United States Patent Application Publication US 2014/0057251 A1 - sequence listing, part 178

SEQ ID NO: 360723 - DNA, 689 bp, Cannabis indica
atcggtttacaatttctaagagatctatgattttaattttgggtataaacgcaagaaattaaataaatcttattgagtaattcaaaaatttaagaacaccaagcaacatatttatctcatctaattcgaaaaattaaatgtgtaaaaacattttaaatcaattatggatgagatatgcacaatcaatttctcattataatcaatagaattgaaaaacacaaaattaatttcataaagaaatatataaactctaaaagtttaatcttaaaattctcctaatttactcaataattttatgcaagtaatatatcaaaagaaagagaatttaatgaggaataaaacccctaaacttttaagattgaaaaataaaaaattcaacataaaataataacgaaattaatatgtaattgaagaaaattaacatatacatattaattgttatacaaattataggttctaaatcatatacaataggcaatctgataccacatgttagaaaaattaataataaacccaagatcaatttgtatataacatagaacacaataataatatataataattaggtatgtgtacctgattgatccatagcaattatctcaattcgatccacagcaattacttcaatttgatagtgcaatactatcaactaagtcttcctccctagatctctaaatcagaagcagttt

SEQ ID NO: 360724 - DNA, 1034 bp, Cannabis indica
ataacagttgttcattttaaggttaaattcctctcttttgggccttgtgtgagagttgggggccaataaaagtgggtacgacatactgaacccagctacccctcacatgaactaccccaattgtgaaggcccatttgccttatttggataaccatgctaggttaattaaattagacagactcactaggccttgaaatagactaacgagtgagcctatgggccacaagccggatcgtcccgcaaccgggtccgagcccagccagtcagccaaatgggtgaaatcaagtaaatatggaaccagtcaggaagacggttactactccctaataattagggaagtaaccaatttgaacgagtcgaacgggtgacatggaaagggagcaacgacactgaaaacacacgataaaaggaaccatacgatagacgctggagaggacacattcgagactcacactactcactgactcaagcagacagtcgccttttctaagcttttctcttaagcctcaccatcggagttactcttttagtccgtctgtccgcttgtccactcatccgtccggctaccatttatattacatttattttccattattattatttgttactataatcgtactgacttgagcgtcggagtccctttggctgacaccccaccggtgctcccaattgaacttttgtctctatctttgttcttgacaggttgctggtgcccaaattccgtaattgtagatttttgctacccacaaagatcaaacacacacacaaacatacaacaagtaaaatatatttactcatctacatcacaaaaataaatatgaacatgtacaagaacatgaaaaacataacaagaacattcaaggaagaagatttagaaaacttaccacttgaaagcctccctctaagacttcaagccttacttcaccaagagctccaacaaatgtgaacaagagtgaaagtaactcactatatttataggcaaaaggagacattagatgagtgacaagtgtctcccatcccatctgatcatcaca

SEQ ID NO: 360725 - DNA, 651 bp, Cannabis indica
gagcctgcgtgagcccatagagatttcttgagcaagcaaacttggtttccatattctttgtcaaaccaatctagaacctccatgtagactggttcctcaagtttcccatgtaagaatgcagttcttacatcaatttggtcaacttctaagctggatctagtagctttggctattattgccctgattgagacttgtttgaccactggtgagaatatctcattaaaatctacaccttctttttgtgtaaacccctttccaactaacctttgaatctagtggattcaacaccaagaattccctctttgtgcttgaaaatccacttgcagcctaccaatttgcacccctctcattttctgaccattatccaggtcttattcttcactagagatgacttctcctcatctatgacttgcaaccaagctattccatctttcccattaactgcttcatgatagctggttggttcagagctatccatttcctttgcaacagttagtgcataggcaataaagtcagcatagccaatcctattaggtggtttgctttctcttctttctatgtctcttgctagttggtagcttcttatatcaccatgactacttgttgggttttatgccctaaataaaacttatttcaatataattagattta

SEQ ID NO: 360726 - DNA, 494 bp, Cannabis indica
aaaattaacaaagtaatcctggagaggaagcatggccccgaccatcaagtgcgtctagctccaagccccgaagccgtcgtagttatggttgggcgtctccgcatcacgaggcagccggtggtacgtcccgaatgtggaaggcttgattctagctacctccatgatgttctcaagttgatgggggcaagttagagtagagtgaagctctaccgcctcccatccggtggcccgagacttatacccctcctgggcaacgggacccagtgagacatcttcgagggtagccagacgcttactactcttttgggatgactttgaaccagatgcagacatgttttgattctgtaaaaagaattaagattccagcagttaggccccataccaaaccctaaaccaagaaaaagggaatgggtctcctggacaagagtcgggtgcaataaattcacagaagacgacattgcgcaccaaagaaaaagaaagggcagaaaaatcga

SEQ ID NO: 360727 - DNA, 1000 bp, Cannabis indica
tgatattgcaaaatcttatgtcacatatgagcattgcatttataatttattttaggttaattagtatttttactccctaaactttaatatgtactaaattatgttttttgaatttttttgggcgttaaaaattctccttgaactattaggattattagatttaaggacttttatttaatttcattcaattttattatttcagagattatttatgtattaaactatgctccattttgatatctactaaatcatgtccctcgaactttgattgacacatactaaatcatgcttcatgaactttcatccatgttagattttttttactaaaattagacaatagtctttaaatccaacaatttcaatagttcaggggtatttttaacgagcaaaattaagagaacataatttggtacatatcaaaatttagagggtaaaaatcttaattaacctttattttaatattaacaaacaacatgaccaaaaaatttccttctatacttgagtacatttaataaaaaatattataaaaatactataaattatttttatcagatgcatataatataaatttatatttagaaaaaaaattaaaaatatataaaaaataaaatattatataaaataaattgtttataataaattatattataacattatcatgattataataaattttaaccatttacagtattttgaaatttataatttatcaaatacccagttcagttcttttttaccagtctaaaactgttttttctcacaactacagttactttatcctacactaatacccaattagctcttatatggacaccaaaatttctctaaataaaatataagagacttaatattaaattacataaacaattatattaatttatataaaatattaatttataaaaatttgatgtggacaaattaacttattgggtctagatagaggtgagtaacatccaattcaattcaattgaaccgatctaatctaatttaattataaaaa

SEQ ID NO: 360728 - DNA, 766 bp, Cannabis indica
acaattcatcataaaaatccaatggtaaaaaccccaaaaattcagattaaacatcataaacttcaaagctccaacttaagcaaaatcaccaagaacttcaagctcaagaacttgaacttgaacaattaatttcaaagttcaataacagaataaaaacacaataaaattccttttaaattctgtctaaacctaacccaacatcaattcaaaagatccaagtacaaacatgctcaaatcaacaagaaaacaccaacatgcatctcaagaccatcccaacctatttcatgcttttcaaccataaaatcagagcagcaaattcattaaatttcaacaatagaaaaactacctcaagcttcactgcaatgatcaagccacaactcctcaaaaaattcttcaatttcaagcttgaataccaagcaaatcaccaacttttcaaccaaattcaaagagagatagagagagagggaagggggctgttttagggttaaggtaaatgcagaaaatgaatttcatttttttacaaagaatgcctttagttgaaaataaatccaaaaatacatatttaccagtttgcccctagggccatttctcacatactcaaacaattaagggcattgaattcatttcatacataacacatattttaataatttcacattattcacacataaataaaatgcgcgaaatacccgattgtgactataccgcgccaacttgtcagaaaacacctgaaaaaggacacactagatatactatataataatat

SEQ ID NO: 360729 - DNA, 664 bp, Cannabis indica
ataacaaacccctggttacccaccactggcacgggtgctggtggtaacacttgatcaataagggcagccggttgccttaatcgtcgcaactcttcttcttgacgaagtatgaaacttcacatttcttgaaacatctgctgccaatcagtagaaggattaacattgccaacccccgcaatattccccagattctgcggaggtggaggcagtgtcaatggattggtttggtctacaccaggctctactaacttgccctgtggtctggatgattaaagagggtccattactagtacccatgtaatcaacaaccccagcgagttaagcaccaataccacacttatgcacttattgctctacaccctaactcatccatttaccccatataaattttcatttcatttacagcatggcattaaataacatataaatactctagatgtttgcatactggctaaaatggaaagcggtaaacagatgatcacacaaacagtcaagtatttactctcaatacttactgcaccatgagtcgagcttgtctctgacgatgaatgtacatgttcggccagtctacaggaagtttaaaaaccttggcgcattgataccaaattgtaacgccctaaataattaggcacgctacccaagatacttataaagccctaatccc

SEQ ID NO: 360730 - DNA, 641 bp, Cannabis indica
ctctaaaatcaccacaacctactggtgccaaaaccaccaccactgcttattttcaaatccaaatacaactaaaaaaaaaaaatacaaaacaaaacccatcccgatatacacatatatacacaaaacaaaccaatttaaataaattcaaatccaacaaataaacaaacacacatatatacacaaaatttcagtccaaaaacacaaactttaaaaccctaaatttatttctccacaaccattatctttctacagatctgaaaataaaaatcacaataatacctaaaacatttatagacagatctattgcaaagaaaaactatgaaaaaccctaaatgagagagagagaggtatcagtgatcgatacctaggttggggtcctcgtggccggctcggcggtcctcgtcaacggacagcttggtggtcctcgtcgacggcaactggactcgcatcatcgagagagagagaagagggatgagagagagacagagacagagaagagggctgagagagaaagaaagaaaagagggctcggggaagcttacctgggttggggaagcttcagcgtgcgcctggcaggtggtcatcggcgacggcgccggcgcggggggtctgtacctgcatcgagagagagagagagagag

SEQ ID NO: 360731 - DNA, 811 bp, Cannabis indica
aattccaattcttggaaggagttaattcgacttaggccaaaaacctaggaatttaataaacctaagtgcactccttaaagccctagaaattaccaaaaactaaatcgaaaaatacttaaaccaaacacagtaaaagaagatgcaatcagaagtaaaaataaaagtaccaacttaggaaaagggaataacagagagaataagtaaaccacttactatatttctaaagatttctaggcagtaaataacttcacgattgggatcgtgatgaatgcgatgatgggctctaagaatttcttaagattaaagatgaaataggcaaaaaataggtcaagtacaatgagggcatgcaaggtgatgaaaaacgaagatggtttttcagaagggttcgaagatttaaaaggtagaaatggcaaataagtgttttctcttgagttttatactttaagaatgatcaacgttagatgaaaagaataaagatctaacagatgggaacaagggagaattagaaaagatgggcatttaatgctaatgatgtgcctcaaaatcatgaactaccaaaactcaaagcatgcaatttttgaaactgagattaagacgaaaatacccttgtaatcatttaaaaaactcttttttattgaaaaagaactttttaaggggcaattattatacccaaaatttagctacacttcagagaatgatcttgcagtggaatataaaccacatgatatagtaaaattttattatttaatgtaaaaaagaataacttgttaataaaggattaatggaacatattcataacttgctaactaca

SEQ ID NO: 360732 - DNA, 731 bp, Cannabis indica
attgaattttgaattgtatccaaacttacctccctagaaattcagattgcaaattgatgaaagtgaaggtttatgattagttactagttgttgcctaagtccttctagggaaataccctagtgataggaaaatttcagaatgatgaaatggttgtgtacttagtgtaaaccattactagattcatggatgtcctaatcgtgaccttaagaaaaactagaactgttaactaaggtttgcatatttgatagctattctaagtgattaggggtggaccatcctattgtcattaagatcggaaagtgtttgtttcaataaatactacttttctaagaaaatgacatgtctgaaaataaagtagtaaagtagaggacatattttttcttgattccaaaagtgttctatcatcttattctatataagatgatcccactgcctatgttgttttgacacaactgaagaggacaataacatttagtgttcttagacagatagtcacagtaccttgttgtagtgggagggtttgaagaaactcaccctattatgatttggaagacacttgtgattaaaatccattgttcgtttaaacaagtaatgaatagttagaataaggaactaagaagtaaagccaagagaactatggttaaaaccattcatatggaataaccaaaagttttctatcacatggacaagaaaggaaaattttagaaaataagcctattcaatggactta

SEQ ID NO: 360733 - DNA, 791 bp, Cannabis indica
ttgaagtagaaaagtggaaaaagacaatcatttcaaatgtcatagacgtatcggttccccccaaaagcaaatattgggaatcaaatataaccaagtgtaaccgtcaaacgtggtgagagaaagccgggtttcgaggcattaattgagttagagcattaattggccgaaaactgaagagatgcctggtcagcctcacatcgagtcgcaaacacacgcgcctaacacgtgtcacccattcaaatgcaagggcagctcggatgaagtctacgcgcaactttggaagtcccgtacaaacttggggggcaaatgttatcccaatttcggtactctgacgtgtcgtcacacgatggtgacatgtggaatcaactttatgtacctgctcgcaagagatatgccgaatagagcaccacatatattccctcggatgaagcctgcttaaccgagtaatgagcaatctgaacagcacgccaacacttagcagtttcagcttttgcatcgtgagtcacagaaaggatccctataattttgggatcagatcacaaagatatggcaagctttctgaattcccttgattagtgtattctatatttattatgcaatctttccaattatatcaattgtaatcagaagggaaactcttcccttaaagtttattgccctataaatagtgattcgattatattcatattcagagataatattgtaagagctctaaggaaagggatcattatattccttgttcttaagtcaatacaaaccaagaggatgaggctattaccaaactgctcagg

SEQ ID NO: 360734 - DNA, 742 bp, Cannabis indica
gaataaataataagtgtatctcatgggtaagaatacaaaaattcatttgttttaggtctttaaaatcaggcaatcgccaatcaaatgcatttcttacaactatatatataaggaacaatatcagctttaatgcatgacaattatttcaagctaaaattgagtctcctttcttgggcttctcttcaggcagctgcaacttggtccattgtgtgcacattgttatcaacatgagtgcgaatgcttgacacaacataccacatgtcataccaatccacaatccctgtaacgaacatagaaataataattattatgtaaactcattaatccctatacgcatttcatttcaataaacaaaagcaaatagcaatgaatgatatgtatatttatatatatatatatgtttattaccttgacatataattcaaatttaaatgcaaggatggctgcaacagtcatgccaatgaaataaaatgttcccaagttcacatatacagccgtttgctgccaaccgcatcctcttgccacgccttcaattaatggaacaacaaatcttaattataaccaaaaaaaaaaagtgaaattaaagtagaaaacaaattgaaattgagtaatccttacctgatagaacaccctggagagaatcaattactatggatattgcaagcagaggagtcaaggaagcaaacgactttattatttcggaactgtcgctgaataaaccagcccagatgttgtgtccgaa

SEQ ID NO: 360735 - DNA, 539 bp, Cannabis indica
gagaaaccagaaggttataagcttccatgataggaagagaaagtttgcaagctcaataggttaatttatggacttaagcaggcttctcactcttggaacaaaaggtttgatgaaataatcaaaacctacaactttcaccaaaatgaagataaagaaattgtttggagcaattgtttggagaagtgtgaagcaatttgcaatatcaaactctaccatggaggccgaatatatagctgccactgaggctgctaaggaactagtacggaaaagaaatttctttacagaacttagtgttgttcctagaatatgtgtgaagaggggatgtactggtggagaaagttgatactaaagacaacttagttgatccattcaccaaaattttgacagtcactacatttgaaaagcacaaaacgaatctgggattaattgaaatgtactgattgttttattttagtgcaagtggaagtttgttgggttttgtgccctaaataaaaccctatttcaatgtaatcttgaacattcatttatcaataaagaaa

SEQ ID NO: 360736 - DNA, 879 bp, Cannabis indica
aacctgactggaacaaactgcacggcggtttacaggctcctaaaccataacaatcacaacactaataagtgatacgctaaatcacttcccggggacttaaactagaaactaaaagtttccctaccccaaataacataaaaacgagaaaaactagggttcctgaaaatcccccaaccggtagaccggttctgcaaccgaaattccggttctgggaattcctgaaccctcatccggaattccggttgcacaaccggaattccggttcctcgcaggatacattcaaaaattcacaacttgctcaaatcaaatccaaaccacaccaaaacttctagacctgttctaaataccccaaagaacaataccaaagcatgaaaatagcccagaacacacagatactaaaaatgccattaaagctccaagctttgagttcaaaactcaaacttggttaaatctaactaacatgcatcaaaatcagttcaaatctacttaaacatgcatataataacctctgaaaactacaacaagcatcaacaaaacaacagcaacagatttcaacaatttctttgaaaaacatagctttcagtaaaaattccacatattgataaaaccaactaaacaccaacacgatcatgcttgaaacaacattttaaatcatgttctaactacagaaatcaagaacaacatacaacagcaagtattacaacaaaactcaacatgcaaccaattctcaacttgatttttcaagaaactaaagaggaaaagagtaaggacaatacctaaagcttgaattgcacacaaaatcagcttgaaaaaccaaagaatcaacaaaaacccttgctgctcaaagggggaggccgaatagagagagaaatgagagaa

SEQ ID NO: 360737 - DNA, 575 bp, Cannabis indica
tgaaaatatgaagttataacaaataaatttcatgaaaaaatagtttaatagtacaaaaagataattaagttgtcaaaaataagaaaaaaaagaacttcgtaatacaaaacatagtaaggagttgatattgttttgcatattgcaacggattacgatgttttgttctttttctattactttatatatgttttttttgttgttttatagttatttttatgttattgtgtttgtgttatataattattgtttttagttattctttgttttgttaaaatacatttttttaaaaaaaaaaattaaaagtttaagacagtatttttaaaaatttaataaaataaaaaaatattacagtaaaaatataaaatatttagaaagataattatttttataataataatatattgggaaattctacaatgcacccccttaaaatggatacattgatgcacccttatttgttttagcacccgaaataattttttagccaaattttttctcatggtcatgtaccttatagttatttaagacatcctgcaaaattttaagaaatttgaaaaagtttaacacaccgaaaa

SEQ ID NO: 360738 - DNA, 532 bp, Cannabis indica
tgtgagtgtaacatgtgggtctatgatatatagacattaaatgcagtggcatcattatatatgaaataatgtgataaacagtactatggcacaattgtatacgcagaggcgtaatgtatgaaatgtaattattataattattcatactatattattattttattttgttgggtcttgactcacaggtgctctaatgtgcaggcaatagtaaagcaatgttggttcggccatgagtttgagagttttgaagatgaattgtacatgttctaaccaagttagaccatgagagttgggtccaacagggaattgtataaaaattctaatttttctgcttaggttgtataaaatgactagtgatattttgaaagtaaattttttacatgtaaactttcattttatggttttaaacaggcccggccctaatggtgtgcaggcatacctactgcacagagcccacacaagaaaagggcccaattttgttaagtttttttttttttataagctgccttggtcattgcaaaagtccatttaa

SEQ ID NO: 360739 - DNA, 560 bp, Cannabis indica
tagcaaatgtacagatcaaaccagttttcaaccttgacactctgataccatgttgtaacgctctgtccagcagggacgccacatgtgtgttatttttgtttataaaattcttatttaaaaactatataattataccaaaagtgtgggtaattaaatttttgataattaaaatcaagcatataaaaatttctttatagtaaaagataagtaatgagaactacggggaccccctgtttccaaaatattacaaactagtttattcgtacttttagaacatacactttgcattcccaaaatatattcaaaatagagcatcctgttcactgggctgtgccactgcggctgatatgtacattgctgctacgacctcgaactcatggctgctcaacctttgctttccctttacctacaccataaagcacccgtgagtcatagagactcagcaagaaaagtgaataaaacaataaccagtaatattcattaattcaatctcatatcaacatgcttacacatttacacaatatcttaaacacacaatcccggtactttataaagtaccc

SEQ ID NO: 360740 - DNA, 824 bp, Cannabis indica
aaatatgctacaaatcgtatcgtgctaggacatctcgttgggaacatagcaacaataaccctagctgcgaacaagagcttttcccatgtctttctgagattgataatgtaaatctcgttgtttctacgattgaagacataacgcctcatctaacaatcgcagttcttggtgacaagatcaacttcagcagtcaacatcatttgaatatcagcttctatcggaaagagctaactcaacagtgtactgaatctcattgaaagatgtttgaagctaattagtgaaggtaccatgagtatgccctcctataacgagatggatgtctcgctaatcgttattcaagttaattcaactgatatgcttagtttgtataatgaatattatatgctaagtgttataacagtcaacatgtctcatttacatctcttcgtctttagagaggctggtacctcgctttgtattactgatgttgtccttatgatcttgtcttcatatacgaatgattttcttgtcaatacatgaattaataatttgtacatccttatctcgcttaagactttatagtcatcaagttatagatttactctaacagttcatcattcaatgagttattccattttaatattctctaatataattaccattatattcgttgattcatattctcccaagttgacacgtattcttctcagaagcaccagccgaatttcgagtataacaattgccccttaaaaagttctttttaataaaaagtgctttttaaatgattacagagggtatatttgtcataatcccttttgaaaaaatgcatgtcctctgattttggc

SEQ ID NO: 360741 - DNA, 658 bp, Cannabis indica
cctttctgtagcagaacattatcaagatctgaacctggatctctttctctccttcttgttgattggcttcttcacagtcttacatactatgattgaggaccaacttgatgtgtgtgggcactcactctatcactcaaggtataaaaatatagaagagagaaatagagagatagggtttcggctatgctataggaaaggaggctcaaaattttattgaaggaatgagatgtatcatcatattttcccttaagccaccattacttatttatcggtaaccacctaggtttaggttagatttaattagcattaaaataatagaaaaataaagtgacaaatcccatacaaagtggctgccaatgaattggattgggccccacttttgcaattttgctattttctcatttttcgatcttattttctcaaaaatgccaattttccaattctaaccatttaaatgtcaattctaattatttaataactaaaattaattattaaataatattttcatttaatatctttattaattagacttaataaaatctcttaattaataaataaaccttagaatctctttccttcacatttaagtccttccttagtgaaaaggactctcagttacatagaacgctttatatgtttcacgatatagatacgctat

SEQ ID NO: 360742 - DNA, 513 bp, Cannabis indica
ttaggttgttaatccaacatacatgatggtaaatagatcctggtaaaataatttccaacatctgtgcccctatgaagccaacacagaaagacaagtgatccattcctagggatcacccagaaaaacactataaataccccacaaacatactaaaggaggggtcgaggattctgggttcaaaggaatcaaagagagaaaataggagagaaatccaccaaaaacattctctgtaataaatactcttattaataacacagactcgtggactaaggctcgtgaatgcctcaaccacgtaaaaatctcatgcattaaacttgttacagcttttcttatatattatttaactggtttccgaaaacctcggtcaccattttgttgctttcattgagagctgaaggaagcgtcttcaaacagacaacaatcttacaaattgaagcaaaaattgtggaaactcgccacacacgtcagtattggaatttattttaccaggatgttagatctactcacaagtat

SEQ ID NO: 360743 - DNA, 947 bp, Cannabis indica
aaatcagaaccaatatcaaaaccaagatatagacctaaacccgaaatgagactaggactcaaacccgaatctagaacgggacttaaacccacacaataaccgggacctggaccaagaatcaggatagggaccttggaaacataactaggacatgaacctagtacccgacccagacccgtacttgaacctaggactcagctcgtgtcctgatatcagaaattgaacaatacttggacctgagattgggatccggatctggacccagagcttggacaaaacctgtagtcggtgtcttgatttggcacacagccctggacccaaaaccctgacaaggacctaaacccacacccggaccggtacacagtcccaaacctaaaagtggacccaaacccgtaccctgtgacccaaaattgaaaccaaaactggaagttgaccgggactggaactaggacttcgacttgggatcataacttaaattggacctagatccagaaccgtaactggacaaggacccggactccaaatctgacctagaccggaattgggagttggacccggatcccaacccaaacctagactcgagaccccaacccaaacctgaactcagacccaacatggaaccagactagggacacagaaccagggtcgggacctaaaaccgcaccccagtctcgatctcgaacccaaactcagaaatgtgacatgggacctgaactaaaacaagaccaagacccgagatagtgatccagattttgactccaaatttaggtaacggggcctagaacagaccagtagtcggtgtctagatctgggactcagactaggaccagaacccagacgaagagcaaaacccaaacccagactgagacctggtacccaaaattagaacctgaacaagaatcgtcgaacccggaacctagaacaagattaggacagtgagaaggacc

SEQ ID NO: 360744 - DNA, 518 bp, Cannabis indica
catattattttttttaccacaaagtccaacacttctttagatgtgatcattgctaaaggctcggcttctgtccatttcgtgaaatgatccactatgaccactgcatattgtactccacccttgcccttgggcaattgtctgatcagatctattccacatatggaaaaaggccaaggactttgcatttgtattagctcattaggcagtgcacgggggatctttaaaaatctctgacatttgtcacatttcttcacttaggcctttgaatcttccatcattgtcggccagaaatatccttgccttagtattttctttgatagactttgtcccgctgcgtggttaccacaaaatccatcatgtacctcggataggagctgtgcaaccttctcctttattacacatctaagtaatggcatggagaaacctcttctatacaccacaccttcaactatgatataccgtgcaacttttctcttcatcttccgagctttgttcctgtcatttggaagttctctagt

SEQ ID NO: 360745 - DNA, 510 bp, Cannabis indica
gagcttacacttcgtaccagatttgggatgcagcatctaacaggctgtggggtttttcttcttttgggattgtgattaacagtactactagttgtgtttaccacagataaacgtgagctgcttttattggatgagttggaaggtttggtctcataatcatggctgccatcattactattaaaactctcacgaaacaactcaaacaaaagcttgttttgagaggttcttggtatggagttgatctttgcttcatctttgtgaaaggatttatctagttgaggagtatcacttgtagttggggtaatatctgcataaataaagttccaattatattagatagagtaaatactattttggaccttatattttgcaaaaattactaattagactctttgttttattaaatgcaaccagttttgtcataacatctttaaatcagattaaaattaatttaagatcctatttatacagttttaaaaaatacaggttctattttatcatttaacaaaa

SEQ ID NO: 360746 - DNA, 527 bp, Cannabis indica
aacaagaaatcaatataaaacaatatttttctaaagaaaaaaaaagtgaaacacttgaaaaaaaaaaaaaaaacatagtccttaagaaaatgtaattgcctcgtgtaaatttactttcacttatttcattaccatcagcattaatttataccaaacatgtaataagttaaaagtccacaatttggacaatattttaacaattttttccccaattagtctaaccaaaaatttgggtgtatagacataacttgcattctttgcctaattttaaagttgaatagagataattaattagctttatattatataacatgagtacactattaatataaattatttaaattattttaagtttgaatgtaacatttactcaaatcaacaagcatgtttaggggtgtgcataaatcgatccaatccaatgagaaccgaccgatccaattacaaccgaccgccaaacattggatatccaattgtgatcggatcggattggatgttatttttaaatatccaattggatcggatcggat

SEQ ID NO: 360747 - DNA, 651 bp, Cannabis indica
caagatctagttcaaagagatccaatgtgacataggccggtgaacaagccgaacaaattcatccacttgtggaggcacaaatagatcaacttaaaaatattgtacaaggtttgactggcccaaaactcactgatctccaactcaacctactacgcaaatcacctttcttacctaaaattgaagttcttgaactaccccaaaagttcaaaatgccaacctagaaaatgtatataggaaaagaagatcctttatcacacctaaaatattttgagatgtagatggatctgcaaggggtaaggggtgatgtactgtgcaaaatttttcttgccacactcgtagaggccgcccagcaatggtatttcaaactgcctctaggaagttttaactcatggaatgccttctcattagagctccatgcacaatttcctcctcttgacagcttccctcactcctagaagatttggtagaagtaatgcaaatgccaggagaacccttcagagcttatattagcaggtttatgactgaagccacaaaggttaaaggactgactgaagaaggaagactagctgcaatactggggggcattgagcctctcgaagagttgtggaaatatattaaaaggctaactgtgggatcaatggctgaatttct

SEQ ID NO: 360748 - DNA, 677 bp, Cannabis indica
cacaaattacttaaattaatataaaaaaatatgttatattcatgtaaattaatattgagctttggtcctgactctataataaattaagggcaaattgcggcataaatacctaatgttttagattttatacacctaaataccttatctttatttttggaggcaaaaatacataatgttacaattctcttacaccgttactaccacttccgttaactcataaatatgggcacgtggagggtccagatgcattacatttatttattttattttaaaatttaatattcttaatatcaaaaactaaatgctacttgttttaaaaaaaatcagagatatgcaataccaaattactatagttgagtgaaccagtgcagtatatagaacatgattatcgaatagaattgtcaatatcatgtgaaaattgttatgacaattgatttttttaaacaagtagcatttagtttctcatattaagaatattaagttttaaaataataataaaaaaataataatgcactgtgagccttttcaaggatctcaaacttttctttctcaattaaacttgcagatagttctttctctcctgaaacggtagcttgttgtaccaacaatgcccgcatcttaacacgccgtaatccaaaatcattcttccctgtaaatttctcaagatcgaactttgt

SEQ ID NO: 360749 - DNA, 700 bp, Cannabis indica
aaactaggaactaaaagtttctctatcgataaaaagcatggcaataccctaaataacataaaaacgaggaaatctagggttcctgaaaattccccaaccggtagaccggttctgcaaccggaattccagttttggaaattcctgagccctcatccggaattccggttgtacaaccgaaattccggttcctcgcaggaacttttcaaaaattcacacattgcacaaatccaatccaaacaataccaaaacttccagacctgctatttagaccctaaggaacaattctaaagcaactacacagtccagaacacacataattaaaaatcaccatgtgagctccaagctttgagttcaaactcaaacttggctaaagctcacttacaaccctcaaaactagattaaaaccacataatcatgcataaaaacactgcagaaaacaaactctaactcatgcaataatcacagcaacagatttcgaaatttccctttgaaaactaaactttgagctaaaaactttcaatcttgaaatcaaagcaattatcatgcattacactagctctaatctacttaaaacaacaagattaatcctctgtaaatcacaataaatcacagcagcaagaacaactaaaacaagcatgcaaacaacacttctttttcatcaaaatttcaagaaacttaaaggagagctagagagaacata

SEQ ID NO: 360750 - DNA, 665 bp, Cannabis indica
actagtgccttgaaatttatccatacttatccttatttatcctcgtagagatgacatttttgaagtccgcgcccgtccttaaaatcaagccaaagggtggaacagcgacgacatcacccgttatcgcccagaagaggaagagcgatgttgtaactactcttgccgcagattcttccaagaagctggctaaaaccacgcaggacaaggggaagaaagtcatgatcgagccaactgtccgagcccgcgttctgcctatgcaggagaagtttgtgggtgaggagttcatatccaaggcggagaagatcccttctgaggagcttgttccgcgttctgtggagttggcttcgcagtcgatgaccttgttcctgaaggctcttgccgctggttctaaggaagctgactcgctgaagaggcacaatgcccagcttcaggagaacatgaagaggccgaaacaagaggcggctagaaaggacaaagagcttgaagaacttcgcaaggctaaggagcaggcagagctcgaggccaagaactctcaggcgaagatcgaggagatggctcgcgacttagaggtcgagaaggagaatgggaagaaacagtatgatcaggcagtttctgattatatttacaccactctttctaaaatcccagacttcgacttctctatc

SEQ ID NO: 360751 - DNA, 622 bp, Cannabis indica
aatagcaaaattgaaactagtgggggccacaagtatggccgaccacttaagggagtttttagccattattttaccttttttaattctatataatttaaaccttaaccttagaaggaatcatataaatagataatgataggctcttgttttcataacctagtaacctacatcagactattaagtcaaacaactaaaaaagagcctctctattagatttcgaattctccctctcttcttacaagggcgacactcaaggcgtgtttggagatcgctagatatatgtacaacttgtctccccttttttgtttggccaacgaaggtggatttcccaagtgctccttcaagctcgtgaaagctttctcacactcctcatcccaagcaaaacttcttgtttcctttgagagtgttgaagaatgggaaacatttgtcagtggacagcaaaatgaccctgttcaaagcggctactctcccagttaggcactgcacctctttctttttctttggtgattccatatctatcaaagctttaacctttctagggttcacctctatgcccctctcattaaccatgaatcctaggaactttttacaggacacactaaatgttggaaatttattttac

SEQ ID NO: 360752 - DNA, 543 bp, Cannabis indica
cactatgcggcagccaagatatggtccgaatataaaatgaaaaaattaaaagctcactcttgattgctcgctgtcgaacatggaaggacctgaggtagatgtttggtccatggtacagattgagtcgagaggagattgagttgctggctgtgttgctgtgaagccgtgatgttgttgggttgttgactttggtggtgcgggttaggtcgaatggtgagctgctggtgcgaggtggtggtgtagttcgaaagttcgagcttggaggtggctcagtcgggtcgtggttctgatatgagtgaacagaggttgggtttgtgagtggtggtcgaatggaggcaggcttggttcgtagtggcttcgggttcaggtaaaaatggaatttgggttgtgtgctttgaatgaggtttgaaggagatggctcgggctgctatgggtctggcgggttcgaacttggtggtgaatggtgagctgctggtgcgatttcagtggctacgggctcaggtgaaatggtggttcgaaggtggagtgaaggcacacggctga

SEQ ID NO: 360753 - DNA, 587 bp, Cannabis indica
ggaaaaattaagcatttacttttttacagaacttgatttcgattttattagaattagttatgaatttttgaaaattagaaaatatcaaggtgacatcacctacatggtgcgcgcagatgcttgagaatcctcgggtgcacgcgcctcagacacgcacatgtctgagaattttcagtctaaacgtgctgatcatgtctgaaggctttgctgcacgcgcgaaaatgctgctggcagcatcagtgggcgtgaaacagccccaatccgtaccacatgcaattttttccaatttttcattttttcatgctttttcatggaattaatttctgattttttgtgtagttttgtattttgattcttacttttcaaatttcaaatctaattatcagaattaaattattatttttttaaaattgatttaagatattagtgaaatttgaatttgaaataggtaagaatctatcttttttgcttaattaattatcttatttttaaaatttaatttttttatcttatttttaaatttaaggtcagatattaatattttttaaattattctatttttttttaaataaattgaccttatttaa

SEQ ID NO: 360754 - DNA, 516 bp, Cannabis indica
aaccaccagcccacaaacacaaagaggaacccccactcttttttccaaatttttttttaaaaaaaaggaaactagaattaccaagatattttccaaaaatagccaatttaagaaaatccttcaagatcaaagacaaaatacattgaatatgttatcaaactttaaatggaaacatatcaaaataaatcaatgtagaataaatgttgacacttaccaattcaagcacaaattttcttagcccatgatccaagttaccaacgcctccctctttttttatttttaattttgtattttttgtaaaaccgaaaataatacacataaaataaaatatgtacaatagatataagatatctaagcaagcaaattaatcaaaattcatcacaaatgaaaaatagacatgttatggtttcaaaagagaataactaattagtatctcaagaacaaaccatgctttgaagattttgaagaaaaaaaaaatgcatgttacaaacacatgtgaaccaggatttttaattt

SEQ ID NO: 360755 - DNA, 525 bp, Cannabis indica
aatcacgtaatacgcctatgctagttagggtgttacatgttaactcttgggggtggagcagttgtttggagaagtgctaaacaaactgcaacgtcagactctaccatggaggccgagtacatagctgctgccgaggctgctaattaacttgtctgacttagaaagttcttcacaggagtcagtgttgttcctagaatggaaaaactactgggtttactttgtgataacaccggagccatagccaacagtaaagagcctcgaagccacaagagaagaaaatacatagagagattatatcacatcatcagagaatatgtggcaagaggggatgtactggtggtgaagtggatactgaagacaacttagctgatccattcactaaagttttgattgcaactacatttcaaaatcaccgaatgaatttaggattaattgaaatgtactaattgttttatgttagtggaagtgggagttcgttgggctttctgccctaaataaaattctattttaatgtaatcttttcta

SEQ ID NO: 360756 - DNA, 547 bp, Cannabis indica
cttgcagatccatttgcatctcaaaaatacttaaggtgggataatggatctcccttacccgtgtacatcttccaggttggcattttaaacttgtggggtaactccagaagattgatctcatggaagaaaggggttccacatgctcggttcaactcgagatcgttattcctttgactggccatgccttggaacatactttttagttcgtctagctgtgcctggacaactggactaacttgtttggcatttgggccaatttgagtcacatcagcatctttttgagcaggaatttgaacacgggttctgggctgcacgagcggcgtgtcaagctgattgtccactcctctcctcctattcagatcgttttctgagatcatgagtagtccccaatctatcaaaaacggaaaacgcctggttgtctcagcgactaagtggtttggccaatgtgctgaccgacaccattaatctggttggaattgttaggcatgatttctcctgatgaattactagacaaagtctacccacctaccactgggcccacaggcgg

SEQ ID NO: 360757 - DNA, 1009 bp, Cannabis indica
ctaggaactaaaagtttccctatcgataaaaagcatggcaataccccaaataacataaaatcgaggaaaactagggtttttgaaatttccccaaccggtagaccggttgcccaactggaattccggttctgggaattttcaaaacccatccggaattccggatgcacaactggaattccggttcctcgcaggcagaacttcaaaaattcacacaatgctcaaatctaatccaaacaacctcaaaccttccagacctgttcgataggacccaaataacatatctaaagcaacaaaaccgagcttcacacacagaaactcatttcaccattaaaggtcaaagattgagttctaaactcaaaacttgactaaacaacctctcatgcattaaaccttgattaaaaacacatattcaagcatttaaaaactgcagaaatcaaaccctaactcatgcaacaactacagccactaaaattccaattttctctttgaaaacctaagcttttacactaaaaactccacaactctaacaatctaaccatcaagcattacaatcagcttaataacatcaattagtcatgcttaaacctctgcaaacaactacaaaatcacagcaacaagatcaacttaaactaagcatgcaaacatcaacatttcatcaaaattcatcaagaaaccaaaagggagagctacaaggatcttaccaacaacttgaggtcaaaatctatgctaaaatcagcttgaaatccaagagaaatcccccccaaacccagctgctcaaaaccgaaaaggagagaaagaaagagagcctttgaatttccaattttctaacttttgaaatttttgactaaatgaaataaatgcaacttaactctttttatttcagccaacatataacataataaaccacataattccaccatttaaaatccactaaaggacaaactaacaatggggcaaaatgaccattttgccccttcacactaaaatcacataaataacactaaagggg

SEQ ID NO: 360758 - DNA, 706 bp, Cannabis indica
gcccaaccggaatttcggttcctcgcagaaaactttcaaaaaatcataacttgctcaaatcaaaaccaattcaaacaaaaccttccagacctgttctaaacatcccatagaacatttctaaagcaacaaaaccatccagaaaacacagattcgaaatcaccattaaagctccaagctttgagttcaaaactcaaacttggttaaatctcactaacatgcatcaaaacttgattaaaaccacataatcatgcataataaaactgcagaaaatggactcaagcaccaacaatccctacagcaactaatttcacattttcactttgaaaaccatagatttgagttataatctctacacaaggtcaaatcccatcaactaacaacacaactagcatgaattcactccattaaacacatataaacctctgaatgcaacaacaattaaccacagccacaatttcttaaacatgcaactatcaaactttctcaaaacttcataaaactaaaaagaaagctaaaggaaacataccaacaacttgtgatcacaatctcttgctaaaattaacttgaaatccaagaaaaatggcaagaatccttgctgcacaaggaggccaaaagagagaaagaggctagagaggaaatggtttgctttcttttctaattttctaatttgaataaaatgagggtaaaatgcataactcaacatata

SEQ ID NO: 360759 - DNA, 522 bp, Cannabis indica
gttgcccaggaggagcccaaacgaccacggagagctgatactctggcccacggtcttaatggcgggggctctcccatggaggaacacactgcccctcccaatattgtgctgactccggttcctggagatgaggcgagacaggagctccggatagctaaacacaactacgccatggacgaatactcccgggggtatgctgaggtggaagcccttaggaggatcttgcgagttgagatgcaaaatactctcaacaacccggaataccagaatccgtgggatctaaatttggatcccctgtcggactggttcggtcgcttcctcgggcccaccttagctccctttgctgcggagatgactggcgagtttgcgtcccagcttacccggtgtgcacctaagcggttcgctgcttgtgcatccttgaactccatcttccaagtccaggatctcagccactccctcactgtggtaagtgttttgtagtttgcttttttctttattgttttctttttcggagattcttac

SEQ ID NO: 360760 - DNA, 664 bp, Cannabis indica
ttgaaccaatcccattagagttgggtctgacatacctccaactctttatttgtcttagtgcattttttttttgtctaaaaggctacatatgtttcacagcactctttcccttgggttttggaacacaaacccaagtcttctctttactcaaagagtctgtctcttcatccatagcacagttccacttcttagcattcttgcacttcatagcttctccacaactttctggtttgttcttctgtccttgcaaagcacttaatagtgcataggcaatgttttcattccaaatgttgaagctatacttgggattctgcctggtgctcttttaactttttctctagtcaactggtagtcttccaactcctctgcctgactttcccttaggtttccttattccacatgagcgatgttctctccctgttccacctgaacagtgttttctccctgttccacctgaacagtgttctcttcctgttctacctgaacaatattttctccttgttcatcacttggagtggtaggtcttagatcaaagttgattgagttacttgcatggttagtactagggcaagaacctaaaacatttgggttggtagtaatgcatggaaaaatattttcatcaaatattacatctctactattacatctatatagaggatcttta

SEQ ID NO: 360761 - DNA, 646 bp, Cannabis indica
aataacaagcacaaaaaaaaaaacgaacacagttgcacaatgatcataacaaggaatgaaattcattaaggataacaaagcagttaaactcgggattaaaagctacctggtcagtcagttgttcaagaaatgaaagatatattccaagtttaaagaccgcttggccagtcattttgtctcaaagaaggccaactggccgaacatacataaaaaataataaagagaagggaatcaaacaacgggagtcccaagctctttgtaaggatgaattaggtctgagggaaccagaggatcatcggtctgggcagaaggagcatcaatgttctgatcggtaggagaagtggatgtagttgcctcagggttcttattgaccgcctgagccatgcagtaattaagatacatgtctttggaagtgccgaggtagtcaaaattccctttggcattggccttccaaaagtcataagaaacctcgagaccggctgtctctaaggtatccacgtctctctcaagcttctccaccttagacttttggctctcaacctccttcttaagtcctccgacctctgcctcaagttcctcctccctggtcttcttgtctttggcctcatcctccaacctgcgaagaagagtccggagactctctctc

SEQ ID NO: 360762 - DNA, 502 bp, Cannabis indica
tttaggtcccaggtcacaggtctcggtctgggtctaagtttcgatatgggttttcgtctaagattgtgtttaggtttgggtcctgttacagtcccaggtctgggttctcatccaagtccgtgtccgactctatttccggatcttggtccgggtcctggattcaatcactaactacgagtcaggataaagccttaggtccaaattaagatctcggtctggttccaattcgggccctgagtcccaagccgagtcctaagttttggtttaggtttgggtttggagttgtgtcccggtagtcagttcctgggtttgggtcgaaattctagtcttgtttctcgagtttggggtcaagttttgggtctcagtcttggtttcgcgcccaagtttgggtccaagtcccccatctatgtcccgatcctttgtctaagtttgggtccaggatcgggtttggggcccaggtcccccatctaggtcacagctcggttctcaggtcccaagtccg

SEQ ID NO: 360763 - DNA, 565 bp, Cannabis indica
cttgattgatgtgattcctcataaaatagctgttactagccttattgattatagcgtaatagtatatgtattatttttataaaataccgtaaaaatataaaaatatactttaaatgtaaaaatgtaaatttttttaaaaaatattgcttgttaaaattttaagtaagatttgctttgtatcaaaattctcactatctgcactctgcactgcagtagtcatacctcgttttgttttggttcttttctaaagaaaataatggtaattattagtgataatctccaaatatcgttgtaaaataagatcgaaatggtatcttctggattttttcttggctgctttcagactgtattttcttcaacaaatatttgaacaaattattagaatctggggataagatgaatgaggttctatctcaaaatcaattggctatgggaggagtagcccgttcctcttatatattctattatctttccacacattagcaatgtgggactctctaacatccccctcaagatggtagctattttatttgctcaccatctggacaactcgatcataagaggc

SEQ ID NO: 360764 - DNA, 782 bp, Cannabis indica
agttaatctccttaaaaaaaattatagttaatttgtaaggataatatggttggaagaagatagaaaataataaataattaattttttattttcatttaatatgtatataatttttttttaataatatgaatttatttgaattaatttttttttaaaatcattttttctaaaagaattattagtttggctaatattatatttacatgtggcactttattaatcaactaacagaacattaaattgggtgttaagtttagaaatttgaaaatatgaataggaactacaatgatgacatcaactttatataaaaataatgtattataaaaaaatttgatttacaatctcacacctgtttcgtctacatataatctcccgcatatttgattcataacatattctttctaaaaaaaaatgcactcttcctatattttgcaaagtaaaaaaaaaaatcttcacacatatatatagttatgaatacgtgtatatataaataatttaataattatttaatttaatattattaatttagtttatatttattactatgtgtattttgctaaaaaaaaaaataattgatttacgatagatatttttatgaaaaatttaataaaataatagtaaatatcaatttacaaatttatattctaataaaatattaaaaattagaaaataaagggaaaaaaaaataagcttaggagagattttagagtgacatgtcaccgcctcattcatttcctttatatatatgtatactagtaaaaagctacgtgcaaggcacgtat

SEQ ID NO: 360765 - DNA, 1206 bp, Cannabis indica
gtgactaatcttcaggtttttcctttggtatttcaattctagaaggagcatttgtagttggtatgtatgatttatttactcctttagtgtcaacaaatgcgtcaactaattgattagctatagtttgtaaatgcacaatgttttgaacttctgattcacacagtgccttgtgtaaggatcaagatacaataatgatggttcacaccatgtagtatctttatgtagatttttcttttcttcccctaatgttgggaaaagtttctcattaaagtgacaatcagcaaaacgtgcattaaaaatatcacctattaaagactctagatatttgataatggaaggagattcaaatccaacgtatattcccagcctcctttgagggcccatctttgtgcgttgtggtggagcgatgggaacacaaccaaagattcttaggtgagaaatgttaggttcttgaccaagtgcaagttgtaatggggaatacttatgatatgcacttggtcttatgcgaattaacattgcagcatgtaaaattgcatgaccccatacttctataggaagttttatcctcattattagtggtctaggaataagttgtaggtgttttatcaatgattcaaccaaactattttgagtatgtacatgagcaacataatgctcaatagaaacatcaattgacatgcaataatcattgaatacttaagatgtaaattcactagcattgttaagcctaactctcttgattgtacaatcaagaaattgcactcgcaatttgattatttgagccaaatatcttgcaaatgccatattgtgactagacaataaatatacatgcgaccatctgcttgatgcgtctattagtagcatgaagtatctaaatggtccacatggtagatgaatttgtccacatatatccccttgaattcgttcaagaaatgaaggtgattcaattgcaagttttcctggggaaggccttgtgattaattttccaagggaacatgcttcacatgtaaatttatttgtttgaggtatcttttgatcctttaatgaatgaccatgttagctttcaataattcttcgcatcattattgaaccaggatggccaaggcgatcatgctaagtattttaatattgagagatctttacttttctctttaactacaacatgtgactaaattacacttatatatgtataatgtagtccagtgg

SEQ ID NO: 360766 - DNA, 699 bp, Cannabis indica
ccaccatctcagcataggtgatcttgtcgtcagtggtgatcatcaaatcatgtttaatcttcgcatttaacccgtccaggtatttctctttcttgctgaagtcggttggcactattctcgaggctaacctcgctaaccggtcaaactgagtagtatactctgtcacgctcatattctctcgctgggtcaggtgagcgaactctttcctcttggcgcttctgaccgcctcattataataattggcgttgaagagttcctggaacctttcccaggtcatagtggtgacgtcgtgaatctgagacaccatgtcccaccagacaagagcgtcttcctggaactggaaggtggcacacaccactctgtcggccccttcccaaatcaaaatcgagcacttctcactgcctattgcctacatcgtcggccccatcaaaaccgaaatatccaaggtaagattcgaccctcttatgtttcacaagggaaaaaacaaagttcacattaatattatcaatatacatcactattgtttttctatttattccatttaattatatatcaatattgtgcttatgttctagagatcatttctcaaattatctgtttgtcaaatagagtttgaattttgatatttgtaatatgtttttttgttaatttatctttaaatttgatttaagattaaggaggattggaagaaaaaaatga

SEQ ID NO: 360767 - DNA, 788 bp, Cannabis indica
gtcccggtctaggttcgggttcgagtcctagtctcagttcgggtttaggtctctgtctgggttttcatctgggttcgggttcgggtttaggtcctagtcctagttcgatttaggttcaatttgcgattctgagttcgagtttgggtttgagttcgggtcgtagttcgagtcctggtctgagtttgggttcgggtcctgatttcagtctaggtccatatcaggctccgggtgtgggttcgcgtcctgggtcttggtctaggttgggtccgagtcccatgttcgaatcccgatctgagtcttgattaagttctgggtctaagtccttggttctgatcctggtcttggttcgagttggatccggctccgggtctagcttttggtctgattctaggcgtgggtgttttagttcgggtctgagtctgtgtccggattagtgtccaggtctggaccccgatctgggtctaggttcgggtcccgagtgcgggtccaagtttaagtcttggtcaggatctcgatctagatctatgtcccaaatttcgatcccagtctgggtctaagttcgaatccagtttcgtatccggatccctatctaggtccaagtctgtgtttgttattgggtcccagaattagttccaggtccgggtctcagttacggtctgggtacacgaccgtgtccgggcccgagttccagtctcagtttgggtctgaggctaggtctgtgtttggttctaggtttgggtccaggtcctggtcacggttttaggtcccgaccctggttctgtgtccct

SEQ ID NO: 360768 - DNA, 1909 bp, Cannabis indica
acaaaaaaaaaaaaaaaagttcttggtagagaaattgaactgtagttgggaaactcgaattgtggctctcaatgaaagcaccaaaatgttaacactgaaaagtagccaatattagcttgctagattgacgagatgagaaagaagtttaactaaataatttagaaagacatacaaaatttatagtagttcactccccatatcatgatggtaatagggctacgtctatttcaaatttttatttctcacaaaaattatagaaaaaggctaagtgattaagctctaatttttagagagagatgctctgacctttgagtagttttctgaatatgaaaagtgagctaagggatctctatttttataggtgaaagaggcccataaaaataggaaagataaaatttggatgttttggacagttgatgatgatctaacagtgaaaattagctcttggtggtgatagccatttttctagcctaacgggtcccgctgtgggtaacctgaagcttatttttgtaactcccttggttgtaaaattttatgccgatagcttcaaaattaggattgaactttgagatatgacttatagagcattgaattagcttcaaaacgcaagttgaattgaatcagatcaatatttagtgagttatggttgttttactgaaggtagttcatgacctagcacccaagtttacatccagcgcctaggttgacatccccgcgcccaggatgacatatgatgtcaacctggacgttgggtaagtgaaaaaacgtccaagggatgtactttggtatgcctaagtgatattttgacatcacctaatcagtttttatgttctggcaaagctagtcattagttgtcagagatgtagctgttctgcggaaatgagagactcgaaaatcttcattttcgagtgagtttcccatgttggaaatcagaaatgcaaagttgtgaatttgacttctctaagtttatatgggtcttagtaattgtgaaaaactagatggacggtcgaaatagaattagtattggataatcagaacccatcgcactaggccatttatcaacttgggcactaggtactctttagtgagctctcggaatctctttttgatacttctaaggttcttgaacttgagaaagacatctcttgccctgtttttgaccattttagattcattgttcgaatcagatttggcatttgagcaattgaaggcagcgttccaagttgattctcaacttgggcgctgagcccaacactagatcaacatgggtgctaggccttgtttcttggggttcaggtttgtggttttctccctgagtttgcttgaatcttcattattttttatgatagaaaaaatgtccagaacacttttcggtgaatttgatcggaaatattatcaacctgggcactgggtcccaattttgcccattcggaaattccgtttggtccccaaaaatatttgaacctcaatattttttgaaaacgaagaagatgttcataagtgttcttggactcaattgaaaatggcccaggttgacaaaatgtcaacctgggcactaggcctcgtctttggcacccaaaaagtgttgtttcttctttgaaaggaccgatttcctcatttttgatgaagacgaagaagatgcaaaatttggattgttaatcttatacttggaaggcgctcagattgacagcttgtcaaattgggcgctgggtgcttggggcccagagtgctgaaaaataaaatttgctctgattttgatgcctcaaatatgtctgtggtatgtctagttgatgttccaatataagttttgactgttttgcactaagacggttgtagaaactgaaacagtagttgggaatatcaacttgggcttcaggtgaaaccctaggtgccctggttggctttgggc

SEQ ID NO: 360769 - DNA, 695 bp, Cannabis indica
tttaggatgttaataaacatacttgtgagtagatctaagatcttggtaaaataatttccaacaacaaccccacaggttttcaaagggtgaaacgaatcctaacttagcctagggaagcctattaattacatgagttgttgtcttcataccttcagcccaaaatcttcctggaacattctttgcatgtagcatgcttcgacatgtttctgcaagatggcgattcttcctctcagctactccattttgttgtggcgtattggcacatgtgaattgatggcgtatgcaacattctcgaaaatactaaaacaattcatctgaggtatattcaccaccgttgtctgttcggaggcattggattttcttgccgacttctccttctactatttctttaaactctttaaattttgaagaagtttgggatttttctttcataaaaaaaacccatacgtaccttgagaagttttcgatgaatgtaaccatgtaccacatgtctctgattgatagttgtttgactcgcccaaacacgtcagaatggaccaaccccaatggtgctttggctttgaactttgaatcttcatacggtaattgatgcgccttaccgtattggcagccggcacatacggtctttgtgcttacctcgagttgaggaagacccttcagcataaacttcttcatcatcaccttgagtttatgat

SEQ ID NO: 360770 - DNA, 502 bp, Cannabis indica
ggtatggtcttctaaaccttatattgttgaatcttgggtttaaacaaagaaatgatgatgtttttgtcctagtgtttgctggttttgatcatgttgtacatcgtactcccttgcttcaaaagaaatatgatacacacatgatatgttgtctagtgttcctcattgcttgtttatgtgtcatcatgtgtgataatgaaagttccacaaacattcctcaaaatgcatgttgactcaaaatatatagataatagatatcatttttttagaattggttgagtaaaaatacattggataatcacatattattcttgatgctctcttggatttttgtttaataaagccttgaattctcgtattaatgtgtgcaacttgggaagtttttttttatgtgttctatctgattaattcgttgtggtatatgatcattatctttctcagtttgttcagctaagccttgattgctatcattttttctatgaggcacttcatgtcccatctacag

SEQ ID NO: 360771 - DNA, 653 bp, Cannabis indica
gactaaagtcgagggcacgatttagtacatgtcaaagtttaggaaaaaattactaattagcctataataatttatagtacattccgtaaaatgtgcttatatttcattctttctttttaatatttaaataagttatttaattttattttattataactatgtatattatagttatatgaggtatatttgtaattttttaagaaatttcaaaaagtttatatgtactattgaaataaggtttaaataattatttatgtataaaaaataattaaatgtgtagtaaagtatttaaatcttactgttagtattataaagtactcaaatttttaaaaataattttgtaaataactacagcctccatagttatgaagaaaaagaaattggaaaacttttcttaattttcaaagaggaggtgtaaccaaaaaaaaaatctaattagagagtttactataaggtggcgtttggttgaggtaatgaaatggaatggaaaggaaatgaaacaatttttattccgttcctttatttggttacatattaaaatgttggaatgtcattctaatggaatgtcattctaatggaatgatctttccactattttggtggaatgactattccattttgaaatggaaagaaagaccattccaatgtatgat

SEQ ID NO: 360772 - DNA, 556 bp, Cannabis indica
aatttgcttgaaaactataaatctatcgaaaatgagttaaccaaaaaaattctttttccagtagtttaataatgtcaaatgtgaggtgacaaacttacgtgattgaaaaatattgaaaattgagtaaatttggtgaaaagcactcttttaggtcttaaaaagttaaaattatgcaagatagtacaaaaattaagatttgagcattattttgtgaaaaaaatctttttgagacagtttatatatgagtatttaaacattaataatatcctaatctaattttattattctttttttttttcaaattaataattttttcacaaaataatattaataatttaaaataaaccaaattatataatatttaatttttttttaaataaatcactacaaaaaaactattacttttagtgacaataattttagtcacaatataatttttttgtgattaaatatgacttttagtcacaataaaaacttacttgtgactaaaacataatatttagatataagttgtcactaatttagttttagtgataacaagtattatgattaaaaa

SEQ ID NO: 360773 - DNA, 1514 bp, Cannabis indica
aaaatgctagtctctatggctataagtgtggaaaccaaataatatattgataacagtttttggaagcaaactttctttcctttggcatacattattttatttattcggcactattagtgtcgccctataaatagtttatgatactctataataattattatcaagcccggaaatagacaggttaggcttgtgtctagagtttacctaaccgaggagctcaaattttatctttccttataaaattatactttttttattgattttgaaaaatacaatattttttttctaaataagggcataaaaatatttttttttctatgacccaataaattttagaactggttctaataattacgttaattatctggtattattttaatttttttaaaataaacccgttacttaattcaactaatgacaatataatattttagcattacttattttatttactcttataaaattgatccaactattattaaaaaaaataaagtacatcaaaccaaatttgtaacatattaaattttgatcaaaatacattaaaacaaaaccaatagtacataataggatgcaatgcatttgggaaaaaatccattgcaaacattttttcaataatttattttgctatacacaaaacaaaaatatgatcagtagctaatctctgttctctttataaaataatttaatacacaattttacagtgtacctaataaaaataaaataaaacttacactaaatatgaaaataaattaaacaataaatattcctcacactctcccaaatgatgcaacttattagattaattgttaatttgtaatccgtacaaccattaacacatatattatatcctttgataattcaaattctttcattcattttcgattttaataaatcacacaacggtatagttttatgttgtctatatatccttattatttatttatatattttctaatataataataaaaaaaaaaatagttagatacattgcatgatagttttgtggcattaaactaatagagagagtacagtactcttaatttcagtattttaattaattttaataacataataaatgggtgttttcaatttgttttttctcctaattttttaacttacatatatataacaatttttaatgaatattactcacgaacggttattagggttactaataagtaaatttaactataaatattaataaaaaatatttaagtcaaactcaattttaattgtttaatagaaaaaaaatctctttttacttcatatgatatatttatatacaaaatatttaagttgaatttaatttttttaatcttttttgtctttttttttgggtagttttttttttatttttacactttcaaaatttaattttttttttttttgtctattttttgtctatttttacggaattctacatagaaactcctattgcaattagcgctgcaacctaaattgcaacaaaaatcgtacacaaatccttattgcaactaccgctacaaccactttag

SEQ ID NO: 360774 - DNA, 652 bp, Cannabis indica
tatatttttttggccttaatgtgaacactaaagacaaaacgtagtcctaaactaccacatggaacttcagtctaatacataatgctggaatttaagaagggaaatttgacattttatacttaaaaatgactaatggtgttaaattatacctaattataacacatagaaaaaatataccaatctttctcttttcttccaaaaatacccttcccatttcaaacttcccacattccctctaactacattctctctcttctttccctctcccaaactcacgaacccacacccaaacccacgaacggacggacgcagaccaccaaagctccaccaaaacccacaaacccaaaccaccgttcgaacccatggccacccaaacgaacgccccaaccaatcggcgccacccatgaacccagacgtcgaacccacggccatacgtagtctaacctagacgacccctcgaacccatagccgtccgcatgacctagaagacacagacgaacccacggccatacgcagtcgaacgcacggcgaccgaggagacccgcgaacccagttacgattggaaaaacctacacagacgttgaacccaatacccaggtttgttctttattttttttaactttaaattcacaatctgcgaaaaacctgaaat

SEQ ID NO: 360775 - DNA, 566 bp, Cannabis indica
tcttacaccattataatgggtaagttgtgttttaagtattttgttaaactttatgtagtttactttcgttatatatgtcgtatttgttggaattagtatttttttttgtctgaatgtgtagagatctggtagatctagttttctatcaaaatctggattttctagatgttatcgatagaatatcgatgctatgtcgatattctgtgaagaaaggtcaaggatgaccattatcgacatgttttcgacagtttgtcgatatcatgtcgattaaaaagcaaattagcattcataagttatttaagaatttgttgacattttgtcgatagtatgtcgacattaagtcgaccaagattgtcgacaatatatcaatagaatgtcaatataacgtcgactttaagataaaaaatgaaaagaaaaaagaagcgtttgacataacatacattaaaaattctaaaacaaacataacattaaaacataaaataacataacaaccatagaaagttcataacaaacattaaaatattaaaaagttcattcaaaaaaaaacaaacattaaaactcaccac

SEQ ID NO: 360776 - DNA, 561 bp, Cannabis indica
aaaatctgttaaactaagaattacatgactatattttatatataaagatataaccctaaacataaaaataaataaataattataattttaggtaatttatttaagaatatctttaaaagtttacaaaataaaaaaattattctaacttattcaaaatccaaacgaaacaggcctaaataaatatcatcttcttcttcttcttttttgaaagaaaaggctcatctcttttgaagtacaacaatacatgggcttttacattcaactattttcctttttaagtaataatgatttacttaatcggaaaaaaaaataaacaaatatgtatcagaaactttaaaaagattgccaaaaaaaaaagaaaaaatctgcatcatctcagctaatcggattttaccttcacattcttcaatggtgtaaacatgaagttttcagaaaacatagcatctttatttgcccattcaaacattttaatactttgtcaaaataaagttcataggtaacaaatataacaaatgttcttttcttttttatagggaacatgtcataatatcatgagtagtt

SEQ ID NO: 360777 - DNA, 194 bp, Cannabis indica
gtgtgtattagaccctaaagctaagcaaattatgctagaggtccatggggggttctggggagatcatataggaggcccgagtctctcaaagaaaatattgagacaaggatacttctggccaaccatgaagaaagactgtatagactatgtttggaaatgtgattcgtgccaaagattcgcgaacataccaagag

SEQ ID NO: 360778 - DNA, 1314 bp, Cannabis indica
gattcaagtgaagtccaaaattctatattggagatcccgaaatcaacctaggcgcagggctagggtcccctcccaggttgactactatgactcaagtctactcacctccgtgacattatatttcatgccacatgtgaaaaattgaagtccacacaaccagggaaagtttttgggttaacattgtcccccaagtcaatttcacacttgtgtagaattgacttgatgacgtgaacaaggaccgtgtcgctcgatactaccagatgggcatcaattttggcattcgtaagcacttgtatctattctacaagcattcctagctaaattaggaatttgaacacttttgatcagtccttcggaattttgaaaggcaattaacaaagaaaaagaggaaaaatcttaccatttttttagttatcttttacctcttactttgaaaatttggaattttcttgttttcttatatggcattaggattaattggattggaatcctaatcctagttgaacatgccatttaaaattagagagataaaggaagaactgaaaaggcttttgatcttttgcttatcatttatctttttcctttgatttttctaatttttccttaatcccaatagcattaggaattgttgttaccttttaaattttcattccttttcctaattgtaaaggaattcgaaatacacataaaaaggagaagggaaaagatataattatatcttttatttatcatttacctcctccgtagaaagttttaaatttaaaagactcctaggagtaggaagttggactcaaagataaataagtgagttgagaaccaattttttaactcttctcattccattccacacgcctatagtactttgagagaacctcgagatttcatcttcatcaagccttcaagccttcttcacttcaaggtagaatttttttttgacttcttcttcttctcttcctttgttgatcttactccaaggactccttaattacaacaccctcaaaataattttcccaagcctcccaaaattccaaaatacctttcttttgcctgaaagaactcttccaagctaattagactttttgcatccaagtttgaatttccttgagttgtaactagcctaaattgcaaaacttgagatggctagggtgataagaagtagcaggctacctgatgaatgtgagtcccatattgctcatttcattagagctaagttgacagtgcctaagtctaagaacttagacaaggctcgtggtggaaaagtgatggaaattgaggttcttaaagtttccattgagagcaacgattcgagagatc

SEQ ID NO: 360779 - DNA, 600 bp, Cannabis indica
tttataaatttttaaaaatttatataatattccaataacaataatatacactatcttataacaaaagaagaaattatactcactaagagattttaaaagttgtttacttaaatatgacacttttaagtttgaccaatttatataacatatttctatttttaggtatttttatgaatttgatatgtcatttatatgtaaattaggttttcaaaccctatatttattatttttatttgtttaggtagttttatttggtattggtgccggaaaaataactgaagtttactgtcggcaccagaaaaatcgtcagagcagctgccggtatcaaaaaagttatcggaattgctgccggcgcaaaaaaagttgtcgaaattggcattgtcgctgaaaaaatcactggaaaaatcacaaagaaaaaatcatcaaaaaaatcactaagtcttggtgattttttcgatgagttttctggcgacaatactaattctgacgattttttcggtgccaacagcagctttgacgacttttccgacaccgacagctactccgacgatgaaaaaaagatgctaatctagaaactcataaaatctattaatcaataaa

SEQ ID NO: 360780 - DNA, 1139 bp, Cannabis indica
gcattttttcgtcatacttaccttatttgtatgctccagagtcgagaactttgaccacttgatatggtccttcccagttagcccctagtacacctgccgtagtttctttggtgtttaggaatacccttcttaggaccatatctcacacaaagaatttttgagctttcacttgtttgttgaaataccgagctactttttgttgatgggacatcaactataaatttgcagttgctcgtctttcctcaatttcatcaagtgattcaggaaggagtatgtaattggtaccttgattgtacgtcaatcttctgtgggaaggtggctcgatctcgacgggcagaatagcttcataaccatagccattgcaaatggtgtctgaccggttgttgttttttctgttgtacggtatgaccatagaactttaagaagttcttctggctagtttcctttagcatcttcgagtttcttctttagtgtatccttcaaggttttgttgactacttcaacttgacaatttgcttaaggatgtgccactgcggagaaacttttgataataccatggttcgcacagaaatcagtgaaggattggctgtcgaactgtttgccattgtctgagactattttgtacggtagtccaaaccggcatatgatattcttcagtataaaatcttgaactttctttgatataatggttgccagtggttcggctttagtccacttagtaaagtagtcgactgctactactgcgtactgcactccgcctttacgtttaggtaattgcccgatcaggtcaattccccaaatggcaaagggccacggactttgcatttgtgtcagctcgttgggagaagctcttggtatctttgaaaatctttggcatttgtcgcacttcttaacataggctctcgaatcttcaatcatcgttggccagaagtaaccttgccttagaattttcttcgataagctctgttcagcgatgtgattaccacataatccgtcgtgaacttcagataggagtcgtgtagctttgtcttgactgacacatctaagtaatggcatcgagaatcctcttttgtaaatgaccccttctactatgatataccgtgctgccttccttctcattttccgagcttcatttcggt

SEQ ID NO: 360781 - DNA, 672 bp, Cannabis indica
gggtgtgcttgaagcacaaattactaagcttgaggttgtgactttgagcatgatttttgagtgattgtgtaatctgattcttcagtgtaaaatgtgggtgttgatgcttgttgtatgaattttaataccctatctttgagtttgttaaagtgtggaattgttttgagagtttggatgtgaattgggatgaattgggtgtgttgttttgctgaaatttgaaggtttgcatgctggtttctgggttttgcacccagatgctgcggcatgctctggagcatgccgtggcccgccccttttggtggaacctgggttttgtctcaggtgtcgcgacatgacttgggcatgccgcggcccgccctcgtgattttgggcagttttgtgtcgaactttgaaaattcataacttttgattccgaactccgatttgggagttctttatatcgttggaaagctcgttccgagctctgtatgattatctgaattttaaatgccatgattgaattttatgagtatggaatcaggggttaaccctaagtgtgaaatatcccagatttgtgtgactaggattaccggcacctgatcaggagcacccagggatttggaatctctgacattgctggacaacaggtaagacagtgattagaacgtaaagtatgcgtagtggcgcttatat

SEQ ID NO: 360782 - DNA, 1098 bp, Cannabis indica
tcaaatcagttacaattaaaatagatacaattctataacagtgttatcatgaataaaaacaaataacacgaaacaactcaaaccagttataactaaaatagaaccaattatataacaatgaatacaaacaagtaacacgtaataactcaaactgattacaattaaataataaagagaaaatcagtttctaaaacactgaaacataaattaaaataaaactagtttcataacaaaatacctcataacacataatatctcataaaatcaattataggtataaatatgaatagaacaagttccataataaaataaataaacacaaataacaacacacaataactcaaatataatataaagaaactggttatatttatcagctagttaaaaatttgagacaaaaaaattagttccgtaaagcaactaagataaaaactcacacacataaactagttaaataaaataattcaaacaaaaacatccattcaacatgctccaacctaccaaataattacacgcataccatatctaccccaaaaatactcattcattatgttatataactggttttattttagttataaccggtttgagttatttcatattatttgtttttattcattataacactattataaaatcagttctattttaattataactggtttaagttattttgtgttatttatttttatttattatgttacagaaccggttttatttcaattataaccgatttgagttattttgtataatttatttgtattcattatgttatagaaccagttttatttttatttatatccaatacatctacttctgatgacttttccattgactttttccagcgacggtgacttttctggtgacggtgatttgtctcaccctctacttaagtttaatacataatagagacatcatctataaaagtgggtatatttaaaagaatataaaaatgaaggtaaaaattaaaacatataaaaaaaaataggtatacaatctaatttcctcataatacttgagaaacttacaaaaatactagaatttgggttaacttttataaaaaatactgtcacacggaaatctttttaaaaatacagt

SEQ ID NO: 360783 - DNA, 682 bp, Cannabis indica
gccggaccttctcaaggctcccgcagaggtcctcgaaaggtagcaaccgaatggaggacaagcgccaaaaaagaggtatactccccaatacacccactacactgagctgacggactcataagagcgtgtgtattttgcaacgatgaaaaatacgcactatcagagacagcctcctctatatagagatagttcacgaagggatcccaacaaaagatgcgagtatcacaacctgattcgattgggtcatctctatgagtgaatcaagaaccggctgccccatcccaacccggctctggcatggggacctctgccccaggggacgccaaggggtgcgctcagagcactggcaccagccgcaccctcgggaggaccacaacagactcccggcttgccaccaagacccaacagaagaggggctatgatctctggagggaccactcgaaaggaactaaagggctttgttggggccgttaaacacagcgaggtgtgggaagtcactcagctaccagctcaaaggccccgactcatggatcagccaattactttcacggaagaagacgcgaatatggtgtgtttgttggaaattattttaccaggatctagatttactaataagtatgttggattaacagcctaatatgaattctaaaacaatgaaaataaacacatataaagttagaaa

SEQ ID NO: 360784 - DNA, 1160 bp, Cannabis indica
cctatttttactattttagaaaatacagggtctattttgtcatttaacaaaacacaaggtccaatctgtaacttttacaaaacacagggtccaaaatggtatttaccctataaaaaataaattatgtattttaattaataataattacttaataaaattatattaaaattttaactttactattaaaaaatttgtgacataaatacttaaaatattaaatttattactagtaaatatcgaaattcgaaaaatagtaatataaatatttatttatggtttaatttttattctgatgtgtgcgttaagtacttctgggttcgaattttattgtgttgtttttaatgtttgagttttagtgttttactggggttctaatatttgagtttgtgtttatgagatctatttttattaatttaattatttacttatttatttttatagattttgagaacttaaaatttgatgttgtttctattgattattgggattgaaatagtttgattttttatacgggaattaaagtttgccttttcgtttcattgactgaaaaatattagtagaaaatgtatggaatgagaattttgaatatatgaaaatagaattgaaaaatagcatttgaatcgagaattaaagtttattgttaatctccttacaaaaaaaaagtttgttaatctgtaaagataatatggctggaagaagatggaaaaattaatttttatttttcatttaatatgtatataatgttttttttgaatattttaatatgtatattttaattattatttgtttttaaaaattattttttccaaaataattattagtttggtcaatgctatatttatatgttgcactttattgatcaactaacagaaggataaattgagtgttaagtttagaaatttgagaatatcaataagaactacaatgatgacatcaactttatttaattggaatataaaaataatgctgcttttttttttgttcatttcataataaattttttctataaaaaaatactgtaaaaaaaattcacatatatataattatgaatatatatatatataaataattgaataattatttaatttaatttatatagattattatgtgttttttaaaaaataattaatttaagacatatatttttatagaaaatttat

SEQ ID NO: 360785 - DNA, 602 bp, Cannabis indica
aaaaaccgcaccgcaaaaaatgatgcggtgcggtgcggtttttgcggtttgaactatcacaatttttttttgaaatcatcataaaataattaaactatcattaatataattattccaaaacacttaagaaaatacaacaaacttgagactaataaaagttataacaacaacaataagtcaataatctttttaaagtttcaacaacacacctaaatcaaaataacaaacttgaaactaattaaattccaacaacaatataaatgtacaactaacatacttacagcaatagattaaaaataaaagaaatacaaattttcaactccaaatttcaatacacatgtatgggcttgggtttgtgaagatttatggatttttccctaagatttataggtttggattggactgatatgtatgggcttaataaaataaatataaaaattgaaattttaaaagatgcggtgcggtgcggtttgaatcgcaatttaataattcaaaaccgcaaaccgcaccgcaccgcacgatttgggaaaaattcaaaccgcaaccgcaccgcgaagaatttcaaactgcattttttttgcggtgcgggcggtttgagcggt

SEQ ID NO: 360786 - DNA, 144 bp, Cannabis indica
tataatcttgattgtatgttcgaaagtttaattccctgatttgtcagttcactggatttagactggcatgataatcagcgataggtatgcttacaccttggataagtgttatgtctttcaagggcattggcaaagtttaccaat

SEQ ID NO: 360787 - DNA, 677 bp, Cannabis indica
gccatggtggtcaataaacaacaacagcctaataggagacacaaacactcagaaacaaaaaggccaacaaaatcagatcctcacaaacatatcaaaactctcaatcacagagagacagcacacatgtcaagagcaattgccctaccgaactgttttgtatgaagagaatgctccgagtgtagatcgaggtcccagccttgaaagcaagttgttggtaaagaatgctccgagttagagcaagggatggcgtatgaaagttatcgaatgtaagaggttggtgcatgtcgatcaagggagccaagattggatcggcggcttggagatgacgaagagcgattaccacctcaccattgcaggaaagcgatctcacgacgactctaggaaccatcgactgtacgacatttgactttgtgggttttgcagaggccacgactgttgtaaccgagggtttggggccttcaaacacagcaacggtttgagtggattcgagtcgaaatcgtctggcgaaagcttccgaatcttgcgagggtggaaggggatttcggaagaaggagaagaagtctgaatcttaggttgggatattaggcaataggaattcactctaatttaattacatttcaaagtcgcaagaagaagaaggaggaggggcggcgggtaggggagagagagagagagag

SEQ ID NO: 360788 - DNA, 797 bp, Cannabis indica
tagtataccagaaaatccaacacacaccttgcccagtataccaaaaaattcaacacacactttgcccagtatacctgaaaaaaccaccccaaattccttccctgttgctgaacctaactccacacctatagtcgaaccacactcaatcccacctactgttatgacagaaacctccactgacatagcaccaccaaccttaccatctaccattgcctcagctaacactactgctccaaggactcatcccatggttacaaggtccaaaagtggtattgtcaaacctaaagcatacttggccaccaaacatcctctacctgaatcattgctgccttctgaacccaaatctctacaggctgctctaaaagatccaagatggctacactccatgcaaactgagtttcatgcactcaaaaaggcaggcacatggacattagttcccagaaaaccagatatgcacattattgacaacaagtgggtgcatagaattaaattgaatgctgatggttcattggatagattcaaatcctaattagttacaaaagggtatctacaagctccagggattgactatgaggagaccttctctcctgttgtcaagccagttacagttcgcactgtttttatctttggcagtgacttccaactgggctgtgactcagctagatgtcagcaatgcattccttaatggagtgctaactgagactgtcttcatgaatcaaccacaaggttttattgaccaagataaacccgatcatgtctgcctcctacacaagcaactttatggcctcaaacaagct

SEQ ID NO: 360789 - DNA, 690 bp, Cannabis indica
ataacatacagataacaaaaaatgaacaacaaattaacaagattacaacataaaaaaatcgtattttctgtaaataaaaatcaaaaaaatacgtaaaaatatttaaaattccgtgaaactgtatttttgttgtttttgtgtatttgtgaaatcatcccaaagaaaaatgtaatcattaagtagtcgcctttaaaataattattaaattaaaatgtacaagtttgatattaattaacaaatattttgtataatggtaaacaccactctattttttaagcatttttcttaacctaaaagaagaccacaaactatgttgatatttatgatgcagtgattattttttttaatatatcttttaataaattaatattatagaaatagagtacataatttcaccaaaatgtttttatttattttttgataaataatttcaccaatattaattaatatcaacagttgttagatattttatcaatacattccatacatgtttttattgtttttgaaaaaaaaaaaaaataaaacaagttatgatgtaaacttttacaccaaataaatgttaggagttggaccatcatttaaaaaaatatatatattttgtagaaatagttgatgatattattgggatttttatcatttgacccaccccaataaccgctaacatctccatctatttgtcccatttttgga

SEQ ID NO: 360790 - DNA, 697 bp, Cannabis indica
ggattaagatcttttgatataagatcaaccaatgatattgacttagaaagatacaatggtaagattataatatctttactaagatcaatattggtctcaatctaatgtatactccatacatctgatactagcatactttaccaatatcctggaaagaacataacacttatccaaggtataagtatacctttatcgctgactaccacatcagtgtaaatccagtgcactaatgaatcatgggacataatcttttaaagcataatcataattaccttccattgtgttgacatcactataattgtgaataattatatattctggatttaacaaaagttgtatattaaaccttaaacatgtaaacataaatgacttctaatattctattgataacaaataagattacattaaaataagttttatatagggcataaaatcacaacaaactcccacttgcactaatataaaactaaaagtacatttcaatcaatctattgtcttgatatccagatcaagtgtagtgtattctactaaacccaaattacaggaactgcaaggctgtggtaagcaactactttatccaccattacttccttcgtgttcataaaacattatgcaacatcatttttctatatgcattactcctctaggaatactgaattttttactgcttataagtgcatctgaatgaacagaagac

SEQ ID NO: 360791 - DNA, 594 bp, Cannabis indica
ggcagttttgtcacatgttgctcactaactttaacagttcatggtttgataaagcataccctttgcttagacgataagctatccagattcaagaaagttcttgcgctatttgtggatgtctgaatcgtaaattcatgagtgattttaatcattatgtcaaaaaaaacatatcattaaataaaataaaaattatgtaaattattctaattttaaaataacttcacaattttttttttagagaaattatcaatcctaccttcttataaaaagatttttcatttattcaaacattacttctaagaataatattactaaagatataataaaaagattgagaaaccaatgttttcattatagataattttgaggtattatataaatatagaataaaatatttatttatttatttatttatttctttttatctcttaaatttgattgtttctgaacaaatatctttataaatttgagttctcttagattttgttttttcttgctgtaatatacaaatttaaaatgggaatgggaatgggagtaggagtaagaataggaatggaatggaataaaatttaaaatgcataaaaaaattgataa

SEQ ID NO: 360792 - DNA, 627 bp, Cannabis indica
ttgtgcgttgtcttttgtagatgaacccaggtgagtcttgggaactcaagcatcagatcgaccaggatttgcttcaacttttgcatgaagttcacccttgtcttggtgctaaccctccttctagcgaaggaaattcttctgaccccgtactcagccataggatgatggctcgtacaaagaaaaccacgtgtctggttgacgcttctgatcctcaagtggctcggctcaccactctacccgatgccaaataggatttggcggtcccgatggaggaggatcgtgaggaggacgctgaagtccgcgaggttgaggagctggacgaggcgcgtccaggcaatcctcccgctgcggagggagaggaagaggttggaccccctaactttggggagtacaatgaggctaggcaaccagtcgatggcgacggagacgtcctggttgagggcgtggactacgtcagtgaggagctaacttaggcggttcctcataggaggcagggtgccttgggtgccaggtgggtaagtcctccgtgcaagatttcgaaggcacgcctccacactctcgaccaggacgggtacctgggcgagctggactgctcatttccgccacgacaatcgcgccataaatcct

SEQ ID NO: 360793 - DNA, 944 bp, Cannabis indica
atataaaaagatgtgttctttttcttcttaacccacggccacattggtcggctggtgtcattttcaatctttctttctgtttttttttttaatattttatttctatgtatgtatatataattttattaatttctttcccttactaggtaggtactaggtagattatgaaatttgaaactaagaatattttagactaattgtctatttataccgttttatgtaagatcttgtaggatatgagagtcaaatataattttgattgaaggtcatagtccttgtctaagttaaggttaggactgtcttagacatgaatcatggaaacatatttgcatccatagccattgtcactagcttatgaaacaaaagtaaatttcacatagttttaattttaatagaacaaatatttttcttatttactgattatgattagtagaaattatacaagtcaaattataagggtttattttttatggtttgaataaataatactatggggttatgaggttttttttttttttttatatatatttatatggaattttttatgctatatttttgtaaaaaaagatagaaatttcatatttgtaaaacaataataagtttcgccggaaaagtaagtgacactggaaaagtcaccggaaaaattatcgtcgccagaaaagtcatcatcgccggaaaagtcaccgtcgctaaaaaaaatcatcagaagtaaatgtcgcagatataaacaaaatagaacttgttctattacacaatgaataaaaacaaataacctaaaaaaactcaaaccggttataattgaaatataactggttctgtaacataatgaataaaaacaaataacacaaaataactcaaaccagttataactaaaatagaatcggttctataacagtgttacaatgaataaaaataaataacacgaaataactcaaaccagttat

SEQ ID NO: 360794 - DNA, 787 bp, Cannabis indica
aagacttaaccaatgttcccacaaaaatatacagagaatataaaaccctatgttctaaacaacgactaggaatgataaagtctctgtaaaatctaaaggaggaaggtatgcgaatattcaaagtgttcatccgaatacccgtgtgtattcaggaaataaacaagtaagaaaggtgtgaatattcaaacttcccttcctaaagttcacggttatacaaatttcatgtccatttttctaagattatccagttctacacaggaaaatacagccctatgtgtatcccctatgaacatacatattcgaacccctcaaaatgtcaaaaaacccagaaaaatagttttcatctttccaaaaaaccaagtacacaaatggattagaaactgaccttgagcttttctgataactccctgtaattggtttcggtctcttctgaagtcttagagagtcgggaagaaaagtaaagtaaatctaggaggagaatggatgaggatttttaaaaatttaagagaaaaaggggaagaagaagttaagaatgagagggaaaatgagaaagttatttcgtatcagagagcttaaatactcatatccctcataaattgggattatgacacgtggcagcaggaatgcctaaggtcatcctatccaacggccagccatgggcacgcctacacgaaaacgaaagattttcgtgacgtggcaccataaataagataaaacaaaataattacagccgtcatttttcaaaaccctcgatgggacaaccaaaggtcacctcctcgtgacaacc

SEQ ID NO: 360795 - DNA, 474 bp, Cannabis indica
aaaactgaaaaaaaattacagttttacaaacattgggtttatgccgttaaaaataaacattggatttatgcagcttacaaactaaaactttgggtacttatgccgctatttaccccgaaaataattaaaaaaattacagtttcacggaattttaaatattttcacgatttttttaattttatttacagaaaaaacgttatatttatgttgtactcttgttgattttttgttatttgtatgtttgtattttgttgttctttagatattattttcactaattctcttgttattttcatcttgtttctatgtaaaactgtaaaaatgtaaaaaaaaaaatctttaaacataaaatatatttttttaaaaaaaatttgtaatcttatataattatctctttttgtaaatctaatatccaaaacacatattttaatgttttttttagtcctaattggttttatttttattttatttatt

SEQ ID NO: 360796 - DNA, 732 bp, Cannabis indica
aaaaaaaaataaaaaaaagatatatgagtcggggagcacaataaataagaattttctacactatattattattattattattccactttaatggtacaccaaattatgtattaaattagtatgtatcaagaatctaagggtgcttagtgtgaagatgctaatactgatttttggaagcggttttggtcattaaaaattcctcctaagatcagtaactttttatggcgagctgcttcgggtgtgcttccgacttgttttcaactccaaaagcgtcatgttcctttcaatgccgattgccctttgtgtaactctagtactgaaactattcaacatgcgttggtggaatgctcgtttgcaaaggctgcttggcatcgtaacatagtggatgtcggggctggggctgcaacgttcagtagctggttgttggaaattttcactaggggacacgaagttgaaatggaggaagcggcaatggtgagttgggcaatttggtgtgcgcggaatgactttgtttggcaaaagaagagttggcttgcttcgaatattgttacatcagctaggaacgtgcttgatcaatacaaatttgttcaggaaatgaaggacctttcgttgtctcctttgaatgatgggagcggaactgtaagcgttggattgcacctgtgttaaacaagattaaagtaatgttgatggggctttattgaacagggggccggtttggagtgggctgtgtag

SEQ ID NO: 360797 - DNA, 660 bp, Cannabis indica
agagaatgaatggacataaaattatgtttcaaaaatatatgttttacatatattagtaatgctacaaacaaattaatatatacatatgttattatttcttgaaatcaatggtttcaaactattgttgttataagatatgtatatatacatttattacttaattcagtttgcatattcctagaagtgaatatataatttactgatattataataaaatttattagtggtctaatataatttaatataatcaaagtgataaagaatcacaaaataattatttaaaaaatttcttgatgaagtcttaaatataattgctacttgaagtagttaaataattttgtatgtacctagatgtatagtttttatcaagtcatgaaagtgacaaatcatgataattagactgttgagtagtctattaataaattagatgacttgttaaaaagacacgagaaaaaataaatgacatattatggttatatcttattgaccattgcaataccttttaaatatacaaatcattaaattgatgatgaagaaatataaagttaaataaaaatagtgactcttaaagagtgtatatattttagagaataacataattattttatttatgtatataaaaatgaaacttgtaatgattacttatatgttatagtgatt

SEQ ID NO: 360798 - DNA, 1078 bp, Cannabis indica
acaacaatgttgaaaatattaaacattttgaacactttgaaaagtggacgttatgttgaaaatatttaaagaaatgaatcctatcagaattgagaaagattggttgaaaaaggaagagagactcataaagtagttcaatgatcaaggaaaacattagagaaggggttaaataagaagtcatttataattactattatcatatataaaaaataaatcatcgcttacttttatttgagtaggtacgtatataaacatcaattatggttgtaacctgaatttattcgacactttagtaactttttaatactaatatgttatttttttcctccaaatattattgtttcttaaaatattttatgaaatgaattcctaaattggtgtaaagaaataaattataatttttaaaaacatattttacttttttaataaaaccctcatttaaaagttttccatagcctaaagctatagagagcaaaaaaaattctttatatatttttagaaaattttatatagaaatataaaataggtaaggttggtatttaatttcgttatatttataggagcttgagtgactaagaataattaatgactactttttattaataattttggagtggatttacattttttatttttatttttttaaaattttaaataaatttttaaatatatctttattttaatatttgatgttaagataattatgagtatcctaataatactcaactaagtgatatgattttttatttgatttaaaattttgtaactatttgaattttctaaattagtaattttggatttaatttaaatataaaattaaacaacctttaattgttgtgttaattagattttttttaatattcttaagtttaaataattgaccaaacgctgtttaataaaaattatacttatcttcatttcaattctatttgaaacctaaaataattaaataactgaataataataataataataataaattcttcaatctttctttctattattgataaatcttacacagaaacattacaattataaagaaatttattaattaactaaagaagaaaacaaagttacc

SEQ ID NO: 360799 - DNA, 711 bp, Cannabis indica
agagaaaggtcgagcttcggtggacgatggagtttggggctttaagaagaggagaaaggagaatgggtcgtaggctatggaggtgatggtggaggtcggtcttcgaagagaacgaaaggggctcgagttggatgactttgaagaggatgaagggctgtttgtttcgccacctaaaaagctataactacaagcacccagaaattgaaacttaacagtccaaaaacaaagaaagaagaaaagaaatgctagttggtagagttaagaacaagttaactatttgggttttcaagatttaataattcaacccataaattgaaatgctcaatttctttattttccacgtaaaaagatttgcggaagaagtaatcaaacatcaagaaaagaaattagatccaataaaaagacaataccttggtaactcgaccaaataactttcgaacgcgaatcacaagaagaaaacgacattatacaaaccaatttctaaacagtatgccatatacaaataatactcaataaacgaaactccagatcccaaatatataatcaaaacttacatttatataatcaaatatcagttcgaatctatcgtcgttattgctcttatatgtacgactgcgtttggtaatcaaatattaatgggatttgttttattttttattttattactttattatatataaataatattttattattttattaaatataaat

SEQ ID NO: 360800 - DNA, 805 bp, Cannabis indica
tagaaatagctgaactcttctactgagggagccctatgaacatactccatatacatcgcatagaaggctagggcagtgcgataactgtttggagttagttgaaaaggtgatacatcgtatcgcctgagaatagctgcgatgaaaggatggaaggggaccgataccccacatcggagaatgggtattgagactaccacatcctctgtgggaataatcgcaggattggtaaacgggagatgcgccctctgggacggtttaggtcgctgaaacgcaagtcgcagcagatttaacctcacaaaggtagtgaaatctgatttggaaaccctcgaaatcagatcttcacacgcgaagggctcgttcagctgagtgtcgtcaaccgagtccgtcccgctcccttccgcctcctcttcatcctcgcctgactcgcgagctggggccgtccaatcatcgtccatctcctcgacctcgacgtcaggagcatgcctcgagtgaataaggtagtcgcgggccgacaccgtggactcgctatctcgaatgtcgatggtcccaggctcggcaagttcctgcaccattctttcgatgtctgcagaagacatcgggcctagctctattggtgcggcctcctcttctgaaatcgaggttgggagaaagctgtcttcctcctggtcaacttcgccatcgaatgcacggcctccagagccgagctgttggctatccgacaagtcgctcatctgaaagatagaagatcttttcagcgtgatgaatgtgtgaaaaaacaaaaataagtgatctcacccgcattgaa

SEQ ID NO: 360801 - DNA, 974 bp, Cannabis indica
aaatattattcgattgttattaaaaataattataaaattgctaataataagatttataattatatgttacttatttagtaaaaatattgacaattacttaaatataaaattcacaccctaaaaatagagggattatttcataaatataaaaaaatgacaaaactttacatttttatggctttttttcacaaaaatatagagtgttgtttctttttttttgttatttttgaaacaatgttgttttgacattactgttatggaaaaacaacgtgatttttttacatcaatacggagtgtaattaatctgttgtttcaaaacaacgttatttttagaacaacattatttttacgttattttctgtaaaaaaaaaaaaaatccttaaaaatgtaaataaagaaaaataaagtctgtaaaaatatataaaaaaattataaaaatgtcaaaagtaaagtctatttttaggtgtgttgtgtaaatttttaaaaattatacataaataattaaaataatcataaattaaattttatctttcaattattacaacaactgctcatgcgtttattaatttatataatttatagaaaaaaaaattaaattggttaaatgatatttaaaactgtaaatatattattttaatgattaaaaaatattttaaattatttaaaagtatgttattattaatatttagctcactgaataaaatatatatatttaatttattattttttcaagtgtaatataaggaaaattgaaaattaatttaattaccataaatataacttaatgcaatgttgtattataaattatttttattaattctaatttttattatatatttaataaaaaattaaaaatagtaaattttaaattccattcataattaactaaaattctaatttatttttagaaaattactccatatattatttttttaatatttttttttcaaatttacggtttgagtttctaaagt

SEQ ID NO: 360802 - DNA, 586 bp, Cannabis indica
aaatttaatgtatgaatttgaatttggttgattacaacttggctgcaatgaaatttgtaaggaatcaaagtgtcaattctattgtttgctttacacttcaatttctctacactataactctaaagtaatgttatgaaattttaattacttatttttagaatttttattgggtataagtagtatttagtacttttcagacgtgttattttataaatagttattgatattctttaaaaattattacattaaattatacgagactcgatatttaattttactaataacgatattaatacgtaagaaaattagagctggtcttaaaataatgggtcataagaaaaaaataaatttttgggcctttatttagaagaaaatgtagtatttttcaaaattattaaacaaaatgtataaatttaaaatacaaaattttttttgacccctaaatgaaagggattatttcacaaatacacaaaaacaacaaaaaaattacaaaaatacgatttcacggaattttaaatatttttacgatttttttaattttatttacagaaaatacggttttttttatgttgtattcttgttaatt

SEQ ID NO: 360803 - DNA, 528 bp, Cannabis indica
aaaatgtaaaaaaaaaaatattctttgaacgtaaaactttaaatattttacaaaaaaatggtaccttatgtaattattcttaaaaaaaatttacattgatggtagatcgttaagggtagtggtgttactccaggcaaaggggtttagggtggacggagggaggcggagaagggctgaggaggggggtagaggaggaatttttgagagagaagagaaagaaagtgaaggaagttgaggtataaataaatctgacagcattttttatatacgatattattagcgacggaccattccgcttgtaataataggattccaccgctaataataaaattgtcagattttttattattagcggtggagtccgccgctaataacaataaaagttcgctgctaaaaaagttttgaaaatatttaagtgggaaatttcccgcactttttctattctagtattagcggcggaccccgccgctattagtacatgggtccgccgctaatacattttcatcaaaaaaaaaaataacatttaat

SEQ ID NO: 360804 - DNA, 764 bp, Cannabis indica
agtgtgtggttgggtgcttccctatttctagagtttgtttaatccctagaaagtgtagcagaatctagggttatggttttggatttctcggaattagagttttgttagtgtaacttacccggtttcataatatgattagggcatccatctagcgtgagactttccgttcaggtcggccaacacacttgaattcaaaaagaaggtaagaactgaatgtaatgtgtgatatcaataactgaatgtatgtataggttatctgtatatgcatgcttaaaatgttagttgcactgccaacacttatacggttaaggtatagagtgtattggtatagtgattgttgtctgagagtaccgtgataccagcataagtacggaaaggtactgagtatgtgtggtacatcactcagaggtactcagggtatgaaataaaccctaccaacactagtacagagaggtacgtagtgtatgtggtatagtggttgtaccctagtattgaatattcttactcatctgttgagccttgtaaataggtgtatgggcgcctagatacaagtcagatattatataatatgttatatgcttttcaaactgagtctgtcgactcacagttttgcttccatgtgtaggtaaaggaaaggcgaaagttgaacaggattgaacctgagctcggatgaagttgtacatgtcgaagcggcgcgacctggagtgttcagtcttgggacatctggagttatatttttgtagtcgctatgcgacctggattat

SEQ ID NO: 360805 - DNA, 500 bp, Cannabis indica
ttcgcatttgagagatttttttaatctatattttttttatggttgtgtatattataattacttaaaatattttgtaaaattttaaaaaatttagaaaaatttaacaagttgaaaaataaagttcaaactatctgttacacgtgtgactattttatttagaggagtgtattttagtttgtggtggttttagttaattaatataatattaatttttttattttattaaaaaattaatataataataaggaataattttttagtgtaatttttagtgttgtggttggagtgaagataatttttaacattaaatttggtgatagtgtaacaccaaatttaatgagctccttagagatgctctaagacttcaaactcggctgtgatctatctttcttataggggtaaataccattttagaccctgtgttttgcaaaagttacagattggaccctgcgttttgttaaatgacaaaatagactctgtattttctaaaatagtaaaaa

SEQ ID NO: 360806 - DNA, 625 bp, Cannabis indica
tctcagcatgactcagcctgaggatgccattggggccctgcttagcgctcttcccgaggtctcgtcgggcatgggcgaaagtgaaggcaattccgaggggctggccccggcgggagcctccaatttagggcctctaggtcgggaaggtttctctcagcctgagatcctcccaacagctacgccaggtcttccatcctcctctcctgctcggacctctgcctctctccttggcgtgccgtcatcttcccagcttgccctttctcttgctttaactctccctacatccttttcttcaggccgaggctccccgcctctacccagtcatcccccgcgggtgttagctgaatgggacgagattcccgccttccggatcaagaaggatgctccgttcgaagaatcggctgagaattatttcaaaactctccttgatgccgtcagaaaacctgatgatgatttctacatctcccgcgggcgattctattttaaaggatactgccatctcggtaataaaggtattttactattttgcgtgtgcctcgatccgttttagtttttgccttacttgctattactcatacgttatgtttacttttgctagacggctttgagatgtgcccatgctatg

SEQ ID NO: 360807 - DNA, 531 bp, Cannabis indica
aatatcaatatacaatatcataaccataacattttgacagtagataatataaccagccatatggatagaaatatatatgctcatatattttgcattgcctaatcaggcaagctcgtgtcataatgcaatatcatatataatatcattgcaccacctaatcaggtgagcccgtgctacaacttggcactaatatattgcatcatctaatcaaacgagcccgtacctacgcccgatacttatcatatgtcattgacgcccgtacttacgcccgatacgttgccaagaagaattccaacaatggtttcaatctatgccataaccaggcaatttcatatcactgacacctgtacctacgcccgatacgtggctaagaatatcgcatcacctaatcaggtgagcccgtatctatgctcgatactcatcatatgtcactgacactcatacctatgcctagtacttcgtcaggtatatcgcatcacttaatcaagtgagcccatagattatgttcatagttgttgggattttatgccc

SEQ ID NO: 360808 - DNA, 638 bp, Cannabis indica
ggttgaatgtgaaaattggcaatttttgagaaaatgggaaaaagaaatgagaaaataggaaagttgcaaaagtgaggcctatttccaaatgccttggccgaccacatgcatgggttttattatttaattttttttcattattttaataccaagtaattcaaccctaaccctgtgtggtattctataaatagaaagtaaaggctttaggaaacaaacacaacacaatggcatctcattcttttcccagaaattttcctaagccaccactctctctctttcttcttcttctttgtttcgaaatccccaagtgatagagtagtgcccacacacaacaagtagtacctcaatcatagtgaggaagactgtgaagaatctaaattcaacaaagaaggacattcgggctcagatcttgataatactctgcaacagaaaggatacaagggttagagatctgagtggaaggagacatattattccgctgcatccaatataaggtttctcatactttgtatgtgtttacttatattcgttttaaaagttcatatttaggttgtttatcaacatacttgtgagtagatctaagatcctggtaaataattccaacaactggcaccagagccatggtaattgatttgatt

SEQ ID NO: 360809 - DNA, 566 bp, Cannabis indica
cacaaaatatgcaaaattataaaattccctatatgacatataaaatgcattcttaattcaaataaatctccgtaaataaataattccaaactaaaatgcaagtttcataattaaaccctaattatctgctaatttctaaattaaagttaaacggtctttaccccatgtctgttgttcattacaattacttgaaaactggaattatttaaaatccagagagttgaaacttaaagttggtaatggcaaaatggcatcggttagagctagaggaaaaacaaaactcaagtttcagaatagaattttgaatttagacaatattttgtttattccaaatttcagtaaaatcttgatttttgtttcatgtttagaattgcaacaatataaattgaattttttgagttttggttctatcatatctcgaaatgatattcaaatctgtgttgcatctatggaacaaagggtttatgttcttagaccatatgaaccatttacacttaataacgaactctttaaggtacttaaacctagaaactacaaaaagcaaaagattgataatgaagatgaaa

SEQ ID NO: 360810 - DNA, 1046 bp, Cannabis indica
gtcctggtccaagttcgggttcaggtcttgagtccccgtctgagtccaggtcccagtttaggtttcggtccgagttcttgtcctagtcgcaatgtgggtctgagtttcgggtcctaggtccgagtctggttctgggtttgggtctgggtctgggtccgagtcccggtcttggtttaggtcgcaagtcacaagtccaggttcgggtccaagtcccggtatcgcttcgttctggtttgagtttgggtttaggtttgggtgttattcctttctcaggtctgggttctagttgcagacctggtccgattctgattccaggtcttgaatcgcgtctggatcccagtctgggtctaggtctaggtctaggtctgggtacggatttgggttcgggtcatgatggtcttagtttggtttttggtttgggtcctgttatggtcccatgtgtgggttctagtccatgtccgtgtatgactctagttccaggtccgggatcaggtcaaactttaacatgggagacgatcttagacccagactctgacctagacatggatctggatactgacctagactcgaacccaaacccatgcccagaccgggattgaaacttgggacctggattcagaccgaaacctagacccaaaccttgacttgtacccaagacttggacttggagctagaccaaaacccagacccagaccgggatccggacttggaccgagacccgaccctggactttgaccaggactcagaccacgacccagaccaggacccgaacccgaacccaaacacagaatcgaaatcagaactggactaggacccaaacccaaacatggacccggactaagacctaggacccaaacttggatgggggacctggacctgcgcctcagaaccaagacccagatcgaaacccgagactcggacccgaacttggatctggactcaaactcggtactcgaacccagatctagacccgcaccgggatcgaaaactcgaacccaaactcggactaggacttgaaccccaaccgggacctaggactcagacct

SEQ ID NO: 360811 - DNA, 787 bp, Cannabis indica
agttttgctataaaattttaaataatttaagtataaaaaaataaattgctaaaagatccttatatagtaataaattgcagaaagttaattaataattataattaatttaattttaaaatataattaatcttaattaaagttttataaggaaataaatgattaggttactttcacgttacaagttattattatttatttttatttaatttctaaattaatcacaaccatttaatagtaatctaatggcttaaaaaaatgtaatcattgaaacttcttccatatatatatttatatatatatatatgatatgatatttaagggtaattttaggataggtactttggtttttattattttagtgatatggtacaatattcttcaccatctccaatggagtaaataagtacactaaaactgccaaataactaatatccaatggagcatctccaatgtaattttaataaaaaaaaaaaatgcttctttaatgtgggggtgcatgttcgcggtgcggttggtgtggctttttactatttttttaaactaacccgtacatgcagtttttttaattttccaaaccgcactcccatcgcgaaactaaaaaaatgcaaaaaattgcaccgcaaaaaatagtgcagtgcggtgcgattttttgcggtttctgcggtttggactatcatcaaataattaaactatcacaaatacaataaagtttgagtaacacttgtcaaaaataccataaggcttgaaaataaatatgaaaaaaaaaaattaagtttcaacaatacaa

SEQ ID NO: 360812 - DNA, 577 bp, Cannabis indica
agtaataaataccgcctggcagtatttttgtaaaaaaatagcaaaagttagtataccatgtaaatttccctatttaaattgtttaagtatcattgatatacagatgctacttagacatgggctaagactgactaaatctgaaattagcacccaccaactctaggaccagaaaaaaaaataggttaattagaatttttattctttaaactttaatacatactaaatcatgtctcttaaacttttttgaccgttaaaaattttctctaaactattgagattatcgaatttaaaaaacttttgtccaatttcattctattatactaatttagtgattgtttatgtactaaatcatgcttcccagatttaatgtttaccaaatcacgcctctcaaattttgacatgtgccaaattatacctctgaactttcatccatgttattctttactaaaattggacaaaagtccttaaatccaacaatctcaatagttcaggaggatttttaacgatcagaaaagttcatggaacatgatttggtacatgtcaaagttcagaatgcaaaaatcctaattagccaaaa

SEQ ID NO: 360813 - DNA, 645 bp, Cannabis indica
ttacaagtagctaagtgttttgatgataaaatatattaaaaggtaaaacgataagtttgttcctactcaatgtaaaccgtctatagaggattattaattatttagattgtaacaatgaaaaattcatatagtatctatatttggtatatagagcgttctatgtaatctaaagtggaattccaaatctatagtggagtcaggatgaattaataagctaagaaacttacttggtaaatttttgatctacttatgaggagcttggttacataggccgtgttgggtttagtgccctaactaaaatcctattcaatgtaatcttgaatttcattatcaataaaagaacgaaaattatttttttacttgtttagtgtaatgctaggtttacatgtttatttcatgatcatatgtttgatatatacattctattaaatccctatcacattattgttcatgattattgtgttgtctacatagcagaaaataatcaagattatgtgattaaactaattagtcccatgatttatcagttcactagatttatactgatatgataatcaacaattttgtttacttacacttgtacaaaggaatatcttttccaagggattggcaaagtaagcttgtattggatgtatagttatacat

SEQ ID NO: 360814 - DNA, 772 bp, Cannabis indica
tatattatatatattattatgaatataatatataatataattgagaattatatacatgtaataatcacaatataatgtgattgagagttacatatatgtaatagttgtaacataagaggtggagttactaatatgttgtaacttccacatgatcactaataagtgtgtaaagagtggttacacaacttaatttttaaaattcaaaaactataattcaaatatagttgttggggattgaattttattatttataatgtgtataagtgatataaaataaagtgggaatgatttggaataggtaggagtgttatttgcaaaagctgaaaattttggtaactagtaactagttactattttttttcagcattaatagtaaaacgttttttgctattgggatggcttttaacaactctcataaccttcaaatcacccatttacaccccattaagaaatggtaacagccattgggtgtgtgatgtttgaatttcaagtttgtgatcctaaacactataaatagaggccttggttcacctttcagacatactcttctcttctatctttcaaaaataaagctagagagttctaaggcttgataatttctagaagtatttccacaagccctaagtgtttcatagaggcagaaataatcttcttggacagaggtgtacaaattttgttcaagtttttggtgatccccatcgccactttgggtgtttgttcttctttctttttttgttctattctcaagttttatattgttctcttgttctcc

SEQ ID NO: 360815 - DNA, 788 bp, Cannabis indica
agacacgtgcattgcacgtgttaacttcacctagtattcaataatgtagattaacattcataattatcttcttattccattatatcatcatataagaaattttttatgatagcttttgagattatgatatcaaaaaaaagcgtaaaggcaaaaaaaagctatatggcgctcaaattgaattttagtaaaacttatgatcgtgtggagtgggactttcttcgagctatgatgagcaaaataggttttgacttgcgtttcattgatcttgttattgctacggttagctctgtgagatataaaataattcatggtggtcatgagctgggtccgattattcctgagagggttattagacaaggtgatcctctatcaccttacttttttcttatttggtgctgagggcttctcctctttgatacggaagtttgagcaggatggtaggcttaaaggatgcaaggttgctaatggtgctccggttatatctcatatgctctttgcagacgatagtaatgtctattgtcgtgcaaataatagagaggcttcaaatatattacatctgcttcagctatgtgagatcgcttctggccaacaagttaatttcaataagtcctctgtcttcttcaatactaatgtgcctaatgctactcgggaccgattgtatgggacccttggaatgagacttgctgatgaacataatacttaccttggcctcccttgtgtcatgggacgaaataaggatgccatcttggggtttttgaaagacaaaatgcagaagcgcattcaaagct

SEQ ID NO: 360816 - DNA, 528 bp, Cannabis indica
tcattttgtccttaacataacacaaatcagcatgaaactcaaaatacacattattatcctttgcaaatttggcaacactaatgagattctttgtaatttcagggacatgaagcaagttattaagaactaaagaatgagatgcatgctgaggtgtaaaataagattgacaattatgctttattgacaaacctgtaccatctccaacatgcatttgatcttgtcctccataatcatagcaatttgctagattttgagcttgaggggtacagtggttggtggctcccgagtctggataccagttgggatcacttgaactgttgttggtcgtgagattagcttgaggtttctgtaatccaacaccttgagaactggttcctggttgagctcctgagaaagacttgtcaaaacggtaataacagttgtgtgcaatgtgaccaaaatgcaagcacaactgacactgcaccttattgttcaaactcatagcagatctactagattgattgaaggggatattacctttgccaccaa

SEQ ID NO: 360817 - DNA, 586 bp, Cannabis indica
atcaatagagtcttatttataccattttggaaaataaaaggttcattttgtcatttaacaaaggcaatttgtaatttttcctctcgaactttgacatatactaaatcatgccccataaacttttttggccgttaaaaattccccctgaactattaagattgttagatttaaggacttttgtctaatttcattcaattttactgtttcagtaattgtttatctactaaaccatgctccccaaactttgatatctaccaaatcgtgcctctcaaactttgatatgtactaaatcatgctttttaaactttcatccgtgatagaattttttattaaaattagacaaaagtccttaaatctaataatcttaatagttcaggaggaatttttaacggccaaaaaaattaagagggcatgatttagtacatgtcaaaattcgaaagaaaaaattgctaattagcctttaacaaatagaaaacccattaataactttggtaaaatataaaatctaaaataataattttatataatttttttttttttggttgtaataatattataagataaataatgcgtgtacacatttacc

SEQ ID NO: 360818 - DNA, 550 bp, Cannabis indica
taaaaaaaagagaaacacaatttgaaagggcaaaaaacatacattggagagacaataatattatttttcatttttttctattctttttattttcttttagataatgaacaatatatattggaattataaaggggtaatggccaaattggctgattttctcttagagttcatagatctctaattataattttgattctatgatttaatgaaatgtattttttttttttgaaataagatctcagataaatgtgactatgtaacactccatattttcctataatttgatacaattatatttgaacttttatttcatggtatagttaacattaatttgagtcaaaataaaaataagaaataaaaataaataaaaatttcttattgaatatagggggaatttttaaaaattaataagatggaaattagactaaaaaaaagaaaaaagaaaagagagaaagaaaaacaatgcctaatttctattttgtataaacaatgtatttttcctaatttctcttttgtatgcaaaaagaaaaaaaaaattacatttattatt

SEQ ID NO: 360819 - DNA, 525 bp, Cannabis indica
tgtttatttcattgttttagatattcatatttaggatgttaaataacatacatggtagtaaatataggtcctgataaaataattccaacaacccaaacctgggacccggactcgaacccagacctgggacccgaacccggacccagaccctgatccgggacctgaacccggacccggacccggaccaagacccgagacccggacccgaactcggacccagactcggaccgggacctgggatcgggagaaggacccgaaccctaacccaagaatcggacccggacccgggacccaaacgcgaacccggaccgagacctgggatctgaacctggacccggaccgagactcggacccaaacccagacctggatctttacacaatctattaatacatgtcaataccaaacatagtattgtatttaataatactaatacaaaattaaaatgaatataaaattataagttgatattaatattcttaaaagagagagagagagagagagagagagagagagagagagagaga

SEQ ID NO: 360820 - DNA, 831 bp, Cannabis indica
ttaaaatattaaaaaagtataacatgaagctaaacccgaaaaaatgttcctttggagtcccctccggaaagtttttgggattcatagttaacgtgatgggtattgaggcaaatcctgaaaaaataaaggcattaatagacatcccatcaccaacaaagcctgaggaaaggcagaccctgacaggaaggatggctgcacttaacaggttcatttagaagtcaacaaaaagagtgcaaagaggcctttcaaaacataaaaaggcatctagcaatgcctcaagttttggcaaaaccaataactggagagacgttagttctctatttaaccatctcggaagatgcaagcaccaacaacctatttactatgttagtaaaaggctactaggggcagaatccagataacccctctagaaaaactggcgttgtgccaagtccattcgtcttgtaaactacgaccatatttccaggctcaccccataaaagtcttaatcgatcagcccttgagacaagttttatctaaaccaaatgtttctagaagattgataaaatggtcgatttaactggggtagttcgacataacataccatcctcgaacatccatcaagggccaagctttagctgacttcttgatagaaggtataactcccgaataaattccacctgatcagcgagacgtgaaaacctgaaagttatatgtggatggcacatccaacgaacagggtttgggtgcaagggtatattaatatcgctagaaggctttacgttcactatgctttgagattccaatttgacgcatctaatacgaggctgagtatgaagccttgatcgctgg

SEQ ID NO: 360821 - DNA, 614 bp, Cannabis indica
agcgaaactagtaaagcaaacctcaaggaatcacaagccagaggtacaacttcaaatcaaggcagaaattgaaaaattactaaaagcaagatttatttgcacatacaagcattcgatatggttggctgacatagtgctagtaaagaaaaagaatggaaaaatagaatatgtgttgatcattgagatcttgacaaagcttgtccaaaggacgactttccattgccaaatcttgatactttaattgacgcaacaaaaaattgtgagatgttttctttcatggatgggtttagtagatataaccaaattagatgtctccagaagatgcagagaaaacaacgttctgaaccccatccagaaacttctactacattgtcatgccatttggtctgtaaaatgctggagccacctatcaaatagcaatgacgacaatattccatgacatgatacatgggaacgtagaagtgtatgttgatcatatcgtcgtcaaatctcaaaataaattcaatcacattcgcgatctcgagagagcatttcaaaggtgtgaaagatacaaacttaaaatgaatcctcttaaatgtaccattggtgtgagcgcaggaaaattcttagggttt

SEQ ID NO: 360822 - DNA, 752 bp, Cannabis indica
gttgatttatgtgttatttgatgtttgcaatttattacgaaaaataatttgaatttttttctggaattatttttgttggatagtttgggaaaaaattaagcaattcactttttttatagaacttgatttcgatttaatttgaattagttatgattttttgaagttttgaaaaatgataggggtggtgtcaccccatacgcgctcggatccgagtgatcactcggccatgcgcgcttcagacatgaggctgtcagagttttctaggtcaaaatcctccagtttttctggagcctgcgctccgcgcgcggacgaggctgctggcagcctctctggccaagttttcttggctgtgcacccaggcttgcgcgcgctgatggtatgcaattcataccatctgtaccaaatgcatttttttttttcaattttcttcaatttttacttatgttttttcttatgaaattaaattttaggttttttgattctattgtttatacattaaaattgatagtgcaaatctcattaccaactaatttacaatgtttccacatcatataatttgaattcggctgaaaacaaaaaatcaaaattcgggttttttttttgttcttagttttcggattgaacacaatccgatcgagaccattatcgtcatttatacccgaaattaataccatatattgatgagaaatcgattcccgagcaaaacccaccaagatcgcgtgttttcgtcgattttttggctgaaaaacggg

SEQ ID NO: 360823 - DNA, 648 bp, Cannabis indica
aatgaacctagggcttaacttacccttcttcccgaagcgccgaatacccttcactggtgaaactcgcaggaaaacatgttcccctgcctaaaatgtaatatctctgcacttcggatcagcataaatgtttttcctgctttgcaaagcaagcatccgagccttgatcttgtctatagccttattggtcctgtgaactaattctaaacataagtacttcctttctctagtttcctcccaatgaattagagagcgacatttcctaccatacaacatctaatagggagccatccctattgtactttggtaactgttgttgtaggagaattcaattaaaggcaagtacttactctatgaaccctcaaagtccatgacaaaggttcgtagtagatcttccagtatctgaatagttctctctgattgcccatcagtctgagggtgaaaagtgtactaaacttcagcttggtacccataaccctttgaagactcacccaaaattttgatgtaaactttggatctctgtccgaaacaatagatttaggagttccatggagacgaactatctccattacatacaattcaacgtactgatcctttgtgtaggtaattttcactggcagaaaatgagctgactttgtgaatcaatccact

SEQ ID NO: 360824 - DNA, 692 bp, Cannabis indica
tcgcaacatatcttccagtatctcaattgtccttttggattgtccatcagtctgaggatggaaagctgtacgaaatttcagtttagtacccatagcccgttgcaaactctgccaaaacttagaggtaaacttcggatctctatccaaaactatggattttggtacaccatgcattcttactatttctttgatgtacaaatctgcgtacttatccactgaaaatgttgttttaactggtagaaaatgtgcagactccgtgaatcggtctaccataaacccaaatagaatcaaataagcccgtggttctaggtaatccaaccacaaagtccatcgtgatatcttcccacttccactcaggtaggcaatattcttggtgatgtatcgggcgtaggtacaggcgtcagtgacataagataagtatcgggcgtaggtacgggctcgtctgattagacgatgcgatatattagtgccaagttgtggcacgggctcacctgattaggtggcgcaatgatattatatatgatattgcattatgacacgagcttgcctgattaggcaatgcaaatatgtgagcatatctatttatatgcatatgattggttatattacctattattgaatgttagagtttaatcattatgtgataatgaaatgtataattagctatttaatgtatccttctttattacttt

SEQ ID NO: 360825 - DNA, 595 bp, Cannabis indica
accatttcagaccaaaaaacaccagttccaacaaatacgacacttataacgaaagcaaactacataaagtctaataaaatgcttaaaacataactcactcattataatggtgtaagattcttgagtgattggggtgtgctccgattttccaccaccgcccaccgagaaataaacattcgacaaggaagagagagagggaagagagatagtgatggtagttttcaattttttctagagagagagaggggtacacgagagggaagagggagagggaagtttttcagtttttaacaattctttttttaaaaaaaagagtaaaatgggaagttcatgtaataaatggaattaatttgtacaaattagtggagggtctaaattttgatattggaggttttattaggggcaaaatgtgaaattttcccatttaaattatgtttcaatttattaacatagtgtctttttacatatatttaggggtgtttataaaatatatatataatcaaatctgatctacaaaatacagaaatttgcacttgtgtagataaaattgcattaaaaaattaaaaattcgcacttgtacgaattggatgttgat

SEQ ID NO: 360826 - DNA, 599 bp, Cannabis indica
aaagtaattgacttatgcataaatagactccctcttattatatgcgcaaacttgatgtattccaccttctaaccgaaccttgatgaaactccaagagctcgaaatcccttcgatctccttgaagagtgcttgcttcctcccgatgcaagacttgaaaagtaatctcccgaaagctttgtaaaaccttctcccgaaggtagcactgatgttctctcctttgtagacttgaatacagagtcaagacaatacaaaatacatataaacagagtaagagtcatacaagctcttctctacaaaacaaagacactttttccttaagatatgaatacaattcaaagtgtatgaaagagatactaaacctagctgttataaagtgtatttataatcaatatacaccttattaacagcttacacatggtctgaacaagaccccagcctactagaaaatttcctaaaataaatcttacaatcagcccaagaatttccacttctgtacctacagaattgtgggcagtaagtacaacttttcttactttagtaaagaaaagtttagctccgattttctcttaaagtaaatctgatctaacaaaatggaaaac

SEQ ID NO: 360827 - DNA, 504 bp, Cannabis indica
aaaaattagctgtaatagtacactgatatcaagtgtacaattttttttttattcttattggtcaatttaacttccttatgacatgaggtaaaaagaaaggggagtacactagatttcccctacatatatatatatattgacaataaataagattatattgaaatgagttttatttaagacataaaatcacaacaaactctcacttgaatgcactaacataaaacaagaagtgcatttcaatcaatctattgtcttgatgtctatatcaagtgtagtgtgcttgactaaactcaaataacatgaactgtaaggttgtggtaagcaactactacatccaccattatttcttttgtgttcataaaatattatgcaatattgtttttgtatatgtattacttctctagggatactgaattctttactacttgactaagtgcatctgaatatacagaagacatatctctaattctatccaaaaatggaatatatatatatatattaaaa

SEQ ID NO: 360828 - DNA, 528 bp, Cannabis indica
ttcatactaaagtttaaaatttccattagatatgaacataaagttcttttgtccagacccatctatcccttccccggctgctcggattaccgcctcttaagatgttactaatagtttcctagtcaaaaaggttgtgtagcatgggtgtgtccaagtttccgtcaggtaaaaataaatctggcactttctccaaactcagctattgacgataattgggcttagggtaaaaatccgtaccatggataacccaagggtcatcccaaatacttgtctctctcccatcagatattagcttacacgccccttttcttaaaatctctttaggtcgcaccacatttctccaaaattaagaatcagagctcttaacctcacagtcaaaaaactacttgtccttaaggtacttaaatctgagaacattacagtacaacgactgttcctcagtaatcaaagcccagccccacttggccagcaatgcctgtatacaactttgttcatactaaagtttaaaatttcaagtagatatgaaca

SEQ ID NO: 360829 - DNA, 628 bp, Cannabis indica
gtttttacggaaaatcgtaaaaatataaaaaaaaatcattaaacgtaaaaatgtaaagttttttttacaaaaaataatgccttatgtaattatccatatcatttatttctatatgtattattttattcaaataagcccattaagaatgatgggcccatttacccgggtccaagtagatcgaccaatctgcctatatgcaaagtcaaatgaaacgttcaggtctgatagtcacttcctcgcgactaagccaaacatgtggttccggaaagcaatcacatatttagttaaaaagtttacctaattaaataattttaaatttctccaatgcacaaaataaaaagaataaaaaaaaaagataattacttcagacaccattttttgtaaaaaaaaaagttatatttttacgtttaaagaatttgtttatatttttacgattttccatagaaacaacaagaaaaataacataaaaagtaacatgaaaaataacaacaaaaaaataacacacaatataacaaaaaaattacaacaaacaaaattaagaaaaagtaacaaacataaaaaaagaaccgtaattttctgtaaaaaaaaaaacttaataaaaagtacgtcaaaaatatttaaaaattac

SEQ ID NO: 360830 - DNA, 451 bp, Cannabis indica
agatcctggtaaaataaattcgaacagcaggtctgtgtcacacaggcagattcgaatggcattgttgtttatattatttgatgagcatattaatgatacgtattatactatcttgatgggcttggctcacatgtactctactgtgcaggaaagggtaagactattgtttatcagccatgagtgcaggagctggacgaagaatgtacatgtccgggccatatcaaaccaagcgggttggggtctaccagtgttgtgtttttgagactctgttttgccacctaggtcgctgaaagaaaagaacttgtaataatatttataaatgtttttgggatcccaacttctgtaatttttagtttataaagtttaaaaatattataagtttattctcattcctaatgttattaaagtttaaattctgtgctaattttattagtaatctcgtttaggggat

SEQ ID NO: 360831 - DNA, 969 bp, Cannabis indica
tcagcctatactcaatatgctagtcagcctataacatcaatcagtatttcagccaacatacatttatcaataatcagtacaactctaagtatactattactactatcaatgtaatctaactggcataaacaacatgcatgctaaacatgtaataacatatgcatgacattatattaatcttacctcaattccgaattcaggtgtgccggccaacttgagtggaacagctgctcggcgaattacaggctcctaaatcacatcgataacaacttggataagtaacacactaaatcacaaccgggacttaggttttaaaccaaaaatctatttattgtaacttaatatggcaatatcctaaactagcagggtaattaaccaaccaaaaacttgaaactagcattgaatcgacaaccttgaattttttggggaacccagctgcaaaatctgggtaaccgattagccagttttccccaaaaaaaccccaaacaaaaccataactctaaccaaatcgatcccaaactttaccaaaccttcaagacctacatattataccccaatatacatttttcaagcaataaaataactacccaagctcagaatcaaatttcaccattaatgagccaagcttgagctctaaaactcaaagcttgctcaatcaacaaaccagccatcaaaacatgctcaaatcaacatatctaaacatatgtaaacctcggaaacatacttcaaacaacaacaacaacaacaacaactaaaatcgcaatttcatgcaaaacccaatttcttacaattcaagaaactaaggaggaggttactaagagattacctagagcttgaaaccactaaaaacttagctgaatttagcttgaattgcagagaacacaccaaccctaagctggttctaggtgggttcgaaagagagagagagaaagagagagagagagagagagaagatgcttccttttctaa

SEQ ID NO: 360832 - DNA, 1072 bp, Cannabis indica
ctctgtaagggctttgagaaaatatggcaaactagcgaaagtaaccaaatgaaaggagaaggctggcttttatcgggcagaatgggtgtgaagcaactgtgaccaagcatcatcgtacggtgagaattgcaaccgattcgcattctgcagatctaacggttggggtaagcgcttatcggggaggctggaaacgcttgagtatttgactgacacccattaaatgcgccagatcattaatggatgggaagcgaatcgttgcctgcaaaaagcaataaactataatgatgattgtcataaatgcatcccacgcgcccgaagcacgtgcaaggtagtcaataagacagtcagaggcacctaagcaagcctcgtttacttcccaccaaacgagacttgggggtaaatgttgcccaaaatatgcggaccaatgcaactgcgacacgtggatctgaaaaatatgattctgggataaattaactaagtttttttggatcaagagtatcaacaagaaaatacctcccggagaagatatgagggctccacgtactcccagaggatagagctatggcaaagcacctccaggagataccagaccccatttgaacagtcacctcgcatttaatgccgcatgggagaagacgtattaattaagtctgacggcgtaacccctatgctgcagctattacgctatgattaatgagcctcgtgacggctactttagtgagggatcacatcagtcaagaagggataaaggattatatccacctaacccctaaggtacctagggtataggccatgcattttcccactttgtatctgctgggaatatgtacccctactgaaactacacagaaagacaagtagttcggttctaggaatcaccccaaataaacattataaataccccccaaacacactaagacagggtcgagaattctgggcttatgagattaaagagagaaaaactaccaagaacattctctgtaataatactctcaataaataaaaaagactcgtggactaaggcttattaatcgccccaaccacgtaaaaactctcatcgcacttaaacttc

SEQ ID NO: 360833 - DNA, 758 bp, Cannabis indica
aattaaatacaaacctagaaaatttgagaagtgagaacactaaaatctcgttcttctcccccttctcttctgcgattcaggggtcaatttcttctccctcatcgtattgtgggaacaaggggtgcgaactaggggatcatcgttcttcaccctcatcagcgtcgacctgcgaacatcccccatcgtcatcatcttcttcctcctcaccatcaacaacagccctatttcaccacatctcatcctctttttcttcctttttttctctgtatccaaattgtaaaaaattaaaaaaaaccccaaatctctcatcactcgagatctaccggcgagtgaccacaggatcgaagtaaaaacatgcggggttgaaagggttagcaagtatcgtgctgggaatgaggatcgacaagccgaagaggaccaccatattggaatgtgaatcgacagggttagaaattttttagagttagtatgtcatttgtgggttcttctcctttatctgaatgtgacctttgttaaaaaaatccctcaatgtttacaggtctgagcttgaatttgggcatttagatttgtggactttgttctattttcgggtttgagtttttaattctaggtttgtttacaagtctcacctttgttcttcacctgggttttagtttcagttgttgcatttgtattttgtttgtaatatatttttgatttaggatacctgtataaagtttatgttcttggaaagttttgggtttgttttagggtattaa

SEQ ID NO: 360834 - DNA, 710 bp, Cannabis indica
cctcgacgtcaggggcatgcctggagtgaataagataatcgcaggctgacactgtagactcactgtctcgaatatcaatggtcccaggttcaacgagctcctgcaccattttctcgatgtccgcagaagacatcggacctagctctatacctacagtaggtgtgatctcctcttctgagatcgaagtcgggataaagctatcttcctcctggtcctcgtcatcatggaatgcatggcctcccgagccgagcagctgactatccgacaggtcgctcatctgaaagatagaagatctcttcagcgtggtgaatgtgtgaaaacaaagtaagtgatctcactcgcataaactataaagtcgcaacctgcaaataagtcacgcatccaaggataagcgatatacctctagaaacggctgggagaaactcagtgactcaaggggcatgcgttctcaagcatgaccctgaagttactgaggtactcccaccgtttcgagaatatctacctgccaaagggtacgctcattagaacattaacgcatgtcgcaaatggttgggtgtatcacagtatctcaagagacatataaccgcatatatgaccattagaatactgtgacacatccaccatttgggagactcagttaatgttctcgcgactaaattcacagtatacaaaaatcctaaaagatctaggcgacgatcaaaagtaagtaa

SEQ ID NO: 360835 - DNA, 651 bp, Cannabis indica
tatctcatgagttaagaatatactgtgattacaaaattatactcgttcaattgaatctaatagccccctctattcctgagtgttgaggttggcttggaagatcgtggtgtgaaccctttagcaagttcttagattagatgttcgatagatattacgaaatgatagtgaggatccctgataggctacaagagatattgtctctctttctattcgtctagatttaatctatatatattatgttgagatccttgggcttatggttcatattagatttaaattatttttaatcgaatccgctttccgcttttttaactctgatattgttatacccgaaatttagctggtacttctagaaaaagacacgtgttaaattgaggaatatgaatcaacaaatataatgataattatattagaagatattaaaatagaataactcattaaatgcggagctgataaagtatatttataatttgctgactgtaaagtcttaagcgagataaggatgtacaaactattagttcacgtattgacgagaaaaccatttagtatatgaagacatgatcataaggacaactttagttatacaaagcgaggcaccaacatcgctacgtatgaagagatgtaaataagacatgttgactgttagaacac

SEQ ID NO: 360836 - DNA, 630 bp, Cannabis indica
aattcaaacctaaccctagtggaatgctataaatttccagaatctagagcaatctacaaccatattcttattgctctatgtggatgattcgctcatcatgagcaaagataaatcagtgatcaaaagtattaaagccaagctcaagagggaattcgagatgaaagagcttggaccagttcaaaagtaacttggtatcgaagtctcacggaactggaaggaagggactattagcttaaagcagtccgggtacatcaagaaaattattcagaagttcaacatggaagatgcaaagaatacattctttctgttaggaggtcagtttgttttatcaaaggaacaatgtcctaatggtacgaaagacaaagaagagatgaaggatgtaccttatgcaatggttctaggatgcttaatgtatgtgatggtgagcacgagaccagatatagctcacgctttgagcatcctaagaaaattcatgtccaatccaggcattgaaaattggaaggcccttaaatggttattgaaatatttgaagggcacttaggattatggtctaacctatgagaaagaaaaaagagaattagaattgaaagggttcatggatgtggactatgcctcgaatagagatagaga

SEQ ID NO: 360837 - DNA, 536 bp, Cannabis indica
ttttggtataacaattgccccttaaaaagttcttttttagaaaaaagagcattttaataattacagagggcatttgcgtcaaaatcccttcttagaagaaatgcgtcctttgattctggtggttgtacggtttagaggatcattatgagttttcccttcatattctgccctccaaccgttagatttccctagctttcttgtcactagactttgtgtataaaagggcggctcaagcttgtcattttttacaaacttctgtctttcttggagaaatccattttcagaatggatcatctctttcttgctggaatgtcccttctgagtttagaagttcactctcccaaactcataataccagaatgcaccaaccattttccattcgttcctaagaactctaagcctcaattggaaccggaaaggatggattccaaggccgaggagtttttgaccaatctaaactaggggaaccccgtagcttgctatgggagatcctcacaagggttgtttgaaggtgagtatcatctcttgtgaatggt

SEQ ID NO: 360838 - DNA, 611 bp, Cannabis indica
atatttaaacttcagttatgaataaagagaatcatttcttttatttaagtaattacaaagtcttactctttaaaattacttaaggggaatttgtgtatgattaatcgaaatccatctgggaatacatgatataatgcaaacccacaactctaattttttattaaagttcttagtcaaacctttctgacgagaaggggatcaaactatcataactttttgatttaaacctgtctgacaaaaaaggaaaatcaaaagttataaatgagatataactcataacttgcgtacaaatctgaatactaacagttcgcgaaagataggaaagtattaaaggagacattaaggtgtctcgataaaattacttaaacttaatgaatgaataggcaatgtaacaattcatataagcaatcaaaaatgtacaaagtgataaaatcattaaaagtatattcaagtttgcttaagacagattataactatcattatgagacacaattgataactgctcgttaatcaaaagtctagtagataataaactgtccgtaagcataatagatttgcaataccctaagattatgggaatggattagcaaaaccctaattagataattatg

SEQ ID NO: 360839 - DNA, 534 bp, Cannabis indica
cacacagatgctaagcccattaacaattgatcaccaacaacatgggctaacacagcaaagaactatccaatcaacccaagttttaataaaaccaataaaatttaatgtaagcccaaataaaagtctaacagtaagtgctcttaaattatatatgtataatagagatgcactcaaaccaatacaatttgctctacatatagagaatgaatagtgtattctttaaacttattttaataatatataaataatgttttatttatgtacatcgtatatatgttcaaaaattataattttaatagtgtaaaaaataaaaataatattaatttaatgatgtagagaaaaatataaagaaactgatataatgtaaaagtgtgctataaaataagaaatgaatttttgtgatgtatgttaaatgatagagtagagaatcttaacactcccaacaacttttctatttgggtaaatggcggcaaaacccccaatacttttgttttagtttcattaaacccccaaaacccaaatttctgcgggtaa

SEQ ID NO: 360840 - DNA, 573 bp, Cannabis indica
catatacccacacctaacatttcccactaactttcaagtttcaatatatattttgttttgagaaaaatacagtacaccattattgggggttggtagaaatataattcaatttaagtctttattattatttcatttttcttttcttttaaaaagattaagtagttttaattaaaaactaacaaaaattgtagtttagtgagctaaaagttatttttgttttatatatttatgagattaattataatttacagttttttttttacaaaattgtattttataggttgagtacttctaatttttttttttttttttttgcaatgagtaattttttttttaatcaaccgtactttttataaatcttttggtgtatttatgagagcattttcatatatttgatcggataagattattgtagggatattattttgttgagcattgctataaggtactagtggtgattagcattttttcgacatgttatgttgcgattggctagcgatactcttaaaaactattatattaaattatatgaggcccgatacttagttggactaataacgatactgacacata

SEQ ID NO: 360841 - DNA, 744 bp, Cannabis indica
ccaatgcttgagacttcagatattgaggttgagctactgtcttgttaacttttcaacgaagaggctacttcccagaagaagctcgtggtgactttagttacatggtatgttattgcatccaaaccagaacaatgaatggcacttgcagctccgtcaaaaatttctgctggttccgtttcggatttacttgagaagatgatattcttattctttttcattttcttctttcatttataattcttcatttttagccattattttcatgggattgggatccataacaaaattagtcgatttacaattctaataggaaagtacagattagatttatgggttaatcttagatttggttttttcttcttttgagccatacaaaatcccatgcgaaaattggtaagcggttacaacttttctcaagtgacgataataagtctctgaccaaaaaggtaaaaaaaaaaaatcatatacttgtaacaaatatccacttttcttaatgtaattggtactgcaaaattttaagatttcgagaacaaaaacaaatttagattaaattcaactctggaaattgagatggaaatttttaccacgggaatgggtaacggtggggacccactcttaatggaataagaatttcctatttttgtagttaatggggcggaggtagaagataattttaacacgtagggatagggcgggagcgacgggaataatactattcgtaccctatttgatcttaatataaat

SEQ ID NO: 360842 - DNA, 562 bp, Cannabis indica
aaacttagcgatctaagctccagtagtagtaggatagcaaatccttgaagagtgaaaggtaaaggtatggtttaatttcgttttaagctaaaaacgatttgttttatataggagtttcatgaattagaatagttatggaaattttgacttcgtagaattgttcttagtagtcttgggactagtcccaatgttttcttgctgaaactgagatgattttaggttagaaatcgagtttggaactttttaaagcttagtctgaacgttaatggcattttttattaagggcttgattttaatttctattacataaggatggtaatatttatggtatatatgtgccctatgaagtttggattgatttggataagtttttgtattgtttcgatgagtgcgatcatagtttttagaaattcctaggagatcagaaatcgtatttttttcataactttttactcgggtgtctgttttggatgttctatataccgtttcaaagcttgcaatgagctctacaatatgttgtatgttttagagcccaaatttaagttttattttagtatattta

SEQ ID NO: 360843 - DNA, 621 bp, Cannabis indica
gagtaaaatggtgcattggacagattttgctcagacacactaggttcaggaattttggatttcttaggcactgacgaaggagttgcatcagaggaaacatgtttcctttttgggtgagactttggcagagggggcggagacgagtcagactcagtgggaggcatgggggaagtggtggatgagggtggagccttagtcgaggcaaagggaatggacattgacctagtaaaccttctcggaagacttacagaggaagaaggcttacctgggattggtgtgcatggaggcgattctgacctagtgggggacgagtggggttgcaccggtggtgagagagacgacgagccatcgccagttaacgcagacgttttcacgagacgcccagcctttttgcccattgttgcacagccaagacaccccagaaacagtaaaatccacagagaagttgaactgagcttaagaagatgaatagtttgagttgacaagtttggtgaaagcaaatgatggtaaaaacagatatttattaccatttatggaaaaagaccaaaatgccctgatcattatatagaatgaagcccaagcccattaacaatagaaaaaaaacaacagcccaaactcgag

SEQ ID NO: 360844 - DNA, 640 bp, Cannabis indica
aaaagattagactttaaaaaataaaaagagaagagagagtggtgatcgtgggtagttgagaatatgtacactttgattttacttacccaaaatcagaaaaaaaaatggaaaaggaaagtaacttccttaccttagacaccacgtgtggagaggaaaagggaaaccaaaaagatttttcaaaaattggtcaaggtttccttaaatggaaaaaggaaacaacatatccccacaaaatctaagaattaaacaccctaccaaaaccgaaaatgccaccaaaaaggaaaccaaaaaataattaaataattaagaacaagtttcctaaagcaccacaagaataagaccaatctccaaaaataaaggaaacacgctagatagaaagcaattaaaacatgtttcaataaatgaaaaaataaaagaaaaaaaatattgctaaagaatcgaaaattatgcccccctttttctttaattttttcaaaaaatgccccccaaataatgtgcaaagaacgaacaagagagcacatagagacacataaagcaccaatcaacacttaagagcaaaaaatagtgcctaagaaaataatgaaacataacaagaaaaataacaagaatttttaagaaagctcaattgacagaatcggtc

SEQ ID NO: 360845 - DNA, 1841 bp, Cannabis indica
agggtgctagggaccagtgatgccctttagcatttctcaataattatataggatgtactctcacttagtataaaataattaattaggccgacattactttgttattactaattattaattactcttctttatatgcctccttccttctctatatgtcactatcttagtacacattattcaatgcttagagagatattaatagttaattaattaattgatttaatgaaatgtttcttcatcatgtgcttccctctctccttccttctatagtcaattaaaatgatatgttaaaaaaaaggcaaaaaatttactatctatatcatccttccaaatgtcatctcttttaataataacttagtttgctttcaaaaattaaaaaataaaataaaataataataacttagtttacttaagactacgcacaaatacaaaaataaatactttaaagaataatatcaaatttgcaactttaaatagccagttgaagtaataattagaatattgcactaatgttcaagtacttttcttcacaaaatttatttatgtataaatatctttttcgtctttaattaagtattataagtctatcattgctgcatcaataaatttttcatattaatttagttctttttttttaagtagacacactattacttaggtggcatttagtatttagaaacacttttatttttaaaatttttaattttaaaaatacaagtaaaattttatttttgaaaaacaaaaatatattttataattatttttatttttcaattttaaaaataaaaaataaaagtgtgttttataaattttacttatttgttttatttaagtcgggatcggggtccgagtctgggaccgaaacctagacttgttgggatttatgctcttaaagcaattaatagataatatgttacagaatatatgatacaattataagataataaatgaatacattaattacagaagtataattaataaatatccaaaaattcttattcatatggagaagtataatctcgtaaggatgtacaagagaattaaaattatacgatatgaataaaactagtcggtagtgtattaaagttttagaatctttaatatagaactgctaagtacgatttactctacactatactctagtgtttgtgattttgattcgaaataaatatgtaaagagacatgtggtaaaagtgatgtgtataatttgattatatggaccgatatgtaataacatcttttattaacatgttattactataaaagagttattcatatcacaacgatgatcattagtagatcagtctaaacattgagaatacatgaactcttatttgtgtttattgagttctttgattctctcgttaaagtttctcaaagaagataattcttacaacttctgttttttgagcttaataacatgagtggttgggaacatgttatacaataatagaatcaaagctttctaaacggatcaaatattaattatcttatagttttaattctcgagtgctaacagttagatcgaaatttataataatttatacattaactgttcacattgaattaatggtacataaggagtcataaaataattagatgggtaaaacaataatttgaccaactctaattatgaactaataattggagggcgaactacttatattaattatatcaatactagtaagaattttataaatataattctatattgtcaaagagtgtaattccatatttatagttgattaataatgaaattaataaattggattattctattgatgagatcgataataatcaagtattcattggagttttgaaatgtaggtctcatctataca

SEQ ID NO: 360846 - DNA, 612 bp, Cannabis indica
attagtatttgggcctattcaatttatatcattagttcattttaaggttaaattcctctcttttgggccttgtgtgagagttaggaggtcaatagcagtgggtacgacatactgaacccagccctccctcacatgaacaaccccaactgtgaaggcccattttcctgatttgaataactgtactaggttaattaaactagtttagcataataaaattgattagcaacataattaatttcgaaatatatgaaattaatttttcatttgaatattttgaaattaatttaagaaaaacacacttagtttaatgaaattaatttttcttgtatttaattaaatatagaattataactaattagattcttctgaagcttgattttttttttttaatattttattaagtattcctatttaagttgtaaattagttatttctaactaattttctttatcaacttaaatttgaatatttttaaaattcaaaattaagttgaggaagtccaggttgttagttattgagagattcttggaatattttttaagttgaaagtttgttaactttggatcaacttaaaatggcaatattttttaaattaagtggttagtaacttaa

SEQ ID NO: 360847 - DNA, 1801 bp, Cannabis indica
ttgagagccttcatgaaaaaaaatcttataaaaaaccctcctaatatataaaaaaaaactttctccatggctgacaacggagaaaacattgatactcctcatgaagaaaccactcaccgtcctggaaaagagccaatgggctcctgggggcctcccaactcacgatctacacggaccactaattccaagaggacccaacctgagggtggcccaagtacatggaccactcgttccaggaggacccaacctaagggtggcctgagtacatggaccactcgttccaggacgacccaacttgagggaggcccgagtacacggaccacacgttcaaggaggacccagaatccgagaacaaggtatgaagaacctgaaatgaacattggtagagcccaacccaggcaaactgatgaggatggtgcctatgatccaacaagatacgtgacaaccgtcaagttggaaaactgccaactcagatgtcgtttggaggaggaaaactgacgaaatgttgagttggaacatgaggcactcgcggtcagggcggcaaaggagaataacacacaaaatcaacctaatcctagagtgagaagaccacgaggcaaacctcgcggcttacgaaccaggaggcatgagacagctcaggaaaaccctcagaaggctcaggaagaacaacctagggaaactgagggtccccctaaaaatgaacaaccaaatgatcaacaagagcattctcacaaaaatgagaacaaaaggcgaccagaaaccagggaataggaaatccctcgtggaaacgagggaaattctgggactcaacctggaacacgagggtcaccaacgaggcacccccaacgttcttcccaaaccaataggaaaggggcacgtacaaaccccagtaggggccacacaatgaattacaaccaagggagaagagtgggacgtgaagaggcgagtgttacctcggggcgcgcaagaacccacagccgatcaacgtgaggaggagaaagtactcgtcgcaaaaaggatcaagaatgcacatgcatgaattaaactgcaagtcactcaaggacaaggtgcatgagtaggacgaggtccatgagtaggacaaagtccatgagcagaacgaggtctgctagtaattataaccaaccggatctgcaagaacacttgaaccagaaaaaacttgatcttcgccaacaactcagtccaaagtaaggggatctaatccaattgcgaatagatgagttggacgatacgttcagaaggtatcaagtcgaggtgcaaggaaaacaatctggatatgacttagatgaggaactcgagccataccatctagacatcatgaatactctttttccctagggattcaaaaatcgccatgtctcgtcatatgatgggaccactgatccggtcttgcatttgaataatttcaatactataatgcaagctagcaatgttacaaacaatctacgttgtatttgtttcccacctcactagttagagcagcaagaaacttgttcaataaatgtactcatcattccatcacttcttgggagcagctgtctaagaacttcaaatagcaattccaagccgtaagggataggcgacccgaagcgtcctcactcaccaacataaagcaacagcctgtcgagatgcttgaggcgtacttaattcgttttagcacggctgctgcgagagtacgaaatttggacgatagtacccagcttactgcccttcaggcaaggatcactactgatctctccagtgcacgaggtaaactgtgggacgacctacagggtcgtccagt

SEQ ID NO: 360848 - DNA, 1169 bp, Cannabis indica
agggacatgacaaagtttttgcgattccacgaaaattatggagggaattatgtacagaagagaattttcaatgccattgctcagatatgttactcaagaagaagttgcacgaatcctatttgaagtgcacgacggattttgtggaatcatgccgtcgggcaaagcttatctaagaaaattctaaggcaaggttatttttggccaacgatgattgaagattcaaaagcctatgttaagaaatgtgacaaatgccagagattttcaaagatacctcgagctccacctaacgagttgactcagatgcaaagtctgtggccctttaccatttggggaatcgacctgatcggacaattacccaagggcaagggaggagtgcaataagcagtggtagcagttgattactttactaagtggacaaaagtcgaaccactcgcaaccattacatcaaagaaagttcaagactttattgtgaagaacataatctgctggttcggactgccgtacaagatagtttcagacaatcgcaagcagttcgacagccaatccttcactgatgtggaatcaaccttgagtatctacagggagggtatagtccaagcaggatgccttgcaggcctacctggagcaaagcgatcagcaatccacgcagaaccatcaacacttagtgaattcagcttccgcatcgtgagtaatcaaagaaatgtggggcaattcagcgggataccaactgaggatcctcacctccatctccgttcattcttggaggtgagtgattctttcaagatccaaggagtgagtggagaggtgttaaggttgaagctattcccattctcactgcgagaccaagctagatcatggctcaacactttgcctcctgattctgtcaccaattggaatgatcttcctgagaagtttctgagaaaatactttcctcctactacaaatgcaaaattcagaagtgagataatatcttttcagcaacttgaagatgagtctacaagtgatgcatgggagaggtttaaggaacttttgcgaaagtgtccacattatggcattccacattgtatatagatggagactttttattatgtcttgaatgcagcttcttgaatggtgctagatgcatcggccaatggtctattttgtcgaagtcttacaacgaagcattt

SEQ ID NO: 360849 - DNA, 449 bp, Cannabis indica
taagtgaatcttcatgaacatcaatataattaccaattaatccaccaatattccgagcaagattttctgatttacttagaaaggtaatcggtaaacctgaatccaaaagggagtaatagtgaaagactctaaagaggcattttgtagaacacttggaaggcaaagaaccaagtgttggttctgaaaatgtcagggctctttggagaggaccctgagaagatcaccttggcatccaaacgtaaccatataaacatcataatcataagtagaagtttccactggaaatctacctgaccaattcctggtgacaaagttgaaaaattgcttcgggttatggccccttttggagaaaattttgcagaagactctgctactttgggttcgaggaagaggagcagagatgttggagaagttgatgttcggttttgtgccctaaataaaacccatta

SEQ ID NO: 360850 - DNA, 954 bp, Cannabis indica
tttcggcgatggtgactttttcgacgactgtgactttgtctgtaactttttagtgatttttcctgtgacaataacttttctggtgacttttccgatactagtgactttttaggagaaacttattattgttttacaaatatgaaattttcatcttttttttataaaaatatggcataaaaatttcatataaatataaaaaaaaaataaataaataaaataaaacacataactcatggtattatttatttatgccataaaaaaaataaccttttataattttcccatataatttctactatatatgtaattataaaagtggaaacaaaaatttgtttgatttatttattaaagcacaaactttttatttctattttttttttttggtacaaatattaaagcacaaatttttatggggttattcattcgcaattattattattttttcacaaatagtgtaagtaaaatttttttcattaatatagatataagtttttattttgcaaaactaaggtcgaaaccacgtgcgattccatcaaagaaagaacgaagaaaaaagtggtctaaaactttacatatgaaatcatctcctttagctttgacaagttttcaacaatcattgttgaaattactgacctttgtcttaagagaatgactgagaggaagaagaagaaaggttgcactcagattacgatttggcttgcgaatggggcataactgagattgctatatagtttaatggttattcagggtttgcaatttgggttgcaatttaggttggaactgagcatgattgagattgcaatatggtttaatggtgatttatggttgggatttgggttacaatttaggctgtgattgagcatgacagagaatgagatatggtttaatagtgatttagggtgtcaagtttgggtgcaatttagttgcaacagagcatgattgagattgcgatat

SEQ ID NO: 360851 - DNA, 655 bp, Cannabis indica
tctaccacattcttcttcattctgttccaccagaagtagggtttaaggtcttggtacatcttgctagtgccgggatgcaatgagtatggagtggtgtgagcttcttcgagaatttcgtttctaagttctgcactacttggaacacaaaccctggtcttaaacaacaacaacccattatctgacattgtaaaatctctagcttgacgagctgaaacctcctctctgatcttcaccaattttggatcagctaactgagcaactttagttcgttctaacagattagattgcagcgttaagttatgaagtttgccttcaacaaactcgatgcttgatctaaccatgtcctctgctaactgaggtgaaatcttaatcatacgagttacctgcccggaacccttcctgctcaaggcatcagccactacattggccttcccagaatggtaaaagatttcataatcataatctttaaccaactatgtattttggaatattttgtaaagagtttagaaacgggatcccgaattttgtaaataattatgtaaagtttataaagtttcataattaaaataaaagttttaatttgacacaattttcaagaaagttctttgattagcaaagatagaactgtaattgaaaaatcactgtagcgtgtctt

SEQ ID NO: 360852 - DNA, 505 bp, Cannabis indica
tctctcaacgtctgtaatactattgtcaagtgttcagcatgatcctcatgtgtctaagaatacaccaagatatcatcaatgaataccaccacgaacttatccaagaaaggtctaaagattctattcatgtgatccataaaatataatatgtgcattcgttaactcaaatggcatcaccaaaaactcaaagtgtccataacatgtcttgaatgcagtcttagggacatcttcttccctaatcctcaattgaaggtaccctaaacataagtctatctttgaaaagaactttgaaccactaagttgatcaaataattcatcaatcctcggtagaggatatttgtctttaattgtcatctgattcaagtttctatagtcgacacaaagtcataaagttccatcagctttcttcgcaaacaaaactggagctccccatggagaagtactttgtctgatgtaacccttatccattaactcccctaattgttttttcaatttagccaactct

SEQ ID NO: 360853 - DNA, 668 bp, Cannabis indica
ttgagaaataccttaagttttagctaaagggtaatttagtctttttttcaaagaatggattaggtggctgccctattatttgacacctagcactctaattaatttcagcaagggattagtttagtaatgcccttttcttttgaaacaaagtttagaaaattaaaagaaaaatcaaaatagaactctctctctctctctcttttctctttcggctggggcaaaaaacagggggaaatctcaccttcaagctggtatttcttgagaattaagcaaggttgttgtgaatcttaagcaaggtaaaaccctagaactcttgaatatgtgtttttaagctttttacttagtttgaacttgtgtttttgagtaataggggctgttagctttaattaagtttagggttcgaattttagggttcatttgagctggttttagtcccttgtagcaggttttgatgaatggtttaagttttatgcaactttgagctttaaactcaaagctttgatcattaatggcaacttgaatttcaatggttcgttctgtgattttctggctggaatgtattgtgtatacccttattaggtaccctggaaagtttggtagagtttggtatagttttgagttcatggggggcattttttgggttcccagcacagaaccggaattccggt

SEQ ID NO: 360854 - DNA, 818 bp, Cannabis indica
gtcagccagaaataaccttgccttagaattttcttagataaactctgcccgacggcatgatttccacagaatccatcgtgcacttcagatagaagtcgtgcagcttcttcttgagtaacacatctaagcaatggcatatagaatcctcttctatacataattccctctagtatgatatactgtgttgccttcctcctcatcttttaagcttcatttcgattatctaggagttccccagtgttgaggtaggctactatcggtgtcatccagtttggggaagtatcaattatttcgatctcttctgtgctagtaatgctaggctcttcgaggaactggataggaaccaagtttgctttatcatttacattgctgcttgccaatcgagctaatgcatccgtagtcgtgttttcttcgcttggaatttgtctgagaccgtagcttttgaattgtgcgaacaggtccttttgaattgtgcgaacaggtcatgtattttgctcagatatgctatcatcttttctcccagagcctggtattctccagatatgtaatttaccaccagctgtgagtcactgcagatttcaatgtgttcggctttcatctcccaagccaattttaggccagcgattaaagcttcatactcgacttcgtattggatgccttgaatccaaacttaaccgcagcgtgcaggtgttgccccctaggcgtgacaagggtgattcctgcaccaaatagcttatctatagtcgacccgtccacgtgtagtttccaaggcagctgtctgcactgttacttggctaaggtgtttgtaccagctcggg

SEQ ID NO: 360855 - DNA, 498 bp, Cannabis indica
tttttttttattaatttattctaaatattgtataataaacttggggtgtcatttttaattctactagtaatgttgtttagcctttaaaaactagataaattacatataacattctacaatataaaacaatttacaatactaaaaaaaatcgtgccaaacagttatattgatctcggacttgtccacataagctcacaaatgaaacctatttagttggattggaagaacttaaacttttagtaatatttggtgatttatccgctaaatttaaaagttttatttataaaaataagtttgtaaagctttaaaattataaaacaaaaagtttaactataaaacaattaaaaataacaactataaaacaaaaaataacaactaaaaataataacaacaactataaatcaatctcactacaattataaatcaactataaaacaatcaaaaaattaccaaaaaaaacaaactaagtaaaaataaactataaaataaccaaaaaag

SEQ ID NO: 360856 - DNA, 652 bp, Cannabis indica
atataggtagtgtacaaaatatataaattattaaaaatataaaatattttgatcaaagaaattaaatgagtttcatttttatttaaagtagaaataaaatagggcattgctgcagggatgacctgtagtgaatttatttgggtcaagatcgacccttaggctaaggcgggttaggcccgtgcctagagcccactcttattaggggtccaaatgaaaaaaaaaaaactataaatatacgtatattttttactaatttttaaaaatatcatttgttgttataaaaagggtctaaaaaaattatttttctagagctcaaattaactcagggtcgaccctgatttgggttataacttaactaaattattatatatttttttttttaaaaaaaaaccaactttaatttatgaagaatgttattgataagaaaaagataatattattattgtagttagatagtttattttggaataaataccattttgaatcttgcattttgtaaaaattattggacttgttaaatgacaaatttaacattgtattttctaaaataatataaaataatagttgatttttttttttcaaaaaaaaaaacataataatactcaatataaaagctttataagaagattgagtatattttttgtatttgttt

SEQ ID NO: 360857 - DNA, 502 bp, Cannabis indica
ttcgaaatcgactgagctattgggttcatagtggttcatcgtcgacaatggggttcatagctgtttgtgggtgacgaaaactgattgtgaaaatattttgctgttcgaggtctgtaattttgtaatgttgccttgcagatggttctttggttactgtaaagagactgaaaaaagagcgtacacctggtggagaattgcagtttcaaactgaacgatacgtgggttatgtgggttttgtatgacactaactaaatgattaaaattttatatattgtttgtgtaatttttctttaataaaatttatgctcaaatctattatactgtttaaaattttgtaatgttgttattgaatcattgatctcatttgggatattaatgtttgtatttgagatttatttgtaaagttctagtgtgtgtttaagtttaatcttttttatatattattttaattttttttgttataatatatttttttgattgaagtttattgttttattaaaaa

SEQ ID NO: 360858 - DNA, 145 bp, Cannabis indica
cacctagggttaggttagaattatttggcattaaaataataaaaataaatggtaaatatgcatataagtggccagccatgatatggattgggccccactttgcaattttgccattttgtcatttttccatctcatttcctcaaaa

SEQ ID NO: 360859 - DNA, 1299 bp, Cannabis indica
aaaactttatttataaaacctattattgtttgatctaaattgctatggtaaacttgttgacagatctaatgatctgattttaaccaataactaatagttcaattgttaataggtcaaataaataagttgtaacaggtaaattttgcaatctcatgataggatccatccaaatcaatgtgtgcctatgtgagtcctatatgtttgctttgggcatagatgcatataggaagcccattttacttttgtaattaaaatggactaagctgctaaaataaaatgatcactattgatagattttatttaggcccacttagtattgagcttattcaatgaataacagttgtttaattaaggttaaattcctctccttcgggccttgtgtgacagataaagggccattagtagtgggtacgacatactgaacccagccctccctcacatgaaacaaccccaattgtgaaggcctatttaccttatttgaataactgtagttggttaatcaaactagtttaacctaataaaattgattagcagcataactaatttcaaaatatatgaaattaatttttcatcagattattttgaaattaatttaagaaaaacacacttagtttaatgaaacaaattcaagataaactagatgtatttttctgtattacaattaaataaaagaagttataactaattaaattcttctagataattaattatttggattttcatagaaaatatatttaagttgaaattagtttttaaaactaactttggatcaacttaaattagaatattttgaaattaataattaagtagattttctaagaaattagtcattcagatattcttcaaaaatatttttaagttgaaaatttgttaattttagatcaacttaaatagcgatccttttttcaagtttaaggtgattagttcaagatacttaatttgatatttaattaaattttagaaaaattatttaagttgaaaattttgttattttagaacaacttaaattagattattttttttaggaaattattttattatattttaatataattttgaaattttataattatttataaatagattttcgaaatcaattttttttgaaaattaaattaaagttgaaaattaattttaattaattttggaccaacttaaattaagttatttttattaataaaatatatagattaaaataaatgattagttaaaactacattgtttaaataatgagctttaataaaaaaaagatattcaatctccattgttggtcttacaatggttaattgtttttaatat

SEQ ID NO: 360860 - DNA, 514 bp, Cannabis indica
atttatttttaaatttataatttactacattcttcttaattttctaattaatgtactaatgtgaatgtgtatttttttgcagacaaattttgtcgtcccatgagataatcttgcgttcgtagactatggtgagtacgagatgtcaaaggatttgcatgactggaggtttgattgtaattaagaaaatagatagaaaatattgaggagcttggacatgagaggacagacatgttacctcctgacgaagtaactcaggaggtgtggagtgattgcattgcttactagaacacagaaaaacaaaaggtacttaataaaatttttaattttagtaatactttatgttatatagtcaataataaataattaattgtaagaaaaaatattaatttcaagcaagagcaacaaaaaataaagaaagtcagggtaagatgaaacttcaaggaagctggggatccaagcctattgtttcacatgttgtctctagggtaacattatataatacattatcattgat

SEQ ID NO: 360861 - DNA, 711 bp, Cannabis indica
gagttgaaattctaatgattgaataatttagatttttcatggaaatataaagggatgtacaattcttgaagataatttttttttcttaaataccgatttgcttaagcatcattcattttattattaacttactcgaggacgagtaagagtcaagtgtgggggaatttgataagtcgatattttgcctataaatatagctaatttatgtattaatattcttaaattgattttttaaattattgattagtgttataatttattcagctattttgaagactaatcatgcatttggagtcatttggagggatattcgcatattttgaagactaagccggcgagctcagttttacaaggcagaacttaattacgaattttggtaatcctaaaagcggattggacttgcagctcaacatgaaagttttagatctcgttcttagattttcggaacatcttgaatcgtctaattccgagctgtattgaagatgttatcgccaaaatactaatcgggtacaaaacagaaattgtgttggccgctatagcgcccagttccagagctatatcgccggtctgaaacaaaaaacacacaaaagaaaaagatagtttcagcacatgggttattcaagaaatatctcatgggcactatagcgccaatttatcatttttttttaaaaaaaaatacctaattctaaggggattcatctatcttttcaa

SEQ ID NO: 360862 - DNA, 673 bp, Cannabis indica
attctcaaattcttacaatcaagcatggaagaatcatcctaatttgtcttgggtgggtcaaggagcaagctcaagtaccgcaccagcccaacaaagacaagcatatccatcgggtttttcacaacaaccgcgacatccacaacatgctcaaaattcccaaccaagttctttggagagtctaatgcgggattatatggccaaaagtgatgcggtgatataaagtcaagctgcttctcttcgaaacatagagttgcaacttggacattgggcaaatgaattaaaagctagggcgcaaggtttttgcctagtgacacggaaaatccaaggagggatggaaaggaacagtgcaaatccattcacttgaggagtggcaagcatctgaaaaattcctaagaggaaataaagggtagtggggagcccacttcaatccaaattgacgaaaaattgagtaaaataactgcgcaggaaattgttgataccaaaccagttgatacagcaacgggtcagcaacctgatagtcagcaatctgcaccagtatgttctagtcctaaaccaccccttccatttcctcaaagatttcagaaacagcagcaagatgggcaattcaagaagtttttagatgtgttgcagcagctccatatcaatatcccttggtggaagcattggagcaaat

SEQ ID NO: 360863 - DNA, 585 bp, Cannabis indica
attttaatataatattttaaataaaaagacaaagtaatcttttaatttaaaatatgttaaatatcaaaatgtctaatcttataattaaataatatataaatattaaagaagttaacaaatttttgaatctgaccataataggaaatatttaaaattgagaatattccaaattggaaatattaaaaattggaaatattaaaaattggaaatatttcaaattgaaaaaatataaaattggaaaaattgaattttgggaaacaatcccataaaaaaacattgaatttttggggaaaaaaccaaaaatcgcaattttgggtgctggctgccgaggaggctccacgtgcagcccaggaaggctgcacgcagcctcgggcgcgcgcggacacagggagctcagccaagaaacctcggcagatgcagggtgcaaggcgggcaggtgcaggggtgacacgggcatgatgcccagttcacgcgcgcgaatgaggagcttgtccgaagcacctgatgcgtgcgattgagcacccatgaacacccaaaatccaatttttccaaaaaatcataactttctcagtttttatcagaatc

SEQ ID NO: 360864 - DNA, 1009 bp, Cannabis indica
gttgtaaccaatgtagaataatatgctatgagttataattttgatgatattattaggaccttattatcatcatcatgtttgacccattcacaccaaatgtcaaccacttacatcaaacagtaaacacaattccaaaaacaattgaaaaataatataaaaaatgaaaaaattggccaattgccaagagggttttggctcgttctttcacaacgcaaagtcgcaaaacctaaggaaagaaaagcaaaaaaaaaaaaaaaaaatctaagaaagaaatgctgcttaagaaaatacaccgaagaataatacaacattacaaaaccaaaaaagtcaaaatatgatttagacgggaaacatatatgaatgaaattacacttacataaacattgcactaaacacaatccaatttaacaaaaaaaacattccacaaaaacaaaaacaacaaaaaaggaaaatggaaaagtgggtgatgttgttattaattttttttttcttattatattatttagtatttttgtgattgtgtataagtgcagtgtgagtgtttgggtaggcggaatgattaggaaaaaagaatattcaaaacaaagaaagagtcactttcaggttctgactcgaaggagggttagggtaggggaaatggaattgcaagtggggtcaacttgtctcggcacgcgtgcacgctgtgtggaccctactcgttgactcacatgttttattattgttttgattaatttcttggcctttgaaaagcatgacgcacagtcttctaaattcttatattttcctactgccgtccgctcttgtctactaaattctactgtggtctgatcattattataagggaatttagaaaatactatgcaaattggaggaaagtttattaaaatactaaaacataggaatttgtgtattaaatttatacaaatatttccttaaagtttcaaaattataaaactgtattttaaatttataaaaatcaagactatagatagagattggtttggtggtt

SEQ ID NO: 360865 - DNA, 966 bp, Cannabis indica
agttgttcccgggtgtaaagagtatggtgtggtatgagactcatcaagaatctcctgtctgatatttttgtcgaccgatacaccaatcatgctcttgtatcgtaataacccataagatgaaagtgaaaagtcttttgccgatccggtttctagcttctctttgtacccctgtagctcggaatcactttgttgggctgttctaattctttctaacaaattggactatagagtgacgttagaaagttttccgaccacaaactcaattctcgctctagtcatatcttcagccaactctactgaaatcttctttaattcataaacttgccctgggccttttcgacttagagcattcgctaccacatttgcttttccagggcggtagagaatctcacagtcataatctttgaccagttctaaccatcgctgctgcctcatatttaaattcttctgagtgaaaaagtatttgaggctcttgtgatcgatatagatcgctcacttttttccatatagataatgaaaccatactttcagtgcaaaaacgactgctgccagttcaatatcatgagtaggataccgctgctcatactctttcagttgcctggatgcataagcaatgacttttccagactacatgaggacacagcctaacccctgtttggatgcatcgcaataaatcacgaacttttcatcactgaccgataacgttagcacattagcagcagttcctggaaactattttcacacttatcagtccaaacaaacttgcagttctttcaagtcaattatgttaagggcatagagatcttagcaaacccctcaacaaaccttctataataccctgctaatcccaggaaacttctaacctcagttgttgacttaggtcgaggccagtcccgtactgcctcaatcttcaccgaatccaccaaatccatctttattcaccacatgccccaagaaactcacctg

SEQ ID NO: 360866 - DNA, 760 bp, Cannabis indica
tatagagcatttcaatagcaatgctattataatcaaatattactttaaattagcttacgcggcgagcaaaaatatttgttatgaggaagttaagaattaaaattatagtgttaaaatttaaataatatttattttaatttttgtaaaaagaaaaggcctcgttttaaatttcgccttaggcctcttaataccttgagacggccctggatgtatttttatactgtactcttgttattttattattaattttttattatttatatactattttttatgttattttattgttattttcttgttatttttatgtaattttcttgttgttttctttttattatagaatatcgtaaaatgtaagaaaaaaaattgaaggcaaaagtgtaaaatttttaccaaaaataacagcttatgtcattttcctttaaaaatttgtaaaaatacaatttggtatattttaaatttgaaataaaaaagatacctttttagtaatctataaagttggttggtattattaaattttctttcaaaagacataagactaaaaactaataggttgcctatttaatgtaggtcatgttttttttagtgaaggtaaaataatatttgttttccatatattaaaatgaacactttaataagtaaattataattagtaaaagtcttaagcacatacaattaccggtacggtctgaaaattaatttaaatttataaaaaaaaaaaaaaaataataagctctccattaaaaaacatacataaaaa

SEQ ID NO: 360867 - DNA, 1009 bp, Cannabis indica
gttaatgattatgagcctattttcgtaatagatttggcacagaaattataagaaatttgagaaagctaataagaatgaaaagaacaccaggtttttatgtggttttgcagttaactctgcatagtctacgagtctatcttatttagatatttctggatacagtattagggttttaccatcagtaaactcttttttctctcaacgatttttcgtcctcttttttgaataacctgtccctatttatagtaatataggttggtagttaattacattcaaattcgaatcccataacaatattcttcgaaggggctttaattacgctccacgtaaataaatgcagttaatatttgaaaatcacatagttgtgattaaaaccatttttaaggaggtcaacgctgacgtggattaggacacgttgctgaatgtatctcgctgaggcatctcgcctagtacatgaacaaccttgtttattcataagctttccagcaatggcatgagcatcaatatactgagcaaacttaagaactactctttgaccataagccttgcagactacacaatcatgtccttcaagttactacacttagttattataatgtgtattatcctctaagtgttctaataattgactcgcctcgtaaatgccttcttatacgtagcgagatggatgtctcgctatgcgttatctggcacctgtaggattttgccttccgagacaagatggtttctcgtcaatacagaaattgatagtttgtacatccttgtctcgcttaagactgtgcagtcggcgagttataaatatactctatttattctatatttaatgagttattccattttgcatttaataatacaattactattgaatttattgattcatattccacgagattgacgcgtgtcatcttttcaagtacaaccgaattttgggtataacatacctgatttagattgatcaagaactccagatctattttagaaagatctacattttatgaatttaaaaatt

SEQ ID NO: 360868 - DNA, 399 bp, Cannabis indica
agcaattgttctttgagcacatgcgtggataagatcttttgctttaagaatactacgccaaatgaactagaattgtctcccaatccagcagaaaatagattaccagtagcataatatttagccttataaagcctactaaccaaagaatcagcattaaccaacaaacgccaatattgcttccccaaaagagccaaattaaaatctctcaagcttcgaaatcccaatccccctgcatgtttatgacgacacaaccactcttagctcatccaattaatacccttaccactacttgaatctgagcgccaccagaacttggccataagccgctctaactccttgcaagtgtctgacggcaagaggaaaacattcatagcataactcggcaagacttgagctata

SEQ ID NO: 360869 - DNA, 502 bp, Cannabis indica
tttctttttcaatctattttttttttcaaagcactatgtttcttttgaaaaattttcaaattaccaaaataatttgttttgtacaaattttgcatggtgaaacatttaggtcgaatatgccccttaataccacaaaaatgacagattggaacaaactttcttacctgagatcttgtcctttttgaacttactggagactttgcttctgcaaatgacatttttgtagcagcagatcttaaatttgaagcaacaggtaaattcgctggaacactagattttacaaatttcatttttctaaaactttcagtaccatttgatccaagactagcaaagcctctttgacctgcattccgaacttccttaaaaataaaaaatccagggttaagcatttgactatttttcttaaaatttttaagttccttctttaatagaataatttcctcatcttttaaaaaaaaactagtctcatattctttaattttcaattcaagagattcagttt

SEQ ID NO: 360870 - DNA, 609 bp, Cannabis indica
agtagcagttttttttgagtgtgtcgtcttcttaaatattgatgttggtaataacgttgtgaataagtatgcatgattgacatttgattgaatatgttggacaccaatagagccattttcttgaagatcatgtagtaagaaaaacttgatgaaaatgcctttagttctatctcctttattatagtgttagttgatcaatacatttcacgttgtcttcatagagaactgctaatgttgatactgtttttatagtgtaatctatttgtttcccaaatatgttatgtcaatgatctcactcctacatattttctaattgcttcataaagtacaagtatgctagcatgatttaaatttgcctcgttaaaaccttgttaggaaaactcagtgggacaaaacctaaataagctaagggaaaaaagagtgcaatatatattcataattatttgaaagttgcgtcgttaaaaaccttgttaggaaaatccagaggataaaacctgaggtaaggaaaaaagagtgcaacctgaatatatctctctctcatgcacatgtgattcataattattttggtgataatatatcttataagattattgttatcacttttaaaat

SEQ ID NO: 360871 - DNA, 786 bp, Cannabis indica
ttttaaggggcaattgttatactcgaaatttggctggaggacatgtgtcaagataaagggaatgtgaatcgatgcaatttctttttatggaataactaattaattacataagtatcagagtatatttgtaacctgctgactgtaaggtcttaggcgaggaatcaatgtacaaactgacacttagtacattagcgagaaatcatatgtcactgaatgcgaatagcgagacatcaaggacagaacacattggaaggcaaaagcgacatatatcaattgtgaaagcgttagagtacaaactaagtgtaaaagtcagatcggctcaagaacaagtaagagaggtgaccgtctcgttatgggaagacttcatccgttagcgtcagcgaggcttacttcctagcgagcccaaatggagaattcaaatgagcctcgaggaattctttgacgataagaactgggatcaacacaagacattttcgacctcagaaggaagaagggtcccagctccccatttagatcattggaaccaagtttatgtcgagacgtcaccacatgcaacaactaaagacgtgtttaatacacgattgtcttgatccagtaaaaccgggaaaatcacagctatatgattttcaaatcctaaaccacatttacactacgtgatatgtaatcaaatcccccaattttagggatgattgttgtgaacatattccggtcaactttgtaattaactgtccactatgtaattatcaatagtgacaaacaatatcaaaaaaggggacgaaaaaactc

SEQ ID NO: 360872 - DNA, 1097 bp, Cannabis indica
atacaaactaataacaattatttaaaatcgttctttagggttttgaaggatttgttatttactttaagtgttcaaattattattttattataaaaccgtacttggctgagttttaaatatatatatgtcacatcatatgtactgtaggagtttttattaacaaaagacaaaaattaaacaaaggtaatttaagttttattgatattaacccagtcaaaatgtatatttaaattaaaacattattttctttcatattgacttcaaaggtttgtgttataataatatccctaaatttgtattttttatgtttttaaagaaggtagtacatcctacagatgtcaactgattatttgaaattagtattccaatacaaactaataacaattatttttctcacaaattgtactaatttcttacacgtacccattattaactgagctggttcgtagtactcacaaattgagttttgattattagtaaacatcataatttaatttcttattcatttggccacacatgtttatttggacataatatgggcatatttgttgctacatgtgacaattttagggatgggacaacatttcacttatttaaatatttgatttttctaaccaaactcaaccaaaccataacaaaaccggttattaggttggttcaaattacgtctttcaagaaaaatttattagttggttgggtatgttgaacttacggttttcaatgcattgacaaaatcagatttatattggtgttatatcaccccatctttagccgtaccagtttgtattaattattatttcttaatttttgaaaagactacacaacacaatcacatccacaagtactatatatagccaagtagatagtacaacctactgatttgaccgtatatggattgatggaaaaatattactaaaatatttattattttaaaatacaaaaaaaatcctcctcatttatttaaaatcgttctttagggttttgaaggatttgttatttactttaagtgttcaaattattattttattataaaaccgtacttggctgagttttaaatatatatatgtcacatcatacgtactgtaggagtttttatt

SEQ ID NO: 360873 - DNA, 460 bp, Cannabis indica
attattaaaaattatagaaaaattctacgatgcagtctctttaaatggatgtattgatatactcttatctattttagtatccgaaataaatttttaattaaattttttctcatgatcatgtaagttatagttatttaagacatcctgcaaaatttaaagaaatttggaaaaatttaacacgttgaaaatagggttcaaaaagtgtattgtaagcgtgactattttattttatacacgtgtgaaatatattgtttgaacactactttctacattataaattatttcaaatttctcaaaattttgtaagatatctaaaataactgtaacataaacaaatatgaaaaaaaaaaatttttagtctatttttttcatattcatgtacgttataactatttatgatatcttataaaattttgagaaattcgaaataatttacaatatagaaaataatatttaaaca

SEQ ID NO: 360874 - DNA, 919 bp, Cannabis indica
tattttgtatcttgttaccaatcgaattctctgttattgataatactagtaaatagttacgtgctaggcacgtatagtaaattttatgctcgatattttctattttatttgaaagtgataaaattaataattaaagaaaaaaaaatttctaaaaaataataattgaagaaaaaatattattaattattaggtgagattataatataatatatgatacacagatacattctaaatcgagaaatctttcctcatgtctctttacttttgaattgtgaatccaaatagtgacaaacaataagtaccgtatattataaactggtaacaataagtacagttacaaaccttgcattttcttaaataaaataaaataactgaagaccatccatcacttctgattttgatagaaaacaaccagagtaaaataattatatcttaaagagtaatcatagagatataaaaagccacgtaaatatcatttttatttaagttttagtggtttttttttatatagattttggtaactaattttaaattatcattcgaacgatttgttttataaaactaaatttggtgagtgtaccattgttgtgtatataaacttatatgcacattgttattaataataaatagtaaattaattttaatatattcatactcatgtagtaattgtctttaatgtgatgaaataatttataataagttatgacaacatatgactttaatatttattttttgtttcgggaaagttaaaagcattaatatgtgttttgtaaaatttaaaagaaatacaatgtagcgaaaatgaatgaaaaagtgtcatcttgaaattgaagaatataattattaattaaagtgttaatatagaaaaccctatgaaaaataaaactaagcataactaaacgttatcttaatcttccat

SEQ ID NO: 360875 - DNA, 620 bp, Cannabis indica
tagcgaggcatcgtgctcggcctgtcttctagagcagatgttccaagtggactccacatgtcaccattcttgtgatgccacgtcagagtgcaaaaataaggataacaagctccgagttccaccctggcgtcatcagcatccttcctggcgaagtccacctccgccctcatggtgttggacagtgccgagatcttggaagcagtagacttagctcgggagtatgtgtaagccaacttcagaccagcctgcgcagagaaaaaactttaaaatccgagccaaataaagaggattaaaggaaactgtaaagaaagacttacccttgtgaattccttcaagactcctcccagtttctcactaacctctggaaccaactggttcatgtagtgggcgagcatctccttgcctttcttggcctctggaagcactggcaaaggtggagtaggggcccgcattttcttgggaccactcttggccagctcggatccaccttttggttgctcaggcctgtccgaacttcttccttgagaatccttggacttatcaacttttggagtggaggggttcgcaacagttagctcctccgaaaggtcgataacctccccggcaggtgccttttcctt

SEQ ID NO: 360876 - DNA, 979 bp, Cannabis indica
gaagcaattcatacagattggggcaacataattcagagtattttgaagacctgctgcaattttcattcctctgagtttattttttatcctagaacttgtaataaggtagccaatagtttagctaattgggctagagtaaacaaagagtctaagttgtggactgttattcccctgtgtgctactgctagttatttagctgatatgcctaagggctgttagtagtattaatttgtattcaaaaaaaaaaaaaaaaagtgttatgtcatatgttacgtaagatgtacagtaatgacaaatagatagtatttataaatgtagaacattaatatgagagcatttttaatttcaaagtattttttttataatgtaatccattataattttctcaataaaccaattgtatatagtttttttaattatttttttaaaaaaaagtgtaaaatacctattgtgaatatttttatttttttttaattttgagaattacttttttttatatatagatttcaatcacataaatcgtacatccatttgccaaaatcctataaatccagcaacaatatgagacaaaacaattattaaatatcaatgccaaataaactcaatatttgaaaaactattccttttcattttccaaaatgagtactgaaacatgatattataatcgtctgttcaatagcaaaacagaaaaattcaagaagaggaagacaagggcgaaacataaaactacttaatgctaatgtgttctttaattttacaacgggaagaagataacaactattgacaaacatgagaaatatagcaaatggtagtaagtattccattcggggaagctccctcaaccaattcctactcatttttattgccaatttttccaccactttcttttctttttaaactcgtctgagggagtatctggagacaatcaaagcacagaaattcgctaacaagtcaatattcaagtaaagtatatccatac

SEQ ID NO: 360877 - DNA, 560 bp, Cannabis indica
agacttgagcgaccatagcaacaatatgtgttagtcgatttgctaactgttttacaaaataaattttaacactatattgatagcaaagttaggtaactaaaattattttttaaaaataaatacctatataaaaaaattaaactaattttttaaataataataatttaaattaaaaattaataatttttttaaaaattattaatatattatttattttttaaaataaatatataattaaatattattctaatgcataaaattttaattgtatacagacagtcttaccgtaagagtatacaccttatattataataaccacacgatctaaaatcaatggttaaagagaattttttctaggtcctaccatagtcttgccctaaaattatatttgtaaaattgtaatttataaaattatatgtttcaataaattaataatatattagtactacttatggcgcttttaatatatttttgaaacatatatttatattactagcaaaaattacgtgcgaggcacgtatactaaattttatgctagtttttttctatgttatttgaaa

SEQ ID NO: 360878 - DNA, 510 bp, Cannabis indica
tacaaatgaaaaaaaaaaaaaaaaaaaaattgtgtacaaataagaaaaagtttattaacccgtatagatggtagcattaaagagagcattaaattaaaaatacatttaatcttgtatagaaaaagaagttgtgtaagataaaattattcttaaaaattataaaagagttgtaagtttttatgttgaaggagaatcctcttgtggatgtaattggctcagtttgattaatagatattatctttcttgataaaaaaaaattaataaagtaaatcaatttaaaacaattatggtagaactatgtatgtaaacaaattgatggcaaaaatacttaagtaatcaatttcgttatagttaactattagtataaaaaaaataggcatataccattttttaacattttttttatttttaaggtttggattgcgctttaagttgctatgtgaattttcgtaaaaatgcaaaaaaaaaaaaaaatactttgaaatgtaaaaataaaaaaacttttaaaaa

SEQ ID NO: 360879 - DNA, 493 bp, Cannabis indica
cctctatttttttataggaataattacataagacactattttttgtaaaatatttacatttttacgttcaaagaatgttttttttttacatttttacggttttccaaaaaataacacgaaaacaatataaaatcaacaagaaaacaacataaaagtaacatgaaaataatatcaaaaaaacaacaaaaaataacatacatataacaaaaaattaacaacaaatgaacaaaatttcaacataaaaagaccgcattttatgtaaataaaatcaaaaaaaatcgtaaaaatatttaaaattctgtgaaaccgtatttttgtttattttgtgcatttgtgaaatcaatccctttttttatatacatatataaaatataagttaagatattataatataaattataacaaaagagattaattaaataaattaacacatatacacaatatatatttactgtatatatatatgggtatgctcttaatgggtattacccat

SEQ ID NO: 360880 - DNA, 478 bp, Cannabis indica
aaaaatattactaattaattgtaaagtgttacttttaaataatattaagtattattaatatctaataacaatactttataatttagacgcaaaaattctaattagaatttattttattatataatataataataatagtttttgtttccctatttgagaagtgaattaagaaacgagaaacgaggtttgaaaacgcgtggttttggtttttgatacgagttaagttacaaatggtttgtaatttgtgttttgatgtgagaaagaacacaattactcaaatttattattggtgcttaaacacttttttctaaagtatattactatttatatgattaaatattagattttatataattttaaaaaataatttttaaccaataatgttaattaattataaaaatgccacttattaaaaatagagtttttattatttaaattcttaattattattttatttgtacttaattgtctaagttta

SEQ ID NO: 360881 - DNA, 693 bp, Cannabis indica
ctcctaatctttctctcttgaatttgttgaaaattatgaaaagaaagtggttgcatgcttaattttagtgtgtagttcctgctgtgtttagatgttattttctaaagtttaatcatgttaatttgagtagattagagctagttatgatgcatgttagttgctttgattcaagcttggaaatttttactcaaaactatagctttcaaaaaaaaatgaagagtcttgttgctgtgattgttgttgttgtataaatgtgttttctagtgttttattatgttgaaataggttgagacatgcatgattgagtggctgttaggagggttagtcaagttttgagtttttgaactcaatcttgaacctccaatggtgaaatgagtttctgtgattgaagcttggttcttttgctttggatttgttcttaggggtatgtagaacaggtctggaagttttggtgtgaattgggattgatttgaatgagttatgaaattttgcatgtatcctgtgaggaaccagaattccggttgtgcaactagaattcccgatggggttcaggaattcccagaaccggaattccggttgcggaaccggtgtaccggttgggggattttcaggaaccctagattttctcgtttttatgttgtttagggtattgccatgctttttatcgatagggaaacttttagtttctagttt

SEQ ID NO: 360882 - DNA, 535 bp, Cannabis indica
ggaaacagtctcagacggatggcatcatcactaactccattgactttgaaagtctcacatagttccatgaagtttgataaatgcaggttgggatcttcagaagggagtccaccaaaatggactgaagactgcaccatttgaagtatgacaggcttgatttcgaagtttttagtatccactgctggtgcctgatgcatgactgaacccccgtaagagttgggaggatataatctctcaagctacggtcattagcttgatcttcaacggcacctccgttattactgttgtttcctccattatgtgcaacattggcgttgtcagccatgatttttggtgtttcagcaggtgctgaaactctctcttgccttttgttccttctgtttctcctacaagtcttctctatttcagggtcaacgagcaatatgactccttgcccttgacggcgcatacactcaaaatacctgaaatagataaaagcagtattacaagaaacagaatagaaatttagcaagagaaataaaccaaagtagaagtt

SEQ ID NO: 360883 - DNA, 872 bp, Cannabis indica
ttaggtcttttatcatttggcttatagtgagttggagaagctgccattacttagtttaattaggaaaacaaaattatgataattaacttaaggaaagaaaggaaagaggtgtgaatagagaactttgtagctccaatctctctctctttttcatgcaacccaaagaccagcaaaggaagggattttgttgctgaaattgtagtgctataacctgtttaaggagattcaatctaaggtaataactcctagcctttcctatttgattttagtaagcaaaagttaggtttaaagcttgattttgggaatttttgggctgtgaatataattgccattctaattagagttctgaagcttattggtaatagattaagttgttagcagctatctttgtgggttgttttaaggttttggcaaggattggatttgataactcaaacctagctctctaatggtgtttttgaaattggtatgaattattgagttttgttggttgggttgagtttatttgggtatatgcaggtactctagcgaaaattatgagatttgggattgaattgaggtgtgggagacggatttttggttcccagtctagaaccggaattccggttcctgggagcccgtggcaaccggtcgaccggttggtcccaggaaccggactttcggttgggaaccggtctgccggttggagctttttcccaaaccttagtttttcccgtatttgcgttatttagggtattagcatcctatttatcgatagggtaattcttagttttgattttaaattcccgataagtattttagagtgtctctcattgtaacaccctaactaaaataggcgtattacgtgagttttaaacatgctgtgcagctcg

SEQ ID NO: 360884 - DNA, 659 bp, Cannabis indica
tgaaaaaagatgtggtagattacgtgtccaagtgcttaacctgtcaagaagtcaaagtcgagcatcaaaggccgacagggttattggaaccattagcccttcctgggtggaagtgggaggacattgcaatggatttcgtggttggtttgcccagaaccacacgaatgtatgattcagtatgggtcataacggacagtttcagaaaatcagctcactttctgtcagtgaaagttacttatgcagttgatcaatatgttgaactgtatgtaaaggagatagttcatcttcatggagctcctaaatccattgtttcagacagggatccaaatttacatcaaaattttgggtgagtcttcagagggctatgggtacaaagctgaagtttagtacaactttccaccctcagactgatgggcaatcagaaagaacaattcaaatacaggaagattttctgcgagcctatgtcatggactttgagggttcatggagtaagtacttgcctctaattgaattctcctccaacaatagctacaagagtacaatagggatggctgcctatgagatgttgtatggtaggaaatgtcgctcccctattcattgggatgaaactggagaaaggaagtacttaggtccggaattagttcagaggaccaatgaag

SEQ ID NO: 360885 - DNA, 575 bp, Cannabis indica
agctatcctggttcgagaagattgcactacagagtgtggtttgttgctttgttaatcatgtttgactctgttcaccatgtcaaaaaaaaaaaaactaaaagtaagtgactcaaaggaagtacaaagttcaacaatttcaacaagaaagcaatccacatccctcacacccccactctggttattaatcaaattaattgtgtttaccgagatttttaaaaactaattaaaataaagctgaagaaataataaatgtggtaagtaaaatagacagagagttttacgtggttcagacgttaatgagccttagtctatgagtcagtaaggcttgtgtaatattttacagtggtgtttacaagaaaacccttactctactctttttgtttctcattattttaaaagggtaaattgcggcataaatacataatgtttcagattttatacacttaaatacttaatgtttatttttggaggcaaaaatacctaatgttacaattctcttacaccgttactactatttctgttaactcataaatatagacacgtggagggttcagatgcattacatttatttttat

SEQ ID NO: 360886 - DNA, 684 bp, Cannabis indica
agcagcttactcagacaaattgtccagggccaaaacgatattctgacgcatgcgctcgggacactagagcatccttgacgtgtcagggatgctggctatgctagtacttaaatgttgtttctttagttatacaaataaatcgtagataatttgcagtttatgatttgcaagttcctggccagggcatctaaactgttcgataggaagaaaagggaagtgtctaatgttgtggctcggcaacagaaggagattgaaaaatgaaaagccgaactccaatcccttaaatagaagaaaaacactgccgaacaagaggaagaaggagaggtggctagtgaggcgtatgttccacaaccatacgctcgtgaggatgagggtccaccacaaacctatgttaaggagtttgttttccacagcgagccaactctcctgtatttcgatgaccattcggcccatgatcagcaaatatatctctgccctaacaacatcgacaacattgtggcccaagcgtatctgtacgagcatgttggtaaaatcattgttcactgcacggactacgatgattcacatacccaggttctgattttggaaatgctgcaagaggatgttgaaatcccaatctcaattgaagggtgcagatttgttagggacgtaccaaacatgtccttccttggcctaaacacttaa

SEQ ID NO: 360887 - DNA, 528 bp, Cannabis indica
cactacattcctcgaatctccattaaaggccaagccttggcagacttcatcaccgaatgcaatgaagccgaggcaactgcgaatgcgccaacaccgttgatccccacatggagagtgtttgtggacggagcctctaatgaaaatggatccggagcgggggtggcaatgatatccccgaccggactttgactccgggcagccctacgggtcgacttctcagcttcaaacaacgaggccgaatatgaggccttgatagcagggctgaggctagcgaaggccgtaggggccagaagagtcgaagtctacagtgactcccagctggtcgtaaatcagatatcgggagagtaccaaatgcgtggcgagcgaatggccgcgtatgtaactatagtccgagagctgctccacgagttcacagactacaaagtagaaagaatccccgggaaaagaacgctcacgcggactgtctggctaagttagcttcagatagtgaaatcgaagggctgggggtagtaccagtggaacgcttgg

SEQ ID NO: 360888 - DNA, 709 bp, Cannabis indica
tatggttaaggactcacttgttatgtgtgggcatgcactcaatcacttagacttgaatttggtttgtgcagatggctatatgatttcgaaattagaagaagaaggaagaagatgaattctcataaaactagttgccaaagagagaaaactaggtttttagctttagaagcattagttggataatgagaccataactttccttttacactaatttcacctagggtaagaattgatttatttggaataaaaaattgatacaaatagagcaaaaaatagcacctagtggccggccatgtaatggggcctatactagttagatttttgctatttttctcaactactttatctatttttcacaaatatcactttttgcactttcaacgctataaatgtcaaaatcatttatttaataattaaaataattatcaaataaaattttcatttataatatttattaattagactccataaagtctcttaattaataaataaactctaaaatcatatttatttacaatcaagccatatcttagggtctatttggaaacaactgtgtaattactatgcagtataattactaattactagagtagtaattacactgtatagtaattacattgtattttaaaatacaaggtgtgtttggatgtcaagtggtaattacatgtgaattcctcatattatgtttggcatgatagttagtaattac

SEQ ID NO: 360889 - DNA, 525 bp, Cannabis indica
gtgcgaattggtttgaaaaaatgtcaaaaccgcactactcacaccgcgaacacccataatcaccaccaactagccataattcctaagactattgtttccaaatggactcttatcgagcttcaatctcctctatctcaagcataaccataacttccattccaacattctctttagtcgaagatttgttttggatttccaccacatattcaattttatcttaaagaatttgaaatattcgacattccaccgcttcaaggcctttgtagtgaatttaagtttttgcgacaaaataatattgtgatacccatagaccaccttactgttgtgaatattttacccggatctagatttactaacaagtatgttgaattaacatcctaaatatgaattctctaaaacaatgaaataaacacataagggtttaagaaaaccttacattggttgcaacagtatataatgactcctttcgttcaagatctctagcccttgatacctttctgtaccagagcattatcaagatctgaa

SEQ ID NO: 360890 - DNA, 619 bp, Cannabis indica
tatgtaaattaggttttcaaattttcatatttaatgtttttatttattttaggagttttattgtcactggattagaaaagtcgcggggtttgttgtcggcgtcgaaaaaatcagtggagtagctattggtgtcgaaaaaatcgtcggagttgctgccgacgctggaaaattcgtcggaattggcattgtcgtcgaagttgatgaagaaaccagtttcttgattaagaaaccactttcttggtaatttttccggtgacaatgtcaattctgacgacttttctgacactggcagctactccggcgacttttccagcaccgacaacaaactttggaaaattcatcggaattggcatagtcaccgaaaaaattaccaagaaactggtaacttcatcgagaaactttcttgatgaggaaaccagaccagtttcttggtaatttttccggtgatttttccgacgacaatgtcaattctgacgacttttatggtgtcggaaacgactccaatgaatttttcgacatcagcagctaagggttaacatttctagcgggttcgacccgaactcgaaccggtgaaaccccccaaaaatttttttttgaaaaaatattcgggcgggttggg

SEQ ID NO: 360891 - DNA, 610 bp, Cannabis indica
agtggcggactcatgatttaaagagaggggtgtaatttttattttttgtaagataagatcgggcaaaagtaaacttaaaaaggaaaaatatttttaatagaaattgaaccattaacctctactctatatgcaatctaacttaactattacactaaagttaatattatgtctataaatattattttttattaaaaatatatgccgtaactaactaaactgcatacacaacttttattgtgactaaaagtaaaaaaatttgtagtgagtaatggaaatgaatggaaactaatgtatggtatttaatcggtaaaaacaatatatgatatttaagtgtataaaatcgaaaatatatggtatttatgctgcaaatttccctatctacttatgatctgttaaagtactaaaataattttaacatgtcagttgttagtcatgtcaatccaaacactacctgaactcatttaaagcaaatctaaatccattaatattcgtctagatttcgaattttatcgtatccaaatcgttttgccgaacttaatgatcagttgtaatatccatattaaaatagtatttaatttttttttctctccttgggatattaattgtgtga

SEQ ID NO: 360892 - DNA, 916 bp, Cannabis indica
tgctgtgtgttttaggtctcaaaattgcttcccctaatttccaatcacagtttttttatttatatctcatttttagggttccacagacgaaaatacccctgatcgtacggacactcgctgcggccacaagtggtctcgccgcagccagatgagcttctaaaaaccacgtttctgttctgactttatggccacggccatggtgatctcgccgcggccactggacccaatttttcttctttgacctctttcagtaaaatgggcataactttctcatacaaactccaaatgagctgattcaagatgcattggaaagataaaaaaagatttaaaacttttatgttttgacttcttccaaaatatgatcagaacatagtcgaatttaggctttaagtttcagctttattttctttcaacatttactctattttatagatcactgttttctgaattttgtccaatttatacattccaagtgtccaaacctgaaaacaaagaaaacaagcataattctattccaaaactaataataaagaagaaaaacaactataaaatatgacctgaaacttaggctaaaaataacctaacaaataaccccaaactaaatctttactcgccctcgagtaaagctaaaactcaaactgaaattaaacaatgtaatagataactaaaccttccaatgattgaactaccactaccacctacacaacttcaagcaaattagtaacaagaatttcaactcaaaactctaagaactaacttggatgcacaatttagaagtaagcaattcatacagacacaaaacacatcttttgacattcatatcacaaccattctacactctccagcattctgctgacccatgtttaataagcttgaacgacatacctctctccactaatgttgacaattcttgctc

SEQ ID NO: 360893 - DNA, 503 bp, Cannabis indica
ttagagtgcgaaaattgggataataattttaatatgtgtatataattttattagtatactacatatatttaattattatttttattattttgattgtatggttatttattttaaataatatttaattagtttttattttattatatacaatggtagtatataattttgttgtcatggtatatatattttaattgtagtatataacttagttagtatagtatagggaagttctaatgtagggccactacattcttcctcatgctatgaggaacttatttagaccaattaaaagtaaaaaaattaaaatgcacataaattattttgtatctataatagttgattcttttatgaaaaatgggagtgggaagttggtggtccaacactaaccgtgaacacaaggcccgagtgtgactgtatcatttaactgtgtagtatatatattttaataaaaataaataaatataataaattattaaatacatataagggataatttcacaaat

SEQ ID NO: 360894 - DNA, 633 bp, Cannabis indica
tatctgataatgcatatattgtaatttacttattcttaaccaaaactcacataactaaatttgagtgtgtctatatataagttgaattcgtaaatttgatataaaggttttttatttccaaactttactaaaaatatggcgtgtacgaattcaatttacaatataaaataaatgatacaataaagttaaaaatatagttaaaaacatttataatattttaaattttaatttctttatataaaatattcacataatttttcattttttttaattttaaagttagactaataaatttaaaaataagattaaaaatatcaataatattttaagtattttaaattaaattaaaaatttatttatataaaatatctatataatttttatttttaaatatatattgtaatattataaaattaattagaatattctgttaagtaataggatattctgttaaagttaatatgaaaagaaaaagtatcgttaaaccaaaaattctgttacatagccacactttatatagaatagatataattatttttatatacaaatgtatacttttttaataggagacttaaaaaatagggataagttgaaaaatacctcttttttatatctattaattaataaaaaata

SEQ ID NO: 360895 - DNA, 660 bp, Cannabis indica
cgtctggcggggggaccaaacagaagacatagaaatcactggcataggaaacaaacaagagacaaaatttgcgtaacaaatagaaatataatcaatataatgcttaattttacatatataattattagtatgaatcttatcgtttcgggttttccatatcgtgtccactacaattgaagcatacaaaaacaactcttgaacctccactcgtttttctttcaagctccatagaaaattagcccaatcccttattcgggcgccaaactctggtacaacccccagggggaggacctccaaaggtgaaaaacaaagttacagtagaggaaaatatgttccatcgtttcttctccctccccgtaaaaagggaaagacacatcttcaatctgcattcttttagctagagttgacctgataggtaaggcattagagagaatactccaccaaaggactttgtggtgtttcaatatcctagaatttcatagtttattccaaagagcgggagccacagtggtaggggaggctcttgacaaggcctgagcaagacaagcagatttcatagaaaagcgactgtccttagtccagatccacttatcggtgcctcgacccctgggccttccccctttgaggatattattggttgtctcctggtcaaaaagatag

SEQ ID NO: 360896 - DNA, 810 bp, Cannabis indica
aaaaaaaaataatatttataaaacttatataaaatcagtaatcaattctattaacttacaatgtcattttacaccaaaaagtatatatgaacactttttaacaatgttacacaaaaacaaaataatagcgaggcaccggagaagagtaacacgtaccttagcttacaatgagaaaactaagtgtaaaagtcaaaccggctcacagagcaagaatgcgagatgaccgtctcgctacgaggaaacttcctatagtctcatccaactaacgaaagcgagactcataaccctggcaagtcaaaagatttccatatacccgcaatcaacgtaaaatatatcatgtcaacctcaaaaagagaatggttccagctcgccattgggatcactacaatcaagttctgtcgagacatctccaaattcaacaattaaagatgtgtttagtacacgatattcttgacccaatgaaagcgggaaaatcacagctaaatgattttccaaaatcatacaccgcatttacatttcatgatagtaatcagatcccatgatttaagagataatgattgtaattacattttggtaagccttgtaattaactaccactatgcaattaaaaatagtggcaaacaatctcaaaaaagggacgaaaaaaactcttatgcaagaggccctgaaaaaaatactcagaaatcggaataagattgactagtggactatgcagaattttaactacaaaaccacgtaaaaaactcgatgttcatattttatttttctatagtttttattttttctatgttgaattatcatcgtgaggct

SEQ ID NO: 360897 - DNA, 915 bp, Cannabis indica
gggtttcctacatgtcttctacaacaaagttgaaggtgcattcaaaaagtaaacatgcaaagtaaacataaaggaaatcgagaacttactcaagaatcagatgtctggattcaggtaacgtctaaccaaacgagcagttttgatgaaggcactttagcaagcttgaagccaaaaacctctcttttcgctctgaacttacttagcaaagaaggatggtgaaaatgagtttttgtacaaatgcctgttggtatttataggcaagcagcgaaaaggggtaatcatttcaaaagaacctcagacgcctcggttcccccttaaaagaaaatatgggaaattaaaaatagtcaagagcaaccgtcaaccatggtgagagaaaatcggattttgaaatattaattgtcagagcatttattagccgataactgaagggatgcccagtcagcctcacatcgagtcgcaaacagacgcgcttgacatgtgtcacccatccaaatacagaagcagctcggatgaagtctacacgcaacttcggaagtcccgtacagacttgggggcaaatgttatcccaattttcgcactctgacgtggcatcacatgatggtgacacgtggaatcgactttgagtatctactcgaagaatacagtttgaataggatgcctcatacgcatgcctgaagcaaagcgatcagcaacccgcacagagcgaccaacacttagcgaatttagcttttgcatcgtgagtcatcaaagaaatccctataacttggggatcagattgcagagatatggcaagctgtccaaatcccacgatcaatgtattctgtatttattatgcaatctttctgagctcatagccctataaatagtgattcatctcactgggcaaaggtcgaaacattctggtagagagatatt

SEQ ID NO: 360898 - DNA, 488 bp, Cannabis indica
aagcaagggcttaattgagaagaaaagagactctagggcttatttagtaattaagagactttattaagtataattaataaatatattaaatggcaatattatttgataattaattttaattattaaataaatcgttttggcatttaagtggttgaattggaaaaatgatgtttttgagaaagtaaggaaaaagtggaaaaatggcaaaattgcaaagtgggggcctacatatcgatggcaggtcaggtacccttatttgaccatttaattttttcaatattttaatgccaaataattctaacctaaacttaggtggttgcctataaatagatagtgatgtctcaaatcaaaagatgaaaacacttgccttcagtgaaaagtttgagccatctattctataccatattcgaaccactctcctctcttcctctcttcatattttcaaaacctatagtgatagagtaagtgcccacacacatcaactggta

SEQ ID NO: 360899 - DNA, 858 bp, Cannabis indica
acggtgatgacctgggaagaattcaaggagttgtttaactctaaatactacaacgaagccttccgcagtgctaagcagaaagagttcactgagttggtacaaaccgaaggaatgtcggttacggagtatactactaagtttgaccgtctggccaagctcgctgtgggaatcgagccaattgattttagcaagaaaaaaaagtatctggccggtttgagtgcaaagattaggcatgatttggtgatcactaccactgaagcaacctcatatgctgaaatggtcgaaaagttgagagccgaaggtgcggtgaaattcctttagtagccctgagtgactccgagtgttggtggaacccccacttttcctactcctgtctatggtagggatggtggtgattccaccactgatcagaaaaggaaagttaccccagcatttggtggttcgggacaaagtaagcggtttcgtggaaaccaaggcagaggtggacgccacggttactcttaccctgagtgtcctcgttgcaagaaacatcacccgggagagtgcaactggaagacatgctttctctgtggcatggtggggcatttcaagaaagattgccctcaggcaaagaaagaggagccgaaagctgaggtaaaaccggttcctgctcgggtgttcgctatcacccaagctaatgctgcagccagtccttctgttgtgacaggtcagcttcccgtcaacaactccttgtttacagtattatttgattcgggagctacacgctcatatgtagctacaagaataattgatcttttggataggccttgtgatattttagaaagagggtttggaaccctaatgcctagcggggaattg

SEQ ID NO: 360900 - DNA, 589 bp, Cannabis indica
aagtatcaaaaaagactaaccctggtgagctccttcaagactccgcccaccaacacatccagagatgagtcgtcagcaccagccagttgctcaccgacctcaggaaccagccggttcatgtagtgagccatcacctccttgcccttcttggcctcaggcagcacgggcacgggtggagttggtgcctgcacccgcccagggatcctcctgaccagttcggacccagttgttggtggcccagacttcttagacttggcatatttgggaatggaaggattcgcagcagtcagctcctcggaaaggtcaataacctctccagaaggcctcttctctgaagacccctctccgcccttagacttcttggccgaaggggaggcgctagaatttccgcccatcctcttcctcagagcatcattcatctaccgagacatgtctgcacagaacaaaaatagcgttgttagcacaaaccagcagaaaatacaaagcatgaaattcaagaagctaaaaaagaagtaaaacgcaaagtgactccctgcacagaaaatcagaagtccatcatcacctgacatctcagacataacgaccttcc

SEQ ID NO: 360901 - DNA, 585 bp, Cannabis indica
aattgtagaaaagaatcaaagtgtatagacaactatactgttgaggtgtaactcaaatatctataatataaaataaaattcttaaataattgcagtttaaagtaatcttctatgacatgttataggttttcaaaaatagttatgtctcttttctaaagttggtaataggttaatttatagaattacaatttgaaaatacgagtttttgtattagaatgtcttgataaatttgaaattgaagggataggtttgaataaaaaagaggatgaatcttataatattattaagtatgtgcataggtgtagtttggaattaataccaaaatttttttctattaaaagtgaacttaagttcagtcagttcgttttttagttttgtattttatgaagtcaatcttgtaataggtgtaacaagtatttgaaaactagcataactcttttcaatagaaaaaacatgctaaactaaattatgggctatagaattaattaattaaataatattttaaagtttaagttttgtatccatgggttaatatttataatataaaattaaagaggaaaaattttaaattatatgcaggcatat

SEQ ID NO: 360902 - DNA, 521 bp, Cannabis indica
ccgacctgaacaaaaagtctcgtactttatggatgccctaatcacataataaaactgtgtaaatgacacgccaaaaccctaatcttgtgctagggctacacactcatatgtggcattaagagtaattaatcaattgggtagaccttgtgatttcattgaaaaaagggtttagaactatactgcctagcggggaattggttatctccaaaagacatattaggtctatgccaattagggtggaagatagggagttgagtgttgacctggtggaattagaacttacagagtttgatatcatacttgtgatggattatctgtccaaatattcagccaacattgattgcaagcaaaaaatggtaacatttcaaccagagggcaaagatccatttatttatgtatgatctgttcaggggtttcgaatcccggttatttcaatttcaagggctaaagatttactacacattggatgtgtaggatttttaattgttgtgattgactccagcaaacctgaaacatttggg

SEQ ID NO: 360903 - DNA, 907 bp, Cannabis indica
ctcgcacttcggggtcaatgttcaattgatgacacatgacatgcggtgatatcccgaccatgtctaaatgtttccacgtgaaaacatctagattttttctgagaaaggtgaccagcctttctcgctcaattgtatcttctgcaggttgtgcggtgttagtataatcgagaatccttggatctagatcaggtttctcttcatgcgctatctcctcgattctacttcttgtcgaggaggtggtgcttccaatagatatatcacatttaccgagttcttcttttctacgagttttagtgctgcgttgtagcactctcgtgaatctgattggactcatcgcatagatcctacaccagcgagggtagggaatttcattgtgagattatagatagaggtcacaatcttcatcttcttcaaaatagggcgcccaattaccacattgtatgctgagtactgatcaataactgcaaaattagccatcgatttggcagtgacaggtgcggttcctagagtgattggcagttaatcattccttttaatgcaattttgtccccagtgaacccatagattctcgagactacaggtgacaaatccttttcctgtaaccccatttgtttgaaagcctgaaatttgagaagattgactaaacttccattatccactaagatgcggtggacattatgtcctccaatattagcaacgatgaccagtgcgccagcatgcgggtggtgaacccacctggcgtcactttccatgaaggttatgtcgtcgcattccttcttaaaaagtttttttggtcgttcacttaagttattcacatcagtgagcggtttctccttcgcttccttagcataccgttcttgtgatttcttggagtctcctacaatgtggggtcctccaatgattgtca

SEQ ID NO: 360904 - DNA, 679 bp, Cannabis indica
ttcttgggcatcatcaattatttgcattgttccctgactttttgtacggacaaggtcactcaacaatatgctcaagaagaatagtccagaatcgtcacatgaccaaactgtggcaataagaaagctaaaggaaaacatgttcttcaaatagacgacagtgaccaacattagggtgtgtccttcccgagcaagattgtgatagtaaaaagtcccatgatccgtaaggggaaataccgagtaagttgtacaatcacacacttcctggggatggtcaagtgtgaagaatctgagactatgtaggtatggggctacacccttgaagcgagctttaatggattgattggtactgcctatatcaacaaggtgcatcttgtttttggtagcccatcacgaaagaacttcacagttaagcgtgctgttgggattttatgccctaaataaaacccatttcaattcaatctaatttgttatcaatagaagattagaagtcatttatgtatacatgtagtttttatgtttatggtttaatgtgtacagaatatgttaaatccaaaacatatagttattcataattatagtgatgtcaacgtagtggaaggtaattttaattatatgcttcataagataatgtccctcgattcatcagtgcactagatttatactgatgtgatagtcagcg

SEQ ID NO: 360905 - DNA, 550 bp, Cannabis indica
aatttattcatcgtgtttatttatattatgactgttttttttttgtggtgtttcttattatgttttgtagtgtatcgtattgtaatatttttaatattatttatttatttttagtgttttttttcaaaaaaatttatatatacttttgttaaacttaatgggttgtttttgtttattttttaatgtattttttcgctctttattattaatttaaaactgtttattattttcaatcgttaattatttttttatgttttatatttaaaatattacatctgtatatttttaataaaccatcttctcatagatgttattgttttgtttatttttttggagttttatttttttttgttcatgtgtatattttaaaaagatatcatatattaattttatttaaacataaatatcttgatcatatgttgattttaaaatctaccctataatcatatattattaaaaaaaaataattacataaggcaccattttttgtaaaatatttacatttttacgttcaaagaatgtttttttacatttttacgattttccaaaa

SEQ ID NO: 360906 - DNA, 665 bp, Cannabis indica
agaagcatatacttagaatctagtatctttcttccttatatcctttcaacctctgtgcatgcagtagatcacctggagaagtaattatataaattgaaacaaaataataaaaccttaattattctatccaagctgttttatatgttttcatgtttttagaatcatattgtgataatcatatttatattaataaattatccataatgaacgaacacaagctagtggcagaaacacataaatatagtatataatatgggatcttcattgatcttatccacttttatatcacccattaggcgatggagtagcctatagattactatatataaatatatatctatctattctatataaaatgtgcgtatataacacaattcttagtttatgagaaattcataagtgactttttatttatattaagaataaaataatttattaataaaaataaaataatttattagaaattcatgggtaactttttatttatatataataaaataaatcctattaaatctaaaaaaatacaattgggtttttgctttgtacatctactattgacttatttagtgtagggttatttagctggattttattctaaataagaatttactactatttatatatatatatatatatattgctaaagaatttttctatttgttttt

SEQ ID NO: 360907 - DNA, 571 bp, Cannabis indica
ttttttattatactacatgacatggggattgagatgggccgaatgatcagaccacacacatttactaggctttcaattcaaggggggttgctttcaccactgatcgaccaaagtggggtcaattaatatgaattatggcaagtggaactaacttcagggtatatttagtttcagaaatgctaaaaagggctagtgttgccaagtattctcctacatgtcaatatcgctattggcctaatagtatcgggttctatatactttaacataatagcttttagggagtatcgctagtcaattgtaaggcgacacgtcttaaggatgctaggcaccactagtgtctaatagcaatgctcatttagtttatagtagggctgtacaaaaattttcgtaaaccgtccaacccgaataactcgcccaaaccaaaccgataaaaaaatacaaaccgacataactcgacaaacttctaaaccgcccaatcagttaattggatgggttgaaaattgacccaaaccgcccaacccgattttcacttttttttttttattttatatatatattatataataatata

SEQ ID NO: 360908 - DNA, 1685 bp, Cannabis indica
ccagtgagtgtaatcgattgtgggattgaccccccctttgatctcttttatagcagaatatactccaattggcatgagatttaaagctccgttatctactaaagcacgtttcacttttaagccattgatttttgcctcgacatataatggtcggttgtgaaggaacggagaagtttgtatgtcagcattggtaaagacaatcgctccttcagattttttagcaatattatgcattgggcgccctaccatataacaagaagggccatgttgttgggaaattttaagcaaattttctgtagcctcagtccttgcatcttggccaaattctaagcaatcgaagaaattacgaaataatttagtttttaacaatggctctaccatgctgttttctcttggttgttcttgttcttctataatttcctcgatacgtatgctccgtgatatccctattgaaatgaggggaaactcttctgtgcatgtcatagcggctcctccattttgatgttggggaaacggcatttgctccacctcgttttgatccaaaataatctctcctttctctagtcgctcatgaaaaatcttccttagcgtgtaacacctcattgttggatgattaattcttcgatggaaatgacaatagagatcatgttgcttttcttctggagtgggtaattttgtgacaaatggtaacactacttctccatcccgaatccatgcttctaacaagctacaaactctgtctttgtcacaaggaaattcggctggtttatcacttcgtttccttttttatgggcttcgaaattttgtctgtcttgagctagtgctatgtcaacaccacgttttgaacttttccatggccgatgtgtttggtcgttttggttggacggcttggtcaaacggaaaacagtggcttccgtatttcttgatttagctataagctctgcaaaattgtatatggcatggttttcaatgtgtaatcgatattcatccaacatgcctttgatacacatcttcaccagatccttttcagccatggtttcagcacaatcaagagctttttccctaaacttttgaacgtaattaacgagtctttcaccaaagttttgtctttctcctgataagtcagctatgctccatttatcttcaatcataaagaactttgcacaaaattgagagaccatgtcgtcccaactccttatactccctgatggcaaacttgcgtaccaagagtatgctcgatcagtgagagactttgaaaattctcggattcttaattcaaaatcatgggcataaatacccaaatcatctatgaattgaatgatatgttctttggcattgccaaatttcccattgtattttcgaaataccggactcatgtaaccgcgggggtaaggtttgaccgccacttccacagggtagggtggatgaaagtcgatggaagttaccgatgatgacgatttacccctttcagctttaaggagaccaatcaattcgtcttttgtgacgaactcagaggaggaccgagcctcttcaccaaccctttcaacaatctcagaagttctgattcctcgaacattatcatgtgttgccggagttcgttggtcaacagtatgtacttgccttatcaaagattcatttattgcacgttcctcaggtaagccgctcctttcaacagatgcttctta

SEQ ID NO: 360909 - DNA, 567 bp, Cannabis indica
attaattgaacatatataaaaaaattggataactgaaataattagtaattaaatcttattataattagaatattttaattaattattaaataattaactatattttataaatcaaatcaaataaaatatttaatttgttactacataaaatttaggaattattacacagaaaatataaattgaaattttatttacaaaaatacctctataaggtaaagataacatttacaccttttatgtgattttaattactaaaataccacttacactatcacaacttacacaatcaaacgatttgctgcgtgattgcacggtggttgcatcagacgaatcaaacgatggttgcagggtggttgctagatggttggccaaaggttgcatcagacgaaggtttcaatcagacgaaagtttctgagtggttgctggtggttggctgaaggttgcatcagaggaaggtttcaatcagacgaaataactgttagcaaaaattttaggcaactgtaatgcaactgcaatgcaactgttgtgaaacattaaaaatcaaaacagtatttccacgtacgtaac

SEQ ID NO: 360910 - DNA, 757 bp, Cannabis indica
ggtcttctcactccaagtttaggttgagttagcattcgtcgcctgtgccgccctgctcgatgctgcatctcgttctaactcaacgtttctatgctgcgcctcttccaaacagcgtctcaggcgctggctttccgtttcataatttctttctcccatagactaggcacctccacgattgagctcttcatccattgtcctggggttctaaccactcccacattaagttctcctcgagcttgttgtccgcgtactaggacaatgtcgagtcgagttctccgggaacgtgtggtccgtgcattggggctaccctcaagttgagcccttctggaacgggtggtccttcttgaccgtgggttggtagatcttctagagcccatgggctgtttcccagaacgatgattggtttcctcatgttgggtgttaacattttctagattttcagccgtgaaggaggtggtttttcttcaaaataagggatggttccttctaagctttttcacagaggctcttaaagaaagcaccgaactgttaacgcagattttcattaactaaatttgagcctcgcagtagtgatttcacacagaaaaaaataaaagctatcaaaataaaatatgaacatagagtttttacgtggttttgtagttaaaattctgcatagtccacgagtcaatcttattcagatttctgattgtttttcagggcctctcctatatgagtttttccgtcccattttcgatcttctttgtcactatttata

SEQ ID NO: 360911 - DNA, 1060 bp, Cannabis indica
tatgtatattggtttaaggtatattgtttgtatatcatatgatatattaataaaaaaaactaattatatgcttaaataacatattagacagctacaacaacagtaaaatctaaaagaataaaatatataacacattttatataatgaaaaaatagttgacaaaaattcagtagagaggttttgatctattatttttcataatttctgttaaaggaataaaacatataataccttttatataatgaagtgtattttaggtattaaaaagtaaaaaaggacatttgctttattattttaaaaaaaggacattaactgtctataaagttaaaaataggacaatttacttgcatttctcaattttatatgggccttatgggattcatttttgccattttattgaaatttagctttcttttctcaaatgttatctttttaattctaacttagaaaatactaattttatctatttaataattataattaattatcaaataaaattttcatttaagttatttattaattagacctttcaaagtttcttaatcaataaacaaactgtaaattctttttttcttctcaaagaagccctttcttagtgaaactcataaataagacaaagttttattcaaaattctaatcgattaataaaatcaatcaattgggactacaaaacaatattatctcaagtagtgtggggactatgggtgtatataataatcaagcatgtaacaagtagttctagaatttatcgagtaaattatctatcctactaattcctcctaactccattatagattcaaaattgcagtcctgattacatagaatgctctactcaccaagaatagatatgctataaaatattcattgtttcaatctaaataatcaaagatcctctatagataatttacatcgagtagcgataaatttaccattctacccttcaatgtattttatccttaaaacacatagcttgttataaatgatatcttagtaaactaatctaattactgaaataagagctcttccatttttgactgttatccaagctctaaggaaatca

SEQ ID NO: 360912 - DNA, 670 bp, Cannabis indica
ataaattttgattttcctctcccttcggataagttataaataaaaagttagagttgtttgatccgttcttcatcaaaaaggtttgatcaaggtgttataacaatttgacccctttctcgtcaaaaaggtttgcttagggagttacaacggttcgaatccactttcgtcaaagaggtttagtcgagaacctttgaatttcaatttttttctgaaatgacaggtttgcattatagaatgtatttcctaatggattccagttagtcatacataaatgcccctcaagtaatttttaaagaatgaaactttgcaattacttaatataaatgattctctttcttcataactgaagttgaaagtttacaacagtaatgcaagttacatcatttatttattgataatagggccgcaaatgttctacgttccagtagttctttattagcgagccatcaagtcaagcaaatttatagactctaactccaactattgcttcgatgaccctcccaattcgggttaaacactcctgttgatgcgtctctcgtatttggaaagactcgtcttagcaccaagtctccaccattgaatagtcttttcttgacttttttttgttgaagtatcttgtaactcggtgttggtatgcgacgttggtcatttgcgactcagttcatttttt

SEQ ID NO: 360913 - DNA, 515 bp, Cannabis indica
tcggtgttggtatgcgacgttggtcatttgcgactcagttttctcaagtagatccaaagacaattttaaaagttcttggttctcttattaagtataaaactctcatctgtgagtcgatatattcacttcaacaggcagcattgcttccgagctaaatgttagcaagaaaggagtgtgtcttgtggctgaggtagcttgtcaacccatttgcccttgacagtgtctagcttcttcttgatagtatcctttagggttttatcaatggcttccacttgtccattttcctgaggcctggatactgacgagaagctttggataattttattcctctcgcaaaattcagtgaacaagttgcaatcaaattgggttccattatcggatactatcttcatgggaattcaaaacctacagataatgttcttgacgacaaaatcaaggactttcttgcaggttatggagatgaggatctccacctccatccattaagtgaagaagtcaactgctaccaccgcata

SEQ ID NO: 360914 - DNA, 629 bp, Cannabis indica
taataataaatattatatatataaaagtgttccacatatatatgagaaatttacaataaaattaatcttttatgttttaatttttatacacttaattttctttttttttttggcaaaattttcttaagtttacttttctttggaaattaaaagtattagtcagatattaccgttaaatatcaactggattactactgtattgacttcaaagttatactgttatatatacacaggtatatacagtagtcatccagttaataatatttaactggcgtgttaaatttacaaagaaaaataaatttaagaggtttttgtcactaaaaaaaataaataagttaaatgtataaaaattaaaatataagagatttttcttgcaaattgctatatatatatatatttatgatattaaatcttgagggagcatgatcgatttagatgcaggcaagtggagcaattactcactactacaaaaaggggtattttcgtcggttttcaagtgactaataaagattttgcgtcggttttctaaaccgacgtataagccgtagacgcaaattgtaatttatttgcgtcggttataaaatgacacaaaaaactattttcgtcattttataaccgtcgcaaaatat

SEQ ID NO: 360915 - DNA, 399 bp, Cannabis indica
acactaaattagtgtaaattcaacacaaaattaatgtaaccatcggagatgatcttaatggtgtaggatttggtgcacaccaatttggtgcataacttagtgtgctattagagtaaaatagtgtgaagattttataccaatttaataaaatggtataccactaaagataccctaacactcttatgagatgaaacactattactctaatttattttacattaataataattacaaaaaattacttaccatttatacagcaccaccccttaaaaatattatagactacagtgtcttataacaatgctcttaaaaatattatactccctacacatattacttgggcattgaaaaatagagatatatttaattttatagtgtacttgtgttggaaattatttt

SEQ ID NO: 360916 - DNA, 666 bp, Cannabis indica
tatagtttttgaatttcaaaaattaagttgtgtaaccactctttacacacttaattagtgatcatgtggaagttacaaaatattaactccacctcttatatgttacaactatatgtaactcccaatcacacaatattgtgattattacatgcatataattcccaattatattatatgtaataatatatataacatatcacaattttaatcttaaacattatattatataataaataatataacaaattatttaaacattggtttactatattgtaaatgttatcccaaattttacacaatatgacgtgacactcagcagagttacacgaattgtacatattcagacctagacagaacacacttatctatagttccgtccaaatcgagttagagccaaatcagttgagtctgagcctccaacaattatcatccgagcagataccatacctcacactactctaattaaatcaagcatactgagcaagtttcattcgttagacagaaacacatagagagtaaagatttttagagatattttctttaaatatctccataattatagtttattgagaatcattatctttgtgggattgatttttatataattgagaaaatcatagaatttaatattgggcatttttacaattttgtatatattattttaat

SEQ ID NO: 360917 - DNA, 525 bp, Cannabis indica
gatttgtgtgaggcatatggtaccacaatactcctatgatactaaggttgcaccacaacgcatgattgacatggcaacggttcttagatttaaagaacctcatcgacatggtcaacaaccagctccaccaaaccctcctcctgaacgcgaagaagagcgtgttgaagaagtaccacaacatgttggtcaccctcttgacccagccatgtagtacacacatgatcagctgaattatcttattcagcaagacattcacatgcaaacttatatggcgcagaggagtgtctttgacgagaatcaagtgcagcagctgaatacactaatcacaaggatgaatgttggaattgaagagcctaattacttggcgaatctaccccgtttttatccttatgacaagccgcctccaccaaaccgcttctgatggggctcaggtaagtctctctctcctagaaattttttcctcgcattagggacaatgtgtatctttagtttggggggagggatttaaatttttcagtttatgtt

SEQ ID NO: 360918 - DNA, 737 bp, Cannabis indica
caaaataacaaatttttgaatttgaaaatattatggttagaatatctataaaaatatctaagttaatttcaaatttattatttaatttatcatataagataattttaatataatatttcaaattaaaagataatactatctttttatttaaaatatgtcaaatattaaaacatcagatcttataattaaataatatataaatataaagaaattaacaaatttttaaatctaaccataatttaaaaaataaaataatcaatttttaaatttaacctcaaaatatcaaagattaataataatctattaaaaaataaatattattaatttaaaattgatatttaagtttaaatatattaaaaataatattttattttgaaatcgaggtttgaaaattgcaaaaatttgaaaaatttggagaaaaatcccacaaaaatcacatttaggtgttggctatctaggagggttgcatgtgcagcccaggaaggctgcacgcagccctggacgcgtgcggaaggggggtctccaactgagaaaactcggcgtgtgcaacatgtccctgggcgaggctccagggtgcacacgggcgtgtctgaaggcgcctgaccgaggatttcagacaattcttgtctgaatccgtgcacgcatcacctcggcttgtccgagttcctggtgcgtgtgatgagtaccacgggcactcgattttcaaacatgcataactttttcaatttttatcggaa

SEQ ID NO: 360919 - DNA, 556 bp, Cannabis indica
ccaaaggagaggaagttaaccttaatttaaacaacttttattaactaaataaaatctatcaatagtgatcattttatttaacaacctactccattttaattacaaaaattaaatgggctccctatatccatctaagcccaaagcaaacatatacgctcacacatgcacactgatttggatggaccctatcatgttactaggtttatacacagaagaaagaagattgcaaaatttatctgttagaaattatttatttgacctattgacaattgaacaattagttaaaattagatcattggatctgtcaacaatttaaccatggcaatttagatcaaacaataatagactttataaaaaacaagtttaataattaaacaatatataaaacacacacatgcaacaaattggatagttgaatataggatttatttaatttaaattaattttcgaaaaatctaaataataaattattattttttttgaaaatattaaatttaaattaaataattaatttcaaaagtgaacctataaatttgaaaaattaggttttcaacaa

SEQ ID NO: 360920 - DNA, 379 bp, Cannabis indica
tacccaaccgacggtaaaagtcaaaaacttaaaaaaattcgttcattattagcgtcgttttaaaagtctcacgaatgctttgtgtggcgttttaaaaccgacggtaaagagattggaagtgtgagaaaacgacgcaaatcctcttattattcacttacccccaaatcgacgaaacagactttcatttcgaatagctctctttccctctctttctctgaaggtctgaaggtctcgatcgaacagctctctttccctctctttctctgaaggtctgaaggtctcccacctctgtaagtctctctctttccctctctttctctcttgcgttctctcaactaatctctctctctcagtcactttctctcttgcgttctctcaa

SEQ ID NO: 360921 - DNA, 151 bp, Cannabis indica
ctgtgaacaggatccacttggactattctgggtggatatgagttatcattaaattcttagatgatcactctagattttatcttatgttaaaaaatttgaaatgtttgagaaatttcatgaatttctatcaatgttgaaaaacattaaggta

SEQ ID NO: 360922 - DNA, 717 bp, Cannabis indica
aaagagttttatttagggcataaaacccaacaatttaaacatcaattttcaagttatgcaaggtaatgtaatattcctattccatttactaagaataaccttaacctaggaattcacttgcatcattcaagttgtaattactagatctagcatttccacaaccagatctagcttattaaattgttactcatggccaaaaaaataacaataataaataacatgcttacttgaatgaacaaaggaaaagttgctaaaatatgcttaaaattaatcataccaaacataggggttcatagtcattcaaactttaagaagtttagctcatgttcaaataagaaaataaaattcaaaatagaagttgttcatgttgaaattattttaccaggataacccttatatcctttctgtagcagagtatcaccaagatctgagtccaaatctccttctcttgaaactggattcttcacagccttacacactatgattgagtactacttaatgtgtgtggcactcactctttcactataggctcggttttgaagagggaaagagagaaagatggtttcggctagggtagtgaaggaggctttgaaatttttactgaaggaatgagatgcatcatcttttcccttaagccatcactacctatttataggaaacaacctagggttaggttagatttatttggcattaaaataataaaaaaattaaatggta

SEQ ID NO: 360923 - DNA, 916 bp, Cannabis indica
tgtccaacttgaggggtagccgaatttgtcctagaggtgcaactccttgacttgagaaaccatagacaggctgagggcatggagttaggtccttgagctagagccccatcttctcgtaagcagccttgaacaaaatgtttgaagaagctccattatcgatcatggttctagctacaattttgtttgctatctggacttccacgactagtgggtcgttgtgcaggaatctgatctggatagcatcatcatcgttgaaagttatggttggctctcctgcgcggggaactttgggcttcctctcttccacgaccaagattacttcttcttgctcgtactgagccgttcgggcatatctctctcgagctttgcccgtgtctccagcgatgtgtgggccttcaataatgacttgcaagtgtccatctatcggtggaggtaacagatcctggttgttttgaccttggttggccttgacatacttctgtaagtgcgggttgtttttcttgatcagatgttctatttctcgcttcaagttgtagcattcgttggtgttgtggccgtagtctccgtggaactgacaaaatttcgtcatgtcccttttgccagtatatttcttcatgggcccgggcttcttgtacggaattaacgactgagttgttatatacacactctctatatcttcagtttaggatagtgaatgtagtgtgtttggcgtgatcacggggtgtttgtcgggaattttcggtgaactttcctttcttctcgtttccttgcttgtggttgttgcctgaacgcttgccacttgaattgctagaataatgggggaagttgggcggatgttccagtggaaggagccttcgttttctcggcttttgcttcccttctgctcgttgaatggcttcttcgagcttgatgaacc

SEQ ID NO: 360924 - DNA, 817 bp, Cannabis indica
ggaaataagcttttggacaaaggtgtaagaccttgttcaagttttgtgattcccctattatacacttgtggtgtatgtggtgttgagattgctctcacatctcttttatatttatgctatttatatattgtgtttcatgtgtagctttttgctttgagttgtaatccctctcttcatctctattctctattttatgtgtatattttgtttaagtgttgtaacattatttatacatgttttgtcctttgtattatttgtcatagaattgtaatcttgttggtttggtatttcttttagagcacaacaatttccaacagtcaaaagcttatcctttcctaccttgcttcaatggaaggtaagaaatcaacatgtgataatgcaagggtaagaattgtgatatttggttatttactattttttatatagtataatatatattcacatatttttctatattgagatatatgtatatatatgagttatatatgtatggatgtatatattaatagagtgatatataatatgatatttgaatatgttacatgttagtatgtatatgtgagatatatataatatataacatatatatgaattatatattatatatcttgagcatatgataatatatatttatgatgagaatatttatgtatgtgatacatatgtaatatatattatgtggaaataatgtatattatgatgaatatatgttatacgagatatgtaacatatatagttgtgatgtatattaatattatatgtatgttatctatgagatgatagtgttatcccaatttttgcactctgacgtggcatc

SEQ ID NO: 360925 - DNA, 1402 bp, Cannabis indica
tcattctattttctcttaagaaattgaatggcgtatatgattatattcccgacattctatcccgaaataatataaattctcgatcttatagaatcttctacttatatatgcttactttaggcaaattagactaagagttagattagtagtggtggtccaagaaagaataattactcatgtatatttggcataaatttaagtctttactttaattatagatttgaaatagaaatttcagtttcctagaattcattggacattacagtatgactttcacaagtttttaatatccattttctttcaatggatccaaactgtatgttcatgtatggaatatgagttttggattttgtgacaaagatcaacttggattgttctaagaactctttattgtaactagacctaagtcatcaaaagatcacaacaacatttttatatatctatggtatttgcattttgttcatagtggttttcacaagatcattctctccaaagagtaaatatgccaatatccactggaactaggatcatctatattcgaatatggatgtacattcaagggtggatattagttttttgttatattcttaagacgatcactgtagattttaccttatgcaaagcaatttgaaatgtttgagaaattttatgaatttctagcaatgttgaaaaacattaaggtaagtggttaatgatcttgcaaactaatagaagtggagaaatatttggttgatatgcagttcaaagatcattaagttgaattttgaattgtatccaaacttacttcctagaaatttgatatgcatattgatgatagcataaggtctatgattagttactagtagttgcctaagtccttctagggaaataccctagtgataagaaaatttcagaatgatggaatggtcgtgtacttagtgtaaaccattactagattcatggatgtcctgatcgtgaacttaagaaaactagaactgctaactaaggtttgcatgtttgatagctattgtaagtgattaggggtggaccatcctattgtcattaagataagaaagtatttgtttcaacaaatactactttactaagaaaatgactaagtctaaaaacaaagtcgaaaagtagaggagatatatattttttttattccaaaagtgttctatcatcttattcgaaatcagatggccccactgcctctgttgtcttgacacaaccgatgaggacaataccacttatgttcttagatagaaagtcacagtaccttgtcgtagtgggagggtttcaaggaactcaccctgtaatgacttggaagacacttgtgataaaatctattgttagtttaaacaagtaatggatagtcagaataaggaactaagtaaagccaagagaactatggttaaaacca

SEQ ID NO: 360926 - DNA, 629 bp, Cannabis indica
gtttgtcgaccaggccatgtaggcgccgtcgtcgaaacgcctgacgcagcacttacaggagacaggggacaggagctcatctcttttagccttcttcaaggcttggtctctgaagtccttcagctccttcatatccacgcccaagttggccttggactgcaagttcgcctggtgcaactcctctaaggacctcaccttggcagccatttcgtccatggcctccttagcctcccgaagttcacgcctggccctggcgacggcctcaccctctgccttcagcgcctcacgatgcctcacctccagctcagcctccctccgttggacctcctctcggagccgagcctccacctgggcctccctctgtttggcctcctcctcaagcttcgccttagcaagggcctcccttcgctcggcttcctcctggatcgcctgcctttcagcagacaagtcccgtaggatcctcacggcatcgtctatgcccccgaatttagacatgacgaagccatgattgacgatggtcttggagaggtggctggtctccgcagtaatctaaaaaaggagataagagtgagatcaaatgccttagacaaaatatcgaggaaagaaataaaccacaagaacttaccgca

SEQ ID NO: 360927 - DNA, 983 bp, Cannabis indica
aataatttataagctagattctttttgattcgttattaatattatttattacatacataaaaagtaactagactattatcttttattattttataataaaaaataagaataaataaaattataaaaaatgttttttaataataaataaaatttttattaatgagtaaggcagacgtagtccattatcaaagtcagttctaaggataagtataatagacccgtggctagggtcttagaaaaaatattttatatataaatttaatataataaaacatatatttataccattataaacataaaacttgatgatctcaactaaaaccactgaacatcttaccactaaaccaaaccaattgtttattttatatatgtattaatattaatatatatatatactagtaaaaagttacgtgcgagacacgtataataattttatgttaggtattttatactttatttaaaaaaaatataattaacaattaaaaaaaaatattataacttattaggtgagattattattatgtatatctaaataatgtaatttataattttgacaattaaaagtaaatactggatgttgttagtatttataaaacacttatgaaatatataaatcacagatccaaacatattcctaaaagtgctttaatatagaaaaccctaaatcataaatcatcctttgctaaattaaagaagatgataaaatatgagcggaagcactaacctgaagccattgtggagattacagagaaggttttgatcttccaagaatacactattttcttaggtattttctctgatggggaaggagagaatacagaaaccctagtgtttcttggggaccactacctatttatagagtcatcttagaataactcttgggtatttataatttggcccctcaacaaattataaattaacttatggtatctacacattaattccatgacactttaatacccttttgatacccataacataat

SEQ ID NO: 360928 - DNA, 713 bp, Cannabis indica
gagagagagagagagagatattgaagcttctaggattttctcaactaaaaccccctgttttcctttcttcttttttttttaaaaaaaaaaaaattgattaatacttatccaaaaacaaagaattcagattatagagttcactaaaagccaaataaacaattaaagaaaaagacctatttgccatttaatttaaaccaaggtttcaaacaattcaagggtagtttagtcattccaaaccccgagaattctaacacctccaataccttgcaataataccccaataacaatattctaaaacacataaaatgcgactctctaaaggcccaacgtcgttttccacagcttccgaacacaacctcaaaattcacaaaattcacataaatagcataataagaatatattaacttaaataaatttccacaataagcatattataaataacatttaaatctcatgaataaaccctaattatttaataatcaaaaatattaaatcgtatgcggtctttacaattattccctcgttaaaaggatttcgtcctggaaatctaacttgaataactctaggatattgagtcctcatatcagactccaactcccaagtggcctcttccactttactattcctccagagcactttaaccaacgctatggttttgcttcgaaggaccttttccttcctatccagatttgcactggttgttcatcataaga

SEQ ID NO: 360929 - DNA, 586 bp, Cannabis indica
gagcctagtgatagagtacatgtccacgtatagcaagttggtactcaatcatagtgtgtaagactatgaagaatccaatcacctgaaggagaatcgggcttagatcatggtgaaactctgctacagaaaggatacaagtgttagagatctaagcggaaggagtcatttaatttcgctgcagccaatgtaaggtttcttgaactctatatgtgtttaaattccattgttttagaaattcatatttaggatgttaaacaacatacatggtagtaaatctagatcctggtagaataatccccaacacttacctgcacatacatgtaataattgtgagtcgacagactcagtaagaaagcataatcataacatagatgtaaacaggattacgattaagtgcacatacccccaaccataacccttccctgtgtcccactcggtactaagtcaagaacgtttaaacgacaacactattgatcacaatttcagcctattctcggtactctagtcatactctagtcataccgatgtgatagatattgggctttgtgccctaaataaaactctatttcaatgtaatcttttctat

SEQ ID NO: 360930 - DNA, 636 bp, Cannabis indica
cggtccccgagctcctcactcattctgaattcattcagcaaattccatctaaagagagttgagagagcgaggaagcccgaactccaatactgaagctatcgcagggattgaagctcaaagatcaatggctggaggtacatcgatcctttcattgcatatattatagatatgattacagttttattttccgcatttcatatcatttatatatgctatattacatacactatatatatagtctaacacctatttctttcggcaaccgcttaatagaatcattccaggatagatcaagagcttttaaattctttaattcaccaatcatggttgtgtcttctacaaagcatctacacagacatagtgtttgaagattttgaagagaaggaaaagacgaaggtaatgatctcaggcatgtaccattcataatcaaaactttaagcagcccagtttgcttaaaaaattcatctggaatagattccaaagtagacccactggatagaagaagcaattctaaattaggacattccaattctggaggaagattataaaaatcgtcataatcagcaaacgaaattgctttagatgctttaggtctttcatcttcatacataacaatgttactcatcatcctatgcc

SEQ ID NO: 360931 - DNA, 660 bp, Cannabis indica
atctactttctagaaaaaaatacattcagtacaaaactaaaaatattttttgtcaaaaaattacgatttccatactgttgactgaggttttcaacaaccagttaagtaatatataagaagagctgtagaaagtttaatgcataagatttttacgtggttggggcattaatgagccttagtccacgagtctttttttttttaatgagagtatttattgcagagaatgttcttggtggatttctctctttgattcctttaaacccaggatgttcaccactttttcagtttgtttgtggggtatttatagtatttttctggggtgatccctaggaatggatcacttgtctttttgtgttagcttcataggggcacatattcccagcagatacaaaataggaaatacatgacctataccgtaggtatcttaggatttagatggatataattttatcccctctcgattgatgagatcccacataaagtagccatcactagtcttattgattatagcataatagccgaaaagggaggttacgccatttgtcatgtcgtttatggagattttaatacgtcttcccccacgcgacattaaatgcggggtgactgttcaagagatctctgcacctcccgaaacagtcttagcatacctctggcctcccg

SEQ ID NO: 360932 - DNA, 550 bp, Cannabis indica
gaagaataagtggttgaaataaagtggcaaatttgtaactagtgaggcccatagtggccgaccacttactatgaattttacccattattttactttttcaatccatataattaaatcctaaattctagttgaaatactataaaaggaacatgatgctctcattctcatcaaactcacttttcaactaaattaaacgtagttttcattctctgacaactagtagatgagagacacgttctatagtgatttcaaccctcattcattgttcttcaccaatttgagccatagtgatagagtaccatgcccacacataacaagtcaagtaatcaatcatactgcggaagacggtggtaactaactcgaaggagagaaagagatctaggctcatatgttgttattactccgtgatagaaaggaacaatggttaaaaatctgagcgaaaggagtcattattattcctctgcatcaatgtaagattttctaaactcttatgtgtttaatttcatcgtattagataatttatatttagggtgttaatgaaacatacatg

SEQ ID NO: 360933 - DNA, 545 bp, Cannabis indica
cgtagacctacgtgttgctctcacacgtctaaatacaataaggccttagaatggttcttctcggttctaattaccgagtccaacctgattatgccttgatcgcataatccttaaatcttaatatatattcatacatttagcatggcatagcatttactcaacttatatcactagggtaataaccctaggctattaaccgctcatattagggtaataaccctaatcccgattacaattactcacacatatcattttcaacataaatgccaccgcgcatactctacgtgctaactactatcttacctgttgtcctgcaatagcagagattccaaatccctaggtgctcctgaccaagtgttcgtaatcctagtcacacaatccaggattttcacaaatagggttaacccatgattccatacttataaaatatattcatggcatttaaaatttagataatcacatagagcttggaacgagctttctaacggtatatagaactcccaaatcggagttcggaataaaaagatatgcattttcaaagttgg

SEQ ID NO: 360934 - DNA, 648 bp, Cannabis indica
aatttaaatttaactttttctaaaaaagaaataaataaaatagtccagtctattgttaaaccaaacacaggattactttcagcataatccaatcttgtccagtccaatccaatctttttcaatccaattcagtccaatcctgcgtatcaaacgggccctaaaagtgttagtttagctagaagcattgatttctcgcctttaaaggcaagtgcaagacttggaaaacattcatcaataactctcaagaaaataacttcaataaagaatttcaaggacaatttaattgacaaagacatgtagaatatgaaagagacttgagaaataattttcctctttgcaagtaatttcaattttgtgaattaattcatcgcgttcacaagagaggaactcagctatttcttctcatcgtccaatgtaaactcaacatgagtaagacacgttcagcaatacccaaattatgacttctaataattgaatatatatacatataaaaacaaaataaaagaaaaattaccccctagaagctttggactttgtcaaaaatgtctagtctacgagcatgtttggtattgttttctgttttttgttttaaaaaattgtttttagaaataagaacaaaaaatagttttgtaagttttaaaactacaa

SEQ ID NO: 360935 - DNA, 893 bp, Cannabis indica
agttttatggtcatatcgaacaactgagaaaacggcaaccggacagaccccatttgctatggcatatggatatgaagctatgttacccatagaactcgagccaccatcccacagaagattggcatacaaccaagataccaatcacatactattggccgaatgacttgatgaaatcgaagagaagcgaaccacgacaaacttaaagttggtcacccatcaacaaaaagtagctcgttatttcaacaaacaagtgaaggctcggaaattctttgtgggagatatggtcctaagaagagtatttttaaacaccaaagacagtaagacaggtgtacccggacctaacttggaaggaccatatcaggtactcaaagttctcgaatcaggagcatacaaattgggtaagtatgatgaaaaaatgtaacttgttctagtagtacggtattggaatggggaacatttaagaaaatactaccaataaagtaccaggtcggacgaccatataagtactgaaagaacatttacttttaagtgaatggcctgctaggcagaaaaagtccaatggttcagataaaatgaaagagtactcaggtcggatgaccaccatttaaagtacaatttctaatttctgcaatttgttttatttcatgttaagctaaaagatcaaaatagatcaaatagctctaatgtaagttactacagtaacataaacactttcgatctataaattaataaagatgtttatttaaaaattaaaatttagtcgaaattcctaacatgatgctaatttaccatccaatgcgtacaaaatgtttggtcaaacccaaaaccccgaacaaataaagaagtatacttgtaaaaaacaagtgaccaagagtaataagtctgctcggtca

SEQ ID NO: 360936 - DNA, 620 bp, Cannabis indica
tttaacctttactaaaatatgatgtttaacttttacttttacactttttcttatattttttttaacactctttttatatcttacaaaaaattaagcactcctcttatatctttctatcttttacataattaataaaagtagtattttttttagatgttttgtagtttatgccgagttgatttatgaataatttgtatattttaacaaggttgatatcttgttatttctctattcatttatacccgtcttttatttattttatagttattttataattatctttatgttatttttaggtgttttgtagttgttttatagttatttttgttattttttttttttttttgttacagtcgttgtttagtttatgtatattttctatggtgtacatttttagtttaatatgcacaatttttttgttgtatatgtatgcatttgttttgttatttttatgttatttttaagtgagtttaaggatttatttttgttcaacggtactttttagttatttttttatggtgtgtaatttttgttttgtatgtgtgttgttttgtagtttaaatacatatatttaaattaatttccggacacattttattaaaatataatgataagatttt

SEQ ID NO: 360937 - DNA, 599 bp, Cannabis indica
tagtatttgttgaaacaaacactttcttatcttaatgactacgggatggtccacccctaatcacttagaatagctatgaaacatgcaaatcttagttaactgttctagcttttttaagatcacgatcaggacatccatgattctagtaatggtttacactaagtacataaccattccatcattctaaaattttcctattactagggtattccctaggacttaggcaactactagtaactaatcatagaccttttactttcatcaatatgcaaactgaatttctagggaggtaagtttggatacaattcgaaatcaacttaatgatctttgaactgcatatccaccaaatatttctccacccctcagttcgcaagatctttaaccacttaccttaatgttttcaacattgctaaaaattcatgaaatttctcaaacatttcaaatttctttgcacaaggtaaaatctagagtaatcgtctaaagaatataacgaaaactcatatccatcgttgaatgtacatccatattcgaatatagattatcatactttcaactggacataggcataattgactctttgcagagaatgatcttgtcaa

SEQ ID NO: 360938 - DNA, 591 bp, Cannabis indica
gacataaaaatgcattcaggaatcgaatataacaacataaataattatttaagtatctataaataattttcataattaaatcataattaactgggaattcccaaattaaactaagcggtctttacaactactttgaagatttattaaaatcacaaggagctgggaaagtgagtttcttaataattctcaggaaaagtttacaattgtttacaacgtaaatgctctctagaaaatatgattttcggaaccttgtacaatagaatggctccactttttattcggaaacaatataataattaaatttcttaaaacaaataaaactaaagagggaaactaggaaggtttcttattatttcttgttggtgcaagtcaatcccacaaaattagggatttcataaagacctgaatgctggaatatttatggacagtatgcgtgaagatcctcttaagctaaactaacttacttggaagaatcattattcttggataatgaggatctgtgctgaaaatcacgtacaggttctgcccggataatccctgctaaaggtataaatgttgggttttatgccctaaataaaactcttcacaatc

SEQ ID NO: 360939 - DNA, 514 bp, Cannabis indica
aaaaaaaataatatatatcaaaatatagaatccatttgatcaaaactcaagattcaaacattataaatccttatttatttacataaactttatatataattttgtattgatcacgttcattctcataattattggagatggaacacaaattagagctttcaaggattcttggctttcacgtatcaggtcttttcagctaattacaaggagaattaatgatgaatatcgggtgagtggattaattttttcatttggtacttaaaatgtggggaagcttcaacagatatatttgccaataaatgtggacataattttatctattctattagtgaagcgtgaggcagaagatggttggtgctgacactacgatagagatggcgtttataatgtcaagagtggctattcgttagcgtggtcgctccaagttgaggagggagttgtagattcatccaagttatctcgttggtggaatggagtatggaatcttaatataccaccaaaggtgaaagtattt

SEQ ID NO: 360940 - DNA, 764 bp, Cannabis indica
ttcccgtcttctctgtgtttcaataatgacaatacgacacgtgtttattaattgaaaaactcacatcttctgctctcttatagtcttttgaaagtggctctcttatagtcttattgagaaaaaaaatcttttttctatttaattttatttttttaaaaaaaagcttatcacataatcatacaaagtctactatcttttttagcctcaataccacttcggcctctaggcaacaaatgtgtcatcttcttcgaatgaatgaagctcctgaaaatagtttgtatcttggccttccttgtgttatgggtcgcaataagaatgttattctgggtttcttgaaggacaagatgcagaaaagaattcagagttgggaaggtcggttgctctcaaaagccggaaaagaggtgttgatcaaaacagtggcgcaagctcttcctacctatgctatgtctgttttcttgctaccggtggaaacctgcaataagctagagggtatgatgagcaaatattggtggagttcgggatccaatcaaaaccgtggggtaagttgggtgagttggaggaagctgtgccgccataagcatcatggggggcttggctttcgacatctaagggatttcaacttagccatgttgggaaaacaagcttggaggttaattcaaataatctttctcttgttagtcagggttttataagggtccagatattatcctcagggttcttttctgagtgcttctcttggaccgaatcctagcttcatagtggaa

SEQ ID NO: 360941 - DNA, 532 bp, Cannabis indica
tggaatctgactaggacctagacccaggcctggacagggacgcagacccgaataaaaactcggatcggactcaggacacgaacctgaaccccgacacggacttggacccaaacccggaccacgggactcgatcctggaatcaaacaaagcccctagcctaaattgggattcggacctagacatggacatgaacccagacccagacccagaccgagatcaaaatactggacctagacccggacccagacgtagacccagtcacgaacctgggacccagacccaggaatcgaacctggacccagactgggatcctaaaaacccgtacccaaactcggacgaagactcattacccgaccccaacctagacccatgcctagacacggaaccaaacccagacccggaatcataattggaactatgactaggacccaaacttgagactagaatcgaacccaaaccaaaacccaaactcaaactagaacttggactgagaccttgactaggactaggacctgagacttgggacctgaac

SEQ ID NO: 360942 - DNA, 599 bp, Cannabis indica
tttttatatttcgtgtcagacgtgtcgattcgttttttacctgcatctaattttttcaatactaagccgatctgtaaaaaaaattgtgtcatgttgatgttgacccacaactggagttatagagaaaacgataaattaagagttccattaaaaacttatatacatttatgctgatatactttttatatttatatatatataataaaaattagattttttaaaattttaataatttatagaaaattaaattaaaattttttaactcaacattgagtcactaaatatatatttttacataattatattattatgaataatttttattttattttatttaaaaaattgtatcaaatttgtgctaagcgggttatattgtatttgatccgtttttattttgtatgaagttatgtagattcgttttctaaccatatttaatttttttgaccctaacttataaaattcgtgtcatgttcgtgtgcgtatgctccgtgaaaacccatttaccactccaatttctaatttaaattcacattcctattcctaataattctagcccacactttaaactcttttttttattattaattctagaagcccat

SEQ ID NO: 360943 - DNA, 626 bp, Cannabis indica
gattataggagtcccatgtgggtgagctatctatcatctcgatgtcttccttttcacatacacttggctcatttagcatttccactggaaccaagtttagttcatccaagtcgttctaggaggtcagttttgctaaggcatcagcgttagagttttgttctcttgggatttgctcgattttacaataatcgaacatttctaagttctttcgaaccctctctagatacttagcctttttaggcccttagcctagtattcctcgagaacctgatttacgatcagttgtgaatcgctataacatatgagattcttaaccttcaacgcttctgctatcctcaaaccagcgatcaaggcttcatactcagcctcgttatttgacgcgtcaaattgaaatctcaaagcataatgaaacttaaagccttctggcaaaattaatatcacccctgcacccgagccctgcttgttggatgctccatccacgaataacctccaagtatccgtgtctcgctgaacaagtggattttcttctggagttattccttcaattaggaaatctgccaaagcttggccattaatggatgtttgatggtgataagttatgtcaaactgccccagttcaattgacc

SEQ ID NO: 360944 - DNA, 806 bp, Cannabis indica
aaacaacaaagagaaataagagttgttgaccgagagctgacatgttaccactgaagggctggcttctgcattagcctgagttattgcgaacacccttgctggagtgggttttgcagtagtcttctgtgtctcagtcttgagttggggtcaatcccttttgtaatgccccaacataccacattggaaacatccctgccctttactctcccctagatgatgctttttacaactggggaactctgggtgagctaccctgacaattacttcaaccctggttccctcagaacctcttgttctaacctgagccactagatgcaacatgtgcctttcttttctgatcagtggccgagccactacctcacctactaaagcctgatgtaggaggagtaggagcccctccaacaaccggagtccctcgagactctaaggtacactctactgtgcccttagctagtagtgccttacgcaacatattagcataggtggtattgtcatcagtagtgatcattaagtcgtgtctgatcttcgcattcaacccgtctatgtacttctatttcttactgaaatcagttggcacgattcctgaggccaaccttgccaaacgattaaactgagtcgtgtattcagtaacactcatgtttcccttttgacccttttgagtcaatgttgggttttatggcctaaataaaactccatttcaatgtaatctgttttattcaacatcaataaagaagcataagtatttttcattcatttgtgtatgttttggttcaacttatcaattgctatttgatttataaattcat

SEQ ID NO: 360945 - DNA, 717 bp, Cannabis indica
cctacagggtcgtccagttaaaaacatcactgagttcaacgagagggctcaggtgtttgtacgaaaggaagaagctcgaaaatagatgaacttgttcaaaactggctcaggaagcaaacccaacactatttcaacaagtactatctcgactaaagctgataacccgcgggcctttggctcaaagagaaaagatgactctaaggtgtcatctaaagacaacaagaaacaaaagaagcacaacaaatacgtgctagtttataccatctatattaagcttaatgaaactcgagagaatatctacctcacgcatgagcacaagattgcattcggtaacctaagcccatgaggcacgcgaggcataaaagagatccaacaagatattgtaagtaccataaagacatcgggcacacaacagaagaatgtcctcagttgaaagatgagatagagagtctcatcgcgcgaggccacttcatgcaatatgtgaagaggtagggcagtgaacataacaaacccaatccggccaacaacctaaggaatcaggaaacacaacctcctcctgttgaaggagaggatatcctggttatttcgtgaaggccacatattgcaggagagagcaaaaacacccaaaagaggtacgtgaaaaaagtgaagagcgagcattctgcatttgctccagaaccttccaagaaaataaaacccattacaatctaatctgat

SEQ ID NO: 360946 - DNA, 745 bp, Cannabis indica
aactccatcttgatcatttttttgagcatcatcttgagaaattttttcctgggcaaccaccttcgatttcttctttggatgagctcgcccacgtttcgacaatggaggagcaaaatcagagtcttcctcaacaacaggttgtttacccttgtttctattagctaaagattttaacccaattttataacttttcttttgaacatgggaaggagttgatgaagaacgagttacagccatatttatatgtggattaagagaaagaaaaaaagagagaaaacggttatgggattcggttaatgggagttgaaaaaaaaaattgaagaacaaaaagaagagggaaaaaggagttgggatcgtggagggggaagtgttcagctatggaggtcaatatttaaaaaaaaactgaaaaagaaatagaaaataaaaggaaaaagaagagaaaaaagatggaaatgatgtgtatgcatcaatcactgacgtgtcaaaaagtaagaattgtgtgtgcatgtggtaaatatgtaataaatttaagcaaaagtgtataaaagtttctttattcgtgtgtaggtatttatgtaataaagattgcattttgtatttttgatgtaaaaatttcaaaatattaataataatagttttaagccattgattttttttttaattgtattaatttttgtatacattaaacttattatagtttttactttttttaaaaaaaaatagaacttccaattaatctatgtat

SEQ ID NO: 360947 - DNA, 744 bp, Cannabis indica
ggagaacatgagtgttactgaatgtacgactcagtttgatcgcttaaggttggcctcgggaattgtgccaaccgatttcagcaagaaagagaaatacttggatgggttgaatgcaaagatcagacatgacctaatgatcactactgacgacaacaccacctatgctgatataatgggtaaggcactgcgagctaagggtgcacttgggtgcaccctagagtcttttgggactccggttgttggtggggctcctactcctcctacatcaggctttagtaggggaggtagtggctcgaccactgatcaaaaaagaaaagcaccgtttgcatacaatggctcaggtcagaacaagaggttccgagggaaccagggaagaggcaatcgctagagtggcaccgaaacccgatacacttagccagagtgccccaattgtaagaagcaccatctgggggagtgtaaagggcaagggtgttttcagtgcggtatgccatggcattacaaaaatgattgtccccaactcaagactgaaggaccgaagactgcagcgaaacccactccagcaagggtgttcgcgataagtcaggctgatgcagaagccagcccttcagtggtaacaagtcagctctcggtcaacaactcttatttctctgtgttgtttgactctagggccactcattcctatgtggcagccaaaatttttagtaaattggatagaccgcacgatagttatgaatcagggtttgg

SEQ ID NO: 360948 - DNA, 556 bp, Cannabis indica
gaacctccgagcagtatgccctaattaaattcaatgatttatattgatttaattagcaatagttggtataaatttatagaaaattaaaattataattttaaaatgaaaattgaaaagtacctttggagtgtgaggtcaatagtcatcttagggcgtttatgtctaagccaagggtccaagtgaatgatcttcccagcacaaacaatctcaagcatccaatgacgtctaataagaaattaataagaaaatattaagtgttaatttaaaaagaagaattaaattatacttaactagtccttaaatagtacttgtacatactcgtagttccacggtatgaagaacatctgagatttgttattcattgtattcaaccattcagccaatttgataacaacttcttggtggacaattccatctttgtccgtggcattgagtagctctgggtcaaagaacttgaaatactcctgcatattcgttaaatcctcccaaatgcatctacataaatttatcatggttaagtgttacattttaataaatgggaaagaatattatgtaa

SEQ ID NO: 360949 - DNA, 708 bp, Cannabis indica
gcatgactagcgtaccgaataaaggttgatattatggtcattagtactatcgtacgaatgttctagcgactcagcactgtgttggacacggggttagggctatgattgggggtatatgggcgtctgatcataatccgtgttattgctatgttattgtttatatttttcttactgagttcgttgactcaaagttgctatttccatgtgtaggtaagggcaaggctaaagctgagcaaccatgagagcgagcagatggagattgtacatgtcgggacagttaggcttggagcgtacgatctttgggacatcaggcttattttgtatagtcgctaggcgacagacttctatatatgtacagtgaaacatttataaacacttttgtaaacgggatcccgaaattatttatgtaacctattttatgtttttaattaaatgactaaaattttaattaatcacgattttcgataacttcgttgattagcaacgagctccacagtaagttaaaaatcacgttaacatgcctaaaataattaaggtgttgcaatgaacacaggagagagatgaatagcttaatataaagatgatgatgaaaataaatatgaaatgataaaatatcaaataagggggtaacttgtgattacaaaacaaatataatatattaaggtggcgtttggtaacattttttaaatcagttttctgtttttaaaa

SEQ ID NO: 360950 - DNA, 436 bp, Cannabis indica
aaagtgtgttctataaattttattttcattttttgattttatttaagtcgggacagggtctaggttcaggctagggtcggtgttcaggtatgaggtctgggtcagggtttgggtctgaggtcatggttcagttctgattaaagttcgatttcgggtctgggtctggggtcgatgttcaggtccagggtccaggccagggttagccttcgagttcgggtcaaggttcgagtttaaggttcaggtctggggtccacgttggggccggggtttaagtttggggtctgggtccaagtttaggctggggtcggggttcaggtttgggatccaggtttcgagtcgggtctagggccaggtttggggtcgaggtcagggtccaggtccaggtttcagggtctgggtccaagccagggccgaggtgttggatatattttaccag

SEQ ID NO: 360951 - DNA, 1511 bp, Cannabis indica
aaagataagtttctataaaatagcagaattgaaatcctataggcccattaagggttcggccaaggatgattaataaagcaattatttttatcttttttaattccatttaaattctaaaccaaaccctaaaaagctaccctaaaagtatagctcttattttcaaatgacgactaggatcttttgtcggacaaaatagaaaatagaaaagatccactatcgagttcaaattcccttttcttcttcctcaaaatttttggagccttggtgaattgagagtatgcccccacatgtcaaaccaatacctagcattgtgaggaagactatgtctaactaaactgaaggagagaagattcagatcttgataatgctctactacagataggaatcaaaggctagagatctaaatagaaggagttattatattccgttgccgtcaatataaggatttcttaatctcttatgtgttcatttaattattttaggaaattcatatttaagattttagattatagattataatcaaacatacatgttagtaaatttagatcctagtaaaataagttttaacaattggtagtcgagccatggtaagattatttccatgaaatatggatttaaaatgatattttgttgatttggatgtgttcaggttggttttttgtgttaaatgatgattgaatgtgaattacaaaattttaaaaaagtacttttatttttgtactaaaatattttatttggaaagttggtgaaatggaaagatgcctcccaatatggccatatatcgaccctcttttgtaaggcctttgactttggtggtctcggccataaacctttcgatctaatccttcaaaggttctccctgtcgttgtttgacttcgacaaggtcttcttgctacaatggtatgagccttgaggacaagaattgtgtgtcaaattctcaagaaaacttggcccaagaattgaatcttcatggaggaagtttaaagtttcattgctgagttgttttcgaaaaagtcatcgagaatatgcgacaccacacatcacctgtaatcttttggagatcgagctgcatctcgaagtatttgatgtgcgccagtagattttctcgcccgatatacatctttcgtactagtatcttgaatttgggcaagggcaaggcatttatgtatgtcgagaatggttatcgccttgactggtctagctcaaggtctgaaggttttggaccagctaggcccttgatcatattccttaattggtccaactgtgcttgcacagaaggatccgtttttattgggatttgaatgactagtccttcttcgaggggttgcaggctcggatgtgttggaattattttaccaggatcttagatctactcacaagtatgttgattaacaacctaaatatgaacttctaaaatgaaattaattaaacacatataaagtatgagacatcttacattgaatgctgcagaataatatgtctccttccactcagatatctaacccttgatt

SEQ ID NO: 360952 - DNA, 1224 bp, Cannabis indica
agggcacaaaacccaacatgtcactcatccaatgaatgtcaaacatgactattcaaccaagctagatgagagagttccttctatagagattttacctccttcattgttcttcacttttgaaccttgagtgaatgagtgtcgtgcccacacatagcaagtcaagtactctatcatagtgaataagacggcagacccgaaggagagaaagagatccaggttcgaatcttgataatgctctgctacagaaaggaatctagggctagagatcttgaacggaaggtgtcattatatttcgctgcaatcaatgtaagattttcttaaacctttatgtgtttatttcattgttttagagaattcatatttaggatgttaatcaacatacttgttagtaaatctagatcctggtaaaatattcccaacacaaggttccaagggggcagtcagacttttgtcctcttttgatctcgactagggtctcatgacaaccttgtaggcatatacaactgtgatcttatgcgtgggtcccttaggaactctgtataagacttggtagtgagtccattatagtaaagtgcacaacttaagactcactatttttcaaagtaggtatactttagacggtactttgctgatacctagccttgtacaatgtaatttactggaaagtactcttgggtgcacttgactagaactttgtctgtagctttgtcaggttgctcacctcctcttatctcttctatgcaggtaatttcaagtgttgatctggagaggtgacagttgttgtgtctgttgggattttatgccctaaatataacccatatcaatataatctgatttgttatcaaaagaagattagaagtcatttatgtttacatgtagttttcatgtttatggtttaatgtatacaatttttgttaagtctagaacatatagttattcacaattacaatgatgtaaacacagtggaaggtaattgtgattatatgtttcaaaagataatgtcccatgattcatcagtgccctggatttacactgatgtgatagtcagcgataaagcttacttacacctccgataagtgttatgttctttctagaaaattggaaaagtatgctagtatcggatgtatggagtatacattggactgggactgatattgatctagtaagatataataatctactgatgtatctttctaagtcaatatcactaattgatcttagatc

SEQ ID NO: 360953 - DNA, 674 bp, Cannabis indica
tgttggaggataggagatgagaataaagtttgaattctagaagatccatggctgcatagacccataagtttttcacatttatgatagaccgtatcttcttgaaaatttgtatgtaaccgatcttaaaagaagaaatggcacgtggaatgaagagttcattaaagctttatttaatgatgaagatccagcaatgatttttcaaattttgagcgaagattggggtattgaggatcgagttatgtggcattatggtaaaactagtaaatacacagtaagaagtggctataagctggttgtggcaatgctggaaaaagaagctccatcatatgcacaatatgtttaaaggtggtggaagtttgttttgaaaataaaaattccaccaaaagtgaaacactttgtatggaaagtttgtcattcatggatgcctacaagagttgctttgacacatcgaggtatgaaaatttattcaacttgttttcgatgctcgaatgggtatgaggaggatgttatacacgctcactacaaaaaatcctttttttagtcacaataaaatttgtgattaaagataaaaaaaaattgtggctaattataaattatcattattgtgttgtgattgaaaagtccgtgactaaaagtattagtcacaaaaattacaatttgttgtgactaaatgt

SEQ ID NO: 360954 - DNA, 737 bp, Cannabis indica
attgtactatcaaagtggagtaactgctgtggatcaaacagagataattgctatggatcaatcaggtacacatacctaattattatatcttattattgtgttctatgttatatacaaattgatcttggggtttatattaatttatctatcataaaatacatgtatatataaattgggttaattagcgtacgttttgagaaacatgttaattaattaattaattatacttttagggtttaaaacattaatggttgtgtgggttatttctgtatgaattacgtatatatagttaggggcagagccaaaataagaagttagggaatgccaaactatattataaatttaggtgataaaatatttgaaaaacactttattaacttcataattaaagtttttttttttaaaaaaaagcttcataattaaaaataaaacacataatcgatctctttcttgcatatcacgaaagttattgataaggaatactaattttttttgaggatttctctttttcaatatacaatactagcaaacaactacttaaatattcattttttatcttgttgccaagtataatatttattatattcatagttgaaaaagatcatttttaatttgctaattctagaaatgcaagaataagagttatcactttatacataattaaaaaatttaaagtggtacgaaaaaaaaaattgaagtgatatcttgcaaagcaaatcaatattattaattttttt

SEQ ID NO: 360955 - DNA, 779 bp, Cannabis indica
ctccacacacctcctcctctctctctctctctctccctctcaatatggaacacaattggtttcgtgtgtctcttgtttccaacacttcaatacccatttatttaattattgtcacaataataatcgcagaaaaccattggtattgcaatgcgaaagctgagtggaagcagcaagattatttgatgagctataacaataacagtgatagaaatagtaatataaatttagaaaaggggaaaaggtgtgatttatttgaagggaattgggtttacgacaattcttatccactttatgacacatcagcttgcccattcgtagagaaagagtttcactgccagaagaatggacgcccagataaagcttatctcaaatatcgatggaagcctactttttgtcaattgccaaggtacgtatatacaatcaatgatattatcattattttttatatgtaattcgtttatgatcaaattagtagtatactagaaaaattaagttttatggtactataattaatgaagatatgatctttgaaaacacaggtccattattaattaattaatacaagtttattaattagtcgcattcattgtattatttgaatgtttataaataattaatggatctgtatagactatagacgataatgaataataataataataatatatattaataaaaattgggggacagttaattcatttatatatatttttatgctttacagtaattatatatatttttatatatgtacaactaaatgacattagggagaatattac

SEQ ID NO: 360956 - DNA, 523 bp, Cannabis indica
ttttttagtgacttatcattaccacgtgggtaaaattaggacttaacgaggatggacagacgacaccttaaaaatgtaaacggagagtttttccaccaaagtatgaggttggatgattttttacaagtaaattgatagttggaggttttgccgcaaattactcattttacttcgacaaattaaatacatacctcgtgtatttgaatatgagattattgagaaagaattacttaaaaatgcatgcattttacaaaaattaactaactaaattctttttttgttaaacgataaaattgaatttgtatgtcactacaacattcaggagcaatagcggcgggcccctcggccgctattgctccattttttggccgctaaagggcaatagcggcggacctcggccgctattggtccgccgctattgcttggccgctattaatagtattagcggccaaaaactggttccgccgctaatactattaatagcggcggagcaatagcggcgggaccccgccgctattgccct

SEQ ID NO: 360957 - DNA, 550 bp, Cannabis indica
cccgaccctggttctgtgtccctagtctggttgcatgtttgggtttgagttcaggttcgggttcgggtcccgagtccatgtttaggtggggatccgggtccgtcacccaattcgggcctaggtctgatttggagtccgggtcctggtctggttacgctgttggatctaggtccaatttcatttaatattcaaagtccaagtcctatttcaagtcctggtccacttcccgttttggttccaattttgggtcgtagggtacgggttcaagttcgtgtcttggtcaggtactagcgctcggttctagttctgtttcctagttccctatcctgattctgggtcaagcattcgattattgtgtgggttttggtcccgatctaggttcgggttcgagtcgtagtctcggttcgggtttagttcgctgtctagcttttgatcttagttcgggtttgggtttaggtcctggtcctggtcctagtcctagtttgattctagttccattggcgattctgagtttgagtttgggtttgagttcgggtcggagttcaagtcc

SEQ ID NO: 360958 - DNA, 508 bp, Cannabis indica
gatgttaaataacatacatggaagtaaatctagatcctggtaaaacatattccaacacgataactttgactcgcatgcatgacaatcatctcagaccggcacaaaagcataaagaaagcagtagcttctatctacccaaacatattccatggagcatgcatattccacttgcttaacaacattaaggtcaattttagagtacacggggaagatcttagaataaactttgtcaaagccgccaagacatacaacatgaaatcatttgaaggatacatgttagaattgataaaatagacaatagaatcagaccttatcttcagagaataggatacaaatattggagtagatgccactgcccgaccagaaggtacacaatgatgacatccaacatagctgagtcgataaattcagcaatactttccacaagaacactgcccatcactacaatgatggagagtctttgaagtttggtacaaaaatgggtttggacaaacgacaacgaagcaca

SEQ ID NO: 360959 - DNA, 556 bp, Cannabis indica
cggtggtatcgtcgtgccttctagtcttcttctccggcgatttatccactgcgttactatctctgttttttgttcgttcatccaccatgtcaagtgaaaatccttctgctactcaaatggaaagtgaggaacaagcaccaagatccacagaaagtccttctgcttcgactggacatggaaatcaagaattacagtttgttaatcaaagaaatcctctcgaagaccccacaaatccatattaccttcagcatggtgataatccaggtaatattcttgtttctcaacttctcactggtcaagataactatgcttcttggtcaagagctatgcaactttctgtttctgttaaaaataaactaggtttcttggatggttctattcctaaaccaatgatctcagattatacactgtataatgcttgggttaggaataataatatagtcatatcatggattttaaattctgtttccaaagagatttcctcaagtattctgtatgatgaatccgctgctaatatctggaatgatctcaaagttagattccatcaaaggaatgg

SEQ ID NO: 360960 - DNA, 661 bp, Cannabis indica
agggtcctagttcgacaattcttattcatgttctaattttaagtcccatttctgtgtttgggttcgggatcgagacttggtacagttctaggtcccgaccctaattttgtctccctagtttagttccatgtttgggtctgagttcaggttcgggttcgggtcccgagtccaggtttgggtggggatcgggtcctactcccaactcgagtctaggtctgatttggactccgggtcgtggtccggtgacggttctagatctaggtccaatttcatttatgattccaagtcaaaatcctagttccagtcccggtcaactttcgaattttgttccaatttgggtcacagggtacgggttcgggtccacttttgggtttgggactgggttcaggtctgggtgtgggttcggatccttgtcaaggttcgggtccagggctgggtcccaaatccgaacaccgactacaggttttgtccaattctggtgccgggtcacgagctgggtcctaggttcaagttcgggtctaggtcgggttctaggtctcggtcctagttctgtttcctaagtcgctatccagattctacgtccagatcccggttattgtgtgggtttgggtcctggtctaggttcagtttcgagtcctagtctcggttcgggtttaggtct

SEQ ID NO: 360961 - DNA, 464 bp, Cannabis indica
ttccatctttagtattaattttccaataaatattatgaaaattacttaattttagtttgtccaaaaataattttcaactcaaattaaattttccattaatatatatctatatgatggaattcgtaatccaatttattatagtaatacattgttgaaatcttattaaaataaaataagataaaactggaaaaatattctaatatatgttgatctaaaattaaattaattaattttcaacataaatataattttcctatttaattaaatctccaaagaaaaatatcaaatatttgagtatcttgaataaaatcatctgaaatattaattttctattaaattaaaaatatctagaaaaaatactaaaagtgtacctagaaaataactatcttgatatttcataaactaattacttattttctaattaaatacaatatatattactctatttattttaattaaatcat

SEQ ID NO: 360962 - DNA, 1152 bp, Cannabis indica
atatgctaaggggagggtgctcatccaggaacgaacctaaaagatgacgctcatccctggagaagtgggggaagaccgtttctctagggacggaccacgtttcaagagatagtcgttttcttaagataataaataggcccacactgggactgggtgagggcatcgaaagatatacgaatattcacacactctctctatagttttacgactaaacttatcatttctctacgatctgacgtactctttctcattccggtgagcaaggtttgaccgtcgatcatcacataaccatagacacaggaagtatttatttacatttcttattttcttttctacttcgcactataaatttactgacttgaccgtcggagtgccttcggccggcaccatcccagtatcccaaggtctcacggtcatccttttatctttgtttcgcaggttgtcggtgcccactaacgctcattcatatcattgtagattttagcgtctccaatttggcgcccaccgtggagccctgataaactgactgtgagcaaggcgatctatcattaccacacttcagattgcagaagaaggagagtttgttgcccaagaacaacccaatgtcaatgaaaaacttgccacaataatggcccagatgcgcgagatggctgaacgaactggagttctggagcgagaaaatgcaacctttaaggaggagaacgcagcatttaggagtgaaaatgccgcaataaaatcacaaatggagtcactgaaggctaccatgacgactcctggtgttgctcaaagtcgttccgagttccaattgcaccaatggcatcactagactcaactcctataagaacagagacccaagtctctgatcaacaaacactcggagggacatcgactccaacgttaggaagtcattctgtcgtaggaggctctcaacctcaacaatctgaacatactgatatgcaaatagatgggacaaactctggaggtctaacgaccaacaatgtggcctctgacctgcctatagtcaatcttcctacaactggcctgcctacggtcagccttcttgcaactggcctgcctacggtcagccttcctacatctggtctgcctacggtcagccttcctacaactagcctgcctacagtcagcctccca

SEQ ID NO: 360963 - DNA, 591 bp, Cannabis indica
cggtattaagatattacttaatggtacgcttttcttaaaaaaaaaatattacttaatgatgtagcaatgtattttcttaagatttttttaaaatgtattgatgatagcttattagttttttgaaataaacttgaaagttaccaaaatatatcttaaataataagattctattagtataactcaaaaataattagctggtatcttacaatgtaaaaatgtacgttttgaaggtaataaaaaattatctcaaaaatatgatctaaaaaaatttaataaaagttaccgatttgtattttaccatcatcataagaaattaaaaagtttttttttttttttttaatccaaaaggatatatttagttagtcaaaaagtaactaagttgtgtttgagaaataacttaattattttttaatttggatatcaaaatttctatgtaattacattctaatacttttatgtttactttatatttgattaataaaaaataactacgtactactcacacgaaaattgtaaaagtgactctcttaataaaaataagcatataacatatgtggttaaaaaattccattaaagttactatgtattata

SEQ ID NO: 360964 - DNA, 719 bp, Cannabis indica
agcaagacataaaataatgataaacatatttatcacactatataatcagtaatgccattcacatattcctgtatgacacaaacctgcatcttacgctcacatgcctatttatgtctacgtagcgtagacctacgtgttgcgctcacacgtctgattacaataaggccttagaatggttcatctcggttatagttaccaagtccaacctggttatgccttgaatacataaccctaacttttaacatactcatatactcatatatatatatatcatggcatagcattcatataacatatatcactagggtaataaccctaggcaattaatccgctcatgttagggtaataaccctaatcccggttactgattactcacatataccatttccaatataagtgccaccacgcataactctacgtgctaactactatcttacctgatgtcccgtaataatagagattccaaatccctgggtgctcctaaccaggtgccggtaatcctagtcacaataccgggatttacacaaatagggttaatccctaaatccacttccacaaaaatataaaattggccttcaaatcatagataatcatatagagctgaaaaagagttttccaacagtataaagaacgtcccaaacggtgtcccgagtcaaaagttatggccaaaataaaaacttaaaaaaataaaataatctaccattatcatggtcgcgacc

SEQ ID NO: 360965 - DNA, 430 bp, Cannabis indica
tactcatatttcactaattaacttgtaattatcttaagtaagataataatcgtactctgatatgtctaattaaatatcattatatttttcgggatattacatcttacttccaccgacggtttcttggtcaagaggtcacataggtctcttagtctgctaagtcgatcttagactccagtctacttgggtcttgttgttgtctcctgaccatagggtcgtgaaggcaacactggtgaggtcttcagaatgaactccaaatcatctcaagatgattcgctgcgggagtgatcattttgagtattgtagtagctacttccttcaaagtagtcttcgtctggatcactagtatgaagagaattgaactgtttgttctggttctactcctctccatgtacttgggggaagtaatcgacttattggaagctcggtt

SEQ ID NO: 360966 - DNA, 866 bp, Cannabis indica
ttttttttaaatatttataattacttttgaaaactaatattacgtggaccacttaaaatttgctacgtgtacaagtgtgtacacgtggacagtccatcgtgacacttaattgtgatttttggacagaggtgttcagagcaaaacggaaccagggtttaggtagtttagccgctaaaaattcggtttttgtggttaagtgttacaaaccgtaaagttcaggtggtttagccgccaatatcctttttttatgggtacatatacttttgagtttctgtacaagtgttttgtaattatttttaagtttcttttattttcttttaaattattgatatttttttattttcattttattgtcgcaatgtattgatacatatttaatttgcatattaacatggtgttgatataattaaagatgtttgtttgttgttatttcgttgtatattaaggttatgtttctttaaggtgtcgataatatttattgatatccaataatttgcatatttatttagtattgttgtgtagttgtattttcttatccaataaatgtcatttttatatatatatatatatataattttgagtttttgtcaaattatttgatcattgttcgttgttatttaattgttcaaataagaaaaaaataaatatatatatatatacgcttagtttatttataagtacatacattaatattatttttgtgtagttattattgaatttttcgttggttattatttagttcattaaaaaagagaaaaatagtatatatttaatttttacgagtttttcagttagtgtacaattcttttgtaattatttttaagttccttttattttttttttaagtattattgatgtcttgtttt

SEQ ID NO: 360967 - DNA, 944 bp, Cannabis indica
attcttcttgaactcaaaaacttcttaaagttctttgtgagtagggttatatcctccatatcactatcaccatcctcactagcttcactatcatcatgtgaagtggatttgaatgcaatggtgttattcttctttttatcaatttcctcttcttcttgagcattcatgaaaatctcttgattcatgagagaaccaatgagctcttccaatggtagagttgagaggtccttggcttcttggatggcaactactttgccttagtacgctttggtgagacttgtcaaaatcttggtcaccatatctttttgtgtaagtaccttgccaagagggtgtaaaccattagtaatagttgtgaaatgagtatacatgttagcaatggtaacatgttgtaacatcttgaaattctcatattgagtaactaaaagttgaagtttagtttctttcatggcactagtttcttgatgagttacttctaacattttccacatatcatgagcagaggaggcttgctcaatatttttaaatatatctctatctaatccacgtattaaagcatacttaggcttagcattcttagacatcatctttttatcattttcatcatttgcatcatatttctttacaatttctacatcatctacaacatgcataagaatgtagggaccataacagacaataagccacaaatcataatcaatggattgaagataagttttcattctaattttccaatacggaaagtctaccccatcaaagaatggtgccctacttgtgcttaaaccttctagcatgttattgtatgaattgcttggaaacgacatacccttagattgtgaaatcaacccaaaaataagtgcccttgctctgataccaatggttagtccaagatatgttccaagaagggggatgagttaaagattgaagctaattttagaaatttaaaa

SEQ ID NO: 360968 - DNA, 557 bp, Cannabis indica
gctcttaacgattcattttccgatcccatctctcttgaaattgaggctaaatttgatgcttggattagcaaatgattgctaaaatatcctaggtgatttttttctttattctgtttttaattttttcattgtttgcatttcattttatttcgccaattatttgagttcaatattgtttctttgttgtttattttttgatataggccttacaattcttatgaggatggtgcgaagaaaatttcatcggggttcagattaggtgtagattatgttgaagataaaacttggttttatcatttgtcttgttgtgacctgtttatcaatgactcggtaatatttctttttccttttaatttttttttatcattgtatttaagtttagctactgttattaagtttttgtaatatttgttcactatttcttttttgtttctttattgtgttgtttcagcatatgaacactatcttctatcaccttaagaaaaaagggaaatattcttctgctgttacagtgaatttcgcaacaactgactgccttttcgatgattccattcaat

SEQ ID NO: 360969 - DNA, 500 bp, Cannabis indica
ttgaatctaaaatttgtaaaattaaagacaatttaattaatatattgataaaattttatcaaaaaattttgaatttagggtaccaaatatgtatgttaatatgtatacaccctataaaaaattagttgttctactgttttttattttttataaaaaaataatatttttataaaaatttccgtgtaacactaaaaattataaatttttgctcaaacttgtaaaaacaccttttatttttagggaaatttacatggtatactaacttttgtcatttttttacaaaaatactgtcagacggaattttttacatttttactgtatttttttataagtttcatactgcagtatactgtgttaagttttcactggtgttgtactagtgttttactggtgttctactggtattttgagctgttctgctttgtgttttactggtgttttataaaattacagtatttttgtaaaaaatttcgtgttacagtatttttataaaagttaac

SEQ ID NO: 360970 - DNA, 678 bp, Cannabis indica
ctttgtacaagccatcatcctatggctgggtacaaggccaaaagaatgtccttcactagaagaaggaggactagaacgaagacgaggatgatcctcgtgcagaagttgaagaaaatcctggtcgattcgatgttcgagttcccaagactcgcctgagttcatctacaaaagacaacacacgagatgagtgttggtcagaatatcaaacaataaacaagcagatatgccgaccaggagtactcaacagattaaagaatgactatgtttaaagaaaagtcagaactcaagaagtcaaaaaaaatttgagttagggcaaaaaagttcatgaagcttagaatgagcaagatgaaagacgggcgttatgtagttcaaaaacaagcattatggctgtaaacccgcatgaagacatgataaagaagaatcgcagaggtttctaaccctagggtttcgtaaacatttttctacagcacagtagaagttgcattcgatatgtaaacatgcaaagataagcataaagaaaatcaaaaacttactcaagattcaagtgtctgggttcgagcaacgtgtatccaaccagcaattgtacgaaggcactttggcgactttgaagccaagaaattttcttttcgctctgaagtttactagtaaagaagggtgatgaaatgagtttatgtgcta

SEQ ID NO: 360971 - DNA, 847 bp, Cannabis indica
tttcttttttttttttaactaagatattaaaaataataatcacttttttaaaatatattaattaatagtaacagagcaaactaatgaattttctctaatattttaaaaatgttaagaaatatttgaaattcaagatgaaatctaagatcaagatatagatttgagaaatacaatattgacgactacaagtgaactacggtaatgacaagggatgagatacaatgatgacaacaaaaaagatatggtaataaaaataagtgagatataataaaacaacaagtgggatacaataataacaatagttttgaatgatcgagatatgaaaattatacattatgaggaacaccgtaattattttctacaccagtctatttatttatttttataaaaataattttttaacaaagcaatttaaaatactacatataataaattttaaacttcttaataaataatttcaaataaaaattaatgtaattgtgcacttatttttgataaataaaattattaataataatattaaataagataatatatttataattttactatatattagaatgacatttttaagtaactatttattataatactaaaaataattaaatcagtcacgcaaaaagtggctatattgcctagttattatatatatttaaaaataaaaattatgtttaatattttatataaaaaaattaagtttattatatatatttaaaaataaaaattatatgtatatataatcgcatttaatataaaatatatatatatatatatatttaattcttaatttaacgataaccttttgttttaaaaatgataaatgatatgcttctaataatttgtatac

SEQ ID NO: 360972 - DNA, 882 bp, Cannabis indica
ttacaacctcttagtcaacttccgtgcttgaaaatatattttatggcggtgtttgttagttacaacatcatcgctttaaaattttaaaaaatttcaaacaatttacagtgccgaagttaggtttgaagtttttttgaatacacgtagcaaaaattctgttttgttactgtaaactattcagaattttttaaaaatttataatgatgatattgtaattctaactaataccgctataaaattttttgaaaaaaaaataaccgacatgtgattttagacgtaaaagttgattaagagattgtaattagtacttctcaatataaaaacaacaaatgagtaaataaggttgatgtttcggcggtttaaggtatatgaggttaggaattgatatttgacctcctactttaaaataaccctctataccattatactaaacataattttgacatattctcttattatttaatattttatttttatattaatattttttttacaattttgggcctttgaacatttggaagctcaaagcgcacactttgctcgcctcatctcaggattggtagtcctgtgtcttatgacttgatacaatttattcattattttgataaaatagattttttttttttttttttatatatatatataattaaaaagatctaggaacagaggcaaaaactcaaattaagggggccaaaatgcaacagaaaagattaaacaaagtacaaacataattttttaaaagaaattaaagaaaataataaaaaaataataataaattttaaaaaatattaaaagatggaggggggggtcgagtggccgaccctccctacacatagattcgttacaattggtgcgacattctatcctctactttttcggttt

SEQ ID NO: 360973 - DNA, 863 bp, Cannabis indica
ttaattatttaatttttttctaaagattaattttgtactttttgtttttatttacttttgcaaatatatatatatatatatatatattataagaaagtgtttcgtggtacatacattttttaatatgtaaaaaaattattgttagctgctgctgtcatcttctctgaccaaggctcatttttagccaatggtgtggctttgggttgaacgtttttattttagacaccttgacctctgtgatgtgcttcttcttttcgttttcgagttttctcaagttttttttttatgaggtttctacattttggttgcttgattctgaggcctcaatgccacaaatttgcctttggtttttcctccgagggccactctggggtatggatctggtggtgttaaaccgtgtattggatcctgagctggagcctttgggcttgattcaatgaccgtggggattagactgtcatgccggatctgggttgctgctggtgatttggcagagtttggtggttgttgatgggggcttaggctgggttgagatggtggtttcattttaaaatttattgaataatcgggttgtcattacctaatttttattagaagatctttggataattgtcattgataggtgtgactgtcatatgttcattcggattagaggtctatcattcttcgcatttctttaaggctaattaggattttctcctcttgaactttgacatgtaccaaatcatgccccttgaacttttttagctgttaaaaattctccctgaactattgagattgttggatttaaggactttttttccaattttagtaagaaaagtctaacgtggatgaaagttcagggggcctaatttggtacatgt

SEQ ID NO: 360974 - DNA, 889 bp, Cannabis indica
atatcataaacttaccataatatctttctaagtaaatatcatttagttgatcttagatcaatgatctcaatcctgagatggttaagttctggttcaattgtattatttgtgttctttgacttgttcattaaagttgaccaattggatcttcctaatacttacatcttgagaacatggtagtacaattaaatgggagctctaatcatagacacggaatatatagcttctataaatgcatagaagtgaaatgatgatttccttcgagcttggctaaacaagattaaatggtggagtactcattttagtaatttttattagtatactgaaatattatttacaaggagctaagtattttaagaataaaatatgttgaagggtagaacggtaaaattttcctactcgatgtagatcatctatagaggatcattgattatttagattgaaacaatgaataattaatagtgtatctatatttagaacatatagagcgttctatataaacaggagttcaatttcaaatctatagtggagtcagaagaaattaataagtgataactctagaaattagagttatttttcacatttttttgaactaaaattggtttagttcttaagtttttaataatttagtaagtttttaattatttttgaatttataagctttattttagtttataggtttttctgtgtttttatatttattttcattataatatgttatgtgttatttatttgtaactttattgtaaatttctaattaattttatatatttttaggcgtgtttgtggaatgaaatgtgggattaaaatgaagaaaaacttcagaagatgggtcaaaaacataattttaaaaagggttaatttcacaaatgcacaaaaacaacaaaaa

SEQ ID NO: 360975 - DNA, 758 bp, Cannabis indica
taggttgcagttattcttttgggatcaattcaaatataattgtttataaaacgtggacaatccccacgtttcatttcatcactactctttatttttatcctttagacggttattgctaacttggaaggttttatctcgcttaatatgagttatcctccttgtccatcttaataaggaaaaatgctaagtgttggtaagtcgttcacctcgttgtatcccttcatttgagtcagtattgcgaggtgactgtcttgctatatgtaacttgaggttgttgcatgcgattatatttattctgctcaagtggatgaatatcctctttttgtctatgtattctgaggcagatgtatgtctcgtcaatatcagttcaatagtttttatccttgtctcgctttagactatacagtcaacgagttttgaatattatccattaaacctttatgtaataataacgagttattttaatctgcatttaatgatataacattattatatcatgaaagttgattcatattctttctgttagacacgtgtcaacttctgaagtgtagctaaattttgggtataacaatttcccattaaaaagtacatttttgattagaaagagctttttaaacgattataagggtatttttgtcttaacccaattttaaaaaattgcatgctataggttttggcggttcaggatttcgaggcacatcattagcattaaatgtcccttcttttccaatttagcaatatttgttgggttttatgcc

SEQ ID NO: 360976 - DNA, 659 bp, Cannabis indica
tgtgggaattaagaaaatgttatcccattttaccaatataccctattttaagtttagagaaaaaattattccttaatgtaagcatagaaattcaaatttcccttttttttattggtatatttaaatttaatatttttaaaaaataaaaataagctctaccaacgttgctagcgttagaaatgcccttaaggtaaatatggtattgattatcattcatttatttactaaatattgtaattaatagaatagattagtagggttcatttaaattagagataaaaaaaaaagagaaagattctcctcatgtttataaagaatacattacattcaaatttaaatttattatacatttctcttttaatttttttatcatatattaaatgtagttatataatataaattttttttttggacattgtaattcaaatttaaattcattgtacaaatctaaaaaatatctttttattatcattttttacccaatctatatatccaaaaaaaataattttctattattattattatttaaaacaatgaaataaaaaaggaatttatgtttacttagcgaatcactattgtgacactgttatttattgcagttacaattttttttgttattatttaaaaaacgaaataaaaaagtgtataatatttcttag

SEQ ID NO: 360977 - DNA, 608 bp, Cannabis indica
tcgccgtattccaattcatgcgtgcgattgcatgttccttggggtattgcgatacagccagtcatttgtgacatatgccagcattcccttttcccatacaactgtatatttagactagtagggttgctcaaaatagtgagttgtttccgttagcccaatggttatgcgaagaaggcatgccccttgagatataggagattcctcagctgtttcttgagatgtactgctagttagatatgcgtgatatactcgcaggttgtgattggttagatttctcgaaacggtgggtgtttcccagtaactctatggtcatgctcgaaaacgcatgccccttgggtcactgggtaactctcaaccgttttttgagatattcttctagtctcacaattgcgattttatgccttggtgggctgattgggtttttgcgagaattcgaactagccttccaaggaaatcttgaatttttaatgcgggtgaggtcacttgtattgttttcacacattcaccacactgaaaagatcttctatctttcagatgagcgacttgtcagacagccagatgcttggctctggaggcaatgctttcgaaggcgaccaagatcaggagga

SEQ ID NO: 360978 - DNA, 707 bp, Cannabis indica
ttgaagagggctccttactgcctattgcagccacaattgattcccagaattttttccactttttcaaggtttactacttttgcaatgctctttgctatctgttcttgggttttcgttgtcactaggcaaagtgccttgtggtctattcttcaaatcattggccaattgccccaattgaatttcgagattctgaagagatgctgcctgactttgaattacagtgtcattcttggccatatagtctctcattaagctctccaaaagaactagtttgagagctttgaggttggtgtggttgttgatgtcttggctgttgagaaattcccagtggaaatgattgttttccttgtgcttgtgctccacttgaacttgccccttgacctccccatgaaaagtttggatgatgcttccatgccggattgtaggagtttgagtatggattgttgttgcggttgaagttttgattacccacatatcaaaccgaagctggattggaagagcaattttcaaaagtatgcccatcaccacaatacacacaagaaatttttgccctttgactggcagcaactggttgtacacttcctcccatgttcatgttcttcaaaattttggtcattgaggccatttaatcagttagagcggtcaaagcatctacttcaagaacacccgctactttttggcttgtaggagctctattagttgaccat

SEQ ID NO: 360979 - DNA, 520 bp, Cannabis indica
atttaatttaaattttatattcttatcctcatcaagtctaaaccttatggtaggaggttcaaaaattaccaaattgatttacatgtttaggtagataaataggtaaatttgagaaagaaaaaaaattgatagcgttttttatattataattttgagttacatacttgagagatttgatcctatgaacccatacacaccataatacattctatgtgacaacgagcaagcctcaaagtcaggcaatataaaaatttgtaagtgtgatgatgcacccaattattatatggttaattaggatttttttttccaaactttgacatgtaccaaatcatgccccttgaacttttaagatcgttaaaaattccccctgaactattgagattgttaaatttaaggacttttgtttaattttattcaattttactattttggtgattgtttatgcactaaatcatgctccccagactttgatatctaccaaagcatgcccctcaaactttgacatgtattaaatcatgcc

SEQ ID NO: 360980 - DNA, 863 bp, Cannabis indica
aattcctgttgcatccacgcatagaactcagaattgcactctcagttatatagaacgctctatatattccaccatatagatatggtattaattatccattgttataatcctaatttgaccaatgaccctctatatatgatttacattgaataggaatccaaattaccgttacacctttcaatgtattttatccttaaaacacttagctccgtaatgatatttcagtgaagtgaaatgagtactcaaccatttatctctgcttagccaagctcgaagaaaattatcatttcactttctatttgccagatagaagttatagattccatctttaagtttagcgctcccactcaattgcactgtgctgacgacacaataaacaagaatgtaaatgtgaaaagggtttggatgaatttataaatcaaatagacaagtaaatgataacatgaaccaaatgacacacaaatgagtgagaaacaaatacttatgtttctttattgatattaaaagaatagagattatattgaaatagagttttatttagggcataaaacccaagaaagtcgtcctcctgtgggatgggaacaacgtttccaccgagaccatatcctcacaaccgctattgagaatggcgagtggccggttgtggttcttggggtggtctagtatgctcataacactcttgacaattctttgggccatttctttttgcaggccagcagcttcttctttagggcgacccttacgattttatttacgacttcttcttgtccatttgtctatggtcgtgctaccacagagaaacttgtaatgactccgtgttggttgtagaagtcggtgaactcttcgcagtcaaactgctttcc

SEQ ID NO: 360981 - DNA, 1292 bp, Cannabis indica
gactctctaagggcccaacgtcgctttccacagcttccgaacacaaacacagaaattgggtaatttacataagatagcataataacatatacgatattaaatatatttccaaaatatacatttcataattattaattaatctcatacataaaccttaatatttaataattcaaggtattaatcatatgcggtctttacaagttaggcttgcagtctcagcggagtgagacaggacttgtccgcttacgcccgaggggttcccgtagtgcgaagatgcggagccaaggcttggctcttattgtatcctagagtagcagagaattgtataccgctcatttgtggagtaaccgaaggtagggttcccgagagttgaactccgggtacatatcccgccactccggttggatagtatcctccgtaggccactatttgggcctcttccaagttgatgtatttttggaccctcttctggaaatcttggagattcgcggctccttcttattgtaattcgttccataacagggttccggtacggatcccacctaggagaagtgcaagctgttgtccgtcatcaactttcttagttttttagggctcttcctttaacctctttatgaaatttttcaatgtctttgtgggtatttgcttgatgttagtcagggcactaacttcgagattaatcttcctcgcggcgacgaactgtctccggaagttgacttgtaatttgttccagcagtccacagatcctggttccaactttttgaaccattcttcctcagaaccgcttaacatcagtggaaagcataagcacttggcgtcatttctaactcccatgaccgtcattactcggttaaatcgagacaaatgatcgctggggtccgagtccccagtgtaagctgccattttgggcatcttaaaatttttggggagctctgcctctagaatgtgtctggcgcatggctcccggtcctcaccgttagagtctgagtcgtcccccttttgtctccgggagactcgggcaatgtccttacgcagtatggctagctcagccagaattcctttgttcagcgttcctacggagaccgcctgtgcgtgtttttgtccaagtgatcgcacaaatcaccatgcctcaagttgatctgatttcttagatcaatgggagggtgtcttcggttccgtcttcctttttcctcgggttcctgatgcacagaaactctctttcggttctctcgatcctgagggccaagactccctttttggagtttgccgctctacggacctttcccttttgg

SEQ ID NO: 360982 - DNA, 719 bp, Cannabis indica
taagtgatattgacttagaaagattcaatggtaagtttatgatatttttaccaagttcaatcgattgagttcaatgtatactccctatatctgatattagcatactttaccaatgtcctagaaatgacataacaagcatccaaggggtaagtaaattttattgcatgctgattatcacattagtgtaaatccagtgcattgatgaatcatgagacataagctttgaaacatataatcacaattaccttccgctgtgatgaaattactataattgtgaataacaatatgttttggatttatcaaaaattgtatattaaaccataattataaaaatcagatgttaacttaaatgacttctaatcttctattgataataaataagattatattaaaatgtattttatttagggaataaatctcaataattatgtatagagtgtaaggcatgatttgatagagcattgaattagctttaaaacacaagttgaatcgcgtcaattagatcaaaattgagtagttatagttattttacaaaaggcagttcatgacccaatgcccaggttgacataccaacgcccaggttgacatatgacgtcaatctagacgctaggtaagtgtaaaaatatccaaggaatgtactttaagatatctaagtgtatattttgacatcacttagtctatttatgtgttctggttggtcaccgattctcaaagatgtt

SEQ ID NO: 360983 - DNA, 579 bp, Cannabis indica
agatttttcttatctctctttttatttatttacagataacttgcttttatttaagacaatctttatttaatagctgttttattttttgaggggaaacaatggttaaggcatgtccccaggccctttgtatatatatatatttttttaaacctgtccttagggccaggatttctatatatatatgatccctttttatgcacatatttttttctttttggacctgccctttgggtcaggatgtttatacatttgctctttttggtgcacactcttttttctttttggacctgccctttgggtcaggatgttttacttttggcctgttttttcgtctgtccgtgtggtatgccttaataccccccgagtggcatgaaaactttatttttaaggcactcagttttatttaaaatacagaggctgcatacacttagacggtacaaaccctttaaacaaagcctaagttacactttcggactattggtaatattttcggaggtgatcggtgtttcaggcccttggcacaatggttccatccatcctttttagcttataagtgcctgaaccgatttcgtcctcgat

SEQ ID NO: 360984 - DNA, 705 bp, Cannabis indica
gtggggagagggcataccccattctgaaaggcatagaggacgaagagggcagacagatacttgatgcccttaggagtgaactgggccgggcagaggccgaagaagtccgcaacgctccttgctgacaatgggcacccgactaggcgcacatccccttctcagggtttgtggcacgattgttgttggcaggaatgtagcagtccagctcgcccaggtatcccccctggtcaagagttcgaaggcgcacctccgtaatcttggacgaagggcttacccacttggcacccaaggcaccctgccttctatgaggaaccgccgcagcaagttcctcacagtcaacgccctcagccaaaacgtctccatcagcatcgactggctccccagtctcgttgtactccccgtagtttgggggtgcaacctcggcctcttcctcctcctcggaggaactaccaagatgtacatcgtcctgcccctcgatctcctcgacctcagcgtccccttcatgatcctcctccatctagacggctggatcctgttcggcgctgggcaaagcggcatgccgagccacttgaaggtcagatgcgtcagccagacacgtagttttctttgtacgagccatcattctatggctgggtacaggatttgaagaatgtccttcgctgaggaggtggactagaacaaagatgaggagtgattagtgtttgg

SEQ ID NO: 360985 - DNA, 727 bp, Cannabis indica
actttctctttaacaaaatagtactttatgtcaatgtgtttagaacgggaagtacttctaacatttctagagaaagctactgctgcggaattatcacaatataatttcagcggcctcgagatagagtccataacacccaatgctgaaatgaagttccgcagccatattgcctgacaagtagcctcataacacgccatatactctacctccattgttgaggatgctgtgagtgtctgtttgacacttttccacgaaacagctcctccagccatcatgaaaatgtagcctgatgtggatttcttatcatccacgcatcctgcataatcggcgtcactaaacccaactatatcaagagtgtcagctcgccgataagtcaacatatgatccttggtaccctgaagataccgcatgaccttcttagccgctttccaatggctaagtccaggatcactcaagtatctacccaacacgccaacaacaaaagcaatatcagggcgtgtgcatacttgagcgtacatcaggctacccacaactgacgcataaggaaccactttcatttcatctctctctttatcattttgtggacattggccctttgagaatttgtcacctttcactattggtgcctttccaggtgaacaagtatgcatattgaatcttttcaaaatccgatcaatataagttctttgagacaaccgaagaatacctttagatctatcccgaagga

SEQ ID NO: 360986 - DNA, 1127 bp, Cannabis indica
ggcacctatacctgtacaaagcacttggtaaaaataaaataatcacaattgcacgacaattataaacagagaatgcaattcattaaggataacaaaagcacataataccgggattaaaagctgcccggtcagcttgttgtccgaaaaatgaaaaataattccaagtttaaagaccgcttggccggtcatgatgtcttacaaaaggccttgagacagccaccttgaacaggaggaggatctgttgtttgaacaggaggtacatcagcagcttgaccggaggttgaagcagccaccttagtttcgccataggccacttgggacgcgcaaaaatcaatgtacatgtccttagcatcacccaagtagtcaaagtttgcttgaggattagccttccaaaagtcaaagaagagctcaagaccggctgtctccaaggcattgaccttctctttcaaccttgccacctcggccgaaagctcctcctccttggcttccttctcctccttcatcagatgaagaactactcgaagagaagtcctctcatcctgaagactattaacttcgtcagataaggtctcaattgtctcctcaaaacggtcagctacttcgagatccttactcagctcagtcatcttcttctgggtggaaaacagcttcttgttggcttcacccaactccaaccgaacaactctgactttcgccctggcgtcttcagcatccttcctggccaagtccacctccaccctcatggtgtcggacagagccgtgttcttggaagcagcaaacttagcccgggagtaagtgtaggccaacttcagaccggcctacacaaaggaaaaactttagcatttgagctaagtatagaagattaaagggacgtatcaagaaagacttaccctggtgaactccttcaagactccgcccaccagcaattccaaagaagagtcattgttagcaccatctagttgctcactagcctcaggaaccagccggttcatgtaatgggccagcatctccttgcccttcttggcctctgaaagcaccgacaaaggtggagtagatgcccgcacccgtttagaatcactcctgaccagttcagacccaaccttcggtggtccagacctgtccaagct

SEQ ID NO: 360987 - DNA, 516 bp, Cannabis indica
ataacataaattttaaaaagttagttgatatttttaatagattatttaggtttgttaaaaacctaatttttttaaaaattataggtttaatttttttcaatttattatttaatttaatttaattatttttcaataaaaaaatattttattatttttaatttttgagattaatttaattatttaattaatttaaattaaataaatctgatatccaaacattcaatttgttgcatgtgtgtgttttatattatttattatgaaaacgtgttttataaaacctattattgtttgatctaaattgttatggttaacttgttgacagattcaatgatttgattttaaccataatccaattgtcaataggtcaaataaataatttgtaacatgtaaatagtgtaatcttctttcatttgtgtataaacctagtaacatgataggatccatccaaatcagtgtgtgcctatgcctatatgtttattttgggcctagatgcatatagggagcccatttaatttt

SEQ ID NO: 360988 - DNA, 487 bp, Cannabis indica
tatttttgtaaaaattttaaaaataaatataactgctaaaagattccatctcgtggtattgcccaataatgttttgttaaaggtcgtagagtaactgggcctgctcaggtcctatagtgtataggcctacactcattgggcttgcctaaattcatgaataaaaatgattagcaaaatgagcacacatgaagtgagtgactacagatatcttcaatcatttttcactcacaaaagtcaaaattactcagtaaccagaggatgctctatatattgaagattattttagtaaattcatattgaagaaataaattttaatagtggaggaaaaatataagtgttacatttgagaaataacatgtgctattagatgaacaagcaagtactactactcacccatactaaaatgcaaataaatttaggattatttcaaaaaaaaaaaaatataaaaaaataattacaaaaattacaaatatacaattgtacgaaa

SEQ ID NO: 360989 - DNA, 533 bp, Cannabis indica
atcataaagccagttgtcctatttcctaataaaaatttaaaagcaagcaagtcattgttttgttgctaatctcaggcccaaaattttgatttgatgatttctatagctgtaaggttgtatagagaaagtatgtgtatcttttatgtttacaatgaagtttttctattcatttttgtaattaatttattatgatatgtttgtaaatataagtgtaactttcaaatacattaaagacttgaattttattgtttgttttcattatttattagctaaagaaacacagaccacataatgaaatattgttcttcaatttttccaaccataggtatatagcattggttatatcaaaaccaacttagctcttcttaccatctaaattcatatattgcagagctcttactactttttaacaaagacatctttttaattttatttatattgcaacaatctataataagaggtcattacttgaattaggtttataaaattatatcgacgtggcctaacaatgcgaatgtgaaagtatccattga

SEQ ID NO: 360990 - DNA, 1114 bp, Cannabis indica
aatcaacaataactaaagaaacatgctaacttttaaaccaaaatagttcacaagtactaaacacaactccccctggaaaaagggtccagagttggtccaaacaaacagttaaaatcaaaatattactccccctttttgtttatctaagggccaaagataacaaataagaaaatatagtaatatgtccaatcaaaagcaaagaagaaaaaaaaacttagtctcggtagagcttgaccaaggaggtcaactgcttggacatctcttgctgaagttcctccatggcagcaagacgattgttcaccagctgaacctcattcttgacttcctggatttctgcagcagcagaactcgaacttgcagcagcagcagcagctccagctttaggcctcttttgaaacacaccatcaaaatactccgagggttggaatgttggtccagtgattgaaggctcaagtgtttcatgagattgggccacatttttctgagaggataaaaccttaaagattagatttggaaatacaagcttaaaggttggctttttacctcttcgaaatgaaacaatttggttcaaaatgtgggaggccaagtcaattgaagctccagaggtgatgcggtataggaatgaggccacatcttgagacaccacggtcttgttggagtttggaacccagttgctaagagcaaaccgcataagagatgcatgagcaaatgtgagatgtgtaatccgaagactctcccccgatttcaattcagaccgtgcaccagtgagttcagagagcatcaattcacgatccatagacataactgcattggagacattctctggaagttgcaaggcttgagcaatgtctttttcagaaaaagaaaaccaatgtcccctaacatacactcttcgaaaaagtctagaattctcatcaagaaaatcatcagtgagattagcatagaaatccttaacaatgtttgcaatgtacccattgaaaccagtgagagtgttttcccattgatggaattgaataaacttaacaattccatagacccgatgagcatgcaaatcataattcctctcactttcaaacttacgggtagcatacaaattccaatcacgctcattatc

SEQ ID NO: 360991 - DNA, 766 bp, Cannabis indica
ttagggtaactattgagaatttattgaatgatatatacagcgtaatttattaattacggcaattatattgagatatgtgggtatcgaagatactatttttgaaataaaaatattttatcaggcccgacgattgtggaaattaagcattgtggttagaaatgtcacgacaataatggatggattattttgagagtattttggactaggttagaatttttagaatgtcggtttaatggattagtaaaattaccaaaaatgcccctaggttatttttaaaaatttaagtttctttggagggtaattttgtcattctttggaataggtattttaagtttaattgtttatgggatgaattctttttttttttagaaaaaaaaatagatagaataagaaaataaataaagtaaaaaaaaacctatttaagggaaagcttatgaaacaagtcaccaaaacactccattattcttctccccttcgtgcaagccaaccagccagcaagagaggctctcctcaccattttcttttgcctttggagcatattattcaacctaagatcaacctagaagtgattgaggtaattttacaccttataggttgtgaattttatgaattttggttggtttaaggttagggttttgtgtttccgtggctgtagggattagattaagtttgagttgtgtttaggctaggtttttgaatatgttaagaatggttttgagaggtttctttggctgcttggattgaaatgtgttggatgaagctaaaa

SEQ ID NO: 360992 - DNA, 1988 bp, Cannabis indica
aaaaataaacaaatgaagtcagaccgaatcataatcatcagtctcttcatcttccccatcatcctcatcttcatcatcgctatcttcatcttcaatctcatcaattccaaaatcaatttctgatgggcctgataattccatttcactgatcatttccatagtgtccaagcctataataacttgctgcacacataaacaggaccaaagccataaatatttaagagcaagggctatttgaatacactagtgaaaacaaaaatcgaaataagtcagaacttgttgctgagttgcgtatcaaattaaattccataccacgaagttatcttccgaggtcagggattgcatagtatctccaccctctttaacatgaaaatatatatctgcaatgcactataacacattaacatttcaataagaaagacaaggctaccatgccccaatttaaaacaacagtcattagtactaataaaacaaactcaaaagacttcacttacttccatgttcatcagttacataaggcaactctggccagaacatactctcactgatttcatcattcatcaaatttgaaaacataagtgttgccttgctgtttacctgaacaatcaaactacgagcaatattaactatgcaaaatctgatagcatcgtatttaataatatccacgaagaaactttgaaaggaatcccctgaatttattacttcccaacagtttattcaaacatgtgagaagtaaagacaggattaaagaggtaaagtttaacatgattaaacgagattgaaatataaatactggttatgcaaatataggcattctaactcgttcttcctgggaatcacatatactgatcacttaagtgcatggaatttcatacctcaattattgtcctggcaatttctgcagatgtaagtctagcacctgcaccattctctggtgttaatttagcaatgtcctcaaatgggtgatattgtggtcttccattctgctttatgggatctgaaccaggccctaaatgctttgttgaagcatgaatcctattcttaatgacatggcatcttctaggagaagcattgttcgttcttcgatatcttctcctgcatattcagaacaacctattccacttattaatctataattataaaaggaaaaagcagtttatttcctagtaaagttccgttggatttcgttaatcacagcttctctacattgctttaatcaatttgcaaataacatctttcagaatgaaaaagaaaaactcaaaacattatgcttcagccacaatgtaaccacactattcactattgtatacaaagcatactacctaaatcaaaattgtttcaaaacctaaatgaaaaaagtccacaaaacccaaatattgtcaaaaacatggaacgaccaaaaggttgaatggaacgtagctagctaggtctacaaacaaagtggaatacgtaagtaagagttaatgattcagtaccacgggacgtggaatacggaggaggcgtgagaaacgcggcaagaggttacatgaacaagtccgttgacatcgtcggagctcaacataggccgataatctacatcaattaaacaaataataaaaaagtaaaaactttgattggtaagcagcaaaacaagcagaaagagagagaaaccgaaagtggagggaggagttacaaggtgcggcggctatggcggcggagaatcggaaggtcatggcggagtgaatcattatatatttattagatatgtgtgttggtgtttgagtttgagtttgagttgatatgaatatgataatggtatagattccctccgattatccgattatccatctcttcacaaaaccacccgggatatgttggtccaatcatatttcactttattattacattccatttccaatttccacttcacatattttatttatttttatcatttataaacttattattattagggcattttacaattttgtatacattattttaattaa

SEQ ID NO: 360993 - DNA, 927 bp, Cannabis indica
actctgactgtgaggaccgggagccatgtgccaagcatatcttgcaagcagagcttcccgaaaactttagatgccagagatggcagcttatactgggaactctgatcagagcgatcacctgtcacggttcaaccgagtcatgacagtcatgagggtcagcaatgacgctaagtgtttgtgcttcccacttactctaagcggatccacggaagaatggttcaaaaaattggaaccaggatccgtgggttgctggaataagttacaaaccaacttccggagatagtttgtcgccgcaagaaaagtcaatctggaggtcagtgccttgactagcatcaagcagctgcctacggaaacactaaagaatttcataaagaggttccgagaagaagcctttaaaaccaagaaagtagatgacggacaacaccttgcccttctccaagcaggcatccgtacgaggaccccattctggaacgagctacattaagaaggagcttcaaaccttcaagacttccagaagagagtccagaaatacattaatcttgaggaggcccagatagtggcctatggaggatactatcccaccggggtagcaggatacgtgcccggatcccagctctcaggcactgtgccagcagcggcgccaccaatgagcggcgtacagttttctactactcccgggtatagccaaggctagaccctggcccccacatcgttccatttcgggaatccctcagggataaatggataagccccctcgcactctgctccgacagccagtttagctggtccttcccagggctcgaggagtaaaaggtcctccaaaggcagcacccgaacggagggtaagtggcagaaaagggggtacactccctaatatacccagtacatggagttaatggactcccaggaacgtgtatattttgctac

SEQ ID NO: 360994 - DNA, 669 bp, Cannabis indica
ttattttttaactctgcccggggctggggctctcccagtccggcagagattctgtatttttatgaactcgtttccgtccctaaaaagggagacaaatttaaggacgacttttacggtttctgggcccatcctttgaatgagggcccggtccctttcaaccaatagaaacatgtgaaggagtaccgttaccgcttcttcttctcctccgggtttccaggctgtggaagacccgaagcttctcacggagtgggttagtatccctccttatgcgcggactgaacctactcagattttcctccaacggggtctaagaccttcgccacatatgacaagaaggccctcgacgtcggggagttggtcacgatggagaactgctggaaggccaagctgatccaggggcattagtcggtggatgactccaacctttccaaagtcatctcccaaaacgtgagggttccggccgcggagaaggtactctgggaggacattatcgccacgggggaagataagtaccagaagtacctcttccagaaggcccaagagtaggcttacaataaggccccttcgtatcgaaagcccggtggagaggccccacaccaaggcttgcggtctggtgccgaatacggggcctcccgttgccagcactctggttctggtaagtccccttta

SEQ ID NO: 360995 - DNA, 636 bp, Cannabis indica
aaaaaaaaaaaaaaatgatgtggcttaaacttaaaactatatacatataacgaaaattgaataaatactatattgtatgcaaaaattgcattcaatttgaatatgcacattacactattttctgtaagctacattgtttaaattttttaaaatttcttgatttttatctttgagcactttcataagtgtctctactctattttttaaaataactctccaaaagctcgtttggtaaaccgtataaaagtcgtattatattaaataacaaataatactatatttagataaaactaaagatgttcataaactaactgatccaactcaattcaatccgcaaagtgtagatacccacacttgtgcagattatattggattagaaaattcaaaatttatatttctgcggattgaatgttaattgacatgcaaaagtaaccgatccaatccaatccacataaatttataaaataatttaaaaaattatatatacaattagcattttaatgtaaataaaataataatttaaaaatttaatacatataatataaatatattttaaatcttaatagatcaaatgtatattctattcttatatataatttttttttcttattacatacaatttaaaataaagttaaa

SEQ ID NO: 360996 - DNA, 1132 bp, Cannabis indica
atgcaataatgacgttgaattttctttatttaatttgcgtttagtacctcgtgattccatatgcaaggtttcattaaaggattcaattaaatctagcaaataaagattgtcataagtattaaaataactagttccaataacatttgaattaaaagacaaagtaaactggttgtttctaaatgaacaacaatatctaaatttgtccaacaaagaaatagaaactaaattccgtctaaaagacgacacaacaaaagtgtctttcaaatccaaataaaaaccagttcccaatagcaatctaaaatgcccaattacttctacttccactgattgtccatcgcccacaaagatgtatctttcaccatcacttggctttcagtagcttaggcaacggtgcatagaaatacttatgtgagtagtagtacgagaatctatccaccaagtgtttctaggtactgaaactaaattaacctcagagcagactaaatcaagattaatacctttctttacacaatatgcgtgatatttggcacaatctttcttaacatgtccaggtttgttacaaaagaaataacccttaaaatcatgttgttctttcttttgaactggacccttagtagcttcattctcaaatttccttttcttgccattatccttagaggtagtggccaagtgagcactttcagttttgtccttttttaacctttctttctcttgcacacaatgaaaaatgagcttgttgagcatttctccttttgacagttgtaactaatatattggttaaactgtgggggaagtgttaacaaaaccatgagcacaagtacatcatcagaaaggtcaatcataagtgtccttaatttgtagacaatatgatgcatttccttaatgtactcacttacatttccttgacccttatactttatgttcattaaagaaccaacaagtgttgtcattttaaccttatcgtttttagcaaaacatcactcaatttgttcaagaaaattcttggccatagtaaccccttcagtttcataatcattagactctgcgatttgaacgatcccacctctcaaattcccttttatcatcatggaactttccttagtgagaggtgctgtaatatcccaataagtct

SEQ ID NO: 360997 - DNA, 760 bp, Cannabis indica
tccacaattaaattaattcacaaataataataaaataattaaaattagtgctaattgcctttactaatccatatactagagcggtcattacaatcctcgtgatcctcctgtgaaaacatagagttcgattatctatgttgcgagctggtcccgatgacccaacagcctcaataaagcgatatggacttgcatgtcttagttctatcagctcgttatacgatgtccgtaaaaacgactttataaggacgcagacatcctggacttaactagtctcaaatgcatcttaagcctgcgagcttatgtaagaatatgaatagccaactcgcactatagaagtcgcgtacattgttgtatttagtgaatgaaactggaaactgttcttcatttattatgtttacgtttttagcttaattattgtaaatcaatgtataaacggattgacaatgaatgcaatccttgtgtaaatgataggacacttgctttgtatataaatgagtgatccaccgtgaaataaacaagatagaatccttgcaacagtggactaaacagcagaccgagatctgactatgaaccactatatttctcttgtgttcattatttttctagtcttttactaagtattcgtgttcttgatttgagtactcgccgttctgggttgaatactcgcacttattcaatatttactattattattataatttatttttggtgttagtaaaattccttcgaacaaaattagggttagaagtgcttaggattc

SEQ ID NO: 360998 - DNA, 620 bp, Cannabis indica
tttttttgctattgataatctgtaaaacaatttttttaatatcctgtacaatagatgtaattgtgctccagaaaccattaaaaatacagttgtttctgttcaaccacagcctgtatactgtggctgccatgacagcagtacaacttctactattcttgtttttgttactgatcaccaacctgtttttccaagcctgaaactccttcggccagcccccaactcccaccaattttgcacctgatctgcaaccttacaggagagattacactcaaagaaaagatgctgaattgattcagcaacttcaacacaaaccgggcactcaacattgtccagcaagactcgaaattgcagcatttaacacaacttttaatatatactaaatttaaactatattagtatattatacatcaccataattaaaattcaattttgttgaacatgagctaaaaattatttatatatgtagtagaacctctattcaagaatacacttgagaccaaataaattatattctaattgagaggttataactaaatagagttacactagaaaaaaaaaataaaaaaccaaaaaataatcaatgtaacaataataacaataaataatcattaatactatat

SEQ ID NO: 360999 - DNA, 511 bp, Cannabis indica
agtgtgtctctctcctcacgcatccatgatttatccataacaaaaattctaacgaaaaaatcttagtattgagtaactaattataactagttactacttacataatgtaactaaataatattctcacaactatttaatatttatatattactctaattcttaatttagtttagatcatactattatattactcattttaaatattgacatgataactagtaattaattgtacatagttactagttatataagttgtaattaattaactagtttcttacaactagtaactaattatttgtgttatgtaacactttttcttttaatatttatgtatttttagtaaaatttatcttaattctacaaaatttttagcctcataaccactgtaattggacgtttccaaaagttttaaacatgtcaaaattaacgaacaaacaaaaaaaataataaaatacaaacaaaacattaacaatacaaaaattatcgacccatccgaccgcagtacatgtat

SEQ ID NO: 361000 - DNA, 812 bp, Cannabis indica
tttaataagattttttttgttttgtattgttaaagttttattagtttgatttttaaatttttattataatgtttgataattatgatagtgtaaactgctgaaactgcaccgcaccacactgtatttttgcggtgtagtttttacggttttaagatcttgcggtacggttacggtttgaaaaattattaaaaccgcaaatgcagtttggtttgaaaaaatagctacaacccacaccacccaaaccgcgaacacctctagccatcgggagaactgcccagggccaatgccaaagtaatcgaccacatctttaaaaaaaattatggagagggagagccccactgtaattgatatgacgtcaagaccaagcacgtaatccctcttgaaaattatgagctaattgatccttggaggggaacacaatgttacactccttgtcgttcatggacattccttctaggtgttggaattgaagatcaaagatggtactaggaggggccacgaaagaaatttgaggtgttgaagaacaacgtgtatgagtcaatttgagaccccttgaagtaattttttttgctctgagattaactagactagaggtatcaattgggtcctcttcagtatcttccccgacgaagttgtttctcgcttcattttcagcaaatttctcaaatgcttcgataattccatccatgatctctccatcaaatgatccagccttaaggtcattgagaactttccttctggtagttacccttgccacatgagggtcactagaggtaacaccctaactaccgtaggcgtattacgtgattttt

SEQ ID NO: 361001 - DNA, 392 bp, Cannabis indica
aaagctagacaactttcctttcaagtttagatatacaaaatatggtaaccaaattaaacacaccaaccgaaattaataagaaataataaaatatttttgtcaattaaatatgcccaaaatggaattaacaattttaaataactactttacatattgtcatgtaaaaaaaaaattaaattataactattcagacatcgaaaacatgaaagatgtgtattagtgctcctatttctaagaaatatattgtagaagcacttgtcaatatatcattaaaaaaaaattcaatccttttaatgaacaaaattatcaaatatgataactaatttaaaaaatctattaagagaattacattttttaataaccctaaataatttatataaaatatattaaat

SEQ ID NO: 361002 - DNA, 1015 bp, Cannabis indica
tactcccactcatgttgatcagacatgaagtataacctgtcctgcctcgtgctgttctcacactcggcatccaataggacaatctcttatcataagttctactcacccatgagaggataacctacaagtaaacccatacaagcagcgaaaaaatatatcctgccagtgctatgctcacacaagcagcaaaaaacctatcctataagtgttactctcacacaaacagtcaaaaatcttatcactattacacactaataacattagcataaaacaacaatccaccatagaataaaacatgtaaatacaatcccataatacagttgtatgttttaacatatacaccatgtgcacagatgtccaatcttcttacctcaattgttaagaacaccttcttgatacttcaagcacctcactgaatttttttgttgagaacaagatcctaaacattcattaacacaaaaatacattcaagtatgaatctttatactcataaagaaacttacataaaaatacgtaacacataagctaatttcacttgcatgccacaccattcataatcatttatcattttgattcacacaaacacattgtatgtacccacataaatatttttaacgtaaaacatgaattcatacaaatactttttgcgtgaaattttactaaaaaattatttattagctaaatatgtcattaggtaattatttaccaaattcagaagatatcatattctttaaccatatatacagatcctaaaacatatccaatctgcttagaaatatgtgtgaaatactacccatgattatgtataaatttatatgttaaaaatgaataaaattctaataaataattaaccaaaaatagcaaaatatctcaacatagtgtcaaattaattcaagacaccataattgtatcgcccgtacttttataaaaatattaaattttatttacaagcgacgttaaacgcgaaaaaaatcataatgtcgtatttttatttaatacttgaaaatgttcacaa

SEQ ID NO: 361003 - DNA, 590 bp, Cannabis indica
gatcctggtaaaataattacaacaacaacttggtattatagcagccatggttttaaaagtcttgaagactggttgaatatgtacatttgctatgaagacaggtcgactcataatatagtaagtgtttatgctattttctattgccttacctgcttagataattatagtgtatgatgggaagaagtagcatactgattatttataataagaatatgtgtatggtatacgcatattgatattgatatctatctgagttttaagcgtttagaagatgtggattaaatgtgtgacaaattatacagtaagggcaattgaattgcctcattggcgagttgtttgggctcgggcaaatggtaaggaagagaatccttttctgccgtaatactaaaaaaagtaaattctgagtgatatgttaagccttgtaaataggtgtatgggcgcctagatacaagttaatattatgtgatatgttatatgtttttcttacggagtctgtcgactcacagttctaatttcatgtgtaggtaaaggaaaggcaaaggctgaacacgagtgagcctcgagctagggtgatgttgtacatgtcatgg

SEQ ID NO: 361004 - DNA, 1198 bp, Cannabis indica
agtgatccaatggctaaaaaaagtgtaaccataatggttacaataaaaatgtaaccattgcaacctcctccatatatatatatagtaaaagtcaatgagttaaacttaacctataagagaagcatatttattgagtaataaatattatagtaattttttttaaaaaaaatctttaatttatttactttatattaaaaaaatatataatttttaaatgatataaatatatagagaaaatatgaaaaagttaatgttaatgtaatataaatgtgtaagataaaattaaaaaaatgtagtgatattataaaattattaaaagaacaaaaagataaagagaaaaagagaaacaaaatgagatttcaatattttattttaatgggatgatccattatttatacaaatatgtgagtcatagattaggaactaaggagatgaatagtaattataattactggtaattaataaaaaaaatatttaggtgaattggacatccatatatttaatatttaataacacttccccttagatgtctataataactgtatcattaaaaactttgtaaggaaacttagtgggacaaaaactcgatcaagggaaaaagagtgcagcattaattaactctgccttatttatgcattcgtagaaattttctaatcgacgaattctaatcgtgtgaaccatcttcttgaatattgatattggtaatgactttgtgaataagtctgcaaaattgacacttgattgaatatgttggacactaatatgcattctattgaaatgtataaagaagaatttagtgaaatgtgttttaattatatctccttcaatgtatcctccttttagttgaacaaagcaagcagtattatgttcatagagaatttctagtgttgatacctttttattgagtgcaatccatatatttctgaatgtgttatgtcatgatctcactcttacacattctctacttgcaacataaagtgtaagtatgttaattagcataatttaaagttgtctcattaaaaatcttgttaggaaaacccaatgggacaaaactcgagttaagaaaaaaagagtgcaatatatatatttcatactcataattatttgcatgttgcctcattaaaaatcttgctaaaaaaatccaatgggacaaaacctgaactaagaataaaagagtgcaacatgaatatgtctcccc

SEQ ID NO: 361005 - DNA, 923 bp, Cannabis indica
acaacataaaaagaccatatttccaataaataaaataagtcaaaatgtttaaaattccgtaaaaccgtatttttgtaatttttttgttatttttgtgtatttgtgaaaaaaaatccttatttgaaaaggtccgcgccgaaaatttattaaactctttcactaaagattcaaaattaagtaatataaaataaatgaagaaaattctacaatacactctcttaaaaatgatgtaccgatgcatcccatctattttagtatttgggacaattttttaattttattgttttcatagtctttacgttatagttatttaaatatcttgcaaaattttgaaactttcagagaaatttaacatgctgaaaatatggttcaaacagtttattgcacgtgtgactcttttattttatatgcgtgtgaaatagactatttgaacactgttttctatattgtaaattattctaaatttcttagaattttataggataccttaaataagtataacgtacacgactatgaaaaaaaattgactaaaaattcttctaaatactgaaataaataaaagatgcattggtacatcttttttaaatgtgtgcattgtagaaacaccctataatataatctattaattcaatcacaactatttataaaataaaagaaacaaaataaaatttattatataaaaagtagatagccttaactaaagccatcaacataaagatcatatatcattacaattttgtgaccacatattaagcataaaatttaaaaaataattttttttttttgaattaagtatttatataatacaaccatgttttacttgagactcgaatccaggacctccaacacacacccacctatagtcacttaagctagcctcaagtggtttttttttttaaaaaaaaaaaaacgttaatataaaa

SEQ ID NO: 361006 - DNA, 441 bp, Cannabis indica
ttaaacaacatacttgtgagtagatctaagatcctggtaaaataaattccaacaaaatcatcacaaacaaatttctaaagtcacaagcatacttaaccacaactttcagcagcaagaacacaaaataaaacatgaattccaaccttgaaaaactcatctaatacacaacaatataatccattacataattatgcaaatcatactcaaatctatcaaaataaacaccaatttcccccacatgcaaagtcaagaacttcacaacttaatcatgctcttttaacaataacattcagcaaggatttaaagcttaaaatagtaagaacactacctcaattccttgcacaaacactagcaccaacaatcaaagcttccaaaggaaaatcccaagcaaatttcttcaattcaagttgaaactcaacaagggttagagagagagagaga

SEQ ID NO: 361007 - DNA, 944 bp, Cannabis indica
ttatttgtggctgaaattgagaatcaacttagtagaaagatcaaaaatttacgcagtgatagaggcactgaatatgattctattacttttgttgatttttataactcatatggaattatacatgataagactgtaccatattcacctaaaataattggtaaacctgaaagaaaaaatatactatactgaatcttttgttgccattttacttaattttggtgttgcctctcattggcggggagaaattctgttaatcgtttgctatgtgcttaatagggtacctaaatcaaaaggcaaaatttctccacatgagattctaaaaaatacacagctaaatatttcctatttttagaacttggggttattttagcttatgttcgtattcctgatcctaagagaattaagctagcaagtagagcctatgaatgtgtaattttagggtatgctgttaataacaaatcctaatgatgctagtctttttgaagatagattttcatttaaattgagaaatagtgggggtgcataacctaacaacattccagtgattaggagtgatgaatgtactaagagtttagaaactgaacctagaagaagtaagagagcgagggtagctaaagactttggtttagatgtctgtgcttatactttagaggaggatcctgctaacctttgttggaaattattttacatgtccttctctttgtgtttgatccttcacagtcttccaatctatgattgagttaccacttgctgtgtgtgggcacttactctatcactaagttcgaaatttagaagaagaaaagagagagagagggttcggccaaggtatagaaaagggaaggctcaatttttctgaagagagaaatttctgacagaaaactaatgaaagtgttgttttgactgagccatcactttctatttataggcaactactaggtgtaggt

SEQ ID NO: 361008 - DNA, 533 bp, Cannabis indica
aaaaaaaataaaacttatctttgaagaattttttctcactcaaaaaatcacaatgttatgtccaaacaaaataaacaaatgctgccaaagcagccgagataaccttcacagtaatgcctttcaaggagctgatacaatcattaacccaatcagccaaatggttcagccatgttgtcaaactaaaccacttgacaacaacttgtaagatttttctaacgaaaatgcagtcgaaaaatagatgctcatgggtttttgaaattgcttcacagacagggcagagagaagagtttatagttatgaatttgtcaataagatcacgagttaacaagtgctcatttattatggattatccaacacacaagtatacgtatcgtttacaagtaatagactcacaagagtgaggtcgatgccacaaagattgtagttaattaccagacaattaaattactaattctatttggtgacaataaaaataagaaaagatgtttactttctactaaaaaacaaaagaaaataaataattaaggtgaaat

SEQ ID NO: 361009 - DNA, 1042 bp, Cannabis indica
ttaatcttcttttccttttggagatcaatatttgtcttgaaaatcttaaaggcatctaaagattcatacttctcactaatgagctcaatatgaccatatcgggaaaagtcatcaaatgaaggtaatcaaatatctatagctgcccatagcaggtagggctgaacatttctagcgggttcgactcgaacccgagcaaccctcccgaacccaaccagtgaacccgcaaaattttctacaaaaaaatgttcgggggggtcgagttcaacccggtattcttcgggcgggttcgcggtttgagtttttaggagtattgggtttcaggttgaatccgccaacccgcaatttaaatgtattatgtatattttatttttttatttacaatttatatatctatattaaattattaattaaaaataaaaaatcctaattttttttaaaaaattaaactactcaggaattttttttattttttataatttattttcttaaataatataaattaaatatatttatatatagtttttattaaaaatttatatatattatataaaataatttattttcagaaatatataataatttttttaataatatataaattttattttaatttattgttatttttattagttttgaataaaaattaatttttttaaggagttgaccgggtcaacccgccaacccggtcaacccggccaaccgaaacccgccaacccgtgacccgccaacccgccaacccgtgccctattcgggtccaggttaggtttcatttttttgaacccgaaactcgcgaattcgaaacccggaaaacccgcccgatgttcagccctaatagcaggtggaactaaaggacccacatatgtcagtgtgaataagctccaatacatctgtgcacttatctgacttactctttataatcttgccagttaactttccctttatacaatcaacacaaataatgatcaattcagagaaattgagatcttgaagtacaccattttcaccaatctctccattctatctctagaaatatggcccaaac

SEQ ID NO: 361010 - DNA, 580 bp, Cannabis indica
tagtgtggaagattgtgaagaatccaatcaacaagaaagagaatcagcatcaaaggaatgagagaaagagatccagattcagatcttgataatgctctactacagaaggcaatcaaacgctagagatctgaatggaaggagtcattatattttgctgcacccaatataaggtttcctaaactttatatgtgattattttcattgttttagaattcatattaggttgttaatgaaacatacatggtagtaaatctagatcctagtaaaatatttcccacactagcaacctgaataaagttgataatcctcttctgcattttccagttatcatcaacccaatgtgcagtcaagcacaaataagaaatattttggattgatgtccaacaatcagttgtcagcgattctctatgttgtgccaacatttcctttagttctttttattcgatccaaaaataattgataaatatctctcgccacagtgaaccttgatgggaattgcaaatcgtcaaaaaaaaaagtctgataagcttttgaaatccttttccatcaacgtgccaaaaaggtaactcatccatgatga

SEQ ID NO: 361011 - DNA, 524 bp, Cannabis indica
taaaaagagagattttttttttattattaagtagtaaaattaaacacataaactaggaatgtcaatcgggttgggcccgccccgatatcaattttgcctggcatggcccgacccgactactttcttcatcttagcgggtcaggcccgaccgtatatatttttaaatcagtttatttgtttatttatttttaaagaaaaattgtttaattcattacgtaaaagaattcccaataaaaatagaagacatgtataaaaatttattaaattttccataagttgattttgcattgtggaggatatttttttaagtagcttttttttttagataaatgattggattcatttgatagtaaaattcattaggtaaaggaatttgttataaaaatagaagacatgtttaacaatttattaaattttgcattgtggaggatgttgtttttaagtattttttgcttaaagataaatagtttgatgggtaaataccattttggaccctgtgttttgcaaaagttacagattggacc

SEQ ID NO: 361012 - DNA, 1169 bp, Cannabis indica
tattaaaagaagaataacttgttcaaataaagtggcaaaattataactagagattgtccttctagtggcccgccactctagtgatttttgcccaatattttatttttttaatccatataattcaaatctaagccctagttgaaacactataaaaggaacatgatgctctcatctcatccaactgaactattgccttcaaccaaatcaaacctagttttctttgtcagacaactagtagatgagagacaccttctatagtgattcgaaccctccttaattgttcttcacctgttcggcctatagtgatagagtgtcatgcccacacaaagcaagtcaagtactcaatcatagtgcgaaagacagtggtaaccaacccgaaggagagatagagatccaggctcagatcttgataatactctgtgacagaaaggaataagtgttatagatctgagtggaatgagtcgtattattccgctgcaatcaatgtaagattttctaaactcttatgtgtttaattttattttttttagagatattcatatttaggatgttaatttaacatacttgttagtaaatttagatcctagtaaaatattcccaacatgaaaccccaccgttggattggtaggtgggacatttttcattgtggtctttaccaatgtcagatcgtacttactacattggcgaggctttggacacgtgtcgtctcagggccactctcatttgaatttcgctcgttggatcgcttagcacggtacgcaaggacaagtgtgctccgtatggtagaatggcgtgggagacaaattctgacatcatacggaaaaaggcgtggtcagtgggcttgtagcctggcatgcacgggctgcaattccacaggtcaaaggcgtatcccagattgacgcaccccagtggaagactcgtacccctcacgggacaaatcggtcatgtcttctagaattgagaatgtcgctcgcccacggacatctctcacagggacttgttcccggagcgcaaggtaaggcactttggtggcttaatgactcttcgtccttccctacttagtatacatgtatcattccagtgaaaatgtagataacaacatataatacaattatatttcaaaacttaatagatcaagtgtatatcctattcttatatatattttttct

SEQ ID NO: 361013 - DNA, 760 bp, Cannabis indica
tttctctccttcaggtttggttaccaccgtctactcactatgattgagtacttgacttgttatgtgtgggcatggtactctatcactataggctcgattatgaaaaacaatgaaggaggcttgaaaactgtatagaatgtgtctctcatctactagttatctgacatagaaaactaggtttatgttttgttgaatgatcagttggatgagatgagagcatcatgttccttttatagtgtttcaactttcaactatggcttagggttgaattatatggattagaaatgaataaaatattgggcaaaaattactctaaggccggccataaagtggaccattctctagttacaattttgccactttatttcaaccacttattcttctttcaataatatcatattttccaattcaatcctacacaattaagtcattgcttagtgaaaattcattaataagacatatctaattttagaattataattatcaattaattgagtctgcaagcagtattatttcaactagtgaggggaccatgggcctatataaccgagcttccaataagtagctctagaatttatcaagtaaattctctaacttagtaatttcgccttgtgccactatagatttggaactgaataacactctcaattatatagaatgttctatatgtaccacgatatagatacattatgattatttattgttacaatcctaatagtcaaagatcctctatagatgatctacatcgaaaagggacaaa

SEQ ID NO: 361014 - DNA, 533 bp, Cannabis indica
cttgttaatcaccattttgtatgaagccttcaaaattgaaccactctaggagataacactctacatcactgtctgagggtatccccagtagatcttttagaaagaccttttagaattctctgactatgtgcatgtcttttcattgttagttttgtctccactgcttggtgcactacattggccaacaatgcttgacacgataccttccttagctagctagtcggatgagattaaagaagttccgaagtccatcttaactcttgtgaaagtaaactagtctctggcctttgttaccaaaagcaacccaaatacttttagcagttgatgaatggatagccagtccatatcgagtgcagcatcatggtccttcatttccagctctatcaagtcatttgccaattgtctattattgagttccatatatcccaacatgggtgctacaatccttggtcgtctccctcccctccaatggtttagagccccccttcaaatgctagtggtttctattttttttctttcatatggtggctcaa

SEQ ID NO: 361015 - DNA, 707 bp, Cannabis indica
atacatatgagctcatattgaggattttaatccaacaatctcccacttaggctacatatgtattctgatagtgtataactttataagcgcttaacttttgctattataattataggtattccaaaacaatctcgtccattatttatactaatataggatcaaagcggctttcgcaacatttaacgtagctaaacccattaatggtcacgtatatcaatataatcaaatgatatagatcaatcatgaatgcgtagcatagaaattacatgcaaatgtgatcttagcatgcctatttctaactggttctccttaattgagatcagttccttattagttctttctaaccttaatagaaagaaaatattcagagtactcaaaacttaagtccatactttatctgcagaattaaaccataaatatgtgtcagcttgataaaacatctcaaatacgaactcccactaaatcaacacattcttaaataataaggtaatttgtggcataacctccttaagtggtcaggtgtttgcaactaaccctcaattttaaaattttagtggtaaaacctcctaaacccaagttctgttagcaattagccctttccatccatttttggctgttaactgccatggtagaatgtccacgtgtacacggtgtacacgtggcacaattttattggtccacgtaaataaataattttaaaaataaaa

SEQ ID NO: 361016 - DNA, 697 bp, Cannabis indica
gataacaaatcagattgtaaagagttttatttagggcataaaacccaacatgaattaggtagttttaatggttggttgaaatgattaagctacatagggatagaattgtgtttttcttcactttgaagtgtgattttgagcaaatggatatatttcaatgaattggttgttgggttatgtcatgtttactatattatactgttttggaaggtttgagcaggtttggtggaggtttgattggtttttggagtgaaaaaccagaaatcaccatggctgccaggaaaaacggcaggcacccagacaaatggccgaccgtttttcccagtaagggggtattttgggttttcctcctcaagtccgatttgattcagggtgtctttcggagtggaattcagggtgttttagaggtggttaagctagtttgatccgggggaaagtagagtgtgttcgattgtgagaattagagtcgattatcagaaatttgattatggttttttattgagttttggttgttgtgacataggaccgggatcgtctagcttgttttccactcaagtcggcccgtacgcttgagttttgaactaaggtaagaaaagtggtaagcaccgtatgtggttaaatattaatggttgaatggttatggccttgattattatcaagactttgattgaatatttgttgagcctatgttatgacc

SEQ ID NO: 361017 - DNA, 544 bp, Cannabis indica
tgattttgactttagcaacttaattaattaatggcagcacagtacagtttaatacattcacaacaagagaatagactagtaataatgtatgcaagtatgatttcttttcctttttcaataaataacttaattcaaaataattatattaatgtcatatattcttatttaaggaatatttagtattattttgtattttttgtttttaaaatgataaatagcgtcataagtacctaaagttttatgtttgtaagcggcataaacttaatgtttatttttagcggcataagtacccaatatttgtaaaactgtaatttttttttccaattttgtcagtacagactctgttttgaatttattaaaagaacatttagaagtaactgatactatatatttctatctagacccgatgatgaaaaatttaggccttatatgtgccctgtttaagacaatatcagagtctatactgacaaaattagagaaaaattattgttttacaaacattgggtacttatgcctctaaaaataaacattgggcttatgccgc

SEQ ID NO: 361018 - DNA, 556 bp, Cannabis indica
tagctgcacaacacacaatgtaagtccaccagaacatgtctactagaaagttgagtacccgtaggaaaacaacccgaaagagctttccaaacaaaatgtaaaaccttaggaggggctttaatcttccacaacatcctccaaacatcatcctctatagaggagttccaactaccattgaccgactgtagatgattataggaacttttgacagtgaaaaaaccagttggatccttattccaaaaccaactatcacttgcaagattaacactcaaaggcacctgtttgatgagctcaacatcacaggaatcaaacaagtcctcaataagctccaagtccaattgtctactacctggcttcatgagttgagacactttacaattagtcagtgccggatgattagagaccacacacggattatcctcagacaaaagccaaggtgtgttaagcaccttggtagatgaaccgggtcctattctcctacgagcaccatctttgaggagcgtttgtgactcaagacactacgccatataaaactcagattgccacccaactcggc

SEQ ID NO: 361019 - DNA, 879 bp, Cannabis indica
aagaaagggctccatcgtggatgggacgtcgatggtgctattgcacttcatgaagaatatttggctcttgagcaagagaatgaaatggatgttgacgctcatatctctgtgtttgatgagggcgctgatgctcatacctctgtccctagtatgggtgtcgacgctcatacttctgtttctggcgggagtggcattgacgatgtgatgttctccattgctgaagatggtaccattgctccatagtgggtcttttaagttctcccttttgtttacaagtgacaattgatttaaactttaggtctattttgtttaaagtatgaacatcgccattgtggcattaagtatgtatgcttaacgatccttttgatgtgcggacatcctcttagtgatgacccttttgaattttatgacgctttgatgtatgaacgttgcttttgcggtggtgtgacttattatcttaatttggtattaatattcttcatttttcattttgctgatgttttatgttattcggttgatgtaaattttgcattgatccatgtactatatcccctagtctaagtcttagtgagggtcactaaaacttagactttggaacagcttgactgagtacatcgaacttggctgaccgtaacattgttgagtaaattttatatttagttacgattgaacgcaattctgaagacttgagtttatagatgaataggtgggttggtcgcagcccttatcacttaatttgtgagtgaatacttgggttgagtgtaattcctatcacttactttataagtgaatagttgggttgagtgtaattcctatcacttactttataagtgaatagttgggttgagcgtggctcatatcacttattttataagtgat

SEQ ID NO: 361020 - DNA, 719 bp, Cannabis indica
ggtgatctcaaatcatcaaagtgcttttctcccaggccgattaatatcggataatattatggttgcttttgagattatgcactatctgaaaaggaagagagttgggaaggagggttttatggctatcaagcttgacatgagtaaagcgtatgacagagttgagtggaactttattgagaatatgttgcttcgaatgggctttcaccgccattgggttcacttgattatgtcctgtgtaacttcagtttcatataatattactcatggaggtcattctatggggcctattaatcctaccagagggttgagacaaggagatccattgtcgccttatttgttcttgatttgtgcggagggtctctcgttgttgttgaagtactatgagcggcaacattggttgactggttgtcgagtggctaggggtgcccctgtggtgtctcatatgctatttgctgatgatagctacgtattttgtaaggccaatgagaatgaagctcagaatgtgctgcgtcttttgcaaaaatatgagctagcttcgggacagcaggtaaattttgctaaatcttctgttttctttagcaaaaatattacttcggctgtgagggatcgattatgtagtcttatgcggttaaatgcggcttcagatgatagtttctacttgggtcttccttgcatcacggggaaaaataaaaatgccattcttggctttttgaaggaaa

SEQ ID NO: 361021 - DNA, 471 bp, Cannabis indica
ttttttttttttttacaatagaggcacatcacataacaactattattttaaacttgcttaaaagcttatggcataataaggtatgttgagggtgaaagtagttaaagataacgaattcagcttagttaagtggtgaaaattttttgaaataggctaaggctcaactttgggtatactaaggataaaacttttttaggtaggcttgaaaggctcaatcgatccaaagaaaatttgcctaaatcattttccaaacaaaaatcatcaaggatttcgcttcaagagagtatgtcaaacaaattctattccatgtcaagccaacattccacaatccaaatagaacaaaagtgatatgcgtcaaaaataaatgttttacatctaaatgaacaaccttctaatacacatccaatttaattcaaagagttatgactcaagcacacggttaagatttcaatccattgcacaagtgaataa

SEQ ID NO: 361022 - DNA, 522 bp, Cannabis indica
gcagtcggcggcagcggcggtgatagagagagcaaatgagaaagagagacaaagtgaaagagagagagtgcgagaagagagagagagatcaaacgagagggaaagagagagaaaggagaggctgatttttttgggtttgaggagagggcattttggggttaccattgtaagattagcatagttacaaaattttaggatgatggtataattaaacaccattagtcatttttaaattttcctttttatttttaaactttccatactatttgattacaccgtcaaatatacatattttgttaaaaaaatttcttaaaatataacacttgtataattatatcttttttacgtttcgttaaaagttaatatgtaattccctgaaaaaaaaaataatataaattttactcttttttaattagaaaaaattaattttaaaaataataatattttattaattatgtaaaaattattaaaagctaattaaaatattaaattatttaaaaagtattaagtttacttaaaaaa

SEQ ID NO: 361023 - DNA, 647 bp, Cannabis indica
aatatattatgtaaattttccttaaataatggcttatttgtaccgcatgtacctaaattatacatgttttggcaagttggtcctcaaactttatttttttggcaaattactctccaaactatataagttttggcaagttggtccccaaattttatattctggtaaattgattccccaaacttttatttctttagcaacattaagttcccactattagatattgacatttttattatttattttacttactttaatttatgtttttgtgttaaattcaaataatttaatttttttaattttaatactttaagaaaaataattatattaataatttttatttattatattaacactaatatttcaatactttaatttattatattcatatacattaataataagaaaaaaaaaataataaatactagcggatacatataatagctagaaaggattttagcccctcacatttttatatttcagcatttatactatattttattgttgatttatgaatatgtggtattataattttaataattttttaattatatatatttattgattatttaaattttgtatctacgatggtaaattttcataggtttgtcgcgaaacataagttaaaaataaattttaaaatataattt

SEQ ID NO: 361024 - DNA, 773 bp, Cannabis indica
aaacttatatattttggctctaaaatatacaccatatggtagagctcattgcaagctttgaaatagtatataaaacctccaaaacggacatttgagtaaaaagttatggtaaaaatacgattcctgagttctcgaggctgttcgaaacggtaaactgattggccagaaccagttgaccgatttttcaggggtaaaaatgtgattttctaagtttacgcactcaccgaaacgctactggtacgtgtccaaaccaccccaaacttcatagggcacatatatatcatacatactaatatacttacgcaatagaaactaaaatcgagcccttgattggcaaacaccgctaatgttcggactttaactataaaaagttctaaactcaatttttactccaaaattacctcaatttcagcaagaaaatatcagaactagtcccatgactacccgagatcaattctataaggtccaaactttcataactattctaactcacaaactcctatatgaaaccgattattttaaacttaaaatagaattgaaccttaccttaagctatcctgctctgagaattcgctatttcgctactaccggagcttagattgctaagtttcaagttgaaaatcaaagaaaatagatataagggggagagaatttcgacagaggacgagggtttcgtttttgatcgtaagttttgtttataaacttattatatatattgataagtttttacatatataataataacataatatattaatatattaataataata

SEQ ID NO: 361025 - DNA, 556 bp, Cannabis indica
ttattaagttaaaaaaattatgaatcatattaaaatacaacttacctttttggaaaaccatgatgaaaatgattggctatgaatccgatttatagtcatcgttctttgacgaaaattttattgtgcaataatattacgatgttccccacaaaataaattaatattatacataaaattatatatgatatcagcaatgagattttattatttcagagataacaaatgatatacttactcaatgaatgaatctacaatattacaattaaatagcacatattgatgtgtcttagctttagtatcattgtttaaacttttagtatatgcttttcccaaaggttgacatgtcatttggaaaatgggaagcaattcttcatgtgcttccatattactataatttctaggcttacgattaaactttgtctctacactttccatgtgttaattccatttttggcatatttaattgacaaaaatattttattattctttgtatatttcggctggcatatattgatatggtttccctatttgtgtatatctaaacttggaaggaaag

SEQ ID NO: 361026 - DNA, 1121 bp, Cannabis indica
tagtgtggaagattgtgaagaatccagattcaagagaaagacattcaggctcagatcttggtgatactctgcgacagaaatgatacaagggttagagatctgagtggaaggagacattatattgtgctgcaacccctgtaaggtttctcatactttatatatgtttatttcatatcgttttagaagttcatatttaggatgttaaataacatacttgttagtaaatctaagatcctggtaaaataaattccattgaatcggaattccggttgtggaactggtctaccgtttggggcattttagggaactctgatttttctcaattttgcgatatttaggatatttccatgttattcatcaataggaaagcttttagtttttagtttttgtccccgaaaagtgatttagcgtgtctctcataagttttatgaataatgtgatttagggacctgtaaatcgtcgtgcagctgttccactcaggttggccagcacacctgaattcgaaagtgaggtaatattagtataatgtgatatgtatatacatgtttagcgtgcttattagttaagcctgtgagattacattataatagcgatatcaatatatttagtgttatattggatatcaataaatgtatattggcttaagtactactcaacagtatcacattgatacgactagagtacgactagcgtaccgagtataggctgatataatggttgatagtattgtactactcaacagtatcacatcggtatgactgaagtatgactaacgtaccgagtatatgctgatattatggtcagtagcactgtcgtacgaatattcttaactcagcaccatgttagacacgtggataggattatagttgggtgtataggcacctgattatattccgggttattgctatgttattgattatacatttcttactgagtttgtcgactcacagatattgtttgcatatggaggtaagggcaaggctaaggttgagtagctgtgagagcgagcggatgaagattgtacatgtcggggcggttaggcctagagcgtacggtctttgggacagctgggcatcttttgtatagtcgctaggcaaaaacttttgtactatgcactgtaa

SEQ ID NO: 361027 - DNA, 625 bp, Cannabis indica
aaattttttaattttgactacgatttttttaagaaaattttctttgattagcaaaagatagcattataattgaaaaaattactgtagcgtgcctaagtatcagggtattacaattttcagtatcagaaccgctaggtttgtctatcgaagattgccaagacatgtacaatcatcatcaaagaaaagctcggctcagggttcagtaagcctttacttgtttagtattgtatgtaattggtaaagcatgttaggaagcatattagtttacaattgtttattttaatgcattgccttaaaatacataagagcagtattaagttttgtgatcgctgtctgacctacttggcttatgggttcgtaggctaagtcatattgaatggacgcccagcaaattataaggagtcagggtaataaggttgataccgaaagcagctagggaaatcaaattccccaaaatccccgtggacgcggcagtagccgtggaagatttcagggtggtcgacatgtgaacccacctcaagctcctccagattgggagtagagattcacagaaatgcaagatcatatccgtcagcaagatgaagaaattctgagattaaggcagcaggtgttgggttttgtgccc

SEQ ID NO: 361028 - DNA, 547 bp, Cannabis indica
gggttatttgggatgattgattcgtattcccatttgttttttaattttttttattttaatttattaaaataattttataaaaattaaatttaagttagatatattagattaaaaggttaagtttttaattttaattaaatatttacaaaaacgggaatttagtttagaccttatacatgcactagtcacaactaataaaatagtagtaacagagaggcctaaaatataacgtttagtattaaatttgccaaaaaatatatataatatttaagtgtataaaattaaaaacgtatagtatttatgccgcaaatttctcttaaaataattattattattattattattattttgcatggaactctaaaattatagtagtgtaaccttagattagtcttgcatcatgaaaatatttgtaaaaatgaacaaaatacaactagagagtaaatttgcacttattttcatagttagtggagaaatttttacaaataataataataataataataataataactaagggagcaaaaccttaacaaaataacctaat

SEQ ID NO: 361029 - DNA, 759 bp, Cannabis indica
ttattgattaaacatgttttgcacccattgaattaatcatgtggtaggcattgtaagactagtcaaaaatattgcaaaactattgttcgaaagctttgcagtaattggtcatagtaacaaacttttgtaaatattttcattcttttgttagtaaattttgaattgataagtaaataaaataactttaacaaatttttgttggtagtgtcaaaatgttaaaaattaaattttataatcaaacaaagagtagataaaaataaaagcgaacatataagtttttagaacaatatattaaaagtattgatagcacttaaatctataataataataagaaaaaaaaaattggaccaaaaaaaaaaaagaagagcatgatataaagaaaggttttgtgttctatatacatgtaagtcatagatatgtaacatactcatacatatacacacacaaacttgaagtatattctatacaagttaacaatttggaatgaactcaaaataagtcaaaagactattaaagaaaattgtcagattgcattatgtgatcttctgtagtacaaataagtcaaaaacagaaaaactattaaagaaaattgtcagattgcattacaggtggtgaattgaggaaccgatttcagattcaagaggggtctgtaaatgggtcaggtcagactgaatacaaaccaaaagatatttgttgtgcctgcctggtaattactcttttttctttttacttgttttagatattttctatgaaaaagat

SEQ ID NO: 361030 - DNA, 676 bp, Cannabis indica
tcgacacgatggtgcaaactcgtagaggcttgtccgacccagcaaactcacagatgctggattcgacgttgcaggacccacggagtttgagggttccacccgctgccaatcctggacagatgggaagcgtggtgaatggtgggacaactcctgttactgaaactgcccctggtgtgcaagagaccggaaacaacggttccgcacacagccaggacgttcataacatgactgttccaccaggcatcaacgcccagacgaccatcgtagacgcaaccgaattgaaaaacctccgcgctgcgcttggactcatgcagggttacaacaataccctgcatcacgatcaggaggaattacgtgcagcagtaaacctcgcgtttgacgaacagaggtgtatgttcaccgagtggagggacaaagagatggaggcattaagggctcaccatacagaaattgaggatcgtagttggcaagccactgtgtttatacaaagagcctatcagactgtaggccagcaagcgccgagcgtcattccccttggagaaaccgaggatgacccaacggtgaatgcttcccagacaaccaacggtcaaccgtccaatccccgatcacgagttctgttggaaattattttaaataaacacatataaagtttagtaaaccttacattaggtgcagc

SEQ ID NO: 361031 - DNA, 780 bp, Cannabis indica
aaaaaattctttcttcttctcgttctctctctcattgctctaaacctagctgccatccccgtcaaagccaccatcaccatccaccacaattggtgactaccatcaccaccaaccctcacaactgccaaccatcaccaccactgtcgaaacaaatgcacaccatcaccaccgtcgaaaccacaattgctcaccaccattactatcgtcacctccatcctgattcaaacacaatcccataactcatatcctaacacaattaaacaaacataaacacaaactccattcaaatcaataagaaaaaaaatcttagatctaacaattaaatttttcaaaagaaataataaatgaaagagagagagaggtgcgacaatggagaagtcactgaaggggcaagaactgttgtcgttgttgtcgttcaggtcccgtaccacctcaaaactactcccatttcttgtgtcatcgccccaaacctctccactgccatctcctccatgctcgccgtcaacaaagaccgccccaacaagctttggtcgtcgtctccggcaaccgaaacctccacatgtcgagtttgagctagtccaagtgcaactctattgacccacttcctcccacatttcgactgtgtgagccctcacatcgacaccgaaacccttcatctcggacatggtggagacgctggagtttctcgtgggtcagattggtggtggacggctagatttagggcagtgagagaagagagcacgagaagaagagagaaatttaggggaattagggtttttt

SEQ ID NO: 361032 - DNA, 731 bp, Cannabis indica
atctaaagggttcaccccccaaccaagtgggcgggtcatgattagagagactaaggttgctgagctcctgcttcaaaatggtggatggaacgtccagctgctccaccagttgtttaaccgagaaacgatctctgctatcctcagtgaaggtgtccctactggccggggtaaggatagctgggtttggaccttggaaaataatggtagattcacctgtaaatctgcctatttggcacaaaccatggataattccatccttccagaggttgctccctctttgtggaacaagctttggaattgtaaaatcccagaaagactcaaagtcctttggtggtgcatcctgtctaaggctctcccagttcgttcagtgttaggtagaaggttccctgttgaggacgagagctgccccctgtgcggagcagaaagtgaaactttggagcatttatttctctcttgtaatgttgcctttcacctatggcgatcttctccttggggtattttccccatctgtgatacgggtataagaatgtgggattgggttaagttcttatgggagctcaaaaacaaaggcattaatgaacaggaaatttttttatacgcttcgctcaccattgacaccatctggcggacaagaaatgaaaaggtacataataatagtccggtagatatctttaaatgtattgacgctgttcgtttttcttttgcagatcatcatgcttacttgctccctt

SEQ ID NO: 361033 - DNA, 839 bp, Cannabis indica
cttcctttaatcacaaaatcattgataatgtgaaattcctctctatattaataagtaaatctagatgctggtaaaatatttccaatagataattctgtacaaaacaaagttttacaaaaaattaacaaataagcattcccaaaagttgctgcattttaccattcaatgatgactttgtacaccttcgcttctcaaaaatatgagtccattacaccatcagatcatatttttgtacacttttgcttctcaagtatttccagttggaggctccgaaaatattcttgttgcattggagataatgctgagaagtctatcctcataatttcattaacttctttttgtttatccaattcaggcctctcttttgtaagacgaataaattctttcttagcatcttttttatctctcttctctgagatttgaagcaccaaatcaataacatcagaagaggtactctcttgcctctttcgcttctttgtagccttcttccctataagtctctctaaattaacatctatagatggtgatgtatcttcatctaggaactctagcgtatcaccatttgaagttgttgatccccttttagtttttgcattgatactctcaactacatattctttccatttgtgatggtgtcctagagtaatccaacaatgaagaaagttgaatgttgcgaaatggttacttcgataaagctccttcgcttgctcaatctgaaaataaatagagtgtgaaacatatcatataaaaatataaacaataaaataaaaagatggtggttgtataaacataaaataaaaagatggtggttgttgtaccttatcttgctcattaacccc

SEQ ID NO: 361034 - DNA, 529 bp, Cannabis indica
atcataattagcctttattttatatcctgattgtatcagtttggggatgtcccaactaagttgctatacttaaaaatatgctatttttgtgtcatttttgagaataagcttgtcaatcgaaaatgatatgtaccctagcccatttaagaaaaacgcaaatttattcatttcgtctcctctaactaaaaagtacctccatattctttatcttagctctttaaaaatatagtatacaatagatatattattttacataaattttacaacaatgaatagtgttgctctacatgtaaagcagctctaaatttattttattggtttctttaattttattatatttatgtatatataatattatatatttaaaataaataaaatatataaaaagatttaatatagagaaagaaatagagaagatgatcatgatggatactataatgtaaaagtttattgtaaaatagataaaataaaattttaataaggtattttaaaagatagaatagataagttgttgtgagtgctctaataa

SEQ ID NO: 361035 - DNA, 694 bp, Cannabis indica
tttcgaaaatgctataaaataaaataaaataaatcctgaaaaattattctaatttatgttggtccaaaattaattaaaaattaattttcaacacaaatataattttcctatttaattaaatattaagaaaattatcaaatatttaagtatcatgattaaaatcaacttaaatattaattaataattttaattaaatataactagaaaaaatacttcaagcaaacagaaaataactatctacactttcactaaactaattactttatttttctaattataatatattttagtccatttatttgaattaatcattaaataaaaaaattattgatttaagttggtctaaaattaattaaaaaaaataattttcaactttaatctattttccaaaaaaaaaaattcaaaattttctgcattaaataaaatgcaatttcgaaaaaaaaaaatgattaataaaataaaataaaatatattttgaaaattattcaaatttaagttgttctgaaattaaaatttctaaacttaaaataattttctatttaattaaatatcatgaaaataataatatttaagtatcaagaatgaaatcaacttaaatatttaatttttaatttaattaaatgtattaaatacaagaattaaataatcaagtataaaagaaacttaattattaattctaatttaatactagaaa

SEQ ID NO: 361036 - DNA, 923 bp, Cannabis indica
gctatcccaagtgtcatttctcgaacacattgtcagttaggatgggatcatggttaatttgggaaagtttgaattcatcagagattggccaaggctaaagacagtcactgaagtaaggagttttctaggtttagctggttattatcgtcagtttgttgaggggttttctaagatctcaatgcccttaataaaactaactaaaaagaatcaacaatttatatggacatacacgcgtgaagcaagttttcaagatttgaagcatcgattgattacaactccggtattagcattaccatcagattaagagaagttcatgatttactgtgatgcatctagacaaggtttgaggtgtgttttgatgcaagctgatagggttattgcttatgtctcccgtcaattaaaggagtatgaatagcgatacgcaactcatgatctagaggttgctgcaatggtttttgctttgaagatctgacgacactatctctacagggaaaaatgtgagatttacactgatcacaagagcctcaagtatttcttttctcagaaagatttgaatatgagatagaggcagtggttggagctagtcaaggattatattgtgaattaatcctttatcatcccgagaaggctaatgtagtggcagataccctaagtaggaagggtctcgagcaagtatctaacatggttatgatttcaccccagctagcagatgacatgattagatcaggtattgagtttgttgtgggcaaacttaataatttgacgctataattagaattgttagacagaattatagctgcccagctagctgattcagagttagtaaagatctgagaagaggttttatgtaataccctagaattaagaaaatggattagcaaaactctaactagttaattgagtattattgtggaattatatta

SEQ ID NO: 361037 - DNA, 507 bp, Cannabis indica
aggaaaaagaaaaaataattaagacgctaagggctgccacagatgttttcgcgtggtgtcaagaggacatgactagcataagcccccacgtcatgacccacgtccttaacatcaacccggacatgccactggtcaaacagtaaagacgcccctcgactcggtaaaggcagaagccctagagaaagaggtggacaaattactaactagtggcatgatccgagacgtgtattacccagaatggctggccaattcggtgctggtaccgaaaccaaacgggacatggagggtttgtatagattttcccgatctaaacaaagcctacccaaaagactgttttcccttaccacgaatcgaccaaatggtagatgccacctccgaattcaagctattgtccttcatggacgcgtacgctggctataaccagatcaagatgcatatcgcagatcaagaatgcactagcttcaggaccgataatggggtatactgttacctggtcatgccttttgg

SEQ ID NO: 361038 - DNA, 590 bp, Cannabis indica
gaaaacttgattacaacaaatatttgcgacagatgcagtaacgacaactttaaatgtttgatgaaatcatatattcaaatattttaataagaaaacttaattggaacaaatatttgtagcataattgaggactataattgatatgcaataatgacaaaaacttcaaaagtaataatcactaaaatgagaagacaacatttttgaaatcatatagttaattttttatagatttatcaatttattttttaaaatttctattttgtgtaaaaattcttcaattttttatatattttttcctataacacttaaagatatttctattttatgatgaatttttcacaatattaattatttatctaagtaaaagaatataattcctcaaaaaaaaaaaacgaatataaaaatttaatagcctaattaccaaattaataaaaaatttaaaaacagaatatctttaaaaattttgagtttgtaaataaaatattcctaaatttaaataaatatatatatataaagaacacttcttaatcagtattacccatgaatggttactaaacaagtttaactataaatattaattttaaaaatat

SEQ ID NO: 361039 - DNA, 724 bp, Cannabis indica
tagggttatttgagcaggttttgataggtagtttgttggatgagcaagctttgagtttttgaactcaagcttggctcatcaatggtgattttgaattttgtgtatgggtagttattgtaacacttgggaaatgtttattgtgtatattatgcaggtctggaaattttggttgggtttggaaacgatttggttagggctttgaattttttggttattgtgggaaaaaccagttacccagatttggcagcagggaaacccaaaaattcagcttgtcgttttgcgtcagtttcaggtttctagttggctgatgccctgctagtttggggtattgccatattaagctgtagtagataggtttttggtttaaaacctaagtcccagttgtgatttagcgagtcacttatgcgtgttattatcgatgtgatttatgagcctataattcgccgagcagttgttccactcaggttgaccggcacagctgaattcgaaattgaggtaagattagtataatatcatgcatatgttattacatgtttagcgtacatgttggttatgttagttagattacattaatagcagtaatagtatacatagagttgtgctagttaaagattaatgtatgttggctaaatactgatcgatgctgttacatcaatatggctcgagtagtttattttctatagtatgatttaagaaaagcctgttaggaagcatgttagtagcc

SEQ ID NO: 361040 - DNA, 344 bp, Cannabis indica
atatccctctgtatgtcttttgccttgtattttgatccatctgatgtggacttgttcttaataatgtgaccaataacccacgttgcttcttgacagtgatctgaatgtctagaatccaagttacatgtgtgttcgttatgaaacacagtaacctcaaacatgtcacaaagtgccttcttcttcccccttaatctccatttacaattttcattacaagtaacataaaacacatcagtgccagacttacttaccatccactcaaaattattttcagtgcatacctaccaactacattcttcaattattccttgtttttgtacaacttgccaagatatatctcccct

SEQ ID NO: 361041 - DNA, 572 bp, Cannabis indica
tgcacgtgaactgatatcgttgatgagaaggtccgaatgtttgtcattaacaggatcaatgtctgtcaacagtgtttctccatctttggttaatgaaggttttcctagattaaagcatttgagattttctaataatgatggggtccaatgtatcaataattcgaccgacgtagcctttccgtgtttggagtcaataacacttgtccatttaagaagcttggaaagcatatgtcgtggcaataaactcccaagaggctccttcaatcaattgagaaaggtggatgtgaggtgttgtggtagattaaagaatttgttccctttgagtgtggccaaactacttgatgagattatagtacaagaatgtgagatgatagaagagatcgtagtgagagaagatggtgatgaagttggccataacattgatgattatcactcttctttgcaattacgctccttgcaattatatattttaccaaagttggtccaattctattgctccaaccacagggcagctgaggagtcagatcattcaaagcctttattcagtgaaacagtacacttttttttttctt

SEQ ID NO: 361042 - DNA, 762 bp, Cannabis indica
gccgtaagtttttaatttttttttttttttaaaaaaaaaaagagtaaaaacgttaagattaccgtactacagtataattgaaataaaaatgaaaaagttaataaatggtgtaaatttcccttatgttttctacaatatttgtaattatttttatttaaccaaaaaagatatgtaaaaatacaataaaacatattatataatgtgttacataaaaaaatagatcatcaagatcgaaaaaggaaaaaacatgaagtagaatattaattgggaataaatttgttgttcttactttcaagaagaagaaaagtttatattgaaaaataccattttcataagaggagtttacaagaatagcttaaaatttcacctagaagattttgttgctcaaatgtcaaacttatgtaagggcaaaatgttaaatttacaaagcttcaataacacattctgttaagtctcttttagatattcaccaggaatactatagtaaattatataaaagagggtgtaaatcaaattaagaaatatataattgtggggttcaatcattagctgaaagttagttgtattaaggttgaggaaattagactctatatcatttttatattgtcctcttttatttttattctttttttttaaagtctatcattttacctttttttttaaacattatactaattttgttcctgtcacttcaagatagtaaatactctccatgtgactttttcttatgtctggatattttgggtacaatacatataaaaa

SEQ ID NO: 361043 - DNA, 744 bp, Cannabis indica
aaattaagtataaataggaaaagaaaattaattatatcacacactaattagagtctattatcaactagcattactagaagctactacatacgagtttgatcgacaacgatttctaaaccgattggatcattttgatagtttaactcaacacaaataattttaattataatacaattattgatcttttgagatatcaaggtaacaattcgattgttgaatatgtactaaaaaatatcttactattcaaagttttcataaattattacatttcgatgatatattaataccttatcgcacatcttattttattgttcacaaaaattacaaaatttaaaaaaaaaaaatattccatatatgaattattccataataacaagatccattaatatagtatcatagagatttaaaattgtgtaataataattaaaattaatctcaaataaaaaataaattataaaaatcgagtcttatgggatcctgaactaatttagtagacctgaattgaatatgtcattgtcggggttgtaggaatcaaagaaacaactgcatgttgaactatttacattgttaaaatatatatactggtaaaacatataccaatccctcaatataagtgttgatcgagattttcggcaactaataaaatattataaagttagagagctgtaagaaaattagagaaggatttttacgcggttggggcgttaatgagccttagtccacgagtctttgttatttatggat

SEQ ID NO: 361044 - DNA, 692 bp, Cannabis indica
agtattatctcaactagtgagggggccataggcctatataactgagcttccaataagtagatctagaatttaccaagtaaatttcctaacttattaattccaccttgcgtcactatagatatgaaattgtgataagtcgatattttgccttataaatatagctaatttatgaattaatatttttaaattgactctttaagttactgataagtgtaattataatttataaggctattttgaagactaatcatgcatttggagtcatttggagggatgctagcatattttggtggaaaatagtagaagtcagcgagctcggttttacaagacagaacttaattgaaaattttggcaaccttagaagcagaactcaacttggagctcaacatgaaagttttagatctcgttcttaactttccgaaacatcttgaatcgtccaattccgaattttattgaagaaattattgctaaaatactaatcaggtgcaaaatagaaattttgttgggcgctatagcgcccaatacctacgctatagcgccggtttggaaaaaaaaaacacaaaaaagagataatttcagcacatgggctatttggaaaatatctcatgggcgctatagtgcccaattcctgcgctatagcggcgatttattattatttttttaaaaaaaatcctaattctaaggggattcat

SEQ ID NO: 361045 - DNA, 1769 bp, Cannabis indica
ctaattagataattatgaataattgaggaattatattattatatagttcaatatatgagaatttatttgatttatgttatgtaaagaccccgttggtgagccaggggcattttagtaattatgacccgagaaggggtaaaatgatgaaattaatttgattacatgcttttgggactatattattatatagaatacctgtgttgtctttttcaggtgtgttctaacaggttggcgcggtatagtcacaaccgggtatttcgggccgaaccgggttcgggcctgaaatgcaatttgggatttaatgttggcattttaaatatgtatgagaaatctgaaatttaattgggtttatattggtgtgtaaatgtcatttttgcccttgcatgcctaagtgaatgttatttggccctaggggcaaaatggtctttttaaacccttaatttatgtttaataaaagaatgattttaaggaaatgagaatgttatttctggattattcccccttcatacccgaccccctgtctctcaaaccctctcttgaatttcatctttccaattagtgagaaattgcttggttggagcttagttcttgggggattaattgtgcatagcttggaattggaaattgaggtagtttttatagcttttaattttgtttgtggttgctgaaatggttggttgggaggcatgtttttctaagcttaatgttcttagttgcatgagtattgatcttgttaaatttgtgtgtaaattccatgatttgttgtgagttattttgttgagaatagagtaagattctagggtattttctaggtttgatttgatgttattgtttgtatgttgctgctggaaatttgttgggatgcatggttttgaagctctagttcaagggcttgaactttgctaagttaaagcatgattttgggttatttgtgcaatctgaattttgagagttgttgttgatgttgttagctctctgttgtgatgatttttatctgtaagaagttaattttgggtatggtttgattaaggttcgaatatatgaaaaagtgagcatttttagaccttaaaatcttgttttatgggtttttcgaaccctgtggccgcgaccagatttatggtcgccacggccaaaaacctagcatagagctctggcttttcccgattttgttttggccataacttttgactcgggactccgttttggacgttctttatattgttggaaagctcgttatgagctctatatggttatctatattttgaatgacgaatttatattatgtgaaagtggaattagggattaaccttatttgtaaaatctcggattgtgtgactaggattaccggcacctaatcaggagcacccaggggtttggaatctttgatattgcgggacaacaggaaagacagtagtttacacgtagagtatgcgcggtggcgcttatgttgaatacgatatatgtgagtaattgtaaccgggattagggttattaccctaatatgagcggttaatagtctagggttattaccctagtgatataagttgagtaaatgctatgccatgctaagtatatgattatattgagatttaagggttatgcattcaaggaataatcgggttggactcggtaactagaaccgagatgaaccattctaaggccttattgtatttagatgtgtgagagcaacacgtagatttacatcacgtaaacataaataggcatgtgagcccaacatataggtctgtgtcacacagacagatttaaat

SEQ ID NO: 361046 - DNA, 584 bp, Cannabis indica
cttgagagaggtaatctaaaatcggacttagaattgcataacataggaaaagtgtaagattgagagattccactaattctatgagtttcatttaaagagaatcatattgctctatgagtgattatttgattaacattgaatatagatatcgtgttagttaatttgagttaaatctatcatcgcacgagagaagttaatcggttacattaggattcttgaaactacaaattataggataaattgggataatcagtaaatttagattcatagtttgaaatcatgctctttattttttacttttttattaaaaaatcgttctttgtctataacttatttttctatttatcttattatttgtttcttaattataatttactttgtgttatctaattaagtatgaaattaaaaagtataataattagtaaaatttaataatcaatccctgtgggttcgacaactttttaagtattaaaactttgctataacaacattgtacgcttgcagtaaaaattgtgtatcaaatttttagcgccgttgtcggggattaaaaattcttaaattattactaatattattactaaaag

SEQ ID NO: 361047 - DNA, 865 bp, Cannabis indica
catgcgtctgttgaatcttgtttgtcaacttttcaatgatcgtatcttgtgattgttgtttgacaactgtctctgtgcgggtgtatttttttttctacccgttttaagacatggttctgggcaatcatattttctgtttgccaattcaatacttcttcggctgctgagaccttttgtaaagttccatcaacattcctagttgtaggattttgtatttttggatggtgggaagtggtaccttgctcttcaattttttcgaacctcttgagaggagggcaatgtgtatcataatcaatggatgggctagaggtgatcatgtttgcgtcaggatgttattgaattaatggttgaacagccggtgctgtaattgtttctccatgcttcttcatccattttgcttgtcttttgtaacaaggcaagactatctgtggctgtgaatcttttgaagaatcatttgagtcccatccggtaggttctggcataggctgattgtagttctttggtgcagagtatttgactatgtagtcgaattttccggatagttggcctaatagaccgatgtttttgttgcctttttccagcttttgcttgagttgctttcctggagtaggacgtcgttagggctcatcatcttttaaacaacttttgcagttacagacatcccagtatttatgcccgtctgaggattcaaaagcataaattggctttccttgggaatcggagtacaagatttctgcatcagttgggtggatgggtgtgatgacatattgggtgcgaaaacagctagatgtttttgtttggcttctgtcaaaaataatttcgacagatccatcttctttgtgtggtaggaaggttcagttgtggt

SEQ ID NO: 361048 - DNA, 524 bp, Cannabis indica
ttttttttacctataacctattatagaaaactgtcacaaaaattgctttgcccagtaagaattatatctatatacataaattaaattaagtactgatcacttttgtttatgatatgttttagtatgcagaatattatagaacaataccataaacatgcaaaaagtcaaaagcaaaccaacaaccatataattgaaattaattttattttatattaagagtatatgtaatgtaagtaggtagaaaacattcataattttcgcaagtaattaacaattgctataagccaaataaatttggagaaaatctttgggtcatacattatacatttatagtgcaagagaattctggttttagcagaattaaaagatgaaacagtttttcttagttccttgttgcttgcccctatcaaaaagaagaaacatccaatctctatagagtcgtttgtaatgctcttactaaaccacatttttttttataaaaatatgatttttatttcaaattctattttgaaaaatacagtaaa

SEQ ID NO: 361049 - DNA, 799 bp, Cannabis indica
aattgtcaatagatcttataaataatttataacaggtaaattttgtatttctttcatctttgtaaacctagaaacatgatagggtgcatccaaatcaatttgacctgtgtgagcctatatgtttactttgggcttagatgcatataggaagcccatttatttctaaatatttaaatggactaggttgctaaattaaaatatcaccttaaattttctcagtacactttatggtcaaagagtagttcttaaatttgctcaatacactggtgctcatgccattgctggaatacgagcagaccaagtcactcacttatgtacccaaatgtgttcttacccatataagcgttgaccactttaaagacagtttaaatcacatatgtgtgattttctaatattatatacacgtaattaaatggagcgtaattaaagcccacaatttcggggaatattgttatacctatattactataaatagggacagattataccgaaaaaaggatgaaaaatctttgagagaaaaaggagtttactaattgtaaaaccctaattttgtatccagaaatatctaaataagatagactcgtggactatgcagagttaactgcaaaaccacgtaaaaacttggtgttattattatttctattattcttctaagatctcttataatttctatgccaaatctattacgaaaataggctcataatcattaacgaaaatctgcgttaacagtttggtgctttcattgagagcctacgtgataaaagctcaaaaaaatccctcctaaccaaagaaggaattt

SEQ ID NO: 361050 - DNA, 516 bp, Cannabis indica
tttcagtgacaagagatactcgctgcagctcatgcaattgcaaatccatcaattgaagacgtagcccttcccagttcatttatgacaattagactcctgtacccacaataacattaatataaaatgtaaatgttgcatagttggtgtgtgtgtgagtgtaaatatgtattaattgtattttcaacatatgtagattgagaacaactaattagtagtatgtactctgtagcagaaaaagaaaaatctgaaataacttggaaagagcatgtcttacatgtttgggcccataactatcaccatatttgatgcctccgataagaaagtgttattgggatgcaaaatgcgaacttaataatcttataaaaattttccatgaagagaatataattatttaataaagcttctttcttgataaaaaaaataaataaaaaaaggatatggttatttccctattttgaaaagtaaaagaaaaagatggagagcatataatagcaatgccatctacttcagtaaaac

SEQ ID NO: 361051 - DNA, 569 bp, Cannabis indica
cttgtttttcggtagcccatcacgaaagaactccaaagttaagcgtacttgacctggggcaatttgaggatgggtgacctcttgggaagttttcccaagaagcgtgcgagtgaggacaaaacacgctagaaacactcgtgttggtctgtagggtcagtcgttagtccatgaagcaactagagtggcgtactcgtgtataagagccattaattccgtgggtgtgaggacccaatggaggcttgaagcggggacgttacactctgtgttcatatattatttttctatagcttttattttttctgtgtgaaattaatatcgtgaggctcaattttagttaacgaaaatctgcgttaacaggtcccacaaaagcaaacacaatcaaacaaacaaacccacaaaaacaactcagatatcatattcaatcccacaaaagctaaatgtctcacctccaccacaatctcaaattcaaagcccacatgtacaaacaaacctaaatcaaatccacatgatgaaaactctcagatggaacaatcaaatatgtcaaaaacaataagagagagagagagaga

SEQ ID NO: 361052 - DNA, 1248 bp, Cannabis indica
attactttttattaaaaaaaaattgattcaagataattttttctcatacacatttggttgcttattttgattcatcaactttaaaattaatatatatacaataatttttataatgtaactaatttttataagatactatttgataattttataaattttcgtattaacatataaataattttttattaaataaatttgttataaatatactatatcgtaacttttaaatacaaaataacagaagattttatggtaatctatgatgttatttgatttgttaaagtttattaaatttaaaattctattactttttgttataaaatataaaaaaaaaaataaaaaactacttttaatattgataatcctttttcaaagacaattaaagtaagagagatatttaaatgttagaggaaaaaaattaagagaaatagaagattaagagaaaaagataaaaaaatcataataaatgaaaaagataataatgtacaaaaaaaaaaaaaaaaaaaaggaaaaaaaagtaaaaaataaaaaataccagaaaaataaaaataaataaaataaaataaaacagtaaaatatgagataaatattaaaactattgttaaagcggctgaaagtagtagttcaatacaaatacaaacaccataactatttatatgtatatatatagatgaagatttgatattaaccaagaaaagggtcttgaaaaatcatcaaataacaatctgggtcattcttaatttctcaaaattgatcataaatatttacatgtgctctcttaaagtggcgaaccagagaaaacccaacgatgttagccatggcggcgaagaagaccaattagaagaccaacaacaacaacaaatgaatattttacttaaccaatacggtgtcgtttcaccggctgatcatcagagtggtgttggtgttggtgttggtactccgactgagatgtcagcaattgtttcggctctaacgcatgtcgtttcgggaaacagaggagatgagttttggggatacgacagtcgttttgatagtcaagtactctatggtacttctccttcttcttcttctacgacatctggtcaaaagagaggtcgcgatgatgatcatcatcaacaacaaggtgtttcttcaacaaccagagcttttagaacaactcatcatcatcatcaacctgagtcatcttcaactggtaaagtatttgtattagttaatatgagtttttagctaaaaaatcccacatcggtt

SEQ ID NO: 361053 - DNA, 1014 bp, Cannabis indica
taaaaaaaaaaaaagaaagaattaaaggtgcaaaatcgggttggttgggttagtaggtttaattgggcgggttggacctattttcaaccccccaattaatagattgggcggtttgtaattttttcgaattatttcggtttataatttttatcggttttttcgattcggtttgggcgggttattcggtttgggcggtttacaaatttttttgtacaaccctattcaatactattaatgacgtataatttagtgcataatttagtgtgctattaaagtgaaatagtatgtgtgaagattcacactgatttggtggaatagtttactattggagatgatttgagaagaataagtcaccaccaaacaattaaagaagagagaagccttccctatagtgtccaagtagtaatcacaaacattcgagagggcattacaaatatataaaatataatggtaatgtaaataataccaatcattaagaataataggtagcaaattacatgattaatgttcacatttattcttaaacaagcataaataaaatacaaaagtagatacaatgttggcaatttatttttttcaaatactattcttgacgagtcacaaattattagccaagtacaagtaactttcaacttaattattagttagttatcaagaatctctgatacaaacttgatcaaagagcaaagtccacccaagaaattatgatcaataaccccttgaccatccaccacatgagcaaagtcaatcaatttaattgtaacacatgatctatcctcatttggctttattttctcataaaccatcaaaacagaacaagaatagaaatgaaaaagagtttgatcttcaaaccatttcttgagcatcaacaattgtgccaacaccccattaggaccaccataaacacgttgtgcaaatgcacaatctgattctccatctacatcattcgaattcgagactgtgtaggtatgggactacacagttgaagagagtttaaatgaattgattggtact

SEQ ID NO: 361054 - DNA, 555 bp, Cannabis indica
aagttagactcactgtcgttggctaaaagttaggtcaacattttggtgctttcattgagagcagaatcaagaattgctcttcattctaaatttaatcacaagtatgatggtggtatagactcgtagggacatggttgattcggcaaatccataggcgctggatcctgcatagcagaacctaataaacagaagggttctgccagctgttaatcacgagccaccgtcaaacccgggtcatggtgtgaaaacttgtgtggatgaaattgcacctggtgtgcaagagattgggaataccagttcaacatccagccagggcattcttaacacagccgttccgcctgctaccaacattcgaacaaccattggagatgatactgagattcaaaacctccgtgttgctcttggactcatgcaggatcatactaactccctccatcatgacaaggaggaactccgtgctgcggtaaatctcgcgttcaaagagtagaggcgcatgtttgtcgattgtagagacaaagagatggaagcattaagggctcatcatgcagagattga

SEQ ID NO: 361055 - DNA, 640 bp, Cannabis indica
gggcacaaaacccaacagatatctgtgtaatcaactccctcaacctgtgtgaatctcttagctaccaatctagctttatatctaggtggttcaccctctgtcattccctctttttctttgaacaaccatctgcaggagataactttcttgtcttttggccttggcaccagaatccaagttctattcttcttcaaggaatgcatctcttctcccattgcagcaagccatttcttctttaatttgcatgcaattgcttcttcataggtagttggttcaggttcactatcagattgtatcacagccagagcataggctatcaaatcagcttcagcataccttctgggaggtctaatttctctccttgtcctgtctctagccaatcgatagttggtcaaatctggttaatcatcttgactggtttccagggattccacctcagttgtatttgtaccaacctcagatgtgtctacaccctgtgtttccacctcagtagatgtccttgcttctggtgtctgtggtaattcaatggagacttcaatcttgtcagtgttgatctccaactcagcaaggtcatccctgttagtacctgcaacatcagaacccttgccttccttggctgtcaagtgcatgaaatcatgct

SEQ ID NO: 361056 - DNA, 591 bp, Cannabis indica
ttttgatattttatgtgtattataaatttcaatttaggaccattgataaagtgaccaacttgtgtggtgttaaattcctggttttggtcctttgtagtaacacttaaattcttttcttacttgaattttatcttcatgccatacactatatgtatacgatatatataaataatgtaatacacaattaatttcttcaagaattttttacaacagagccattaatacgagttgacgagatgagccaatttttttattatactgcttttaaacaaaattaacattttgaaaataatctgacaatatattatttatctttatttaaaatttttatttttctctttgattatgaactctcatataagggtatttataaaatagccgattcaattcaatccgcacgattctgcagattagaaaatttaaaatctgcacttgtgcggattagatgttgattgacatgtaaaagtaaccgatccaatccaatccatgttagaattattataatgaactaatacaatcataggtttaattccatattacacaatcattaactatgtgcctaatgttactcataaccataatgggatggtt

SEQ ID NO: 361057 - DNA, 454 bp, Cannabis indica
aaataatttccaacactaattaacctgagctaattaattacttgaaaattagacctttcttgataagtaccgcttatttttagggcattttgggcttaacttttttaattgacctgaatccattagtttaagtaccttgaatattttagttgtgttaacttgggttaaccatgaagcttgaattcctttttaaaattaaccttgattaactgtttaatatgtgagaattgattccaagtataataagatagtagcctactttcggctccgtaaatatccagtttcaggcggtactcgctactcttatgcttggttaaaggctaaattaacttcaaataaggtagaggcttacttccaattctctaaggttccagttttaggcgatactccctactctcactactacaagagaaggccttttatcccggtttttaaggctttttatcccggtttt

SEQ ID NO: 361058 - DNA, 848 bp, Cannabis indica
caaatacactgcattcactattttgactgacgatatagaaagtgtatacatggcaactcagtcgctggccccgtataagaagcccgggcccatggagaaagatgccaacaaaagggacatgacaaagtttcgtcggttccatggagactacggccacgacactaataaatgctacaacttgaagcgtgaaattgaattcctaataaggaaaaacaatccacacctgcaaaagtatgttaagaccgaccaaggtcagaggaacgacaacaaccaagatttgctacctccacctgtagatagacatctgcaagtcatttttggaggaccgcacattgatggagattcgggcaaagctcgggagaggtatgcccgaacagtgcagcacgagcaagaagaagtcatcctggccgtggaaaaaaggaagcccaaagttccacgagcaggagagccgacctaaccttcaacgatgaagacgctgtcaaaattagatttccgcacaacgacccgctagtcgtggaagtccagatagccaataaaatggtggccagaaccatgatcgataatggagcctcttccaacatcttgtttaaaactgcttacgaaaagatgggactccaactcaaggatctaaacccatgcctccagcctgtctatggtttctccggtcaaggagtcgcacctctaggacaaattcgtctacccctcactattggacaagctccgacgagcatgactgtaatggcacagttccaaatattagatgttccttcagcttttaacgtaatgcttggccgaccgaccttgtatgacttaaaggatgtcacgtcaatatttcactcatgcctgaa

SEQ ID NO: 361059 - DNA, 444 bp, Cannabis indica
tattttatagtattttaatttttctagtgtaactctatttagttataacctctcaactagaaatataatttatttggtcctaaaagttctacgataagttttatatatatatataaaataaataatataataataataatattaatagtaattttattattcatacttatcttatcatttcttagtcactacaaaatttatacttctaggctgctaagtcaaattccacaaactcctaattaacccaatatttatattatcaacttatcacaatatttctatcaattctatcaattaaatccattatgacatttttggctcccgatcgagtctccaaggtcgccaaacctgaaaatattattattccacatatagtgttacattcacacatgctatataaattttcgtaagttataaattatacttacatgctcactaataaca

SEQ ID NO: 361060 - DNA, 836 bp, Cannabis indica
taaaataatttccaacaataaggatttggatgaatttattaatcaaataaataaatgatcacatgaaccaaataacacattaaacaagtaatgaaattaaatatgtttctttattgataattgaatagaaaagattacattgaaatagagttttatttaggacacaaagcccaaaaacctcgtggttcttccctagattaacaggcatcaagttcgggttaacttcgttgttcttttgtagatggaaaaggggttgctgctgtaatcatttacaatatagatggtaaggtctttgggcttaaaattgagattttcaatgcttcttcaactctttaagctgaggttcgagctgggattcttgcagtgtagtttgtcctagagagtaaccggtccatatgcatcatgtgtttttatcagactaccatgtcctttgtggtgctactaaaagcatggtttggcttagttggttggtggcatactggtatgatttgcttttaatctccttctctctacagattttgtgttttgttagatcccgagatctcttaatgtggcttctaatgatctagcggtgtgggctagagtgcctgctttttctggttatctttcagtaagggagttagcactaggagtgttcgcggttcgagtggtgcaggtttagcctattttttcaaaccaaactacatatgcagtttttataatttttcaaactgtaaccgcaccgcatgactttaaaatcgcgaaaatcacactgcaaaaatgcggtgtggtgtggtgtggtgcgctttacactatcaaacattaaaataaaaattaaaagattagtctaataaagt

SEQ ID NO: 361061 - DNA, 667 bp, Cannabis indica
gggacagagattattttttgttctcgaatattttacaagacgggaacggagatgacactcccaccccgacgggaatccatttaagttattaattatctttttattgatattttatattttatatacgtgtttataattttttttagtatattcgtgtcgtttttataattttttaagttatatttttatataataattagtatattgaataataaataatgtttacatgatgcaattatctagctatgtatatggaactaatggagacttgcaagtacatgatgctggctatgtatatgaaactaattctcattatgtatgcaaacttcacaaatcgttatatggattaaggcaagcacttcgagcatagtatgacagctcaaacttctctcataagttggggattcaaaccatctgttcagatacatccttgttttacactcaaaagcatggtagttcttctagtttcgatttatgtagattgacttgttgattacagggaaaaaatttgaatgatatccataatcttataaagaattttgcatacataattttccctttaagttttttggtatttgtcagtttattttcttggtagtttgtaaagctatatctcaatgcctctggtttatatcttaacttacccaaacatgcatatgatctcttg

SEQ ID NO: 361062 - DNA, 713 bp, Cannabis indica
tttttttttataagaaagtcaatcgactaagaaaacataagctattatagtgggaatattgtccaaccaagtggaattacaaaagatttaacacgaggggaatggagagatatcacagtatcgcagcaaaccttttttttttgggaaataatattataattaattttatatagggatgcacatttcccctacggggataggccccgtggagacccgccccatcccgcccctaatggggcgggaattccccgtctaaatggagaacaaggcggggacagggatcactttttgtccccgatgttaaacggggcagggacggggatgacactccccgtccgacggggaccgtttagtattttatcttatatttttaataatattttataatttataatttatgtttgcatttttttagtatattagtatcttttttatgaattttaagttatattttggataataattagtttattgaataataattaatgtgtaatattttaatttttatgtggtttaatatttgaaatttttacatgaaaaatccattttgcacaatttattacctaaatacctctacacgcctatgtctacatttttacttacaaagttggttttattacacaaataccatttagtcatcattccatccatcatcaatcaaattctactctcttccctctcttttttcattttctatcaatcaatccatcatt

SEQ ID NO: 361063 - DNA, 523 bp, Cannabis indica
ggtggacatatttcgtgtccgatgggaggtccgatactatttaaatggagtccgatatatacatatttattatgtatataaacatgtgcttttcttttctctttcttgttcgaatacatgtaatatattattatgttcgtttaaatatatattgttgtgtatgcatatttatatatataagtttgtttatgttttatatcatagttttaatctcttaactaatcgatgctcaactttgaagatctattttctcacattagagttttgacgtggttttccattagtttttggtttttctttgtcttaattaaggagtggtacagtttaaagaggagatttttatatttctttctttctttctttctttaaatggggttcgcttttttttccttatttgtacgattttaaataccccatcagacccccatctggatagtatcagagatcccatcagacacgaaatatgttcaccaatcagttactatcaatcatgttgggtttagtgccctaaataaaactcatt

SEQ ID NO: 361064 - DNA, 962 bp, Cannabis indica
ttatttttaaattataaaggaatcaatacaaaagccaaaaattaagaaaacctttctctgtcttcgaaccagaaagaaccaggggattttactgctgatctttggtgttttcagcaaggaattcaagtgggattcaagctaaggtaaccctagaatccatagacttgtgtttttaaagcttttactttggttgagtttgtaatttttagttataggggctgttagggtttgatttgtgtatggttcaaattttgagctttatttgagttgatttaaaattttggatgctagatttgatgtattgtgatggaattgaacaagtttgagtttaatggcatattttgattcaatgtgtttttctagtttctattggttggaaaatattgttgaaggttgttttaggtactctggaaggtttggtagcaattggatgagttttgagcaagttgggagttctttggggaaactgcaaaccggttagccggtttgccaggtcctgcaaaacctattaaccgattttcgcagattcctcgaacaacctattttctcaattcttgcccatttcagtgccttagttgggtgtttccctatttcctaggatattgtagtccctattagtaataacagaaccttaagttgtgggttcgggtttcccagattagggttttgacatgtgatttacccggttatgttatgtgattagggcatccatccagcacgagactttccattcaagtcggccaactcacttgaatttggaaaggaggtaagaactgtgtataatatgtgatatgaatatgcgaatgtatgtatgtgttaatgtatatgcatggctgttataattgttacactaccaacacttgtacggaaatggttaggagtgcattggtatagtgtgtattattaaggagtacattacattgttaccaatacaagtacggaaaagtacagggtgtgtgtgg

SEQ ID NO: 361065 - DNA, 631 bp, Cannabis indica
cattactggcttacatatgggtagtgccccaacacacgaggaaatacacgccaagtccaacgaccatctagttcggacttattttgaagggaagagttctgttcagctggattctcttatgctccaactcgagaggtgcgaagataaagatgatgcctacaagcttggactgatcgctttcattgaaggtgtattagtatcaaaggagggaaatgtccaagtttggcctgagatgttgaagtttgttaacgatctcgaattcttcttcaagtatccgtggggcgagcgcgcttttcgtaagctgatggagacattaggaaagaatatgcaacattacaaggataatgttgacaagaagaaggggaagaagattgctcaggaggcaaagtacactgttagtggctatgtacctgcctttcagtactgggcatacgaagcaattgagaagttggggaagaagtatgcccactgcaacgggaccaagttccccagaatgttgagctggaaaacaccggagggccagcggaaacaagatgtcaaggcaaccgacattgcactgttgttcaacagtcgggtatgtttctttactgttctgtatttttttttcctaaagagatatggttgaatttat

SEQ ID NO: 361066 - DNA, 655 bp, Cannabis indica
accctaaaaaatttataaaataaaaaataaagcaatgtacattactaaaattagtagaaattaggtttataccttttaatagacgttgagatataatgttttctccactaaaaatggtggccggaggtataaccaccacaaccattacctctaccttcggtttaccctaaaaatgaggaaaactatgatcttttcaggtatataattttaggtatgaaaaatagaagatttagaaacaaaaataagctaaaatggtgaaaaaatggtgaaatgggggtgattttccgtggtggttggcgtagagggtttggggtttctctggtttgggagtttctgggttggctgatcgaatgaggaagatgaaggactgggctaggattataaacccttttggcgtcggttatttggaaataaccgacggttataaacccatggtgcccctatgccgtcagttatttccaaataaccgacgccataagtggtgtaaaattcccttcttcaaatttttaaccctatgtcgttggttatttattattatgctgaaaaaaaatacctctaaaggcttgttttgtagcagtgcatatggatatctgtaacttttatgattattttgaagtgtaatgtgttggaaattattataccaggatcttagatc

SEQ ID NO: 361067 - DNA, 617 bp, Cannabis indica
tagagtaaattggagatttttagctgaattccagtggtttaagtaaggtaatcctagactctaaccttgtgttatttgaagttcttagttttggtttgtgtatccaaattagtgatttagtggctgttagggtttcagtgaagtgtaattttatttttaaatttaatttgcgatggaataggggtcttattgctagtttcgtagtttggtgtgacggatgcacaagtttgagtttgaaaactcaagcttggttcatccatggaactttttgttttgtgtgaatttctgggtgctattgcttgaattatgttggttgatgttattataggtattctggaaagtttggtgaggtttggacatgttttgagtagattttggattgttttggggaaacttggtgcaaacttgttaaccggtttgctaggtcctgtaaaacttattaatcggttctgggacatgtttcctcaacaatccatttcattaattcgtgtccatttcagagccttggttggaggattccttgttgcttagggtattgttgcttttgttatcaatagaagaaccttaagttggaggattgggtttcccggattagggttttggcgtattatttaccc

SEQ ID NO: 361068 - DNA, 685 bp, Cannabis indica
tattttcccccattttttttcctccattagctttataattttacttaaattaaaataaaacaactaattaatattgttacaataacaacaactttaaaacacattaaatttatacaataacaaaataaatatatataataaataaaaatgtatataaataaataaatgtatttatactgagcttggagagaaagagggagacagacgggaggtgctggtggtccgacgtatgagacgaagatgagagggacaccgacgggaggtggtggttgtccgacgtatgtgacgaagagtagagggaaatcgacgggtggaggggtgggtggagatcgatggacgagacagacaaaaagacatggagatcgagagaggcaggaagacggcgagagaggagggtgatatggtgcggaggcgtgggtggggttttggagagttaagattttcattttagggtgtgggaaatggagaagaaataggtgagaagatataggtgggcatgtgggaaatagaaaacatgtcggtgggcacgtgagaaatgtggcaagaagtaggtaatgatttttcaatggacctttatatgcgacggttttaaaccgtcgcctataaagatccattaaaaaattgcattttattaaaaaaacgttgcctattttgtttactacaattttaaaccatcgggaatact

SEQ ID NO: 361069 - DNA, 1114 bp, Cannabis indica
tttttttttttaatctttttgtataatttcttgattagctcattgttctcctttcggaaataatattggctttctgagcagacactttggttgaatgttgatgatgatgacatttctatatgtagttgcacgaaattgttttatttgggcttgttattacgtccatatttcatatttaagttggtctcaagcataatatataaatatatgttagtgtaatttaattaggttcaattagttattgttaagtgtaatacatatttaatttaagttattgttaagtgtaatacatatttaattttttttaattagttaatgtattttttttattttaatttttaaatagaatttgagattttgatctttaagaaaaaaaaaatttagctattgctcattgatctgttatttggatatgattatatatatgtattttttaaatttttttaaattttcctaattaggtaacgtatttgatatggcatatattgtaatttactatattcttaaacaaaactcacataatcaaatttgagtgtgtttgtatatagactggattcgtaaatttgatataaatattttttattcccaaactttactaaaattatggtgtgtaaatcggtttaccataactaaaatagaaagcaatctatacaaccatttcaatttaaaatataaaataaataataataaaattaaaaatattgtgaaaaatatttataatattttaaatttaaatttctttatataaaatattaggaaaaaaaaacaggaaaatacaaaaagggggaaaaattacaaaattactatgggtcgacccattcaacatttatacagcccacatacaaatatttacaaaaataccacatgctctaaactttcagccgaacggactgaacgatgaagatggacatacctcgattgtttcaaaacaacaaaacaaccaaaatgaggaaatacaaccattaattccagcgaaatcaactggaaaagaagatctgcaattatctaaacagaaatttacgaaaaaaaccagaaaaattgggaagaaactgaaattacacaattgttttcggttttattcgatcaaaacaactctccctaatattgaaattca

SEQ ID NO: 361070 - DNA, 659 bp, Cannabis indica
gtttcaaagaaaaatggcaaaaactaaaaatgctcaaccttccaaaaagccctcctgtggctctacttttgcatctccgatcaccccacttgcgccatctgctccaatgaccggagtccctagatcgtcgtctccttcaacggtgactgccaaaaagtcgaagacccaagctcgaaagttgacttacaatctcatttctcctccgatcattgcctctatgattgctactccaactcctgggcttggtgatcatgatgaatcttattcatccgatcattcattgtcaaagtcttattcttcaaattgtgctccaaatgtcaagaaagcaatagtgcccttgcccacggtgagttctcgaacaaggtccaaggtatccacacctagaaaacccaaagtggataccttggattgaattgtgaaggaattttatgttaacatcactgatgagtgcctcgatgaggactcttttatgtttggcaaagtatttgtcaagggacactagtattcctttactgttaaggatgtggctgaggtctcagtctgtctatgggaattgagacaactgatgtggagttttatcgtcaaaaggtgttcgggtatctcaatggtgataatgatatggaactctccgacacaatgcatatgtctcaactcaccta

SEQ ID NO: 361071 - DNA, 859 bp, Cannabis indica
tgtaaggccactgaaaggcatatcatcttggacaacaacagtgttgccagggatactcctctcaggcccagactgtaaacaaccataaaccataagaatacaatagagaatcgataaataaaaatatacactaaagatggaaaaaaaaatattcacaacctcgcctatcaactcatgatctatctcagttgcaaaatccagcgacgattccgccgctttgcatatatatctcaaaaactcagccaagaatgaagcaatcacatcaataccaaatgcttgcagccaaaaagatttatcgaatgaagtccgaatagaacgaaagaactccaaaaccactgatttaggacagagatcagtgcaatcttgacatttcgacaggaaccgagccacggcaaggacaacattgagttgagattcagtgacgagagactctgtaccattggggcttcaatgattgaagtcgtagaagccagtggtggtcggtagcagtcgtgaggagcggcagatgcagaggcgagtgatagaatccattaattctgtggtgcgatttgggatttgggatttagttagtcggtcgagactggagaaagaggaaggtagtggagataggacctcaccatttagaaaaagattataaatggagatcactgatcgttgtctcgtaaagatttttaaaatttgggtttgagagaagaaagaagattcacatttaatggggatgaagaatcgcagatacagttgcagggatggagaattattggattgaaaatcgcatggttttgttagagaagaaagaggaatcacaatatgatttgaatgacattaattaaaggaaacggtggtctccgttaaagttaac

SEQ ID NO: 361072 - DNA, 976 bp, Cannabis indica
cgaaggagttaaggctagactaataggctacctggcctacttactccagtgaacatgtatctaatatttcactcgtaccacacttattaaggtacctaaccagtggtacatttaattatcacttttagacatacactttgtcagggaaagagattattttaagataatataacctttatcaaatatacccatgacatgtttctaatattccattgatcttctcaggttacccacatttcaagaataaaaaatcatactatttttgctttaatctctatagttctcaataaccttctttaattcttaacatcatagccaaagatatcaatcttggaatctcaagagataaaattattctttcgtatgaattccatatccttatttattgtataaattagctatactgatagacaacatattaacttggtatctccaaccattactattcagtcgaaatcataagatcccacaatacataattcataattatgtcttttcattccttatataggacctcctaagctggcctactgacttagcttaataataagttaactattcatttctgatagatattcaattagagtacttcttatttccatccactactatatactcctctcaataccttgtcaatatctacttattaacacatctattcctcttgataatctctggaacgactgctaattctgcatcctaatatgaatctttctagagtactttgtcctcactcgtacgctttctgagatgactccccagaagattttccatcttgagattaccccaagttaagtatgtttaactccaaagtaagctcatggtgggttatcagaaagtagatgcttctttgtcgtttctaattatatttcttgctttcattctttcattaaaaaattcaattgtgtctctccttcattacctcttgcaattcatcattggtttttgttcacttaaacttgagaaattcccatct

SEQ ID NO: 361073 - DNA, 1026 bp, Cannabis indica
ttatttttttatatattttataaaatatattatcaattgtatgtaaatttactctttataattatttattattgttatttttttttataaaattatatgaaaaataataaataaaaattattttgaacacttagaaagaaaaaaaaatattgaattattagaattttataaaaaaaaaaaattaattattgtaaaaaaaaaagtaggtcacatttcattctaatgtcaacgaaacacagtaatgttgctttcttaggtttatcattcctttcatcagtctccaagcaatgttaaacatactcccatgaaataaaacttgcatacaaaacggcccctaaggatttcgaagattgaagaagaagaagaaagaagaagtctcaaactctctagttgtctaacaagatgaaaactaggttaagagtcattagttggattatgagaccattcttttcctttttatactagctaattcacatagggttaaggattgaattatttagaataaaaaatgataaaataatagcaaaaataggacttagtggccgacccctatgtgggcccaacactagttagatttttgctatttttctcaaccatttatctattttttacaaatgtcatattttgcaattctaatcccataaataccaaaactatttatttaataattaaaattaattatcaaataaaattgtcatttataatatttattaattagactccacaaagactcttgattaataaataaatcctaaaatcctatttcttcacaatcaagccatatcttagtgaaaattcataaactggacatagtctaattttagaattataactgattacttaaaatcaactaactaagtcttacaagcaatttgtctcgactagtatggggaccatgagcctatataactgagcttctaataagcagatctacaattaaccaagtaaactctttaacttattaattcctccttgcaccactatagatttagaattgcactctcaattatatagtacactctatat

SEQ ID NO: 361074 - DNA, 546 bp, Cannabis indica
tccccgctcagaaagatgctgacgtaatccaagttgaccagaatgccgagcaagtcagcccagccgtacaggcttagctggacgaactgaaaaatatgtttcacgacatggctggacaaagaaataatgatcttcagctagaccgagcacacagaactcctttctcgccgtagatcaatttcctgtcattgccccacaagttcaaaatgccgacgtggaaaatgtacacgggaagagaagatcccctttcccatctcaagtacttcgaaatggaaatggatttgcaaggggtacgaggagatgtatgctgcagaatctttccggccactctataagaagccgctcagcaatggtatttcaagttggctcctggaaagtttagttcatggaaaaccttctcttcgaaattccatgcacaatgctcctcctcgcaccaactcccattgcattttggagacttggttgaagttaaacaacgatcaggcgagccactctgggaatacatcagcagattcatgacggaagcaaccaaagtttcacgggtaa

SEQ ID NO: 361075 - DNA, 510 bp, Cannabis indica
aggatgttaatgaaacatacttattagtaaatctagatcttggtaaaataattccaacacagaggtcctcctcagactgacaagggatccaggaagaaagtaatcccagttggcgaggtcatggattctactaaagaatccaaatggctcaagaccaaggcttgcacaaggaagtctccgaaccaaccaatcactggtgtttaaaaatttcccgactgggaatgaggtctcggccgcaaggaatgagatctctgctgcatgaaatgagatcttctgatgcaagaaatggaggtcttctgctgcagagaatgaggactatgcagaggttgagtccttttacgtgtagatagcctttctcgagctacgtgtagacggtctttctcgagctctcctgtcctctataaataatcttgtactctttgtttaagaaaatggcctaatggtttgcccctagtggcatttttgtacggacaagtttgtaaaccaacttatcttaaatgccttgtgctt

SEQ ID NO: 361076 - DNA, 862 bp, Cannabis indica
aagaccatttgcccttctacacttaaaggcataaaagacactaaggggtattttgagaaattctaaaatctcaactactcccgacattcccaatgtctaaactattgtcccgctatatcaaaaatactagagtgtgattctaatagccatacattgcgttccaatgttcctgggcacaaaatatgcaaaatttatgaaatttctatatgtgatataaaaatgcattctgaattcaaataaatcatcataaactataaattcataatcaaatatagatttcataattaaaccctacttattagctaatttcaaaattaaaactaagcgatctttacagaaatagataattgagatctcatttcagtaattatattagtttactgaaatatcatttataggtagctaagtgttttaaggacaaaatacattgaagggtagaacgataaatttgtccttttttcattgtagatcatctacaaaggatctttgattattaggattgtaacaatggataatcataacatatctatatcgtggtacatatagagcgttctatatagttgagaagtctatagtggcgcaagacagaattaataaggtagggaatttactttgtaaattctagatctacttaatgaaagctcggttatataggcccatggtcccctcactagttgtgataatactgcttacagagtcagtttattgaattaatcaattataattctaaaataagacgatgtcttatttatgaattttcactaagcaagggcttaattgtgaagaaaagaagttttggggtcaatttattaagtatgagacttcgcattgtctaattaataaataatataaatggaaattt

SEQ ID NO: 361077 - DNA, 673 bp, Cannabis indica
aaaaaccaaaaaggttgatgacgaacaacagttagctttactccaaactggaatccgaactaggactcctttttggaatgagctacaacaggaaggagctactagcctccaagactttcaaaagagggtctagaagtacattaatctcgaaaaagcgtagatagtagcttatggagggtattatccaacgggattgttagggtatgggataggaacacaacttcttggagttgcggtccctgtcgccctacagacaagcggaatacaattctctgccattccgggatatacttagaatcttgcccttgcttccagcactgtcacacctgggggggccccagtaagcagtccccctgggatgaacgtgcaactttcaactcagtccgcgccagccacaagcatcgcaggagcaactcaaagttcttggagtaagaagtcttctaaaggtagtacacgatctgaggataataggcaaaagagagggtatacaccccaatatacgcagtacacagaactcactgacactcaagaacgagtgtatttcgtgactaggcaaattatgcattaccgaaaacctcctcctttgtacagagacagttctcggagagaccccagcaaaaggtgtgacttgtttgaaatattttaccagaatctagatttactaacaattatg

SEQ ID NO: 361078 - DNA, 653 bp, Cannabis indica
tttaaaaaaaaattataaccggttttatgaggtattatgtgttatgaagtattttattgcgaaactagttttgtctttaatttatattttcgtgttttaggaactgatttcttctttgtttttaattgtaatcggtttgaattattgcgtgttacttgtttgtaattcattttgttatataatcggttctgttttagttataaccagtttgagttcttttgtgttacttgttttttattcattataacactgttatagagctagttctattttaattataattggtttgagttattttatgttatttatatttaatttattatgttatagaaccggttatatttcaattataactggtttgagttattagtttttattcatataaccggttatatttttagttatatatgagacatttgcttccggtcacttttccagtgactttttcggcgacgttgatgtttttgttgacttttatgacgatgttgacttttctgttgactttctggcgacgatgacttttcctacgacttttccggtgacatttatttttccaacgacttttccagtgccggcgacttttccggtgtcggcgacttttgtaaagaccgcttagtttaattagcagttaatcacgtttaattatgaaatta

SEQ ID NO: 361079 - DNA, 725 bp, Cannabis indica
caatccgcacaagtgcggatatccgcattttgcggattggattggattggatcgtgcggattggattggatcggataatttgtgaacacccctatgtttagtattgctttctttttttgttttcaaaattgtattttaaaaaataagaacaaaattttttttttgaagttctcaaaatacaaatcttatttagttgatattttctaaaaataatttttattttaagaaaatacttaaattttttgagacctcaatatgaacacttgacacggacttggatcctggtcccggacccatacccagactcagaccagcacccgacccagactcaggccctagccttaaacctgagaaactctgccccatacccggaccttgacacttggctcgaacccgagaccatggccccaaactttgacccaacatggaccctgacactcgacccgtaccccagcctcagacccgacccctggacccggacccatacctcggtcctagacccagcccagaccccaagatcaaaacctaaaccccgacctcgaccttagactcgacccttggacccggacccataacccgaccgaccccataccctgaatttaaacctgttgaccgaggttttcggcaactaataaaatacgaatataatagtgagctataagaaagcgagatgaagactttttacgtggttggggcgttaatgagccttagtccacgagccactg

SEQ ID NO: 361080 - DNA, 506 bp, Cannabis indica
ggaatagttaaaatagcaatggaggagaacccactaagtgatgttttgaagagatacacgagaatggattttttgttgagttactacaaatttctggaatttcacctatgaaattattctatgaaagatctaaatgggttagctgatgtagattaaaaatggatgaccatgggaagaaaccacctaaactattacaagaaaggtctaaggaggtgatttgtgtgcaattgtcaagaaatgtggatgatagttgtaccgaattgaatctagaaagagaaagagatataacttgtaaatacttgaactttctacaaaggtaaggatctattatgactccagatccagaaagatccatcactttaagtgggctactccaattatattgtggaaaagaaccattgagattcaaattattactcaaatagagttgttgaaggtttggcaaactgagaacattttctggaagtttcccctgcaaattagtccaactaagatcaagagatgtc

SEQ ID NO: 361081 - DNA, 524 bp, Cannabis indica
aattacaataacatcagaaagataataattttcgacatagaatgtcaccaaattggtaaatagtttcttcataaaaattgtagatcattgaataagctttccaacgatataaaattgctggaaacagactaatatcgagagagatatcataactttactgaaacgtatttttctgaaaacgaaaaatattagaaatctgaaccctagataacatttaacattattgagcaaaaaaatatttcatacctcttcagaaatttcaatgtgatgtctcaagcccacaagccttgattaaaaattcaaaagtttaagaatgaaggtagaaaaataagaagtattgaagggttgagaagagcaaccatgaagaagaatgagtctttgactaattggtttgcagaggaaaaataaaactataatagtttaggatttgataaaaatatagattatgagatattctattgtaataggtttatcttaactaataataataacatgctaaaatattattaaatcaacaaatatct

SEQ ID NO: 361082 - DNA, 456 bp, Cannabis indica
aatctggctgctggtgttgatagtgcaagtggggggagaagcgaaacggggagtatcactgaggtttaccaggatgatgaaaggtgaagggatatgtggattgtgctttggttaaggaggttggagtcgtggcttctgttttctttgatgaagcagggaacttagttgcttttgtggcgaaaaagttcacgtgctctcggctttccagggggaattggaagctctggctttcggggtggctcttgcgaaggaactccatcttggtggtgtggacttttcttcggactgtcagcagctggtgcaagccttgattgtgggctcttctcctgtttggtttcttacgctttcttttaatgagctttaccatgctcttgttgcgaacgatagtcatgttgtttggatttctcgtgtttttaataaggctgctcactcccttgcgaggtggggtttgtccca

SEQ ID NO: 361083 - DNA, 995 bp, Cannabis indica
taatatgataatgagttatattaaaaaaactagtattattttatgaatgtgtgtatataatacgtaaatgcatcaaattataataaaataaaataatgaataattgagactttaaataaaaaagatataagtaaaattagtttaataaaattgtatattaaatatgtagaaaaataatatatattatatataatatatatgttcggtcggttctcggtttaatcggtcggtttgccattgacactaaaaccgaccatgttaaggcagttttttcggtttttggttttttcggtgtcggttttttcggtgttcggacggtcggtttactcggtttggtcggtttcttggattttttgctcacccctagttcctattgtaagccttttcactttatgtgattttcagtcttgttccctgctagtttttgtgtgttggttttttgcccaaactgcttatctttgttcgaagagagtgtcttgagaatgggggaaaaagaaagagatttgcatggatttgagagatgaagcaagagataaactgctggaaagagatagcaatatggagatggaaatgttggagccttttgaagatataacgttagaagatgtggttgctactaaagcctgtgtgggagagtgattggttgctaaggatatgccagcttcggttgtaaagaaaagctctaccagagaagaattataacttggtctattcgaaaataccagaaagttatatcactgaagaaaagtctacactgtattatctcaattacatattttaaaatatgagagatatgtcttctgttaattcagatgtacttttaaaacagtaaagatttcagtatcccttgatgagtaaagcatatagtaaaggatgtttcataagtgtatttatgaactagtttccagaagtttgggtggattcaaatatactacacttgatctgaagatcaagacatcagattgacctatttgcacagtttgttttatattagt

SEQ ID NO: 361084 - DNA, 445 bp, Cannabis indica
acgaccgaggtggacaggttgaaggagaaggtcaatgccttgtagacagccggtctcgagctcttctttgatttttggaaggctaatccccgggccaactttcactacttgggcgaggctaaggatatgtaccttgagtactacgcggcccaagtagcttatggtgggaacgaggtgactgcttcaacctctggccaagctacttcaacctcttgtcagcctgttgatgcttctcctgctcaaacaacagatcctcctgctccagttggcctagaacaaccgaaccaagagcctgggactccagctgcttaaacatttcctttatcttttttgtttatatatatatcttattcagccttcgggccttttctaagacatctcgaccagccaagcggtctttaaactttgaattaattttaattttttggacaacgggctgaccggg

SEQ ID NO: 361085 - DNA, 683 bp, Cannabis indica
gatcttgggttaattgttaatttatctaacatgtgatatatgtatattggtttaaggtatattgtttgtatatcatacgatatattaataaaaaattaattatatggttaaataacatattagacaacaacaacagcagcaaaatctaaaagaataaaatatataataccttttatataatgaaaaaatagttgacaaaagtagagaggttttgatttattgtttttcataatttctattaaaagaataaaacatataataccttttatataatgaagggtattttaggtattaaaaagtaaaacaggacatttgctttattattttaaaaaaaaatgacattaactatctatagagttagaaataggatcatttacttacatttctcttttttctataataggtaccttaggcccaaattttacatttttaacttggtaagaaaaattaaacaaaaaagaaaaatctaaaaaaatcaaaaatcaaaaataccggctgaaccttcttcctctttcttcattcccggctgcttatcttatctcctctattttccttctaaactaaggcacaattttagctccaaaaaaaattgtccaagttgtgtaataccaagaccgcactgtagatctcaacaacaaaacgatctaatcctgaaaactccaaaatcaaaaaggtaaaactaa

SEQ ID NO: 361086 - DNA, 549 bp, Cannabis indica
ctcttgggtaataaaagtaggaaatacaatacccttattggtagtctcaattgtcatccatgtcacattttcttcttttaaaaataatcatttttcctataaatatttttagctattgaatataattatataataatgaatggttatgagagtaacatgttactctctttaatataagcgtgaccgaatctatgccctgtaatttaatagtaatttgtcaaaaaaaaaaaaagaataattagcttttttagtccctgtatttatgacactatactatgatgctccttaatttataagtgtagttaaaaataccccctaaaatatatcagttggaatagtataatccttctatctaattctgttaaaattgactacagttgactgttaaattaataatgtgggattatacatagatagtagttgaaaaattatataccattaggaaaataaattacaagtcataaaaataacaatcacaggaaaaaaaaaaatagaaaaataaacatccaaaaaactaagaatatcattaccttaactttttcctaaaaa

SEQ ID NO: 361087 - DNA, 374 bp, Cannabis indica
cacacaagatttttgtacgtggtttcaacaatcctttcagattgttactagtccacgatgccacgaccagggataagattcattagataaatctcaaaaatacaaagtaattaacttatacataaatagactccctcttattatatgccacaagcttgatgtattctaccttctaatcgaatcttgttgaaacttcaagtgcttgaactcccttcgatctccttgaagagttcttgcttcctcccgaggcaagacttgaaaagcaatctcacgaaagttctgtaaaaccttctcccaacggtagcactattgttcttcttctttgtaagcttgaatacagactcaagacaatataagtgtaaagcccgcttagt

SEQ ID NO: 361088 - DNA, 1028 bp, Cannabis indica
cacttatccaaggtacaagtaaactacattgttaattatcctatcagttaaaccctttgtactgataaatcataggaatacatgtatcacacaattttgattactttccactgtgttgacaacaaaataaacaagaatatcaatgtgataaagatttggatgaatttataaatcaaataaacaaataaatgatcacatgaaccaaatagcacattaaataagtaatgaaaaacaaatttgtttctttattgataattgaatagaaaatattacattgaaatagagttttacttagggcacaaagcccaacagttcacacattaatttgggaaatattgaatttagtagtttgtaactttacacttgaatgatgaaatagtataatcttgttaggttgtttttagtgagcaaaatagaaatattttacttattttgcataactttttagaattggtttctttatttatgtttttaaatttaattttgtggtatttgatcctctaaaccaaactaaaactaacttacctacctttaactaactcaactaactttcagttatgttagttggttagttggtgctggttttacacctagtttctagtggtgagttgtacctatcaaaagggtattcttttcacttctgaagtagagaattgagagagagtttagaaaatgagtgcttagttttctaagttataaaatcatgttcttaaagaggtcaagaaccaagggtgtactcgggtaggaatttagaaactgagactgtttctctagtgtgtttttctagtgcaaaagagcattgtttgctttagtattggtgattgtacaaactctcttattctccatattcatgaaagcattgatggtgtttctactgggctttgtgccctaaataaaactctatttcaatgtaatctttaccattcaattatcaatgaagaaacagaagttgtaagaaatcaagctagcaattaggtgtaaatttacatttaatgtattttttttatttactctaatattactaagtg

SEQ ID NO: 361089 - DNA, 914 bp, Cannabis indica
cttcaaacactataggtttcttaataaccttcattcgttactgtcagtcaacatttcttcgtcgaccaacaacaactcccagttctaacactttatgtaagtttttcgcatccctcactttattgtttgtgttcatggtatgctttactgttcatctgcttttctgggtttaatgttcgaggtttctgggaattttttgccttgagtttttgcgtaacacgtttagatttctcttctctggtgtttgggtcactcttattttgcacattatatttttcaaaggcccatctgttctttacgtgatggccttcaagggtacagagaagactttgtctttctcgattttcaccctttctctttctttttctttctttgcttatgtgtgatgttattatttgtgagattcttgcacccgaattttttccaggaaatcctcctaaggctttctttttgtcccgagagggcctctttccagcggttaggggacccccattcccttttttgatttagggtttggtatggggcctgactgctggaattttaactctttctcagaaccaaaatatctacatccggttccaaatcttccaagaagggaggaaagcgtctggccaccctagaagaggtgatggtgggtcccgtcgcccaggaggggtataaacctcgtgctatggggtgggaagcggccgagcttcactctaacttaacctgccttcaccaactggagaacattgtggtggtggacggcatcaagcctgcgacttccgggacgtaccaccggccgccccgtgacgcggagacgcccaatcacaattacggaggcttcagagcttagagccagacgcatttgatgaccggggctatgcttccccttcaggattatttcattattttccttgtatttgtcggccttg

SEQ ID NO: 361090 - DNA, 515 bp, Cannabis indica
taggtagtactaatcaatccatttaagttctctgtaactatggagtcccatacctgcacagtctcagaatcatctcacttgaccttccccaggcgatgtgagattgcacaacttaccccgtatttccccttacggatcacgggactactgactgtcacattcaacataagtgccaccacgcatactctacgtgcaaactactgtcttacctgttgtcccgcaataacagagattccaaatccctgggtgctcttgatcaggtgtcggtaatcctagtcacacaatttaggatttcacaaatagggttaatccctcattccactttcatataatattaagttggcattcaaaatatgataatcatatagagctcaaaacgagctttccaacgatataaagaacatccaaaacggagtctcgagtcaaaagttatggccaaatcaaaattgagaaaagaaatggctctctcctgggtttttggccgcggccactgggttcgaaaaacccagaaaacc

SEQ ID NO: 361091 - DNA, 852 bp, Cannabis indica
cctatgcccagggccgggcctgagtgatattgacacataagagagtgttttatcatttctctttcttaaattatatgagacctgatacttaattacattatagtggtatgacaccgagggtgccagacaccagtggtacttttagcaattctttaaaaattaataagtcatttaatattcattcaataatttattagaaaaatataaaataatataataatacaaaagtaaatataaaatttaataataataatgcaagttatttaatgcaaaaaaaaatatactaactaaaatttaataatataatggtaaatataaaagaagcattgctattaagcatcaatggtgtcgagcatccctacacatgtcgtcttgtaattggttagcgataccccctagaagttattgcattaaactatatgatacatgatacttaattagaccaataacgataatgacacataagagggtgtcagacaccactgcagccttttagtatttctcatatagaagtatatcatttattgttatagaaattttgtatcatgttatgttgtgatcttaatttagattatttttttgttatgtgacatatttatatcacaatttgatacacaagttgacttttaacaaaatgaactatattttgcatttgcatcgcttatttacatcttcaaaaagttgtaatataaatttaatttatactcttttattagcagttgttaatttcattttatagttgattagtcctaatagttatatgttgctaggttttttgtatcaattggtttgattttatcttaatattaaattggctaattaggattttttttctctcactacaagaaatat

SEQ ID NO: 361092 - DNA, 540 bp, Cannabis indica
ttcagaaccaaaatgtctgcttcagcgtctggttctaagtcttcccagaagggagaggttgaactggccaccctggaggaggtcatgcagggtcccttggcctaggagaactataagtcccgcgctaacggatgggaggcagctgagctccactccacactcacttgtgctcaccaactcgaaaaaattgtggtggtggcaggcatcaaacccttaacttccgggaccttccaccggttgcctcgggacgaggagacacccaaccacaattatgggggcttcagagcttggagccagacccatttgatgttcgtggctatgctccctcttcaggactactttgtaaattttcttatttttgtcggcctcgcaccatatcaactaatccctcaagcttaccgcctgctttgaggcttgttatttttatgccgcccggagctggtgtttgcccaatttggctgaaattttatatttttacgaacttgtttctatccccaagaagggggataaatttaaagacagtttttatggccttcaggc

SEQ ID NO: 361093 - DNA, 526 bp, Cannabis indica
cttctatttttgagacacacgaataaaagaaaattcatttttgatactggatagtcaagaatattatgttggtaagcccacttgaggagacttgtctccggtttgccaagactaatcagtttctatctttccttgctttcttttatttttggtatgatttaacttttgttttgttcgtttattttttcctttagttttatttttctaagaatcaatatcaagtcattttgcattggctcactctctaagtgttctcatttcatgtatttcatgtatatatttttaaacaatgaggacattgtctgattttagttgggggtggtgagcatattcaagcatgcttattaatttttgtcatattaatattttcatggtcaaatttttcaaaaattactcatttattcttgtaaaatattattttcaagccaatatttgctatctttgttacttaaaatttttctagagttataaaatgcacatgccaaactttgtggtaagatggttgttagcacatatttgcttagaa

SEQ ID NO: 361094 - DNA, 542 bp, Cannabis indica
tatatatatatatataaatgcagggccgtgtaaaagtgggtgcactcgtatttttattgtgtttataaaaatatgatattatttttataataattatttacattgtatacttatttaaaatattttataagttctttttgtagaaatttacagtaatttgtatttttaaaaataatattgaaatattttttttataaactatatattaaaaacatcaagtataagtataataacactatgtcgcactaaaattatttagaatttttttaaaaaaatgtagaatgtaaataattaagtgtgcattattatataaaaataaatgtaaataccattttagaccctgtgttttgcaaaagttaccgattggactctcggaccttgtattttccaaaatagtaaaaataggactctgagtttaatttttgagaactttttttaatataaccaacttgaagaaaattcctaacacgaacagatatagaaaatataaacagttttgtcagaacacttttagatcagattattattgtaacgtccccgct

SEQ ID NO: 361095 - DNA, 569 bp, Cannabis indica
atataaccaattaaaaaccactattttaacattataacattggtcccatacaaaatataaaagtcaaaattaatgtacatgtacatgtctcaaggatgaaagaacataaaatagatttactcctttacggtgagaaggcgttggagctaattctttgttggtcacaacatatcctttgttcaaccctacaaaaggcccatattgggctattaaggagtcattacctcgatcaatacaatcaaactaatcatagaataaattacaattttaattttgaaacttgaaactaatcctataaaataggtgacttcatcatataaataaatacaaagaaacgttttctcaaaaaagagaatgattggatgtgtatatgcaattttagtgatctactcttatagcatttataacatgattaaaatatagaaatcaaatgaatctttataccaatagaactaaaaaaaaaaagttatgatagcaagtgtaacgcttcgatattttgccttgctttacaaaaatattattttaaatgcataatttgaaaagataaaaaaaatccttaaaatacaaca

SEQ ID NO: 361096 - DNA, 766 bp, Cannabis indica
atttaaattttggtagaatttttatagaatccaaattttcaaattaaaatccaattatcagaataaaattaattttcattaattttttttaattaaaattagttttaggtagtagtagcatttgaatttgaaaatttaatttttcacaagctagcctaatggttaattttgaaatttttgattatttttgcttgttgtattaattttaattataagatcagatattacttatcctattattaaaatttgaaatgatcttattttgacattaaaatattaataaaacttaaaaataatcttgttaaaattttaaatttgctaaccctaacagatttttcaaattcgttattttcaaaatatattttatttatttaaattataagattagaaaaattttaatttttccattttatctttatcttagtttttatatgttttgtcaaaataacatgataattttgaaaagatgttaactttggtttgaatagatattttagggttttccaaccataaattttttcaaacttgggatattttattttaattttttttaaataaaattgataacatcctaactatcaaaatatcttatttttaattttgtttattttgttaaatttatttaattaaattataagattagaaaaattatattagaaatatctgaattctcaaattaagatattatattatattatcgtattagatatttaattaatttaaattatttaaataaactaaaaatttgaaaattagttagatattt

SEQ ID NO: 361097 - DNA, 722 bp, Cannabis indica
aacctgaaccagaccatgattgggaccaagacctagactcgaacccagaccgggacctagactaaaaccaagactcgagatctgaactcgaacctagacccaaaccaagacctaggaaccagacatagatgggggacatagaccagggacccaggcctcgaaacccaaacctatatctaaatccgatattcgaacctgaaccaggacctgacttggacccaggaattcaaagtcagacccagacccagaacaaaaaccttccctagacccaaatcatgacaagaacctggatactagaatcgaacccgaacctagacctgaacacaaaatcaaacacgaactcgggactcgaactcagacccaaacacaaaattagacccaaacctagacctacaccaagacctatactcgaacccagaccggggtcggaacccaggacctagacccggaactaaaccctgacttagatcgagatcaaaacctgggactcagacacgaacttggacccagacctaggacactaacccatagctgtagcccgatccggacatgaacccaaactcggactagcactcgaacgccgacccaaactcgaaccacgatcccaactctaacctaaactcgaactcggaattgcaactggaactagaaccggacaaggactaggaccaggactaggacaaagacccggacgcgaacccaaacctaattaaaaacgtaga

SEQ ID NO: 361098 - DNA, 684 bp, Cannabis indica
gaaaaatgaagaagttatgaaggtttaaaatgttgggtgcatatggtcgagcaccatgcgcgcacaccttcggacaaggtgatccgcgcgcagaaattcagacaattttttgtctgatgcacgcggatagcccttgtttagacacgaagtggcacgctgaggctgcaatggccaaagaatcccgcacatcccaggctgcagcatcactctcccgagcgcggaatgggctgcttgtagcctgtttcgtgggcagctgggagatttccccaaaagtgcaatttttgtgattttttccacaaatttcaattttttttttattttcaaaacccagtttcaaaataaaatactatttttaatatatttaaacttaaatatcaattttaaattaatatatttaacttttaataaattattattaattttatgatattttgaggtttaaatttaaaaattaattattttatttttaaattatggccagattttaaaaatttgttaatttttttaatatttcatatattatttaattataatgttagatattttaatattgggtatattttaaattaaagatagcaatatctttttaatttgaaatattatattaaaattaccttatatgatgaatttaataattaataaatttaaaattaacctagatattttttttatagatattctaac

SEQ ID NO: 361099 - DNA, 436 bp, Cannabis indica
ccccaccttcattagctgactagcttttagggaagagattaatggagtcctcaaggccagcttgtcgcccttgaaagtaaaccgatccccagcctttgtttcaaaaacgaccagtttctttcggcaattgattgtcgcaccgtgactagatagccaatccatcccaagtataacatcatattccttcatttccagctctattaggtcgcccatgagttctttgctttcgattatgataggtacatctcgcattcttcttgttgataacatggtttctcccgagggtaattccgtcacaataccacatctaagtaggtcacatggcttatctatactatcaattaccctagtagctatataagaatgagtagctccagaatcaaagagaacattacaaggcaatccgtaaatagaaacctgacctgagacaacagtg

SEQ ID NO: 361100 - DNA, 507 bp, Cannabis indica
caaatttcgaaaaagtcgtcagaattggcatttctccgaagtttgctgttggtgccgaaaaagtcaccgaagtagttgttggtgtcagaaaaataaccaagaaactggtttcttcatcaagaaaccaatttcttggtgatttttttggtaatttttcaggcgacaataccaatttcggtggcttttccagcgccggtagcaacaccagcaactttttcgacgtcaaaagctacttcagtgatttttctggtgccggcaacaaactctaagaacttttctgacaccagtgacaaataaaactgtttaaacaaataaaaacattaaatatggactttgaaaacctaatttacatatatatagaatatcaaatactataaaaatactttaaataaataaaaaaaaaggccatgtaaattgatcaaacttaaaagtgccatatttaagtgaacaacttttaaaatctcatagtaagtgtaatttctttttaaaaaattaacttttagaccc

SEQ ID NO: 361101 - DNA, 809 bp, Cannabis indica
tgcagtatgaaacttataaaaaatacaagtaaaaagtaaaaataccgcctgacagtaatttttgtaaaaaaaaatgacaaaagttagtataccatgtaaatttcccaaaaataacttaaaaagaatgaaaaaaacaatcttagtgggatttgaacacttaatctctattatatatgtaatttaacttaaccattataccaaaactaatattatttatataaatatcatattttattacaaatatatgtcttaactaactaaaatacaatatgtatgaaagttcaggagtcaaaacttagtacatgtcaaatttcgagggcacggtttggtagatattaaaatgggaaattatagtaaatggccccaaatcataggagtatgttagtttatgtcctcttttcaaaaaaatatagcaaatggccctaaatcataagactatgttagtaaatgtccttatttcaattttttttttttttatttttttagaattagaagcaaattatttaaacattatggtatatctatattagttttgttaaaatcttttttattttaaagttatgtcaatttttttaattttttatgagttgttttgggttgttggtatatagattttgttgtacggtatatttctattttgttgtatggtatattattattcttagatgatatttattttttattatgatatgtataatagtggtatataattttattagcataataaaaataatttaatggatgtatataattttattgccatgctacatatatttaattattatttttatatttttttgatttgtatg

SEQ ID NO: 361102 - DNA, 758 bp, Cannabis indica
atatgtaacaatattaactgtatatcaatattaatcaattcataacaatactaattgcattacatacaacgtactatgcagtaaaatatacttttcttacctcaagttccggttcaggtatgttggccgacctacttggagtacgatcgatgatcctgagccctaagtcataacaataacagactaataagtgtttatcccaaaacactgcttaacagttgcaaataacaacctagggtttcttaccaaaccccgtagttcaaatacactaaaataaaacttatattttggctctaaaacatacaccatatcgtagagcttcttgcaagctttgaaacggtatgtacaacgtccaaaacggacacccgagtgaaaagttatggcaaaaatatgatttctgagttcccgaggctgcgcgaaacggtgaacagttggccagaaccggttgactggttgatcaggggcaaaaatataatttttcaagtttacgcactcaccgaaacgctatcgaaacctgtccaaatcaccccaaacttgatagggcacatatataccatacataccaccatacttacgtaatatgatctaaaatcgagcccgtaattggcaaatgccactagtgttcgaacttaagttatataaagttttaaactcaatttctaatccaaaatcacttcaatttcagcaagaaaacatcagaactagtgccatgactacccgagaacaattctataaggtcagaacctttataactattc

SEQ ID NO: 361103 - DNA, 1095 bp, Cannabis indica
tattattatattaatttttttttttttgaatgaaagcaatctttattagacagaaacatccgctaatacaatggactgaagagcaaggggaacatcgctctcagtaaaaagacgacctgaccaataacaagcaccacgtgccatacagtgcgcggctttgttagcagaccgtttaacatgaccaatagaaacattacttaaagaagataaaataaattgacaatcctgaacaaataaaccaaaaatagaaggcatagagaccgaactaagaatagcttgaacaactaaaatgcaatccgtctctaaaatgacatttgacttgttattcctctttatccaactaagtgcctccttgacgcttagaatttctgcaatttcgggtcggcaactaacagaagaaatagttgaaaacccctcaattattcgaccatcacagccgcgtgctacaaaaccagtaccgatctcatttgtgtcttcaaaaaccgccccatccacattaatttttatctgttcagcagcctgtttggaccagtgttctctcgtatcagtacgattagacggcagggaacccgagtctagccgcttagcctgagcacacaaccattgttgaagagtggtacaagccagccaaacaacatcagcaacactacagcttttaccattccagagcatatcattctgagccttccgaattgcccaaccaaccatgacagcttcttgaaccaaccccatatttcctactgtcaacacttccataaactagtcaaagaaattggttgctgcagagtggccaacacctaacgcagagcggagccaacaagaatgagcaaatgagcattgaaccaaaacatggaaaattgactttatcccatagctgcacaatacacaatgtaaatccacaggaacatgtttactatgaagttgagtacgtgtaggcaaacaacccgaaagagctttccaaacaaaatgtaaaaccttgggaggggctttaatcttccacaacatcttccaaacatcatcctccatggatgagttccaactaccattgaccgactgtaagtgattataggagcttttgacagtaaaaaaaccagt

SEQ ID NO: 361104 - DNA, 923 bp, Cannabis indica
ttaagattccagcagttaggccccataccaaaccctaaaccaagaaaaagggaatgggggtcccctaaccgctggaaagaggccccctccggacacctgtcatacaggaaaccctaggaggattccctggacaagagtcgggtgcaataaattcacagaagacggtattgcgcactaaagaaaaagaaaaggcagagaatagaaagaaaagagtctatcttatgccttaagcgaccattatacaaagaacgtatggtcttctgcaaaaaataacaacaaacgcgtgacaacagtaatcctatcactagagcagtaaactcaaacagattatatgaaggatctaaacatttgcattctcagaaacttcgagtacaaatccagaaaaaaaaaacaaacagataagtaacaacatgccatgcatattaataatgaagcaaagggtgcaaagaacttacaataaagtgttgagactgggggtcctgctgtgaatcgaatgaagacaagaaggactaacagtaacaaacgaagaagaactggagaaaactgcaaagtatttaaaggtgtttttctaggtctgagaatttttctctctgggaaatttgagcaaagttggcaagaaatgggaagtaaccgaaatgaaggaaaggtggtggcttttataggcaaggctgcatgaggaacaggcgtcatcacctaccaatcgaacggtgggggaggcacacgattcgaattctcagaaaccacgaactagactggttcgcaataaaggcagtggaaacgtttgagtatccgtctgacaccattaatgcaccgcatcaatcaatgggcgtgaaacgaatccacctctgcaaaaagtgaatcgctgcattaaaggcccatcattaaaactcaaccctcacgcgctcaaagctcatgtcaggaaa

SEQ ID NO: 361105 - DNA, 485 bp, Cannabis indica
ccttgagaaaacccagctagagaagaactaggattaccttagcttaaacctccttgaatcccttgctaaaatcccagaaaaaggttgaattgaggtgattctcctctggttttggtcccagacgaaagagagaaggagagagggttcaagagaatgaattttctaattttttgattttccttcaaatgagaaaaggatttctctaattcattacttgctgaaaaaaagagccacatgtcacctccctaggcagccaccacactactcctttaaaagactcaaatgccctttgacttaaacttagggtatttctaaacttagcggtaaaattgtcaaattccataaccccgcttaaacccgataattattttctgtaagatatttcccactaagaaataaggttctaaacttacccatgtgatcaaactagccatccatcgcatttttcgttgtcaccgagcaaaaattataaaaattgcatattt

SEQ ID NO: 361106 - DNA, 773 bp, Cannabis indica
tttatttcctacaaaaaaaaaaagtacaagtagagtcgttgtgaagatttagccgcaaaaaattcaaatataattaataattagacaaattgaataaaacttgaaacaataaaaaaaataagataattaattgttatattatatgttataatataatatagattaaaatatttaaatgtgacatattatatattaatatgagattaatatataatatgtgtaagatgttgtattatatcatatatagtataataatacacataaaaattataacatacgagaagttacaaatttgaaaatagattataacttaaggatcacatgtaattaagtgagttattacatatagaagttatgaaatcaatgggataagtttctagctgttgaaaattgttacaatactcaattatatcatttaaatgagtattggacgttggaggaagatttaactcggagaggagttacaaaaactcaattttgagttaactggaaacagttgtttaatggttgtttttatgttgttttacgaacacctggaacaagcttttgaaaacgtccataaacgtacatgaattggttaagcatgtttccagctctcttgtccaacgtttttattctattaaacaccaattaatgtgctggtaacagccatgtggtgaagagactttgattttcatatgtgatcctcaaaacactataaatagaggtcttgggttcactttgggagtgaacaaagtttctatcaagagagcacattgctagaaacactatag

SEQ ID NO: 361107 - DNA, 660 bp, Cannabis indica
cacaacacccattaaaaccagctactaggagtggaaatcaacttaaaagaaccctaaaattcgaaccctaagcatatgaaaacttaacagccactaaacctagaaatctcacattcaatcacccatgaatttcaagaaataaagagggatatgactagagcttaccttagcttcaaagaccccttgaattgcttgctaaaactcaaaaatcaatagccctttccccttgttcttgctggcttcgaagagagagagagaaaaagagagcttttccttctaattttggtattttctaattcccctttcctaactaagtaaattaattacttacccttggctgaaaaaagggttgcaaggtgtcaccaagctagggtagccacctatcccaccattaaatcaaatgactataatgcccttacacataaaactaggatattctaaaagctaggggtaaaatggtcaaattccatccccgctcaatcccgatattttatttcctcaaaaatattctccactaagaaataaggttctaaacttaaccatgtaatcaatctagccatccatcgcattttccgttgtcgccaagcaaaaagtataaaaaattgcatatttcacatataagctaattaactactcctagagtttaataaaaactctccg

SEQ ID NO: 361108 - DNA, 607 bp, Cannabis indica
atatatatatatgtttagtttttcatatataaagattgttgttgtgttattcttctaagattatttgtgtttttcaagttaacaccacatgttgatgtctaataacgttttatattaaaatagggttgttaataatatattgtttgctcgttgttatttagttgtttaactacgtaagaaaattaaatgaatatatgtttactttttatgtgtatatatatattttttaagttaatgcactagtatcttgtagttgcttttacttttttcttaaagattatttatcagtaatttttgaatttcttttgagttaatgtaatgcgttgttaactaattaatttacgtattaatatgaagttgttatctagttattttattttttcatatttaattgttcaatcaagagaaaaatagtttatgttttggtttttcatggtttatactttttgttgtttgttggtttctttcatattttctacactattagttgatgtacaattgattttcatgttaaaatagaattgttattgtattgtttattcgttgctattaggttgtttaacaaaaaaaaaaaaagactacacatttattttttgaatgtgtagat

SEQ ID NO: 361109 - DNA, 781 bp, Cannabis indica
ggtgccggtggattggtttggtctacaccatgctctacttgctcgccctgtggtctagatgattgcggagggtccatttttacaagtacccctgtaaccaacaaccccagcgagttaagcaccaataccacacttatgcacttattaccttaaaccctaactcaactatttacttcatataattaaacacttaacatatagcattttaagcatggcatcatatatcacataaatactctagatgcttacatactgcctaaaatggaaagcggtaaataattgatcaaataagcagtaaagtatttactctcaacacttactgcaccatgagtcgagcttatctctgacgatgattgtacatgttcggccggtctacaggaagtttaaaaaccttggcgctctgataccaaactgtaacgccctaagatttaggcacgctacccaatatgattaagaaaccctaatcccctaaacgggattggttttaaaataagcgcggaaattaaactttaaacgaaaacggaatgaaaataaacttgtaataattttaaccttacaaacaaaagttacatgtttcgggatcccaaaaatcattttacaaaatattacaagtcttttccttagccgacctaagcggcaaaatagagttacaaaagtttcaacactggtagaccccaacccgcttggtctagtgtgggccaaacatgtacattcatcgtccaactcctacactcatggctgattagaaactgatttaccctttcctgcacagtagagcacc

SEQ ID NO: 361110 - DNA, 732 bp, Cannabis indica
tctccttgcgcatctggggggagtttttctaccgtatttttgtaaataagaaactttaaaaatagtaaatttgaaattaataaagaatataaatgtttatttttgcttgtaacattataaatgtttatttaaagtaatattaacccaaaatagaaaaaaccccttatttttaatattggaagtatgttcaattttaatatttttaaactttatatttattattttattattatttttaaaattgggatatcttcaattttaatattcttaaactttatatttattttttattgttatttttaatattgggagtatgttcaattttaatatttttaaactttatattatttttctcaaatttatcaaacattaaatattatttgtataaaaaaaaattaataaattgatacatagtttcttttaatttataaaattttaaaaatactcaaaacaaaaataaaaactaaaaatataacttaatatacatgcaatacacgtaataataatttaataaatctatatatcaaagtagaatatttattattatttttttttttttttgtaaattgcattgtcttttttttttttttttagtgttaaaattacttgttattataaattaagaagagtattcatttacaatacagagtaaatgggaggagggatttcctcaaaccaagaacaagcctcatcacccctaaagcaaactttgccaaaccatgtgcagccata

SEQ ID NO: 361111 - DNA, 675 bp, Cannabis indica
atatgaaattttaagatattcacacttctcgataacatacataaaaatattaattaattacataaactatgcttttctattacatctaaaatggaaaaaagtatttacctttgaaatacgaaaacaacgcaaattctctggcaagcaacggtagtccgatccgataaaacagggactaattttataaaaaataaaatcaaattaaaaaattaactcagacatatatctatatacatatacatatatatacatatgtatatacatatatattgttggaaatattttaccaagatctagagtttaaggaaaccttacattggttgcagcggaatataatgactccttccgttaagatctctagcccttgattcctttctgtagcagaacataatcaagatctgaacctggatctctttctctccttcctttgatgctaattctccttcttgttgtttggaatctcctacagtcttacacactatgattgagataccacttgatgtgtgtgggcactactctatcactcaaggatttcgaaattgaagaagaaaagaagagagaaggtggcagctagaagattttctctgaaggaatgagatgcatcatctttttcctgaagccatcactacatatttataggtaaccacctaggtttaagctagaattatttggcat

SEQ ID NO: 361112 - DNA, 574 bp, Cannabis indica
aatcttgtagctatgtaggatttgtgactaatctgccaaatttatagtgtgactgatgggagttgcaggagtagaggcagtagaatctactgtagaattctaaatactttgcgtttagcaagtgaattcaattctgcttgaactacttctttccattttggccaatcttttctattttgacattctttgatagatttaagttcaagatcctcgttttcatttacaatttctaacgctacattataagcaaagatattgtcaacaattacttcaagtcggttccattcttttcctatattgacataatttattgagaactcattatttttaatattttcaggtacttgaatctcttcaagtgatttgtttatgtcaacatcttcctcgaaattttcagcctcttcattagggacatcttgattatttgctccatttctttttcgagaatttttctttggaactgactggtctaccacgtttcaagcatgctttagaatcattagctaattgtctttctgggacatcaattcaaactggagcattttcagctggaatatgtaattttgtaattttc

SEQ ID NO: 361113 - DNA, 539 bp, Cannabis indica
ggtcagtaccgtgggagggtactatgataccactacaccagatgcgccttgctgtatagccaatttattttttactacttaatttgtggttagaaaatgtagttttcaaattccttatttcacttcatttatattctaatgtaaaatttatttcataagaaagacaaatattaatatcaaaatgaagttcagttggaatcctgaagtaatttagagaaatgttgatatattttgaaactgtagatgtagctatcactccaatatttcattgaattattttttttgaaaaggactccaatcttttgtttttattatatttctccatcaatgtattttttttttttattattatactgctttttacttctttttttttaaaagggataattgcggcaaaagtccccaaaaacttgaggttgatgccgattagtcctcaacttcaaaaattggcggtgaaaatacctaaggtcccaatttttgtttgtccgttggtccctaacttaactgatccgttaaacacaaataaaatgccacgtgtc

SEQ ID NO: 361114 - DNA, 544 bp, Cannabis indica
agaaacttgattagtgtttcatgtttacaaacacaaagttatcaattaaattgttcgagttctatttccactatttctcgtaatggcattcaattatgttttgctcacatagaacaagtgctttatgttttaagaccagatatactgtttgcactcatgaatgaactttttaatattgctaaacctagaaaccataaaaagaaaaatattgataataatgatgagacatatcaatggcatttacgacttggtcatataggctatgatagacttcacaggttaacgaaaggtggtccattgaaaaatgttaccttaggtgaattaccagtttgtgagtcttgcctaaaagaaaaaatgactaagtgttatttctctgcaaagggagagcgtgccaaagaacctctaggattagtacatttagaggtccacagacatctgaatgtaaaagcgagaggaggttatgagtactttgtcactttcattgatgattactctagatatagttttctttgacctaatgcaaaagaaatactgaaacgtttga

SEQ ID NO: 361115 - DNA, 1070 bp, Cannabis indica
gcaatgttggcctaaggtgaaagtcagtaggactaaggtactaaggcaacatagaaatgttaaggggcgaagagtccaaatgaccgaggcatttattcaacatcttcatcaaagtgacattttgaatagagggaccgtatgcgagtatgcgttagcttgcaagctataccttgaggagtattcctctaagagagaagttcttcccaagttgaagtggggaagcccactaattcatatctttgaagaattagggtgtaaggttcattgttttgacaaattatattaatagtgagtccagtcttatctgtggttttaatctgttataactgcatacaagttttctgttaaagtccatgtgagtctatttatgttttaactgttggtttaaattgttattaggtcggttgaactattgtctacaaatagctagtttcattctgtaaaccagtcagctagctaatttataattttggttagttcagatatatcgtgtgatattgtgtgtggtatcttgtatagttcgttcctatttttcaagtctgattgcatagcttggtgatggatatccatagcaaaagtatcagagcctggtattgctgagtttagactgaagggagtttagtgtcatctttgtcattagatctgatgggatttcagattgaagaaaagtgtcgaagaagaacttagctactgcatagggaatcttgtgcgtacaaccgagaatcttggttgttgttgataatacattactaattgttgcaaagattgtattaaatttctaattgtgaactggagattgtaatacgaatcttttggatttagtggatgttattaccctggttcggggaacccaagcactagtcagttgagatttgttctcagtgcagacaaagattgtaagtcaatgtgttctttactgcttactcttcaatccgattcttgaatgtttaagttgaaattaatcaatctattcttgaacaactcggtaacttgaatcatgaaatttggataagttgttctttcatagggtacttgttcatttttggtgtgtgaatctagagggaaacact

SEQ ID NO: 361116 - DNA, 717 bp, Cannabis indica
taaataactatttatatttaaaagacaaagaagttgtctttgacttcatcggaccatgttgtttgtgagaagatgcatatccaagtgtataatatgaggaggtacatttctgagcatgtattacgtggagttacattgttgattgtgtattacgaggagatacattgttgagcatgtattatgaggagatgcattggtgactgtgtaatgcacggagatgcattaatgatcatatattacgaggagatacattgttaagtatgtattacaaggagatgcattgctaattgtgtaatatgaggagaggcaagatctttgtattacgactggctacaagatccttgtattacgaccaactataagctcctagtattaagaccaactataagctccttgtattacgtcaagctataagatccttgtattaggacaagctacaagatcgttgtattacgaccaactacaaggttcttgttgtgagatgttgaatgtttctcaaaataacatctcgacaatgctgaaataccttacgtcatgaaccttgtgatccttatttagatgaggtcatctcacaagttgagtcccgatttttttttaacatgttgcacaatgtatttgtcgcgagaatttattatttaggtcacatgacatacaatttgacttttcatgaaatagtccaaaaaaataggtataaaaataacataaaatattttttta

SEQ ID NO: 361117 - DNA, 529 bp, Cannabis indica
tcgtcctcgatttcatatggcccttccctatttggcccaagtacccccactccgggttcttgggtggctgggaagactcttcttaagaccatatccccaatagcgaattttctgtttctttggagttaaaatatttggtcaccttcttttgataagctgccatccgtatttgcgactcgtcccagagatcttcaacctgatccagcgcttcctgtaataaagcttggtttgtagctggatcataagtcgttctcctatgggacgggaataacgtttctaccgggaccattgcttcacaaccgtacgccatcgagaaaggcgagtggccggtcgtggttctaggggtcgtccggtaggcccataacactcttggcaactcttcgggccagttgtttttgcaggccagcagctttttcttcagggtgacctttagaattttattgactgcttctgcttgtccgtttgtttgcggccttgccaccgcggagaagctttttacgactccgtgttggttgcagaagtcagtgaa

SEQ ID NO: 361118 - DNA, 647 bp, Cannabis indica
ctatgcagttttgataattgagtatgtgataaaattctttaatagttcgtttatgaaactcttaaatactcatttttgaagtttttattttttctgttctttttctacaagagaattttgtaatcaagaaaactttaaattgaactttttgatgaagaagtacaaaaacaaaagctaaaaaacataaaaaggagtgagaagagggacaagataatattgggcatggcccatgacattgatgtgtgaatgaaagctgagttggatctaagtcattaatcaacggaccaggcccacattcatgttgacaggttctaccatgtgttgtagtcttgttagtagatgataaatgctaaatagtaccttttactttttttttgctaattaaaattttctagtccaagatatgtggtacttcttgaaatttttaagttatttgaaactattgacattataaattcaaggacatatgcttgacatggataaaaacttaaagagtacgatttgatacatgtcaaaatttggaacacaatttagtacatgtaaaaagttcgaaaacataaattcagtatatattaaagttcagatagataatttggtacatatatagggaataatttagtgtatagatgatcgctatattagtaaaa

SEQ ID NO: 361119 - DNA, 830 bp, Cannabis indica
taacaaataaagaaaactaattaaaaattcaataaaaatataaaattattttttaaaaaaagttaaaaattaaactaagatagaaaatattatgtttacttaaacaaatctttattttttgacaaaaataaaatagactcaagtttgttcccgtaaaattgaatttttacaaaaattgaatttttatatattttaaaatatctaaatgaattcttttataaaaaataaataattttttaattcgcctaattagtttaaaaattttaatttcttttttaattttcttaatcattcaaaagattattttttaagatctaaattaattttttaagatttactaaaaaaaatattgaatctttgtcatttttattttggggggtacgatttgatagttatcaaagttcaggtaacaaagttgctaatttacaaagacatgtcagtatttaaataaaataatgagacagaacctaacagaataactttctgtaaatgtaaaagtttaagaaattcttaacaaatcgtgtattttaagaaacaaaatcaatattgtgaaaagttcagaggataaaattactaattattctatttgtaaaatatagagtccaaaataacattaaccctattaaaataaatgtaatgaaaaatataaattatgtaaaaccgaaactttttgaaaatatgataggctaaatatgctaaagattataggaagaaattgaaagtgtactctctttttttattacattaccaaatttacctccaaataaattaattcaaatatctctttttaatgtagtatgtactcaaattatcctcacacactcacataa

SEQ ID NO: 361120 - DNA, 530 bp, Cannabis indica
aaccgtggaacaactgtgaaaacttaacactgtacatagtataaaacttacacagtattttttataaaaaattctgtcctacagtaaaaagtaaaaaagtttaaaattttagtatgtggtgtaaaaacttctaaattttagatctacttattggaagcttgattacataaggccatggtccctacactaactgtgataatatttttttgtagtcttgtttgtgaattttcaccatggaaggacttaattgacaagaaaagagaattcaaggtttatttattaattaagagaccttggaaggtctaattagtaaatatatttaaagagtaattttatttaataattatttataattattaaatagatagagttagtatttaaataactagagcaaaagaatggtattactgaaaaaaaaaaaataagtttgtttcattaaggtaaacaaaataaataccaaaattctaactcatgggcttcattaaagggtttggctatgaggtgaattctaagccattggatctttctaa

SEQ ID NO: 361121 - DNA, 358 bp, Cannabis indica
gcataaaacccaacacaaatataattagcgtacctaaaattcaagacttagtcgactttcaacaaatttcaaccaatcagtaaggtcgatttctagatgctttatagggaattctgccaataattgtacatcattctcttctaatgcgggcattataacgtcttttgtcattccattcttgaagtatttcattaacttcccagaaaggatcagacaatcaagtttgaactcatctggcactataaaatccgtctagtttgaaggaaaacaaacacgattagagttaacatctgaattaatcaaaaacaaatcaaaattctcacaaataaccgctgacttgtatatctttccacacttt

SEQ ID NO: 361122 - DNA, 514 bp, Cannabis indica
taacaacaacaacaggcaaggcaatgggaaagggaaagtttgctggcaaagccgaacaggcccctagagaaaatccttccgaattcactactttctatgtcttgactgatgatttggagactatctacatggctactcaatcagcagctccgtacaagaaacctgctcctatgaaaaaggacataagtaagaggaacatgtccaagttttgccgttttcatggagattatggctatgacaccaacgaatgcaacaatttgaagcaggaaattgaatttttaaaaagaaagaataacccccatgtgcaaaaatatgtcaagaccgatcaaaattagagggccgcccaggtagacaataaccaagatttactaccaccaccagtagatgggcatttacatgtcatcattgggggcccgcacatagttggagcttcaagcaaagcccgggaaaggtatgcccaaacattacagcacaaacaaaaagaagtggtcctggccgtcgaagaaaggaagcc

SEQ ID NO: 361123 - DNA, 555 bp, Cannabis indica
  modified_base (550)..(550): a, c, t, g, unknown or other
tatttccatggctgaatttaatagaattaatgaatttaatacatgaacaatctttgcccaattcgaatatatttgtgagatcgatattaggaatagagatttctgctgtggttatatgtagaaacagctacacacacttgcaatattgaggcaggttatataccttatgtagtatagcaggttgatctcttaaattaataaattttaaagtgttcaaatatataatttcaattgatttttcgtagtgtgttatatatatatttgttcattattatttttaaaaggagattttgtcaactgttcatgaaattatgtgagatcttttttggttatatgatatatatatatatatatgtatgtgtatatatatgtaatgtgtttgtataaaaaaattaaatattgaaatcataatgaattatgttatgtgtatttatagttgtatggtttgaagtcaattcgagtgagtgcagcaaagtcggaaaggcgtttgggtattgggttattaattattatgtctagttggagagtagttgtttttggcagtgaactnttgta

SEQ ID NO: 361124 - DNA, 1006 bp, Cannabis indica
ttaatcacataatcttgattactttccacagtgctgatgacacaataaacgagaatatcaatgtgataaggatttgggtgaatttataaatcagataaacatataaataatcacatgaaccaaatgacaaactaaataagtaataaaataaatctgtttctttattgataattgaatagaaaaaattacattgaaatagagttttatttagggcacaaagcccaacaaactcccacctacactaacataaaactatcagttcatttcaattaatcctaaattcagtctgtgcttttcaaatatagttgcagtcaaaacttttgtgaatggatcagctaagttgccttcagtgtccactttttccaccagtacgtcccctcttgccacatattatgtgatgatgtgatatttcctctctatgtgtttgcttctcttatggctttgaggctctttactgttggctatggctccagtgttatcacaaagtaaaaccagtggttttttcattccagtaacaacattaagtcctgtgaagaactttctaagccaaacaagttccttagcagccttgacgacagctatgtactcggcctccatggtagagtctgacgttgcggtttgtagagcctagaaatctgagtcggtatagcctatgggatttaaagcaccactcttgtagagtaacacataatgcctagtacttttcaaatatttctgaatatgattaactgcagtccaatgttcctctcctgggtttgtctaatatcttctcacaattcctactgcatagcatatgtcaggtctagtgcataacattggataccttagattcccaactgctgaagcataaggaacccttctaatgtcctctatctctggaggatcagtaggagactgtccttagatacggatacaaaatctagaaggcaacactgccccttttgtatttgtcattgggaatctcgctaacaccttatcaatgtaagctatttgagagagagcaagg

SEQ ID NO: 361125 - DNA, 735 bp, Cannabis indica
attttccccaggtttttcttcctgagcattttcctgtctcctggttcgtgagccgcgaggtttacctcgtggtcttttcactccaggtttaggttaattttgagtgttattcccctgtgctgccctagctgcgactaaattacgctctaatttatcattccgtcggtttgcctcctccatgcgacgcctaagatgatggatttccatttcataagtccccccacccgtgggctgagtacctccacgatagggcccttcatctctcactctgggattttggccattctcattctgagtcctcctcgaacgtgtatttgtgtactggggccaacctcagattaggtcctcctagaacgagtggtccaagtgctggggccaccctcaagttgggtcctcctggagcgagtggtccgttaagactgtgagttggaaggccttttggagcccatgggctcctttccaggacgactatgagtttcttcatgtggcgtgttaacgttttctgtgttttttagccatgaaagagattgctttttatatgtaaggaaggtttttttttgagcttttacacgaaggctgttaatgaaagcaccaagctattaactcatattttcgttaatcaaatatgagcctaaacggtgataaatttgcatagaaaaataaaagcagtaaagaaaaaggtatgaacacaaaggttttttcgtggttttgccgttaaaattctgcatagtccac

SEQ ID NO: 361126 - DNA, 1015 bp, Cannabis indica
atgagttcattttttaagatattatcttttttgctcattttttgtagttctttcttttacttccttcctgttattttcggccatggaaactgaaacttggctttttccaaaatcaaaattgaacttacaatacatgtcacaactctacaccatgatcaaaaccatattgcaatctcatctcctttcttcttcatcatataaattatttcatcctttgtggttgtttgagatcgtccaccacgtgaagcttccctatttaatttctaaattaagttgtagtcgatcgtaacctaaatcgcaaccctaaatcaccatcaaaccatatgacaatctcaatcatgtctcgccacttgaatcgcgataccaccatgtgaagcttctactaatctctataacgaaattgaagtcgcaatagcaacttaaatcactatcaaactatattgcaatctctcagctatgcccagtcacaatctaaaatgcaaccctcaattaccatcaaaccatattgcaatttcagctatactggagtttcagtgcaaatcacaacgtttcttcttcttcctctaatcactctttgattgatcaccgtaattttgtaaaaaaagagtcttatatacagtataattgatttagttaagtatatcttacttgaaaaaagccctaagtagagacatttgaagcgattttagaattatttaatttaattaattgatatattttttgaattgaataaaaaattaagaaaataagagaactaaggagagaataaataggcacatttgaataaattttaaaatatcacgtcaccatttcgtgtctcagctttatatatagaatcaatttatatattttttaatttaaataaaaaattaagaagatgagaaaatcaataagagaataaataaagataatttaagcaattttagaatactacatgaccacctcatgtcttatctttatatatatatatataaatatatactaggtgaatgtacgtgccgagccacgtattgct

SEQ ID NO: 361127 - DNA, 573 bp, Cannabis indica
tgggatctggatctggacctaggtcctagacaaaacccgtagtcggtgtatggatttgggacctagccctagacccgaaccctgacaagaacctgaacccacacccggacctgaacccagtcccaaacccaaaagtggacctgagcccgtaccctgtgacacaaaattggatccaaaatgggaagtagagcgggactggacctaggacttagacttggaatcataactgaaattgtacatagatcgagaaccgtaactggatcaggactcggactccacatcaaacctagacctgaattgggagccggacccggatcaaaacccaaacctggactcgggaccccaacccaaacctgaacttagaccgaaacatggaaccagactagggacccagaactagggtcgggacctaaaacagcatcccagccttgatcctgaacccaaactcataaatgggacctgggacctgaacttgcaccagaccgagtcccgtgatagtgattcaaatcttgactcgggattcgtgtaacggggcctggaacagaccagtagtcgatgtctagatctgggact

SEQ ID NO: 361128 - DNA, 863 bp, Cannabis indica
gagaccgcgggcacgtgtttcttttggtctaggtgatcccggaggtcaccgtgtttttcgttgatctgatgtctcagatcgatgtgagggtatttttggcctcttcttcctctccctccgggttcctggtgcacagaatcgctctttcagtcctctcgatcctgagggccaagactccctttttggagttttcccctctgtggacctttcccttttgggaaatctgagcagacctttcgaggatcctgcaccttttcccttttcccaggggtggaagtagggtttttctgctagttcccttcagagggataccttatatggttacgttccctagacttctgcttttgggcacttggcaaggattctcctggtgtttctccaagtccagcatggatggatttatgatgcacgtggattcttactgcctccatggctttttgcatggccagcatcaccgcttgcatctttttgttctgttcgttttgggctgtgatttcagcttcgtgatcggcagccttttgtctcaagagtactagttctgtgtagctaccttcgtcataaacgtcgtactcatcgaagtttcctttatactcgtcgttgtgggttccttctccttcttcagagtccacgttcactcttgaggccacatcctcatcgtcaggatcttgagcgtcttgaggagtacggggttgacgtgtgttgcgagtctccaccattgttgttttgtaatattactgtttacttgcagacacttccttcagctctcaatgaaagcaccaaaatattgactgagattttcggcaaccaatataataatattatataagaaagctgtaagaggttaatgcgcaagatttttacgt

SEQ ID NO: 361129 - DNA, 767 bp, Cannabis indica
aggaaatgcctcatgtttgttaatttttcaagtttaaaattttgtcaagtcttgtaagcttttctacttattacaccaagctgtaattaacgtcgaatatatatattaaaaaacgcgggtacccgtgtactgcgaaaatgttaaacattacttatccccgcgaggatataaatttgtccaaaataaattgcaaatatgtctaagtacagagtgcgagtatccctgtaccgcataaaaactaactagcaaattcaaaaaaaatagtttaaacatagaagagaaaagtcaagcattgggagcaccaggggcagattcatccgcgactttactaacggcttcattctcggcttcctcagcatctgcagcctcggcctcctcaggaagattccctccaccaccttgagtttgtgtgggcgacaaggcgcgaaaagcctcagccatttcagcggcttctgctccgaggatagagaagtcgaaatctagaattttagaaagagtggtgtaaatataatcagaaattgcctgatcatactgtttcttcccattctccttctcgacctctaagtcgcgagccatctcctcaatcttcctctgagagttcttgacctcgagctcaacctgctccttagacttgcgaaggtcttcaagctccttgtccttaccaaccgcgtcttgtttcagtctctttatgttctcctaaaactgggcattctgcctcttcagcgagtcagcttccttagaaccagcggcaacggctttcatgaaca

SEQ ID NO: 361130 - DNA, 848 bp, Cannabis indica
gtctttttataaaataacctaaaacaatcgtgaaagaacaatatagaacaattaaaaacaacagtagaacaactaaaaaacaactgtaaaacaataataaaaacttaacacagtagtacacagtatgaaacttatacagtatttttgaaaaaaattccgccccacagtatataagtaaaaaaattagaaatttcagtatgtggtgtaattatcccaaaagctaaagctggtacaacccaacttttagaaaaaaattgttttaattaaaagaatataataaattattttttactaaaaatttatttaattacttattatatattacaaaaaataaaaatatttttttgaaaagacaaaatatttaaatttctaatttttattttgctttaaaaatattttatatttatatttttattattaacaaacaatatctacctaagttttttataaaataatttttttttttacaattgataaaaatataatttaataatattaaagattatttttatcaaatacatataaatttatacaatagaaaaaaataattaaaaatataaaaaaaatcaaaaattttatataacatattttttatatatatatatatttgtgattttaatgaaatagattaaaattttattattattataaaagaatcttaacaatttataatttaccaaacactcagctcagtttttttctacagttctattttttccacgagaagttatatagcaaatagccccaaatcataggattatgttagtttatgttctcatttcaaaaaattatagcaaatggccttaaattatagtactatgttagtaaatgtcctcatttcaaaactt

SEQ ID NO: 361131 - DNA, 553 bp, Cannabis indica
tcattttttataaaaggaaagtcacacttgatgctcacaattccgtaggtacaaaaataaaaattcctaggctgattgataatcttttttagggaattgtctagtgagttgtggtcttgttcagaccacgtatgagctgtcaataaggtgtatattgattataaatacaccttatagtaactaggtcatgtatctcttttatacactttgaatcgtattcatatcttaagaaaaaagagtctttgttttgtaaagaagagtgtgttcatctcttaccctatttatatgtattttgtattgtcttgagtctgtactcaagtctgcaaaagaagaagaacaacaatgctacctttgggagaatgttctataagctttcgggatattgcttttcaattcttgcctcgagaataaataaacactcttcaaggagatcgaagggagtttgagcatttgaagtttcaacaagattcgattacaaggtggaatacattaagctcgtggcatacaataagacagagtccatttatgcataagtcaattactttgtattttt

SEQ ID NO: 361132 - DNA, 549 bp, Cannabis indica
attattagatttaagaatttttgcctaattttactaaacaaagtttgacgtgaataaaaatttagagggcacaattttgtacttttaaaagttcagaggcatgatttagtagatatcaaagttcggggggaggattcagtatatggataattgtcatattaataaaattaaattaaattagacataagtccttaaatctaacaatttcaatagctcgggggtaattttcaaggcttgaaaagtttaagaaacatgatttaatacatgtcaaaattcagaaaataaaaattctaattagccataataaaaataatcccaaaagtaaaaaaaaccgcacacatatataatgtatatttttaataataatataatacacataaaagctttattcatgcaaatttcaatttgaatactagcaataaacttgccataaattatttaataattatttttagttattaaataattagaattggcatttaaaatgttaaattagaaaattggcatttttgagaaaatgggaatgagaaataacaaaatgggaaagtt

SEQ ID NO: 361133 - DNA, 503 bp, Cannabis indica
tcccctatcgcttctcagaagaggaaaagtgacgtggtggttactcctgtcgcatattcttccaagaggcctgctaagggtattcatgagaaagggaagaaagttgtgatcgacccagcggttcgagctcgccatgtgttgtaccttcaggagagatttgtcagcgatgagtttcagtcgaaggttgacaagactcctactgaggagctgttgcctcgctccacggagttagctttgcagtttatggccattttcttaaaggcttttgctgccgtgtccaagaaggttgaactcgcgaagaaacatattactcagcttcaagaagacaacaagaagctgaagcaagatgcgtcttccaaggacaaggagctcgaagaactccgcaaggccaaagagcaagtcgagctcgaggccaagaatgctcagacgaaaattgaagagatgtctcgcgacttggaaactgagaaggagaatggaaaaaagcagtatgaccaggcggtctc

SEQ ID NO: 361134 - DNA, 662 bp, Cannabis indica
tcaaactcataagaataatcagatatattttaccaagccaatgaactagtagaatgaggtcataccagtgacgtaggaaaaatatttactcagtcaccaaggtctaaccaccccgatatgtacaatcttcatctgctcgtactcactgctactcagtcttagctttacccttacctatacatgtaaacaataactatgagtcgacagactcagtaagaaaaatataatataacataatcttaaatcggattataactaggtgcccatacacccaatcataacactgtcttgcgtcccacgagtactgagtctagaacatttgtatgacagtactattgaccataatatcagcctatactcagtactctaattgtaccaatgtgatagcgtcaataagtacttaagccaaacatacaatcatcagtatctaatataactctatgtatattgataccgctatttcaatatgttatctagctaacattcctaaacatgcacgctaaacatgtaatctcatatgcatatcattatactaatcttacctcaatcccaaattttagtgtgccggtcaacctgagtggaactgctgctcgacggtttacaagcccctaaatataatatttacaaaactgataaatcatacgctaaatcactttctgggg

SEQ ID NO: 361135 - DNA, 754 bp, Cannabis indica
gctttaagaaaaggaaccatttttcttgttcttcaatcaatacaagtaatgaggattaggctattactgaactgctcgtggctgaacctctataaaattctcgttgtttttatttgctttactatattttattcatatcaaactacttgtcgcttacaaaattagactcactgttgttggctaaaagcaaggtcaacagtaatgttgtttgttgatgatttctggttgtttaatggttgtgaatgtttacatttttttctagttatttttttttaagaaaaaaaacagatatcttcaagtgggtttggtggtgattctggtaaccaggttccagattttaaaaaatttgagattaaggagggtcatggtcttggtgttgaggtatggttgttttaccgtttttatttagttactaaacagtagttttgtaatgactgattttatattttttcccctatttgtttttatatatatacttagaagggtacaataggtgtttttgttgattctattattcaagttgtggaagatcatctaattctcattgaccaaactcctcttgttgagaagaggaaatctaggaaactaatagctttgatgtctccctttatggaggttgactcttcgatttcaagttctaaagatggttctggttatggagttgttaagtgtgttgctagtttgtgtcctcttgacgctaaaattggagaagatgtagaccataaaggcgagaatgattttgacttgtggcttg

SEQ ID NO: 361136 - DNA, 532 bp, Cannabis indica
ttccaaagcctctatgaatgggatgttgatatgcagtttcttgaatatttcaaggaattttgaaaactgcttatctatcttattcttctgaagtctttgaggataaggaattttgatgtgatggtcaatgctgatgggaggtggagtttctttttgttgaagaccgtcagtagtcttcttctttgttgttattggggttgatgccggttgatctttaatttcttcatccactggttgtaccatatcaggcacctcatatttctttccacttcgcagggtgattgccttgaagttttctttaggattcacttcggttgtactcggcaagtttccctgaggacgagttgctatctgagttgctagttgccccatctgagtttgcaagtctttaatggaagatctcgtctctgtcatgaattgcaataaaaaatctatctgaagaccaaaatttccactagagctttgttgctgagtctgttgttggttctgtgactggttctgatttctctattgatagaacccactattcctt

SEQ ID NO: 361137 - DNA, 712 bp, Cannabis indica
ttcatttttctttttcggtgtttatttcgaattctatatacatcactatattcacatagtattatagatcgatctaaacatgtgaaaaactattaaaatctgataatttattttttaagaactcatacggactagaaattttttattaaaattaaagtctacattttacgtgttttcgatgcttgaaatcaatatggatctcttaatttattcatttagatcattttggaattggtttcatgaattttgtcgtttttcagggcagttttttttcttcaaaaaaaaaaaaggaaaattaagaaaaatttaagaaaattccaaaattttattattttgatttatttttggaattttattttatttccttatttttgttgatttagtcaattaaattacatttgtttaaactttccattcttatttaacatatatcttcatatattatatgttatttagtaataaattattatggaaagtttttaatttggtaaattaattacatgctttatttttacatgtaattacaataattgtgatattttaagaatgtgaatatttaattattctacaattaagtgcgcaattattatatttatttaccaattaagtaatttactgattgaattaattgataatctgccattaagtatattctttgatttttgcatttaattaatttcatataattaattgtactaatttgtatatttac

SEQ ID NO: 361138 - DNA, 519 bp, Cannabis indica
ctgttcgccgagaagaatgatacgattgcaacttctggagaacgagcttctttaaatcaggcagcgtgacatgacgatcaaccaatacttcatcaaggtaaaatctcattgtcgcgaaatatctacaatagactcttgtgttggcatgtcagatgctagaattagaagaattattattcatggattaaggctaaaatttagaacttttattgctacaatacaagattggccaagccaaccttctcttgttgagctataaaacttgctagctgaacaagaagtgttatctaagcaaatgtctggagtctcattaaagagtgacgaagaagcactctttagtagagataagaaaggacgatcctgaccaaatactagtagaaattctagaaagcataatgataaggatagtcatcatgggagctcccgaatagagagagctcaaaataaagataaacgggttggtcaattaaagaataacaataaatttgataaaaaaaatgctacaactgtggaaagtat

SEQ ID NO: 361139 - DNA, 614 bp, Cannabis indica
aatatggatttcaaacgatgaacgatgattattgttttttttgtgttgatttggatatgttcatgttggtttatgtgttatttgatgattgaatgtgttttacaaaatttttccatgaaaataattttattttcgttctgaaaatattttatttagattccttttgaaaaattaagcaatttttttacgcaatcgattccaataaaaattgaaaaagttaagaattttcgaagtttgttgagttggtgcatcgagtgcactaggcactcggacaagacgggttccgtgtgcgtgacaggagacaaattccctgtctgaagcgcacggacgcacgacttcgaacacgatgcaccctacatctgcctgtgtcttgatgctgcgcctaccgaggattcctgcacgtccaccctacaaatctctatgtccgcacgcagaaggcctgcctgcagccttcttgggctgcacgtgcagccctcctgcgcagacaaccaccaagtgcaattttcatggggttttttcccaattttgaattttcctgattttcaaaccctaaatttcaaaataaaatataattttttaatatatttaaacttaaatatcaattttaaattaat

SEQ ID NO: 361140 - DNA, 617 bp, Cannabis indica
taattaatccaattccctgtggttcgacctcacttgcgtgagtttactacttgattgcgtgcacttgagtattatttaataattttcgtaacaattacattctactattttccttttccctgtcccttgcctgaaggagtgttggtgtcccccccccccccccttaaggattaaatcaaactgaattgcgatattaaagtagggtttgatagcatgtgtacaacagttgttgccaggaaccacttaggcaaggtggttcgggttcatacgacttgtcttgatttctctgatgctctttgtggggaagcggtggcgtgctgtttgctatttctgctgctttggattttgatgccaagtttgtcatcgtggagagcgactcgagggtagtcatcaatgctctcaatgggaaggagtctcattgggttattggaaactatgtctctttttgtaatagtcactcttctttattttcgagttgtattttctctcatattagtaggacttgtaattttgttgcccataatgtggggcgtttacccacaagttatttggtgatatcccgctatcgaccatcccgttaaacttattatgtaatgaccatgaggtctaacttattc

SEQ ID NO: 361141 - DNA, 1081 bp, Cannabis indica
attcactctatattaatccaaactaaagccataataaactctaattgttcaatgaaacgtatattataatttttttaacgtgacaaattaatagagtctaatataactatgtggtgttataattattattctaaattaataaaaagttaatattttagttgatttatttattttttaattaatttatttattaaagttctattatgtttgtattataataaacaaatcataataaaaataattttgaaacgtaattattatttggaacttaaaaccatagttttagaaaaaaaaaaacaaacaattataacaatgtacattacttgttacaaaaaactgaaaaattaagagcacacagattaaaaaagagtaataaatttttactgaaaaatttatttatatttattaattatttaaaaaaaaaagttgaaagttgtgattgaatataaaagttatataattgtaaccgaaatattttgtcattattatttttagttataaagagcatttatatttaaaaagtgtgggaaaaaaaactataaagggtacaatgtcatataataggtaatcaattttttttaatggaatcaatgttttattatatatttccgtttttgtaatttattagtcaaatgtaatttatatgcttttattagtcacaattatttctcttaatgttgttttcacattttgttttttatttgtattttattcactctaaattatccaaactaaagccattttttcaacgtgacaaattaatagagtctatataactatggtgttataatttaattattctaaattataaaaaaagttaaacattttagttgattatttatttttttaattaatttatttgttaaagttctattatgtttgttattataacaaacagatcataataaaaataatattgaaacgtaattattatttggaacttaaaaccatagttttgaaaaaaataccaacaattttgaatgaagcttattattaagttaataaccttaaattttgtttttatttttatataggatgtaagtatatttgtataattatcattgtttcttttttttttttt

SEQ ID NO: 361142 - DNA, 729 bp, Cannabis indica
aaagccagaagactcataccagcaactcccaattgaccttcatatgctaaaaaaagcaaaatccaggcacagtcactgaatgatacagacaagagaaccggttcaagtacatgttcctagcactgtcaaactcaattagaggatggattcattgtagaccggtaattgtggtagatggcacattcttgaaaacaacatacggagggacattgtttacaacatcaacaatggatgctaataaccacatattcatattggcattcagaataggagactcgaagaatgattcatcatgggagtggttcttccacaagctaagagaaacattcagagaaagagaaggtaagaaactggttcaagcagaaatatacagcaaatacatcatctttagtgtaatagttttcctattgtttgttagacttacttaacataaataaccggtttaaaaaaaagtaacgaaaaaaccggttaaaacagacataaattgatatccgatatgttggaattttatgccctaaataaaactcatttcaatctaatctgatttgttatcaatgaaagattagaagtcatttatgtttacatgtagttttcatgtttatggtttaatatatacaaaatctgtaagtcccaaacatatagtcattcacaattacagtaatgtcaacatagtggaatgtgattgtgattatatgcttcaaaagacaaagtccatgattcatcagtgca

SEQ ID NO: 361143 - DNA, 1032 bp, Cannabis indica
taactcatctccttgtcttatttataatttttttttttaaaatcaaagtcaatataataaaaggcagccattaatcactaaaagccaaaacaagggttttagaaagaaaagacctaattacccttctaactaataaagctagtcaccaactcccaagggcaaattggtcatttaccacaccccgaaaataccaactccgctaaaacttagcaatgatatcccaaaaaatattctaaaccatataatacaattctctaaaggccccaacgtcgctttccaccgcttccgaacacaaacacaggaattggataattaaacataaaatagcataaaaacatatatgatatataaaatatatttctaaaatatgcattccataattattaatacataaaccttaaataattaataatacaaagtactattcataggcggtctttacatattgtgtccagtaaggagaaccagtacaaggaagaaatcattggttttgtggactcagattttgcagcaaacctagacagtagaaggagcctaacagggttagtgttcactactcttgagggctgcatcagttggaaatctaacctacagaaagtggtagccttatcatcaacacaagctgaatacatggctgttacagaagccatcaaggaggctatatggcttaaggggttgacagaagagttgggtttcaaatctaaggacatcacagtttattgtgacaatcaaagtgctttacatctcatgaaaaatccaatgtttcatgagaggtcaaagcacattgatatcaagttacacttcataagggatacatgtcatccaagaaggtgcaagtgaagaaaataagcacacatgataaccttgcaggtattttcactaaaagtgtaactagatacaagtttaggcactgtttaaacttgttgtgcattcaggacaattaatgtccccactcatttcttttggatcagagtttaagtgagtctaatcaggtaggtggaattgttgggattaaactcacttaacctatca

SEQ ID NO: 361144 - DNA, 654 bp, Cannabis indica
gaatgaaaactaggtttgatttggttgaagtggataattcagttggatgagatgagagcatcatgttccttttatagtgtttcacctagggcttaggtttgaattatatgaattaaaaagaataaaatattaggcgaaaatcactagagtgcccagccacttaaggaccaatctctagttacaattttgccactttatttcaaccagttattcttctttcaataataccatatttctaatttcattcctatgaatgccaaaactatttatttaataattataataaattatcaaataaagttgccacttatattatttattaattagaccatacgaagttttttgattaataaatagatcacaaaacctcttttcttcacaattaagcccaagcttagtaaaaatttataaataagacatagtctaattttagaattataataatgggtttttttttcagttttaaccaaaaaagtaacaatattaaaaaaaaatacttttttcttgaaacggtattaaaaaaaatactttcagctggccaaataaacaaatatacagcccaaataaaaaaaaattacacaaataccacttacacacaccttcaactcaggatccatgcttcctgggcaactatcgtgcaactacgcagcaacc

SEQ ID NO: 361145 - DNA, 643 bp, Cannabis indica
accattgatattgacttagaaagatatagcggtaagtttatgatatcttatctaagatcaatatcgatcccttccaatgtatactccatacatctgatactggtaaactttgccaataccctagaaaggacataacacttatccaaggtgtaagtatactatcacagattatcatgccagtctaaatctagtgaactgacaaatcatgagaattaaacttttgaacatataataatgattatattccactgtgctgaggacactataatcatgaataaatacatatgttctagacttaatagaatttatacattcaacataatcatgaaataaatcatgtgaaccatgcaacataaaatgcgatttctgatctatattaattagtaaatctgattatattgaaatgaattttatttagggcacgaaacgcaacatatataagccatatatgtatgagtatatatgtcatattattatagtgatgtttaatatgttatttaaatatgttacatgttgatatgtatatgtgagatacataatatataacttgtatatgagttatatatatgttgaagatatgatgatatatgagtaactaatcatatttagtgtatatgataataataataatagtgatgacgat

SEQ ID NO: 361146 - DNA, 977 bp, Cannabis indica
caaagttggcctatgaggtcaaccaggtgatattctgagcatcgtccgccagctgaacaatcctttgagctctgtccctaagagctagtgtgaggggtggacggtaatatatagggatctgctgaaaccgagtatagatggtgcccatgccttcgacaatgtaatattcgttagcaaaatttccaattttgctcacggccttgtccccggtgctcgtcaaccacttgaagtctggctgagagaagtagaagtaccccaacctgccttgctttgaagtagactccaggtcaaaaaacttgctcacctgatgcgcagaaggcataccccatttttgggtggcgtagaggacgaacagtgctgacagatacttgatgcccttgggggtaaactgggtcagaaagagacggaagaagtctgccaccttcctaaagtacaggtgcaaaggtagcattgccccttgtttggaatgagcacccgaccaggcacacatccccttcttcgggtttgtggctcggtggtttgaagtagggacataacattcaagttcacccaaatagccagattggtccaagtaacttaggcgtgccgcaatgactttggacggagggctcacccaccggcacctaaggcaccttgcctcctttgaggaactgtagcagtaagctcctcggtgacgtagtccactccttcaaccagacttcgccgtccacatctactggctacccaacctcattgtatccccaaaaatttggaggcccagcctcctcctcttcctccacctcggaagggctgccaggatggaagacgttcaggtcctctatctcctggactttagcatccccctcatgatccccctcctcctagatgggcagatcttgttcggggcttggtaatgtggcgtgttgggccacgtgagggtcgaaagctttgaccttgcgcatcgtttgctttgttcgagccatcatcctatgactgga

SEQ ID NO: 361147 - DNA, 1013 bp, Cannabis indica
agtggcaaataagatcaaaaaagggacgaaaaaaactcatacaggagaggccctgaaaaacaatcagaaatctgaataagattgacccgtggactatgcagaattttaactgtaaaaccacgtaaaaaaaccctctgttcatgcttttattttttacagcttttattttttctgtgtgaaatcaatactgtgaggctcaaatttggttaacaaaaatctgcgttaacagtttggtgctttcattgagagcctctgtgaaaaagctcagaaaaaaccctcccttcttgtgaagaaaaaaacacctccttcatggctgaaaaatccagaaaatgttaacaccccacatgaggaaaccaatcatcgttctgggaaagagcctgtgggctccagaaggtctaccaactcgcggtccagacggaccacccgttccaggaggactcaacctgagtgtggccctagtacacggacgacacgttctcgaagagcccaacccgacgttggtcctagtacgcggacaacatgctcgaggagaactcaacgtgggagtggccagaacctcgggatgagggatgaagatctcaatcgtgggggagcccagactatgggaaaaggtatttatgaaacgaaaaactgctacctgagacgccatctggaagaggcatagcgtcgaaatgctgagttcgagcgtgttacagcctcggccagggcagcacaagggacaaatgctcaaaatcaacctaaacctagagtgaggagaccacaaggcagaccttgtggctcacgaactaggagataggaaaacgcccgggaagaacaacccagggaaaacgagataccccttgaaaattaggatgaacagccagatgggagacaactggaaactgatgaacgacgaatccctcatgacgatgaggaggatcttgggactcaactaggagaacagaggttaccttttagaaatcaccggctttcttcccaaacccatagagcgaggactcgtacagaccctaatg

SEQ ID NO: 361148 - DNA, 787 bp, Cannabis indica
aaacacgactactgatgcactagctcgacttacaagcagcaatataaatgataaggctaatctaattcccatctaattccttgaaaaacctagtatcacctactcggaagaaattgaaatgattaacacatatccaaactggatgacgccaatagcagcctacctcaacactggggaactcccaaataatagaaatgaagctcagaaaatgagaagaaaggttgcacggtacatcatcatagatggagtcatgtatagaagaggattctccatgccattactcagatgtgttacacaagaagaagctacacggcttttgtctcaagtacacgatggattctatggcaaccacgcagccgggcaaagcttatccaagaaaattctaaggcagggttacttctggccgaccatgattgaagactcaaaggcctaataaatgccagagattttcaaagatacctcgtgcaccacccaatgaactaacgcagatgtagagtccttggcctttgccatttaggaagtgacctaattggacaatttcctaaaggctaaggtggagtacagtatgtcgtggttgcagttgattatttcactaaatggacagaagctgagccattggcaaccatcacatccaagaaagtgcaagacttcgtggtaaaaaatataatcgatcggttcggattaccgtacaagatagtctcagacaatggcaaacaatttgacagtcaatccttcactgatttctgtgcaaaccttgggatcataaaaagtttctccgcagtgacac

SEQ ID NO: 361149 - DNA, 548 bp, Cannabis indica
acctaaacctaggtggttacctataaataaatagtgatggctcacacttaagattgatgaaatttcacttttagaaaactttcatgagccttctttcttttaggccgaaaccacattctcttcttttctttttcataatttcaaaccttgagtgatagagtgagtccctacacacatcgagtggtatctcaatcacagtgtgtgttatcccaatttttgcattctgacgtggcatcacacgatggtgacacgtggaatcaacctcgagtatctgcttggaaagtatagcccgagcaggatggctcgctggcatacttgaatcaaatcaatcagggatctgcgcagaggaatcaacacttagcgaattcagctttcgcataatgagtcatcaacgaaatcccaataactcggggatcatattacagggatatggcatacacacgatcccacgatcagtgtatactgcgtcaatccgatgatctttgtactcagcattaatcccacgatcttttcaatttatatccattgtaacgagaagggaaacactt

SEQ ID NO: 361150 - DNA, 991 bp, Cannabis indica
ttatgcacaccctagttaaaaccgttcatatggagcaacaaaaagttttctattacaaggtcaagaagggaaaatttgataataagtctattcaatggacttaacaaaacttcctaatcttagtattgtaggtttgaaattatctaaacctatggcttgcgatatacctggtaatttacttactctagttcaagcaacttactttagcacatagatattatttatctaaggaacagtttcaactattctagaaaagataaaggccaaggaaagaattccttaagctttgacagtgagaggtcttatgtatgttctggtatgcattagaccagatacctgctgttgagtgagagttatgagtatgtattagtttaatccaagaaaggaatattggaagacaatcaagtaaatcttaagattaaaggaggaccaatgtgttattcgataaggttggtattttaatactcttaggctacaccaaaccaggttgctagacttgcgctaatgctagtaagtctacttatgagatggtaattactctgagagtggagcagtgatttttaaagaagtgtaaaaacctatctaaagtctctaattctaccactgagactgaatgttaaagtggcccagaaggctactagataattattcagcctatgagaagttctataaaatttttggtgttattccattaatggattaactaatagtgttacttcctgattacacagacatagttgccaaatagtaaagaatccaataccctaagaggagtagacatatagaaaagaatttcacaatatcaaagattttgtgactaaggagatgtgatggtggagaaagtttatattgaatacaacctgtcagatcttattacaaagaaaatactgcatactacacttgatttggacatcaaggtgttaagattaattgaaatacacttttagttttatattagtgtaattggaagtttgttgggattttatgccct

SEQ ID NO: 361151 - DNA, 1125 bp, Cannabis indica
aaagtaggcttaactaacaaatcaaagaacacgaatagcctttcaagattgagcctaatcataacaggattaagaacatttgatctaggatcaactaggcgatattgacttgaatagattttacggtaagtttaattaaatctaagtcaaagttcaatatcggtcccttccgatgcatactccatgcatccaacctgagctttactttaaccaatgttctggaaagaacatagcatttctccaaatgcaagtaaactcttgttgtagattatcatatcagtaaaaccctgtgtctgataaatctaggaaactttattcacatagtcatgtttactttccaatgtgatgacaacacaataaacaggatcaagtatgtgaaaagggtttaagatgaatttataaatcaaatagacaagcaattgataaagtgaaccaaaacatacacaaatgaatgaaaaatacttctgtttctttattgatgttgaataaaatagattacattgaaatggagttttatttagggcataaaacccaacaaaactattataatatttatttttttattttaaatataattacttctcataataattatttttaataagaaaaccttatagaaactatatgttgcattagttttactttggtctaaatctcacacactattgtagaatctttcagtctatgtatttatgtaaatatcgaatttctatatatttatataaaggaaagtactaaagaaaatgaggtatcatcctacaatattttaaactattttaagagaattttagtaaatttagtccatttagtttaatttatatatttgtcgatgttgagatatatgatttagtaagtttttttttattatttgtaagaattctacatggattaaaaactacattattagtatacttgtatactataaataaagtattcttacatttattttgatttgtccaaaaatatatgggtgattgataacttgatcctactcaattaattataatttaatttcttattattaattataacttaactcttggaattagagttattttcacattttttttaactaaaattttcttagttcttaagtttttagttaatttagtaagcttttaatta

SEQ ID NO: 361152 - DNA, 732 bp, Cannabis indica
tacattgaacaaaatgtcaaagcctcatctacaacgtgctttatttcctacgtagttctttaattttttcatgtacctttcaaatggatacatctacctcataaaaacaagtccacccaaaattgcttctataggcaaatgaaggactagatgaatcattatgtcaaaaaatgttggaggaaatatcgactccattttacacaatattaaaataaggtcttgttgagcaacctatgggtctttaacatttatagtccttgaacaaatttgcctaaaaaagttgcacagttcagaaatggtggtcgatatagagttcgggagaaacttgcgaacaccaaaagaaagtaatcgttgcattagtacatggcagtcgtgtgactttaacccgataacatttgttaaattttcatttactttctttttcaaattcgaacaaaagccatcgggaaatttcacatcgctaaaaaatttacaaaattggagcctatcatctggtttaagaacgtaaggtgcatgcagtttcaacagcttccccttctcatcttcataaatccacacccattctccgactcctacattcttcaaatcatgtcttgcactggcattgtccttggatttatcattgtcgaggattgtgcccaataaactatcacaaacattcttctcaacatgcatgacatcaatattgtgttttagaatgtttgaacaccaatggtcaagctcgtacaagat

SEQ ID NO: 361153 - DNA, 687 bp, Cannabis indica
ttttagaatgtttgaacaccaatggtcaagctcgtacaagatacttttttccttccaattttgattttctgcaactcgtctgcgcttcacatgtaatatcccgaaaacctaattatgaataattaaggttaattatatatttatagaataattaggtggtaatgagtaggattatgatcctactaacctaatttagcataaattaaaatttttaccataagtagataaataagcgtaatttattaattaaagagatttatttagaatatgtgagtatgatgtgagttattggtgaaataaaaaatattttttatggcaccaaatattatttattatatatgagttgtaaattaaattacattgattagctaattaattatatgatatatttattaattatcagtgagtacagaaccgtttgagcgacaaagtgaaatgtcacagtgggtaaaatatcgaatatgcaatttttaaaattagttagtgaaattaataatactctaataattattagttggttcaagtgagaagtattacttggggccattattaatggaaaatttatttataacttgtagtatcaattgggatcaagatatatatatatatatatatatatatatactaggcagcaactatgtgcaaggcacgtcatatcctttttttgatattttaattaaattaaat

SEQ ID NO: 361154 - DNA, 513 bp, Cannabis indica
gaaaattaatttgaattaattttggaccaccttaaattaagtaattttcatcatatttattgaaaattaatgctatgatggaaaataatttaattttcagatctatgtaagtataattttgtaaatattacattaaaatttatatttagagtcatctaaattaataattttaattaaataaatatattaaaataaatagattaaaataaatataatataaaaatacatattttaaaactaatgtgctttattttaaggttattttgatctctattgtttatttttacatagtacttgttttaatgagattcatccctaatagatgttcattcattagaaatttaaagtcgtagaatctcgaaagacaagtattattgtaagtcttttattcttagtaacgatctcactaatagcagtgactaagagtataggttacaaagtatgaaacaatggtagaagctcataagatagaatgccctcgactctcgcctaaacaggataacaccgacaatt

SEQ ID NO: 361155 - DNA, 614 bp, Cannabis indica
accacagtgagggagtggctgaggtcttggacttggaagatggagttcaaggatgcacaagcagcgaaccgcctaggtgcacaccgggtaagctgggacgcaaactcgccagtcatctctgtggcaaagggagctaatgtgggcccgaggaaacgaccgaaccagtctgacaagggatccaaatttagatcccacagattctggtattccgggttgttgagagtattttacatctcaactcgtaagatcctcttaagggcctccacctcagcatacccccgggagtattcatccatggcgtagttgtgttttgctatccggagctcctgtctcgcatcatctccaggaaccggagtcagcacaatattgggaggggtagtgtgttcctccatgggagagaccccgccatcaagaccgtcggccggagtgcagctctccgttgccgtttgggctcctcctgggcaaccattttgcccttgtgtttgcgaatcagagcaactctaaccgtttgggctttggcctgggagcccttctctccgccgagtccccaatatgaaggggcttcccagcgatcgcctggcttctcctctcgaccgggctccccacgcgaagtg

SEQ ID NO: 361156 - DNA, 910 bp, Cannabis indica
gcaacacacgctattcaaattagctgaagcagttttaaatttctcaatggacaccccatcacggccccctcttccatctttgaacttccaacttacactcttttatctcttaggaaagttcccagatagcttttccccaacgccaaagcacatcaccacaacactttattttatccattataccactcggttcagcactatcccaacagcttttgacaatttcaaaaaataaaggctcttttaaccaagagttttcaaaccgaaagacatggctcttagcaaccaccacttcattaaccaaaaccaaatttaaaggagtatgatccgaagtagacacctctaaattaaaaagtttggccaaaggaaagaagtctaaccaagattgagtcaccaacgcacgatcaatacgaacctccacccaatctgccgtacctctacttcgctcccaagtgtacgggtagccatataactcaagatcatgtaagctaaaatccgccaaagtatcattgaaaccatccactaaccacctcggataagaattaccaccttttttattaaatacgactatgcaacataaaatgtgcctttttgttaacattgcaatttaaatttaaacccattttacatatctaaatatatatttctattactaatttttaatcctattcacacatatagaaaaaatataacatcaaaaacaaattatacagctaaaatatacatgaacataataaaaattaagaatataactaattatacgtgcatcgcatataatattaatctagtatatataataataagaagaagaagaataaaaatactcactcacaacgttgagtgtagattagcagggatcatcatgacttgaacaatatataccacatttgtccaaaagcttatttctcctaac

SEQ ID NO: 361157 - DNA, 530 bp, Cannabis indica
aaaaacaacccacacttgcagaagtatgtcaagaccaatcagggtcagaggaacgacaataaccacgatttgctacctccactggtagatgggcatctgcaagttattgttggaggtctgcacattgctggagattcgggcaaagcttgggagagatatgcccaaaccgcacagcacgagcaagaagaagttatccttgtcgtggaagaaaggaagcccaaagctccacgagcaggagagccgaccacaaacttcaacgatgaagacgctgtcaaaattaaattttcgcacaacgactcgctggtcgtggaagtccagataggcaataaaattgtggccagaacgatgatcgataacggagcctcttccaatatcttgttcaaaacttcttatgaaaagatgggactccaactcaacgatctaaccccatgtctccagcctgtctatggtttctccggtcaaggagtcgcacctgtaggaaaaattcatctacccctcactgttggacaagctccgacgagcatgactgt

SEQ ID NO: 361158 - DNA, 502 bp, Cannabis indica
atgtgcatgagggggagacattcatgttgcactctgttttccttagctcaggttttgtatcactgggttttcttgacaaggtttttaacgaggcaatttgcaaataattatgaatatgaaatatatatgttgcacttttcttttctccttagcttagattttgtcccactaagtttttctggcaaggtttttaataaggcaattttaaatcatgctaacatacttacattttatgaagcaactagagaacatgtgggagtaagatcattgacataacatattcgggaacatatgtattacacttaataaaacagtatcaacattagcaattctctgtgaaaataacgtgaacttcattgctcaaataaaggagatagaactaaagatattttcaccaagttcttcttactacatgatcttcaagaaaatggctatattggtatccaatatattcaatcaattgtcaatcatgcatatttattcacaaagttattactaacat

SEQ ID NO: 361159 - DNA, 872 bp, Cannabis indica
tatatatatatatatataagcagtagagtctctatctaagaatattttatttaagaataatctctaatttgttataaagaatacaagtcttaatttgatcaaattataaataagaataacctttaataatttatttataagaataattacatcttattaataaatatagacatatattttataaatttatttacgtagaattaataattttattctaaattatagtatatgtataaatattatatttacttaaaaataattttattataatatagtattaatgattgtataatgttattgttgttatattgatattttttagtgttttattttttttttcttagtgtaactctatttactgttacaaaggtatgatacccaaaaatctcattacaaaaaattaacaaagtccagtcaaatctggcttattcatcttcctaatggctatattgagaattctagtttgaaaatctctttcattcaactccacactagaatacacattataagattttctttcatagatacaagcttttttatttgggaaatttgaatttctatgcttacattaaggaataattttttccctaaacttaaaatggggaatattggtaaaatgggataacattttcttaattcccacaatacccccccatttgaaaccatcaactctctctctctttcgcctctctttctttctttctctctttctctcggtgccgcacccacacacccacggcagaccacccacggcagaccacccacgccgtcgacgctcaaaccatttcaccgcccccaccttcaaatgcaccaccacggctcacctccaccacccacccactgtatcgcccctctcactctcttcgtctctc

SEQ ID NO: 361160 - DNA, 676 bp, Cannabis indica
tttcatttaaatgcatgtgggattatattggataactgcttaactgctttttgttcttatccttttagatgatttatgttgatttggataattgtatctcacttaactcagagttttttatccttgtctatcataatgtggaaaaaacgctaagtgttagcagatggtttgcctcatcaagtttctttagttagaattgcgaggtggttgtctcgctattcataactcaaggttgctttgtatgattgtattcactttactttgaataaatgaattatcttctttggatgtgtactccgaggcagatgtgtgtctcatcaataaaagtttcaatagcctcttatctttatctcacttaaaactatgtagtcagggagttatgaatatgttccactaatcatttattaacgagttattcatttttgcattatatgatataattttattatatcaagtggtttatattccattgcaagacacgtgtcactttctgaagtgtagccgaatttcgggtataacatcaacctctaaggaaactatcatttcacttctatgagttttagaagctatagattctatatctataattaatgctcccactcaattgaagtactgagttctcaagatgtaagtattgggccaatcaattggttagctttaacaaacaagtcaaaga

SEQ ID NO: 361161 - DNA, 971 bp, Cannabis indica
ttcttcaacacgccaaggtcttctccacgtacgacacagacgggttgaatgttggggacttgatcacgactgcaaactggaagagggccaagttgatctcagagagctagttagtggatgaatttaatttatccaaggttctttgccccaacgttcgcaattttgaatctgagaaggcacttcgggcgaacatcattgcctccgcggaggatcggtataagaagtacctctttaggagggaacaagaattggcctacatcaaggcccaagccgccgcaaggagggtccttcagatcgaggctgcaaaagagcaggtgacctctcggcccaagcttccgttctcggtccccaacaatagggctcctgatgccagtattttcgaagctggtaagtctccgctgattgttcatcatgttccttctgttcaggattactctacctgtaggccagtggaattcgatgacgggcttcataggtttaggatgccccctttttgatggggcgatcatgccaagaattcttatttttcaaaccttattcattttttaggacggtcccgaatggggtctggtcctcccgtacctatccttttggatcattctgcctatttatcttccagttagttcctcccctcggacagctttctaggggacgacgacaccagccttttaatacatatttttgctaaggcagaattagatcaccagagtaggattagtttcattacattattcctgcatgtatgactttttgataatgctctaacgcctttattcgtctatttctttaagcagtgaagccaatggatgagctcctagacgctcttgcctagacctacaatctcgaaccagttctgccttagacacaagacccggtcgtgactcccgggaggtcttcttccagcatacccctggaccaagtcattttaatcgacgaggaagaggaagtagaagaagaaggcgagattctcc

SEQ ID NO: 361162 - DNA, 793 bp, Cannabis indica
aaaggcatctcgcaacgcctccatttttggcaaaaccaataactggagagacgttatttctttatttagccatcttggaagatgtgattagtacagctatagtgtgagaagaaggcaagcaccaacaacctatttactacgtaagtaaaaggttactaggggcagaatccaggtatccccctctagaaaaactcgcgttatgcctagtccatgcgtctcgcaaactgcggccatacttccaggctcaccccataaaagtgttaaccgataagcccttgagacaagttttatcaaaaccagatgcttctggaagattgataaaatggtcagttgaactggggtagttcgacatgacataccatcctcgaacatctatcaagggtcaagctttagctgacttcatgatagaaggtataactcaagaagaaatcccacctgatccaacgaacagggttcaggtgcaggggtgatattattattgtctgaaggctttaagttttgctatgctctgagattccaatttgacgcttcaaataacgaggctgagtatgaagccttgattgccagcttaaagatagcagaggccttgaaagtcaaaaatctcatttgtaatagtgattcgcagctgatcgtgaaccaggtcctcggggaatacaaggccaaaggcttgaaaatggcgaaatatttagagaaagttcagaagaacttggaaatgttcgattactttaaaatcaaacaaattctgagagaacaaaactccaacgtcgataccttagcaaaattggcctcgcag

SEQ ID NO: 361163 - DNA, 862 bp, Cannabis indica
taaatatttgttactaaaactttttacaattaaatgactttttaatttctttcgtattaatatttgtgtcaactttgaattatgtgtttcacattttgtgaatttttcactttttttttttatttttcatcttcaaagtaaagtacaatgtcagctactctagcgacataccacggtggggatggtgatggcagggatccccctgatccttctagggtaccctcgtcctgcgaatcaggttttcatattttttcagatctaacattgttcttaatataaatggtgaatgttcaatttactaataaaattatttttctctcgaataaataaagttccacctccggtcagaaagggtcgtgggcttgcagcaaacactaaccttgaagaaaaaaaggagagaagctggtaagcccttaacggtggaggtggatcttgaaactggcaaagttgttggcactgaagcaagcaattatgttcgatttattggccagcaagtaagcatgttgtgcccaggtggtcatctaaatttttctgatgtaccccaacaatataaggatcaagtgctcaatcgaataagagtgagtgatttttaattattcatgattgtaattattttatatccttatttgtaaattactaaaattttaaattattttattacataatactattttgatatcgatgggaatccccaccgagacctactgatggggactttatattcggcgatggcggagaggtatagtgagcgaaagacactcagacacaagcattttaaacaacattacaaaaaaccagaagattgggagacagttctcaaattccctcctgaatacttgaataccgagacttggaaaccggt

SEQ ID NO: 361164 - DNA, 611 bp, Cannabis indica
gatactttttatcccggttttttatcccggttattatgaaaaaaccgggataaaaagtaccccttttatcccagttttttaaataccttttatcccactggcatacatcccggttttcattttagcgaaaaccgggataaaaagccttaaaaaccgggataaaagaccttttcttgtagtagtgccatttaatccatatattatctttttttttttgttgcaattgaccaaacatatttgatcaatgcttctaattccaatctaattaaaatgttcaagaaacctaagccaccagcttttgcaaagtctgttctatgtcatacagcttcatgaaccagccatgctattttgtcgttttcaaagaaaaaattattattattattattatttgttagagctataaaataagaaaataataaaaacgctacttacgagcgattgatgtatataaactactcgatgtttagtaagagttagtcccacattgctaatgtgtggaaataaattgtgatatatataagatgaaagggctactcctcccattaccaattggttttgggatggaacctcattcatcttattcctcaaattctaacatggtattagagcca

SEQ ID NO: 361165 - DNA, 530 bp, Cannabis indica
agagagagagagagctataccattggtgcagtgtgagttcgacagtggcaaagtgaggcaagagagatattccgacagagctcatggtcgaagctcacggggcttaagaggctaacagtcggagcacacagggtgggtcatcggggctgggcatccatcgcagttgggtggttgttgggggctacacaaattctataaatttttttttaaaattctgccttttgtcgtcagttttgtaattagcgagggagagagaaccgacacaaatcattacttatttgtgttgtttttaaaacgtcgaattatttaatctggcactattcacgtcagtcaacgtaatgaacagtagtgttgaccgacgtgaatagtgaattttgtagtagtaattttggcaggttgatctgggtgattacatctaaattttctgatgcattatatatgtggggaagcagtgacggacctagagtttttactttgtggtgggagcttatttatcattaaaaaatatttatacttatattataattact

SEQ ID NO: 361166 - DNA, 1070 bp, Cannabis indica
gtgcgttttccccaccatgacccgttggtcatagagacccccatcactaataaggtggtggccagagtcctaatcgacaacaggagttccgtaaatttgctgctcaaagaggccttcactgcaataggcctaacggaccgagacctctcaccaagtggttcccaactcacggggttcaatggaacaacacttatcccaatgggaaaagtgaggcttccagtcaccttgtgcccggacacaccccagagcactttcaagtactgcacgttcgtggtggtggactgcccgacagcctacaacgcaatcctcggccgaccggccttggtggactttggcgcagtcacgtcaatacggcacttgtgcctgaaattcccaacccaggaagctgggatagggacggtgaggggaaatcaaggggaggcgaggcaatgctataacgttgctgcccacctacccgtgctgatggtccgagaaactattgagccagaaatggctgaagaagacgagttggatccccgtgtgggatccgaaaaaatcgtagaaccaatggaggacgtcgaggagatatcagtgtgcgacctcgactccaccaaagtactccggctaggaaagagcctagacccggaggaaaaagaaaagataataaagacactgaagggtgccattgacgttttcgcatggtgccaagaagacatgactggcataagtccccacgtcatcacccatgtcctcaatgtcaacccggacatgccgccggtccagcagaaacgacgtcccctcgactcagtgaaggccgaagccttggagaaagaggtggacaagctattaacaagcggcatgatccgtaatgtctactactcggaatggctagccaatccggtcctagtgccgaagcctaatgagacctggcaagtttgtatagacttcactaatctaaacaaagcttgcccaaaggactgtttctctctgcccagaatcgaccagatggtagacgctacctccggattcaaattactgtcctttatggattataacaatggttaaatgagatagcatattgatatcgtgga

SEQ ID NO: 361167 - DNA, 552 bp, Cannabis indica
tatatatgtaaatttaaaaaattgtgtgaataatatattaaaaataataacatatttatatgtataaaaagtattaaattatttatagttcatattgtattattaaaaaatgtgttttgatacatatatgtgtgattaattttgaagaaaaactataaacaaacaaaaaaatgtagggtaaatactattttggaccatgtattttgcaaaagttactaattcgattttctgttttattaaatgactaaatagaccttgtctgttctaaaattgtacaaataggacactgaactgattttttgtcaaaataaaatttaataataatctaatctagagatgttatgacaaaactggttagattttttgtatctattcgtgttagaaattgtcttaaagttagttttattaaaaaatataattgttaaaaattgagctcaggatcctatttttacaattttagaaaatataaggtccattttgtcatttaacaaaacagaggatccaattggtaactttttacaaacacagagttttaaatggtatttcccaaaa

SEQ ID NO: 361168 - DNA, 889 bp, Cannabis indica
gatatcaagtgggggaattaggaagatgcttttggaagattgataaaatggtcaatcgaactggggcagtttgacataacataccacccgcgaacatccatcaagggccaagccttgacagacttcttaatagaaggaataactgcacacaaaactctgcctgttcaccaagacgcagacactttgaagctatacgtggatggtgcatccaacgagcagggctcaggtgcaggggtaatattaatttcatcaaaaggcttcaagtttcattatgctttgaggtttcaatttgacgcatcaaacaatgaggttgagtatgaagccttgatcactggcttaaggatagccgaggtgttgaaagtcaaaaatctcatctgtcatagtgactcacagctgattgtaaaccaagttctcggcgaatactaggccaagggtttgaaaatttctaagtatttagagaaggttcggaagaacttggaatgatttgattactttaaaatcgagcaaattccaagagaagaaaactctaacaatgatgccctggaaaaactagccttgcaaaatgatttagatgaattaaacttggttccagtgcagatactaagtgagccaagtatatgtgaaaaggaagacgtagagatgatagaaaactctcttacatggattactcctataatcaactatctactcgacaggcaacttccgactgacaagaatgaggcacgaaaactcttgtactcagtgcctcgatacacgataattgaaggcaaactatacaaaagaggttattcgatgcctctacttcggtgtgttctccctacagaagcaaacgaaatcatcagagaaattcatgaaggcttttgtggggatcatgcaggttggcagagcc

SEQ ID NO: 361169 - DNA, 765 bp, Cannabis indica
gtgactaaatgacatttttagtcacaataaaatattgtgactaaactaaattagtgacaacttgtagctaaatactatgtttttagctacaagtaaatttttgttgtggccaaaagtcacatttagttacaaaaattttatgttgtgagtaaaaaattgtcactaaaagtaacaattttttatagtgtataaaaaaattaatttacaatttcttcataaatactaaatttttttcttacaataagagcaaaaaggatgatcaaatcaatgaatttttttaaatgtatatggtagacttatgaagaagtaagggaggtcagttgactccgtcaatttttttgtgtgtgcatggttataatacatcactttttttttatgtggtgaacagaatcacacatgattaataatgtagtaaaccacaattggcggtagaacctcctcgaactaggatagctcatcatctaaccgaagggcatgtttcgccaaaccatgagctatagaaatcttatcgtgagccacatgggacaaaactgcccccagaaatttagccaataaaaatatattgtcttcaattagagccccagcacattgaaaaaatatacctttccattattaatacatctgttttttttttttaatttacacaatttaagcattattataaaagttttcaaaaaattgtgaatagtttatactgtagaatttaaattttaaaacaacttcttccatttgggtaaaaacaatagaaaaaaaaaaagacaagag

SEQ ID NO: 361170 - DNA, 535 bp, Cannabis indica
aatatataaaaaagaaaagaaaaaaaaatgaagagagaaatagaaactgaataagaatttctaattatttattctaatcgagtgcaccctatgtatacaaaaatatgactaaaagaatgagaaaccaaatcaatataagaaaggagaatagaaccgaataataataatgataattaatttagatatccataaataatattttataacataaatagtctaaaaaaattcatagaaagtggaaagttaattggcatggagtaatttagagagtacaaatagggtaactttttaaatataagtgacatgtttatataatgtaatttggagtgtgtatgtgtaataatgtagtttaatttggaggtgattactcattttttaattgaagcctagtttaatctaattgataatatatatatatatatatatacaattattagactagtgtggatgtataataaaaaatgctaaaagatattaatattttacacttcttaaaatattatatcactattaattaaattaaatattaaatttt

SEQ ID NO: 361171 - DNA, 629 bp, Cannabis indica
aaggttagacttttgagaaaaaaatgagagaggtgtgaatagtggtgatcatgggtatgtgggtagttgagcatatataacatttgaacataattactgaaaaatcagaaaaaaaaaagaaaaagaaaaaaaaaaaggaaagtattccttaccttgttcaccacgtgaggagagaaaataggaaaccaaagaagatatttcaaaaaatagtcaaaggttaccaaaaatggaaaaaggaaacaacatatccctacaaaatctaaaaaaataactataccagccaaatttgaaaatgccaccaaaaaggaaaccaacaaaataattaattaaataaaaacaagtttcctggaacaccacaaaaaaataacaaatccccaacaaaaatagaggaaacacaatagataaatgcaataaaaatatatttccataaatgaaaaaataaaagaaaaatagcccaaaaattggaaaaaatcgaaaaattatgcccccctttttcttgaattttttcaaaataagcaccccatattaaattgcaaagaacgaacaagacaacacacaaagatacataaagcaccaatcaacactttagagcaaaaatagtgtctaagaaaataataaaacacaacaag

SEQ ID NO: 361172 - DNA, 725 bp, Cannabis indica
atgagaaacagagaaaaacagggaagaagcaagaagaagatgattcttgtattatgcttattctgtagaaaaatgtttacagtaccatgactttatacaatgtaaaagaggagaccatggttagttagaaaagctaactatggatctacaaacctaactaaacgagtcaaccaaacttatccaagtaaaccaacttaactaaggttaggtctaatagcccccctcaagatgtagtgtaaatattgatggcaccccttggatacaatggtagaaacttgagtgggaagtaaggccttagtaaatatgtcggctaagttgtgttgagatggaacatggacaagcttgagtgaaccttgttggaccttctctctaataaagtggcaatcgatctcaacatgtttagtccgttcgtggtagacaggatttttgctgatatggatggcagcggtgttgtcacaatataggacagctggagatgaatgagaaatgccaaagtctttgaggagagcaaggagccatgttagttcgaaggttgcgttggccatggcacgatattcagcttctacagaagaacgggaaacaacttgctgcttttttgatttccaggaaactagagaactaccaaggaacaagcaatagcccgagatggagcagtgtgtatcttgacatccaccttaatcgacatctgaaaagaaagatatttggacatttgatggagaaagact

SEQ ID NO: 361173 - DNA, 580 bp, Cannabis indica
gagagagagagatgagatgagatggttaaagaattcattgtttcatttaacatcgtttgttggccaaggagaaaaaggtaggtggtggttgaacctcctattttttcaaacaatttctttctttcttctcaatttttttttttaaaaaaaaattaattacaatatatacaaatatatatttatttatttatatatatatagtttagaaaaattatacaatatgcattcttttttgttttggcattttgagaaaatcttttattcaaatttattttcatactgtagttgttatttaggatttcttgtaaaattttaagaaaattaaaaacatttaagatgataaaaataagatttaaacactttgttgcacgtacgtgtggctcttatatttttatcgtgtgtaaaataaattagggtaaataccattttggaccctatgttttacaaaagttaccaattggaccctctgttttgttaaatgacaaaatggaccctgtattttccaaaatggtacaaataggaccctgagcttaatttttgacaacttttttttttaatataaccaacttgaaaatacaaa

SEQ ID NO: 361174 - DNA, 979 bp, Cannabis indica
tgtgcctgtcatacatgggtctcaacacgacacgaacacgacctgcgagcaaaaattgccacccctagggcgtaggtacgagcgtcactgaaatatgataagtaccaggcgtaggtacagactcgtctgattagatgatgtgacatattggtgccaagttgtggcacgggctcacctaattaggtggtgcaatgatattatatatgatattacattatgacaagggcttgcctaattaggtaatataaatatatgagcatatctatttctatgcatatggctggttatattatctattgtggaatgttatggttatgatattgtattatgacacacgcttgcctgattaggcaatataaatatattagcatatctatttctatgcatatggctggttatattatctattgtcgaatgttatggttatgatattgtatatgatattgcattatgacacgggcttgcctgaataggcaatgcaaatatataagcatatctacttctatgcatatggctggttatattatttactgttgaatgttatggttttctattaccacgtatctatatactaatgtttattcatggcagatacaagtagtgatttagatttcatcttatgaacaatgcgtaatggtttgattctggttgtgtataaatgataatatttgaataataaactatataattattattattgcttttcttgctgagtccttgttattcacaggtgctacgtggtacaagtaagggcaaggaaaaattagagctgccatgaggtgactaccttctccaaaaatgtacatattgacctcaccggcctgcgtatcgagttgccaggagttgttttgggctgattgtatttgctgtgtattttgattttgtatttgaatggttgtcgtatatatttcttagtgaaactttttataataggaattcccagaatacacttttattaccattataatgtttattttta

SEQ ID NO: 361175 - DNA, 492 bp, Cannabis indica
atccaaagagcatgcgcaactaatctatgagcaacacagattaaggacactcatggaaataaacttattaaaatatatattttaattttccatatcaatttatttttctacttattaaaaataaaatatattttcaaatatataatatgaatattcaaaatttagcaaatatataattttatcatgttaattatttttcacattaataaaaatatattataaataaaaattagaaatttcaaataacaacaaaaaatagacaaggatttaactaatatgtctacataatttttttttttggtattctataaaaataagggtaaatatcattttggaccttgtgttttgtcaaatttattaattggaccctctgttttgttaaataacataatggaccctatattttgcaaaatggtaaaaataggaccattagctcaattttcaccaattttatttttttaatataactaactttaagactatttctaatac

SEQ ID NO: 361176 - DNA, 504 bp, Cannabis indica
tttttatatcgcctaattagttttaaaatttttatctattttttaatttttttaatcattcaaaatgatttttcttaagagttaaattaattttttaagatttagtaaaaaaaatattgaatctttctcatttttatcttgagggggtacgatttaatagttttcaaaatttaaggcttccgccgctaaagagtaataccagcggactactctgctggtaatagtcccattttccgccactaaagagtaataccggcggggtcccccagtaataatccgctggtaatacttggtcgataataaccattattagtggcggactgaacacctgccactaataatagtttcagatcattaaactcacactattattagcagcggatcaatccgccgctaatacttttaaatataaatttatatatattttttaaaaaataattaatataaaattaagggtaaataccattttggaccctatgttttgcaaaagttacagattggacc

SEQ ID NO: 361177 - DNA, 510 bp, Cannabis indica
ttatataaatatatagattcttaatgtcttatttaacaaaatagttaataataataataatttttagtacttaatatttaaaataattttttttttgagtaattacacataattaaagagtatatttgatacttaattttttgcccaattgcaaaattacagtttaattagttgattagacaaaaaaaaaaaacagttaccttcaattatactcaattacaaatttacaattattaaaaacagtttaaatccgtggtggacaagggggccgtgggccttccctagagtcaaagagaaggagacaaagtgaaggggtggttgggcttgactatgttgatatggatgaggatgatagtgctgatatggttgataatggactctcaaaaaacgagttcgaggtgggctctggtctccaggcccaccgggcattatgaatactttaagctggaattgtcgtgggatgggcaacccacgggcgatacaattcctatatgacactgtggcccaaaa

SEQ ID NO: 361178 - DNA, 542 bp, Cannabis indica
gcccatttccaaggagtttctctgataactctttcggctatattcttcgttttcatcaaagattaagataaacctggttcgaagaatcaaacagaatcatttggtggccagaaactagacccaacgtgtaatgaccgcatacttaggatgtagattagtaagacaattaacactaattaattatattttatgattaaatgtgaatattttgttatatgggcccaatttttaagaaataggcattagagttataatttctcaattcgaaagattttattaaactctaagtgtattatttatgttgtgtgtgtaatttatcgtctttgttatctttctcgataacaatagaaatgtgacggtttaatcattaaagtcacacgggtttggtttagaatcttattttagcagggaaattatatttgatattcgagattagatggggttatgttgtcagaccattatacccctaggtcttaagtttacgtaagtttgaagtaatgggcaaaatgataattttgcctaaagaaattagaattggtttt

SEQ ID NO: 361179 - DNA, 1468 bp, Cannabis indica
taatttgaatttaatcaatattttagactagtatttttggatcggatcggatccatccaatattttaggtccaatatgtactggattagactggatccatgcaatccaagaaaaaaagagtaaaattttaatgttaatttttatgtatacatatatattttacgtataacattataaaatttaattactcatccaaactaaatgaaaataccaattagtttaattggatgttggatgtattagatttttaaacactacatccaacatctgatccgatccaattggatattcataaatagcatccaatctgatccgatcacaattgcatatctaatatttggcggtcagttgtgattgaatcggtcggttgtcattggattggatcgatttatgcatacccctactcattagtcattaccaattgaggaaccccgtgattcttaacctatactaataaataatcaattatatatatagaagtaataattttctttttatataatctatatctacacataaatataaagggaagcacaaaaaaaagtctaggcgacatcctagatttttcattgtattttaaaattttataaatgttttcatatattttttttaagaaaaaattactacacatacaaatttaaaagtctcgtaatgatttagaaaaccattaaagtgtcatccacgtaggttataaattacacttttgctatgctacttttctttgcttaaaaaatagtttctttaaagggtgattgatttatgtcttaccctaataaattttaagttttatttaatatatatataaataatttattattcatattttgataaataattatatatttttaataattaatctttttacaaattatatatggtttgtctttgtttataatttttctttaaaatttacaaagacgcacatgtatacataataatatatttttttataatacaatatgaactataactattttaatattttatatacatataaatatgttactatttttaatatattatttatacaattttttaaatttatatatatatttaaatttataaataaaaatatttttataatttaccaaaataaatgtatcacattgtttaaatactcttttaagtgttgtacatataaagtataaataacatttttattttgtcacaatattttttaatatataagtgatttactaatatcttaactaatattttttaacataaagagtttaggtggaattttacatttttccattctagtttaaaaattttgtgaggtttttcaatttgtttaaaagaacactataagttttatttgtaaaattaaataaataagcaaaaaaaaaaaataataaactacaagtataaaactatgtattattttttctacaaataacttaaatttaaaaggctcgcatggtttaaaaattattttaaatgctatcatgtaggttacgaataatgt

SEQ ID NO: 361180 - DNA, 880 bp, Cannabis indica
atagccaaagatatcaactttgagatttcacaagattagactattccttcgtatgaattccatatcctcatttattgtataaattgtctacattaatagacagtatattaactcaatatgtccaactattactactcggtcgaaatcataagatcccatagtacataattcataattatgtctttctatttctcctacgggacctcctaagctgacctactgacttaacttaataacaagttaagaattcatttctgatagatattcaattagagcacttcttatttttactcactaacatatactcatctcgataccttataaatctttacttgttaacgcatcccttcctcttgataatctctggaacaactatcgattctgcatccttatatgaatctttctagcatactttgtcctcattcgtatgcttttcgagatgacttcccgaaagatttcccatcttgagattaccccaagttaagtatgcttaactccaaggtaagctcatggtgggttatcagatagtagatgcttctttgttcctaattgtattttctactttcattccttcgttaattaaatctaattttcatcaatcccttcattaacctcttacaattcctcatcagttttgttcacttaaacttgaggaatccctaccttattatcaacttgaatcttcttcatctccacttattttaacttgcattaatttctcttgaactgacacaacttttaaatttcccaatcacttacagttaaccactattataaagtacaataatgtaacctatacgatagaggcaacattgttcttaccaggtacccataactaaactagaaatacccattttctgaattctcaactaataacaat

SEQ ID NO: 361181 - DNA, 635 bp, Cannabis indica
aacttggttcctatccagttcctcgaagaacctagcatcactggcatggaggagattgaaatgattgataccttccccaaactggatgacgccaatagcaacctacctcaacattggggaaactcctagataatcgaagctcgaaagatgaggaggaaggttgcacggtatatcgtagtagagggaattatgtagaaacgaggttctccatgccattgctcaggtgtgttacacaagaagaagctgcacgacttttttttgaagtacacgacggattttgtggaaatcacgctgccaggtagagtttatctaagaaaattctaaggcaaggctactttttgccaacaataatcgaggattcaatggcctatgttaaaaaatgtgacaaattccagagattttcaaagatacctcgagcttcatccaacgagttaactcagatgcaaagtccttggccttttgccatttggggaattaacctgatcgaacaactacccaaaggcaaaggaggagtgtagtatgcagtggttgcggttgattacttcactaagtggatggaacccgaaccactggaaaccattacatctaaaaaagttcaagactttgttgtgaagaacataatctgtcggttcaga

SEQ ID NO: 361182 - DNA, 548 bp, Cannabis indica
attagatcagtaaaaatttgcatcactaactctagtattctataattagtgacaaatcttattcgtatgcctgtagtttttgacaaaataaacccatatttccttattttttttaaaaaaaggaaagcatataaattatggcgtttaatggtaggtggtgaattccatttagtttatcatttacaaagtacaccaacttttttttttttttttttagattaactaaagtacaccaattgtaatattaaaataatcttaggtgcggcatttactatgtgcaagctactattttcattaatttatgtacactacaaatatgaacatctcacccactcatttgctataaaagcaccacttaccaaaatcaatttataggtatgtactaggaggttcataaaataatcgatttaatccaatctgcacgatttaattcgtaaagtgtaaatattcgtatttgtatagattggattagattagaaaatttaaaatctgtaattatgctgactgaatgttgattgacatgtaaaaataaacgatctaatccaatc

SEQ ID NO: 361183 - DNA, 656 bp, Cannabis indica
aagttggtttttttcttggtgatgtccgactccggcgactccccacacacgaagcaggtcgttttcccatgtgttttactgttcacagtataaatgttaagttgttgggcttgggcagtacaaaagtaaagaaaatgggctggggcaataaaaaagttatttttgccgtgtcccagtatttttgtaaagttttgatccaaaaacagtatatatgttaaatttccgttttttttttttttattggactatgaaattgggctattatatatatagagtggtgtggggtcctttgagtttaaattttgtatagttataatctgattagaacactataaatagatttttcaattaataagaagattgtaaaatatcaaagtaatcaatttttttttaataaataatgatatcagtattcacgtcaaacaattaccacttaatttcctcggatttttcgttttttttttttttgaaaagagatattttcttctattaattaataataagattgtaaaatattagtctattccagacaaacataagaacgattaaatatattaatcctaaaaaaaaatattaatcctaataaaaaaactaataatatgagacttttttttaggtattcatccaatctaattcgtattatttttctaatagtg

SEQ ID NO: 361184 - DNA, 630 bp, Cannabis indica
atattttataaatataattttttttttactaatgaatagtattaatgagtggcaaagatgtaattataatttttatgaagattatttatgatatattacataaattattgttaatcattaaactatttgtaatttaaaatttataccttgtagtgtttaatttgaaattggaccttatagttaataattttgattgtttttggatattaaagttaaaatttagactatatcaatatacttttttcatgtatattttttattatgttaaagtgaatatttgtttgatagtttgatgtttattcatgtttaatattaatttagactatgacatattaaatttgaaatatatatatattatatatttatttttcaattttaatatttgaaaaccttaaactaacaaaaaaaaaaaatatagtttggacaaattaacaaaaatattggacaagttaagcttatttttaatttttaataaggtgggttacaattaaataatcgtaatttggtatttattacattagatttgtaaaaatatactataatccgactaaattgactaatgtactgtgttaaattttcactgtattttttagctgtttcactattatttttaattttttgatttttgtg

SEQ ID NO: 361185 - DNA, 768 bp, Cannabis indica
tgagctatcaagaagggactcctcgagaagttagcctcacctgaatctaacttgcgagatgatgtgaccatgatagagtctagtcgtatgattatacctcgcgtaatataaaataagcaggaccaagaagggattttacaagttgcgcatatatcgagatatatgcgatgactaagtagtcttcttcttcgacttagtaaagatcatttctttacataacaaatttattccaataacccagcatactcgatgactcgacaaggactcgcatgtcctatgttatcaacgctgataaggtgtctacatacgcgactcgaccaaggcgcagataccttagtacaagattcgttagcctcctttagaatgataaaatgcaccctaagcctgcaagcttgtgcgagaagatgaacatgcaacttgcgttatggaagtcacatacgttgttgtatttagtgaaacagatttaaactgttctttatttattattttatgtttatttcaatttaatgttaatatttaatataaaatagttctataaccgattaagttttgtgtaactaaaatgacacttgctttgtatataaaggggtgatccgacatgaataagacaagacagaaaaaatcacttgcaacagtggactaagcagaacgtaatctgattgaaccacgatactttcttgtgttcattgtttttattacttttctattatctggacagtcttgtttaaatactcgttgtttttttagttaaatatcaactgtttattt

SEQ ID NO: 361186 - DNA, 647 bp, Cannabis indica
ggagtactacttaatcactgaaatgtgaaaaaacccaatatattgtttgcccgcttttatctttcaacaaacaaatcacataattcacatttaaatatacacacactaatattaacgtatgtacagtataatcaatcttaactatatactgtaaatgatatttcattaagtctctaactttggacgacaactctcaagtcaccactctaaatgatattaccacctcttttgttcagttttacactgatctctttgcttcccaaggaactaacactgatgctatgacttttgttacgcaaggtctctctaagcgcgtcactcctactcaatcagcgttccttatctctcctttcacttttgatgaagtcaaagttgctcttttccagcttgctggtgataaagcccctggttccgatggttttaatcctagtttttttcaaaaaaattgggattctactggtatagatctctgccaggcggctttatacgctctcactaccaatgctgatcttagcccggttaacgaaactattttggttctcattcccaaagttaaaaatgtttctcgggttaaggatttccgtcccatcagtctctgttccactctttacaaggtcgtctctaaaaccattgcaaaccgcctcaaa

SEQ ID NO: 361187 - DNA, 529 bp, Cannabis indica
tgcccagtcagcctcacatcgagactcggacagacgcgcacgacacgtgtccccatcccaaggcagaagcagctcggatgaagtctacacgcaacttcggaagtcccgtacaaacttggggggaaaatgttatcccaatttttacactctggtgtggcatcacacgatggtgacatgtggaataaactttgagtatctgcttaaagagtacagtccgaacaagatgcctcattagcatactcaaagcaaagcgatcaccgatcttcacagagcaaccaacacatagcgaatccagctttcgcattgtgagtcatcaatgaaatccctataacttggggatcagattacagagatatggcatacccacgatcagtgtattatgcattcccacgatctttgtattatgcatttatcccacgatctattctgtttatatccattataacgagaggggaatgacttcctctccaagttcacagccctataaatagtgatgcatgttcactaggcaaagggtcgcaaacagttt

SEQ ID NO: 361188 - DNA, 574 bp, Cannabis indica
acatatatatttaaaatatcttggcccaaggcaggtccaaaaagaaaaaatacataacataccaagggcctagggacgggccacaataactgtctccccttacaagataagttaaattgtcttaaaggaaagaaaaagactgtaaataaaaaagaaaaatatgattataaatgtgaaattggttggactccgcggcctaatcaatgcgaggaggaagacaagggccccgacgcgcttcaagtaaagcatcaagccttttcttcttctcccgaaacttagcaagagcctcttcaggcttgggatagaagtcaagtttgatactttggccattcgactgccaggccatgtagacgtcgtcatcaaagcgcttggcgcaatgcttgcgggagacgggggtcaggagctcatctcttttgacctttttcaaggcctgatctttgaaatcctgcagttccttcacctccacagtcaggttggccgtagactgcaagtctgcctggtgcaactcctctaaggacttcaccttggcagccatctcgtccatagcttccctggcctcccgaagctcgcgcct

SEQ ID NO: 361189 - DNA, 847 bp, Cannabis indica
gtgaagattgatgagtaaaattgtgttttaagatgaattgggattgagtaatcggtaaagagatagaaagattgaagaatggtgaagaaatttgaattttttggaagagagaaagcttgggcggctgagaggtttattttgaatttgtgtagggttggaatgggggggggggggggaatagggtatttatagaaatttcgaaagctggtcgcgactagcccatgggctggtcgcgactagcttgaatttgaaaaatcaagggttctagaaattggggtagtcgcgaccagggtcgcgactaggacgaaccctggtcgcgaccactcggaccaattttttctcgtacgcgaccaccaaaaagggtcgcgacccaggaacctggtggtcgggaccactgggttcccagtcccgaaaaataattttttttcttcacgtttttaacgattcaactggaaaattataatgtctggtacttaactacaaattcaaaatactaaaaacactaacacataaactgaaaacataaccaaaaagtctaaaaaattaaaggaaacacttgggttgcctcccaagagtgctgtctttatcgtcatcttgtcggacgctgagttgttgtctagagaggccccagaataatggcggacttggcttggtcaattcgacctcccaagtagagctttaaacgttgtccattaactttgaaggttgctggaccttcacctttcaactccacatctccatagggaaataccttgaccacggtaaacggtcctgaccaccttgactttagcttaccaggaaacaatttcaaccttgaattgaaaagtaacacttgctgcccaggttg

SEQ ID NO: 361190 - DNA, 828 bp, Cannabis indica
gactaaatttctataaatgtaacagtttaggggaattgttaataagtcgtatattttaagggccaaaattaatattgtcaaaaattcagggaagaaaattgctaattattcactaggtaatatggtcgcacttcacgcgactattttaattcttttaatataaattggaaaataaaattttattaatataataaataataataagtaaaaaatatttcaatatattataatccgaagttatattatccaattatattttatttataagaaaataaaactctctgattgaacccaattaatcaaatctaatctaattataaaatatttgatatcaaattataattaactggattaaattgaatgtataagttagatcaaaattggattagttggatcctaattgaattaattggatcagttattgcatgttaatctcaaaattgagttaaaaattgatccagcctaattatatttatataaatattttttatataaaataataatatttaaaaatatacataaaaaaatatgttttaaattgtatttttagtggcttctttcctttttatgctaaatttgttagatatttatatgtattgatgaaatacgtaaatgtatcaaatgtggaattaaatgaacatatacgcaataaattataggatcgaaatacctccaaccattgattctttgagcttcaatcccacaagctttgatctgcaaaagaaattgatttatgtgggtaatcgggcttccaagctcttctactctttttatatggatttactgtatttcacaaaaaatgagtagtgagctcgatgaccgagactc

SEQ ID NO: 361191 - DNA, 623 bp, Cannabis indica
ttagtttcaacacataaacacgatcacaacattaaaattaattaagaaatgaactctttataattctaaccccataaaatcataaatatatatttaagtatattgattatatttattttattagtggttttttatttaataatctttataatgaggtgatggtttttatgccgtttacagtcatttttgtgtttttcatggcttttgtgctttttacgatttttgtgctatttattatagtttatcccaaattatttaaggtaatttcgtagtacagtcaatcataacttctacatcaacgataattcaattttaatagatgagtatttcaagtatttttatttattcattgttttatattataatatggattattttaccatctttcttccattttatctattttttcattaaattttgtaataatagagttttatttattgttgttttgtaggtcagttttgtagagagcttacgattacaaagactttaccgataagcttaatttaaagattgtctcttctaatacatgttgtttcttggtgttgtttgttttgtttttgttttttttttttttttttttttttttcaggtagtatattagtattacaagctaaaactta

SEQ ID NO: 361192 - DNA, 786 bp, Cannabis indica
aacataaataactgctaatttccacattaactaagcgggctttacaatttcacccaaggggatgacattcggtggttgctgcccaacagattgataagcttttcgtatcagcacagtggcatgccgactacgattttcaatgactgcatgatgagcccttaacgcttccatctctttgcccctccattcggcaaacatgtgcctttgctcttcaaacgcaagatttaccacagcgcggagttcctccttatcatgacgtaaggtgttggtatgaccttacatgagtccaagagcagcacagaggttttggatctcagtgtcatctccaatagtcgtttgaacattggtagcgggcagaacggctgtgttatgaatgccctggttgactgctgaactgctattcccagtctcttgcacatcatgtgcgatttcatccacaggagtcgtcccaccatgacccgcgttggatggttgtttaggattaacagctggcggaacccttgtgtttcccgggttctaaaatgcaggatccaccgcctttggatttgccggatcaaccacgcccctacgagtctgtaccaccatcgtactttgtgattaaatttagaatcaagagcgattcttgattctgctctcaatgagagcaccaaaatattgacctcgcttttacccaacgataataagtctattttagtaagcgacaagtagcttataacgattgaaatatagtaagcaatgtaaagacacaggaattttatagagattcagccctgagcagttcggtaa

SEQ ID NO: 361193 - DNA, 531 bp, Cannabis indica
aaatacgaaaatcgacgattcctcaaaattaaccatccagaattccggttggtgcagccctgttccatccggaattccggttcacaacaataaaactcaaaaatttcagcttttcaaagtgccaaaacttgctccaaacctaaccaattgttcccaaactttacagaacagtataataacataaatataacatatctcaagcttcaaaacacaaaaattcaatccctaactcaaaatcacatgttcaagtgaagaaattcaactttggcttcatcaaaccaaactcaattcaaacagccataaagaccacttaacatcactcccaacatactcaaaaacctaccctaaacacaccccaaactcagtttgattcctacagcaatagaaaagcaaaaccctacctcaaaaccaactcaaaaaactagtgttctcaacccaaaaagtaggaaacctacctcaattcacttctaggttgatttggaattgaaattttgcttggaaaaagaaagcttgctgaagaaaatcccctag

SEQ ID NO: 361194 - DNA, 792 bp, Cannabis indica
taaacaattcaaatagtccaaataactcaaaaacaatcaaagacaagtaccgagttccaccctgagccaaaaaagggttcggagaaaacccaagaattttcccctgcaggtaaccggtcgaccggttctggtacaccaaaaccaaccggtcgactggttgctggcaaaccagaaaaattatgggttttcttccccagctcgaaccaaaaccatcacagacctaaattgcatttccataacagtataacataccaaatacaacatatccaacacatcaatttaccacaattcatcaattagctcaaaaacaccttttctaatgtaaattaatctcaatttatcacttttaacaccaatccaatcaaacagcccctaattccaatcaaattaaacttaaataagcttcaattcaaccctaagaaccaaccttaacttcaatttataccccagctcagaattcactaaaacttttaccaaaacctaaactaaactcaagaaataatcaaaggaagagtagaaaggtcatacctccacttagctagcttctagagttaggttttgctcaagaatttgatgaaatggaatgaattttccctggtttccagcttcttctaaggttcggcaggaggagaagaaaaggaaagcttgagtgttatgttatttttttatttcctttcttggaagtaaacttccttaaatagggtttgtttcttttttttttcttttatcagcccaaaaataaaagggacaataaaacctaaaaaaaatgactaatttacccccaatgaaaaa

SEQ ID NO: 361195 - DNA, 948 bp, Cannabis indica
atattgagactgaaccctagctattatatatataaatatatgtaaatattataatatataaattaaattaaaaaaaaaagaagctatatatatatattggaatgtattgttttggcaacatccaaattaggtatggttcacctatatatatatatattttatatatattattcatttttggggccaatatcacatccaatatcagattcattttgtccctctatatatagattatagagtagtatatgtactgtataatatacatgattttcttccaattatatatatatgatacgattatataaaattattattagttaatttaattataatataaataatatatatagggaaagatatatatatatatatataaacaaaaaaaaatcatacgaataaatcagtgaagcctttcattattattattttagaaaaagtacgtgggattggaatgtacattattaatattaattattaaaattcaaataaatatatataatgtgtttaaatattcttgaatattccttttatattttcaagaagaactatcaatttcaacctactctcaccaaattattattcatgtacattctaaaatgggtcccacttcccctcgtttatttttaactaatataattatttttttgagcgaatattttaattttattttagtataataacacaaaaaaaattatttatcaatataataaataataatataattttaaaagataatttaatatataataatattatctaattgcttataaatatatataatagagtgtataaatatttggtatcttatgttttatataaatacaaatttaatatcttatattttcaataatatttatttggtaccatagtttttaaaatcatatgttggtaccctaaactctaaattttttattaaaatgttattaactttcttcaattttataaatc

SEQ ID NO: 361196 - DNA, 725 bp, Cannabis indica
gtgtaatgatttctaattaatcaaagaaactcacaacgattttaacgagttcatcagtgtaagccccggcacggatcaagatggtaactcggcgcagatgattgttgatcgatccagttgaaagatgacgcgttgagcttgacgaagccgcttggctatgtttattttgatgtttacaattataataaacataccaagaatataaaatattttatatatatgtttatttttattttctattaattaaacatagtaatttaatagacaaaataataatgttcacataggtttattatatcactctatgtgtgttatgtttattttttagaaaataaagaacatatataaaaaattatttatctttatctttttctttgtttattgtgtcatgtttattttttctaattaaataatttttggagtttataaaattatgtttgtttatttattttttgatgtaaaaattatacttcaatagaaaattcgtttactaactcattagaaaataatcaatatatagaaacaatagaaagaaaagtatagtataaattggctatgtctatttttatgtttacaataataataaacatactaataatataaaatactttatatgtatatgtttattttgttttctatttattaaacatactaatttaataaacaaaataataatattcacatatgtttattttattcactctatgtgttatgtttatttttag

SEQ ID NO: 361197 - DNA, 530 bp, Cannabis indica
gatcttggtaaaatattcccaacagatttgagctcggattttacaaataaataaataatctaattcattaatgattactcacataaattatatctcaacaaaattaaagatttatatgttgtaatgacatttaaatcataagtagataaataatacaatttgcatattaaaatagtgagatcaaatatagatggagaatattacattaaaattcgtgaggatgaataaacttatttttatttgtaaagtttcttaaaaaaaatataggttcattgtccaatacatatgcctgatacacctaaataatggcatgtgataggtttaagaaactaggcattgttggacatggagtggagtctacatagcaaactcttaattttcttgaatctttgttggttgatactcttcaacgctagtgtgcatattgaattgtgttctgacaaaatttgttcctcaaatatattttgagttgtgataaggttggaaaccaactttatgacatgtacatattttagaaatgtccatatata

SEQ ID NO: 361198 - DNA, 1196 bp, Cannabis indica
tctattcttttacaatggacttgatgatgaaaccagaagctggcttgattatggagcagaggtaactgaagaccctttgttaagaagatgccatgatgtaataaatttattgaatgatatggcagattttgattacgactagcattgggatccatcacttaaggtttggagtcaccaatactctccttatagcccaaactcaccccaaccaattgaagaaaagaaaaataaactatcacttccaaaaaagattaatcgcttggtggacatggtataagagctcgatgtgataatttaatggcgcatgattcacagagttttaaggatgataactcaaataacaaaagttgtgaagttgttggaataatatagaagcacatcagatgaatacatagaagagattcaacctataattaaagagaaagaatccttttgaagtggctgaaaatttgcgtacaatggatgctttgctcaacaaatgataatctcaattgggtgatgaagaaacatccatcctcaattatgaagttattgaagatgaaatcacaatcaaagatgtggatagtcatgggaaaactaaacaaccaattgagaggttatttgagaaaaatgagaaacaagtgtcattggtggctgaagaatatcacatatagttgttgatttgaggtcatcaatgtcactatattatgaacaaccaatggaccgttattttccactaatacaacatccgccatattgtattctctacgagctaccaacgtttttttttccaagctcaccatgcaaagtcttgtgttattggtgtgggttttgttcaaacttataattgcatgccaaacttgagggtattttcaaaaataacttttaagttgtcctgacgccatcttattgaaattgcaaataatatgagaaataattgtatcttcaaaaaatttaaacactaaaattttaatatccaaaaagatatttgccatcatattttggtatactatgggccagttgggcacatttgtattgtggaaaaatcagttatgattgtgttgtgagaaaaaaatagctacagtagaactgtagaaaaaaactgagtagagtgtttggtaaattttaaaatgctataaattattaagatttaattataatgataataataatgacaatgttttagttaagttataatcataaatatatagaaattt

SEQ ID NO: 361199 - DNA, 669 bp, Cannabis indica
aaatgaatcacatgatattgaagaaaactaactttttgacatagtatgacttcgaattaacaaaaagtttcttcataaaacttatgggaaattgaataagctttaaaaccatatatagatcattaaaaatggatgagaattgagagagttattgtattttaagtgaaagtactttttctggaaatataaagaaaacgaattacaacaatagcagaaagatgataattttcgacatagaagaacaccgaattggttaatagtttcttgataaaaattttagatcatcgaataagctttccaacgatacaaaaatctctaaaaacggatcaatatcaagagagatatcatcactttactgaaacttattttttctgaaaacgaaaaatataataggtccgaaccctagataacatttagcattattgagcaagaaaatatttcatacctcttcacaactttctatttgatgtctcaagcccgcaagccttgattataaatccaaaactttaagaatgaaggtagaaaaataagaagaagtgtggaaggtttgagaggagcaaccatgaagaagaatgaggctttgactaattggtttggagaggaaaaataaaactatgatagtttagggtttgataaaaaaaaactatgtactgaagattatgagatatc

SEQ ID NO: 361200 - DNA, 735 bp, Cannabis indica
acaccaactcaatcactttttgggaaagacagcaagagaagaacaagtgttcatgagtttcaaagtaatcctcacaaactgggcacttattcgactccacaggaatgtgtaatcttgccatattatcctttgttaataaatgggagttaaccacttgccaaagaataaatctgtgctttggtaagttaagagaactccaaatagttttatggcattgaaattgattttgatcaagcaagctgttatataacagactagttctgagtttacctgttctcacagcagcctttatgtcaccttctgtgaatctcttcctcaagtggcaaagcttacgccaataccaacttgtgtcgggtttgagctcatacaaccagtaagaatcttgtttcaggtaaatggtattgatccatttaacccataacaagtcttttttattagaaatcgcccaaacaaacttggctaagttcacatgattccatttagcaccatctttgaatcccaaacctccataagctttaggcaagcagactttatcccaagaagcaacatggactttgcttctgttgccatttaaaccccaaaggaaccctctacaaagcctctcaatttccttggtaacactttgaggtaaaacaaaaatgctcatccagtagtttcgaaggccaagcaacacagagtgaattagttgaatttttccagcaaaagaaagatgcttacttgcccaattatgaagtc

SEQ ID NO: 361201 - DNA, 741 bp, Cannabis indica
aattaaaaaaatctctcatttatgggttgtgtttattcaatcggttgaaaaaaaaaaattaagaaaaaaagttttttaagcaaaaaaaaaaaaatgttgatatgacttaagtattttgtacataaatatatttttgatataatgtaaaaggagatcttttttaatatttttttaattaagtagctaaattaagcatataattaaaatttctcttttattattcgttattagatccgaatctaatggtataatatttttaaaattaatttttatagttaaatttatttagtttctatcaatgagtaatgcccattgagaagtgttccttttatatatatttcatatttttttttatatatatttcatattttttttcatatatatttttattattaatgttatttaaattaagtataaattatatataataagcataattaaaaattaaattgacaagttaaataaatacacatttacgttctctaaataaatgaattgcattaatattctaaaattactctaagtgtttaagagttatgaaaacatgaaaaaatatatccttataaaagtagattaaaaaaataaatttcaatggctaaaagatttcttgagtaagtgaatgatttctttctattgcattcagtatgtgagttacaccattgattttccaatcaaccccctcacacttgtgaatggggtatttataggctctaatggcctgagttacatggtggtcccaaa

SEQ ID NO: 361202 - DNA, 695 bp, Cannabis indica
gggcataaaacccaacacttgttcctgtactgcaactttgctttccacctttggaggtcttctccttggggggtcacgcctgtcctagattctggaggccgcatgtgggactgggttacttttatctggaatcttaaatccaaaggagttgatactaatgagctattcctctatgcctcgattgtggttgatacgatttggagagctcgcaacgacaaggtacataacaaatcaatgggtaacattaagcattatattgactctatttcttcttgttacgcagattatggctcctgcctgttttccccaccacagtcttctgagactcatgcttggtctctgcctccggtggattgagttaaaatcaactgcgatgtcaaggtcggaggtgacactatgtgtgttgtagcgattgcaagggaccataaggaatcagttttgtgggtggcggcaaaaagactacacttctccgacccactcactgagaagctgcggcctgtcttttagctatggagatggctgtctcattacattatccttttattttggtggagagcgatttagagattgttatcaaaaccctaagaaggactgactctttttaggggattgagaactatgtgcgacaatgcaagatcctctctggttttatgactaattgtaatttttctcgtatttctagaaactgtaactat

SEQ ID NO: 361203 - DNA, 909 bp, Cannabis indica
ttcctttttgtagcatagcattatcaagataagaacttggatctctttctctccttcgggtttggttaccaccgttttactcactatgattgagtacttgacttgctatgtgtgggcatggcactcattcgctataggttcgaatatggtgaagaacaatgaaggaggtgagaaattactaaggaaggaactttctcatgaactagttgtttgacatagaaaactaggtttgatttggttgaaggcatcaagcggatgagtgagagtaccatgttctttttatagtgtttcaactagggattagggctgaattatatggcttaaaaaagaataaattattgggcaaaaatccacatcatggtcgtacactataagacccatttctagatagatttttgccactttatttcaaccactaattcttcttttcagtaataccttattttccaattcaatcctataactgccaaaactatttatttcataattataattaattatcaaataaaattgtcatttatgaaatttattaattagaccatacaaagtctcttaattaataaattgacccaaaatcctcttttcttcacaattaagcccttgcttagtgaaaaatattaaataagacatagtctaattttaaaattataaatgattaattaaaataaattaactaagtctataaagtgaagggaccatgggcctatataactgagctttcaataagtatatctagaattcaccaagtaaattctcaacttattaattccgcctatcgccaccatagatttagaattgaatagcactctcaattatatagaacgatctatatgtgccacaatatagatatgtaatgattatccattgttacaatcgtaatagttaaagatcctgtatagatgatttaca

SEQ ID NO: 361204 - DNA, 610 bp, Cannabis indica
gtttaacttaatgcaatctttattccttttcaaacttaaaaatactaatctttaattcaaataaaatacaatctatttctctttttttcttctgttttgccaaaaaaaaaacgtaactaactaactaaaatttattatttacaagaaacaaatatataagtgcacccagcaccttactatatttttataattaatatttataatctcaatttcatttgtatgattgtgtatattatagtgttaatgctgaattttttttttttttttttttttgaaaattgaaatagtaacatcattgaataattagcattcagaatacaaaagggagagtaactcgtcccaagcattatactcaaaaatgctacgaccagagagaaaacaagagtgcctagccacaacatgggcaactcggtttgctgatcgtctaataaagcaaagcttaacattatttagagaagaaaataaaacttgacagtcatgaataatcaagccaaaaatagaatttaaggattggttactacgaatgccttgcacagtgagcatactatcagtctcaatctcaacatcagaccaattcttacttttaatccagctgagagcttctttgact

SEQ ID NO: 361205 - DNA, 825 bp, Cannabis indica
tatagctttatgtgcgtggctagagatgctaatggagatttggtggaggcaattatcgtctgtcgagcagggaacatgtcacctgaactggccgaggcaatgggggttagggaggctttaagttgggtaaaaaaccatgtcactgagacaagactaataacctgagctcgcatattgtcagcctgggctgttctgatgaagattcaagcaaattcagaaaagaaaaccacaatcccgagtccttggaaacaaggcccagcacccaggttgacctaggactgggcttagcgcccaagttgacaatcaacttgagacgatgccttcaatggctcaaatgccaaattcgatgcgcccattgaattcaaaatggtcaaaaaaaggggaggagacctcatcctcaaattcaaaagccttggaagtatcaaaaacaaaatctcggaagctcgggaataagtatgcagcgcccaagttgacaaaaagtctaatgcgctgggttctgcttatccaaatctaatgctgtttcgactgtccgtctagtttttcacaacgacaaagatatatgaaagtcaaaaaatcaaattaacaactttgcatttctcatttctagctcacctgaaaatgaagagttttgagtctttcattcccagagtaacaacaatatctccgaaaactgggagactagcttcgctagaacacagaaactaagtgatgtcaaaatatcacttaggcatcttaaagtacattcctgtgatattttttcacttaactagcatccaggttgacgtcatatgtcaacttgggtgctgggatgtcaacctggatgct

SEQ ID NO: 361206 - DNA, 796 bp, Cannabis indica
tattataaattattaaaagttaaaaaaaaaaaaccttaaattaaaaattagtgtttctctcgatactctctctctttcttctttatcctccctcttctcgactgcttagtgcttaccaagttaaaggcacaagacggcggagtcagaagatggctgatcaatcatactccggtcgtcttgaaatatgattgcctgagagaaattgtgtgagacaggttctcagccattagtggcctcccttttgtcgccgacaataatagagatttgtgatgaacgtcatcgtataggttgacggaggcgggagagagtagagcggttcagatttaggtttagtgatttttttcttttcttgtttttgtttcagattttggattaaggattttttttttttgttttagtgttgtatttgataatattttttagtttgtgtttgaatatgactttgaaattgattaaaataaattgtggtaattgttgtggtggtcgatggtggtgccgttaatggtcggtggtgtcattaatagtgatggtggtgtgccgttaatggtgatggtagccaattcgaagtagggaaaaaagtgtgatattgatttctttatattttttttttgttttcgccttctccaatttatagtgaaattaatgagatatacatatttgtatattcaaatccaaaggtattggatgtaattgttcagagttttatttttatacgatgaatagatacaacaatttgaagaaaaaaaaaaccgattctgttaaaattgacaattatatagtatattctgtcaaaaaa

SEQ ID NO: 361207 - DNA, 643 bp, Cannabis indica
ctgcacaatgatttcaatttccaaccaacaaatcccagaaataaccactaagtcaaaatatgccataagacctaagttaaggtttttatgctcaaattaacacaaaacctaaattaaccaaccaaaccagctgctataacccttaattaactcaaactaagcctagaatttgatccctaagcatttcaaaccaaaacaaccactagtacacaaatttacaagtccaaactaaggtaaaagcttaaaaaaacatgaaatcaatgtactaaggttacctttgattgctcctcttaaaattcctagctcaatcacagagaaataggaagaaaaagattgcccttgccctggatttacctcagccgtaagagaggaagagagaaagagagttctaggtttgattttttttctttaattttctatttcaaatgaaaagggagttaattgattaatcccttgctgaattgattagattactaggtgtcacaaccctaggctgccacctactctcccctttaaaaagactaaattgcctttaaatcaaacttaagtattttccaatactagtggtaaaatggtcaaactccataaccccgctcaacctcgatattttattttctctaaaatatttcccactaagaaataa

SEQ ID NO: 361208 - DNA, 486 bp, Cannabis indica
attattaacttgttgattgttaggttgtattgtcgattgaatatcgacagtatgtcgatatgttgtcgacttgttgttaaattgttgtctgattgaatttgtcgacagcatatcgataggttgtcgatatgttgtcgattatcttaacatgttgaatttaagtttgtattgtcgactgaatgtcgacaggatgtcgatattttgtcgacatgctgtgaaattgttgccagattaaaattgtcgacaggatgtcgatattttgtcaacataaatgaattgtgtttgcttttgataatgttgtggacggcatgtcgatataatgtcgacatgttttttgaattttttggcagctttatttatttgttttttgttttttcagatggctcccagactcataattccagcacccgagcattttactggtcgcgtgacatatagaggcaccggaattttttcaaaaatcaaagctcggtttgaagagttcaa

SEQ ID NO: 361209 - DNA, 533 bp, Cannabis indica
gttttagaaattcatattaggaaacatacttgttagtaaatctagatactggtaaaacaaattccaacatatacattattacatacatacattcgcatattcatatcacatatcatacacagttcttacctcctttctgaattcaagtgagttggccgacctaaacggaaagtctcgtgctagatggatgctctaatcacataacataacctggtaaatcacatgtcaaaaccctaattcgggaaaccctaacctaccacttaaggttctattattactaatacgaactacaatattttaggaggcagagaaacacccagctataaggcactaaaatggacacaaattgaggaaaatgagttgttcaaaaaatctaccaaaaccggttaaacggttttacaggtactggcaaacctgttaaccagtttgcaccaatttttcccaaacaattcataaccctctcaaaacttatccaaatgctaccaaaccttccagagtacctatattgaccttccacaatataattcaatcaa

SEQ ID NO: 361210 - DNA, 606 bp, Cannabis indica
tgggaatgaagtaagattataatcttacttaggataattattgagaatttatttaatgaaataaaatatttttttcaggctcagcaattgtggaaatttagcgaagtggttattaatgtcacgacattaatggaagaattattttgggaatattccgggctaggttagaaattttagaatgtcggtttaatggaattagtaaaattaccataaatgcccctaggttataatttaagtttaggtttctttgcagggtagattagtcttttttatgttttgacattttgacctatttattttggtgggctgattattatttaaaaaaaaaaaaaaagcaaaccctatttaaggttacttccaaggcaagaaaccaaaaagattcataacatcaagcttctctttttcttctcctcttgccgaaccctagaagcagctaggaaccaaggaaaattcattccatttcttcaatttcctaagctaatcttaaccctagaagctagctaagtggaggtatgatccctctactcttctcttgatttattttcttgagtttagtttaggttttggtaaaagttttaatgaattctgagctggggtataaactga

SEQ ID NO: 361211 - DNA, 755 bp, Cannabis indica
gaaaaacatgcaatattagaacacatgtggtgtgtagtaccactatcaattatccaaggtataggatgtgaattaaagtttttacctgcaagattggatgctgcagcaggcatgatgttgggatcagcaggggtatggttgtttaattgttgactgaggagggaaatcaactgctgacattgagaagagagatcagcagtgatagagggtccatccaagtcaggtttagggttgttggaagaggcattgttggccttagctttgcccttttcttgtttctttttatctccataacctggtagaaagccgtggaggaagtaacacttatcaactaagtgtccaggtttgccacaattcgagcaagatggccttggtttcttggcccttgatggattcgtggaaccaccagcagcagcaaggggaattggttcagttgaaccaagagatctttggtgttcttcttgaacgatcatagcaaaaacacgggacaggttaggtatgggttcattgagcagaatttgtgctcaaaccgaggcaaaagattcgtttaaaccagtcaagaactgaagcacttgattctggttgtaacaatccaagaatactttcattgcaccacaggtgcaagtagtaattggctggaactctttgagttcatcccataagcagaaacagaattgtcaccctgttgaagtcgggtgagttgagtctgcaattggaaaatccgagggccattgccttcattgaaacgctcagca

SEQ ID NO: 361212 - DNA, 465 bp, Cannabis indica
tataattaaattcgaatcactatggcatataagatttttaacctttaacacttgagctatctttaaaccaaagatcaaggcttcatacttagcctcattgtttgaagtgtcgatttgaaatcctaaggcatagtaaaacttaaagccttctggaaaaataagtatcacccctgcacccgagccatgctcattggatgttccatccatgtacaacttccaagtgtccgcgtatcaccaaacaagcgaatttttgtctggagttattccttgtatcaagaaatctttcaaggcttggcccatgatcgatgttcgtgggtgataagttatgttaaactgccctagttcaattgaccattttaacaccttaatcggatgttcctggaagtaaggccttaatttgtgagatgcatggattaggcataaggcaagtttttcaagagggggataccttgattctgcccctag

SEQ ID NO: 361213 - DNA, 517 bp, Cannabis indica
agaaaaacgtgtttcacgtgccttaacttttcttttgattattggttttgtattttattattttatatttatatttttgttctttaattaatgatatattattatgtttgttaattttcctcattctctttatatttaattctaataatcttaaagcactatttttttttagaagattaacaggttgaaggacatatttcgttgattataaataaattttggtgacatattattttttcatttatatgtattattatatatactatgaactattaatctcggtttcattacagtgtttacaaccattttatattactagttggaacaacacgtgctacgcatatacaattttagtgtatcatgtaatgtaattaatagtaaaataaatttcatttagcatattcattataaaatataattatcatatggtcattagtatgacactcacacgataatgatatattatctattaaagagttgcataagtatatctctaatggcgatgcatcaaataggt

SEQ ID NO: 361214 - DNA, 513 bp, Cannabis indica
aagggaaaaaggtgttttctaagattgatcttcgttcaggatatcatcagctaagaatcaaaaatgaagacataccgaagacagccttcagaacgagatacgggcattatgagttcatggtgatgtcatttggacttacaaatgccccagcagcttttatggacctcatgaaccgagtcttcaaggaatatctggatcagtttgtcattgtattcatagatgatatattgatttattctaagacagaggaggaacatgaggagcacttacgcttgaccttgcagcgactgagagaacatcaattgtatgccaagtacaaaaaatgtgagttctggttgtccgaggttgcatttttgggccacattgtcactaacgggggaataaaagtagatcctgccaaggttgctgcagtgaaagaatggcctagaccaaagaccgcctcagaggttcgaagctttttgggtttagcaggctattatagaaggtttgttgaggggttctcaaagatagcca

SEQ ID NO: 361215 - DNA, 961 bp, Cannabis indica
tatagacatcaaaacacatacctgctgctgttggtcttctcaaatcatcagctagagatagtgcaattgcatgttccaactccatccgttctcccttccgttgctctgggacgatgatcaccctgatcaaacaaaccataacaactaatttaatagattgtacactacatttacattgtcgatgttctgttttatactagattaattacaacagttctaaattgctctgcaaccaaagtctagtgattcattttgattccaaaaaacaaaaaaagaaagttcgattaacatttggtgcaaaacaatgattagaagtgccgagctattagtaaatactagaattatatagtcattttaagaaaagtgtcgggtatagaatttacaagccacaacgagactttcttaattaaatacgcgttcagtgtatagtggtatcattatattgcattattttttgaatgcatggtatgtaatgataatatagaagaatagctcagtgatttttgaatttgataaagacatctttattgaacattttttttggtcagaattagttaaaaaaaacatttattggtaagaaaaaagtttaaaagaattataaaataaataaaagtattaaacggagctctattgggataaggatcccgtttaacatttaacgatcttagtcccgttccaatctcttgtggaaaatcctattagcagtggtgaagaaaaaggagacatgtgaaatcattgccctcctcaattttttgttcatataaattattttgtatataaatttttaaatattttacatttcgatcatataaaaataattttttattatttacgttcttctatatttttatatttatctttataaaatttagggtaaatattattttagaccctgtgttttgcaaaaattattaattggactctgtattttgttaaaagacaaaatagatcctatattttc

SEQ ID NO: 361216 - DNA, 1429 bp, Cannabis indica
aggatggagaaaggttgcagccgcgcgaggatggagaaaggttgcagcttgcctgagaagaaggagaaaggaagagagggtgtctgaggaagaaaagcgagaagagtgttggggaagacagagagagattagggtttttcttttttaattaagttattttaatattttttttttactttttttatgttttttaaataatttttacgtaaattctagattttaatgattttttaaaaataataaataaaattaaaagatatggacctataagagactgccacatagctactgacgtagcaattaacggccaggtacttacggaagtttcatattagtgacggtaggtatttttaccgccaaaaatacggcttaggtatttatctgctactcggcataaaacttaggtatttatgccgcaaattactcttttttatataacactatttttttttttgacaaattaaataacactaatttagttctgcctatatcatttttttttcttgtgtgttttgaaaaatgaaaattatatcaaatttagggtgcaataaattttactttattattttttatatgttacttcttttaatataaattaattattataaaatttaacattctttatttacatattaaataaccacgagtaaaaacttttgttctcattttaattttacttaatttgcttattatacattagagtacaaaaccacaaatagcatatggtagtaacttatttttaacttattttttttaatttgccgaattcaataataaaatttaacatgttgtacggaagatggtctaattataattattaattaaattaaaatatataaaagttaatattaaattatatcaacaacaacaacaacagtacatatcattttaaaatgcaaattctcatacaatatatcaaaaagacctttattttattttcactactgtgctccttcttatcttgttttctctccactagacccgggccccgcttttcctcctcctcatcaaaaattgaaatactaattaatcttgggtttttttcttctttatattatttccatttgttatatatatagggatatgattttgtcccgtgacgtacttttacggaatgtattccgtggtatattaaatgggtttcagggtacattaaatgagtgttagggtacgtttctactttttaaccctaattactcctagatcaatctcagccgtcagatcaaataactccctcatctgacggttgtcgtacatcacggattacaatccgtgaaagtacaataacgggacaaaatcatatccctatatatatatatatgaaagggaaaaaaattgttttaaactttgttaagtagaggagtgctaattacaacatcttattacaatttttagttcaacttctacatttgaaatcacatgctcaaat

SEQ ID NO: 361217 - DNA, 543 bp, Cannabis indica
atgtatcaggatttgaaaccctacatctggtggtatgggatgaaaggagacgtggtggactacgtgtccaaatgtttaacctgccagcaaatcaacgctgaacaccaaaggtcggcagggttattgcaacctttggtcctttctgaggggaagtgggaggacattccaatggattttgtaactggatttcctagaaccacaggaatgtatgattcagtgtgggtcatagtggacagattcacaaaatcagctcactttctaccagtaaaagttacatatttagtagatcagtactctgaactgtatgtaaaggagatagttcgtcttcattgagcccctaaatctattgtttctgatagggatccaaagtttacatttaagttttgggtgagccttcagaaggctatgggtaccaagctgaaatttagcacagcctttcaccctcagactgatggttagtcaaaaagaataattcagatattggaagacttactacgagcctgtgtcatggactttgagggttcatggagtaagtacttgcct

SEQ ID NO: 361218 - DNA, 733 bp, Cannabis indica
tttttttttggctcctaaattaagtgagcccaaacacaagtctaacccgtctatatcgagaaccagacctatatctatataaaaaaattcacgaataattctttattaatttagctaatactactacaaaacaaccctttagagactgatttttcaacaagtttcataataaggaagctaaaaggtgtaaaaatgctcgcctatatattgaaaattaacctttagaggcgattttttttttttttttataaaaactgtaagtatagaattgcattataccatttagagtcgattgggaattcaacgacattgagttatatgaaataaccctatataagaaccgacgccatagggttatataaaataaccctatcgcgtcttcatcatcttcttcctcacaaacctagagcccagcgaacccaaaacccttcgccaaccaccacctccgccacccctttctcccccatttctcaaccatttgagcccatttttttttaatcttccattttcgatacttaatcccatacacctaaaaagtttttaattttttgccatctttaagtgtcatccgaacctaatagaaaatagtgggtataactccggccaccattatttgttgagaaaacattgaatcttaacatcctttaaggtataaatatagtttctattcatttttataatgtacattgttttatttttgatttttgtaaattattttttgggttattttcat

SEQ ID NO: 361219 - DNA, 647 bp, Cannabis indica
ttaattaattatatataaatacaattaaatataataatagtaattttaattagccaaatgtaaaatttataaattatactattataatagttaaaccaaaaaaaataatattaatttgcaatatgcatattttttttcaaaaaaaaaaaactaataataacaataacaataataaagacatacaaagaaatcagaaaatctacaaatcagaaaacacatactaaataataataaagaatataaatcacaaaataataataataataaaggcatacatattatcaagtgattacaaaccagaaaatacatattatcaagtgattacaaaccaagaaaagtataacaaaaatcagaaaaatattatcaaaactcaaaaattcatgcccgtccatggtgatgagccaactaattatcgtatacagccaacactctaaacatccacaatcgccaacctcgaacaaccaccgtcgtcatcaatccgcatcgaaggggacgtcggagatcatggcagaagacgtcagagcccatccacttgcacaaattagagataggtagagagggagacgagggagctatgtgagacaaaggggacggagaccaagggcatttggggcaatgaagccgacggtggagcatcgaaggggacg

SEQ ID NO: 361220 - DNA, 1237 bp, Cannabis indica
ttatatataaatataggaaaatttggatttttttttctgagaatttgagatgtaccaaattatattctctgaatttttttagctgttaaaaattactcatgaactattaaaattgttagatttaacaactttgtctaatttcattcaattttactatttcagtaattggttatgctctaaagtttactttccagactttgatatctaccaaatcatatctcttgaatcttgatatgtataaaatcataccacttaacttttatttatgttagaatttttttactaaaattagataaaagcctttatatttaacaatttcaatagttcaagggatatttttaacaaaattaaaaatttagcggcataatttagtacatgttaaaattcggggaatttgtagttacggatgtaaagttagtggggatgatgaagaataaaacagtaaaacttcattattattattattattattattattattattatttttattattattattattattattattattaatttatgcaataatgtgatcaattggtttatttattcgatctgcatgacccataacatattaacttatttaagttaataggtacttaaaactaaaacttttacttttacttataggtaaaattataaaataaataaaagttttcgctaagtttaattatttatttatttttttccataaaaaaactgatagaagttaaagtcaaataaagtcatgtattttacaaaagaatattgttattaagctccttatttggtgtttaatacttaataattttttatataatttattaaatcgaaatatgcagatctaatattgaattgcaaaacaaaaaaaaaaaatgtcctaactcctaacatttctcattttagaaaagggtttaatggaaaatttattgggataagttgagaaatatttttttttattatcaattaatcaaaaatattttatattatattttattaaaatttacttatttttatgagtgagttgcttaatataattttatcctccacttaagtgtaacacataatttatattaatctaagaagtataatagaaatatcatttataaaaatgagtatatcttaaaaaatataaaaataaaagtaaaaaattaaaataaataaaataaaatagatatacaatgtaatttctacacacaattattgtggtaggacacttctgctctactaagacaaaaacctaataattgactcc

SEQ ID NO: 361221 - DNA, 654 bp, Cannabis indica
aaccagagtgggacattgctacaacaaaaaagtagtcccaatccctggagagaattttatcaaaccagaaagtaatgacttggagatcttaaaataacctacatattgcttgaaccctagtatgaacagtttaaaccctaaaaaaactcccaaaaccagatgagatgataacgatacaaacaaatcaagtaactaatccacacaatgtaacaaacatgagaaagaagaaagcaacttactatttgaagttagggcttggggcaatgcctggtaattccgtctgcaaatcttcgaacgaagcaaggatcgctttgagaggatgaagtcagaggaaactcacaggaaaaaaggtcaaggacaaggatggcatgcaagtcttcggacgaatttaatggtgatccttggcaaagaaatttaagggtttttctcaaactttttgaaatggagaaagtggtgcaaaggtggtaccttttttcttactttatactcatgatagtggcttcgttagatcagagaaagatttgatcctatggacatgatttaaagcgaaagtggaaaagatggacatttaattctgatgtacctcgaaaccgcacaactgccaaaatcagaagatatgcgtcttttcaaaaaagaggaacatgacggaaatac

SEQ ID NO: 361222 - DNA, 787 bp, Cannabis indica
ccgataaagcaaacgataagtaagaaacctaatcgcggtttcaagagtaattacttgtaacggtattaaccgtttccaaccctaggtcataacctaggctcaaaaaatatttaatcaaagtcttgataataatcaaggccataaccattcaaccactaatatttagccacatacggtgattaccacttttcttaccttagttcaaaactcaagcgtacgggccgacctgagtggaaaacaagctaggcgatcccggtcctatgtcatgagaaccaaaactcaataaaaaccttaatcaaatttctgataataaactctaattctcataatcggacacaccctattgtcccccggatcaaactaacttaaacatctctaaaacaccctaaatttcacgccggaagataccccaaatcagatcggacttgaggagaaaaacccaaaatccctcccctactggccaaaccggtcgaccggcttgccaattgcttaaaaaaccggtcgactgatttttcctgggcagccatgcggatttctagtttttcaccccaaaaaccgatctaatctccaccaaacctgctcaaaccgtccagaacagtttaatacatcaaatataacataaccaaacaactaattcatcacaatttatcaatttgctcaaaatcactctttaaagtgaagaaagctcaactttggcttcaacaaaccaaatccaattcaagcagccatagacaccacttaaaaccattcccaacatgctcaaaaacctaccctaaacacaccccaa

SEQ ID NO: 361223 - DNA, 550 bp, Cannabis indica
tccactcgtacacttacgatcattagcattgccagcccaatctgtgtcaataaaacaagccaagttagaattagtatctttagaataccagattccacaatcaagagtactataaacgtatcatataatcctttttactgcagatacatgagattccattggataactttgatatcgagcacaaactcccacactataactaatatcaggatgactagcaatcaaatacaataaactaccaatcatactacgataaagagtagtgactacctttactccatgctcatctttagttaatttcaacgtggtgctcattggagtacttacctgtttagccgattcaaggccaaactttttgacaaggttcttggcatacttactttgagatacaaatgttcttctttccatcggtctcacttgaagacgcaaaaagaaagtaagttcaccaaccatgctcatttcaaattcatttttcatttgactcacaaacacctgcacttcatggttagatgtagacccaaatactatatcatcaacataaatttgagca

SEQ ID NO: 361224 - DNA, 730 bp, Cannabis indica
ttgattgaggtttgtattgcatttttttattttgccatattttaggttttatctcttttaggtatgattcctatgttttgataaatattatttcctagtttgttttaggtctgttattgagtttcatctgtattttgtattagatggttttaggtttctttccatttctcaacttgagaaccatttttctctttttaatggtttattttacttgttgttgattttaatttttatggttttgaatttatgtttgttgaatacttattgcagtgatttgttatttttattatttttaatgaatttcttaggtttcgtttatgattcattaattgtttttgttgatattcatgattatatttatagattgttgcagattttaattttgatgtgaaagctctactatgagtagtggagattgcttctccacttggtcaggaaaaaaagtatattttatttatgttgttgcaattttagttgttgatgtgtttcaatatagttatttttaactattttggattattgttttaattgtcacattgattgtagtctctttgttgttgtcatttgctgagttctttatacatgaaaagaatgttccactgattttgatatcggagcttatcgcacgaggcttgctatgctttgtttgtatatgataaaggaaaaaatgaagaaaaacattgatagtgagtatgagaagccttagaagtactatgaagaatgttcaagg

SEQ ID NO: 361225 - DNA, 676 bp, Cannabis indica
ctaattaggggaatcaacaaaataataaaaaggccaacagaaaaacgattttcatattttatttatttatttatttatttttttgtgttattttacagttgttctaattgaaaaaaagctcatgtaaatgaaaaattgtgataaatgtcacattatgggatacctccgattaaaatattcaacgttgcgagcctcttcttttacttgcaattaaagatcaaagaaacagatttcaccacacatccattatgcgtcaacaaacagaacaacaacacaacacctactgaaattccaaaaatcacatccataacaacaccatatcaagaaaatgtggcaatgcttgaaaacaacgcaacaacaataaaatcatacacactcaaacactaattagattaaggaggagagtcagaaataagagaatttaagaacgacaaatttgacatggttgactatgcgaatatggttgctaaagaaatggtagaaaaactagaaaacaacagcaaaaaactaaatccataaatcgaaatcaacaacgtgaagctaataaaacgacaaacaccaacctaaaagttaaaaaaggccaggcatacaaggacaaggaaacactgaagaatgtccttagtacgtactacgcaatcaaaaacaacttcaacacaaagcatggaagtcatgctct

SEQ ID NO: 361226 - DNA, 604 bp, Cannabis indica
tcgttaccaacgagtttcttatgtcagtatcgttgcttaattaagcaagcgataagtaagaaacctaacagacggtttacaaaagagagtaattaacacttttcttaacaacgataattaccgtatcttattttgacatgctaagtagtgcaattgacttttcttacctcaagtctaaagtcaggtgtgcgggccgacctgagtggaatgatgctcgacgatctcgggccctatgtcacgacaatgacacttgataaataacttgatcaaacccgtaatagtcctaccggtaaatatttgagatactcgtttcaatgagtttggtattatacttaatgacattgctcatatgtggaattattttactagtatatccttcactcattgtaaaaggtctaagaacattgttgctcattctttagctaaacgggctcttggcttaaattaatcacgtgtttagtggttgggtctccctatagattaagttttttaatttttaaggctcttttgtatcttgaaacctttgtgactttgtgcttatcagtggaattgtttctgataactctatggtatagagttattttttttatgcttttaaactaaa

SEQ ID NO: 361227 - DNA, 835 bp, Cannabis indica
gaaatcagggggaggcgaggcaatgttacaacgttgcaacccacctgcccgtactgatggtctgggaaaccattgagccagatatggctgaagaagatgagttggatccccgcgtggggtccgagaaaattgtagaactgatggaggatgtcgaggagatatcagtgtgcaacctcgactccaccaaggtactccggctacgaaaaagcctagacccggaggaaaaagaaaaaataataaagacactgaagggcgccattgacgtttttgcatggcgccaggaggacatgactggcataagtccccatgtcatcacccacgtcctcaacgtcaacccggacatgccgccagtctagcaaaagtggggccccctcgattcagtaaaggccaaggccttagagaaagaggtggacaagcttttaacaaacagcatgatccgcgacgtatactatccagaatggctagccaatccagtcctggtgccgaagcctaacggaacttggcaagtttgtatagacttcactgatctaaacaaagcttgtgttgctataatttataaacactacgcaagtatacgcaatcaagtagtaaaactcacacaggtgaggtcgatcccacagggaattggattaaataccactaaactatacttataattctatttggcaaatcgaaaacaattatgatttaagaaaagtaaagtaattcagaaaacgtaaaacacagttaaagtttaagcaagatgagatgatagggaggagaatcctgttgttgtttacccaaatcgttaatgcttaattactatcctattcttgaagtgaatgacagattatga

SEQ ID NO: 361228 - DNA, 606 bp, Cannabis indica
tatttaattaaaacataacatataactattataaactttcgggatcccatttacaaaatacagttacaaaagtttactacacatttacaaaatacttgtcccctagcgataaaacaacagaagccctgatgtcccgaggatcatacgctccaggcctaaccaccccggcatgtacaatcttcatatgctcgctctcacagctcctcaacttaacttttcccttacctacacatagcaatagcactgtgagtcgacagacttagtaagaaaagcataacataataaatatacaaatatcccgggttataatcaggcgcccatacacctaaccataacccgaactgaattacaatcgatcttgacaaactatgactaaccgcgaatccagcctatactcagtactctaatcgtactgatgtggtagcaattaattcatactatctgatagcctagcatatacctgttggcttctcggtgcatctctatgttcacctcaccgatgccctgatatgctaatgtgagggctatagatttgcctagactgacggcaactaagatgcacgctaaacatgtataaacatatgcaaaatattatactaatcttac

SEQ ID NO: 361229 - DNA, 735 bp, Cannabis indica
accaattaagaaaatacgagagcaaacgaaaaagatcacaatcgaatggaatgtgacgaaaagggagagaaacagtaataataagaaagtagaagatttctcacagatgaagatggcgattgacgattggcgactcttgtaaagatgaatggaaaccctaggattgtctgccaacagaacggcgaatcaaaagagaaacgaaagaaaaatgagcgctaagccgttagtagtggtagtagtgtatatggttggttggttaccggcggttccaggtaatccggtgaatctcgtcgcacgggaaatgtgtttgttctgggattggtgccgccagatcttcccagcccttggatctctcagatcactcagatcaacggtaagatcctcctctacatttaaaccaaaaattttataatgcactcttttagaaggaatacacagatatatctttatcttttagtatctgaactaatttttcagtcaaattttttctcatagtcatttaaattatatttatttaagacatcttatcaaatttaaagaaattcaataaagtttgcataccaaaaactacgttcaaacagtgtgttgcacgcatgactattttattttatacacgtaaaatagattgttcgaacattgttttctatattgtaaattattccgaatttctcaaaattctgtaggatatcttaaataattataacgtacacgaatataaaaaaaaaagactaaaaa

SEQ ID NO: 361230 - DNA, 534 bp, Cannabis indica
ttgtaatttttgctcggcaacaacggaaaatgcgatggaaggctagttttatcacatgggtaagtttaaaaccttatttattggtggaaaatattttagagaaaataaaatatcgaggttgagtggggttatggtttttgaccattttacccctaggttggaaataagctagaattaatgcttaagggaattttagtctttagccaaggttaatgtttgggtggctgccttgtatggtgacacctagcagccattattcagcaaaggattaataggaatccttttcatttagtgagaatagaattaaagaaagaaaagccaaaattcaagaaaacactctctctcttttccctctctctcttcgaaccagccaaggttaaggggattcattgctgaacttggtgttttcaataaggttggaggaggattcaagcaaaggtaaaaccctagaacccttgaatatgtattttgaagctttttctttagtttgtagtatgtgaatttgtgaaatggggatgttagggttaggttttg

SEQ ID NO: 361231 - DNA, 1521 bp, Cannabis indica
cttcaagtttgataaaaccttctttgcggtcaacaaaatcactcatcgagtcgactggtccattcttccttatgtccttccaaagctcaccaaggacttcaatgcccccagtatcggggacaactttccgtcctcggttacccgtgaaaccttagtcgcctccgtcataaatctactgatgtaggctcggagaggctctcctggtctttacttcgaccagatctcctaggtgcaacggaagttggcgagaggaggaaaattgtgcatggaactccgaggggaaagccttccatgagttgaacttgctaggggctaacttgaaataccattgttgggcggcttctgagagggtggcaagaaagactctgcaacatacatctcctcgtactccttgcagatccatttgcatctcaaaatacttgaggtgggacaaaggatcttcctttccagtatacatcttccaggtcggcatcttaaacttgtggggcaactccaggatatggatctcggggaagaaaggggttccacgtgctcgatccaactcgagatctctgaccggtcaggccttggaacatattttttagttcgtccagctgtgcctatacggctggattaacctgttcgaccttttggccggtctgagtcacatcagcatctttctgagggagattttgagcgcgggttccgagttgcacgattagcgtgtcaacctgtttgtccactcctctcctcctgttcagatcgtttctgagatcatgagtcattcccaacctatcaaatacggaaacggctggttgtctcagtaactggttgttttggccaatttgatgaccgacaccattaacttggttggagttattgggtgtgacttctcccgatgaattactagacaaggtctgcccgcctacaacttggcccacaggtggaacctgtgaccggggatttgacggctgaccatttatagtctgggaggtattcaacgctggatcttcgtctgtttcgcccaagggaatgacattggcaggttgctaccccggtagtctgataggcttttcgtatcagcacagtggcttgccgactacgatcgtcaatgactgcttgctgagcccttaacgtttccatctccttctctctccattcgacaaacatgcgtctctgctctccaaacgcgatatttaccgcagcatggagttcctcctgatcatgatgtagggtgttcgtatgaccctgcatgattacaagagcagcacggaggttctggatttcagtgtcatctccaatggttgtttgaacattggtagcgaacgaaatggctgtgctatgaatgccttcgttggctgctaaactcgtattcctagtctcttgcacaccaggcgtgatttcatccacaggagttgtcacaccatgacccgcaattgatggctgtctgggatttacggctggcggaacccttgggtttcatgggttttgtagtgcaggatccaccacctgtggatttgctggatcaaccatgcccctacg

SEQ ID NO: 361232 - DNA, 716 bp, Cannabis indica
caattttttatttgacaaaatttttcatttaattattattattgcatgtgttattttattgttcactattatactttatgtaatacaactatcaatatatattaacaaataaaatttaaaactttccaccacaataatataaatttaaaatttataatattaaaattgttccaaaccctaaaccttaatatctctagatcataaaatgtaaccagatttaacataatatctctagcaagaacatatacagaaaatgtaaccagatttatcataatatctctgatcgaattatcattaagttttattttgataaaaaaaattaattcagggtcgtatttgtacaattttaaaaaatacagggtccattttgtcatttaataaaacagagggtctaattagtaacttttataaaacacggtgcctaaaatggtatttacccacatatatatatattaacaaaaaaaaattgaagatttcccaccacaataattacaaactttaaattattatagtataagaattgtttcatactaataatgaaaaaaatattgaagaaatttaaattattatttgaaaaaaaatcaaattattcaattaatttaaaaatttaaattaaaaataataaaaagtacgtctttacaaatgattgaacttatgacattatagttgatgtaagagaattttaccacttgcactatgattatattattgattgt

SEQ ID NO: 361233 - DNA, 534 bp, Cannabis indica
gaggcgaggtggggcgtcgcctcccctgaaaaaaaaatcaggaaaaaaatgtacatgtattttatccaattacaacatatatttctaaaaaaaaaagtgatatttatgaacataatacaagctttggtataatggtgaagctatttcatgcacatagtggaggtcatgagttttaatcctagtaaaagcgtgtttactttagtatttaaattttacatttgaacctctaccaataaaatttgtatttagtgtcttaattattgaacccaatattttatcctaacaatttttttttattttatactatatttaatactaaaatataaatttgaatcaatttttaacatgttatacaatgtaaaaaaaaaagacgcctcctcacttaaaaaaaaaagtgttgcccccctaaatcttatatatgtatatatatacatataagtctcgagaaatgttaaaggatacccatagtgtctaacatctttatggagtgtaatatcattattggtataatttaatatcgaatctcatttattt

SEQ ID NO: 361234 - DNA, 548 bp, Cannabis indica
caaaaagctcaagttgtctgcaagctgtgtggaggatctcatgccactgacacctgccctatagatgtcgacagtttgccaatggaacaagcccacaccattggaaactataagaatacttggtcgtcggccgaacttccaaaagcagttttatcctcaacaaatcaatctcagtaaagccaacaatataaacaacaagaagactctagtggagggtctaatcctcaattagacatgttactgcaattcatgatggagattaaatcttccattaaggtcttggaaacccaggtggggcagttggttgcgcaaaacactaacaagactcgaggtaacttgccgagcactactgaagtcgagctaaaggagaactgtaatgcaattatcttgagaagtggtaagacctatgatgagccaaacaaagataagccaaaagaggaagaagacgaagaatcaacacctacactacaagaggagaagaagactactgacattcttcaacaaaaagaaacaccacctcccatcaacattgaccatcacatcaaaat

SEQ ID NO: 361235 - DNA, 602 bp, Cannabis indica
taaaacacacatgatttaaaactaaagcatcattgcttaaccatttttggattgttcttattgctggttcaatctgttgtgaaggataatttgaggaagtggaatcactttctctattcttctcaactgagcttgaaacagtaggattgtcggagctatgaactatttgctcttcaaattgaataattcccagcttagcagctttttggaatttcatgttcatcatgagcaagtgtgaagtattattctgactaggagtcttcttcacaccttcaagttcattcctaaaggcatattctagatgagtgttgggatgtaaggtgtacattttggcactacaaatatcaataaacagaagtaaatcatttagttcaataaattcatacacaagttcacaaaataacaagtaatgagatatgttcgcaaaaatactaaaaacaaaacatgtttattattttccaaggtttccaacataatgaaatacagtgtcctggtgggcgagagtcaaaggtaacattagttgaatagagtagtcagctcatctaaaatggataccattttagcaaccttttattcgatcaaaatgagaatccaacgttgtc

SEQ ID NO: 361236 - DNA, 600 bp, Cannabis indica
agggtaagtctttcttgacacttcccttcaatcttctgtacttagctcaaatgctaaacttttttcttgtgcaggccagtctgaagttggcctccacttactcccgggctaagtctgccgcttccaggaacacagttctgtccaacaccatgatggcggaggtggacttggccaagaaggacgctaacgacgctagggcagaacttggagctattcagatgaagctgggtgaagccaacaagatgctatttaccgtccagaagaagataactgagctgactaaggatctcaaggtttctgaccgtcgtgaggagacaatcgagaccttatatgctgagtgaacagtcttcaaggtgagaggacttctcttcaagcagttcttcatcgagtggaggaggagaagaagactaaggaggaggagcttttggccgagctggcgaggttgaaagagaaggttaatgctctagagacagtcggtcttgagctcttcttcgacttttggaaggctaatcctcaggccaactttgactacttaggtgatgctaaggacatgtaccttgagttctgcgcgtcccaagtggcctatggtgaaactgaggc

SEQ ID NO: 361237 - DNA, 640 bp, Cannabis indica
tcaccccaaattctcaaccaaactttctagctaacaaataggattactagcaattaatagatgctcaaataacatattttatgcatcaaaatcccataataaatccaaaaattcagattgctcaaaaacatagaaaatcaagctcccaacttaacaaaactcaagttcttgaacaaaagcttaacttcaacaacccaagcaatttccagcaatgaaaacattccaaggatacatgattctaagctagaaaataccttgaaatcataatccatgcacaacaactcaaatcatgcaattcataccaaaactcaccaagattaacattcaaagctatgaacatgcaattccacaaacttaacaattcaaaacatacttttctatgcttttaccaccataaaattcagtaggaagacaagattaaaaacctgcaaaagctacctcaaacaaagcttgaactcccttcaactctaagctccaaaacccaattccaagcttcaaatcaatcaattaccaaaaccaaaaaatgaaatttttaagagaggggttcgggtttgggagagaacaacccagaaaatttatctatttccctcaaaaatcaacttttattaagtgtaactcaaattgttaggttttgtgccct

SEQ ID NO: 361238 - DNA, 982 bp, Cannabis indica
tttagagggagtctaaacttgtttaagtcaattgtatttgtaattatttaagactttactaattgatttcattctctaagtgtggcctcatggactagcagtgtttaaaataaaattgatatcacgtgaattctcttgtgtcaagttattttaaattctacatttatttattttttgttctggttttattctgcaaatctgtgttatgcagtgacagaattgcaatctgttgctgtagactgttacaattgtatttttactgtaacttagtaatattattggcatttgcaaaaatacgatttttcaaactagaaattaatctcacaacaactataagagcatctccattggagatgcaaataagtgatgcaaatgtaaaatatagctcactttgtcaaaagtctactccaatagtgtgccaaattatgatgtaaatatctcacataacaaaaagtgatccaaatttagatcacaatatatcatgatgtaaaatttgcatcacaataaatgttatgattttatattttctatcatgtcatttttaatattttattattaaagtttagatagcatgcttatttgcattaaatgactttcataatttttattattaaattttatatttattttatatgattatttttattttatattttaataaactattagatgagcatcaaatgagatattaaattttgcattaagatttacatttatgcattagagtataatattaaatgttgatacaaaaatatcagaagcctattatttgtattaaatatagattaattttgcatttcccattggagatggtctaaatcaactataaagtaacaaaaaacaactagaaaagtaacctcatcacaactataaataaactataaaccaaaaaaaaaatagtttattattttactgaaaaataattttgtaaataaaaaatttcaaaaagtaaaaataattttttttggtattgacatatttt

SEQ ID NO: 361239 - DNA, 533 bp, Cannabis indica
aacaactggcctcagagccattgtaattgatttactttcaataaatttggacttaaaacgatttatgtgtgattcagatggtttcatgttgatctgtgtgttatttgatgattgattgatgtttgcgaacttttaatgaaaaataattgaattttcgttctagagttatattttttttggatattttgggaaaaattaagcaattcacttttttacagaacttgatttcgattttatctgaattagttatgattttttgaaaatttgaaaaaaaatttgaaatcaggtacacatcacgtgcgcgcgcggacatgggtgatcacctgtgtgcacgcgcattaggacagcctattgtccgaaggaacacgcacatgcgtgtctgaagtacccattccgcgcgcgaaaatcctgctgtgcaggatccgtgtgcggcaaatctcgacggtgagccaaatccaaaaaattttcattttttcattttttcatgctttttcatggaattaatttcgaatcttttgtgtagttttgtattt

SEQ ID NO: 361240 - DNA, 529 bp, Cannabis indica
ttgaatgcatcagaagtggttgagacttgtgaggcttggggatttctggtttgaataccagtgtcaggttttcttgcatttctgatgtggttgtcatttggttttcgagtaccatagccaggtggaaacacgatgtaatatcttagaaaaatataatgatatttatttggacatattttattaaatatgtaattatttagatattagaataagattataatcttacataagctaattacgagttaattagtggaatttgaataaatgaacaaataaaccgtaatttattaattacggagattttatcagattataggggtattgtggataccattttcaaaataaaatattttcaggttcggcagccgtagaaacacaacagagtagtcagaaatgtcacgacattaaaagatgagttgaattagaattcgaccggactgtttaaaattctaagttgtcagtttggcgggttagtttgaaattaccaaattatccctatgccttaatttatgtaagtgttttattggta

SEQ ID NO: 361241 - DNA, 624 bp, Cannabis indica
acaaacaccaacactataacaaatgtcaggacgaccagaagtgagataaagcaaactgcctatcatacttcgatacaaagtttgatctacctttactccttgttcatctttggttaatttcaatattgtgctcatgggagtattggtatgtttggcattctcaagaccaaactttttcaccaagttctttgcatacttgctttgagagacaaatgtaccctcatctgattgcttcacttggagaccgagaaaataagtgagttcacctaccatgctcatttcaaactcctcttgcatttgagaaacaaaaacctgcacttcagagttagaagtagaaccaaacacaatatcatcaacatatatttgagcaacaattacatcagtattaatgtttttgatgaaaagtgttttatcaacatttcctcttttgtaatcatgagaaagcaaaaattcagttagacgctcataccaagcacgtggtgcttgtttcaaaccatacaaagctttgtctaacttataaacatgatcaggaaaatgaggatcctcaaaccctttaggttgttcaacatacacttcttccttcaaaaagccattcaaaaatgcagatttgacatccatttgata

SEQ ID NO: 361242 - DNA, 594 bp, Cannabis indica
tttggggttttaattttactttttatacagagatatgtacgtataaatattaatattatatatttgaaataaataaaatatattaacatttgataaaagtaaaattttgatgatgtattttaaagaactttatgtatgtaatgtaaaagtttaaagtaaaatagataaagtagagtgttgataatatattttgaataatagagtagagaaactaatgagaatgctctaatcagatttttttagttcaatttttttatttgatttaattttatgtcttcttgcaaaagtgtattttgtcattcttaaaataaaataaatttgaagcaaaaaatatgaaatgggaaaataaaatgtcaactaagagtgttcgcgatgcgggtggtgcgagttatagcctttttttttaaaaccaaactgcatatacggtttttgtaatttctcaaaccgcaaccgcaccgcaagatcttaaaaccacaaaaactacactatgaaaatgcagtgtggtgcagtgcgatttgagcgatttacactatcataattatcaaacattataataaaaatttataaattcatctaataaaattttaacaacac

SEQ ID NO: 361243 - DNA, 569 bp, Cannabis indica
aaggtttgaccgccacttccacagggtagggtggatgaaagtcgatggaagttaccgatgatgacgatttacccctttcagctttaaggagaccaatcaattcgtcttttgtgacgaactcagaggaggaccgagcctcttcaccaaccctttcaacaatctcagaagttctgattcctcgaacattatcatgtgttgccggagttcgttggtcaacagtatgtacttgccttatcaaagattcatttattgcacgttcttcaggtaagccgctcctttcaacagatgcttcttggggtgtctgtggtagaagcgaactcagtagctgcatcatgccgtcttgggcttttggagcttttccaatctggctaacacaacctcatctgtgttcgtcggattagtattgttgttattgttgttgttgttgttatcatttcgcaaggtatctgttcggatccgactgtccggctctcgagtatcggagacagacatttggatttagatgagagaacagaatttcttttttttttcaagtgaacgaattgagcgttttccttagtatatatata

SEQ ID NO: 361244 - DNA, 928 bp, Cannabis indica
gtactttcattgagagctaaagaaagacctaaactcatagtgttactgtaaccatggtgtttactcaaaaaactgttactaagaagaatcctccagatggcctcaatgctgttatggcggatgtaaaccctttttctccaagcctcgcccagctgaacgatgcaagaaaagtggatacatccaacctagacaaccgagaggctgaccttgataagcaatatgacagcatcgacgatgatcgagatgttaagaatgataggaagacgacaatggagaatacgtcaaaggtggatactataaagatggctaccactacgagcaggaccccaaagtgattcaagtgtcgaaagagttgctcgagactaagaaaaagctagttcatcaagataagttttctcagagaatggagaaaatcatggctcacctccaagctaagtttggagatctggacgagggagattcagatgatgaccactcattggaatgtgtcggaggaaataatagggaaaaccctgctgatgctggaacctctgctcctatacaggacaagggaaaagaaaaagtatgtgaccctcagaacccttcaactcccgtgcctcctcagaaaagcacgaatcctgccaacaagctttctcaggcgcaaaaggccaccgatgccttcaggctcggatgcccttctatccagaaagtgttaggctttgtgccctaaataaaactctatttcaatgtaatctttttctattcaattatcaataaagaaacagatttaatttcattacttgtttaatgtgttatttggttcatgtgatcatttatttacttatttgatttataaattcatccaaatccttatcacattgatattcttgtttattgtgtcgtcaacacagtggaagtaatcaagattgtgtgattaaatatattctta

SEQ ID NO: 361245 - DNA, 455 bp, Cannabis indica
agttcaaagctcaaacttgtataaattcaacacaaggtggtaaaactagctactagaacctttaatcaatctaaaatgatcataaaaagcaaaccctaagtatttctaaccctaacaaccaccaattaaaaaaaatcacatactcaaccaaccataaaattcaaaaactaaaggagggtgttactagggcttaccttggcttcaagaacccttgaatctctactgaatttccagaaaaatagttaaagatcatttggttcctccttggtttggtgctgctcgaagagaaagagtttctcttaacttttcttaatttctctatattttccctaaaataaaactaaggttaattgaattaaccttgctgaatattttagttgctaggtgtcacatgtctaggcagccacctaactctccatttaacaaaaagactaaaatgccccttaacttacaac

SEQ ID NO: 361246 - DNA, 525 bp, Cannabis indica
atatgcctgtatgacacagacctgcatgttacgctcacatgcctatttatgtctacgtaacgtagacctatgtgttgcgctcacacgtctaaatacaataaggctttagaaaggttcctctcggttctagttaccgagtccaacttggttatgccttgaacacataaccctaaatctcaatatattcatatattcaacatggcatagcatttgcacaacatatatcactagggtaataaccctaggctattaaatcgctcatgttagggtaataaccctaatctcggttactaattactcacatatatcatttccaatataagtgtagctacgcataactctacgttctaactactgtcttacctgatgttccgcaataatagagattccaaattcccgggtgctcttgaccaggtgtcggtaatcatagtcacaattctgggatttacacaaatagggttaacccctgatttcatatttataaagtatatgcatggcattcaaaatacagataatcacatagag

SEQ ID NO: 361247 - DNA, 523 bp, Cannabis indica
aatgtcgcatgggggaagacgtattgaaactaccataaacgatatgacagatggcgtaaccctcctgtctcagctataatgctatgattaatgagactagtgacggctactttatgagaaatcacatcaatccataagggataaaagattatatccacctagcccctaagatacctacggtataggtcatgtatttcctattttgtattcgctgggaatatatgcccctatgaagcctacataaaaagacacgtgattcactcctagggatcaccccagaacaacactataaataccccacaaacacactgagaaaagggtcaaggattttggatttagaggaatgaaagagagaaaaattcaccaagaacattctctgtaataaatactctcattaataacaaagactcgtggactaaggctcattaatgccccaaccacgtaaaaatctcatgcattaaacttcctacaacttatcctacatattatttaatcggttgccgaaaacctcggtcaacaatag

SEQ ID NO: 361248 - DNA, 587 bp, Cannabis indica
aattaaaaccacaactcgaagaataaataagtaacaagaaaaaaatgaataacaaattgaataaatagtcactcgcaacagcgccaaaaatttaatgtgtgtcgtttaccacaacagatttactaatttttatttatatattaccaactacttcagtataacggtaaatacaggtcgatcccacgaggactattatcaatttattattcaaaaatcagtaacgagaaataaaaaagggagtctaattatgaagattaaataacataaattaaaaagcaaatagaatgaggtactacgatatttaagaaatagtttaaggttaatcttcacccttaacattaatcatcataaattcctaataatgaatgttattttacatttctaatcgaattattaatctcgcaaataatattgaaatagtcaattatcacattctctctattgcgtgtaataaagacaaaacgctcaataattaactcttttacctaagcagtaaatccatgaagcatgtaatttatttaacttagataaagctttaagttcaatggagatgattaatctaaacaataaattaatgaagtatataa

SEQ ID NO: 361249 - DNA, 522 bp, Cannabis indica
gtgacgctgggtaaaagtgaaaccgggagtgggtgtgcttactaactggttgttgggttggctgactagatttgggtgaatctaggccatcgcagataaaatttgagtgtgagaaattagccttgtgacacattctgtgatagctaagtttgataatgtcgacctcatgtcgacattgtgttgacaattttgatttgctaaaaattgtgatccattttcttggaatatcgacagcatgtcgatatgttgtcgacaatgttattttattgcttcctgtgtgataatatatgtctacatcatgtcgacaattttgtcttgctaaataggtgtgatgatatattggaatatcgataggttgtcataggatgtcgatattttttcgacaaaattatgtaattgtttattgtttgataatgtcgacagaatatcgacatgatgtggaccatttttataatttttttgattagtaatatttgcatttgttatttattttttttagattggctcccagactcataattc

SEQ ID NO: 361250 - DNA, 939 bp, Cannabis indica
gtaggcttaagggtatttttgtaattttctaataggtgatttggtggctgcctagggtgtggacacctgtccattttactcagcaagtagttaattggggttatctcttttcatttgaagaaaatagagaaataaggggaaaagtcaaaattcaaagaaataacctctttctctctttctctctttcggctgaagcaaaccaggggggatttgttgttgaaattggtaatttgagcaaggtttgaggaggattcaaacaaaggtaaaaccctagaacccttgagcatgtttttgaagctttttctttaggttgaatgtgggaattttgtgaaatgggggctgttagggttaggtttgtgtaaggtttgattttctaggttcatttgagttgaatatagcattgagcaactggttttgatttttggatttagttttgtgcaagtttaagctttgagttcaaagctttaatctctaatggcataatttgattcattgggttcaactgtgaaatactggttgggaaatattgtctatgcattgcttaggtactttagaaagtttggtggcatttggtggaaaattgagcaagaggtgaagcgtttgggagtgaactagtgcaaactggctagccgtggttgggtgtttccctaattccagagtttgtgtaacttatagagagtataatagaacctaggattgtgggtttgggtttcccgggcttagggttttcgatcatgtaacttacccggtttcataatgtgattagggcatccatctagcacgagactttccgtttaggtcggccagcacacttgaattcggaaagaaggtaagaactgaatataatgtgtgatatcaataactgagtgtatgtatatgttatgtgttggaaatttattttactaggatcttagatctactcacaaatatgttgtttaa

SEQ ID NO: 361251 - DNA, 751 bp, Cannabis indica
tttgcttggggatgtgccactacggagaagcttttgatgatgccatggttcgcacagaaatccgtgaaagattgactgtcgaactgcttgccgttgtccgaaactattttgcatggtagtctgaaccagcatatgatgttcttcactataaaatcttgaaccttctttgatgtgatagttgcgagtggttcggcttcagtccacttagcaaagtagtcgactgctaccaccacgtactacactctgcctttaccttttggtaactgtccgattgggtcaattccccagacggtaaagggccacggactttgcatttgtgtcagctcattgggcggagctcttggtatctttgaaaatctctggcatttgtcgcacttcttgacataagcttttgaatcttcaatcatcgtcggctagaagtagccttgccttaggattttctttgataagctctgtccggctgcatgatttccaccgaatctgtcgtgagcttcatatagaagtcatgcagcttcattttgtgtgacgcatctgagtattggcattgagaatcctcttctgtacatgatccagtctacgatgatgtaccgtgctgcctttcttcacatttttcgagcttcatttcggttatctgggagttccctagagtttagataggctgttattggcatcatccagttcagagatgtgtcgatcatttcgatttcttctgtgccggtgatgctaggctcttcaagaaactggatcggga

SEQ ID NO: 361252 - DNA, 524 bp, Cannabis indica
cctgttatgacttgggagacaccggtgacaaaatccatttttagttttaacaagtaatggataggcagaatgaggaactaagaagaaaagccaagagaactatggctaaaaccattcatatggagtaaccaaatgttttctattacaaggaaaagaaagtaaattatgataataagtctattcaatggacttgatagaacttgatgatcctagtattataggtttgaaagtatctaaacatatggcttgtggtatacctgatgatttactttagtacaagcaacttacttttgtaagatgctgaagcattttttttctaatggctaaatctataggaagctttttgacttctagacttagattttatttatctaaggaaaagtgtcaactattctagagaagatgaaggccaaagaaagaatttcttaggatcaacagtgagaggtctcaaatatgctttgctatgctttagactagacacctgctgttgagtgagagatatgagtaggtatcagattaatcca

SEQ ID NO: 361253 - DNA, 522 bp, Cannabis indica
aggctgtgaagaatccagtttcaagagaaggatattgagactcagatcttggtgatagtctgctacagaaaggatacaagggttagagatctgagtggaaggagacatcatattccgctgcaaccactgtaaggtttcttatactttatatgtgtttatttcatattgttttagaagttcatattcaggatgttaataacatacttgttagtaaatctagatcttgtaaaataattccaacaaaccgatatgccaattgtccaacctgctcgagaatctcgaaaggtcttgtaaatctagggcataagtttcctcttttcccaaaacgcttgatccccttcattggggatactcgtaaaaacacgtgatcccctatttgaaactcaacatttctgcgtttcagatacacataactcttttgcctactctaagaggcaagcattctagctttaatcttctcaattgcttcactggttcgttgtactgattctggacctaggtatttcctctcccctgtctcat

SEQ ID NO: 361254 - DNA, 568 bp, Cannabis indica
tgaacccggcctctaacttgaactcaaatttgaccccgaatctagacccgacgtaaataaaataaaaaaataaaaataaactttacagaacacacttgtattttcagtttttaaaattgaaaaacaaaagtggttacagaacgcatttttgttttttaaaagcaaaatttttaaaaataaaagttttacttttattttgtgattaagaaattaaaaaacaaaaatgttaccaaacagcaccataattcatttacttgtatataattgaaagttgccacttttatatttcctctttccaatgtatcgttttcattaatattgagtggggtgtcaacatgggtatatgggccgagctatctcaaattccactagtttgggctctcaagtttccattttaacgggcctttgtcactgcaatgggctttttacagatttatagaactgaaaataaaatgctatcaagaacacattgttgtttgggtttatttcacaaatatacaaaaacaacaacaaaatttacaaaatactgttttacggaattttaaaatttttatgattttatttacag

SEQ ID NO: 361255 - DNA, 1377 bp, Cannabis indica
taacctgcgctgcacttcaggatcattcaattctagtataagcattacatagctaccaaacacacatattatcagtaaccattaatcatttttatttttataatattaagatttcaaaatggaatatatggacaaatttataatgggagaaccacctttgcctctattatggtgggtaattttgtaataatgatagagccacatacaaaattggaagtttttacaaaaatattagattttaaggaaaagtttataattttatagtcataattttttttacaaaaatactatctttttataaaacaattgtaaaacaacaaaacagaacaattaaaacaacaatagaacaactagaaaacaactttggaacaacaatgaaaacttaacagtataaaacttacacagtatttctgaactaaaaataaaacacagtattttgtaaaaaaattcgccccgcaataaaagaattcaatatgtgatgtaaaaattttaaaaaatactttttattgtagtgttgtacctctctcttgttgacaaataactcaaaacgctcagtcaagcctggtcttgatctgtgccatttggccaatggactcatcacttctgggtggtttattatgaatgttggatttacacaattctcttcaagaaagtgccccactagctgcatgaaattcatataactaaatctatataacaccaacatacaacttaaatgtactaattaataaaagtccactctttcaaatctattattaattatataaattaaccaccttgtctagcaaccgagctgtggtacgaggaagaggacagttgacattaaagctttgacaagcgtccactaagtatttgttggattcctcactgtaaagatcttcaggtatcttcagctttgaccttttctctagctcttctatcaagtcaactcttctacaatattcaacaccaaatcaatgctagcttataaatttcccactcattatatccaaatgtctctttaaagattccttactaaaaataataaaagaaaacttgtattgtatttgattatgtatgtaaatcatctgtctaaaaaaaatgtatcctttgcaaaacaatatgtgaaatatgtgttttataaggtattgatagaagcacatttaaattatacatattttttacatattcagaattcatttggtatattatattacaccgtattgtattatattatataatattatattaaattgtattttatgtaaaattatttgtaatattgacttttataggtatatgaatatataatatttttttttaattaaaaaaaaagaatatataatgtaaagtccttttttttggcaagttagttgacaaaataatttttccttttat

SEQ ID NO: 361256 - DNA, 642 bp, Cannabis indica
aaaaaggaaattcaaagtttttttttttttttcaaaaatacagtctctacaatgaccttcccaaaataactttttcacatattttagatctgaaattatcatgagttcacccaaacaatccaagatctactccataatcaatgtagcttctccaaacaacaccaccaacaatgtagaagcttttgtcgatcaccatgaatgccgactagaaaacttttgccgatcaccatgaataccgacgagaaagcttttaccgatcaccataaactccggcaagaagctttttccaattagccatggcaacacgaccagcaatagagatctccatgaaaagttgacaggagaaggtcacgattgaggcaaatctccataaacgcttaattacttgcaaaattttcttgttttttcttagtaaaaacaaatttgatgttgattagtatgtttgctttaattattttttaatcaattgttgtttagttgattcacatatattggtggtattagttcatatattttcgtattttctggtatttgggcagtataatgagaacagtgattgcgttttataattttaaaataaaactatgttgttttaacgttgttgtcatgtttttttttggttgtccatgatcgtaaaataaa

SEQ ID NO: 361257 - DNA, 500 bp, Cannabis indica
ctatatgagacaagggcgatgctaggtgtagactaggtagggcagtcacctcagatgaaaatattaagaccggtcttaaactatttgaagtttaggtctaaataaatttttttaggactttatacaaatatatttgtggtcaaataaaattaagtaaggttgtttgatgtagtagtaaagtttcttttaaaagttaaagatcgcaagttcaacactccacaccttaaattttttattttatttttactaatttttttttaagagaaactaaaatattattattgagatttgaactacctagaaaccgtgtaagatgaaaatatagaatgtcactctataaaaatcactttaacataattacatacgttttattatatctaattttataatcttgttaaaattttgaagtctgaagaagatataaaagtatgtaatcgtcttatttcaattttatttctaacttccccctgatatgagataggggagttctatttgtgctc

SEQ ID NO: 361258 - DNA, 435 bp, Cannabis indica
aaagcctacgccacaacaaagagctccaagagcaagcccaaaggcatgggaaccaacctcttataccaagagatccttctccccctaggagaagaagggggcgcccaagggaagaacacgcccttgtgaaaaatccaacaaggggggggggaccatcaaactttaccaaatgttggagttcatgtaagacatgtacaagaaacccatgtaccattacatggaggtggtcatgaagcccatgagaccccagttgttcttccaaggcctaaccgtgagaataatgacgtgggtggagaagaaaggagggagccaccttctctaattcgagccccattgtcacctataaggtatcccgatctgtcagtgggtaccactctggaagaaccaaggcggtccatgtaacaccctaactaacttaggcgtattacgtgattt

SEQ ID NO: 361259 - DNA, 979 bp, Cannabis indica
gtgtctgatacaagtacgatgggagcttccaaattttaaggcttcgaggttgatccaacaccgggaaggtaagtgaggggatggggataagcggatgagaggttgaagataactttgaattcagattttttttcaatttttttttttagtctgtattacttaattcttacaaaaaaaaaaatagtattatttaattttatcttattattttttatctaataataaaacaatataatacaaaaaaaatattaaaattagggtaaatttaggaattttataaatttaaacccaaccagggtacaaaagtatgtaacttttgtaaatagagagtagtaattaatcattatctaaaatagaaggtagtaaatatgtattcttacaaatcacaaggtatactaccatataagtatgaactcaattaatatttacccttaaagaaattaaacacaaaacttttttttttgctgaaaattaaacacatccacttgttttactataccaaagtaccattctttctctttctccaagccaattatttcactctcaatacccaaattggcgtgaagttatacaagcactaggcatgcagcgcttgtatatatttgtcagtttcttattaaaaagcttaaaattatagcatattcccttgctcaacttgtcaagtagaaaaactaaaaacaccattttttatgttttttgtgttttcaaatcattttatgtttaggatttgaaaactattttatgtttttgaaaattaaaatggtggggtccacctaaaaattcttgattggttgagtgttttcaaaaacaaaatttgagtactattttgagttttaggctaaaaaataaaaacaccatttttatgttttttgtgttttcaaatcattgaatccaaaaattctcaaattattctcttacttttttattttgagattcccaaccaatcacatatttacttttttaaaactcaaaaacatta

SEQ ID NO: 361260 - DNA, 818 bp, Cannabis indica
ataggtggttttgtcgtctgtagtaatcatcagatcatgccgaatcttcacattaagtccatcaaaatacttttccttcttactgaaatcggttggcactattcccgaggccaacctcgccaaccgatcaaactgcgttgtatactcagtaacgctcatgttctctttctgggtcaggtgagtaaattcttttctcttggcacttctaacggcctcattatagtacttgcattgaaaagttcctggaacttttcccaggtcatcgtggtgacatcgtgtatcatagacaccatgtcccaccataccaatgcgtcctcttgaaactgaaaagtggcacacaccactctgtcattcccggtgacgcccataaaattcaatatcttgatgatcacagttagccactgctcggctttcatgacgtccggacctcccagaaaaaccgaaggtgcctgcttgcggaacctttcatacagaggttccattctatttaccgctgacactggttcggcctggacaataggggcaggtgccagtggaatttctggaacaggcactgcaggagcaccatgctgtctcaatcgctagatttcattatcttgttcctcaattatggcttgcatttctggaaacctattttcccaattctgggcttcttgagtagcttgggcagcctgtggcgggttagcatcaccccgaccacgagccctgcccctgggacctctacctgggccctaagaatttgggggaaactgagcaccctgaccttcatttgacccgattgaattgccctgactcctggtatttcgcctggcatccat

SEQ ID NO: 361261 - DNA, 864 bp, Cannabis indica
tgatttaataacttttcttgctgagttattgtgactcacgggtgcttcataatacaggtaagaaagttaaagctacattcagccatgaatcagaggtctcccaacaaagtacatattaaccgtggtgtcatggcttctgggaagcagaatcgatttcttttcgtttatgttggaaatgtaactttgcttttataataacagttttgtgatttgatatatatatatatatatttttataaatagggatccccatacttcagtggtactttataaagaagttttattcctatttgatcaaaaagtttttctttaaaactcaattttcataaactaatagattagttagagataaatttgtaaaagcacacacacgttgcgtccctaaggatcagggcgttacaactgctccaccccctaagtaattaccatctcataagaagactttccagcactaatgcaagtctaaaaacctaattttgtgtagtctaacagtattaaaataccacccttatcgtctaacatatagttcctcttcctgatcttaagctttacttgatttcttccaatgtttgtttccttgattaacttgatacctactcattactctcactcaacagcaggtgtatggtctaatgcatatgaaagcatatctgagacctctcactgttgattcaaggaattctttcatcggcttttattctggaatagttaaaactttttcttagataaaatctatgtctcaaagtcgagaagattctatagatttccattagaagaaaaattctctagcaacttacaaaggtaagttccttgcactagagtaagtaaattaccaggcataccacaagccataggtttagataa

SEQ ID NO: 361262 - DNA, 641 bp, Cannabis indica
caccatcaccaccactctctagcgacccatctctagccaccgtctggcctcacgcgtcggaccaatttaaatcccaggtgctgacgacctcaacccctaagcggcgccgcttccttcaccgccattagcctgggatcacaagttaataaagtttggcagttcaaactttgaatggatttttgagccacttctggtgtccgtttaacgagtttaccactagaatcaccttgtcgtggagaacaacctacactaagctattttgcccaactggctacttttttcagtgacattttcgtagctccgcccttttccaaaaacttttcagtgatatcttgtatcgttttgacaaacggatggcatgggtgtgatctactcgttgaggtggtcgttttgatatacactactcttatttttggcgatatttttagtgcaccgatttttactgccaccggtagttaatgtgcaccgcttaggtgaggtttcggaactttaaactttaagtataggcatattatatgtcgttgaactcgttgaactcaataattatttagccatttgatggtatagttgagagtaatatctaagattggactaaaaaattggagctcgtgacttgagagcttaagatcgtgattttttgg

SEQ ID NO: 361263 - DNA, 518 bp, Cannabis indica
tttatcggttacccaaaaaaaaattatctcgttgagtggtggacgcacattcttctgttgactacgcctatcaaccatagcccaatttgcccatctctttgtcgtgctaaagcttactgaaaaataactataccggtctgttcaagatcgtgaacgataggagccatcttgagggttgggtctgggaattgaggagaaagatcttggggttggatctgggtatttgagagaaagaaaaagctctttggtgaggttgagtctctatattaagagaaaaagaagaatatgatgtaatggggaaagagaagaaagagttattatttttttgtaaggcgttaaaaaaattattaattttttattgtcttttatttttttaattaaggtcatatgtctaagttttatgaattattagggagttttgttgtaaatatattaataatttgaataaaaaaaattaattgctaaaagaaccttatgtaataagtaattgtaaaaaattaattagtaattataattaa

SEQ ID NO: 361264 - DNA, 594 bp, Cannabis indica
ctagttctacatcgtaacacataatacctcaataaaaccaattataattttttttaaaaaaaaggtgaggatcaaatttcaaaaaaatactgaagcataaatatgaaaagaaccagctccgtaacaaaataaataacacaaataataacacacaataactaaaaatataataataaaaaaaaaccggttatatttatcaactagttaaaaatttgagaaaaaaaaaactagcttcgtaaagcaactaagataaaaactcacacacaaaaactagttaaataaaacaaatcaataaaaaaactggttccttaaattaactaaataaaaaatcagttctcgaaataactaaattaaaaactagtttctaaaataaataattcaagaattaattttgaattgattaaataaaaaaccagatgacataaattaaaatagactcggttccacaacaaaatgactaaaaacaaataacacacaataactcaaaaaccggttataatttaaaaatagaactaattttataacggagaaaaataaataccacaaaataacgcaaaccggttataattaaaatataactggttctgtaacata

SEQ ID NO: 361265 - DNA, 605 bp, Cannabis indica
aacatattttaatttcatttatttcttcctttatttattttattttaaaaggataataaatataaataatttgtgaaacaagcttatttaaatgaataagcagtttaagtctgtgcgcccacttatctcaggaactcaaaaaaaatatattattttaaaattatatatatatttttttgtaaattttaaaaaacatcacattttcttctaaataaaagcccaaaattttttatttcaagccggccctgagtgtccttacaatagataagaaaatttatcttccttcaagttttggtaccctttaatttttttactctactatagtggaactgaaaaaaaaaaattaaaagtgatcctcagtttgtttagggcacgtctgaaaagtcaatagaaaattaaaattgggagtaattaaaggtaattatacaattttatgagtttgtctcaccatataattatattgtatgtgtgtaattaaaggtaatggagatatctcaattacattctccaattctcatatctcatgagaattagatgtacactacaaaaaacaattacttttagtgacaattttttagtcacaatataatttttttgtgattaaa

SEQ ID NO: 361266 - DNA, 568 bp, Cannabis indica
tggttcagcctcttgaccgacctatgtcacctcaggttctcttagagctgggtcttagatgcggatacttggctgagtggccggttgaacgtattgttcgtccaaaccccttcttctgttcaaatcattcttgagatcatgggctgtacccaatctgttgaatactgaagcaccagatgggctcagtgattaactggtttggctggtgggttggccagaattgtcagtttggatggacttattaggtataactccacctaaagaatggtcagatagggtctggtcgtctactgcttggcccacaagtgggacctgtgactggggattggacggctgaccattgagtttaggcggtatgcccactaggaatttcttcggtactgcccagtgggatactggacgtagtagctggttactaattagcaacttgatagacttttcatatcagtatggtagacttttcgtatctgtcaactgtggcttactctgatcaaccaagcctctgcgagttttcaccaccattttgtgtgtctgttgaacttaagacaaagaacaaacttggattttt

SEQ ID NO: 361267 - DNA, 545 bp, Cannabis indica
ctgtcattatgaaggcttgggatccaaatctcaatctaaagaaggaggatattaggattgtgcctatatggattcagctagaagatctagaattgaaatattgggggcaaaaatctttgtttaagatagtggggcaactaggaaaaccaattatggaagatgcaataacaaaagaaagggataagcttacttttcctagagtgctaatagaagtatcaatgcagcaagagttccctgatttgatttattttgataatgagcatggtaatgaggtttcggtggcagtcaaatatgagtggaaacccatagtttgcaagcattgtcaaggcatggggcatgcttcagaggactgtagaaggaaagaggggaagaggcaagaatgggtagtaaaagataagagtaagacaagtgaaatgggagctaaattgcagaagcataatggtgattttcaaccagtgacaaaaggttggaaaccaaaaataaagaggctgcacctgatacgcatttatctaacacttttaaagctcttgagctgaatgatgata

SEQ ID NO: 361268 - DNA, 755 bp, Cannabis indica
gatcagtattgcaacggttaagagatcacaagctgtacactaagttcaaaaagtgtgaactctggttatctcgtgtctctttcttagggcacatagtagaaaagatgggatcatggttgatccgaccaagattgaacctgtttgggattggcaaacaccaaaatcagctactaaagtttgaagctttttaggtttagctgggtattatcgtcagttcattgagggtatctcaaagattgtagtacccttaacggagctgacccgaaagaacctaaaatttgtttggactgatcggtgtgagaaaagttttctacagttaaagcagcgcttcattactgctccagtgttcactcttccgtcagataagtaaaagtttggtgtttattatgatgcctcgagacagggtctgggctgtgttcatatgcaagctggaaaggtaatagcctatgcttctcgatagttaaaggagtacgagcaaaggtatcctactcacgacttagaactcgcagcactagtatttgcactaaagatttggcagcattacttatatggcgtgaaatgtgagatatacactgttcataaaagtttgaaatacttcttcacccagagagacctaaacatgagacagagacgttggctagagttggtgaatgattataattgtgaaatccattatcaccctgggaaggcaaacgttgttgccgatgccctgagtagaaaaggttagagtctgataaataacagtgaagcaaatc

SEQ ID NO: 361269 - DNA, 526 bp, Cannabis indica
taaacttaatttaaaattaatactaaaaataacctaacaggaccctccaatttttcccataatcaaagttaatgttgatggaccactttttactaatgagagaaactttggtgttggcttggtttctcggtttgcgactagtatggtcattcaagccaagacattgaagaaggttggggcatattgcaacctctcacgaggttgaagccattggaataaaagaggttttgagttggattaaagataatggatggccaagtgtgattgtggagtcagattgccttagagttgtttcggatttacaaaagaataaaagtatggcctctccttatggccatataatttcagattgtaaagctttgtttgtcgatggttataatgtctcttttaattttgtgaagcgacctgctaataaggttgcgcatgtgttggcgccaggggcggacccacattaaggcgaggtggggcagtggctcccctgaaaaaaaaaaatcgagaaaaaaaatatatatgcattttagttagt

SEQ ID NO: 361270 - DNA, 332 bp, Cannabis indica
tcattatattttatttaattttattataaaacaagtaaaatgattaataacaatcaataataaatacaaattaaatatctttcactatttttattttaatgattagaaaactaaaaataaaataaaaagtcttttattctattatataaaaagaatgaatgaagtttaatttgtatttatttatcaattactatttattattttattttattcatttaataataaaattgaatgcaatttgatcactactgtaaaagttgtatttcgatgaaaatattattaacaagttatatactatatatagggtacaatttggtagtgtaaaaagttca

SEQ ID NO: 361271 - DNA, 608 bp, Cannabis indica
tacagggatttggggggaaatgtcatcccgattttttcccaccaaatgtggcatttctacgtagctaatattagcatcatgtggtagtacaactcaccaacaagaaggcaaagtcatcaactcagcacttaaaccaatgaggggtcctggcactcaaacaggatgacaaatgacggaccaaccacctcaaggaggctggccgatcatccgtggccagccctatggccagcataggtcggctagcctacatcctgcaaatgcatagccagccaggcattggcctaggaagactttggtgaacaacttcatgcgtaatcaccaagctagactgggaattgggccttaatagcctacgaaaatagagagaaaatatctattttaaggggcattttagtcatttgtattttactaatttaatatgcaatatctacttattttacctaataaaaggattgaagctttcctatataaagggccttaactaaaccctaaaaccctaagctctaaatcactaagactgaactctaagtctgaactctctctctctgtaaagcccgcatagttaatttggaaattatcagttaattatgattatttatgaaattatt

SEQ ID NO: 361272 - DNA, 522 bp, Cannabis indica
tcactttttggcacaccattggagtagtactttttgttaaatgagctatattttagcttttcaccacttatttacacctccattggatattctcttatacctatcaaagtaaaagatgttaacttttaggtaaaagtttacaattttactatcacatgagattttttacaaaaatattatctttttattaaacaacataaaataacaaaactgaataattaaaacaatagtgaaataactaaaaataaccgtggaataacattaaaaacttaacacagtataaaactttcatagtatttttgaaattttattgccttatagtaaaaaagttcaaaattttagtttgtcgtgtaaaaatcttcagtaaaaatgtagatatttactaacacagtcctgtaatttgatgctatttacgataatttgccatgaaattttttgagaaaattacattgtatacccattttattttacttgctttagttcttacctctattttcaaattttttaagatatacccacttt

SEQ ID NO: 361273 - DNA, 774 bp, Cannabis indica
tttattgtatcactttcaaataacatagaaaaaagctagcataaaatttagtatacgtgcctcgcacgtaatttttgctagtacactattataaatatcgaaaataaggaaggagtactataaaattgcaccctctaaaatattataaatataaatattaatagtattacctattaatgggtacgtaataaataaatttaactgtaaatattaattttaaaaatattaaaccattagatcttggtccgatagctaataataaaagaaaaatttgaatttctatacttaattaatttagctacttaattaaaaaatatatatataaaaaaatatgtcttttttacactatataatgtttatatgtaaaatattaaaattgaattcaactttttttttattttttgccaaaaaactttctttttatatttttttttcagttgatggaccaatctcagcccatataatgtaaaaataaaaaaattttctaattaaataaaaaaattaataataaaaactaaaaattttctaatattacccattaataatactcattaaaagtgcaccctatatatacacatgtacttgccaagaaatatgctaatgaacatgccaagtacttcaaagaaatgacatagtgatttaatttaataaatactaagtaattataaattatttataacattgtcatatcgataagctgttgagtactttaaggtatttaatagtaatactaccaatataccaatatataggtaatagtaaacttattactat

SEQ ID NO: 361274 - DNA, 550 bp, Cannabis indica
aaaatattatatattaatatataattaattaatttttttaaaaaaaaaaattactttgccgacgcagtaaggtgcccaaaaatgtatgcgccaatgctcagattggcgcaaataattttgccggcgcatctatagtgctggcaaaactattggcgccaatctgaggactggcaccaacagttttgccggtgcactattgcgccggcaaaaggttatcaaagcaggttcatagcggataaggagatcttttaacaccggggtttcccttttaccggtgtgatttctcgctagtaaaatacagatttaccggtgcatttagtctacgcgccggtaaaaagtcttttaccgacaaagattcacagacatgctttgtcggtgcagtattgtgccggcaaagctttaacggcgcattcagtgtacttttgccggcgcataaagtacagtttcttgtagtgcttgttaaatattcaattaattattttaagaaaataattaattataattaattgattttaaaaaaggaagttttacctattggtaacctgctatt

SEQ ID NO: 361275 - DNA, 662 bp, Cannabis indica
tctctctctctctctctttgtgagccacatagtgatgtaacgattgctcacacaaaactgttacaatatctagatcactgaggaagactacgtagaaattggtgctttgattcaggttctatggagattcaaattcaatgattgataatactctggcataaaaatgaacaaatgttagaacattaaatgaaaggagttatattttgttgtgctacaaccactataaatattctgaaattcatatataattccaaaaaaaaaatgttataaataattattatttatgttaaataataatttacatgaaaaataataaaatattgtaattatattctaaacactaccctctaattcaaattttgttaagttagtttctcggaagcgatttggaactcaattgcttaagtgtaagatattttctaaaggcgatatgttatgttatgttacgtgtcttgtctttggttatgttatgtctcttcctataaatggtttgttctataggagtaatgttgctaatttggtttttactcctccattgtaatcagtggttgttgttatattattttataatataataagtgtagattaaaatgtagtaatatatattattatgtgaataatatgtattaggtgtttggtaaataaattgtgtaacatataat

SEQ ID NO: 361276 - DNA, 517 bp, Cannabis indica
gctacagtgcttttaacaattacagtgctgtcattgctaatcaaagatttttctcgaaaaacgtgtcaaactaaaacttttataataaatattaaactttataatttgcataacaatttacaaacaccgggatcctgattctaaacttttatacaaaatatgccaaaatacaataaccagatcgcacaacgactacaaaatatatccccagttgtcccgagacctaacactccaggtcacactgccacgccatgtacaatctcatcctagctcaggctcactcctgctcagctttggcctttcctttatttacacatgaaagcagaactgtgagtcgacaaactcagtaagaaaagtatataacatatcatataataccgacttgtatctaggcgcccatacacctatttacaaggcttaacagatgagtaagaacgttcaatactagggtataggcactataccacatacactatgtacctcactgtacgagtgttggtagggtttgtttcgtacc

SEQ ID NO: 361277 - DNA, 691 bp, Cannabis indica
atattcttttatttttaagtatattctgttaaaccaagaattgccgttagataggtacttttaatatataaagatatatatgacattgctgtatatattgtaattacaataaacatctcacttgttcttaatttttttaaataaataaaattcaaaattatatgttgcatgctcctaattattttggtatgacatcacatatatatatataaatatataaatatatatatatattaagtattttgtcttgtttttttttttaaattttgaatcattaattacaatgtactaccgaaaataagtttagggtttagggttttttacattttctctccatatacaccgaaaatagtgttggaaatttataggtgcttcaatagaaagaccaaagtcaaaatacaactcaaaatgaaaagtacaagaacaataatattgataaaataatgttacaactctagacaaaatatacacataagtatagaaaataagatgaagagaagattataaaacacaatataaatagtagtatatatatagatgtgagaacaatctcaacaacactaacaccaagtgtcaagtaggggaatcacaaaacttgaacaaggttttacacctttgtccaaaagcttatttccccctaccacaagcacttagggaagaaagaaatggaaatagctttctggaattatca

SEQ ID NO: 361278 - DNA, 790 bp, Cannabis indica
atactgtcaggcagtattttttacttttttactgtattttttataagtttcatactgcagtatactgtgttaagtttttactggtgttctacgggtgttttactgctattttgagttaaactgctttgtgttttactggtgttttataaaaacaaagcatttttgaaaaaaaaaagtgtgtgatagtatttttgtaaaagttaacccaaattccagtattttgtaagtttcgctatgaatttgtgaaataatccttaaatatttttgacatagtacataccggatgatttggcgcctatttattaatgtctaattttatggaaaattttataatatcatatgttcttgatagggacaaaaatataatcttacatagtttgaatacataagtaacatcaactttggtgattaaaattaaactatatgtagaagtaattaagagagattgataaaaaaagaaaattttatttatacttcaaaaaattttaaacgcactccattttaataattttaagtttagataaaatttatatctttagttgcgctaaattttttcaacatttttcttacaattcatattcttaaaaaatatacctatcaaacaaaattaaattatattttaaatattaagacaaaaaaattaaaataaaaaattatatgaaatttttctagacaaaaaaataaatatatatatatgagttagaaaaaattatgaaaataaaatcaaaatatgtattgaaattaacataaaataatgtaaggaaatttttttaaaaaaaacattaagagt

SEQ ID NO: 361279 - DNA, 812 bp, Cannabis indica
tgcattttccagcaaggatcttcttgattttgaggtgcttaaactctaggtaatttcttgtagctttttctttggttttcttgagtttttagggaaaaggatgaagttgcatgcttaatttggttgtcttgctgctgttagttgttgctgttgtttttgtgattaagatgttgaattaagtgagttagataggttgaaatgcatgctagttacccttgttctagtttgagaatttttggttcaaaagctatggtttttcaaagtgaaaatgtgagttttgttgctgtgtttgttgggatcgatttcctgtgttttttgcagtttctatatgcatgattatgtagttttaatcaagttttgatgcatgtttattagatttaaccaagtttgagttttgaactcaaagcttggagctttaatgttggattttgattttatgcatgaagctttgttttatcacttggaaaatgtttattggggtctaattagcaggtctggaaagtttggttgagtttggaaacgttttggttggagaattgatttttgtgggttttctgggtaaaaccggctaactggttttacactgcttgtaaaaccggttacccggattttgcagtagggtgtgaaaccggtttttctcaacttgtcgtttcgtgctagtttcgggttttcaggcagattgttccctgctagtttggggtatttttgtattaagttacagtaggttaagtttggtttttaaacctttgtcccggttgtgatttagcgtgtcacttatcggtgttgtgatttttacggtttaggagcctgta

SEQ ID NO: 361280 - DNA, 741 bp, Cannabis indica
gtaatgggttttatttagggcacaaaactcaacagggacaacccggaaccagtgcaatagcccctgctgaacaataacgaagacagacctacttagaaattgcatgtaaatgggtcggctatagaccaacttttcggtgcgggaatcgcccttgtcacacctagggggaaacttctacatgggacaatcaaatttggatttaaagtttccaataacaaggcagagtatgaagccctcattgctggcttaaaacttgcttgggagctgcatgctgaatacattgaggtctgtagtgatttgcaattggtagtgaatcatgtttcaaaagagtaagaggcccagggagagaaaatgatggcttatctaaccaagatacaagattttctcgcacaattcaagggttacactctcaggtaaatcccaagagaagaaaacacaactgctgatgccttagcccggattgcgagcagcacagtaacagataaggccaatctgttccctattcaattctttgaagaaactatcatcaattgtgcggaagaaatcgaaatgataggcacaaactcgtaactccctttgggatgaaatttagagtcgatagaatcataattgtgattgaagtgtgagacatgacttgatatagcattgaaatagcttcgaaatcaagttgaatcgcatcaatcgaatcaatattgagtgagttatggtcattttactgaaggctatccagggctttgcgct

SEQ ID NO: 361281 - DNA, 665 bp, Cannabis indica
atgtactcagcctccatggtagagtctgatattgcgggttgcttagcgctactcaaaacaactgctccaccccaagagtaaaaaccatcccaaatgtacactttttatcatcaagacaagcctggaaatctgagtcggtatagcctacaggatttaaagtaccacccttgtagactaacacataatggctagactcccaactactgaggcataagaaacccttctcatgtcctctatctcttgaggctcagtgggacactattccttagatagacggataccaaatctagaaggcatctatgcccctttggtatttgtcattgataatctctctaacaccttataaatgtaagattttagtgagagagcaagggatctgttcttccggtttttaataatctgaataccaagaacataagcagcttcacccatatctgtcatttcaaattgagtgtcaagcttccttgatgtcagtcattttcttgatattgttacaaataatcaaactgtcatcaacatgaaggaccaggaatactaccacttgattatccttgagttggtaaacacaaggttcatctttattttggtgaaaaccgtaggtcttgattatttcatcaaactttcttttctggccctcgaagaacatagccttctggttgctccat

SEQ ID NO: 361282 - DNA, 780 bp, Cannabis indica
agagagagagaagagtaacaaaatcaatcatattttctctctactttgttatgccttttttgtctgttaattgctctcttcaactcttgttatttataatattatatatccctatattgttgggttttgtgccataaataaaactcattttaaaataatcaaatttactaatcaataaaagatcaaaaattattttatgttacatggttcacatgatttacttcatgattatgtttattgtataaattgtattaagtctagagcatatatatatgctcgggattatagtatcatcaggacagtagaatataatcatgattatatgttcaatagttcaattctcatgatttgtgagttcattagatttagaatgacatgataattagcgacaaggtataattacaccttggatcagcgttatgtcctttttagggcattggtaaagtttactagtatcagatgtatggagtatacattggaagggaccgatattgatcttagataagatatcataaacataccgttatatctttctaagtcaatatcaatagtttatcttaggtctatggatcttaatcctgatatgattaggttgatcttagttgtattattgatattcttcaagttgttcgtggaacctaaccaatggttgttgcagatatttacatcttaggaacatggtagttcaattgagtggcagcgttgatcatagataaggaatctatagcttctataagtatttagaagtgaaacaatgatttccatcgagcttggttgaat

SEQ ID NO: 361283 - DNA, 744 bp, Cannabis indica
acactaacactatgcatagctaattgcctaatcgtattttgaagtgttggtgtgaatgactattttatattaaaaatgcagaatattaaaaatgctctccaggagcacacttatttgaagtaatagagcttggctctcgagtggcattgttgttcgacaatactgttatctgttactatggacccttctaaagtttgtgatctgtttgaagatgctgttcagatttcccaagaagatatcacatttgcccttaacccaggggaagtggatgaacccgaagaggccaatcaagtcctactaggcaagatcattagtcgacaccggttcggaaaatcagccatacagggttccctaaagctgtcgtggaatgccattaagggctggaaatggaaagacattggagatggtattattcaatttactttcagtcgcagagaggatgcactaaatgtccttgctcgtagaccatggttcatttgtggcgcactaatagtgatcatgccctggccggcatggttatctccggctgaagttagatttgataagacgccaatatgggtacacattgaaagcatccccccattttattggaatttatctaaccttaaagaacttgcctcgaaggcttcccctgtttttgaacttccccctggtgttgaagatgcagtcggtatgagtacgctccgtttcagagccacaatagacattacctgtaacaccttaactatcttaggcgtattacgt

SEQ ID NO: 361284 - DNA, 588 bp, Cannabis indica
tacatcttggtggttcccggatgcaacgaataaggtgtggtgtgggcttcatcgaggatttattatgaacacaaactcgagctttatgtagtaacatttcattattcgagattgaaaagtccttaggccaaccggccaatacctcatctcgaattttgattagctcaggatcttccaattgtgcccttctaattctttctaacaaatcagattgaagtgtccggttgtgtaactttccaactacaaattcgattccaacatgaaccatttctgaggctagtagaggagctatcatcatagaggtgaaaacctgcccgggaactcttctacttagagcatctgccacaatattggctttctcggggtgatataaaatctcgcagtcgtaatctttgactaattccagccaccgtctctacctcatattcaaatctttcttggtgaaaaagtacttgagacttttataatcagtgtaaatctctcatttttcaccataaaggtagtgtcgccatatttttagagcaaataccacagcagcaagctctaaatcatgcgtcggatagcactgctcatactccttcagttgac

SEQ ID NO: 361285 - DNA, 619 bp, Cannabis indica
tggttatcgattagttctcaaagcagatgttgcaaggtcagggatgacctttctcgaatgctattcgataggtttttgaagccaatatttatcgatatgatatcgatgatatgtcgatagttttatataatgtctcaactgcctcaatgtcatgttatgacattatttttctcgaatggttattgataagttttcgaaaggttctcgaagaagatgttccaaggtcagggatgacctttcttgaatgctattcgatagatttttaataggctcttgaagccaatctttatcgatatgtcgacaattttgttgagtgtctcaaatgcctcaatgtcatgacattatatcgatatattatcgacactttgtcgatttttctcactactcgaaatcatgacacttcttatcgatgggatatcaatgagatgtcgataggttgtcgattatattaaatttctctatttttagtttttatatttttttggtattgttccctaacgaaccttttgttgtttcaaattacaggatcgattgtgtttcttgttatatcgtacgatggtgtttggtgtgttgagggttttaataggtttataaagttgaaggcagtttgacgttaaca

SEQ ID NO: 361286 - DNA, 823 bp, Cannabis indica
tcctgctacagaggctagacatgagttgttagcagagagatttcggaaacaacacccacctgagtttgagggaggcatagacccggtagtggctgaggagtggataagtcgcatagaaagcattttgcagatgctaagggtggatgggaatgaccgagtgaagtgtgcatcttacatgctgaggaaagatgctcgtatctggtgggaggtggtggaacaaacaaaggatgtagataccatgaactgggacgatttcaaaagggtctttaatgagaagtattataactcagcagttctagcagcaaaggtcgatgaatttactgggttagtccaagggagtcttactgtgactgagtatgcacaaaaatttgatagattggcgaaatttgctccagatctggtacctactgatagagtgcgagcacatcgatttgtggaaggcctgaaaccaatggttgctcgagatgtggaaattgtgtcaaggggtcaattcagttatgctcaagttgtcgaaatggctcttacggctgagcggagtgaaaacaaaatttggaaggaaaatgctgccaggagagaatctaagaaaggtggagccaattctaatgaccacaagaaacggggacaggaccagtccgggcagccaagtcaagacaagaggtacaaaagtgataacgaccaacgatttaatggcagcagtgggcgaaacattccagaatgccctaaatgtaccaaacgtcatctcggcgagtgtcgcgcaaaagcatgctacaaatgtggaaaagaaggacacatcaaacgcaattgcccactgtggggacagact

SEQ ID NO: 361287 - DNA, 826 bp, Cannabis indica
tgtccagccataaggccttttttaagacaaagtgaccggccaagcggtctttaaacttagaattattttttatttttcagacaacaggctaaccgggcagcgtttaatcctggttctacatgcttttgttatatttaaagaatttcatcctttgtttataatcatcatgcaactgtgtttgttttattattaccaaataatttgtacaggtataggtgtcccctaagtgacttagcagatttatgactcttggtcacttataattttttgcaattatgctcttttgtctgttcataattttgggctcaaccaaaccttttgtacgcactggatggtaaattaacaacatgatagtaaattcgactcaatttgaattttcaaataaacatctttaatcatttactgatcaaaaatgtgtctgttatcgtagtaacttacatcaaagctattaatttgatctaatctgatctttagcttaacatgaaataaaacaaattgtagaaattaaaaattgtactttagattgttgtcatctgacctgagtactttgtaattttatccgaacctttgggcgtggtccgcccagaaggccattcacttaagagtaaatgttcttttgtttagtacttgatatggtcatccgacctggtacttctattggtagtattttcttaaatgttccccattccaataccttggtaccagaacgagttgtattttttcatcatacttacccaatttgtatgctcctgattcgagaacttcaaccacctgatatggtccttccctgttaggtccgagtacacctgccgtactgtctttggtg

SEQ ID NO: 361288 - DNA, 565 bp, Cannabis indica
tactcactctctataaataaaggaagttcttctctattggcttaacctttacaagccttagagacttttgtttcagttgctttcagatagtgcttagtattgataggttcatacaatcatagaattatagaggaatgatgaaaaattattcatccaaactaatttgttatctattatgagtgtgcgagttgctaattcatgtataaccacattagccaaatgaagaacatatattagacatgcttcaaaaaaattggacaataaactagcaagataatctaataaagagccaatctcattacaaaaagaagatcttctagagaaaaaactaaaatcaatgctaagccatcaaattcaaacgaactaatagataatccaagagtaagtgactgtttaacgcccaaatgtgacttccactagcggtggttgtagtatagatcaggcggtcgattccacaggaaggtgattatggacaaaagcgttagtagaaaaataaaaacaaaggttaataataagtgataatagtaaccaatgattttgtgatttttaatttgataataaatat

SEQ ID NO: 361289 - DNA, 661 bp, Cannabis indica
tttttttttttttaaattgatagataattttattattattatttttccaatggaaaatgacaaataatttgggtgaatagatttatgtttattcttattacatataagtaattactgggtgaatcattattttttggtatttcttataataaatttaaaatttcatcatcacaacgtggctccagccatgcctcaacttatagttgtgttttttacaaagttaagaaactaagtatataaagccaaaagtaaaagacaaaacaaattaattatttatatagaaaaagaaacaaagaaacaaaatatgactttgacaatcataattcatatagaaaatggtatcctttaaataaaaaaaaaaaaaaaaaagttttaccaagaggtttaattatgagaaataattccttaaaaaaatatgacaaattaatttcttacaaaataaaaaaaaaatacaatataataatcgatttcgaaagtaaaaacaccaactaataaataattatatagatcggaattactttatatattatttttaattttttttcttgtcattttaattgttatgtgaattgctatataaatttaaattgtgatttaagtaatcatgttagttgcaatgtgagttattatataaattttcgtaaatatcaaaaaaaaaaaa

SEQ ID NO: 361290 - DNA, 522 bp, Cannabis indica
attaagaaaatgactgacattaaggaatggcttaacactcgattcaaaatgaaagatttgggagaagctggttatgttcttggtattcaaatcattacaaaatggaagaacaaatcacttgctttctcgcaagtagctcacaatgataagctgctagagcgattctcaatgactaacaccagaggggaaattatgccttccaggcctagcatccgtctatctaaggagcagtgtcccactgatccccaagagatagaagatatgagaaaggttctttaggcttcagcagttggaagtctaatgtaggctatattattcactagaccagacattttctatgtagtaagaattgtgagcaagtatcagacaaacctaggagaggaacattggactgtagttaagcatattatgaaatatttgtaacagtacaaggaattttgtgttagtctacaagggtggtgctttaaatcccataggctacactgattcagatttccaggcaagtcttgaagacaggaaatc

SEQ ID NO: 361291 - DNA, 792 bp, Cannabis indica
taaaaagtattgttaggtgatacttgaagataattttatttcaatgatcttgaattattgttagatgatttgacaaattttttatccaaattttaagagtgttcctaatttatgtttattggacaaccaatatagttatatatgaattagctgtacatgctcttcaaattgaattgatgaacgattgtttaattagacaatttttctagttatctttggaatggttagtttatttatttatattggaaaaaaagaataatttcattaaaaaggcataaagctaaagaaaagagatcaatacaagaataaatcaactagagtaaattgaacaagaaaaaccggccaccaataataccatacttatttcaatcattcctcatatttaagacagaatttactaaggtgtgtttgaaagtaactgtgtaattactaagtagggtaattactagggtagtaattacacagtttagtaattacactatattttaaaatgcaaagtgtattgggatatgatgtgataattatatatgaattcctaatatcttgtttggcaaaatagttagtaattacatgaaaaataatattttttagtagctaatgtttaatatggaaagtttttagtaattacacagtgtaattacatccaattctcatgggggcatgagaatttgagagtgtaattagaacccctcaattacttctaattacacagttacagtgtaattacatggtcagacaaacatgccaaattgtgtaattacattcaattacacacaaatccaattacattgt

SEQ ID NO: 361292 - DNA, 924 bp, Cannabis indica
gactactaactgtcacaaaaagtgtactgaaatatgtctttagaggtcgactgtatccttacccatgaatttataagggcattttcaaaataaaagatgaacaatcaaccaataggattataacacaaaaagaataccaatactagttgggaaaacgcctaatacaattacgtatggaaaaagatcataaggtgaatagattctttcaatgaatcgggttctatatattcaaaataacattgtcaatattgatattattattatcatgtattgtctaattcgatcaatattgtgtacccttatattctttctcattattacatgttctatatgcacaaaacaatcgtcaactagttcttcactgcatcttttttccgcatataataatacatgcacttctagatcgatactccatgcatgatgttgcaaactagcacggcatagtaccaaaaaaatgggtccaaaagcacatcacattaaaaattcttaaaattttgaattctaattaattttttatatgattatacgagtaaagtattgttaaaaaattgtataaaaaataattgaaaccataaaaaatacatataatttagtgattaattcattaattgtaaaagatagtagaaaagtagagctcaaattcgagctcgtataaaaaaacaagctgacctatttataaaaatgggacggcccaagtaaatcatgacacgaaaatatgagtttaacagactatgacaaacctaccttttaaaatgttgccctgacatagtatgatttatatttatgggttagcacgcactacaaaaaatagttacttttagtgacaattttttagtcacaacataaatcttttatgactaaatgtgacttttggttacaacaaaaaactacttgtgactaaaacatagtatttagacacaagtt

SEQ ID NO: 361293 - DNA, 783 bp, Cannabis indica
attcgggtctaggtctgatttggagtgcgggtcctggtccggttacgattctggatctatgtccaaattcagttatgattcaaagtccaactcctagttccagtctcggtcaacttttgcttttggttccaattttgggtcacagtgtacgggttcgggtccacttttgagttcgggattgagttcaagtcccagtctgagttttggttcaggtctggatttcagtctagttccatatcaggctctgggtgtgggttcgcatcgggggtcttggtctaggttaggtccgagtccatggctgcaatcaagatctgagtctggaatcagttttttggtctaagtccttggttctgatcctggtctgggttcgagtttgtgtccgggtccgggtctagctttaggtttgattctaggtgtgggtttgagttgggtctgagtctgtgtttgtgtttgtgtgcaggtcttgaccccgatctgggtgttggttcgggtccaggtccaagttcaggtcccgagcgttggtccaagtttgggtttgggtgaggatctccgtccagatctaggtccaacatttcaatcctagtctggttcttggtccgagtccaggttcgtattcggatccctatctaggtccaagtctgtgtttgggatcgggtcccagatttaggtccaggttcaggtctcagttctggtctgggtacacgaccgtgtccaggccctagttccagtctcagtttgggtctgaggctaggtctgttttcggttctaggtcttgcatcgggt

SEQ ID NO: 361294 - DNA, 545 bp, Cannabis indica
ttatcacaaactgactacttgaagaaaacacttgaaaagtttgggatggaaaactcaaaggttgtatctacacccctagctcctcacttcaagctttcccacagaatccccaaactaatgctgaaaagaagctcatggagcaagtgccatacaccagcattattgggagcttgatgtattccatggtctactctagaccagacctagcccatgctctaagtgtagtgagcagactcatggcaaaccaagaaatgctcactggacaactgttaaatggatactcagatatatcaaaggcacactaaacatggggatagtctacaacaaccaaacagaagctactgaagaaattgcaggatatgttgacaatgattatgctaccaattagacacaaggagatctctaactggactggtgttcactgtttttggtggagcagtcagctagaaataaaacatgcaaaagatagtagctctttcaacaactgaagtagagtacataatagctgatgaagccttcaaagaagcactctggttgaaaggttt

SEQ ID NO: 361295 - DNA, 238 bp, Cannabis indica
tgctcgatcactacactactgatatctctcccatgcaaagcagtgtcatatataactaattaattattgttttatactaaataataattatttaattattattaattattaattattattttagtattaattattaattattgttttaatttttattgttttattaattattaattatgttttttagtaattattaatttttattgtttattaattattagttatgtttttttagtaa

SEQ ID NO: 361296 - DNA, 445 bp, Cannabis indica
atcaccaagatctgagcctgattctccttcttgttatttggattcttcacagtcttacatactatgattgaggaccaacttgttatgtgtaggcatgtactcaatcactaatgataattttggtttgtgaagaaaggctacggtgttttcgaattagaagaagaagaaggaagatgtctcataaacctagagagaaaactaggtttttagctttagaggcattagttggataatgagaccatagccttccttttatactaatttcgactagggttagggttgaattatttggaataaaaattgataaaaatagagtaaaattggcacctagtggccgcccacatgggccgtacactagtttgatttttgcccattttctcaactattttatctattttcacaaataccactttttgcaacttcagctataaatgccaaaactatt

SEQ ID NO: 361297 - DNA, 754 bp, Cannabis indica
acaacaggctgaccgggcagcttataatcccggtattacatgcttttgttatccttaatgaattgcattctctctttataattgtagtgcaattgtggttgttttatttttaccaagtgctttgtacaggtataggcgccccacaagtgactgagcagacgtatgactcttggtcacttgtcttttacaagtatattgttcatctgttcggtattttgggtttgaccaaaccttttgtacgcactgaatggtaaaagaaacatcttgataatttcagctcaatctgaattttgaaataactatctttattcatttattgatcaaaaagtatatttgttaccatagtaacttacatcagagctatttgatctaatctaatcttttagcttaacatgagataaaacatattgcagacataagaaactgtactttaaaatggtcacctgacctgagtactttgtttcttttatcgaaaactttgagcgtaggcctcccagcaagccatttacttaaaagtaataaaacctagccatacttacctaatttgtatgctccggagtcgagaacttcaaccacttgctatggtcctcaccagttaggtccaagtacacctgccgtactgtctttggtgtttaggaatacccttctcaggaccatatttcgcacaaagaatttccgagccttcacttgtttgttcaaatatcgagctactttttgttgatgggccatcaactttaagtttgcagttgctcgt

SEQ ID NO: 361298 - DNA, 597 bp, Cannabis indica
atagttttttaaatttctccttttctttctcgtttcctactaatataatattttatgaaagtaattttgtaaataaagtgtcaatttatatttttcatgtaataattctaaaataataatagaaatattttttcaaatatataaaaaaataaggggaattaccccatttactaaatatttttcaaactttttttttttcttttcaaatttacggtttgagtttctaaagtagttgcagcgttagttgcaatagggggtttccatacaagaagccacttttttgtcctgtgattggaaggtgagttttgtcaaccttgctttataaagtgatgatatcaagtccaaattcaaacttaagaccttctcacctatcatattctctttctctctctatctcttaatcaatatatatacacctatatagatacaccaatatatatataattatataatataattcttcttatatataacaatttcaaaccctccacatgtagtattatagtaatagaccgaaaccccctcaccacacaattatttcttctctctctctctctctcattacctttcctttcttcttctttcttcatcttcttc

SEQ ID NO: 361299 - DNA, 693 bp, Cannabis indica
aattttttttaatatttaaagaatttttttttatttttaaaataactaattttttaaaaatatttatttacgtggaccaataaaattgtgttacttgtacactgtgtatacgtagacattccaccatggctaaaaacaactaaaaatggatggaaatgttaaactgctaacagaacacaagtttatgggattttaccaccaaaattttagaattgggatttagttgcaaaaacctgaccacttaagggtgtgatgccgcaaataactctaataaataatatccaaataaaaagttattgttctttgtcaaataaaaatatgcataataaatagatgaaaagttttgcactagaaaatatgaatgatctcgattaccgttaaatctcatccaaatttaatctcaacctaagggcaagttgtcatctggttgataggagacaacaacctgatagagaaacttgttggatacatattgttgcccctgatttttcccaatatacgttgaccaaccgactaaggacacgtggatcaagcaatgtacaatccaaaatatttgctaagtccttatgctgtaaggtagcttccaggacgtagctcccggagaaagcatacggaaccccatatgctcccggaagctcgaagtaacgttaaggcatctccgggacgtgtcaggtttctcctgagcaatcaagt

SEQ ID NO: 361300 - DNA, 566 bp, Cannabis indica
ctttatcaccctggtaaggccaacgtggttgataacgccttcagtagaaaaggtcagagtcagatgaatactatgaagcaaatctcccaacagctagctaatgaaatgactcgagctaagattgagttggttgtggggaaattggctaatattaccctgcaatccactcttttagaaagaattaaagaagaacaaaagcaagattcagaattgataaaaacccgagctagggtttcggctgggaaggctagtgatttctcaatggatgaaacgggaatgttaagattcgggaaacgagtttgtgtacccatggatgagaacatcaagaaagagatcatggatgagtctcatacgactccttattctgttcatccgggtcatcaaaaatgtatcaagacccgaaagccatattctggtggccaggcatgaaaaatgatattgctgaatatgttgtaaagtgccttatgtgtcagcaagtgaaggctgaacatcagcgacctgcagggttgctacaaccactgaagataccggagtggaaatggaaagatattgctatggactttgtg

SEQ ID NO: 361301 - DNA, 575 bp, Cannabis indica
ctccgcttgtgcctccctctgcctggccttggcaagggcctcccggcgctcggcatcctcctggtaaattcgcctttcagcagtcaaatcctgaaggatcttcatgacttcgtccatgcccccaaagtcagacaggacgaagccatggttaattaagttcttggaaaggcggccagcctcggcagcaagctggaaaaggatacaagcatgagtaagaatccttaagagaaaatgatgagaaaaaaaataaactacgacgtacttaccacagtgagggagtggctgagatcctggacttggaagatggagttcaaggatgcacaagcagcgaactgcttgggtgcaaaccgggtaagctgagacgcaaactcgccggtcatctccgtggcaaagggagctagagtgggcccgaggaaacgaccgaaccaatccgatagggggtccaagtttagatcccacggattctggtagttcggatcgtcaagggtattttgcatttcaactcacaaaaccctcctcaaagcctccacgttagcatgcccccgggagtactcgtccatggcgtagttgtgttt

SEQ ID NO: 361302 - DNA, 513 bp, Cannabis indica
ggcacatctgattgtcaaaagaggggtggttaaatctctggattatgcaatttaatacaagtgtacacgtacggagtatcgttaaatatcaaccttattcatcaatcctgtttttccaaaaaaacaaatgtactgcggtactgttctaacgtatgacgatggtttaattcataagaagatgtaggtcaagggcccattaatatcagcccaacgtatataaatgggagcaactacccattctactaaaaaatgtcattgctttaaccaaaaaaaatgatccttacttttcaatctttattttccacataaaaaaaatgtactattatttttttctgacgtacgaaatggtttaattcattaaacaaggttggtaaaggcccattcatataagcccaacaattttaaatgttaccaccaacccatacaactcaacaaaatttctaaaccctgaactcatacaataaccttattttccaattaatttattcaaaattaaatgtaattgtactattt

SEQ ID NO: 361303 - DNA, 602 bp, Cannabis indica
cagttattcttttgggatcaattcaaatataactattcatgaaacgtgaacaatccccacgtttcatttaatcacatgtgcgataatatctaataactacccaaccaccatctgtttttatcctttagacagctattgctgacttggaagatggtatctcgcctaaccagagttatcctccttgtccatcttagtaaggaaaaaatactaagtgttggcaagtagttcgcctcgttaagtctcttcatttgagttaatattgcaagatgactgtctcgctatatgtaatctgaggttaccgtatgtgattgtatttattctactcgaacaaataaatatcttctttttgactatgttttccgaggtagacgcatgtctcgccaatatcagttcaatagtttttatcattatctcgcttaagactattgtaacaccctaactagcataggcatgttgacgtgatttttaatgtactgtgcagctcgttgctaatcaacgaggttaatgaaaaacgtgattaattaaaattttgcttatttaatttaatacttgtaatatagcatacaaaatactttggaatcccatttacaaaacactttaca

SEQ ID NO: 361304 - DNA, 347 bp, Cannabis indica
ctaagatcctagtaaaataattttcaacaactgttgctggtagcagtgtgtgttgggagaagccgcctgctgggatgttgaaaataaatactgatggggcgatttttgttgcaacgactcaatatggtacgtgtatggtcattagagattgtcatgggaagctaatcgaagctagctcttctctgcatcctggggtttgtcagccagctgttgctgaagctttgagtgtcaaggaggctctcagttgattgaagaggaggaactgggcgaatgtactgatcgagacagactgcatcgctgttgttcaagctattaatagctcggttgcacttccatctgtttttggt

SEQ ID NO: 361305 - DNA, 679 bp, Cannabis indica
aaatgtaaattttttgcttaacataatttttggcacgcccagtgggacccattctccttttcatctccaaatatgatgaatattattcaactttaactttatggtgctaatcatgtttactgttttcaggaaaaaatggcaccacaagtcacggtttacttccacaagttaccaacaacctcttctgcccaaggagggaaaaagaaccgctttttagcagcattctctattgatcgagcacccatttcatgcagggttcccgaaccaataaagaatgtgaagacaactataccagctagaaaggctggaagaggaaaaggtgtgaagaatgtccctaagactgcacaggccttgagaggcaaggcaacaaagggctttaaaaagtggcaggcccgggcaatgaaaaggtctgcggcaaaaattgccaagacagaagggaggccaacgaagattggctccctcgtaatgatccaggaatgggaccgtatctccattggtttcgttcctattttcttgcccgctgtcgcctcagtgatggttacctctacggaggaaactgaggcaagatcgacttctcaacctcagagaggtaggaaggcaacaaaagggaggagggggacaaacacttaccttcaccaaaccctcttgaaaacgagggaattagtaggaggcaccccga

SEQ ID NO: 361306 - DNA, 537 bp, Cannabis indica
atcaatataaattttcacaacaattttttgcgccgttgccggggactttaagttctaaattttgttttatcaactaattgacattctaataatttttgtgcttttaatcttgctggtttgttctttgaaatctcaggtatctatagtgtatgaaccaacaagaggactttgaacttgctcctattgaccccgagattgaacgcacattccgaagaagaagaagggttcaaaaggctaagggccgagacatcatggctgagaatcttgatgatgatgggattgcccaacaaattgttaatcccatcatattggcagatgatcgagcaagggctataggggagtatgctgctcccatgtttaatgagctcaatccaggcattgtgaggcctgaaatacaagcaccgcagtttgagctcaagccagtgatgttccaaatgctccaaaccgtggggcaattcagcgggatgccaactgaagatcctcacctccatctccgttcatttttggaggtgagtgattctttcaagatccaaggag

SEQ ID NO: 361307 - DNA, 786 bp, Cannabis indica
agatcctggtaaaataaattccaacaataggcacctctcttattaagccttgagtccacctaaccgttatacttactttgtacattatacgctaagtgtagcgagttgcaagtgtactcagttacttacgcaattaatgagttattccattaaaagtgatatcatcaatccaaattccccttaacttgacatgtgtcctctatttgaatggtagccgaatttcgggtagaacaattgccccttaaaaagttcttttttaattaaaagtgctatttaataattacagagggcattttcgtgataatccctttttggaaaaatgcgtcctttaattttgatggttgtacggttttgggggtcattatgaactgtcttttaatcttttgcctcactcccaaccattgatttcccaacctttagcctttccgtttattgggttctgagtataaaatggtggtcgaggcttgccatgttccatacgctcctggtttttgatgagtttcatcctgaaatcggattcttattctattgctaagatgtcccatccgagttcagaaacttatccctccgatttcgtaacaccagaatgcaccaaccacttttcctctctctacgttgccacgaacttcaaaccccaatttaaattggaaatgaaggattccaagtagggatgtcaatggggcgggtcggatctgatccgactatgattcgacctgatccaaatcatgtacggatctgccccgccccgccccgctggatcaagtattcagatcggatcagatccga

SEQ ID NO: 361308 - DNA, 576 bp, Cannabis indica
ctaatataattactgaaatgaatctcaatcacttatctctaataagccaaactcaaaagaaatcatctttttacttctaaatactttcagaagctatagattccatatctatgattagctctcccatgaactaccatgtccttaatctgtatgtcacgagtagatctaattggtcgactttaacgaacaaatcgaagaacatatataatacaattaagcagaacccaaccatatcaggattaagatctatagacctaagatcaaccggtgatattgatttagaaagatataatggtaagtttatgatatcttatcctagatctatatcggtccaatataatgtatactccatacatccgatactggtatactttgccatgttcctagtaaggacataacacttatccaaggtgtaagtataccttatcgatgattatcatgtcactctaaatccagtgtactgacaaatcatgagacttaaaattttgaacatataatcataattatatgtcactatgttggcgacactataatcatgaataaatatatatttttggacttaataaaatttataca

SEQ ID NO: 361309 - DNA, 831 bp, Cannabis indica
ggggattgggcagctgaccatttagggtttgagaagcgttcacggctggatcttcgtctgacttgcccagggggatgatggttgcaggtcgttgattggtagcctgatagactctttgtatcaacaaggtggcctgtcttgtcggccgtcaatggctgcatgctgagccctcaacctttcaacctctttatccctccatttagcgaacagacgccttggctcttcaaatgcgagattcaccgcagcacggaattcctcctgatcatgatgaaaggtgttggtatgaccttgcatgatttcaagagtagcacgaaggttcgggatctcggtgtcatctccaatcattgtttgaatatttgttgcgagcggaacttcagttttgggaatgccctgattggctgctgaactagtatttccagtctcttgaacaccaggcgggattccactgaaaggagtttgtcacaccttgacctacagttgaaggcttttcaggattcgtggctggtggaacccttgcattccctagattctgcagtgcaggatctactgccagtggatttgctggatcaattacgcctctacgagtctgtacaactatgatttgaagtaaagagcaagtttgtgattctagctctcaatgaaagcaccaaaatgttgacctcgctttttgccaacgatactgagtcttaattgtaagcgacaagtagtataatatagatgcaatatagtgaaataaataaagacacatagtttttatagaggtttggccccgagcagttaggtaatagcctactccccttgatttctattgacttaagaataaagaatgca

SEQ ID NO: 361310 - DNA, 982 bp, Cannabis indica
ctaacatcccctctcaaacgcaaaggggaattcatgtctccaactttgtcgatgaggaaatggaaccgtgagcttgtcaagcctttggtcaaacaatctgccacttgatctgaggatggtatgtatctcacttctagttcttttctaagcactttatctcgaacaaagtgtatatcaatctcaatgtgttttgtccttgcatgaaaaacaggattagaagcaagggcacttgctcctaagttgtcgcaccaggtaacaacagttttaaggggaaagccaatttcttttagcaatgattcaatccatgagattttagccgagacatgaggtaaagcacgatactcagactcggtacttgatcttgacacaacatgttgctttttggaggaccaagagacaagtgtgttgccaagataaacacaatatcctgcaacagactttcgatcatcagggcagcaagcccaatctgtgtctgagaacccagtaatgtcgagttgagaatcacagcttatgtgaagacctttgttcatgcttcctttgagatacctcagaacacgttttgcaccactctagtgtgctgtcgtgggagcctttaggaactgactcaatttattgacagcataggcaatatccggacgagtgtgacaaagatattgcagccttccaatgatgcttttgtaagttgtgatgtctctcaacggttcaccatcattctgggacatcggttttcctgctatagctggtgtagggcacgacttcaggttgataaactttgttctttttagtaagtcttcaatgtatttggtctgtgttaagaaaagacctgtttcgtccctgtaaacttcaattcccagaaaataatgtaaggaaccgagatctttcaatgtaaattttctgttcagttcagcattaaaattattcactttcttgctattgttcccggttactattatatcatccaaatgttggaatttattttacc

SEQ ID NO: 361311 - DNA, 585 bp, Cannabis indica
actcttatgtgtttatttcattgttttagaattcatattaggatgttaataaaacatacatggtaataaatctagatcctggtaaaatatttccaacaaatattctattacatttaacgatattaatatgatttattttataaatatataaaaatattaatattatttttttaaaattaatttaaatatatataattattaatattatttgttttaggttaattcaacttatatcaatttttagattaatttaaatatatattaatattgatatattctttgtaacattattattttttttattgttatttttaatatcgagagtatgtttaattttaatattcttaaattttatatttatttttgtcaaatttttaaaactttaaatattattttttaaaaaaataaaaaattaataagtagtttctttaattaataaaattttaaagatatacataacaaaactaaaaattaaaaatataactaaatattcacacattttagtaattgggtttgttagagaatattaacccagattctgttagttaattttgttctgcaagttgttagtgttgggttttatgc

SEQ ID NO: 361312 - DNA, 680 bp, Cannabis indica
gtattcgtcacttctacttcaacaacttttcaacatttaacaagtatttcaagttttttaagttcttatatttaatatagattagtttatcatcattctttcacattatttttttttattatattgtgtagtaatagagttttatttttattttgtaggttttttttttgtggaagacctacaaatacagagaatttacccataactttaattttaaatataatgtcttagaaattttattgattttagtttcttattaatgttaagctactgatatgggttgtgtgttaatttttaagtttgtatattgatttttttgagattgtcattctaatataattgtattttttggtttggtgctgcaatattttttcaaattcactagctttggagccaactattaataataggaaggtattttttcaatgtgatgtggtgttattttgaaaacgttataactttattgaataaatttttgggggcaaatttatcccatatgactcgggataagaattctgcagcacatgatttggcaaagcatgcccttcggttagacaatgagctatcttggttcgagaaagtgtcgtcgtcaattgtggattgctgctttattaatcttgtgtgatttttgatcaccgcgtccaaaaaaatatacatatatatatatataaaagtttaat

SEQ ID NO: 361313 - DNA, 875 bp, Cannabis indica
ccaccttttgtcttacctttatagtttctgacttgttttatgatcacttctaatttgaagtttgcgagtcttgaagttttcagtcattttaagaaagaatcacgataaaggtttatgaatatccagagttgattgaaatggataccgatacttgaattttttttttaaggagttgttattatacattttatcaagttttgctctatcacagaatgcttttaaaataggccgaataactgattatttgaagttaaactacttataatcaataacaaatcaaagctcttcttgaaaatggttgcgttacttacattttctgtatagagaaactaatcatgtagttatcttttagttaattacgctttgactaacaaaatgaaaaaaaagaaaaaaacatataatcaacgtacaatcttgtatagaaagttggaaggttatatgtacaaggatacacaccaagttaagttttacaataaattaaaaattaatcctattaattaataaaaattatcacaactattatattcaactaataatttaaataaacttagtaattaaattaaagataatgatacaataaaatagataaaactctagtaattgaattaaagataataatacaataaaatagataaaactctataaattaaaatattatattgtaattacataaatattatattactagagaataaacattagaaagaaattacattaaaataatttatgtattcatatttaaatttacaaaaaaaaaatatattataaagtgtttttacaatgcatttctttaacagaaagtttgaattttatttttggcatgttaaatttttttaaattttttaaaaattgacaggatgtcttaaataactata

SEQ ID NO: 361314 - DNA, 769 bp, Cannabis indica
gaattacaggctcctaaatcacaccaatcacagtagtggtaagtgacacgctaaatcactttctggggacttaaacttgaaactaaaagtttccatatcgataaataacatggcaataccctaaacaacacaaaaatgggaaaaactaaggttctcgaaattgccccaaccggtagaccggttgccaatcggaatttcggttttgaagggtttcttggggaccaacccgaattccagttcctacaggcccctctgaaccggaattccgatttagtgcaggaatgactaaaaattccatatctcaaccaaaacaaccccgatccacaagaaaccttccagacctgctctaagcatcctagagaccattttccaagcaacaaaacacaactacaagcacaggaacaaaacttgccattaaagagccaagcttgagttctaaaactcaaagcttgctcaaacatcaaaccagccaacacaacaagcctaaaacaacatatctaagcataattcatccacagaaaacaacaacaaacactagcagcaactacaacaacaaatctcacaaagcatgcataataccatagcttaaaacccaagaaatcaaaaaggaagttactagagactataccttggcttggatcacctaagacttgctgaagaataatcccaaaccctagctggttctagggatttcgagagagagaaggagagagttgagtttgagagaaaatgtaatttttggtttaaccttttatttttttttttaaaa

SEQ ID NO: 361315 - DNA, 681 bp, Cannabis indica
tctatataattgagagtgctatttaattccaaatctatagcggcgcaaggcagaattaataagttaaagaattttcttgttaaattctagatctacttattgaaagctcggttatataggcccatggtcccctcactagttgagataatattgtttgcagacttagttaattagttttaattaatcaattataattccaaaattagactatatcttatttatgaattttcattaagcaatggcttaattgtaaaaaaaacgaggctttggggttaatttattaattaagagactttgtatggtgtaattaataaataatataaatcacaattttatttaataattaattataattactaaataaatagttttagcatttataagattgaattaaaaaaatagagtattattgaaagaagaataattggctgaaataaagtggcaaaattgtaactaaagtttagtgcatttatggccagccctaagtgtgatttttgcctaatattttattcttttttaatccatataatttagccctaagccataattgaaacactataaaaggaacatgatgctctcactcatccacttgatgccttcaaccaaatcaaacctagttttctctgtcagacaactagtagatgagagggttccttctatagtgattttagcctccttcat

SEQ ID NO: 361316 - DNA, 535 bp, Cannabis indica
tggatggtatataacatgtagtaactagtaagcaatatgatctatattcatggaacattatgtagaaactattagatgtaatgttaggtatgcatggaacattgctttcagtcttatgtatatacatatgacttaaatatatatatatatatatatatatatatatataaatgctggcctggggggcaatagtctacgtctgcccctgcctatatgcaattatgcatggaacattgctttcagtctttattattttggtgagcgttgctttgagtgtctataatttcttattttactttttcttagatatgtatgcatggggcaaatcatgatcactactatcttgtggctaaatataattcattatcaaaattaataataattaacatccatctcaaaactaacactactacaatgttagcctttagagactgttttttcacccctatttataaaaagggaagctaaagggtgtgaaaatacccgctttgatcgaaattgacatttagaggcggttttttgataaaaaccgtag

SEQ ID NO: 361317 - DNA, 1540 bp, Cannabis indica
acaatggattaggcgaatctgttctcacagcatgactcgcacaagggggtacaaccccaacccaaatggcactagctttgttaatcaaagcttcattggctaatacatgagcaacctgatttgcttccctataaacaaaagaaatccctctaacccttacattttgcattaaacttttaatatgagcaacaattccatcaacatccctgcagccttcttcttcctgcatcaccaacttcacagcttggaggcaatccgattccacagaaaaagccggcagagaacactgcagcccagcttgtaacccacctgctatggcctgcaattcggcctgaagaggtgtcatttcctgcaacataacagttgcagcagccgattgaacaactccggcatgatcacgcacaaccaaactaatacttgctgcacctgctccctgtttcacaccagcatctacatttactttgaagacatccgctgctggtggtatccaacgagcattctctctacagacccggtctctgttaggtgtagtactatgacgaaattcactaagaaacttactgcaccactccaaaatagcattcggttgaggcttttgacccccatgattgacggagttgcgaacataccacagattccatgaaagaaccaagaaaaattcaaattcttctttagtaaaagtggctgagatgcgcattagaaaggctaatacatcctcccttccaagcctttgaattttcccatagaacccagctgaagtccaaacctcacggttcacccgacagctccaaagtgcatgaaaaacattctcataagcaccaatagaacaccggctacagtaaggctcaacttgaatgtttcggtgagcaagagccgcattagttggaatccaagaatgagccatcttccaaacaaaatgctttaccttcggaggaattttgagcttccaaagaaacttccaccatttctcagctggtgcagtatctgactgtacatctttgacctgcaaggcagccgccattcgataaccactacggaccgagtactctccattactactataatgccataagattttatcctcaatatcccactccgatgtaggcatttgaagaatgagatccgcatctgttggattgaagacagctctaataaactccgcatcccaagcaccattcggtttcttcaaatcaacgacatagagttgctctggcaaaggcggtttatcatatactttaaaagtgagaggcctaggtagccaagggtcttctagaacccgaactgaatcaccattaccaattcgccaccgatagccgttctgaataatctttttccccaaaccaaacttcgccaaacaaggaagcatgattcccacacctcgcctccaatacaccactctgaggatagtaactagctttcaaaaccttgctacacaagaatttggaaaccttatacatctccaaatttgctttgcaaggagagcttgattaaataacccaaatctctgaatcctaagccaccttgctcctattttttacac

SEQ ID NO: 361318 - DNA, 563 bp, Cannabis indica
aaaacaaaaaacaactaacgtcggtaagtttgaataaccgataacatctcacttgcatcacttaactacaaaatttaaagataaataatatattaattaaagttatcatcatatgcattcttaataataataataataataataataataataataataataataataatgtatgacatatttatatagtttgtatgttatgtacatcggccaaaaagtgtttccgattcgaagcttgaattaaatctttcatcatcttcattacataatatccacattaatttggtgtcttccgattgatgtggatactaaagatttttctttaaattaataaaatcttaataaaatataattgaaaaacaaatgctccttgaccttacttaaattcaacttttttgcatttccacacttaacacatggacaaaaagtatcatttgggtctaccatattttccatacaaaatcttatgaagaattcgaccccatttctatactcctcagataacctatttgttgacatctattttttatccatatttttcttcctacatcatccgtataaaa

SEQ ID NO: 361319 - DNA, 868 bp, Cannabis indica
aggataacaagtgtttgtctctacaaatgcttccttccttgaagatgactatattaaagacttcaagcctaaaagtaaagtagtgttagaagaaatgctttcagatataactccttctaatgttccatcctattctacaaaagtagaggataatcccactccctcagttaaaccgacacaagttgttacaactgagaaacctaccacaaatgttcatgtccagaaggtcacgactgttgggcattgtgcccttaataaaactctatttcaatgtaatcttttcaattcaattatcgatatagaaacaaatttaatttcattacttgtgttatttggttcatgtgatcatctatttacttatttttttaataaattcatccaaacccttatcacatggatattcttgtttattgtgttgtcaacacagtggaaagtaaacaagattgtgtgattaaatgtattcttagatttatcagtacatagggtttaactgatatgataatctacaacgtagtttacttgcaccttagataagtgctatgtcctttccaaggcattggttaaagtaagcttgggttggatgtatggagtatacatcggaagggaccgatattgaatttggattagatatgataatcttaccgtaaaatctattcaattcaatatcacctagttgatcttagatcaaatgatcttaatcctgacatggttaggttcgatctcaagagtgttatttgtgttctttgatttgttagttaagcctacctttgggtatgggtattacatacattttggaaacatgctagtacaattgagtgggagcgctaatcataaatacgtaatactatagcttctatccagacataga

SEQ ID NO: 361320 - DNA, 634 bp, Cannabis indica
attgttgcaagctatgcagttgggttggattgatgttttgtgtgatatatttttttttttcataacataaatatcatgttttaaaaattagaataattagcatatttgctccctgaactttcgacactacttagttttgccctttaaaatatatgtcttgttaaaaattctccctaaaatataacatttacataattataccccttctgttaagttcagttatctttaccgttaaaaattagcatttttactccctaaactttgattaatatgaaattttgccccttttatttaaaaaataattttaaaaattataatattctatttttttggcaattataatattctattaatttttaaaaaataataaaaattattaaaaaaacttgacaaaaatattaaattaattaaaaaatattaattttacttaaaaaaaattatattattcttaaaaaatatttttaaactttattttatttataaacacgtatcttaaaaaatcaaacaaaaattattgacaatctaataaattatttaaataaactaagattttttgaagaataaaaaatcaaacttatttatatttataaattcatatcttaataaataaagaaaaataattaaaaattcaata

SEQ ID NO: 361321 - DNA, 703 bp, Cannabis indica
agtatttacaatatgaaacaggaagtttatataaataagaataactttgactctcacctaccgggacattgttggattcttattttaatcaaaattatcttttatttttcctcttagcttatttattttgaattagcttaaataatatatcattggatgaatggtttatcaatcatttgcatataatgtcattcaattttcttaattttaagaaatttaatggcgaatatgattatattcccgacattctatcctgaaatgatataatcctcgatcttaaaatctcctacttatatatgcttactttaggaaaattagactgagagttagattagtagtggtggtccaagaaagaatcattactcatatatatttggtataaatttaagtctttgactttaaattttcgactccaaatagaaattttttatttctatttccagaatacaatacagttcaactttcacaagtcattaatatccattttctatcaatgggttcaaactgtatgttaaagaatggaatatgagtttagtattctgtgaccaggatccacttgcactattctaagaactccttgatgaaactagacccaagtaatcaaaagatcacaaccacatattttatatatctatggaattttatcttgttcatagtggttttgacaagatccttctctacaaagagtcaatatgcctatatc

SEQ ID NO: 361322 - DNA, 821 bp, Cannabis indica
tctcttaacttcactttttttttttttttttgcaaatttgagtcgcaagtgaaatatcaccgttaaatattaactggattatcattgtgtacacatgtgtatacgtgacatatttttattcactttgaagttttactgtcacatgtacacaggtgtacaatcctagttagcatttgatataagcgaataaaaattaaaatataaaaggtaatttataactaaatataatataaaaattgttattccaaataattattgcaaaattattaactaaaaataaaaaattatgaaaataacctatcaacttaaattaatttatataaaaattcaatttagaaataattattacaaaaattacgactaaataattaataaaaaattaaaattttaaaataacttttcaaatttatacatagaatatataaataaaattacatactaatgtttaaaaaaaatataaactttatttatatactacgttaagcactataaaataaattttaaacaatgtggacttttgttttccattacatgtgaaaaaaaataagtgaagtacataatatatatatatattttttataaagatgaaacactctcaaaattagaaaaatagattatgaatactatagaattccacatcagcactctaacatataactttacgctaattagtaattccccccgcctcccgaactttgacgtgtaccaaatcatgccacctgaacttttttggccgttaaaaattccccctgaactattgagattgttagatttaaggagttttgtctagttttagtaaaaaaatttaacatggatgaaag

SEQ ID NO: 361323 - DNA, 556 bp, Cannabis indica
gtggaaaagaagtggatttctactaaacaaggttcacatgcccatgaggaagcagctttggtctcaagtgaaagtgaagaagaagagcaagaagcccaagctcaaagcgaagaggaagcaaaagaagaagtgtcgccaatgccacaagtccctcactttaatatcgaaaaggcttttgctaaccttcacacctccattccttccaattttaacaccttgagaggtgaaatgaacactcaaattttactctctaaaatgagatggctaccataagaagcggcattgccactatgtagaatgacatggagtacgaatttactgatgctcaagaggagatggcacaatgaagggcttgcatggatcgatttggacctccaccaaattagctcccttgcatttgtttttagcatcttttctcatgtttatttgatttagtttatttgcgtaggcttagtgccttttagattttatgtgttagtttgttttgtttttattttggatgctatgtgtttgaatttttatagtgaatggtatgctttgttttatctttttattt

SEQ ID NO: 361324 - DNA, 759 bp, Cannabis indica
tgaaagtgcataagggaattaatgcgactatcttaattctcattccaaaggtgcccaatccaaagaaagtgactcacgtttagaccaatctccttgtgcaatgtggtttataaggtgatctccaagattattgccaacaaaataagaccgattctcccgagattgatatgtcccactcaggtggtgtttgtcctggggaggagcatcaatgataataatgttttggtccaggagatcattcactcctttaagctcaaaaaaggtaaagagggtttgttcgcaatcaaaattgacctggttaatgcatatgatatactcagttgggctttcattgatcatgttcttagcacctttaaagtcccaaacaagttctgctactgggtgcgccagtgcatttcgacaacaacctttaacttgcatcttaatgggggaaaagtatgcagtttaatgccggagtgtgggttaagatagggggatcccctttctccgtatttgtttatttgggctgcagaaattctctcccgcctgctggagagagccttggattcgagtaacttaaagggaattaagctaagtagaaatgggctgagactctctcacctattctttcctggtgatcttcatttttgtgggtagggcaaccattgtcgaggccaagggcttctggcagtgtttggagaagttctatgagtggtcaggacagcgtgtcaataagcttaagacctcgattttctttaacaaaaacaccagtgaaggtat

SEQ ID NO: 361325 - DNA, 515 bp, Cannabis indica
aaaataaaataaaaaataagaaattgaaatattattattttaaatattttttccttcaaaaagatatttttattttttgtaatatataataatataaaatatttttttaagtaaaaaataatttattttagtcttttaatcaaaacagctttttttaaaaattgggttgtacaaactttagcttttagctgtagcttcttcataaattcttcaaaaagctgtttttaactgtttaccaaacacttttttatcacatctattttaaaaagtaactttagctttttcaaaactagcccaaagagacttagctgaattatcccagcgttaaaccccttcagtctacgtgtctcaatccggttggtccacgtattttggacaaaatcaggggcaacgtttacccccaagccttgtttggtgaaaaactaaacaaggcttacttagatgcctccggttgccttattagcttcgtggcacgtgccttgggcgcgtggggatatattaatgaccatcattac

SEQ ID NO: 361326 - DNA, 712 bp, Cannabis indica
cccgttaaaaagatttcgtcctcgaaatctaacttgaataactctcgatacttgagccctcatgtcggactctaactcccaggtggcttcctccaccttactgtttttccagagcaccttgaccaaagctatggtcttgttctgaagtactttatcttttttgtttaagatctgaattggttgttcttcgtacgagagatctggttgtagctcaagattctcatatctcagcacatgtgtgggatctgaaacgtatttccatagcatagagacatgaaacatgttgtgaactgctaaaagtgttagaggcaaggctagacgatatgccaccagtccaactttcttgagaatttcgaaaggccctgtaaacttagggcacaacttgcctcttttcgcgacaagtcttatccccttcatcggagacacccgtacgaacacatgatctcctacctaaaattttccatttttgcgcttcagatttgcataactcttttgcctactctgagaggcaagcattctagccttaatcttttatatggcttcattagtccgttgcattgattccagaccaaggtctttcttttctcctgtttcatcctaatgaataggagatctgcacttcctgccatacaacaattcatagggagccatccctatagtactctggtagctcttattgtacgaaaactctatcagtgacaggtatttgctc

SEQ ID NO: 361327 - DNA, 535 bp, Cannabis indica
gtgaggatcttccgttggcaacccaccaaattgaccaaccatttggagcatttgaaacatgacggacttgagctcaaagtgaggtgcttggattttgggtctcacaatacccggatttaactcattgaacataagggctgcatactctcttattgctcgggctctatcatcggctaaagcaataggattggcttcattatgagcacccccaatttcaaacccatcggccatattgcagcgttttttggccttttgttccttcctcctttgtctgaaagtgcgttcaatttcggggtcaataggagtaagttcaaggtcttcttcttgctcgttcatgcactagattacacctgaaaaagaaaaattcagcgcaccaaataggattaaaactttaaaccagaaaataaattgcaaaatagttgataatacacaatttttagtttcaatccccggaaacggcactaaaaacttgttgtcaaaattatatacgcaagtatacgcagtcaaacaagtaataaagtgataagtaagatcg

SEQ ID NO: 361328 - DNA, 689 bp, Cannabis indica
aagctccaataaactaaattattatttattgagtcttaccgactaaataatttattgtttattaatttcataattactctactataaatatataattgcactcttagtaattatagaattatatatactgagtttaattgcagtgtccattgatataatcaattctagtgattagccctccttgtgtttgttcgtaataagttttggtcaaaatatcattttacccttctaattactttttttatcccttagttaattaatttcctagtggaagtttaattcaagatcctgtctgaatatgtgcacaacattccagttccagaattaacacttaaagagaaccaacattcgatccgttaggaaagttaggattctatgattgtacatcatgttcccagccatccatattattagattcccaaaatagaagttgtaagaatcatcctctctgagaaactttaacgagtgaatcaaacaaattaataacatgaacatgagttcatgataactcaggatttaggccgatctactattgatcatcattatgatatgaattaggtctttacgataaacgacatgatctgtattatatacagtaccttcacatagatgtctcactacatctgtaatgtgaaccaagattacttacaccaaagaatgggcatcatgttggaatatattttacgagg

SEQ ID NO: 361329 - DNA, 533 bp, Cannabis indica
tatataatgcaaaattcgaaaaaaaaatgttatttaaaataaatacaattttcaaaaatgctataaaataaaataaaataaatcttgaaaaattattctcatttatgttgatccaaagttaattaaaaattaattttcaacacaaatataattttcctatttaattaaatattaagaaaatttcaaatatttaagtatcatgatgaaaatcaacttagatattaattttcaatttaattaaatatcactagaaaaatacttcaagcaaacatacaatatgtaatatcctctttctcgaaagggtaattttataatttttttttccttttgtcggtactaatttgctaatttgcatattaagaaaatttattaaacatatgagagtttagtgacaaaaaaaataattttttgagttagaatattttttttttgcattgtatggaacgttgagtaaataattaactacttgtgataatttaattatttattttgtgcatattattattgtgggtataacaacaataattatgtga

SEQ ID NO: 361330 - DNA, 919 bp, Cannabis indica
ttttaactagtttttatataaattttaagtttttttttaaaaaaaaacaatgacttgaactaatttgacacttaaagtattagaaaataagagttaagtgtagtagttatgtctaattagatgattcttactctttttaattaactaagactatgtgtagtaataattttaaatataaagaatttttattacaaatattataataatttagtacaacaaaaattaattgctaaaagatccttacttagtaacaaattacaaaaaagttaattaataattattagtaatttaattttaattaaaattctataaggaaataaagaaagtagtaaatacaagttaattattattttaattatttatttattttattttattttctataatttaatcacaactatttattaataatcaaatgactacaaataaataaaaccatagtagttatgcatataacatgtttatttaaattgagcattggcaacatttaaaaaattagtctattacttgaaaaataaaatgaaagtcaaataagtttttaaattgtttttctatccaaaaaaaattacatagatctaggatcagtttggcatagctgtgctatggaaaaaacaattgtagctgtgttgtgagaaaaagcagctgcagcagaactatagaaaaaaagctgaactgagtatttggtaaattataaatttcaaagtattgtgagttttttaaaaatctattataataataaagataatgttataatttagtttattataatcacaaatatgtaaaaaacttattttacatcaaaatttattttctatatatttttatttttttttgcaaattataaatttatatccatttgataaaaaataatttatagtatttattattatattttatcaaataaaaaaaattagaaact

SEQ ID NO: 361331 - DNA, 629 bp, Cannabis indica
aataaagattcctctttttcaaaaaaaaacaatgttagaaagtacgttcttctttcgctctaaatctccatccacaatctgtatccttacatgtaacataccaaacagtagtacctgacttcctaacaaagtagtcaaaccctttcttcattgcatacaagctaacaaccatctttacatgctctttctctctaaaaaaaactttcctacatgtaactatttgcttagtgtgccacccatagctatataatgactatgatcctcgatgtcttctcttgtaaatattttctccttgaatttactataacttgttgaagaagaaaatggattgctaaatctagtctcaatggtccctctagcatcactaagaccactagcatcattggtctctctagcattactaggacctgtaccatcagtggtccctctagctttgctggttcttctagcatcactaggacctctagcattattggttttgtatggacgactactactagtaacaggtgtttggcaattatctctacggggcattcttttccgtgtcgatggcctaggtggtattggtacgatactggagtgaagtttaaagctacagcaatgggaacctctgtatcttggtcgtctct

SEQ ID NO: 361332 - DNA, 609 bp, Cannabis indica
tatttttgttacaatgataatgatagagacatgaaattttatgagaataggaattatactgttgagaaaaatttcaatgtcattgctcataagccatttggggtttataacatgttgaaagaaagataatgggtggatactttgatcggtgttgatggctatgtggatcaaattgtcaaggagttttatgctaatatcactgataagtgcctcgatggggactattttatgtttggcaaactttgtcagggaacactggtatttctttactgtaaaggaagtggctgaagctctaaatctgcctatgggaattgagccaactgatgtggaatttaatcgtcaaaaagtgttcgggtatctcactggtgataatgatgtggaactctccgacacaatgcatatgtctcaactcacctatcatcatgctgctcttatgaggtttgccctatccaattggtttctttgctcaaatccgataaatgtttcaaatgaaatttccttcttttgtgtaaagtttctattggtgctaaaatttatttggctgacatgatttgggagcaaatggtctctcttagaaagggcaagaaacctagacttaatcttattttt

SEQ ID NO: 361333 - DNA, 515 bp, Cannabis indica
atctaaaactaattttaattaatcaaaaaataataaaaattagttttattctgacaattagatttttaattgaaagtttagattctacacaaaattctaccaaaaattggcatttattcaatgaaaaacgatttttgaatcacaagttatgaagaaaacaagtttgaggcacaggggtatgcattgcatacatgcatacctctgcgtgcacggaaagcaggatgtggacgaggacagaggctgcaagcagcctcatttgaccgagggagctcggcgttgcagccttttagacaggagccgtgtccgagaatcctcggtcagccctgtttgaatggccgagcggatccaaggctcgtgcgcgcgcgcgtgttactcaaatcccgatattttcgttcaacttcaaaaaacccaaattaggttctgtaaaagcctaaatttattagttttttgtctctttccagttaaaatatttccacatcgaaataaaaaatatttcagtaacatacattgcgatt

SEQ ID NO: 361334 - DNA, 1412 bp, Cannabis indica
attatctatcatagtttgggccactattttgttggctatctgtacttccacgactaatggatcattgtgcgggaagtgaacattgatatcatcttcttcattgaatgttatagtgggttctcctacccgtggaattttttgcttcctttcctctacggtcgggaccacttctttttgctcgtgttgtaaggtttgggcataccactctcgagctttgcccgaatctccaactatatgcgggcccccgataatgacttgcaaatgcccatctactggtggaggtagtaacaagtcttggttattgtctgcctgagcggccctttgattctgattgtccttgatgtatttttgcacatgcgagttattttttcttatcagaaattcaatttctcgcttcatattgttgcattcattagtttcatggccataatctccatgaaaatggcaaaatttggacatgtcccatttacttatgtcctttttcatgggagcaggtttcttgtatgagactactgactgagtggccatgtagatggtctccaggtcgtcagtcagaacagagaaagcagtgaacttggaaggattctctttagttgtttgttcggcttttccggcgaactttcctttttttcccattgccttgtctgccattgttgttagatctgttaccgcctaaatttgaactcctagggtactgggggtttcggacagatgttccagctaaaggagcttgtggttggcccgacccaggctcgacatctacccgctgaatggcttcttcaagcttgataaaaccatctgctcagtcgaggaaatcactcatagagtctacaggactgcttttcttgatgtctttccacagctctccaagaatctcgatgccccccagtatggcagctaacttcccttcttcagttaaacgtgctacttttgtggcctccgtcatgaatctacttatgtaagctcagagaggctctcctggtctttgcttcactttgaccaggtcttctaaatgtaatgggagttgacgagaagaagagaatagtgcatgaaactccgagatgaaggctttccaagagttgaaccttcatggtgccaacttgaagtaccatcattgtacgacttctgaaagtgtggcaggaaaaactctgcaatgcacatctcctcgtaccccttgcaaatccatttgtatttcaaaatacttgacaggagataagggatcctctttccctgtatacatcttccaagttggcatcttgaacttgaggggtagttctagaacattgatctcaggagtaaatggggatccgcgtgctcggtccaactcgaaatcattgagcttttgaccagccaggccttgaaacatatttttagttcatccaactgtgtttgcacggatggatgaacttgtt

SEQ ID NO: 361335 - DNA, 525 bp, Cannabis indica
aaaaaacaaacaaaaaaaacaaagtatgaaagtcaagaagctgaaaaagaagtaaagcggagagtgactgtccgcccagaaagtcaaaagtccatcatcacctgacatcgactttatctcagccataacgaccttcccttttccaacatagggatgggatgaccgaataggagaaatgggctcccttatgtgaatgtcgtattccacgggcctgggcgtggccgggagtttcttcttcctcctcaatggagccacctgctcagcctcagcctcagcctcagcttcattttcaggattcatagactcctgagcatactgctctgcccgagcacctcccttcaacttcgcttcacgcttaagttgaataagctcattctccttatgagctcgttgaggccgagcagcagcagatttcctcttcttccctgtcacggacttagaagaaaagtcctctgggtagagcccgtactacagcagatttgcatcggaggtcaactggattatatccctgtcttccgccggcaa

SEQ ID NO: 361336 - DNA, 665 bp, Cannabis indica
gatgttaatgaaacatacttgttagtaaatctgaatcctggtaaaatatttccaacacgttgttgcttgttctaatgccctaatgcgatcctccatctgaggcgcacctgatgtttcagtagcagcgtatctcctctcaatcgcagctaccctggccaacaagttagcatagtcttaagccaacgtggcaacttgttattgtgatgctgttggccctgagttctgatgttggaagttagatccctgaccctctcgtccaggccatctagttcccctatgcgcttctcaagctcttgaattctttgggtattgctcaccattatgtcgtgttaccaagcttccctttctcttggctctgatatcaactgtcacgggccgcctatttggacactcccacgtaggcagaacgtgcgacacttgctggcacaccgagctagcaagtcagcctaaatgcagatgcagacaaacaagttcaaaggttaggcacggtacatgtctcgcacatgttgagtgcaaacaagaggcatgagcaagcaaacacaaagcatccccaaggaccaatctcacacaacccacaagcaaacatatagacaaatggcacgcaatggcccaacaaaggcaacaaacaggcatcacaaagaccatatagaagcatacacaagaag

SEQ ID NO: 361337 - DNA, 553 bp, Cannabis indica
tatatatatatatagtcttaattaaaaagttatagaataaataattaaaatcttgaaatatatatatatgtcttaattaatatgtatgaatcaattaattaatgtacgtgtgtatcaatctgcatactgcagaagataaatatataaatatatattttgtagcattctcttttatatttatgcagatgcaacttctcatactgcagaagataaatatatatatatatatatatatataaatatatatatatatatatacttcttgttgattaatgttatgataggtgaatatgtagttttgtctggctaatcatatttactcatttttggcagattttgagtgtctttggaaacataactgaaaatttgctttttacttttgaaaatttaaaaagtttttttttaacacgagtgaagatattttacattttgttatactcatattttgagaaaacaatatatatagttatgacacgcgtaaaagttggtagatgaagggttattaagctcatttcgaaaagccttatttcaaaagagttcccatgctttctct

SEQ ID NO: 361338 - DNA, 402 bp, Cannabis indica
gtcttttgactgatgtgactcttcacagtgtagccgtcaataaacttaaatgatcattactttgtagctgcagattgggggttgtgccatcagactttattgcgtgtagccgccccaacatgtttcctcccatgtggcattaaatgcgacttgattgcttaggggaagcctgacacctcgcggagatgccttagtattacttgggctttcgggagcgtctggggctccttatgtcttctctgggaggcatgtcccggatgctgccttattaaataaagacttagaaaataattcaaatgttaagctgtttgatccacgtgtcctcatccggttggtccacgtatattgggcaaaatcaggggcaacagtaatctaatcactttacagtgtagatcattcata

SEQ ID NO: 361339 - DNA, 608 bp, Cannabis indica
aaaaagtgttatcaaacgccacccaaattaaaaaatcagttttcctaccttcacctcatcctcaggcaaattagattttgatgcattatagatcctcttaagaaggtattggggtccaaaacctaaatttcttaataaatgatttgtgcttctcactaggcgaaggaataaaatcttcaacaacaagcagattaaacaaaaacaaaattaacgaaaaaaaaaacaattacatatcaaagcattaaaaatatataataaaaaacataacaaaacataaataaagaaaaaaaaaatagtttacaaaaaataaaaaagtaattttagagatattttttaaattacgtgatatttgcgtttgaaaaaaaaaaatccttcaaaaaatgatgtacaacatatgtaattaataaattgaaaaaaaaagtggtgatagatttagagttattatttttttaaaaaataaaattcaaaaaataaaaattaagaaaaaaataaatagatatctttatatattaaaagtatctatctaacggcatttcttggtttaatattctgttaaatttaacgatgttaatagtttgatctccgttaacaaataaacccaataatta

SEQ ID NO: 361340 - DNA, 762 bp, Cannabis indica
ttgtcctttagtggactttattttaacttaataatctgatttttatgtatataataggctgaatatagtatgtaatctaggaattttgtcattttatcaaaaatcaaaagaaaggaaaaaagccaaatcattttcaaagctttttctctatctctctctttcgtcccctttgatgcagtaagggtttgaggttttctttgtgaattcaagctgattttgagggaaagccaagttctaggtatagcttttgcaccatctctttagtttcttgtaatttaagaaagttattgttttgcatgcttggtgtttttgtggtttaatggctgtggttagttgttgttgcattcagaggtttatatatgtttatttgagtgaatttaaactgattttgttgttagatagttggatttaaccaagtgtaagctttgaactcaaaatcttgaatttcaatggtgaaatgttgaattagtttctgtgaatgttgtttgtgtttggggatgttttatgcatttatattatgcttaattgagtagattaaatcaggttttgatgcatgttagtggggtttaaccaagcttgagttttgaactcaaagcttggagctttaattgtagtttttgtaatttatgcataaagcttggtttttttgctttggaaatgttctttggggtctaaatagcaggcctggacagttttaggtggtttggggttgaattggttgagttatgaatttttgaaaaatttttgcactgaaccggaatt

SEQ ID NO: 361341 - DNA, 513 bp, Cannabis indica
taatttaagaaaaaataagaatgcaaattattccatgagtttgtcactcccattcttcaatctcaaattggtgtgggactcacacattttattctcgttgcttaaaaacaattctcattccctaatcccacaagtaaacactaattaattgaaaaaatattgaaaaagtatacacctttttgccaaaaaaaaagggattctggattgagtgagctctaggcgctcgcgttaaaaactagcttgatagccgatggattagctcttctattggttatccactcatgaaatgagactatctctaatagatggtgtaaatttgtgctaactttgtctcaaaaaatgtgttaattttatatttggactaaattttataatgagtaatttgcggcataacctccgtaagtgtctagtttattacaactaacccctaattctaaaattttagtggtaaaatcccttaaactcatgttctgttagcacttagccctttccattcatttttggcagttaact

SEQ ID NO: 361342 - DNA, 540 bp, Cannabis indica
tgatatacttttgaatgatttgagttaataaaattgcatatttctattaaaataataataataatttatattttagttttagctttttaatcattaaagttaaaatggtaaaaaatatttaatttgcattcatttattaactactatttactactttacttgcttcacgataaaattatatagtatataataaaaaaattacattattataaaagttatatttcataaatattattaacaaatcgtatactacaaaaatacaacttaataatataaaaaatcaataacaaaaaatactaattaagtatataaaactatacttaatcaataaaatacaatatatactttatggtaatgtttcacacgacttggtacttttttagcatttctccaataataaataaatgcaaatcctacacctatgaccattttattaaacttagatgagagttaattctcaaggcatcaaatgtttcattaagtcatgcatagttaaatgaatatcccttggttgcataaaaatattataatttttttctc

SEQ ID NO: 361343 - DNA, 508 bp, Cannabis indica
attatccaccactttatttatttcaagataaaatttaataaaatgtgatagaatgacttgtaaaatttatatttcttttttttttttttgtgaaacagtgtaaaatttatatttcaaaaagtattattaacaaaccgtatactatagaaagcacaactttttaatgtataagttcataaggcaaaaatagtaattattctttatatttttattatcctattttttttcaatttttaaaaacaaaaattcaaaaatatataattttaaaattttaaaattacaaaaataaattttacccagcaattaaagagaaaaaaaacagtataagaggaacaacacaaaaataatataaaaacaacaaaatatcaataaaattatatcaataaaaaataacttagcatttaatagttaaatttaactgacttcgcaaatttacaaacagaaatgaagttaaaaaagtaattcccaaatgaaaaaaaaaaataaaaataaaaaagaatataagaga

SEQ ID NO: 361344 - DNA, 562 bp, Cannabis indica
ctaatttatcagtcttttcttatatttaagtttgttgccagatccttaataattttactgatgctatttccaaatggtcacataatttaaaaccgttagtgcttttaagtttggggagctatcctttgtggtagctttagcttaattttgtttgaatgaatttgcacttggcaaaagagaaaaagaaagaaggggtactgaagagaatagccgcaaggccaaataaaaaatttgaatggtcttaattttatttttaaattgatgctcttaatactcaattaattttgaagtgaaactacatatcgtactatctgtcttactgattagtggttaaaaatacacttttatttatattaaatgataaaataaattgagttttaattgatatttttcacgaaattattgtaatatattttataaatgaaaatatttgattttgattcaatttatgtctttcttgtaggaattaaagtgtatttttgttgaaagaaagaggaaggagcaaaattgaaaagaaatgaagaaaaaaatgacatttttgttgaagtccaaagcaacccaa

SEQ ID NO: 361345 - DNA, 747 bp, Cannabis indica
aagatctaaaggcacagctcgcaaaacctcccgtacattctacacctctagacggcgaggagctggggatatacctaactgtcacggagcatgctgtaagtgccgtcctgatcagagaagagaacagcgtacagcacccagtctattacatcagtaaaagactcatcgaagccgaaggctgatatccgttgatagaaaagctcgcctgctgcctcattctagcaacaaggaagctgaggccttattttcaagttcatcttctttgggtatataccgaccaaccactacgacaaatattgcagatgcctctggacggttactcaagtgggcagtaattgggtcagtacgaaatcaacttccaatcccgaacagctatcaaaggccaagccttagccgactttgtggtggaatgcacagggaaaaaagaatacatactagaaagcaatcccgagctattacctcaactaagtaacaaagaagacaaaccgacctggaaactacatgtggatgggtcggcgacagatcaactatctagtgcaggaattacccttgtcacacctgggggcaacacctgcacgctgcagtcaagttcggattcaaggcctctaacaacgaagccgaatacgaggctctaattgctggacttaagctagcccaggaaatgaaggccgaacacattgagatctgcagtgattcacagctggtggtaaatcatgtatccggtgaatacgaggctcggggagaaaa

SEQ ID NO: 361346 - DNA, 1146 bp, Cannabis indica
agcgttcattcgatgggatattattgagatgcctctcgatagaagaagcagcacatgcacttcaagagactcatgccggtacatgtggcgcccatcaagctggcccaaaattgtcggctcaattaaagcggttgggttactattggcctactatggttcaagatgcaattaattttgctaaatgttgtaagtcatgccaattacatggagatttcatccaccaaccccctcaaccactccatccttctatactgtcatggcctttcgaaacatggggaatggacgtcattggtccttttacgccaccctcttccaaagcccataagtatattttggccatcacagattacttctctaaatgggctgaagccataccactaaaagaagtacgggcagaagatgtcgctgattttataaggacccacgtaatttatcgatacgggattccttcaaaaattatctccgacaatgccctttatttcaagtgtaaggcaatggtcaagttgatgaacaagtacaaattcaagcacagtttctcggctagttacaacccgtcttcaaatggtcaagcagaagcatttaacaaagtgttatgcaaaatcatgaagaagacagcgacaaagaataagagggattggcatgaacgcctcctagaagctttgtgggcatatagaaccactgtgaggactgcgactggttgcacaccttataacttggtgtttgggtctgaggcagtgttacctttggaggtacaaataccttcattaagaattgctactcaactaacaaacccagatgaaaatgtgcaagtccgtctagccgagcttgaagcattagatgaaaagcggcttgctattcaacaaaagctcgaaatttaccaagcccaggtagctggggcattcaacaagaaagttaaatttcgatctttttcggttggagatctagtgcttactgtgaaacgaccaattgtcataactagaaggatgaaaggcaaatttgaggcaaaatgggaaggaccttatgttgttactaaggtcttcctaagaggggcatatgaactttcaaattcagaaggccaacgcatttatccgtgtgttaatgggaagttcatcaaaaagttctacacttaaacaaaagggtatttac

SEQ ID NO: 361347 - DNA, 560 bp, Cannabis indica
ccgtagtacattaggttttttgggaaaacgggattgatgaataatgttgacatttgacaatactacgtacgcctacacgtgtatttaattgtgtaattcagaaatttaaccacccctcttttgacacatcagatgtgcccaatggagtacatcccaatagagtacagctaactaaaaaacgtactatagggttattctccacgacttatataacacacttgagacgttttccaatccagcatcaagtttatacagaaattaacttgtaatttagttattagcattacatatatcaagtatgaggagttcaggtgcacactgggttattttcaatggaccaaatgaaggtatctatagtaggtacgaagatgttgtaagtaaaaacactacttcttatgcgtcctaaaaataattcgttatgaatctttcattgaagctttctctgctttatgtctacatggagagacgggacaatgcttcactgggcagcaagttagagaactttgctgtgttaatgagtttccatgcatgtgggattctgatgatgataatgatgaaga

SEQ ID NO: 361348 - DNA, 503 bp, Cannabis indica
gccttccaccatgaagtactcgtcaacaaaacacccaatttcgctaattgccttatccctggtgcccatcaaccacttgaagtctagttgtgagaaatagaagtaccctgatctgccatgcttaggggtggacttcaaatcaaaaaaccagcttacctcatggggagagagcatatcacatttctgggaggcataaagaacgaagagggcagtcaaatacttaatgcccttgggagtaaattgggtcggacagaggcggaaaaagtctaccagattcctaaattataggtgcaaaggcaacaataccccttgctaggcatgagggcccgactaggcgcacattccccttttagagtttgtggctcgattattttgggcgggaatgtaacagtctgattcgcccaggtagccatcctggtcgagatcccgcaggcgcgccttagtaaccttggacggagggctcacccacctggcacccaaagtaccttgccttctatgaggaa

SEQ ID NO: 361349 - DNA, 465 bp, Cannabis indica
agtagaaatcgagtatctctacttggttaaggctgttccagcaaggaagaatgtggcaaggggattctattatctcggtgctcactctagcaagcctaaaattattgtggacctactaaacaaagtgtctttcaaagacgacttcttttggcaactggcctttccccaatcggcacaaccaccttttgtagaattcgtaagtgattgctttcttcatgttctattggattaatccttgtcttttcattttgaaatttctagctaatgtttcggttttttttcacaaccctctcgaaaagacctgtccctactcccgagatggtcagtcaacacagacgcttgctgactcttccccacggccttaggtcgtgcgacttccttctaaacgaggccaatctaagaacggtgggccttcttactgacaaggagtatacttgcgattacaagttgttggaaatattttac

SEQ ID NO: 361350 - DNA, 759 bp, Cannabis indica
aagtttaaagaccgcttggcggttcaccatgtctcataagagggcctacatgccaaatagacataaaaaaaaaggaaagatagtaaaaagaaggcaatcaaacaacaggagtcccaggctctttgtacgggtcaactaggtctaaaggagccagaggatcatcagtctaggcggaaggagcctcaacactctggtcggtaggagaggtggaagtggtcgcctcaagattcccgtaggccgcttgtgtagtgtagtagtcaagaaacatgtctttggaagtgtcgagagattcaaagtttgccttgggatttgccttccaaaagtaataaaaaatcttgagaccagctatctctatggcattaaacttctccccgagcttcttcacctcaaatttcttgctcttaacctcagccttaagttcctcctccctagtcttcttgtccttggccccatcctccaacctgcggagaagagtttgaaaaccctctctttcgccttgaagagtggcaacatcccgagacaaagaagcataatctacctagagctactcggttgatggcatctcctgcagttccctggtcagctcggcaactatggtctcaacagctagaagtttcttgttgacttccccaagttctgtccacagagtctcaagctcagtctgcacatcttcagcttcctttttggccaagtccgcatccctttgcagtgtgttggaagtggcaagattcttgacagcagccgacttagcttgagaat

SEQ ID NO: 361351 - DNA, 1191 bp, Cannabis indica
ctattggcgtcatccagttcgaggatgtatcaatcattttaatctcttccgtcccagtgatgctaggttcttcaagaaactgaataggaatcaaatttgctctatcatttacattgctgctcgcaagtcgagctaatgcatcaacaatcgtgttttcttctcttggaatttgtttgagagcatagcttttaaattgtgcaagaaaattgtgtattttactcaaatacgctatcacttttttcccctcgagcctcgtattctccaggtacatgatttaccaccgactgtgaatcactgcagatcccaatgtgctcggccttcatttcttgggctagttttaaaccagcaatcaaagcttcatattcgacctcattattggatgccttaaatccaaatttgactgcagcgtgtaggtgttgccccaaggtgtgacaagggcgattcctgcactggatagttgatctgtagccgactcgtccacatgtagtttccaagtcgacttgtcttcactgttacttggctgaggtatttgttttagctcggggttgtttttgatacgctttcttccttacttgtacattcaactacaaaatcagctaaagcctgacctttaattgttgttcggggttgaaaggtgatctcgtactgacccaatcctactgtccacttgagtagccgtccagaggcatacagttttagcaatatttggtgcaacggttggtcaatgtatacccgaacaggataagcttgaaaatagggtcttagctttgttgttgctaggatcaggcagtaagtgagctttcctatcagtggatatcggccttcagcctcaacgagtcttttactgatgtaatagaccgggtgttggatgttgttttcctcttggatcagtacgacacttaaatcatgctccatgacagccaggtatatcccaagttcttctccatccagaggttttgagagtacgggagattttgcgagttgcatttttagctcttgaaaagatttttcacattcttccgtccactcaaattgtttatttccacgcatgatgttgaagaatggaacacacttgtctgttgattttgaaacaaatctgttgagtgcggcaatccgaccagtcaaactttgaacttccttggttcttgttggcgatttcatatccaagagggcttgaatcttctctggatt

SEQ ID NO: 361352 - DNA, 394 bp, Cannabis indica
ttacagaatctttaatcaatggttgctagtatggttcactaatgaccgctcttcagtgcaattaatcttggttcagattacggatgtagtgagacatcaaagtgaagatactgtatataatagaaattatacatgacaatgactgatatgaatataattgtctttattaacatgccttttatcataaagacttaattcatatcataacgataatcaatactagattcacctaaatcttgagttatcatgaactcctgttcatgtacaattataaaatcttgactttcctaacgaatcgaatgttgtttccgtttaagtgttaattctggaactggataaagaagtaaattaatgaaactaaaggataaagaagtaattgttggaaatattttac

SEQ ID NO: 361353 - DNA, 554 bp, Cannabis indica
aaaggagtgagaggtttcattttaaaaattattaaagttcagtacaagttgaaagatcataatatttctcctcttgactcttacatcattcatcgagcttttcatgcatcttctcattatgtctctcaacttaagcccaacaaaggataaagaaaatatgaaaagaagcaagcacagtcatggcctaagggatctcaagaagataaatcagagggagtcaaatgcttacagtgggcacttatattggagttgacgttatttatgttggaacattaattcttgaattacagtttagttttcagattgttttgaatagtactttcttgattcctacttttaaagtaattcagtttcgcttccgcttttagttaaacaatgattttcttttcgttttgccaattatagtgttgacattatgtttgacttcgaataattggaaactgtttttactctgatattcttttcaaattatcattgacttcattagcttcctttttcaatgttctgaatattgtgggcaagaaatctcatattaagataacatccttattatt

SEQ ID NO: 361354 - DNA, 557 bp, Cannabis indica
gggatatgctattcagatggcaattgacatttaaattttgttccatctaaatctgtccctaagacacctttagaattatggaatggtcgtatacctagtttacaccattacaaaatctgggggtgccctgctcatgtcttaagaaagaaagattgaaaactagaaaagcgaactgaggcttgcatgtttgttggaaattctaaggagactaggggtgtactattttatagtcacaaggatgataaagtgttcgtttccaaaaacgccactttcctttaagatgactatattaataacttcaagccgcgaagcaaagtagtattggaatttcaaatataactccttctaatgttccatcctcttctactcaagaagaggataatctcactccctcggttgaacttttgcaagttgatacaaccgagaaatctacaactaaaagtttatgttcagaagatcacgactcctcgttttagtgggaggatttccacaaaaccatctcgttattgcctggattgtgacatcaatagggtcgttggtgacggtattgatgacga

SEQ ID NO: 361355 - DNA, 547 bp, Cannabis indica
ccatggtatcatcaaaagtttttctgtagtggcgtatcctcaagcagatggtcaagttgaagcagtcagcaaaaccttgaaggatacactgaagaaaaaactcgaagataccaaaggaaactggccagaagagcttcctgaagttcttgggtcatattgtccaaccgagaaaatgacaaccagatagacaccattcgcaatggcgtacggatatgaagctatgctggccatcaaactcgagccaccatgccacagaagattgacgtacaatcaaggtaccaatcacatactcctagcagaatcacttgatgaaatcgaagaaaaacgagccactgcaacttaaaggttatagtccatcaacaaaaagtagctcgatatttaaacaaacaagtaaaggctcgaaaattcttcgtgggagatatggtcctgagaagggtattcctaaacaccaaagacagtacggcaggtgtacttggacctaactgggaaggaccatatcaagtggtcgaagttctcgactccggagcatacaaattaggtaagtatg

SEQ ID NO: 361356 - DNA, 1028 bp, Cannabis indica
taagcatttactcgtcctcgagtaaaatacgaaaacgaaaaacaaaagttaaacaagtcaatctccagaacatgagtaattttcaagtagacttaataacatgattatgaaaaatttacctatgcataataatccataatttcaattcaattacgtccttaacacactttaatttattttcattcggctcatgaaactatagaacgcaattaactaacagcttaatcactttatgcatgccaattacaacgatcaatccactaacccaaaatattctatatgcttgctacacttactattatccactaatataaatcaatgcacaaccaagaatcaaaagatctttctaggcttgttatgttaggcttaggtacgggtagttaaaatggtcatttatgcttgcctataccataagcttctccaattatgtcacccaaaaaatttgacatttgttagattttttttctttttaaagttattgccaatcaattttatttcacattcactacattttcacacttattcccacacacatataacaattttccatccaaattcccccaaactaaagatctacttatggtataattagggttaaatttttagatattcatgagtttatcttatttaggctcaatatgtgtagaaacaaagaaattaagttaaggctcaaaaagggtaactaggataaaattatagggatggcttaaaaggtacaatcgatccaaacaaatgcctaaatcacttttctagtcatgcattatttattatttcgcctcaaataccaagcaagcaagttttagaatttttcaaacaactttccacatttcacaattaacatgcattaaccaattcaattgctagaaaattacctaatatgatttttgctcttttaaagcacaatattaaaattagtcaagaatctaatatcactaagcacacatattttttcgaaaaaaaaaataaaattttaaatcatgctatttacctactttcaaattgacacacattaagcaaattgactcaaa

SEQ ID NO: 361357 - DNA, 763 bp, Cannabis indica
gaacgatcccacctctcaaattctattttatcatcacagatactttctttagtgagagatgcaggttgttcatcccttagtgcatagtctaaatttatacatcccataactataaataagttcattttccaatctttaaaatttgtcccattgagcataggaatagaattgatattagcagatattgagacaacaaaagatgaaccagatgaatataaaacaaataaaacaacctcacatcaatattcataattaaacagtaaatttaaaaattagttaatcacatctcaagatattaaacacacattaatattaaatctttaaacaataatattaattgtaagcgatactcttagtatatcatcatagtatatcatcatatatatatatatatattataataaggaaacatatcttcaacaaaaaaaatggtgaatctcatatatattttgatatttacataaattaatttttttaaaaaattaatatttacataaatacttatattaagagataaactaaaattgagaataattcattatcttacaaattttatattattttgtttatttttgatatatggtactttaaataaataattttttagtggtagtttgttatttttgatttgatattgatggagaaaataataaaccaattttaattaaattttgtttatatctttattgaatttacaattaataatatcattatactattaaaattatcattaatacatatagattttagaatttatacatag

SEQ ID NO: 361358 - DNA, 702 bp, Cannabis indica
ttttttcagtgccttcctacattgtcaactgccataattgtgctcacggaaccgatatgcgaggatgttccgtcaatggtacaagccctattgaaggtatagtagaatacaatacaaaaacccttttctttccggaagctatgaatattttctcaacaaactaaaactaccgtctactttttcaggcgacgcaaaacaatgcagctctcctgatgcagttcagaaagtgaggcaaaagattatagacaacatggacttgtggctttctcagtgcctagacagtgaaaagagtgctatgtgatatgatatgtttctattatgcaaaaaaataaatttatactttgactgttgaacttactatggtagattattaaatgtggagaggtgaaggatatttctgctacatatcatttccttccatgtataagcagaactctattcttaagttgtttaaaccttcaaatactatacaaataattttcaatctcatcattttagagaggccattttctaaaaaagaaaagtactaaactctgactttttctttttctacacaatgcaattatgcatatagttttgctgtgattcgccaaaatttttatagttggaagtattaaaacttaagtatgagcttttcagaaaactaaaaaaaaaaatcttaagtatgaggattgaggctgcaatacattgtcaaatcatatt

SEQ ID NO: 361359 - DNA, 1015 bp, Cannabis indica
gcattaattaccaaataccagataaaagaaaaagagaaagagaaagcccaacaggcgctgttagaacaacagcagatcaatcatgaagtggaatcatcttccaatatcgttctaccacagtccatgcaaaccttggatattgggtaattaatttctttctaattaacatgaatctctatattttgttcaaattatattatctgtttattctcctgaaatgatttatgtgtttcaaaattgatatcatctcatatagatgcagtgttattgaactaattatccaacaagaagtggcaagaatatttatgaaaatacacattgtttttataacttaattataggctatgtatacgaaataattttaaaattttagtcacatcttcaataattttagtccattcacatgttgcctcgtgaaaaatggattaaaattgaaggaactcactttagtggagatcttgtagagatatttagtttattgtaaaaattatgtttgtatttggttatacttttttaattaattttttatttttaaaattaaaataattaaaatattttttaaaaatcatattttatgaaactgtttttactttttaattttttaattaagaatctaaactttacaaataaaaaaaaaatcacttttaaaattttttgatacaatttttttaattaatattttgaattggggctccaacttagacattggaaaccaaacttggacccaacttcagtcctgacctcaaaaccgacttaaataaaatttataaatgaaaataaaaataaaatttacagattatatttttgttttgttattaaaacatttttattttttaaaaacaaaaatttacttttatttttataattaaaaaatttgaaaataaaagtgaagttaaaataatattttaataatcataataaaaaaaagaataacgtacaacttaaatatcgattatagagcacatgatagtcacattctagctttgagcatatatatatatagatatagaatata

SEQ ID NO: 361360 - DNA, 652 bp, Cannabis indica
agttgaagagggcttaaatggattgattggtaccacctatatcaacaaggtgcatcttgttttttggtaggccatcacaatagaactccatagttaagcatgcttgacctagggtgatttcaggatgggtgacctcttgggaagttttcccaaggagcatgcgagtgaggacaaagcacactggaaacactcgtattgattatacctgtgtataagagccatcattccgtgggtataagggcccaatggagacttgaagtggggatgttataaggaaagctagtcttcttatgggaaggttttctggatggctagttgttccctcctagaagggagtctcgtatagtcgactctagatgtcgttattcctattcaggaagtcctttcagcgtacgcttcgttctatcttctaggaagcgtatgacctattcggaagtgctttaacttgagttgacgtggagatatttctacgagaagtttgttaagttggttaagccataactaacttaacaaattatcatttgcagccactaactttgggatccatatccctgatctatatatatcaccaacacttatcattttggtgaggacaaattttgagaggtgtgataactctatggtatagagttattttttatgctttaaaact

SEQ ID NO: 361361 - DNA, 478 bp, Cannabis indica
tcatatttagggtgtttaaaaaacatacttgtgagtagatctaagatcctggtaaaataactttccaacacaggatgcctcatatgcatgcatgaggcaaagcgatcagcaatctgctcagagcgaccaacacttagcgaattcagctttcgcattgttagtcatcaaagaaatccctataacttggggatcagattgtagagatatggaaagctgtccaaatcccacgatcagtgtattctgtatttattatgcaatctttctgcttatatcctttgtaacgagaagggaaatacttcttctccaaggtcataaccctataaatagtgatgcatgttcactgggcaaagggtcgaaaatattctggcagatagatattatctaagaattcatattcagagatactgttgtaagagctataagaaaaggaatatttctccttgttcttgagttaatacaactaacgaggattaggcta

SEQ ID NO: 361362 - DNA, 883 bp, Cannabis indica
attcttgaacacttagaaaaatagacacttctcattctttgtagtcaagagcctgttcttgacttttgcaactcatatcaatgaaacacaaggggagtaggctattaccgttatctggggatgaacctctttaaattccggtgtcttttctttacatttattgcaaattcttgtgtcattaactgcatttattactgtgattttggtttaagtctcatttattacgactccacgtcggttgactaaaaatccagtcaacatcatgattatattttattgtgctaacgacactataagcatgaaaaattatatatatgtatatgttctggacttaatacaatttatacattaaatataatcatgaaatgaatcatctgaatcatgtcacataaaacgatttttgatctttttttaattagtaaatttgattatattgaaatgagttttatttagggcagacagcctaacaattaattcatggtcaacacatggttttattaattaatgggtcaccctagattaatttatctttttttgagtgttcttttgacaaaacctaagttaattacttatattattaaatgtatattagggctgttcatataaaccaagaaatcgcagtttaatccggaccactacaattcgaaccattgtaaaccgtaaccggagaaactgtttttggtggtttggtcaattcggaccgtttacgtcgtaatggttcggttgcggttcgtaataaataattaagagttacattggaccggactgtttataataaataattaatttatacattttttatatgtgactatatgtataatttagaacttttttgtttgtcaagttttttattgcatgaattttagatttttatgttatgttt

SEQ ID NO: 361363 - DNA, 615 bp, Cannabis indica
aataaaagataataagtgaaaaacattgttaatatatcaataatctattaatttatattatattattatcaataatgtataagccttatttaacttatatacttatttttgaatctccataaaaaatacattgtatattattttatttccaataatatattatttgagaattcctagaagttataaaataaaaatattaaacaattgataaatctatagaggacattaaataaatcttaaaaaaaaaaaatcaaacatgattgataagcactcgcttataaaatcaaattgttgttatcaccgtatcttacttgtagtcgtcactatatttaaaacttatgtcattaccgtatctcacttgtaatagtcattacattcaaactaatgttatagtataaatatatattttaatactttttttttaaaataataactccaaatctatcacatatcatctagctatcacgtttttttttttaaaaaaaaaattaacaaagcattaatataagaaatatctctaaataaacttaatagaagtctaaaagattaataaagacctaagaataaacttaatagcttcttaaacatagaaactatttttttttattgttgcat

SEQ ID NO: 361364 - DNA, 501 bp, Cannabis indica
ctctcaataaaagtaccaaaatgttgacctcgcttttagccaacgacagtgagtcttaattgtaagcgataagtgatataatttagctataatatgaaaagataaataaagagcacatagtttttaaagaagtttggccccgagcagttcggtaatagcctactcccttgatttgtattgactgaagaacaaagaatacaaagattcttctcttgaagcttttacaatgacatctctgagtatgctctcttagataatttttgtcgaccctttgcccagtgagaatatatcactatttatagggctatgtgcttgagagaaggtttcccttttgtttacaatgtctatgattggtaagattacacattacatatatagaatacactgattgagggatttggacagcttgccatatctttgtgatacaatcccagatttatagggattgcttttatgcttcacgatgcaaatgctgaagttgctaagtgttgatatgttgtt

SEQ ID NO: 361365 - DNA, 759 bp, Cannabis indica
aaggtggcgattcaggaaccatggacctataattctaagctccaataaattagattatttattgagtctcatcaatcaaataatcccttatttattaattccatgattactccactataaatatggaattaaactcttagtaattatagaattatatttactaagtttgactgcaatgtccattgatataatcaatttaagtgattagccctccatgtgttggttcgtaattagttttggtcaaaatactattttacccttctttttacttcttcatcatttagttctcttaattcactagtggaagtataattcaagatcccatcctgaatttatgtacaatattctagttccagaattaacacttaaagggacccaacatttgatccgttaggaaagttaggattctataattgtacatcattttcccatccatccatattattagatttccaaaacagaagttgtaagaatcatattttacccttctaattacttcttcatcatttagttctattaattcactagtggaagtataattcaagatcctgtcttgaatttatgcacaacattccagttccagaattaacacttaaaaggccccaacatttgatccgttaggaaagtcaggattctataattgtacatcatgttcttgttggaaaatattttaccaggatctagatttactaacatgttggattaacaacctaatatggattctaaaacaatgaaaataaacacatataaagttagaaa

SEQ ID NO: 361366 - DNA, 815 bp, Cannabis indica
cttgtgtgagatactacttgatacgtacacttgcgtaataaacataattttcgtaacaatagcacgcatgcaagaaagatcatctcgacaccagaaactatagttatcagaattaaaacaatttcaacctcgagaagttatatgacgaacacgagctcaccatcaaagttaactcggttccattctcagcgaggcatccccataagataacgtttaccttatatcttaaatatgcattcatcttggtctaataaaagcgagatactcacagctgtgtgaattataaataaaaactgcatttacttagcgtgatttgtaatcaaatcccatgatttgaaggaataattgctgtaaagattacaatcaacttttgtaatttactgcccactatgtaattataaatagtggcaaataagatgaaaaaggggatgaaaaaactcatacaagggaggccctaagaaataatcaaaaatctgaataagattgactcgtggactatgtagaatttttactgcaaaaaccacgtaaaaaaccctgtgttcatatttttatatttatagcttttatattttttgtgtgaaatcaccactgtgaggctcaaattagttaatgaaaatctgcattaacagtttggtgctttcattgagagcgtatgtgaaaaagctcaaaaaaagcctcctgacataaaaataatggatgatgctgaagataatacttctcatgaaggaatcagtcatcgccctggataagagccattgagtcctcagggatctattgagtcatcacatgaatagactgcaagccctgggaaaacc

SEQ ID NO: 361367 - DNA, 786 bp, Cannabis indica
ttacttactctaatgcaaataacttactttagtaagatgttgtagtatttttctaatggctaattctaaaggaaatcttttgactcctagacataattttttttttatctaaggaacagtttcaactataaaaatcatgaaaagaattccttaagcatcaatagtgagaggtctcatatatgctttggtatgcattagaccaaacacctgatgttgagtgggagtcatgagtaagtattagtttaatccaagaaaaaaacattagaagataattaagtaaatctcaagatcaaaagaggaactctatgttagtcgataagggtggtattctaatactcttagactacaccaaatcagttttctagacttgcgttaatgctagaaagtctacttatgagatggtaattactctgtgggtggagcagtaatttttagagaagtgtaaaaatctatctgaagtctctaactctaccagtgaggccaaatgttaaagtggcccataaggctactatataattattcaaccaatggaaagttctatacaatttttggtgttattccagtcatggattaactactagtgttacttcctaataacacagatatagttgttaaatagtaaataatccaataccctaagaggaataaacatatagaaagaaatttcacaatatctaggattttgtgactaatgagatgtaatggtgaagaaagtttgtattgaatacaacctgtggtggagaaagtttgtattgaatacaacctgttagatcctattacaaagat

SEQ ID NO: 361368 - DNA, 534 bp, Cannabis indica
agggacacatgcactcatgtgttccatcaattgcacctatacaaccataattaaaaaacaaaaaaagttattaaaaaaatgtatactaataatgtactgtgaaagtattatttatcttacactgtagttacactattatataatagatttttggtatcggttcaagggatgtgtttttctaaaaccgacactgaagacaaaccccaactctttggtcttagtttataactgacttttataatgactttaacttactaattaaaagataattaacttaatttaatttaaattatttttaacttaataaaataattaagccaaattaatcatgagcatttatatgtcacctacatgtgtagaatgtgcatacacgtgtgagtcatattttaaagtctaaaattgatttttcaattttgtcataaataagatttattatttattacaccaatatataataaatgattaattctcattaatttcttatctcacaaggattaaaataaatattatttttctaaaataatatatttctct

SEQ ID NO: 361369 - DNA, 622 bp, Cannabis indica
ataatctcatagtgattgattcttcattatttagtcttttataaacaaactaattatttgtattgtgtataaattttgttatatactttatgtggtagtaatatttgaaaaaaaaaaaaacacttttaaagttggtattaatattactagaaattttttcttattaaatttctaatataaccatttaatagtggtggccactccaaattaatagtatggtatgatacaaaatatcgtggcaatactaacttggatatatggggattggcagcgacaatagccataatgatagttgatggtgacggttataacactgttaaaatatataaaaaaatctcaatttaatatcatatttacataaaattttaaaatcatttagtttaatataaaatactattgcagtctattagtattaaaatagacactctaataatttaataattaacatatatttttcttatataatcaataataaataaattttaataacctatgtaatagagctaataataataaatatattaataaattatgaaattttaacgtcacgtgtcatgtgctttagttgaccaagatatttactattacaaacttctttcaaaaaattcataattttaaaaat

SEQ ID NO: 361370 - DNA, 502 bp, Cannabis indica
ccatgcaacagaaaatgttatttctgatctttattaataagtaaatttgattatatgaaatgagttttatttagggcataaaacccaacactaactccatgcctctagcctgtctatggtttctccggtcaaggagtttcacctctaggacaaatccgtctacccctcactgttggccaagctctgacgagcataactatcatggcacagttcctaatattggatgttccttcagcttggctctagtttgtcttgtctagtgtgagcaatagttgtgaaaccaaacaccttgaggtgttcaactgtagggacatgtttagtctagtattcttgaggtgttttgaactttagagctgttgaaggacgcctgtttatcaagtagcatgcagtcttcaatgcttcaccccataacttcttgtcaagtccagcacccttgagcatgcatcttactctttccaatagagttctattcatcctctctgcaagtgttgggttttatgcc

SEQ ID NO: 361371 - DNA, 653 bp, Cannabis indica
ttaatctttgttttgtgtctaaaaataaatttttatttttatccaaagctaatttttaaaatagttgtcaattttattttgataataataagatatgttttccacgtggattgtaactagagacccacatgcataaatagatttgaatgttgttcccaagttgagtttgcctttcacgcgctctctttgtccatttttttgtataattttatttctttacagtatttttgtaaataccaaactttaaaaataatatttttgtaaatattagatagtataaatgtttattttttctaggaatagtataaatgtttattttgggtaattttagtttaaaataaaaaaaaacccaaatcaacttaattattaattctaatttaatatttaggaaaaatattctaatttaagttgatctaaaattaattaaattaattttcaactcaaatgtatttttctaattaattgaatattagaaaatataatttagttactagaaataattttaaaataagtctctttctaaaattaattttaaaataatctaataaaaaattaatttcatatatttaaaattaattatgttgcttattcaattttgcttaggttaaactaatataaatagcctataatacaattatttaaataaggtaaat

SEQ ID NO: 361372 - DNA, 578 bp, Cannabis indica
ttcagtcaaggccactcgagcttgattttgctcttggtgcacaatttgaaactggccttgcatctagcctatcgcgtctcgcagctgatccatctcggggtcaattccctcgatgtcaacatggggttcattccgcggcgtaaagatgccagggccgcggccagtctgagcttggcccgcaccgtcagtaggtgggacaaaatttctagtattacctcttccggtggcgccatcagtagcgctgcctcctgcggcagtggcattggtggtacgcccagtagttgtctgtccagtgactgcagtttgaccagttgctccatggccagcggtttgagcggtggtggtagtgccgccgttccccggacgtggcggtcgttctccattgtttccggcgaggttgctcgctgatggaacttggtgggcactttccatctcttcgtcaggtcgctcttgagatcttcgggttaacaccattttttccggtgaaaaacttaaagatgttggctaaatctctcaatgaaagcaccaaaatgttgactggatttgtagccaaccgacgcggagtcgtaataaatgag

SEQ ID NO: 361373 - DNA, 963 bp, Cannabis indica
  modified_base (940)..(940): a, c, t, g, unknown or other
atcgtcttcgattgctcttcgtttcgtctctgtgaagcttttgttgttcttcaatggccaatccagttgttttctcacacaaagtctctgttaaactcgatgacaacaatttcttactctggcgtccccaggtgctctctgccatccgtggtcaccgtctctcggagtatatctccaacgctgttcaacctccaccacagttcttatccaatgacgatcgactcaatggaatgataaatccccggttctctgaatgggaggtgcaagatcaactcctctactcgtggcttctctcttccatgtccgacgggcatcttaactcgcatcgttggagctgaaacatcagctcaagtttggcacaccttagaggtatacttcgttactcaaacctctgctaagattgatttctttactaatcaattgcagacatgcaagaaaggaggtctctcaatcaatgaatatctgcttcgcatcaaagctttagtcgatcgacttggatctgtaggtcatcgtgttactgtcaaagaacacatttcagccattttcaaaggccttccatctgattacgacactttcatcatttctgtcaattcaagaaacactgattacactgtggctgaaatcgagtctcttctgttatctcaagagcatcgtatggatagcaatcacaaagaactcgattctgttaatctagcaactaatcgcacaccacgtggtcgaggcaactctccttcaatgttcaattcaacaccggatcccaggcaacaattcttccctgcgaaaggtggacgcggctcttggaatccatatgctgttgctcctcgatccacaggtgcaccaaatcttcctggttttgttaccgaccagggtccgtactcgatccatgcaacctcctgcacctgctgcaggcacgaaaattgtctgtcactttgctctcgcncaaggtcatattgcctctagatg

SEQ ID NO: 361374 - DNA, 576 bp, Cannabis indica
ttcttgttggcttcacccagctcgatcaaacagctccgagttctgccctggaatctttagcatccttcctggccacgtccacctccgccctcgtggtattggacaaagccacgtccacctctgggagtaggtgtaggccaacttcagaccggcctacacaaaggaaaaacttgagtatttgagccaagtaaagaggattaaagaaacttgtcaagaaagacttacccttgttaactccttcaagaatcctcccactagcaactccagtaaagagtcattgtcaacaccggccaactgctcactaacctcaggaaccaactggttcatataatgagcgagcagctccttgcctttcttggcctccagaagcgccgacaaaggtggagtagaggtccgcaccagctcagacccacctctcggttggtcagacctctccgaaatcccttctcgagactccttcgacttggaaacttttggggtggaggggtttgcagccgttagctcctcagaaagatcgatgacctccccagcaggcgccttttccttagaagaggttccctcaccgcctttagactt

SEQ ID NO: 361375 - DNA, 942 bp, Cannabis indica
ctagtttgatcacatgggtaagtttagaaccttattccttagtggaaaatattttagagaaaataaattatcggggttaagcggggttatggaattttaccattttacccctagttttgagaaacacctatgttttaacttggagggcattttagtcatttcctttagtgaaggataggtggctgccctaggtttgtgacacctagcaaattatttcaagggaaatgaattttccctaatcctcatttatcttattttgtgaaattaagagaaaagtccaaaattggaaaaaaccctctccttcccttctttctctcttcgaaccagcctagagcaaggagtttgctgctgaactttgaagattaagctaaggtaaccctagttctttgctagttgtgttttctcaagttttttattggtttcaagttgtgcttttggtagttaggggctgttaggtttaggtatgcttagggttcgaattataagcttaatttgagttgattaagggtcctagcagctggttttagtgtgtggtgttggatttatgcaagttggaactttgaactcaaagctttgctctttaatggcaagttgagtttcatttgatttttctgtgaaatactgcctggaatatattgtatatactctaattaggtactctggaaggtttggtgacgtttggtggagttttgagcaagaaatgaaatttcttcgatggactgctgcaaactgggtaactggttttatacgtacgtgtaaaaccggctagctagttttggcaaggttccccgggcctttcatttcctcaaatctcgtcttttccgtgccatgattgggtgtttccctatttctagagttagattaaccccttaaaagtagaacagaacctagggttatggttttgggtttcccgggattagggttttattcatgtaacttacc

SEQ ID NO: 361376 - DNA, 571 bp, Cannabis indica
ttaggagtgttcatcaaaccgcataaattgtgcgcaacgtaccacactgcataaaaatacagtttaaatcttttgcggtacggttacagtttgtatttttgccaaaccgtgcggtgcagtgcggtttgcgattttgaatttaataattgcagttcaaactgcaccgcaatatatattacaaagtcactaattttttacaatataatttttattcatttttttaatataagaacaaatatatatatatatatataactagcaaaaattacgtgcgaggcacgtatattaaattttatgttagttttttctacgttattaaaagtgatacaattaaaaataaaatatatatatatattattagttattaggttcaacatcattaccatgtgttcatttttaaagaaaaaataatatatttatgaaataataatttattgcaacgggtgtacaggaaaattacggaaaatatagtatttattagtagagtattgacaatttcaatagtaaattaactaattgtatactttttgttctgctaacattaagtatttgatatttgagtggtgaactc

SEQ ID NO: 361377 - DNA, 588 bp, Cannabis indica
tttggcactctgaagtggcatcacgagaatggtgacacgtggactctacttggaacatctgttcggagcaatatgtcgagcaggatgcctcgctggcacatccagtatggaatatccaacgagtcgttcagaatgatcaacacttagcgaattcagcttaacgtatcaagagtcaccagctcaattcctacaactcaaggatcaacttacgtggatgtggcacacacacgatccaactatcgatgtattcagcctcaagttctagctctataaatagtgaggaatgttcactgggcaaaggaccgagaaattataagacgaaacacagtaagctaaggctatctaagaattatatattcagagatactattgtaagagctataagaaaaggaaacttcttccttgttgttaagtcaatacaaataaggaggattaggctattaccgaactgctcagggctgaacctctataaaatttatgtgtcttgttattgctttattatatattctcattacgacatatcgtgcatcacttatcaaaaagactcagtgtcgttggctaaaagcgaagtcaacattttggtgcttt

SEQ ID NO: 361378 - DNA, 656 bp, Cannabis indica
gcctttgctcttcaaatgcaagattcaccacagcacggagctcctcctagtaatgacgcaaggtattagtatgaccttgcatgagtccaagagcagcatggaggttctggatcttggtgtcatctccaacggttgttcaaacatttgttgctggcagaactccagtattgggaataccctgattggctcctgaactggtatttcctgtctcttgcacaccaggcgcaattccactcaaaggagtcgttacaccctgacctatggttggctgttgttcaatattcgtggctagtggaacccttgcatttcctagattctgcagtgcgggatccactgctggtggatttgctggatcgattacacctctacgagtctgtaccaccatcgcgtttatgattaaattgttggaaatattttacaaggatcttagatttactaacaagtatgttgtttaacatcataaatatgaacttctaaaatgatatgaaataaacacatataaagtataagaaacattacagtggttgcagtggaatataatgtctccttccactcagatctttaacccttgtatcctttctgtcgctgagtatgaccaagatctgagcccaaatgtccttctcttgaatctggattcttcacaatcttccacacta

SEQ ID NO: 361379 - DNA, 636 bp, Cannabis indica
ggggtgtatttataattttatggggtgcaaatataactccccctttaaaaattgaaattacacccatactccccttcttctttgactattttcattcatgtattgttacattattataatcattttttattctaagtaaaaagtaaattttttttttcttttaaacaaagaaaaaaaaagtaaattattcttattatttaatttataaaattgttgtaaaattttattgaataattgtgttgttctttgttgttgatgattgttgaagctgtgatactatattaaaataataaaaaagagaagaaaaatatgtatgttaaaagaagagagaaaattttattaaattcgttataaaattattaatgtgtttatataaaagatgaaaagatagaaaaaatagttgtaattaaactaacaaaaataatattaattatagtttgattttaattgattaatcttaagtgatatcaccgttataaaaaattattacaattttatttgagatgataaattcttaattgtattcttaattctgttaaatttaacgattaggtttgatctccgttaacaaataaacccaataattaaaccaaaaaaattaaacaatctttaaatattaataatctctttttaaat

SEQ ID NO: 361380 - DNA, 717 bp, Cannabis indica
aacgcagatttttgttaaccaaaatttgagcctcacagtgataatttcacaaagaaaaaactgaaagcaataaactaagaggtatgaacacaaaagattttttacgtggtttcgcagttaaaattctgcatagtccacgagccaatcttattagatttttgatagtttttcagggccttttttgtatatttttttcgtcacatttttgatcttacttgccactatttctaatcacatatgtggcagttaattacaaagttgactgtaatattttcacaatgattatcccctgaaatcatggggtttgattgcatatcacgaagtgtaaatgcggttattatttgaaatcatatagctgtgattttctcacttttattgggtcaaaatgatcgtgtgtttaaacacgtctttaattattgcgctctgggatgtctcgaaaggatctttgttccagtgaccgtgatagcgagctggacccttttttcttatccttctgaggtcgacaatgtacgcctttttgcttctttgtttgaaagcttaacgcttcatttgagacactcgtggttcttattaacagacagtttctcgaggctcatttgaatgtcagcttctgactcgtcaagattgtaagtctctctgagaagatgtctgaagttaactgaaagaagttactggaatgagccttcctatagcgagatagtgttggaattattttac

SEQ ID NO: 361381 - DNA, 514 bp, Cannabis indica
agattttcccacctgaacgagtgcaaagtcgccccttcgcacggcggcttctaactgctctaccacagtcaaccgctgtaaactgaagtatcgatctgcacggtacgcccaattatcgaggtcagcccttgaatacacgggcaattcaatttgtcaggctcagaactcttgtcatcttcctccatcttagttctcgtttctaccaaacccagtcacagttggggttgacaaattctcaccaacaatctgcctaccaggggtttgagaagtcgcagaggcttcacagatgctagcgagttcattgacaatgcgagcttgtccattcatcagtatcttcagttgttctgtaatcacaaccaagttgtgtggtaaataaaatatatgcaagtatatgcaatcgaaacaagtaatataatgataaattaacacgataaataaatgataaataagtatacgcaagtatatggtaaaaattgatacgcaagtatatggtaaaaattgatacgcaagtata

SEQ ID NO: 361382 - DNA, 789 bp, Cannabis indica
gagctaaccctagctcagaatttcccttagaaccttcgagagtgcgaaaaccaactctctctctctccctgctctcttcgaatgaaccctagaaactaggtctccttctcgatcaaaccagatcgatcttaccaattactttccccagaaatttatcccaaacacatacacatcaaagattaaacattaaatagtaaagagatgtaagaaaacagacacaacgtttatagaggttcaccctaaatccaggggtacgttctctattgagctcgccttgaagaacgatctcagatctgcactataaatggagaatattacatcaggtgagaaatccaagtcacagatcgactggtatttcagttctttctctcttctctcttttctgtgtatttttctttgaatctcactaactctgtctttcttttctttgcatgtacatactgaaacaatcaacacgagcctaggtcttcacacttctgggttctctcaactgagagattggtaagaatctgccccttttataggttcagtttgagtagtagatgagtaacagaatttttgttgcaaaatagaaattcagttaggtcaagttgatgtttgttgtatctgagtgagtaaagtcacgagccttttatttgtatttttaacttttctataaaactgtaatataagtgattcaggggggatctaatttaacacctaggagtggagagtttgatattttagcttggtggaagacaaatggtcttaaatatccaatatcacaacaagttgctagagatattttgg

SEQ ID NO: 361383 - DNA, 632 bp, Cannabis indica
tacattgtcaaagaactttattgatatcaatttctattactatagtaaatataaactggaacataaatcaagatcaagaatttattctgataattgctaattcattatattacatccatgtttaaaaatatgtgtgacaaagagtactatggtttattaaatatagtccagagttcaaaatgaactacatatttcaatagtatagtccacccctaagtatatagagattatgatccacccctaaaggatatatagatcacagctctctaagtgttatagagatcatgtggagttatgaatataattcagagttcaatagatataaaagatcgttgaactgcatatcattcttaacttttccacccctatcagatcaaaagatcttcctattaaacaaattcttaatagttgtcttagaattaacaattattcataaacatagaaataaattctaagtgtttatgtagtattaactctatgaagagttgaaaaaactatagaatttgtatcaataataaaagaacatacacatacaatcattaaaacatataaatataattggtaccggcatacacaagataaagtaaatgaagctcaattcataaatgtaatttatttccaaaatagaaaac

SEQ ID NO: 361384 - DNA, 594 bp, Cannabis indica
aacgccaaaaactatatagaactttccataggctgaataagtatctttccagcagctttagcattcaatctcacgagtagggttagagattccggatcgatttttacacttctccaaaatcactgctccacccccagagtaatcaccatctcatcagtagactttctagcattaagcaagtctggaaacctgatttggtgtagtctaagagtattaaataccacccttatcgactaatatatagttcctcttcttgatcttaagttttacttgattgtcttccaatgttcctttcctagattaatatgatacatacgcatttactcccactcaacagtaggtgtctggtctaatgcatagcaaagcatatctgagacctctcactgttgatcctaaggaattatttctttcgcctatatcttttttagaatagttgaaacttttccttagataaataaaatctaagtgtagaagtcgaaaagcttcctatagattgtcattagaaaaatgctccaacatcttactaaagtaagttgcttgccctagagtaagtaaattaccaggtatatcacaagccataggtttagataaact

SEQ ID NO: 361385 - DNA, 623 bp, Cannabis indica
tgggtctgatttttgggtcccatgtctaagtctggttgttagttcctggttgtggtcccagttttttggtctaggtcttgttcaaggtccgggacccggtctgggtccaggtcctggtcttggtttaggtcccaagtcgcaggtcccggtccgggtcgaagtcccagtattggttttggtctaaatttgggtttaggtccaagtcttgatctagggtcgagtcccgtgtctcgagtctaaggttcagtttttaatctcggtcccaatttgggtctaggtccggatcctaggtcccggcctaggtccaagttcaagttcaggtttggatcctgagtttgggtctagttcccagtacgtgtttaggtttgagtttgggcccaggtctcggtctgattccaagtccgtgttcgggtcagggtcagggtcccgatttgtgtcccagtcaaggtctaggtgccgaacaaagttgtggtctaggtttgtgtccgagttcaggtcctgagtttgtgtctaggttcaggactagatctgggtctgggtcttgggttctgatctcgatatgggtatttagggttttagggttttgggtttagtgtttacggatttagggtttaaggtttagg

SEQ ID NO: 361386 - DNA, 603 bp, Cannabis indica
ccagacccggacccaaatcccctccaacggccctggcgctgaacccggcttctgacttgaacccgaatccaacctcagacctagacccgacttaaataaaatgaaaaaataaaaataaaaataaactttacacaacacacttttattttctgtttttaaaattgaaaaacaaaagtggttacagaacgcatttttgtttttcaaaaataaaattttttaaaaaaaaatttactttcattttgtaattaaaaattaaaaaaaaaataaaagtgttatcattaagtattagatttcatattataataatgtttagagagtatcgttaatcaattaaaagtgatatgtttagaggtactagacactagtggtacccaataataatagtgagaattccatgaaatatgaaattttgtaaaaaagttacaaaaatatggcatttatagatttgccactcttttatggcattttttcacatttaagactttttatggtatttgatatccatatttttgtaaacctattatccaaactcatatttcatgtttttgtttctaacttaattagttttatttttttttagtttatttttacattttacatttt

SEQ ID NO: 361387 - DNA, 515 bp, Cannabis indica
aattaaattaatttcatcattttacccttctcgggtcacaattactaaaatgcctctagcttaccaacggggtcttaccatataattaatcaaataaattctcatatattgaactatataataatataattcttcaattatccacaattatctagttaggttttctctaatccatttcttaatgctaggatattacatttactaacaagtatattgaattaacatcctaaatttgaatatctctaaaacaatgaaattaagcacataagagtttagaaaagcttacattgattgtagtggaatataatgactcattctgctcagatctctaacccttatccctttctgtcgtagagtattatccaattggatctctttctctccttcagtttggttaccaccgtcttcttcactatgattgagtacttgacttgctatgtatgggaatggcactctatcactatgggcgaattggttgaagaacaatgaaggagggttcgaatcactatagaagg

SEQ ID NO: 361388 - DNA, 501 bp, Cannabis indica
caacggggtcttaacatattaaaattcatataatttcacatatattgaactatataataatataattccatcaattactcataattatctatttagggctttgctaatccttttccttaatttcgggtattacacgcgtagatgcaagagaacctcagtcatgatcgaggttcagacaacctcttaaccaacgaattttttggcgacaatgccaattttgacaaattttccagcgtcggtagcaactccgacaatttttttgacaccgacagctactccgatgattttcccgacaccgacaacaaacttcggcgactttttcgccactagtgacaaataaaactacctaaacaaataaaatattaaatatgagatttgaaaacctaatttacatatatatatatatagcatatcaaatacaatgaaaaaacctaaaaaaaaataccatataaattggatttaaaagtgttatatttaacataaaaacttttaaaatctcat

SEQ ID NO: 361389 - DNA, 982 bp, Cannabis indica
ataaaacccaacagtttactcgcataaagtgaagtaatacttgtagggtgtgcaaataatattttaaatgagaaatttgcatatatgtagttgcacaaataaactattgtacaaaatttgcacagacatgaaattgattgaaataagttttaaatattgagaaaatataatcatgatttgattataatctggaatatattttatgagaatttataagcgtcacataaatattgtaacaaaatattatttatttggagctgctaatacattgagaatttgaaatatgtcttatctaaaattctaaaaaaaatttgatacatgtcttaagttacataaattcaaagttgcactatattacaaagattttaatttgaaataataaagacatgtaagtaaattattatttaaaaaatacatatagttgtttatgcaatataaatttataaattatacgttgtgatagactcttgaaaaaattttgattatataaaattgaagaacaaacttttttttgtatattgaaaatattaaatgtatatagtttgttcattagtaaagaagtcctaaagtactttatatgcatcaagaaacaagagtctcttgccaagcaatgagtcaacttgtttgcagatcgtttaacaaaacacaactcaacgaaaaataaaaccaaaagtaaatttctaacatcttgaacaataagaccaaactgtgaggacataaaaatattactttggacaacttggacacacaccaaactatctgtttctaacacaacattgtcctagctaaggatgagttgcaatctaactcaaagcttctttgatgcctatatgatctcagcaatttcaggttggatacacccaacctttcccttcttaaaagcttctactatggtgccatgatgatctcaagctacacagtccactccaaaccgcctctcttgttcaaataaagccccatcaacattaactttaatcttatt

SEQ ID NO: 361390 - DNA, 1005 bp, Cannabis indica
agttaagtataagagatcgaataagagtaaagcacaaaagaaaagaaaaaaccattaataaagacttaccgcggtcatagcagcgctgatatcctgaacctgatagatcacattcgtggaagcacaggcggcgtatcgtttggccggaagttaggtcaggttggagaaaaaatggctcgtcaactcagaggcgaaaggagcaagagtaggacagacaaagcggttgaaccagtccgtcagggggtccatgttcaggtcccaagcattcctgaaggcctcctcgcgtaaggaattttgctaagcctcccgtaagacctttttcagggtttccacctcggcattcccccttgtgtattcgaccatggcatagttatgcttgtcaatccgaagttgctgcctttcctcgtcggcggggataggagtaaggatgatgccgggaggtagagtgtattcctcaacttcaggcggaatccctgaatcagagctgacggtcgaagtggccaccctcctagactttttggaagactcagcctccaccatcttgcccttgcgcttgcgttccagcggggccacgatctcaccttcctcatcctcctcgacctcctggtcttcgtcgatcaagacaattgggcctaaggggacactggaagaagacctccctggggtcaccgtctgggcgagtgccggaggaagagaagagtccgagctgtatgtttgggcaagattcgctaaaagatcctccattggctgggctgcttcaaaaaggcaaataaactaagtgtcagaatggccataaaagagtatgcacatgaaaacaaagcgatataactagtcctacccttactatctaactcagccctagcaaagtcttgtactacaatactggcttcatcatccccaagaaagctgtccgaggggagaaaccagctggaagacaaataagctgagtgatccagaggaatgggtgcaaggggtctggaacatatcctggactagcctaaaaaa

SEQ ID NO: 361391 - DNA, 401 bp, Cannabis indica
ggggagtatacccccttttttggcgcttttcctccatccgattgctacctttcgaggacctcttgctccgggagccttgagaaggtccggctaggcttacactaggagcagagtgagacgggacttgtccgcttattcttagaagggttcccatactgcgaagatgcaggagccaaggcctggctctgattatatcctggagtagcatagaattgtataccactcatttgtggagtaaccgcaggtagggttcccgggagttggactccgggcacatatcctgccactccagtcagataatatcctccataagccactctttgggcttcttctaagttgatgtacttttggaccctcttctggaaatcttggaggttcgtagtgttgggttttgtgcccta

SEQ ID NO: 361392 - DNA, 851 bp, Cannabis indica
tcgtctacatctcttcatacatagtgaagttggtgcctcgctttgtactactgatgtcatccttatgattgtatcttctgacgcggaatggtttcttgtcaactcatgagacaatattttatatatccttatctcgcttaagattttatagtcagcgagttgtaaatatactctatcagctatgcatttaatgagttattctattttaatatcctttaatataatcatcattatatttgttgattcgtattctccttggttgacacgtgtcctcctctgaaatactagccgaattttgggtacaacaatcgccccttgaaaagttctttttaatgcaaagtgctttttaaatggttacagagggtatatttgtcaaaatcccttttgaaaaagcacatgtcttctgattttggtagttttgtactttcaaggtatatcagcatttaatgaccatcttttcatatttttttcaaattctattcgttagatcaattgtctccctgatctaacggagattgacccaagagtataaaacgaaaaaagaaaccattttttcaatatctttgccatttcaaaaactctaaaagtttctcatgcttttctgcggaaaaccagatttacccaaaaccttgcttgacatctttgtcattaacattttttttgcgagtttcatccgatttgattttccgcattcagagggatcttcgctacgttcgctgtttcgtagattgcagaaccgctcatcgtctcaaaacccaacttcgaacactaagttatttttctccttattttcttacatgattttaattttgcatttctgggtttgattactaatttcttagttagcacct

SEQ ID NO: 361393 - DNA, 467 bp, Cannabis indica
ataaatggtattgcgctctcatacacaatcaatgtaatactctcatatttcctcgaaatggtagttattttttctcactaatcttgaatggttctattactacaaatgattctttttggctcactattctcgagttactaaagtggcgtttagttcggaaaaatgaaaatataggtatatgaatgagaatgaggatgtgaacaaaaatggaataaataaaatttaaaatgcacaaaaaaaaatgatgaaaaaattattaatttttttcaaatcttgtattggagagagtggtctttctttctattttaaaatagaataattattttataatatcttaaaatgtaaccaaacaaaaaaatgaaatagaataattttcattctattcagtaagaacttcaacaactttgtaccattttagaatttggggataagatgaatggggttctatctcaaaatcaattagcaat

SEQ ID NO: 361394 - DNA, 751 bp, Cannabis indica
ctactttgcaccatttgccttttcatggttctgaccatcgccctcttaaggtttgccttactgagccaaatgtagctagaactcactcctttaggaagaggtttcaatttgaaaacatctggctccaaagtcctgctttttactccactgttcaggactcctggactagttcttctagggtctcttcttgtcctaatgcttttagtgagttcctttattgccaagagggttgtatttcagctctaaagtcttggaataagtccactaaggtcatgtttcaatctagaattcaggatactcaaaaggaaatcgatagacttcaagcttctacctcttgtagtagtgaatctaccctgagaatccagaatttacagtcccagctggatgctcttctttacaaagaagaggtctattggaagcaacgttctagggtcaattggcttagagctggagataaaaatactaagtttttccataggtttgcttctcataggaaaaagaataatactatcaaatatttaaaagatgatttaggcaatagtactaataatcctgaggccatgtttagtatagtttcctcttttttcactactcttttcagctctgagggctgcgatgctgaggccactagtcacatccttgattgtttagggccccctctagatgagtctgatattgaatatttggctagcccgtatactgctcaagaagtgaaaaaagctgtttttagtctctctggggatagagctcc

SEQ ID NO: 361395 - DNA, 826 bp, Cannabis indica
attaatttaccgttacacccttcaatgtattttattcttaaaacacttagcgacctataaattatatttcactgaactaatataatcacttaaatgagtactcaacaatttatctctgtttagccaaactcgaaggaaatcatcatttcacctctatgtctagatagaagctatagatttcatatctatgattagcactaccactcaattgtactaccatgttcccaaaatgtacgtatcacccaggtcaataggtaagcttaactaacaaataaaagaacacaaataacactcttgagatcgaacctaaccatgtcaggattaagatcatttgatctaggatcaactaggtgctattcaattgaatagatattacggtaaaattatgatatctaatgcaagtttaatatcagtaccttccaatgcatactccatgatccaacctaaactttactttaaccaatgcccttgaaaggacatagcacttatccaaggtgcaagtaaactatggtgttgattatcctatctgttaaaccctgtgtactaataaatctaggaatacatttaatcacataatcttgatcactttccactatgttgacgaaacaataaacaataatatcaatgtgataaggatttggatgaatttataaatcaaataaacatataaatgatcgcatgaaccaaatgacatactaaataagtaatgaaaataattatgtttctttattgataattgaatggaaatgattacattaaaatagatttttatttagggcacaaagtccaacaaactcccacttgcactaacataaaactatcagta

SEQ ID NO: 361396 - DNA, 619 bp, Cannabis indica
gctgccacgtgtcgtaatcccattttataagggatatgagtaattaaaccctttgatacgaaataaatccctcatttttccctctcgtccttaacctccttttccctcatttactgagatttcaaagaaacctccatactctgcccagattcctacttcttcttctaaaatctcttcaatctcagaagcgatcgagagcaattgcagggacaaatcattaaaactaaaggttagtttcgaatgcatttgcattttcggtttctgtttaaaatgtaaaactgctttttctgggtttttgtatttcgaggaggggttttagaatgcatgcttgtaggaaatgtatatagggctatgtttttctgtgtagaactgggtaatcccagaaaaatagacctgaaatttgcatagccgtgaactttaggaagaatgtttaaataatcgcatctttcctatctatttatcttttgaatacacgcgggtattcggatgaacacttcgaatactcgtatgcctgctcaccctaggtttcacagagactttattacttctagtcattgtttagaacctaggattttacactctgtatattttgttgcgagaacattggttaagtctttca

SEQ ID NO: 361397 - DNA, 563 bp, Cannabis indica
ataatttaaaaaaataaaataatcaatttttaaatttaagcatcaaaatatcatgattaataataatttattgaaaaataaatattattaatttaaaatatgatatttaagttcaaatatatttaaaaataatattttattttaaaattgggttttgaaaattggaaaaatcgaatttttgggaaaaatccctaaaaaattggattttggttaaggatgcacgctgcccaggagacaggctgcatgcatcagcccaggaggctgcaaatgagccactacgcacgcggacaggaggggctgggcgagaatcctcggtgccagcagggttctcgtgggcggacgtgcagggtctggggtgtctgagcgagtggcatgcacgcgttcagacaaggaatttcccttgtcacgcgcacggatgtggggcttgtccgcgtgactggtgcactcgatgcacccatttgacagtcatgcatccaaaatttccaaaattcataactttttcaatttttatcggaatcgagttccgtaaaaaagaaattgcttaatttatcacaaggaatcca

SEQ ID NO: 361398 - DNA, 955 bp, Cannabis indica
gacagctctcctacatgtatgactcctataatcaattacttactcgacggacaacttccaaatgacaaaaatgaggctcgaaaactattgtactcagtgcctcgctacacaataattgaaggcaaactatatagaagagggtattcgatgcctctacttcgatgggttctccctacagaagcgaacgaaatcatcaaaaaaattcatgaaggcttttgtggggatcatgcaggttggtaaagtctatccaaaaagatcattatacaaggatattactgcccaacgatcaacaaggacacccatgagtttgtcaggaaatgtgataagtgtcagagattttcacatataccttgcgtgccgccaacagagccaagaatgatgacctcgccctacccattttctatatggagaattgatttaattggggcattacccattgggcgaggaggagctaagtatgcggtagtaacagtcgatttcttcacaaaatggacagaggccgaacctctcgtctccataacctgcaagaaagtccttgactttttcgtcaagaacattgtttttagctttggaattccaatgaagatagtatccgataatggtactcaatttgatggggacttgttcactgagttttgcgagaggaacaaaattatcaagagcttctcgtcagtatccaggccttaggcaaatggataagtggaagctgttaataaaatcctaaaggatactatcaaagaagaaattagacgctgccaaaggcaggtgggtcgatgagctacctcaagtactctgggctcacagaaccaccgagaagacggcaacgggacacactcctttcttactagcatttggctcggaagcaatgctgcctgttgaagtgaccatatcaactaatagaagagagttttataatcaagaagaaaccaagaacttctaaaattgtccttggatc

SEQ ID NO: 361399 - DNA, 628 bp, Cannabis indica
aggggtcgccaaacatcttataccggtgtgaattaaacccggtggcgaaaacatggctgtactttgtaagtgctcggttagtgccaaataagcacttctccaatgtccaaatggatcgcctgaaatatgtgtacgccattatgaaggggtacaacataaacattgggcaagtcatcaggcatagtattgatcagattgtctaaggagccacgtgaggtggttttggtttggcgggagttataacagaactctgcggggcatatgaagttgcccaattggagtatgataacatggtgttgccacttcgcaagatggacatcgcctttgtcaacaggctgaaagagcaacatccctatggccagcctccacctgatgcatcgcaaggatgtaggcggcaacgagagcttagtgttgaagaagaagaggagcatcccctacaattgcctgggcctatcgatcccacgatgcaatacactcatgcacagctgagttatctaattcaccagaacaaccacatgcaacactacatggtgcagaggagtatttatgatgagggacaagttcagcaacttaactctctcatcaacagaatgaacatcgggattgatgacccgaattatttggcgca

SEQ ID NO: 361400 - DNA, 533 bp, Cannabis indica
ttcatttgtgttgttaggttttgttgatttaagaccattagtgtctttcttgcaaggatattttcccaatttttgtgctatatatacccataggagaccctatttattcatttatttttgcttttcttttataattatatattttcttaagtatttattgagattaatataattgttaggaattgctgttagaatttattgcacctcaaattttaaattgggatgggaaatttaaacaagtattattttaatatttttatggttacataattttaatatttatctttttatttttaaattataattttatagtatcttataaaaataatataataaaaaaaaagagaaattacttcatatattaattttttaactttttttttttttaattttacggttttgtgtttctaaagtagttgcagcgctagttgcaaaagggacagtgctagttgcaataggagtttctatgtagaatttcgtaaaactgcaaaagaaaactattttgaagtgtaaaaataaaaaagtctctaaaa

SEQ ID NO: 361401 - DNA, 704 bp, Cannabis indica
actcaccccaaacttaatgtgaaacttggctcttgacaagtgagtaattaagttaggacatatgtggaaatgcaaattaagattggcgttagatgtaggattgggttgcacaacaataataggctacatggctcaaacttgggtgactagggaaaaattgaattcataggaaaggctagaaaggctcaaacgtccaaagatggcctaaatcatttctaagtcataaagctcgctaggatttcgcctcaaggattacactagctaattctagacgcttaaactctctcaaagtgttagctattctaaaaactcaagtaaggtgggataacacaagcacacaatatttgaaaggattcctcataagctagcatttagacaaaaataacacttaaaattagcattttcaacacacaaaccaaggcactccacaaatggaggaaaatggatatgtttcatcatcgagcgctaccctaaaccaaactgaaaatacaagcaatatgtttctcatttgcaagctaacacaaattataacacacatgacaaaagaaatgatcaacacatacaaagcttactacacacactactaaattgaacaaccacagtaaacacataacaacacaaacagtagcacacttaactaacacatcacagttaaactaaggtaattaattaaggagaaaagaaatactccctcaacaatccga

SEQ ID NO: 361402 - DNA, 573 bp, Cannabis indica
aaaaccataaaaaccgtccttaagtttgtcccccttcttggggacggatacaagttcataaaaatacaaaatttccgccgggcggggagatccccatccgcgggcggcataaaaaatgaataagcctgagagcaggcgataagcttggggaatgagttggtatggcgcaaggccgacaaaaacaagaaaattaataaaatagtcctgaagaggaagcatggcaccggccatcaggtgcgtctggctccaggctccaaagccgtcataattatggttgggcgtctccgagtcgcgaggtggccgatggtaggttcctgatgtggaaggcttgatcccagcaacttccacaatattctccagttgatggggacaggttaaggtggaatgaagctcggccgcttcccatccggtcgcccgggacttatacccctcctgggcaacgggtcccaaggagacctcctctagagtagccatgcgtttcccacttgcctttgaggacttcgaaccagaggcagacattttctattctgtgaaaagaaaaaaaaaaagaaagagaaaatcccagcagttagg

SEQ ID NO: 361403 - DNA, 564 bp, Cannabis indica
tgaaatggtggaaaaggcactgcgagctgagggcgcagttgggtccatgactgagtgtattaggactccagtggttggcggggctcctaccccttctgcatcaggctttagcaagggaggtagtggctcggccatggttcaaaagaggaaggcatccactgcaacctgtggctcaggtcaaaacaagatgttccgggggaaccagggtcgaggcagtcgttagggtagttttgagacctgatatacttacccaaagtgcgccagttgtaaaaggcaccatctgggggagtgtagaggacaagggtgcttccaatgtggcatgtcagggcattacaagagggattgccctcaacctagagctgaagcaccaaaggctccagcgaaacccactccagctaaggtgttcgccattactcaggctgatgcagaagccaatccttctgtggtaacaggtcagctctcggtcaacaactctttttactctgtgctgtttgattctggggccactccttcttatgtggcagccagaatttttagtaaattggatagaccacatgatagtta

SEQ ID NO: 361404 - DNA, 573 bp, Cannabis indica
tacagaaatagaaattcctgggctgattgaagatctattttagagaattgtctactgagttttggtcttgttcagaccgtgtgtgagctatcaataatgtgtatattgattataaatacaccttatagcagctaggtcatgtatctctttcatacactttgaattgtattcatatcttaaggaaatagtgtctttgttttgtagagaagagtttgttcgaatcttactctgtttatatgtattttgtactgccctgaatctgtattcaagcctacaaagaagaagaaaaatagtgctaccttcggaagaaggttttacaaaactttcgagagattccttttcaagtcttgccttgggaggaagcaagcactctttaaggagatcgaagggagttcgagcacttgaagtttcaacaaggttcgattagattgtggaatacatcaagcttgcggcttacaataagagggagtgtatttatgcataagtcaattactttatatttttgaaatctatttaattaatcttatctctaggtgtggccctgtgaactagtaacaatctgaaaggattgtt

SEQ ID NO: 361405 - DNA, 678 bp, Cannabis indica
agtgcccgacacacatcaagtggtatctcaagtcataatgtgtaagactgtggaaaaacaaccaataagaaggagattcagacagtcaaaggaaggagagaaagagatccaggttcagatattgataacgctctgctacagaaaagaatcaagggctagatatctgaactgaaggagtcattatattccgctacacccaatgttggtaaaatatatccaacagatagctctacaaacttcatgtaaaattcattcacagtcatatccccttgtcttagaccataaaatactccaatcagagccctcctgtgagatggactaaaatattgttctctgaagacttcctcaaaatctcaccaagtcatcccatcagtttccattgttctggataaggtctcccaccaatcttctgcaccaccctctaacttgaacacaacaaaagtaacttgatattcctcttcctatcgtattgaaatttttctttatctgcctcaaccaccgttcagctaccataggatcttgtccaccctcaaactcaggcacttggatccgatgaaaagatctgaaaatgatgactctgtcgagcggcaggatccatctgttgagcgggaactgctcttaaggcttcgagagggcgttcatggaaaatttgcttgtggaggttggacattagcttga

SEQ ID NO: 361406 - DNA, 916 bp, Cannabis indica
ggtcgaagttaaagcaacgaccaggtgagccactccgggcatacatcagcatatcatgacggaagcgaccaaagtttcgcgggtaaccgaggatggaaagttatccgcgatactgggggcattgaagtcctcagtgaactttggaaagatataaggaagaacgggccggtagactcaatgagtgatttcctcgaccgagatgaaggcttcatcaagctcgaagaagccattcaacgagcagaaggtgaacaaaagccgggcaagtcaaaggctccttccactggaacatccgcccaactccccaactattccaataattcaagctcaagtggcaagcgttcaagcaacaaccacaagcaaggaaacgggaagaaaggaaagttcactgataaatctggacagactccacaagagaatcatgccaaatacactgcattcactattttgactgaagatataaagtgtatatatggaaactcagtcattgatcacgtataagaagcccgggaccatgaagaaagataccaacaaatgggacatgacaaagttttgtcgtccacggagactacagccacgaccctaacgaatgttacaatcagaggtgggaaatagaatttctaataaagaagaacaatccacacctgtagaagtatgtcaagaccaaccaaggtcagaacaaccaagatttgctacctccattagtagatggaaacttacaagttattattggaggcccgcacattgctggagactcgggcaaagctcgggagaggtatgcccgaacagcacagcacgagcaagaagaagtcatcctggccatggaagaaaggaagcctaaagttccacgagcaggagagccaaccataactttcaacgataaagacgatgtcaaaattagatttccgcacaatgaccc

SEQ ID NO: 361407 - DNA, 751 bp, Cannabis indica
tttttttatttttctttttaaaatataatttttattttaattttaaatatttattacgtggactaattaaattgtgccacatgtatactgtgtacacgtagactgtgtacacatagtttaagtaattttttttaacacgtgaggtgtactaaaatataatgatctctattattaatacggtaagttattcaaaatttttaacaatttataaaaataatgttataggtctcgtcgtcccgaggcagctggtgataggtcccggaggtcgagggcttgatgcctgccaccaccacaatcttctccagctggtgggcgcatgttaaggtagaatggagctcagccgcctcccacccgttggcacgggacttgtagccttcctgggccacaggaccctgcatgacctcctccagggtggccagacgtgcttcccctttctttgaagacttggaaccaaatgcagaagtagacattttcgttgctgaaaaaatcgaaagaaatctagcagttaggccccaaaccaaaccctaattcaaaaagggaatgggggtcccctaaccgctggaaagaggccccctccggacacttgccaaaaaagaaagcctcaaaaggttttccttgacaagagtcgggtgcaagaatcccaaaggtagtgacattgcaaaaaagtaaagaaagaaagggaaaaaagggtaaaaccgaaaaggtgaagtctactttaagccctaaaatggtcattacatgaaatgaggat

SEQ ID NO: 361408 - DNA, 721 bp, Cannabis indica
ataattatcctaattatatgtcaaaatatctcaaattaagcattattcaaatttctacaaaaatatctaggttatttaaatatttaaaatacaatttataaatttctaataagtaaaatgatataaaatagcataaatatcatttttctaacttataatttataaacaattaaatatttaacaaaataacaaatttttgaatttgaaaatattatggttagaatatctataaaaatatctaggttaatttcaaatttattaattatttaatttatcatataagataattttaatataatatttcaaattaaaagataaggctatcatttaatttaaaatatgtccaatattaaaatatctgatcttataattaaataatatataaatattaaagaaattaacaaatttttaaaatctgaccataatttaaaaataaaataatcaatttttaaatttaaacctcaaaatatcaaaaattaataataatctattaaaaataaatattattaatttaaaattgatatttaagtttaaatattttaaaataatattttattttaattttaggttttgtaaaaaattagaaaatttgggaaaaaaatacccacaaaaatcggatttttggtgttggctgcccagcaggctgcacgtgcagtcaaaataggcggcaagtggccgaggacgcgcgcgggaggcagggtgtcgacctgcaaggtgacac

SEQ ID NO: 361409 - DNA, 855 bp, Cannabis indica
gaagtacttctaacaattctagagaaaactactgctgcggaattatcacaatacaatttcaggagcctcgagatagagtccataacacccaatgctgaaatgaatttctgcagccatattgcctgacaagtagcctcataacacgccatatactctgcctccattgttgaggatgttgtgagtgtctgtttgacacttttccacgaaacagctcctccagccatcatgaaaatgtagcctgatgtggatttcttatcatccacacatcctgcataatcagcgtcactaaacccaactatatcaagagtgtcagctcgccgataagtcaacatatgatccttggtaccctgaagataccgcatgaccttcttagccgctttccaatggctaagtccaggatcactcaagtatatatctacccaacacgccaacaacaaaagcaatatcagggcgtgcgcatacttgagcatacatcaggctacccacaactgacgcataaggaaccactttcatttcatctctctctttatcattttgtggacattggccctttgagaatttatcacctttcactattgtgcctttccaggtgaacaagtatgcatattgaatcttttcaaaatccgatcaatgtaagttctctgagacaaccgaagaatacctttagttctatcccgaaggatctgtatcccaagtacatacgaagcctcaccaaggtctttcatatcaaaatggtcagataacaattgctttgtctcagacaacagatttttatcattagaagcaagcaaaatatcatcaacatacagtaccaggaagatgaagctgctcccactgaccttcatatatatacat

SEQ ID NO: 361410 - DNA, 822 bp, Cannabis indica
tttgttaattacggagatttatatagaatgtgtgaatgtaatatgagctatatgtagaataaaaatattttagggaccctgaagactcgataagtggatatataagcgtaatttgttaattacagagatttatttaaaatacgtggatataatatgagttatttgtgaaataaaaatattttcatgtttggcgaccctggagatccgattggaggtcaaaaatgtcacaacagttttagttaaaaatattaatgggattattaggataagttgattttagaaatatcaaggtattttagggtactcgaagttggccaaataccctaaaaatagagatttcttagtggctaagaaataataagataactattaataatatatactaggcatagtaaacgtgccataggcacgtaattcccgtcaaaacatatgagttataattatatatcttacttttattaattatgtttatacaattattaaaaaaattatgtttaaacaaaaagattcgcttatagaaactaacactacaaaaaaaaaaaccacttttagtgacaattttttcgtcacaacataaattttttataactaaatatgacttttagtgacaataaaaaattacttgtgactaaaatatagcatttagatacaagttgtcactaatttagttttagtcacaacaagtattgtgaataaaaacacatttagtcacaacaaattgtgatttttgtgactaatacttttagccacggactttgtagtcacaacgtagggatgataatttaagattagtcacaacttttttacttttagtcacaaatt

SEQ ID NO: 361411 - DNA, 719 bp, Cannabis indica
agagtacacaaggatgtcgtcgataaatacaataacacaattcacaatgtccatatctagtgcggaaaactatctttgggatatcctcctgttggattctcaactgatgatagcccaatcagagatcaatctttgaaaagacagttttcccctgaagttgatcaaaaagatcgtcgatcctaggtaaaggatatttattcttgattgttagcttattcagttcccagtagtcaatgcacatctgcaaagacccgtctttcttcttaacaaacagtactggagctccctagtgtgagatactgggtcaggaaaaccctatgtcaagcaacccctggagttgaattttcaattctttgagttctgctggatccattctttagggagccttggaaaccgattctgctccaagttccaagtcaatgacgaaatcaatttctctctgaggtggtaaactcggaagctcatcgagaaaaacatcaagaaattcctaaaccaccttgatgtcttctggccgaatagagtcaggccgagtggtatccaataccacggcaaaatccctagacatccctcttgtaacaattctctagctgttagcactgaaattactggatccaagatccctgaaccgaaccgacaaagacaaacggttcttcaccttcaggttggaagattaccatcttcctcttacagtcaatactggctgagtacttggacaagaa

SEQ ID NO: 361412 - DNA, 808 bp, Cannabis indica
catcacagttgccttgaagttgatatcttcttttccttctggccgtcgaagttgatttttttttcaagcaaagacactttcgacttgttcttcactggacgacgaccacctttagccacgggagcaaaatcggagtcatcatcgtcaatgactaggtgtttcctttagccttgttaacaactgatttatgacctatttttgaattttttttttttggcaatggaaatagagaagcagaagataatatatatatatatatatatatatatataaataaactgataaaggagggagttggaataagaagatggcgaaagttatggctaggaggtagttttcgtggattttgaatgtaggtttcaatagagtaatggatggaaggtgatttctattttattaccttaatttttcttattgttttttttttaattattattagatattattatcaattactatatagaaatttagttacatattctaaaatttaattacatttagaatatatttaggtattttaacatgactttttatttttatttttattctttgaacttttttatttataaaaatacattttcagtaaaaacagtaaactggtttttggttgttttatagtttatttaaagttatcatgattttgtttttctagttgttcttagttttttttatagttgtcgtggttgatttttgttattttttaatttttttcttactttatgctgaaaaaatgtatttttgtaattttaaaacttaaaaaaagtatttttgtaaataaaaactttaaatcgtaaaattataaataaaa

SEQ ID NO: 361413 - DNA, 768 bp, Cannabis indica
caaaaataaaagttctctgaatccgattctaataccttaaatttgttcgtggtatgtctatatttcatgttcgaattaaaagttttacctatttgcactaagacggtctcaaaaacttaaactgtagttggggttatcaacttgggcattggatgaaaccctaggtacctaggttaattttcgaggtgttgattcgtgtattttcagctttcggaggttggatggtacagaatactaacttaaatctcatcctacacatctaaaaaaatcatgaaatttcacagagacgaagttgagaccgttgtgcataaaatttctattcgacactttgaaagaaaacgtaattttcatgcactaacaattttttaatcaaaatagtaaaaatctcacatttctaatagtagtacccctttctgaaatgttgcccggacccatctaggattttctttaacactagtcacaatgaatttgttctactaacatgtgaatatgaagtttggtttcacattaaatttggttaaaatagcctcctaattcaaaaattaaaaatattcttctctttaggataaattttaataagatttttctttactcctacacccgttagtattttgttaaaatctcacactacacatgtcaaaaaatggtgaaatttcacagggacgatgcgaagaccgttgtgtatcaattttctattggacgcgttaagaaaaaacgtagctttcatgcactaacaatcattttaatcaaaataaagaaaatcttaca

SEQ ID NO: 361414 - DNA, 670 bp, Cannabis indica
taaagaaaaaattataattttgaggtcaattaaaacttagctactatatatatttttttagctcagtaaatagtacttaactaaatatagaaattattattcattaaactaaacatattttattatttttatttaacttttttacatatgtgtatgttgtattattatattttttttattaaagatataatatttaaataatattaaaaaagaaataaaaaaaattgatagatggtataatataaaagtgtaagagataaataaaaaaaaaaaaataccattttagactttatgttttgtaaaatttattaattggacggtctgttttgttaaatgacaaaatagaccatatattttccaaaattaaaaataagacactgagctcaattttcaaaaattttatgtttttaatataaccaactttaagacaatttctaacatgaacataaatagaaaatgtaacccagttttgtcattatatctctaaatcaaaatattattatgttttatttggacaaaacatgagttcgggatcctatttgtataattttagaaaataaagagtttattttgttattaaacaaaacatattagtaacttttgtaaaatataaggtctaatttttcaaaaaaaaaaaaaaaaaaaactttagtactgtataagataaagt

SEQ ID NO: 361415 - DNA, 617 bp, Cannabis indica
agttcctggtaaaataacttccaacatgcaatccttgtgtaaatgataggacacttgctttgtatataaaggagtgattcgctaagaaatgagggagacatctttgcaacagtggactaagcagaccgtgatctgactgaaccactatatttctcttgtgttcattatttttccagtcttccattaagtatttgtgttcctgatttgagtactccccgttctgggttgaatactcgcacttattcaatatttattattattactataatttatttttggtgttgtaaaattccttcaacaacagctggcaggttaagcatttggacacgtagtctaccacatctcttttcatcccataccaccagaagtggggttttaaatcctgaaacatcttggtagtttccggatgcagtgaataaggtgtggtgtgagcttcatctaggatctctttcttaagctcatcaatattaggaacacaaactcgagctttatacaatagcattccattattcgagattgaaaagtctttaggctgactagccattacctcatctcgaatcctgactagctcgggatattctaattatgcttttttgattctctctaacagatcagat

SEQ ID NO: 361416 - DNA, 806 bp, Cannabis indica
aggtactctcgtcctatattgaaatttatttctatttcactataacataattgatactcacttctcagatttggcatcaaaatcataaacatttaattggtgatcagacaattaaaattaattaagtatgagtgaaatagaatacatagaaattgggagaaaattaaaccacattaaatccatatataaatcattgtcaaacaatatccatctaacccctaataattgtttagctattcatgttcattgtagtaaattcacacatattaattaataataaaagaagaaaatagagaataaaaaaatgttgaaaaactccgttaaaaaaagaaaaaaattaactctaaaaataacataaataattggctaaaaatatcctaataatttccctctcaatttttaataacttttaactaaaacaaaaaatctctattctcaatttcttttattagtaatttttatgaataattttttttttaataatttttttcttattttatggacataatgtctttccaattaaaatgaatgattatctattatttataactatctttactattggtttttttttttccattatactttgattggttttccattttatattttctctttacattaaatgtgatcaaacagaaatgaaattgtaatttaatgattatatttaaatttgtttctttgtttaaaaaaataataatctttaaatgtattaaattaattttattattatttaaattaataatacaagaataacaactctaacataaattttaaacaaaatatacattgtatatactaatacc

SEQ ID NO: 361417 - DNA, 725 bp, Cannabis indica
aaagtaataataaaaaaattgattttgtatccctttattattctgatgaatcccaactccagctccggcattgtctagctgaagtcgagctctggcaccgacgatcctcttcttcactttgtctgtgttgtcagattcaccaaaagaaataataaacaacatttcagatttgagattttctacctccttcttcaaacaaactttcaaatctgaaaaaaaaaaaatatctgcgaatggttttatttattgtcccaactaatttttctttcacaaatcttttacaaggtcgaagtaattttctacaaatgattttattctatatatgatttagtttggtcatctgttgcgatattttgcacacgcaagtgtacgtatcgtttcaagtagtagactcactaggagtgaggtcgatcccacagggagtgtagttaagtacgttgaaattaaacttttacttctatttgattaaataaaagataggaaaaaaacaatgaagtataagaaaaatagttggaagcaacgattcgagaaaattgatagttaataaactagggtgtcgatttcaattgtttttattgaatatggcctaatatgattattttcctaatattaattcctatgcaatagcaggtttactaaggtaatttatagtcttctcagatatataaacctcaattacatgtaaactttctactctcgtgataaatttaacatgcaacaggcat

SEQ ID NO: 361418 - DNA, 631 bp, Cannabis indica
aaaaaaattaagcagagtattggtaaattataaattttaaactgttgtgaattgttaagattctattataatgataatgttacaatctatttaattataattacaaatatataaaaatttatgttatataaatttttatcttttttcatatttttaattattttctcacaaaagtataaaaaaataattacacaaagtactatctttttgttaaatttttatattttgtatttttacggtattctataaaaataacacgaaaagtacaaaaaaattacattaacataacacaggaaaataaaatctaaataacattaaaataacagcaaaaaataacatataaataataaaaaatcaataataaattaacaagagtacaacataaaaatatataaaagactacatatgtaaataaaatcataaaaatcgtaaaaatatttaaaatttcgtacaattatattttgtaatgtttttgttgtttttgtgtatttgtgaaacaattcaaagtataaaatttatatacatttgataaaatcaattatagtatttttaaattatattttatcatgaaaaagaaactcaaatatataagaaattctaagttcatatagaatgttaatattaaatatat

SEQ ID NO: 361419 - DNA, 946 bp, Cannabis indica
atggactcaatttgttctatcggcaaatttaaaaaaaaaaattcaacaaaaaaatgatatagaaaagttgagtgacttaaatattttgtatataaatatatttttgatatagtataaaaaagatatatttttatatgtttttaagtaagtagttaaattgaatatagaaattcaaatttctcttttattattcgttattggattaaaatttaataattttatatttttaaaattaatatttatacttaaatttatttaataatgatattacctattgagaagtatttcttatatacataaatatatataattatatattagtaagttttttaaacaaaataatttacattgttaaaaataaagtaaatatctgatttatgaatttatttttaatatttatattatacaaaatatttgaacttgattttgatacaacaaattatttaaaagaatttaaaactaaaagaatgtcaagtaaatttttttaagctgatagaatgtcaactataaacataatatacacaagatgatattgttagggtttataaaacacttaagaaatatataaatcacagatccaaacatattcctaaaagtgctttaatatagaaaaccctaaatcataaatctataaagcctttgctaaattaaagaagaagatgataaaatatgagcggaagcactaacctgaagccattgttggagattgcagagaaggttttgatcttccaagaatacactattttcttaggtattttctctgatggggaaggagagaatacagaaaccctagtgtttcttggggaccactacctatttatagactcatcttagaatgagttttgggtatttataatttggcccctcaacaaattataaattaacttatggtatctacacattaattccatgacactttaatacccttttgatacccataacataa

SEQ ID NO: 361420 - DNA, 992 bp, Cannabis indica
atctcactcttttctcctttttcagataactgcggagaccagccgcctctccaggaccatcgtcaatcatggcttcgtcatgtccgaatttgggggcatagacgaggccgtgaggatccttcgggacttgtctgctgaaaggcgggcgatctaggaggagtctgagcgaagggaggccctcgttatggcgaagctcgaggaggaggccaaacaaagggaagcccaggcagaggcgaagctccgagaggaggttcgacggagggaggctgagctggaggcgaagtatcgggaggcgctgaaggcggaaggttaggtcatcgccagggccaggcgcgagcttcggaaggctaaggaggccatggacgaaatggccgccaaggtgaggtccttagaggagttgcaccaggcggacttgcagtccaaggctaacttggccgtatagatgaaggatctaaaggacttcagagatcaaaccttgaagaaggctaaaagagatgagctcctgtcccctgtctcttgcaagcgctgcgtcaagcgttttgatgacggcgtctacatggcctggtcgacaaatggccaaagtatcaacctcgacttctatcccaagcctgaggaggttattgctaaatttcgggagaagaagaagaaagttgatgccatgcttgaggcgtgtattggtcctcgccttcctcctcgcattgactaggccgattgaatccagcccactttgccaatattatatctcatttttttatttatagctacttttcttttattcaagacaatcttaaatatgtagtcgttttattaaggggagacaattgcttatggcctgtccccgggccctttgtaatatatatattttttacctgcccctagggccaggatttttatatatatgatcttttttttaatgcatattttcttttgaacctgccctttgggtcatgatattttgtttttacttttagcctgttttacatctgtccgtg

SEQ ID NO: 361421 - DNA, 647 bp, Cannabis indica
tccgggcttcttacattcaaagcgaattggtggatcttctttgctctttctttcttttaagtcactccctctttgtggcttattcccaaagttctttttgaatttcatgaactttttgtatttcttagagaagagtgccaagtcctccatgtcactacataagctttcctcatcttcttcactaatggcatgggaggaggaagacttgaatgcaatagtcttctttttcttctcaacttcctcttcttcttgagcactcatgaaaatttcatggttcatgagtgagccaattagttcttccaagggaagtgttgagagatccttggcttcttgaatggcaaccacctttccttgataagccttggtgagacttctcaaaatcttggtcaccatatccttttgagtaagtaccttgccaagagagttcaaaccattagtaattgtagtgaagcgagtatacatattagcaatggtttcatccgatttcatcttaaagttctcatattgagtggaataaatttgaattttagtttccttcatagcactagttccttgatgagtaacttcaagcattttccacatatcataagcggtagaggcttgttcaatatttttaaaaatatctctatccaaaccacatataagag

SEQ ID NO: 361422 - DNA, 616 bp, Cannabis indica
acaatatccatctaaaccttaatgaactgtgtagctactcatgttcatcgcagtaattcacacatattaatttaagaatagagaagaaaatagagaagaaaagtatgttgaaaactctattgagaaagcctccaatattgattttgctctccaaaatttgtactccttgattgcttgtgatttcctactgaattgcctattgaaaactattgaagtccgcttcttttatagccaaaaaatgattaaaaaaaaatgctaaaaaaacctattatgcttaagattagaaggggcggtgagttttctgttgcgtcaactgatagtattttagccgtaactctctcgatattgcttggaattggacgattcaagatgttctggaaagtttaaaaaaaaagatctagtacttttatgtttcaactttcttcaaaatctgatcagatcatagtcgaattcaggcttgaagtttcaattttatttttttgcacaattttctctattttatagttccatctccctgtgagatctttttatctttttttccatattgttcctttgatattttttttaatcttcttctattttgaatatgcaaaaataaaagataaaaagcataaaa

SEQ ID NO: 361423 - DNA, 611 bp, Cannabis indica
ttgacttcaaaatgaatctattacgtacagccattcttcctctcaaggcttgtacttccttaggctttgtcgatgatggcatgtctattaatgcctttattttttcatgatttgcttcaatacccccctcgcgttaagtatgaatcccaaaaattttcgtgaggaaactccaaaggaatattttttcgggtttagcttcatgttatacttctttaatatcttaaagcattccgcgaggtctgaggtttgatccttactttttattgattttaccaacatatcatcgacgtaaacgtccatgtttcaccatatttggtttgtgaacatttcgtttacaaatcgctgatacattgccccagcgttctttagtccgaacgacgtgactttataataataaagtcccatgttggttacgaagcttgtatgttcttgatctgggacatacatttttatctggttaaatcgagaatatgcgtccataaatgacataagctcgagcccagcagttgcatccaccaactggtcgatcctgggaagtggaaaacaatcttctagacacgccttattaatgtcagagaagtcgatcaagttctccaagtttcgttaggctt

SEQ ID NO: 361424 - DNA, 556 bp, Cannabis indica
tccatttttaatgatctatatatggttttaaagcttattcgatttcccataagtttcatgaaggaacctttcgttaattcggagtcatactatgtcgaaaagttagtttccttctgtatcatgtgattcgtttcttgaatattgtgctttaaaaactgttttggtaaaattataatatctctctgaatacaattccaatttcaaagattttggtgtcattggaaagagaattaaagttcctaaaatttttatgaagatgttatcctcttgttctgaacttttcaatgtcaaaagtttgtattttcactgagccatgtaattcgttactccatattccttctcagaaatagtttcggtaaaactatgataattccctcatttttaatccatttttagtgatctttatatcattgaaaagataatttaattgcctacaatttttatgaagataactttcattgaattagtgtagttgttggtcaaaaatagtgatctttctgctgtactttaagagtacgaattttaatgttagggccttgacccatgtcttattata

SEQ ID NO: 361425 - DNA, 1069 bp, Cannabis indica
attcatattgagcatcatattggactaattggatagatattgtaatatcttagaaaatataatgatattttaattggacatattttattaaatatgtgatttgagtggccattagagtagaattataatcctacttaaactaattacgagttaattagggaaatatgagaaaatgaataaataaagcgtaatttattaattacgaaaattttattaggactatggggcgtatcgtggatactcttttcagaaataaaatatttttagattcgacggccgtggaaaactcgacgggaggggtcagaaatatcacgataatttaagttgtgatacgatggtatttttaccgcactagtttaggaattttaagttactagtttagtttggggaattagaaatgactgaaatacccctagggttaattttaggctttaatttttacgaagggtaaaatggtcattttggtggggttaggatttttgttctgtatggaatttctaggctgaggtttcattaaaatttagtttatattaagttaaataatattaggaaataagatggaataatgtagaaaaataaggaacaatgcatagcattttctgtctccctcctcttctccttcgaagccttagaacccagttgaagctatggggttttcttttcaaattcaaccatttctagtgataaggtttaaggattgtttaagcttggaggtaagatcaccttcttcttctctttaattttctaggttttgatttaggttttgtggtgttttcatatgttttggggttgtagtgctgaggtaagttcagagtgtatttctaagttgaattgaaggttgttcaagtgtgtttgtgatgtttttgtgagctgtgaggtttgaattggaaaattaagtttttgaacttagttttgattcaagcatcgtgattttgtggtttgattgtaattttgagttttggatgttaggatatattgtttttatattgttaaactattctggagagtttgagcatgtttgatggagttttggttgggttttgatgcaaaaactcgatttcccatttct

SEQ ID NO: 361426 - DNA, 587 bp, Cannabis indica
atgtatgctatacaacaaaattaatataaaatccaagtttttttattttattttctaaatggtataccatagtatagaaaatatatataccataatacaaaatatatataccactggtagaaaaatttgactgagactttgatctttatttgggggtaatcattgtaatttggagatgtaagatagaagaagaagaagaagaaaatgagcaaaacttcatcgctttcgattatgaggctttgtcatttagattttagagcagagattctatttctattttgaaaatgaatataatgttaataatacccttatataactaagggtattttaggtactaaaaaataataaaggtcatttgctatattatttttaaaaagggacattatgcttcagtaaaaaaaaaggataaagggccatctactactatttcgcattttataaacacctctatcgtgtcagccgtgccaatattttaaagacgacctgtaagcccatatttttgtgacgtgctttacttgggccgatctgtttttcataaataggccaacttgttttcttatacatgtcgaactcaggcttcacttttt

SEQ ID NO: 361427 - DNA, 695 bp, Cannabis indica
tgaacaaatacagaaaatataaaaatttttgtgataatacttttagattggattataattaaattttattttgataaaaaaatcaattcagggtcctatttgtaccattttagaaaatacagggtccattttgtcatttaacaaaacacagggtccaattgataacttttgcaaaacacagagtccaaaatagtatttaccctaagacaaaatcacgtgtcacgtaatctgactcgtgcatttattgttcgaaaaataaatataaaatcacataaataatttgtgagccaaattgagagaagaggtgtaattcaataaaaaatacttcaaaataaatttttaacaattaaaaaaatcaataataagcagaaaaattagtaataatttaagttgaatagaatagatcttatttgttcaaatataaaatgcatgatctagagctgcatctcctctttatgtagtactattaggctatgattattaccacaatttatttatttatatatgtgatttatattttcacatttgaaagtataagacctacaaatttaaatgaataaataattacaaaagtaaaggaattgctattgatataatgtgtaagataaataaattattaaaacataaataactaaaaacatatctaatagtatacatatatcatagtacataaaaaaaacatattctaatatttt

SEQ ID NO: 361428 - DNA, 846 bp, Cannabis indica
aaaatcatatcccctatatatataataataataagaaaaaaaagaagctcaatgaaagaaagagagagatttataaaaatgaaagagaaagaaaaaaaaagaagaagaaaaggataatgaaaaatttaatagaagttgaaataaataaaaatcagtgtataacagtattagagaaaggctaggggtaatggtatcaagcaagtgaaatatgattattagtgtaaatcaatattgaatctcatataatttaatttaataaataatataaaaaatatataaccaatcacaatgcactatatctatatgatattgggcaccatatatgctcatagtataaattttaaaacttctcttaccatactataaatgtaaattttgaaagaaatataatattttgagtaaaaatcccacaattttattacctgcaaagttggggcaaaactgaaagcagtggaaggatgtgaactgtgttatctgatgatgattattgtacaatgaagatggcatgttcctatgactgctactactcatcatcgtgtttgatcgttgtacaatctccattgttgaattttgacgatcttgtacaatttccgaaacctcccttgtaagaatatgatcatgacgatcgcctcgacgagagagattaacatgatcttcatcatagagaagcctgacaccacaacatttcacttgacagctactaaactcatctgtgtagtcatttgggcggaaagaaaatgttgcagaagggttgatcatctgcctacttctactgctagccactagaggacccaggatttcatttaagcaggacaaaataaaacattaagggctcgtttagaatgc

SEQ ID NO: 361429 - DNA, 595 bp, Cannabis indica
tgtttattacaaataaataatgaagaaagacagatataaatatcccacatttactaccaaaaatttaaggaattaagtacaagaaatttatgcagatctgtttggaaaatcaaaaagaaaaaagaaaaccagattttgtttttgtcttggtcgtttgaggcttgtttgtattgtgtttgtgaataataaagaactttcttgatcaaaaaaagaaaaaaaaagaacaaagaaactaacgtttttcatctgaatcagtgttgttgaataaagctagacgctgtacgacatttccaaaggcggattctacagaaagaggttggagatcaaccgaaggtggaaagagattatgatcatccaaaccagcaacaaaccattcgtagatatcctcataagcataaccagtaattccaacagcagatgagttgtgttttggattcttgtagttggtgtgaaatggaggcaactctggctttggtgtgggagtgggactctgtgaagaacctttctttgaaactcgtttttttttaggatctttgtgtacactttagtgctaacaattctcgttttttttttagcagagaagaagaagaagaag

SEQ ID NO: 361430 - DNA, 506 bp, Cannabis indica
aatagaactctccttagttttaaaaaaaaaaaaattagtaattttgcagacgaaaccccttatatttaaatttgtatacacttaaccctcttatccttttttttattggcaaaactcccttaagttttacttttttttttttttctaaatttaaggtttcagttagatattgccgtcaattgatatttacgataatatttaactggcgtgtcaaatttgtaaagaaaaataaacttaaggggattttgacttctaaaaaatataaaaggattaagtgtataaaaattaaaacatgaaagtgtttcgtcgtaaattactctaaaaaatactacttttttctttatatcctattattaccgacaaaaaaaacaagatgatcgtctcgaaagtaacaacaactaggataaacaaatatgtaaagttaaaatatagcccacttactaaagaaatatacttcatggagatggagtatataaatttatctatatatataggctaattaggat

SEQ ID NO: 361431 - DNA, 466 bp, Cannabis indica
attttagggcatccactggccactactatccccatctcatttgaattcgatattgaaaacgtaccatattagctggagaccagtttacattttaatcatagttacttatacatataaacttatatatgacttttattaactactttactactttttgtttccataaaaaaaaactaataagctagctttataatttattaatttgttttttaggaaaaatatatatatatatattacaaaaacatgtaattcttctcagttgatgtttaaaaatattatatactattgtagtattgttaaaagcgacaacattactactaactagtggtgattaagatcgttacacatttattagttataagaattgaactcgaataattagatccaggggcagacccacatataaccaaggcggggcagttgttccctgaaaaaaaaatcgagaaaaaatatatatgcaatttaa

SEQ ID NO: 361432 - DNA, 817 bp, Cannabis indica
taatatcttacataattcaaagaatatttttataagaggtacacttggagacaaatcaatgtttttagacaaggcttcctcaaaaagcctttttttttttaactatatttaggacaatagagatagtatatcttttgcttcaattagggaaatttcacaaatactcaaaaaaaattaaaaaattacaaaaatatggttaaacggaagtgtaaatatttgacagttttataattttatttatacaaaatacagtcttttgatgtatttttatgttgttctcttgttaatttgttgttgattttttgttatttgtatgttattttttttttattttgatgttgcttagatattattttcctgttatttttatgtagctttcttgttatttttgtagaacactctaaaaatgtaaaaaaaaaaaactttgaacgtaaaaaatataaaatttttacaaaaatagtggtttatatataattatccccattaattactttgaaaatctagattttaaagaacatcaatatttttttgtgttagtttagctttgtgtgaatgactgttagattttaggattttgaggtttgtaattttatttcttgagacaaagataaagaagaagtgctcaaaaaaatattatttttattagttaaatatttaatttttaaataattttttaagaattataacatatttcttattaagttaaattaagaaaatttatttttatttttttaaaaaaattaaacttatttagcacgtgacctaataatatgtcggcatatgtctcctaactagcatttaacgaccttaactagca

SEQ ID NO: 361433 - DNA, 580 bp, Cannabis indica
atatattatttttttaactcttttagtaaaaaaaaaaaagcaaatagccttttttatttaatttatttttaagttgtatttattattttgctactatattagggtgttagttttttatttatttatttattttgtatacttttttttttcttttaggattagctattttttatttatttatttattttaggttagttttagacttttatcctttagggtaaaaaaaaattgtgcataaaatattttcataaactttttagtataaatccaattgtgtaatggtaaaactggtacaaactgagattgttttgtctaagaaagattagttttaaaggtttgtggtagagtaccctctacacattctagcaatcccggggagttctagtaaaagtagcacacgaattgaaactagacacatcccgaaagagatagtcaactgatcttggaattgcttgagatagacttgatgtgcttcatattgcttcctcaaagactaaaggccagtttggcacagctgtgctgtgggaaaaagcagttgtagctgtgctgtgagaaataacagttgtagttgtgctgtgag

SEQ ID NO: 361434 - DNA, 641 bp, Cannabis indica
attgtagtattatatagctattaatcgtatatagctattaatcgtatttttattgggtcattgttttattaattttgtcatcctaatatttttaggtgcatgataagacctctgacgttgttgacaagttgaagctttcaaagaaaaatattgtcaaggtttataatttgcttttttaatttgtcttgtttaaaatgttctctgattgttgttcattcattcattttatagtttgtttaatgttgttttgatgttgttttaactgctgcaggacttgatttctagtgatgatgaacttcaaagttgatcagaatagacttgttgttcatttctattcctttggtagaatgaagtgagttgcaaacattgaaagtgtacaagaaaatgtttcaaagtcttttaagaaagttgaagccactgtacatgaattaatgattgagcagtgtatttggagttattttatgatgcctatttaaatattctgttacagtggagttattatatatttatttatttattgttatttagttgttcaattaagaaaaactaaatatatatatgtttaattttacatggaaacatatataaagattgttgttgtgttatttttctaagattatttgtgttttttaagttaacac

SEQ ID NO: 361435 - DNA, 455 bp, Cannabis indica
ttagactatgtcttatttatgaaatttcactaagctagggcttaattgtgaagaaaagagattctagggtttatttgttaattaagagactttattaggtctaattaataaatatattaaatggtaattttatttgataattaattttaattattaaataaatatttttggcatttaagtggttgaattggaaaatatggcatttgtgaaagaataggatatatagttgaaaaaatggcaaaattacaaatggtgggcccacatcctatggtcgcccactaaagtatatttttaccatttatttatcaattgtttaatgtcagataattgaaacctaaacctagaaggattcttataaatagatagtgatggactcaaattgaaagatgataacagtttatgcattaaacctttcatccaaaatttgagccttctctttctatctctctctctct

SEQ ID NO: 361436 - DNA, 696 bp, Cannabis indica
attatatattacattatttttcacttttattattttttaatcatttattatttaaattaaaattactaactttttaaaaaaaaactaataccactttattacattttaacttatatattacattttttaatttttttatttcttaatcatttattaattaaattaaaattactaacttattaaaattataatatcactttattatatttaaaattttatattaaatgtcataattaaatatttttctaattatttattatttaaattgaaaatgtttttttttaaaaaaaactattacttcactaaatttttaattacatgtttcaatttcaattttatgtttaaccttatttattttcttttatcaacaattaatttatcaattttatttcatttaaacaattaattaattttacattttctctactaaaatttcagcagcataacggcttaaaaatttgtaaacctaaaatttctaaaacttataaataacacaaacaaatatttcacgacaatatataaataaaaaaataatccacccatccaacaacagtcaattttattacagaacttacttcactaacatgcatagacatattcactaataacaaaaactactacctatactaagcgaaagcaaaaaaaatatacctgaatcgagtgcaaaaataacaactgcaggcagctagcggtaat

SEQ ID NO: 361437 - DNA, 674 bp, Cannabis indica
atgttgtgatttgtttatgtatttatgatccttactgcacttgatatttttggaacagcttgatgcattgatgcatgggtttgctaaattgtaagggcgagagagagtgtgtgctaaaaattgaaggatttgatgaggctcttaaggcgcgatgacccacaaaatggagatgtgtttaagcaatacctataatcagagaagagaagaaaaagtatctccggctagaaaattgacaaaatggagttgattctgttcaatcaccggtggcaaaagcagttggaatggttgttgcactgtgtaaatttcaaccttcttcttataataataataataattctcatggggcggctgtttcgattgttgtgctacagccggcgggagccatacaacaaccaccaccaccgcaacaacaacctcctctgcggtctcaaacatccagtacacaatctcttcctattgctactactactactactacttcctcctccaatctttgctcaatgatgtctactaaataatatattgttatttatttattgtacaatttaaagtaatgatttcttgaaaaatttagttcattttccattagttcacatgtaatacagtagtttaagcattacacgcaagcctattttcacctggtagtgatatatatatatgttatataatttttt

SEQ ID NO: 361438 - DNA, 674 bp, Cannabis indica
gggcaacgccaggagattgatctgaggggagaaaggggttctacgtgctccgtccaactcgagatcattgtttctctgtccgacaatgccttggaacatattctttattcgttcagttgtgcctgcacagcttgactaacctgtttggcattttgaccgatctgagttatgttagtatctttctgagcaggactttgagcatgggtttcgggctgcacgattggcgtgtcaagctgatcgtctactcctcttctcctatttagatcgtttctgagatcatgagtcgtccccaacctatcaaatacagaagcgcctgactatctcagtgattggttggtttggctaatgtgctgaccgacactattaacctggttggaattaccgggtatgacttctcccaatgaattactagacaaggtctgcccacctactgcttggcccatatgtggaacctgtgaccagagatttggtggctgaccatttatagtctgagaagtattcatcgctggatcttcgtccgtttcacccaaggggatgacattcgggggttgttgcccgacagattgttaggctcttcgtatcagcacaatggcttgctgactatgattgtcaatctccgcatgatgagcccttaacgcttccatctctttgtccctccattcgacaaacatgcg

SEQ ID NO: 361439 - DNA, 664 bp, Cannabis indica
ttttcctctagtggcatttttgtaaagacaagtttgtaaaccaacttgggttttctcttatcttaaatgccttgtactcttttcattcaaagttaatataattgtgttcacttgcatttttattcacaatgtaaacaactatattttgatcaaatgtaaagtacttttgggtttttccattgctcgtaatcttcctgtttaagtagttagttatctaccaaactttttgattttcgagcagttgtcaattcttcctcgctatagaagttataatctgctttaagcaaacttgaatatacttttaataattttatcactttgtatatattagatttgctcgtatgaatagttaggttatctatccatttttaggttcaagtacttttatcaagacgtcttgatgtctagtttagcactttcctagctcacgtgaatcgttaatattcagttatatacgagagttatgagttatatctcatttataacttttgattttcctttcccgtcagataggtttttaatcaaaaattatagttgtttgatcccttcttcgtcaaaaaggtttgatcaggatgctataacaatttgacccctctctcgtcaaaaaggtttggtcaggaagttataacagtttgacccctctttcgtcaaagaggtttagtcg

SEQ ID NO: 361440 - DNA, 693 bp, Cannabis indica
cagaggagaggcgccagagcttccgcccatcctcttcctgagagcatcaagcatctaccgagacatgtctgcacagaccaaaaatagtgtggttagaaaacagccatcagaaaatacaaggcatgaaagtcaagaagctcaaaaaagaagtaaaatgcagagtgactgcccgcccacaaaatcagaagtccatcatcacctgacatcgactttatctcagacatgacagccttcccttttccagcaaagggataggacgaccaaacatgtgaagtgggctcccttatgcgagttgcatgttcaacaggcctaagcgtggccgggagtttcttcttcctcttcaatggggtcacctactcagcctcagcctcaaccttggcttcatcttcaagattcaagggctcctgagcatactgcttagccctgacacctcccttcaacttggcttcacgcttaagttgaatgagctcatcctccttatgagctcgttcaagccggtcagcatcagacctccccttattccccgccacgaacttaggagaaaagtcttctgcgtaaagcccatacttcaccaaattatcattgaaggtcaactggatgatattcctgtcttcctgcagcaaccaggcaagtttttgagctctatccctaagagcaagggtgaggggaggatggtgatatgtcgggatctgc

SEQ ID NO: 361441 - DNA, 514 bp, Cannabis indica
ctcttgatcagaaccaaaaaaacctagatgttggagagaggccattggataaagatccgcccatttttgattgataatagcccaatccaaacgctccagggtagtaccatgcttccaagtaaaacggctgccagagaaaggaagcgggaaaagagagtatttaccaacaaaactttgaaaagaatgcatggcatgtgaaggtggtaatccgtgggtattacgatcattaaagccaaggtaatcgttaaaatctccaataatgagccacggtgagagaggggcagtatcaaagagacgatgcaacaaggtccaagaaaaatgtttatcaacaacatagggagaaccataatagcaagataaatgaaaactaatattatttatagtaagcatacagtcaatatggtggagggaatgtgacaaaatattaacaaaaacattctccttccaaaacaaaagcaaacccccccccaaaacccgatctaggaacttgaaaaacattatcaaaatacatatt

SEQ ID NO: 361442 - DNA, 728 bp, Cannabis indica
ctcaccagacaacagtggagtcaagcatttctccaacgactgaaagcgaagcgaacaacgacctgaaactgaaagaaatcaaattaaagaaaaaaaaaaggttagtagaaatccaaagaactggctactaatcgggtggaaagtacagatcgaaagcaaaatccccatagattcggaaaaaaaagatcaattatcaaattgatacgttcgtacacccatgtagactaacagtaaagaatcgtcgagcctttctccaacgactgaaagcgaagtgaagagttcttcagccacctgaaactgaaagcaatgggaagttctgaaatttctaagagagagctctctctcatatacatatatatacatacatattataaatgcgacaaattttatctttcattgatttaaaaaaaaatgggtaaatgatgttttccaaaaattatatgtataaaataatgcacacctctttctgatttgagcaagagaaagagacaaagaatgaaattgagaagaaaagctgaggaggaaaagggtggaagatcacacctttaaggctccaatccgacggcattttggagttgccaatcgtcaagacctgccatcccttgatcttcacgagctttctaagcgaatcagaggcataatcagagacggagacgatgatccacctctccatccaaaaattcgcataaggtgaacccttatcagtgattggagtaatcgaattccaa

SEQ ID NO: 361443 - DNA, 510 bp, Cannabis indica
tatatttttttgataaaaataaaatatactcaagtttgttctcgtacaaattagtttttaacgaattgaatttttaatatctaaaaagattttctaataaaaaataaataattatttatatcgcttaattagttttaaaattttaatatatttttttttattttcttaatcattcaaaataactttttttaagatcaaaattaattttttaagatttattaaaaaaaaaatgttgaatcttttttatttttattttgagggggtacgatttgataattgtcaaaatttaggggacaaaattgttaattaacaaagacacatcatcatttaaacggaataatgggacgcaacctaacagaaggactaaatttctataaatctaaaagttcagaaaaattttaataagccgtatattttaaaatttaaaattaatattattaaaagttttagagaagaaattgctaattattaaaaaaaaaaaaagtatacacaaaattttaaggtagagaa

SEQ ID NO: 361444 - DNA, 849 bp, Cannabis indica
cttaagcgagataaggatatacacactattgtctcgcgcgttgataagaaaccattctacgtcagaagtacaatgtgaggcatcaacctcattatgtatgaagagatgtagacgagacatgttgactgttaaaagacttagtgtataatatacattatacaaactaagcataacagttgaatgaacctgaacagcgaatagcaaggcatccatctcgctataggaaggcctacttatggtactttcactagtctgctctagaaatctttcaatgatacctactgctctgtcgagtcagcttctcagaaagaagttgacattcaaatggtgttgactgatgaagttcaccttatcaccaagaactgcgattgtcagatggaacattgtgtcttcaaacgcaaaaatgaggagatttacattatcaacctcggaaagacatgggaaaagatccagctcgctgccagggttattgtttctatgttcctagcgagatgttccaacacgatacactttgcagcgtatttaatccacgtaagcattgacctggtaaaaatagatagatccctgctgtgtgatttttaaataataactgcatatattttacgtgggacgtaatcaaatcccatcatttcaggagattattgttgtgggatgtcagtctgattgtaattaactgccctcctatataactataaataggagcagcatacactgtaaaagggatggaaaatcctttagggaaaaatccctagttttgtatcaaaaatctaataagatagactcgtggactatgcagaattttaactgcataaccacgtaaaaaagcgtgtgttatttcttttcctttta

SEQ ID NO: 361445 - DNA, 588 bp, Cannabis indica
acaaaagattttgttatttgaatgaattagatcgatgcctccattaactaatcatgttctatattctactagggaatatcaacaatttaactcatattgtaatctttctaatctgtctatcgtgttaaataggttaccactaaataacatacatgcacagtccgttcaaatttcttgatgtctctaactaaatgtacaatttttaatatcaataacaattatgatattgcccataaattctagcttgagtcggccgaaggaccgatatttgggtccccttgaatcataactagcacttgggcacgactcgtacacttttcttctttaacatcagtctttcttaactgtgggcaggttcttttcagatgacccactactccacaataacaagatctggctctacatatcccaaatggcgcctttttgcatcttgaaaactaaagataagatcaccatttcttattctcacattaaccgctatcttgaccaccctggaacctttttatctggtcacataactggtggttcatttagttttagtttcctgaactactaataagttggattcatatattacaccacatctag

SEQ ID NO: 361446 - DNA, 226 bp, Cannabis indica
aatttcccgaaataccccttagtcccattttatgacttttagtgtgggaggggcaaaatggtcattttgccccattagtcttttgtctgttgtaatgtttaatttaaattaataatctgaattttattgttagttttgagctgagaaaggatttaataaaataagaaaattgaaaattgaaaggaaaagctttttctctcaaactctctctctctctctttcgttc

SEQ ID NO: 361447 - DNA, 603 bp, Cannabis indica
ttatagtatttatatatatatatatatatatataatatcagtctattattggtttatcaataatgtaacatataagactttttctttaaacaaaaaatacttatgactaaaatataatatttagatacaagttatcagttatcagtaatcacaatatttcagttttaataatcacaatatgtggctcaaactatgtacaataactctttttagaacgaatcactttaactacagaggattaatgatattacgtactactaataactcttgtgaatttcaactaatctcttcccacaaatatacatatgttatgatctcaacaatgttcacggggtaaaagtactatttttaacagtaaaaacgacgtttatattaattgttagaatttggaataaggtaaatgaggttccatcttaaaaccaattggtggctattttatatgctcaccatctaggacagctcgatcataagcgactcttttttggttcactatccctaatcacaagtggctcttttgctctactttttggatcagtttttttagatttttggtggctctctttcttttttagctcactaatcccgaatcacaagtgacatttt

SEQ ID NO: 361448 - DNA, 537 bp, Cannabis indica
gacaaaagtccttaaatttaacaatctcaatagttcgtgggaaatttttaatggcgaaaaaagttcaagaggcacgatttagtacatgtcaaagttgtgaggaaaaaaattagtgattaatacaagaaatgacgatatatatatatatatatatatattgaactcattaatttttgggatcatacaattgagtgggcggaaatttgtgtatgtgcttgccctctccaccatataaatatacataaatacgttcactattaatgggaattactaaatgaatagtattagaaaattttaaattttatatttagagtgtatttggaagtaactgtataattattaagtagtgtaattactagagtagtaattatacaatctagtaattacactatattttaaaatataaagtatttttggatatgaggtgttacttacatatgaatttttaatatcttatttggcaaaatagttagtaatgacacgagaaaataatattttttagtagttaatatttaaatagaaagtttttagtaattg

SEQ ID NO: 361449 - DNA, 694 bp, Cannabis indica
tttattaaatatatatattaaattgttttattaaacaaataaacacatactctctctctaaaaaaaacgtttctcctcattctctctcgaaacctagggtttctttattttcttcttcacctcctctcggctatggtgtccccaccgttgtctttggttgtgcgagtggtgctcatggtcatggggaggtcttttgtgcttcgctcgtaagttggatggtctctctccttggtgccaacaatccatcttctccgttcatgggttgttcttgcgtagcttttcttggttgatggttagatagtctcctcggtggtgggcgtggcgtgcggtctgtgggtcctcggatatagtggcgtctgaaggctagaggtcgacgttctgtgtttgtggtcgtggtcagagctatagttgaaaatatgtgtgtgtcgtgccgtcacgacccatattttgaaaagctcacaataataagggttgtggcgtgccggtccataaaaagatatgggtcatgctgtgtcgtgctaatattttaaaggataagcttgacaaagtccgtaagcctacattttcgtgtcatggtttactcaagttgcccgtttttcataaatgggtcaactcgttttctcatacgggtcgaactcgagcttcactttttttactattttttttttttacaattaatgagttaatcactaaa

SEQ ID NO: 361450 - DNA, 748 bp, Cannabis indica
aggagctttacagggtttagtcttttcttttcgacacttcccctttagcttttcatacttagcttcatatgctgaccttttcctttgtgcaggccggtttgaagctgggttatgcttactcccgggctaaatctgctgcttccaagagtacggctctgtccaacaccttgagggcggaggcagacttggctaagaaggaagttgaggaggccagggcagagactgcagctattctccatgagttgggtgaggccaacaagaagctttttgtcgctaataagaagatcaccatgctaactaaggatctcgaggctgctgatcttcttgaggagaccatcgagaccttatctgttgaggttgatcgtcttcaggatgagaggacttctctacggcaagtctatcttcggctgaaggaagataaggacgctcaggcggtcgaggcaaaccgcttgatggaaaaggtagatgctttagagactgccggcctcgagctcttctttgatttttggaaggctaatccccaggccaacttcgactacttaggcgacgccaaggaaatgtacctcgagtactgcgcggcccaagttgcctatactgagaaagaggtggctgcttcaacttctggccaagcttctaaccaggatgttgatgcttctcctgctcaaacaacaaatcctcctgctccagtcggctcagaagaaccaaatccagagcctgggactccatccgtttgaacattgatcttttt

SEQ ID NO: 361451 - DNA, 670 bp, Cannabis indica
acttattagtctattattgttatgacttagggcccgagatcatcgtttgtactccaagtacgtcggccaacatacctgaaccgaaacttgagttaagaaaagtatattatactgcatagtgcgttgtatgtaatacaattagtattgcaatgagttgattaatattgagatataattaatattgttatataatgaaaagaatgattggttgagtatcgataatgtaatgatattatgcatgtgatatattcactcacctgattaggtgatgtaattttcctagcgacgtaatgggcgtaagtacgggcatcagttttatatgatgagtaccgagcataggtacgagctcacctagttaggtgatgcaattttcctagcgacgtactgggcgtaagtacgggcatcactgatatataatgagtaccgtgcgtaggtacaaactcacctggttaggtgatgaattttcctagcaatgtactaggcgtaagtacatgtgtcaatgatttatgatgagtaccgagcataggtacgagcaaacctgattaggtgatgcaattttcctagcgacgtatcaggtgtaggtacgggcgtcagtaacatataatatgtactgggcgtaggtacagacccgtctcattagacgatgagatatattggtgccagattgtgg

SEQ ID NO: 361452 - DNA, 1008 bp, Cannabis indica
gagatgagtagtggtgccgaggcgaatacaggcaatgtctgtgttgaaatccttcatcaaatcatgaagccatcgatacgttggtctgttaaacaacaactcgggtatgcttccgaagatcggccacggagtgggacccggaggaagcgactgcttatgattattattaggaattagttgtttaaatttgatgaaaaatattgttagtagtaatataataattaatagtggtgctatggcaaatatgacactagataggaaagtagtagtagtagaataacaattattggaagacatattattttagatttgtaattctgatgaggcagccccggtgatatttatatgtaaatggccttataaatatgtaaatttaaatttaattttcatggtctaagataaatacttaaagtttatttttaatggtaataatgtctaaattatatatttacaactattatataagtaactagccgttaattgtcatgtcaatatggtcaacatgacaatttttgattggttcaggtcattaattttttattttttattttaaaaaatttattttaaatataccaataaaaaataaatgcgtggataatatttgtaatcgaaaattaatttaagtattagactgcaaattattttaaacgaaattataacataatttggtgtactcaacataccctcttaattaccaaaatctctgagtcaagtgtcggcaacaattcatgttgtacttaaatttggttaatgtgatatgtaatcaaatattaaatttattttagctcatataatttcaaacataattttaaaatatatttggaattttaaaatataagataccattaaatattattatataaataatatatatgtgatgtcatgctcccatcttaaaatattttagggggctggcaagtttataatacagtagaatctctattcaacaatacatttgggaccaagtaaattatattctaattgaaaagttataactaaatagagtta

SEQ ID NO: 361453 - DNA, 502 bp, Cannabis indica
gcacgtaactttttacttagtatatatatatatatataaatacaagtatatttacaaccactttagaatatctcattttaaaatacctcattcacttggagaaaatatctcaattatattaaatatttgtaattattttttaaatttaaatttaaataaatatttatcttttaaattaattaatttaaaaacaaatttaatgaaactcatcttacccataaaggtctattactgtgttattacatagtgccaggcgtcatcattgtcttaactagacaatagtgatgtctttgtcttgacaatacttggtctcctcaatttattaaataataaatttaaataaattattattacaaaataaataaatactattttgctaattcaaaataaattttatgaacattgttgcccctgatttttcccaatatacgtggaccaaccggacagggacacgtggatcctaacaccttatactttaattatttgctaagtctttatgtaa

SEQ ID NO: 361454 - DNA, 728 bp, Cannabis indica
aaatcaattcctaaaacactgaaacataaattaaaaacaaaactagttccacaacaaaatacatcataacacataatactcattaattatgttatataatcgattctattttaattaaaccagtttgagttatttcgtattttttatttttattcattataatattgttatagaaccagttctattttaattataaatggtctgagttattttgtgttatttttttttatttattatgttatagatacggttatatttcaattataactggtttaggttattttgtattatttgtttttattaattatattataaaaccagttctatttttgtttatatctgagacatctacttctggtgactttttcagtgacttttttcggtgatggtgacttttctggtgacgataacttttctagcgacttttccggtgacttttctagtgacagttatttttccggtgacttttctagcgacactaacttttctggtaactttttcggcactagcgacttttctggcgaaacttatttttattttacaaatatgaaatttttcatatttttttttttacaaaaatataacataaaaacacgtataaatataaaaaaataaaaaaaaaaccaaaacccactaatattatttatttataccatagaaaaggtaaactcttagggggcgtttggtatgaggtgtttaaaatagtttgattatagggaatattatga

SEQ ID NO: 361455 - DNA, 483 bp, Cannabis indica
taaaattggaaaaaatcccatgaaaatcggaatttttggtaaaaacacccctgttgccgagaaggaggctgcaagaatcctcacatgcgcgcgcacgaggagggatgcagcctccttgaccgagttttctcggtcagatgaagcgtgaagtgggcgagaaacagggacgactgcacggtccttgggcgtgacgcacggctttaaacaaagcttgtccaaggcacacgcgcgcgtctcctacttgtccgatgcacctggtgcgtgcgatgcaccaattcaaacccgaaacttcaaaaaatcatatctttttcaattcttatggaaatcgaattctgtagaaaacaatattgcttaattttccacaaggaatccaaataaattattttcagaaacaaaaaaaaatatttttcatggaaaaaattctatacaacacatacattcatcaaaccacatgaatccttccaaatcaacacataacatcgt

SEQ ID NO: 361456 - DNA, 636 bp, Cannabis indica
ttaaacttattttctatcccttccacattttttccctatacctaacatagtcaaaatgtccataattcttcaaaggagaatgcaactaatgttttacttgcaaactagagtacttactaatgtcttattacacttcctcaagtatgaacattaagctttgatggggttgcaaaatgggacttctaaaccttgtccacttgtatattactttacaaaatagctttcttttgataatattttataagatgaattctatctggatgagtgaaaaaatttcgaaagggttttaatttcataaggtctcaaaaatgtacgaaaattttattttctgtagtacaaatatctttaaaaaatttaaaacatatatttttttgaattattcttatccgaatttttaatagtactcctaatttatctgtgttaagtttttaattcaatacacaacttgtttggtttgataatatctcctatttctattaggatatttaaattgtatgacattatgctcattaccaatgagtatagtgcctctaaaattggtaccatacttacaaatacttgatgttttcatattttatcccaaaaacaagaaagaaagccaaatcatttacataatgataagatcactaaaagacc

SEQ ID NO: 361457 - DNA, 387 bp, Cannabis indica
ctctgatgtaagttactacggtaacaaatacatttttgatcaataaatgaataaagaaagtatttcaaattctattgagtcgaaaaaattagcatgattataatttacctaaagtgcgtacaaaaggtttagtcaaacccaaaacactgaacagataagcagtatatttgcgaaagacaagtgaccaagagtcatacgtctactcagtcacttggggggcacctatacctgtacaaagaatttggtaaaaataaaacaatcacaattacatggcaattataacccgatatgaccaaaattagtaatattcctgatattctaacccgcaatgatataaattctcaatcttagaatctcctacttgtatgtatatgtaaagaccgctta

SEQ ID NO: 361458 - DNA, 792 bp, Cannabis indica
ttattatttctaatattaaataggaaaatatcatataatttccaacagttcatatttagggtgttaatcaacatacttgtgagtagatctaagatcctggtaaaataatttccaacagaagtaccccgacctggcttgcttgggggtggacttcaaatcaatgtaccaagcaacctcatggggagagggcataccccatttctgggaggcatagaggacgaagagggcagacatatacttgatgcccttaggagtgaactaggtcgggcagaggctgaagaagtctgccacattcttgaggtattaatgcaaaggcatcgatgccccttgctaaccatgggcacccgactaggcgcacatcccctattcagggtttgtggcacgattgttgtaagctggaaggtagcagtccaagtcgcacaggtacccatcctggtcgagagaccgaaggcgcgcctcagtaacctttgacggagggcttacccacctggcgcccagggcaccctgccttctatgaggaaccgccgcagcaagttcctcactgacgtagtccacgccctcaaccagaacatctccgtcagcatcgactggctccctagcctcgttgtactccccgtagtttcggggtgcaacctctgcctcttcctcctcctcggaggaactgccaggacgtacatcaacctgcccctcgatctcctggacctcaacgtccccttcatgaccctcctccatctggacggctggatcttgttcggtgctgggcaaagcagcatgccgagccacttgagggtc

SEQ ID NO: 361459 - DNA, 393 bp, Cannabis indica
aacctaaatccctcaattccaacatttaagatccccttgagtaagctagatgaatcccttcactagctagattcaaaatcccttgaaatacctaaatccctcgattccaacactaatgatccccttgagtaagatagatgaatccattcaccaactagattcaaaatcccttcaaattagatttgaacctttgacgactctaacagcaagcttcaccttctttatttggcaatccgaggattcattcacatggatagttttggaatctggctccgataccacttgttaggatcgtcagataccatctatctctacattggtatgatattacagtagaacctctatccaagaatacatttgggaccaagtaaattatattctaattgagaggtt

SEQ ID NO: 361460 - DNA, 961 bp, Cannabis indica
aaaaaaaaaaaaaagaaaactatgatgactctggtttctccagcattgtgaatatctgaggtgccagtaccacactttggatagtttattaaggtttggcattttgggaccgcgacaattatgttgattgtatagaggatgaaaactatcgaaggttgctttagaaaattttgtatttcccattgaattgtaaggggttgtttatgcactaggctccatattaattttaatgttatgattattttggttgaaaaggaactaactacttcctacatagttatagatttactactcggtttggttagagagatgctacattataggtatgaggaaattagatcatatatatcttttaagtttatgtattaatttataccctctctttcaaaaaatttcacttttaccctttttttttcaagatttatttagcaaaatgactataatgaaaacttttattagctaaatcacttttcaaatattttagcaaaatgtgtaatgttttccttaaattcttttatagtctatttattagttgcataccaaaaattctttatatggttacttaaatacctattcaatattcttaatatgtttgttaagtataaatacatacatgtttgcacgtatattaaattttgaatcttttatatttcttgaattctaaggttgttattaaggcaacgacttagacaacttattttctttagccacaagtcttttacctggtatagtatcataccaaaagagcctccttgtaaacgaacaacactaggcaacgaagaatcaagttggttagtgtttaaaagagtctccttgtaaacgaacaaaagcattggttgttttgtacgccaagctcgcgtaatctcacttttgttttgcatacaaattattttgttttctctctatttttttctcattgatagaactcttccctttcttttctctctctcttgcttcgatt

SEQ ID NO: 361461 - DNA, 500 bp, Cannabis indica
tagaacaaaccaataacaaaaagattacaatatatcccattataacaattcaacattatagaaacaagaaattttcggacaacaaattctttgaagaaaactttatagtttgctccgtactctttcctcttacaactatcaaaacaagattatacaagaaaaataataaaattaaaaacagaatatacaaaatttaaaatgcaaaagaaaaaacttgatggtagatcttataagaaaacaacaccatataaaactttaaagattttttccatatattttgacattgattagaacagaacaaacctacacgaattcattgatgaaaaaaaatgacaaaaaaactaaagagaacttaactctaatcttataatcttattagagagagaacaagataaaagaatgccagaatgaaccttacctccgtgctcaaatttccctatttaaacttgtacgataatgaattataatttataaaattatgctttagtgtaaactcttct

SEQ ID NO: 361462 - DNA, 501 bp, Cannabis indica
taaaaaactaaaaaaaaaaaaaaagaaaaaagaaaaaaaatgacaccaaaaatataaaagcatgcccacaatcaccatgtgaaaatttaatttaaaatttaacccatacatgcatgcagtcccataatattaactttaggttttgatagggtctgctcttcttttaatttttatatataaataattttttataagagtaagttgtagtgtatggtgtacgacacaattattctggtcaaactcttttggttgttgacttgacttactaaaattatacttcataaaacttttgtcagcatatttttatgcttgtaaaagctgagtattatattagtaaaatagattttatttttgctagtacatttttatggttgttgacaaattattgatgatcatcacaaacaaactgaaaaactaaatgaaaaacaagctaaaatagagatccaaattaattgatcctcaagatatatcttcattccatctcgaacttacatcttcatc

SEQ ID NO: 361463 - DNA, 756 bp, Cannabis indica
tccgagtatgggtcacagtcccattctggtctgggcttcgagtcccaagtctcagtctggttcttgggtcctgagtttggccccgatgaccaagttcgggtccgagtaccgtgttccgattttgttctgggttccgtggcttaggtctaggtcccccatcccaggtccgagtcctaggatccggtttgggtcctagtcctagtttcaattttgattcagtgtccgtgttcgagttttgagtctgggtctgggtctgggttgaggtctgattcctggtccgagtctgggtctgagtctgggtccaggtccggatcccgatctgggtctgggtttaggtccaggttcaagttcgggtcccgggtgcgggtccaggtttgggtctagctcagggtctcgttccagatctaggttcagagtttcgatcctggtctggatccaagtttcggtccaagtctcagtcttggtctgggtacacgatgtgttctccctacttcaggtcacggtttgggtctgaggatatgtcctagttcggttctagggtgggtccacgtcctactcacggtcctagtcttgtttgagggtcccggtgttgcggttcttgttcaggttctagttttgggtcaggggtcgggtttgggtcctggtctgagtcccaagtctagttcgggaccgagattggggtgcggttctaggtcccgaccccaattgtgtgtcccgattttgcttccatgtttgggtcttgttcgagtccaggtt

SEQ ID NO: 361464 - DNA, 569 bp, Cannabis indica
cattcaatattaacttttttttttctttttctaaatcattttctctctcctgcaagcattcaatatcatttcattggtcatttcattccatgaaacagtagtatccaccaaagagaaagtagtaggtttaaaacaatatatatacaccacattatatagtatactcataatttttttacactatattcataaattttttttaaaaaaaataactctttctcttttttagttttaaaaaaaagtgaacaatttttttttattacactgataattatttgagctcaaattttatatcaccacaatctactttttaaggggatcgttttaatatatcggaagcatatatttcattaccattgttagaaaaagataattaaaaatcagaagtaatattttagtttctttactagaaaattaaatttataaatatcaactaattttaaaataattataagaaactaaatttttaaacatgacgtattctctgttgtatagaatgtgttggtgttacttatttcaagtaaattatactaaaatttttaaatatgaaatatataatattattgtaa

SEQ ID NO: 361465 - DNA, 867 bp, Cannabis indica
tgcctaaaacaacaaacaaacaacaaaaaaaacgatattgaatcaaatatttgcaaaaataaattaaaattcaaacaaaaaacagaatacaaaaacagaaacaataaaatagtcacataggatgttttagaaaaccttcaccaacccaagcatcaaactttgcctcaatttcaggagagacgggatcaacaaatgaatcgttaagagcgtaaaggcccttcacataagtaaccatcttaaaatccctctttctctcctcctgattgagaacctggtgacattacctccattggagtgctcctcacatcagccaacccaaaatcaacaaaaggcgattttaatgccggtgcacgctttctcttatccataagaggagtatcagaaacagtgtcctcagctttttcatcagaaggaatgacagctgtcttttcaacaacaagacttggattttgttttcggactagaaaaaaaacaaattgaaaatcaggaaaaggaataattgcaaaacaaacataaaactgccaagcaattaacataaaatatattttacttgcaaacaaattaagctacacttacatttattttacgaacagcttctaaaccagccaacacaacttggtcatcatcaatttcaaggtgtcttaaaccatcgaaaaaatcatccccttttacactagactctttggccttaacgttgtcaacatccttagccctctcatcactaacagtctcagattgattcacatcagcagctgaaacatcactagcaaccttatcatctccagcatcatcaccaccatctttaaccaactcatcaccatcatcggagtcgaaattaatattttcaggatcaggcaattccttgtc

SEQ ID NO: 361466 - DNA, 716 bp, Cannabis indica
ttcactcaaggttcgaatatgaaagaacaatgaaggaggtgagaaatcactaaggaagaaactctctcatctagattgaatagcagtagtcaaattgacaagaggatgagatgagagtatcatgttccttttatagtgtttcaactagggctaagtgttgaattatatggattaaaaaagaataaaatattaggcaaaattcacttattggccgtacacttaataagacaaatctctagtaagatttttgccagtttatttcaaccacttattattattttcaataataccattttttccaattcaatcctataaatgccaaaactatttatttaataattataattaattaccaaataaaattgtcatttatgtaatttattaactagaccatgcaaagtctcttaattaacaaaatgaccttaaaacctcttttcttcacaattaagcccttgcgtagtgaaaattcataaataagacgtagtctaattttagaattataattgattaattaaaatcaattaactaagtctgcaatcaataatatctcaactcgtgaagggaccatgagcctatataactgagctttcaataagcagatctagaattcaccaagtaaattctctaacttattaattcctccttgtgccactatagatttggaattgaaaagcactctcagttatatagaacgctctatatgtaccacgatatag

SEQ ID NO: 361467 - DNA, 870 bp, Cannabis indica
aggtccagcagatcgaggagcaggatgatgtacgaactggcagttcctctgaggcggaggaagaggcggaggttgagcccccaaactacggggagtacaacgaggctggggagccagtcgatgctaacggaaacatcctggttgacggcgtggactacgtcagtgaggaacttgctgttgcggttcctcataggagtcaaggtgccttgggcgctaggtgggtaagccctccatccaaggttactaaggctcgccttcggactctcgaccaggacggatacctaggcgacttggattgctacattcccgcccacaacaaattgtagacataagaaactgtactttagagtggtcacccgacctaagtacattgtttcttttatcaaaaccttttggcgtagtccgccagtaggccattcacttaaaagaaaatgttcatttagtacttaaggtggtcatccgacctggtactttatcggtagtattttcttaaatgtttccctttccaataccgtggtactaaaatgagttgcattttttcgtcatacttacctaatttgtatgctccgcagtcaagaacttcatccactttatatggtccttcccagttaggtccaagtacacctgccgtactatctttggtgtttaggaatacccttctcaggaccatatctcccacgaagaatttctgagccttcacttgtttattgaaatagtgagctactttttgttgatgggccatcaactttaagtttgcagtggcttgtctttcttccatttcatcaagtgattatgctaggagtatgtgattggtaccttgatcgtacgtcaatcttctgtgggaaggtggctcgagttcgacgggcagca

SEQ ID NO: 361468 - DNA, 939 bp, Cannabis indica
tgagccacatgttgtaaatcactactgccaaaatggtgatattgagctgataaatccgagtatgacctgtcataataacccaatcataccagtcagtataagcaatcgccaaacccccgtatcccatccaagcaaaaatcaaatccagaacttttcaagataacacacagttaaaaaatagatgctcatgggattcctccacctcatcgggcatttgatcgagctaagaacaatgtgaaaccgagacatcttgtccctgataaggagatgagcattcatcacttgccataagataaatctatgttttggcacagataaagaacaccaaacaaccttgtaataattgatcgggctttgaaccaatctattctgtacaaccaattggttttaaactgacctaaagcaccagctttcactatctcattttgctcaaatttcttccttagatgacacaatttatgccagtactagctcgaatctggttttagattaaaagaccaaaagctaatagatttcaagtagatattacctacccacttaacccacaacaggtcttgttttgtggaaatcgcccaaatatatttagcaaggatagcctggttctatttgacaccatctttaaatccaaggccacctgttaggctatttttagcctaagttttggatcacattttatagttatttttcttctttattattgtttttggaatagaattacgcttgttttctttggtttcaggtttcaacacttggaatgtataaattggataaatttcagaaaacagtgatctataaaatagagaaaattttgaaagagaataaagctgaaacttcaagcctaaattcgactatgttctgatcatattttggaaaaagtcaaaacataaaagttttagatctctttcttatctttccaacgcatcttgaatcagcccattt

SEQ ID NO: 361469 - DNA, 608 bp, Cannabis indica
atttgcttaggaattttttttttaaccaaatgtaagcataaaaaatcaaatttccctaacataaaaattactaaaataactgtaaaacaatagtaaaactacaaaaataactaaataaaatcacaaaaaaaaaattatactttaataactcttttgctagtagagactaccataacatcacgagaatgaacctttaccttggaaaattttctcttaccctaaatacataaaaaaaattattcagaacaaccaaaaacaaccgttaaaaaatataaaaattaagtacatactactaaacaccgaataacacatacataacaataaaatatatatttaataaaatcagggagtgatgaacaaaatctaaaaattgatatctaaaactgaacatacaacaaaaaaaaaaaaaaacaaaaaaaaactaaagaagaagaagcttaagaagctgatgttttttttgtgaagatgatggagatgagaagagctagaactaagggaaaccacaattgaaaaacgtggatcaatctttcaaatacatgaagaaaaaaaactaaaaaaagaacttaagaagaagaaaattttgaagatgatggagataagaagatcag

SEQ ID NO: 361470 - DNA, 811 bp, Cannabis indica
ttttctcagtcgttctatgagcccaaagtacttttggtagttcatctaccaatttaccctttgcagtgtccaacttctttttgatagtatcctttaaggttttattcacagcttctacttgcctatttgcctgaggccttgagactaatgagaaactcttaatgatcttgttcctctcgtagaactcagtgaataactcaccatcaaaatgagttccattatcaaatactatcttaatgggtattctgaatctgcaaattatgttcttaacgacaaagtcgagaactttcttgcaggttatggaaaccaaagattcaacctctatccactttgtaaaagaagtcgacagccactattgcgtactttactcctcctcaccctgtggggagtgccccaatcaaatcaatcccccatattacaaatgggtatggcgaggtcatcatccttagttctgttagtggtacgcgagatatatgtgaaaatctttgacacttatcacattttttgacaaactcatgtgtatctttatttatagttggccagtaatatccttgtcaaaattattttctttgacaagctttgccaacctgcatggtctccataaaagccttcgtggatttctttgattatctcgcttgcttctgtggggagcacaaaccgtatgagtggtattgaataacctcacctgtacaattttccttctactatggtgtagcaaagtattgtatataaaagtttttgtgcctcgtttttgtcttttggaagttgtccattgagaaaatagttaactatgggtgtcatccatgtaggc

SEQ ID NO: 361471 - DNA, 553 bp, Cannabis indica
caccgctaaaacaacaatcaagaaccaaaacctacccaagaaaaagaaaggggaggggagaaaggctaaccataagaagaaaactgcccttacgaaacgaggaagtgccaggactaaaaggggggaaatagaagaatagggtagaagaaaggggaggatcccagaagaaaaacgagagggaagacaacagaaggatgaaaatacaaaaaatatacacgacaattaaaaacaaaacgtacaaaaggggtaaaaatgaacgaaaagaaggtaaggatgaaaggaagatataaaaaaagagagggagaaataaaaaggaataaaaaaaaagagagaagaaataaaacttaagataaatagagaaacataatatatatacctgaagacagcaagatctaacacagagaagttgaaacgagcagcagagagaaaagcacgaagtgaattttcgaaattggtagtcttatactcaagagtgcgccgccaaaatacagagggaggttagggaactatagggcatttataagaaaaacggttctcgaggttccaccatcac

SEQ ID NO: 361472 - DNA, 422 bp, Cannabis indica
gaagttcaccttgttgccaagaactacaattttcatatggagcattatgtcttcaagcacaggaacgacgaggcttacatcatcaacccttcaaaaacatgtgaaaagctctagctcactaccaaggttactgatgctatgttcccatcaagacatcccagaatgttacgatttattacgtatttaatacacatttatattgacctggtataagcggacccatcataactgtgtgattttcaaatgttaaccgcatttattttacttggtatgatatcaaaccccacaatttcaggggataattattataagatatcagtcaactatttaattaactgccctatgatataattataaatagaggcatgttgtattgaaaaggggacgaatatttcataagagaaaacagtcctagagctata

SEQ ID NO: 361473 - DNA, 546 bp, Cannabis indica
ataacagttccgcacacagccagagcgttcataacatgacaattccacaaggcatcaacgcccaaacgaccatcggagacgcaaccgaattgcaaaatctccgtgctgcgctcggactcatgcagggtcatagcaatactctgcatcatgatcaggaggaactgcgtgccgcagtaaatctcgcgtttgatgaataaaggcgtatgtttgctgaatggagagacaaagagatggaggcattaagggctcaccatgcagagatcgaagatcgtagtcggccagctactgtgctgatatgaagagcctaccagactgtaggccaacaaacgccgagcgtcattcccctgggagaaacggaggatgacccgacgatgaatgcctcccagacaaccaacagtcagccgtccaatccccggtcacgagttccactcgtgggccaagaggtaggcgtgcagactttgtctgggaattcatcaggaagagtgataccagacggatccaatcagaataatggagccatttcgcctatcaaccaagcgaaccaat

SEQ ID NO: 361474 - DNA, 650 bp, Cannabis indica
ttctccttcctcagagcccacgttcgctcttgaggccacatcctcatcgtcggggtcttgagcgtattgaggaggacggggttgatgtgtgttgcgagtctccaccattgttgttttgtaatattactgcctacttgcagacgcttccttcagctctcaatgaaagcaccaaaatgttgaccaaggtttatggcaaccaatataataataataatatttaagaaagctgtaagaagttaatgcaagagatttttacgtggttggggcattaatgagccttagtccacgagtctgtatatttatgagagtatttattacagagaatgttcttggtgagtttttctctctaattcttatggaacccagaattctcgacccctgccttaatgagtttggggggtatttatagtgttttcgtatggtgatccccagaactgaggtacatgtctttctgtaatattcagtaaaggcacacattcccaataggtacatcataggaaattcatggtctaatccctaggctttttaggggtttaatggatgtaatccattatcctttcttgatagatgtgatttctcataaagtagccgtcactaggctcattaatcatagcgtagtagctgcagaagggggttacggccgtcagact

SEQ ID NO: 361475 - DNA, 577 bp, Cannabis indica
tgtacgcacaggatggtaaattaccatcatgctaataaattcgactcaatttgaattttgaaaaaaacaatatttattcatttattgatcgaaagtgtgtttgttattgtagtaacttacatcaaagctattaatttgatctaatctgatctttagcttaacatgaaataaaacaatttgcagaaattaaacattgtactttagatggtggtcatccgacgtgagtactttgtaatttcatccaaacctttgggcgtggtccgcccaaaaggccattcacttaagagtaaatattctttttgtttagtacttgatatggtaatctaacctggtacttctattggtagtattttcttaaatgttctccattccaatacatttgtaccagaacgagttgcattttttaatcatacttacccagtttgtatgctcttgattcgagaacttcgactacctgatatggtccttcccagttaggtctgagtacactgtcgtaccgtatttggtgtttaaaaaatactctttttaggaccatatctcccacaaataatttctgacccttcacttgtttgttgaa

SEQ ID NO: 361476 - DNA, 1248 bp, Cannabis indica
ttttataaaatgactttatttgacatttaaaaataggatatattttaataaaataatctagataattttgaaaaattaaccagatattttgtcaatttttaaaagtttgttattaaattaaaattaaattataaaattggataaatcattttattttattagatatttaattttatattttaaaaataacataaatttgaaaagttaattgataattttgaaaagatatttagatttattataaatctaattttgaaattataggtttaattttaaattattttttttaataattttaaaattaaatatttatttatttaaagattttagaaattaattaattatttaatttaaatttaataaatcctataactaactatccaatgttgttacatgtgtgtttatttattgtttattcaaactaattttttaaaactattattgtttgatctaaatagctatggttaacttatttacagatccaatgatctaattttaaccatagtccaattgttaataggtcaaataaatattttgcaacaggtaaattttgtaatcttttttcgtttgtgtataaatccagtaacatgataggatccatccaaattattgtgtgtacttgtgcctatatgtttgctttggacctagatgcatatagggagcccatttaattttaataattaaaatagactaggttgctaaaataaaaatgtgaaggcccatttactatatttgaataattgtaatatattaattatactagtttaacctaattaaaatttattagtaacataattatttttcaaaatatgaaatttttttcatcagattattttgaaattaatttaagaaaaatacacttagtttaatgaaattaattcaagaataactatatgtattaaactgatattttattaaataaagaagttgtaactaattagatttttctagatacgtagttatttgaattttcatagaaaatatatttaagttgaaaattaattttttaaattaattttggatcaacataaattagaatattttttaaaaaaattaataattatgttagatttttctagaaaattagttattaagatattctttgaaaatatatttaagttgaaaatttgttaattttagatcaacttaagttgggatattttttaaattaaggtgattagttcaagataattaatttgttatttaattaaacttttaaaattatttaagttgaaaatttagttattt

SEQ ID NO: 361477 - DNA, 873 bp, Cannabis indica
ggtcctttaattttaccaaaatataccattttatatatgttataatttagaaaaatatcaaaaaacagattgggcccccaatgcttacaggccggccctatatatatagggtaagttgaaaaataccacttgtattaatcaattaatcaattttacctctaattttatatttaattgaaacatacctctttttatatgtattgtacccaaaatacctgacataagagagtcacatagagagtatcttgaagtgacaggaataaaattggtacaatatttaaaaaagaggtaaaaatgatagagtttaaaaaagggtaaaaataaaagaggacaatataagaagaatatagaatgtaatttcctctatatatgtatatatatcttcttcttatatataattaatatattaatagatatattatatattatatatgcagaaaaggaaggtatatatgatgtattgcatttgaattagtttggcaatataaatagggtaaatagtatcatgtattttgcaaaagttacagattggattctgtgttttgttaaatgacaaaataaaccctatattttctaaaataataaaaataggaccttgagcttaattttagacaactttttttttaatgcaaccaacttgaaataattcctaatacaaatagatacaaaaaatataaacagttttgtcatagcacttttaaatcgaattataattaatcttttaaaattaattcagggtcttatttgtaccattttagaaaatacaaggtccattttatcatttaacaaaatacaagatccaattgataacttttgcaaaacacagggtccaaaatagtatttatccatgtaaatatgatattatcatgatat

SEQ ID NO: 361478 - DNA, 1012 bp, Cannabis indica
tttttatttttattctaatcttcaaaacccctctttttcctaattcttactaatttgtgaataattgaataaacatagtccttgtgggatcgacccttacttacgattatactaaaataattggaagtattggaatgaaaaaaacagtaaatttgttgtggcttacgacacgcatcactagttgagacaaacatcttgtaagactcagttatttaattaatcaattataattctaaaattagactatgtctagtttatgaattttcactaagttatggcttgattgtgaagaaatagaattttagggtttatttgttaattaaaagactttatgagtctaattaataaataatataaatgacagttttatttgataattaattttaattattaaataaatattattttcatttatatgattgaaattgaaaaaggtggtatttgtgaaaaatagataaatgattgagaaaaatagaaaaaatctaactagtggtgggcccatatatggccagccataaggtcctatttttgcaattattttattatttttttattctaaataattcaatcgtaaccctaagtgaattagtgtaaaaagaaaagaaatgtctcattatccaacgaatgttgctaatgcttctaaacctagttttcattatgtcacacaaatagtgttttgagacttcttcttcttcttttctctctactatttcaaaattcttagtgttcttcaccaccaaaattcgagccttagtgattgattgtattcctacccatagcaagttagtcctcaatcatagtgtgtaagactgtgaaaaatccaaacaactgaaggagtatcgggctcagatcttgattatactctgctacagaaaggatacaatagttagagatctgagcggaatgagtcatttaattctgttgcaatcaatgtaaggtttctcataccttttatgtgttgttttatatcgttttagaagttcatatttaggatgttaaaaacatatttgtt

SEQ ID NO: 361479 - DNA, 652 bp, Cannabis indica
atatatatatgtatatagaaatttatattaaaaaaatgaaaaatatacgtacatatattttattgttgttaattaaattcaaaatagtatagtaatagagaaaatttagaaattagatttttattatgaatttttatttatttaaaataattaactttaataaaaaaaaattagaaaaaatgagaacgtacaagattaggtatatattttattggttttaattaaattcaaaataggatagtaaatttatggtttaaataatatcacatgagaacaatatataatattgtatatatataaataatatcagttcaaatatcaaatatcagtttaaatgggatttgttttatttttattttattattttattatatataaataatattttattattttattaaatataaataaaaagtcacacccatgaatttctcataaaccaagaatttagttatataggcacactttatatagaatagatatttaataaaagttgaaatatttttgtagaaattaggattccttactcctaacttatgaaaaaaaaaaactaccaaatattaatttttttctaatttttacatttatactttatgaagaaatttttacgtttatatttacttttcttacttactttttttttttttatttt

SEQ ID NO: 361480 - DNA, 506 bp, Cannabis indica
gctgagcaaaccagggggttttgctgttgatttttggtgttttcatcaaggaattcaagggggaataaaaccaaggtaagctctagtaactccttgccctagttcttgaatttaagtttaggttgagtatgtgaaattgagtttcaggggctattaggtttgcttatgcttagggttcgaattttagggttcatttgagttgatttatgttcctagcagctggttttgttgattggtttgagttttatgcaattttgagctttgagttcaaagctttgagctttaatggcaacttgattttaaaatggtttgttctgtgaaataatggctggaatttattgtttatgccctaattaggtactctggaaggtttcatggcaattggtggagagttgagcaacaaatgaaaggttttgggaaacctggtgcaaaccggctagcctgtttgcagtgccacaaaaaccgactagccggtttgggcagggttccccgggcctttcattttc

SEQ ID NO: 361481 - DNA, 854 bp, Cannabis indica
cgcttgcgagttgataaatgtaaaacgtaccattttggtatacaacatcggtgcaaaaagtgcatttactaaggctagcatatagtttatgttttcgaagaacatccaaaactgattgcaaatgtgaagcatgatcatgcaaactcttactataaattagaatatcatcaaaatacacaacaacatatttttccaatgaaagcacacaaaacatgattcattaatcgcatgaaagtgctaggtgcattagttagtccaaaaggcatgactaaccattcatacaatccatgtttagttttaaatacagttttccactcatctccttctttcatacgtatttgatgatacccactcttaagatcaatcttagaaaacacacaagaaccatgcaactcatctaacatatcatctaaacgaggaatgggatgtcgacattttaccgttatgttgttgatggctcaacagtcaacacacatcctccatgttccatcattcttaggaacgagaattactgaaacagcacaagggctcatgctttctctcacatgccctttggtcatcaatccttcaacttaacattgtatttctttggtttcatcaggattagttctatatgcttggcagtttgggattgaagcacctagaataaaaatcaatttgatgttttattcctcgaataggtggcacaccatttggtacctcctcgggaaacacatcctcaaattcctgcaaaatagaaacgacaacactagggagcgaagaatcaacttggttagtgtttaagagagcctccttgtaaacgaacaaaagcattggtgttttgtacaccaagctcgcgtaatctcacttttttt

SEQ ID NO: 361482 - DNA, 739 bp, Cannabis indica
actaaatatagatatgctataaataatccattatttaaatcacaataattattgatcctctatcgatagtttacattgagtagagacaaaattattgttttacctttcaatgtattttattctttaaacacttagccaattgtaaatgatatatcaggaaactaatataattatagaaatgagcattctatcatttatcgcgttaaaccaagctctaagaaactatcattttacttctaaatagttatagaagttataaatgttcaaatctatgattaatactcctactcaattgtactaccaagttcccaagatgtaagtattatgcctacatgtaatctgtaacgaacaagtcaaagaactcgtgtaatacatttaaattagagcttaaccatctcaagattgagatcaaatgttctatgatcaactaagtgacattgacctaaaaaagatataacgacaagtttatgatatcttttctactatcaatatccgtccatatcgatctatagccgatacattgatactagtgtactaatgcccaaaaaaaatattccacttattcaagtttaagtaaactttatcgctgatttattacgtcaatgtaaattcagtatactgataaatcgtgagacttaataatttaaagcatataatcacaattacttttcactgtgataacattactgtaattacgaataactaatgtttggaatttaatagaacttgtatattaaac

SEQ ID NO: 361483 - DNA, 587 bp, Cannabis indica
tcattctataaaaagttaaaagttttaattgtatttttagacatccttataacaacacaaaattggtaaggtattacattttattctttttatttgtgtctaaaagtgataagaaagatagatacatctttcctataatagtttcagttaaataatgttaatcttatagtttcagttaacttactatatgagtatgaatatattaagattagcttataataataatctcacctaataactaataatattttttaatggtatcacttttaaataaagtaaaaaatacttcgcataaattttagtatacgtgcctcgcacgtaactttttgctagtagaatatatatatatatatatgaattgaataaacattcaagtattaaacaatatttttcaaaaaaatagaatagaaagaatggattattttacaaatacacaaaaaaaaacaaaaaaattacaaaaatacagtttcacggaattttaaatatttttacaattattttgattttatttacaataaatgcggtcttttaatttcagtaagtttaaatatttaaatatcttttaattttttgttgattttttgtta

SEQ ID NO: 361484 - DNA, 1612 bp, Cannabis indica
tcaaataaagtcaattattaaaaaaaaataatttaaaaatattaaatatgtgaccttaaatttgaaaataagataaaataatcaaattttaaaaaataagataattaattaagcaaaaaagatagatttttacctattttcaaaatcaaatttcactgatatcttaaactaatataaaaatgttaattaatttaattctgataattagatttgaaatttaaaaaaaaatcaaaaaacaaaattacataaaaaaattcgaaattaattccttaaaaaaacatgaaaaattgaaaaaattgaaaaaaaaaatgtatttggggcggatggtatgcattgcataccatccgcgcacgcacaaggaggatctggcctagaaaacacggcgctggaggctgcacgtagcctttccacgcgcggataggggaattcggacaaccccgtgcgtgtatcttcagacatgcagtgtccgaacacgcatctgatcgagtggaactcggtgtccacgcgcgtgtgtggcgtacacgatttctgatttttttctttcaacttttcaaaatatcataactaattataataaaattgaaattgagttctgtaaaaaagtgaatttcttaatttttcccaatctatccaacaaatataattctagaatgaaaattcaattatttttcagaaaatttttgcaaacatcaatcaatcatcaaatcacacacagatcaacatgaaaccatccaaatcacacataaatcgtcttaagtccaaatttcttgaaagtaaattaattaccatggctctaaggctagttgttggaattattttaccaggatctagatttacaaacaagtatgttattaacatcctaaatatgaacttctaaaacgacatgaaataaacacatataaagtatcaggaaccttatagtggttgcagcggaatataatgtcttcttccactcagatctctaacccttgtattctttctgtagcagagtatcaccaagatctgtgtccaaatctccttctcttgaaaatggattcttcacagccttacacactatgattgagtaccacttgatttgtgtgggcactcactctttcactataggcttcggtttagaagagaggaagagagaaagagagagaggtttcggctagggtagtgagaagaggcttgaaatttttactgaaggaatgagacgcatcatcttttcccttaagccataactacttatttataggaaaccacttagggtgaggttagatttaattagcattaaaatagtagaaaaataaatggtaaattacaatagtgtggtcggccatggattgttattggggcccactttacgattttacgattttctcatttttccatcttattttctcaaaaacgccaatttaccaatttaaccacttaaatgccaaaactaattatttaataactaaaaattagttattaaataatattgtcatttaatatatttattaattagactcaacaaagtctcttaattaacaaattaaccctagaaactctttcttcacaattaagcccttgcttagtgaaaattcataaactagacgtagtctaattttggaattataattgatta

SEQ ID NO: 361485 - DNA, 634 bp, Cannabis indica
aatcctgtattgcattgcctaatcaggcaagcccgtgccatagcctggcacccatatatcgcataactgcaccaccttatcaggtgagcctgtgccaaaaacttgcacccatatatcatataattacatcacttaataaggtgagcccgtgccacaatcggacaccactttatcgcattgtctaatcagatgagttcgtacctacgcctgatacatatcatatgtgattgacgcccgtacctacacccgacacgtagcaaggaaaattgtatcacctaattaggtgatctcgtacctatgctcggtactcatcatatatcactgacgcccatacatacgcccggtacatcgctaggaaaattgcatcacctaaccaagtgagctcatacctacgctcaatactcatcatatatcactgccgcccgtatgtacgcctagtacgtcatcaagaaaattgtatcacctaactaggtgagctcgtacctatgctcggtactcatcatatatcactaatgcccgtacttacgcccagtacgtcgctaggaaaattgcatcacctaatcaggtgagccaatatatcatatgcataatgtcattacattatcgaaactcaaccaatcaatcttttcattat

SEQ ID NO: 361486 - DNA, 542 bp, Cannabis indica
aattaattttaagatagaattttataatttttatcatagtatcagagtcatatatttagttgactttcaatccatacctagacgcaagcaaacaaaatgacactcccagctatgaacaaaaataagcgagcaaataacactatttgtaatatgtgatttaagattagtaaacgaaaaatagctatcatctcaaggggaatattggataacattatttcacattgatcaaatgtaaaatattgaattatatataagaacataagttacaccatcattaccaattaattttgagatgaattttcataattcttgttaggctgtgtcatatgttatctatcgtaaactttaaagaggagtgctaccgtcaacctcatattacaacctcttactcaacctccatgctcaaaagtcaaaaatatatgcttacaacatcatccttgtaaatttttaaaaaaattcgaatagtttatagtgccaaaaatatgtttgaagttttttgaacacgcgcgcgtggtaaactggaatatcaagaattctgtttt

SEQ ID NO: 361487 - DNA, 792 bp, Cannabis indica
gggttggactccacggcctagtcaatacgaggaggaagacgagggccccgacgcgcttcaagcaaagcatcaagccttttcttcttctcccgaaatttagcaagagcctcttcaggcttgggatagaagtcaagcttaatactttggccatttgactgccaggccatgtaaacgccatcgtcaaagcgcttggcgcaatgcttgcaggagacaggggtcaggagctcatctcttttagccttcttcaaggcctggtctctgaagtccctcagctccttcaactccacggtcaggttggcattagactgcaagtctgcctggtgcaagtcctctagggacttcaccttggcaaccatttcgtccatggcttcccttgcctcccgaagctcgcgtctggcccaggcaacggcctcaccctccacctttagcgcctcctggtgcctcgcctccaccttggcctccctctgcttggcctcctcgcgaagcttcacctccgcaagggcctccctctgcttggcctcctcccggagctttgcctccacaagggcctccctccgttgagcttcctcctagaatgcccacctttcggcagacaagtcccgaaggattctcatggcctcgtctatgcccccgaattcggacatgacgtagccatggtcaattagagtcttggaaaggcgaccggtctcagcagtaatctgaaaaaagaagtaaaagtaagaccagatgccttagacaaaatatcaaaggagaaaaatagattacaagtgctcaccgcagccatggcagagc

SEQ ID NO: 361488 - DNA, 438 bp, Cannabis indica
aaacgatgtttgtgttgatttggatggtttcatgttcgtttatgtgcatatttgatcattgtatggaaatcccagttagacgtaaaattaattaatttaggcttttaaagaacctaatttggattttttatgaaatagttataattttttgaatttggttgaaaatatcttaaatcgagcaacacacgtgcgcacgcaaatgggagactcactcggacaagaggccttcaaacaaggccctgtccgaatttttccccttctgaccgaggtttaccccccatacaggctgcttgcagcctttccctcgcccacatgcagcttcgtgtgcgcacgaggagtatgcaacgcatattccctagtgcaatcttgtttttgtgatatcttttgattcaaaaattatttttcattgaaaaaaaaaattcaaattttggtaaaatt

SEQ ID NO: 361489 - DNA, 685 bp, Cannabis indica
gtctttgcataaactatataattatagttatatattaaatacttaatatattatatttgtatgaatacgtatgattcaatccactatgatttttcttgcaggcgtgcttcatgcaaaatgtcaaaatttaattagttggcatttttggtttttaaatttattcatcacaaaaataaaagtaataattttgtttttaaattaaatttatttttaaaaaataaaaatgtattttcttttgatttttaaattttaaaacagaaaacaaaagtattttttgtaaattttattttttattttaatttattgattttatttaagtcggatttgagttcgaaactgggtttggggtcggatttgtggttgggttcgagggtagtgtttgagtctggggtcaaaactgagtataaggtcgagggtctagtttcaagtctagggttggggtcgggtccgagtttgggtcgggattggggtcagagttcggttctggggtctagtctgggttgcaagatccagactggggtcagggtcgagatttggggttcaatggggtcccaagatccaagtaagggtcggagtccaaaatattgattaagaatttttttttttgaaagtgatattttttttaaaaaaaagtttgattcttaattaaaataaaaacagttttatatagaacatgttttggaaa

SEQ ID NO: 361490 - DNA, 499 bp, Cannabis indica
atttataccttaatggatgttgacactcaacgttttctaaacaaatatcggtagccagagttatacccaccattattttctaatgggttcggatgacacttaaatagggaaaaaatcaaaacttttttcggtgcatggaattaagtatcgaaaatagaagattttaaaataaaatgggctcaaatggtgaaaaaataggggagaacttggctggaggaggtggtggttggcgaaggggggagggttttctggtggctggtgggctggtctaggtttgttcgtgaggaagaaggaagaagacgaagcatagggttatttatataaccctatagcgtcggttcttattcaataaccgacggcataggatacacgtgtcaaatttcacgtgtaccctatgccgtcagtaattagataataaccgatggcataggcttctcaaacataattcaccattgtccaatttccaaccgactccaaatggtataatccaattttatac

SEQ ID NO: 361491 - DNA, 662 bp, Cannabis indica
gaagacaacatgcattatacttgcgtttagaaagtcacaaaaccaaatggaaggcttttgtgacttgatctatgcaagggagataaacaaggtgacacaaggaagtgtcacaaacatgaagaccaaggtgtttatcctagctaagttcaaactgaaattgctagggataaacaaatggtactgacccttggggtcattcaagccctcatagcatcatcaactatccttggataaataagagaatctgggtggaatttgttggttcagattcacttatttatcctttagttgtataacaccactcagagggtttgacaaatatacccttacatcagatacaacaaatatcaagactaaagaacataaatacagttacaaagacggttacaactgaaacagttacaaatattactctagggctctgccctagatcagaatcacagatcagtataaaaggaagtatttttctcaaatacaacaagcaataatatacagagcaaaataagagatacaagcagtaataaaaagtcacagccagagagaacaacaacagaaaataacaacaaagaaaagagaggcttttggctgtgagttgtcatcttcatgtgagctcctcctagaatgttcatgtaatagaaaagagagttttgttagtatcaaaa

SEQ ID NO: 361492 - DNA, 588 bp, Cannabis indica
ttttaattacaaaattgaataggctctttatatgcatctgagcccaaagcaaacatataggctcacacaagcacacttatttggatggatcctatcatgttactaggtttatacacagatgaaagaagattgcaaaatttacctgttacaaattatttatttgacctattgacaattgaaccattggttaaaatcagatcattggatctgtcaacaagttaaccatggcaattaagatcaaacaataataggttttataaaacttgttttaataataaacaatataaaacacacacatgcaacaaattggatagttggatacagtatttatttaatgtaaattaattaaataattaattaatttttgaaaattcttaataataaaatattattttcgaaaatattcaaaataaattaaataattaatttcaaaattaaacttataaatttgaaaaattaaatttcaagaaacctaaatatctatgcaaaaggatgctaacaacttttcaaatttaatgttatttaaaataaaattaaatattcaataaaataaaatgataaataaatatcatttatctaattttataa

SEQ ID NO: 361493 - DNA, 680 bp, Cannabis indica
gggacctctcctttcactatggaagtgcaacaagcccaacttcccaagggattttggctatccgaatccctaaaatataaaggtacctctaaccctatagattatcttgaaaaatttaatactataatggaagtggatcaggtaccacagcttgcaaaatgccgcattcttgcagcaacgctcgaggaaaatgccgacaattggtttacccaattgcccgaggcctcgatatcgacatgggaaacctttgtcgacttattcctcacgcacttttaggccacgatgacctataggcctccttatacaactctggccaacatcaaacaagaacccgatgagtgtttacaagactattttaaacggtttaatgcagaagtaacaaaagtcgaaaaggctcccgagactttgcttgtttgcatgttgataacaggtattttgccgagaaccgatttctggaaggagctacaagctcgaaggccagaatcgctagtcgaattctttgctatggccgaacctcataagagaattgagaattctctggcagagttggagaagggcaagaaatccagaggccaaagcccgagaagacgcagcccacggagacaacgaagtccaaagttggccaaatctcctcccaagaaggagtcctcttcgaagaggaagggtggaccgcgttttgt

SEQ ID NO: 361494 - DNA, 574 bp, Cannabis indica
taatttgtgcatcgtgtcattgttgggagttggatgtcgatggacattccaggcacgtatactaaattttatgctaaattttttttacattatttaaaagtgatacaattaaaaattaaaaaaaatatataattagttattaagtaaaattattattatgtgtatctaagtactataatttataatttttgacaattaaaagtaaataccggatgtaatatattagtgtacactgtattctttgtagagttcttatcttgttgtgcagtagtgactggtcaaatcaaaactctaacaataagtgttgtttttgctcttgataaaactatatataagtgaaaaacttgttggggtaatctaatatttggcctagaaacaaggatgtggtagagaaataggggaagtagaaacttgatgatgagtgtgctttgttttaaagtgtgaaaagttaatgacttgtataaatattattaatgaaaccaacaataaggagttaattacttttgtttaaaaggaaattaaacaattgggaagatgtagattaacagtgctactaaccaaccgtatgagtttg

SEQ ID NO: 361495 - DNA, 677 bp, Cannabis indica
caattttattttttaatataacacactttaagataatttctaaacgaacatatatagaaaatgtatctagttttgtcataatatttttagattaaattattattaagttctattttaacaaaaaaattagtttaggatcatatttgtacaattttaaaaaatatagagtttattttatcatttaataaaatacataatttaattaataattttaacaaaacagagagtctaaaataatatttaaggtgcattaaaatattggattaatatttttaacaattggtatttaattaggaacacttttattatttatgtactgacaacaaatttaatgtgctataatgtgatgaaggcataaaataacagagatagacatgtgacgatgtacaataggttcttttagcaacaaaatattcaaaaagtttttagaataagtctcataaataatactactactaataataataataatatttcatttgtgaaagcataataatatttataagggacataaatttaaagattttttgttatatgataaaatagaccttctgttttgtaaacggcataaacccaatattttcttagtggcataagtaccaaatagtttataaaactagtaattttacttctatttccatcaatataagactctgttttaaatttatttaaaaaaa

SEQ ID NO: 361496 - DNA, 937 bp, Cannabis indica
attcttggctgattattttagataaaaaccaaccatttttaattcatttcatgaaaaataaaaatgtacacaaaaattacatttcctctcaaactctctcatatttttcgaactccctaaaccagctatggtttgctcccatttcctctcaattccagcaagtttctgcaagatttatgagtgcttaagccctaggtaagcttttgactttgtcctcttgagttgcttgaattttaagaaaattgatttatgcatgctttgtggtttttgttgctgtagctgctgttagtgtttagtgttgttttttgaagcttaattatgtttagatatgtggattcaagcaggttttaatggttgttagttagatttaaccaagttttgcgttttgaactcaaacttggagttttaatggtggtttgtgtttctgagcatattagttagttttgttgcttgggatatattctttgtggtctgtatagcaggtttggaagttattgtggtgtttggggttgatttggaagagttaaagaatttttggtcttccctgcactgaaccggaattccagttcagaggggcctgtaggaacaggaattccggttggccccaggaaaccccacagaactggaattccggtttgggcaattttgggaaccctagtttttcccatttttgagatatttagggtattgccatgttatttatcgacaaagaaacttttagtttcaagtttaagtcccaagaaagtgatttagcgtgtcacttacttatgttacgattgatgtgatttaggagcctgtaattcgccgagcagttgttccactcaggttgaccggcacactggaattcagaatcgaggtaagattagtataacactatgcatatgtattacatgtttagcatgcatgttagtaagcatgttagattacattagatatg

SEQ ID NO: 361497 - DNA, 589 bp, Cannabis indica
caaatataataatgagattatagtgagggttttgggtaaaaagacatgaaaacaacataattatgaatcatgcaaagcaaacaaagtaacatccatatctattaagattaaaattattgttgttaggcacttaaaaatttctaatatcaccagacattttattagtcaatatttttttcattacttattaataaaatatgaagaaacctcatattaaattacaccaacaataatataaaaaatagcattagcaataatatcactttaaggtattcttagtattctataagataaataacaatgctccccaatttataccaataatatcacttatttaggtcccatttaaattttagaacacataattaagtcttatttttttattaaatgctataattaagttcttcctctatatctatatttgtcatgcatctcctcactcaattctcaattcttgaagctgaattttatcatgtgttttcaatttgcaagttgaattttgtgttttagtgtggcggttttgtgctactaagttggccggcggcatacaccacagctacacctacatgataaatttttggcctaatta

SEQ ID NO: 361498 - DNA, 659 bp, Cannabis indica
cttgtgagttctctaaagatgttggtaagcttattgatgagctaatagatgggcgtggtgtgttccgtttcaaacggactgatctgaagcaagatatcaagtgtctatataatttcatgcaatccactctgctgcctacgtcacatgactccacagtgagtcgggaaaggatgtggatgctatattgcatcgtgaaagggaagaagattaatgttggcaaggtgatagcgaaagagatctttgaatgtgcacaccgggtaaaggggaaattatttttctcatgcctcattactgagaagtgtagatgcgccaatgtaccgatgttgaatgacgaagatccggttccaagaaagggagtagttagtttcgaacctgatcgtgccccaaaacgtaccactccatccactaccatagcttccacttcaagggatccaatggacgagcggctgtccaagcatgaggctctacagtaacagatgtgtgagcggctacagactcactggaactatgatagggagcgagatgtgtggatgatgcaaaatcttcgtcgcaaccagtctaaaacagccactgcatttctcgctttcccggaagaaatccttgcgccttggggctccgttgataacgaagaaagggactccgtgttggaaattatttta

SEQ ID NO: 361499 - DNA, 623 bp, Cannabis indica
tatgtgtatttggatggtttcatgttgttttatgtgttgtatgatgattgattgatgtttgtgagtattttgtagaaaaataattgaattttcgtttctggaattatttttattggatagtttggaaaaaattaagcaattttttatacagaactcaatttttgattttatgtgaattagttatgattttttgaagatttgaaaaaaaggataggttgatcacccttcccacgcacgcggaactgagtgtccctcggtcagctgcgtgtttagacaaggtcttgtccgagcgacacgcccaggggtgtcttaaaccccttatccacgcgcagaaatcatgcaagggaggcttgcgccgagttttctcagcagatcaccatcacctacgcgcgcggacagtatgcgatccgtaccacttgcaaattttttcgttttctttgatttttcatgctatttcatggaattaacttctgatttttttgtgtaattttgtatttagatatttactattcctatttcaattctaattatcaaaattattttttttaaaatttaatttatgatattagtgtaatttgaactagaaaataggtaaatatcttcttttttttttttttgcttaa

SEQ ID NO: 361500 - DNA, 1115 bp, Cannabis indica
taataattttaaatttatgtttttgtgactgtaacattttggatactaaactttgacataaatttctttgcgttaggttttaatttaacgattcttataagaataaacaaatggtaacaaaaattaaaggtacagaattttgaaagggttataacccaacccaaaccaacccaacccaacccaacccgatgtatagtttgttgggttgggttatacaaaaaagaagtgttgaatgggttagaaatttccaggccgacgtaattgggttggctcgttaaaatacctccaacccggccaacccaacccactgcaaaaccctaattaagatctatagacctaagatcaaccagtgatattgacttagaaagatataacagtaagtttatgatatcttatccaagtttaataccggtccaatccgacgtatactccatacattcgatactggcatactttaccaataccctggaaaggtcataacacttatcttatcgttgattatcatgttagtctcagtctagtgtactgataaattacgagactttaacttttgaacatataatcatgattatattccaatgtgctgacaacactataatcgtgaataattatattattaaatgaattttatttagggcacaaaactcaacatccctaatctcaaatttgaacaaaccatcgggtcaccattggacccctatcggacaccctcagaccagaacgaaaaaaactaaattctaaaaattgcagaaaactttaagaacaattatttccacacaaaaagcaaatcgagcatcaaaacaacattataaactaaatataataactaacaacaagatttaataaagaaaaattattacccattgaatccgagtttgatgctccgtccacaataaaccaaccaccaaagcacctattatatgaggttctagtgtagtttgtatgaaaaattattgttatttgattaggaaatgagtgaagggaatgaggtttatgagtggattagtgaaaatgaatgaagagagaagagagaaaaatcttccagacgtagagcgctcatagccttaaatatattgcccacaatgaaagtaaacatgttagtgttggaaattatt

SEQ ID NO: 361501 - DNA, 623 bp, Cannabis indica
tttaaggaaaaaaattactaattagctttttatttattttgatcaaagttcgaggagtgagttggtaaaatagaaacttttgttagtaaaatgatttttcaaatattttaattaacaaaatagttttcttttaaacgtttgtgggcgagcgtgtgtattagaagtcctgggttcgagtcccaaattatgcattgtgtaatatataaatgcttaaataaaaaaaaaagacataataattaatatagtaaatacaattaatattaatttttctttatcattaaaaaaataaagttagttggactcccatgacttctcttcatcttcatcttcaattgagtttttcattactatctgagtttttatcttcatcttcatactactactcaagtatttcatctttaatggtaatcattcacatttgacctaaaaaaattctaggaatctacttggtaaatttggttcaacttattggaagctcagcaatatagatccatggtccccgttctagttgagactatactgtttgtaagactctataattgatttatgattaatcaattataattctaaaagttagactatgtctaatttgaattctcactaagtaaggatgaaattgtaaa

SEQ ID NO: 361502 - DNA, 554 bp, Cannabis indica
agtagcgtacaggttggctatgcccccaacgctggcaactgtacatgatgtgttccatgtttcaatgcttcggaagtatgtcttagactcgtcccacgttctgagttatgaagcgttggaactccagccagacttgtcatacgaggaacaaccagtgtagttctcgatagaagagaaaaagtcttgagaagcaagacaatggcatgataatcaagactataccacgttctgattacacctttatttacttctttttaatatttattatcaaatcaaaaatcacaaaatcatttgttactattatcactatttattaaccttttgtttctatttctctactaacgtttttgtccatattctcctcattgtggaatcgaatgccgatctatgctacaactaccgatagtggaagtcacattttgggcgtacatcatcagcacagtggaatataatcatgattatatgttcaagagtttaattccctgatttgtcagactagatttcgactggcatgataatcaacgataggtattcttacaccttggataagtgtt

SEQ ID NO: 361503 - DNA, 706 bp, Cannabis indica
tattaagttttaagatataacagagaagaacgaaaaacgaagaacgaaagtctcgttcttcttccttccacaaaatcttctccttttatattcattttctttgatttttaacttgaaacttagcgatctaagctccggtagtagtaggatagcaaatccttaaagagaaaaagcttaaggtatggtttaattacgttttaagctaaaaacgattagttttatatagggactttatgatttaaaaaggttatggagattctgacatcgtagaattgttctctggtaactataggactagtttatatgtttacttgttgaatttgaggtgattttgagttagaaatcgagtttggaactttttaaagcttagttcgaacattaatggtgtttttcatttaagggttcgatttttatttctgttatgtaaggatggtaatatttatggtatatatgcgccctgtgaagtttggagtgattttgataagttttgatagtgtttcgatgagtacgaaaattgggattttcgagttttatagtttttagaaattcctaagagatcagaaatcatatttttgtcataacttttgactcgggtgcctgttttggacattctatataccgtttcgaagcttgcaacgagctctacaatatggtgtatgttttagagtcaaaatataagttttattttagtgtatttataccgcgg

SEQ ID NO: 361504 - DNA, 545 bp, Cannabis indica
gtactcctggtgcatatttgctttgtttatcgtttgatattccgtccaacactcatcttgtgtattgttttttatagatgaactcaggtgagtctgtggaactcggacatcagatcgaccaggatttgcttcaacttctgcacgaggatcatcctcatcttcattctagtcctccttctagcgaaggacattcttctgaccttgtacccagccataggatgatggctcgttcaaagaacaccacgcgtctggccgacggtactgatcctcaagtggctcggcttgccactctgcccagcgctgaacatgattcggctgttccgatggaggaggatcgcgaggggacgttgaggtctaggaggttgaggagttggacgatgtgcgtctcggcagtctctccgaggcggaggggagatgaagagattgaactccaaatttcggggagtacaatgaggttgggctcccagtcgatgctgacggagacgtcctggttaagggcgtggactacgtcagtgaggagcttgctgcggcggttcctcatagga

SEQ ID NO: 361505 - DNA, 507 bp, Cannabis indica
tctgggtaaaactggctaaccgacttactgcttgtaaaaccggttacccagattttgcagcaggggaaactcgattttcagcttatcgtttcgcgtcaatttcaggtctctagtcggttgattccctgccagtttagggtattgtcatattaagttgcagtagataggtttttggtttaaaaccttagtcccggttgtgatttaacgagtcacttatgcgtgttattattgatgtgatttaggagccaataattcgtcgagcagttttccactcaggttgatcggcacacatgaattcagaattgaggtaagattagtataatatcctgcatatgttattacatgtttagcgtacatgttgttattgcctattaaattacattgatagcagtaatagtatacatagagttgtgttgattactgataaatgtatgttggctaaaatattgatcgatgttgtcacatcaatatggctagagtatgactagcatattgagtataggctga

SEQ ID NO: 361506 - DNA, 792 bp, Cannabis indica
aatccatggtgatgtcttcccatttccactcgggaatctttagaggctgaagcaaacctgctggcctctgatgttctgctttgatttactaacaggttaagcatcttgacacatgtacaacaatatcccttttcatacccagccaccaatataaagctttcacatcatgatacattttggtcgttcttgagtgtaaagagtacggtgaagtatgagattcatcaagaatctcctgtctgataactttatctgttggtacgcaaaccttgtttttgtatcacaataacccagcagacaaaagtgaaaagtcttttgctgagctggcctctaacttctcctcgtacccctttaactcaaaatcaccttgctgggccactttaattctttccagcaaaaggtaacgttagcgagttttccaaccacaaattcaattcccgctctactcatatcttcagctagctttgttgaaatcttctttaatttacaaacttgccctgggcctttccaacttagagcatccgctaccacatttgcttttccagggtggtagagaatctcactgtcataatccttgaccagttccaaccatcgctgctgcctcatatttaaatccttctaagtgaaaaagtaattgaggcttttatgatcggtgtagatctcacactttttaccatagagataatgacgccagacttttaatgcaaaaacaattgctaccagttcaatatcatggataggataccgctgttcatactctttcaattgcctggatgcataagcaatcactttccc

SEQ ID NO: 361507 - DNA, 690 bp, Cannabis indica
aacttggcaaccaagactttcctcttcccataattaataattacccgaaaagaaattacaacattacaaatatagataaataaataaagaaataaataatttgagtcatactacaacattctccacatggactcaaattctccaaactcacaagtgctcaagtaaatttcaataatttgagtatatatgcaccgaattcatactctcattgaactttacttgagcacttgtcttcacattcttcaatctttcattaatgtcttctttcttcaaacaacttttaactaaaattggagtcttcttcaccttgtcactttccttcgcactaactaaattccttttgtgacttgactccaccttcacagctccacctaaaatagtcttcccgattaatttatacaaatttcgctctttcttacctttcacaactaccaagtcacctttcttgataattatttaaccatcttttgtgaattagacacaacctcgagtatccaaagctcccaaaaagattaagcccctccttaatgttggaacatgtctcacatcagttagtgttctcacaattgttggaaattattttaccaggatctagattttactaccaagtatgttatattaacatcctaatatgaattctaaaataatgaaaataaacacataagagtttaagaaccttacagtgggtgc

SEQ ID NO: 361508 - DNA, 585 bp, Cannabis indica
aaaaagtaatattaatactatatattttcaattttaatacttagatattatatttttttcttctgaatgttgtgttttaacctattttattattactattctgttagctataaaaaaatatatatgtatatgattctgattaaatcttaattaaataaaagttcactaatatccttttttaataggtaaacttctcaaaattttataactaatagaccaaactaattagaataatatattaacaattgttacaagtgaaaataataaatgttgtataactaatagaccaaactaattagaatcatataattaacaattgttacaagtgaaaagtaattttaatcaaacaaatgaatattaacaattacgtattatgaatcaccttgttgcccctaattttgcccaatatacgcggaccaatcagacagagacacatggatcaagcaattcacaatatttgctaagtctttatgccataaggtaacgtcccggacgtaggtcccagagaaggcacgtggaactcaatatgctcccggaagctcatataacgctaaggcgtctccgcgaggtgtcaggtttctcctg

SEQ ID NO: 361509 - DNA, 750 bp, Cannabis indica
aaagtaattaagcacgaatgaaatagaatacatagaaactggggaaaaataaatcatattaataccataaagcaatatcaaacaatatccatctaaccctaatcaagtgtttagctacacatgttcatgaaagcaaaatcacacatattaactttaagaaaagagaagaaaagaatgctgaaaactctctgaagaatgcctccagtattgcagttgatctctgaaattcgtatctgtattctctatttatttccctctgaattgcttccttctagattgcttggccaaaactattgaaatccatttcttttatagccaaaaaaatgataaactaagattaaaatcgctgaagaaaaaaatatattctccttaggattaaaaaacctattctgctaaggattagaagaggaggtgagttttctgctgcattaactgatagtattttggccataactctctcgatattgctcagaattggacgattcaagatgttccgcaaagataaaagagagatctagaacttttatgactttttctaaaatctaatcaaaacatagtcaaattcaggcttgaaatttcagctttattttcttggacaattttctctattttaaatatcatctttttgtaagatatttttatctttttttcccatcttttttctctgatatgtttttaatcttcttttattttaaatctacaaaaataaaagataacaagcgtaaaaatactccaaacatgattaaaact

SEQ ID NO: 361510 - DNA, 860 bp, Cannabis indica
cattttttgaaacagtagcaagagcatcccccatacacacatcaacaccctccgtcggcccaacaggcccaatagaagcttccttaccagtccgtttacatttagagtccataaagaccattttctcctcttccaaatttgaattactatcccctactgcctcccatctttcgctcccattatttttgctcaaaacagctggagaaaaaataagtccaggattctctccattatttgtggcaatcgggttgacagcaccacccgatccttgacaattcgaccctgcactcatcgtcgactgcctaggctcagccaccatcatgccaccaacattggatgagctaggtgccccagactggagccatttagctcccatcgcataatgagtttgtcgtggcattgccttcatgaacgtgccataaggcttaacaattgttgaggttggttgaataaacaatcgagaacaaaaatgatccgtatgcccaatcaccccacaaataaaagcataaggttggcacagattcatactgaaaattaatccaaaaccaatctccaccaatctattgcagcttcattctgtgcttcaatggtttttcaatgtttaaacgaacccgaacccgaaaataatcactccaaacaccattaaaattattctcatcaggcttaataaagctaccaacataattcctagcatcctatacaacctgctccgttttgaagcccgacctaatatcatgtagttgcacccatatatcgagatgatgcaaaggaacctcccgaaaaacatcccctggtttcaaccgttcaaagatgagaggagcatttttaaacgtccatggactcctatccatcaccctttg

SEQ ID NO: 361511 - DNA, 530 bp, Cannabis indica
gattaaccctatttgtgaaatctctttaccattaaaacttgtgtttcagttcttatcgtcaacattttcttattattttttttttctattttcatactatttatatatataatttgaaactttaaagtaatatttttaaaaatattgagttagtaaaattgaaaaaatatagggtcaccgagtgtgtcaatcgaccttcggcttaaactattcgggttagagttttaatttaataatgactaagagaatctctaaataatgattaaatgcaaaatataacttattttgttaaaagtttaccctaatagtgtgctaaattatgatgtaaatatattcgaaccttaatcaaaccatacccaaaattaacttcttacagataaaaatcatcacaatagagacctaacaacatcaattccaacattaataacaacatccaaccaaatatccaaagcttaagctatatctcaaacaaacttccattaacaagaacttgaactccaacttcaaataataaatttcagagctcaaca

SEQ ID NO: 361512 - DNA, 735 bp, Cannabis indica
agcagtggattgcagatcatcctttctgcaataccagccttagcaacatgtagaggacgtaaccctatgtaggtaaaggatatgcactttacccaatgtgtgcctatatatatcctcgttcttacaaagaggagggggtactcttttgatcgattgttactttacaagaatacctagttctatttctttcaatacaaagttgttacattgtaatacattataatcttgtgatatctgccctaagaggctaatgatattgactcgtggactaaggatcattaacgaccaaactacgtaaaaacctctgttcatactatttattgcttattatatatttatatatgtatattataggatatatatgttatagccctataatattatatatgaatatgatatgtatgtatagtgtgtgatatatatataactcgttttgaggagtaataatgcatatatatatccaaccaaataaaaaaggaactatttttaattaattatttggataaggataaaagtataatatatatacgcacatgcatttaccttatatgcttaacatagtagaggctctttggaataggttaattctaataagggaatagtaatatgaaatattatcttatttgtttggagggtttaggcttggaatgttatttccctagtaatataactactcttgggaaggataatgttcataccttaaaaaaagataagattaaataattaccttccatc

SEQ ID NO: 361513 - DNA, 592 bp, Cannabis indica
ttatgtcttatttatgaatttttcactaagatgtggcttgtgaagaaattggattttaagatttatttgttaatttggcttttttgtttaatatatatatatattattatattaatgtttttgaaatgattattatattaatgttaatgttatatatatataaaaactaaaaatcaggttaaatcggtttggtcggtttaattgggtgggttgggtctattttcaacccgcccaattaagtgattggcagtttagaattttgttggattatttcggtttatattttttatcggttttttcggtctagtttgggcgggccaatcaggtttagcagtttataaaaattcttgtacaacaatagttgatagtttgtaatcattgatatgtctagtttcaaagcgttagtaaaatgttaatgcaactgcaatgcaactacgcatgaatttaaaaactactagaacaatgtttctatgtacgtggctctagatgaatgaaaattttctttgttatttgtgatttgatatgaataaatctaccattgaaaatttggaaaacaacattaatgcaataggagaaacattagctagtgtat

SEQ ID NO: 361514 - DNA, 573 bp, Cannabis indica
gtatgtgaaaagggtttcagatgaattcatacattatatacatataatcatgaaggcataaaacccaacagtgccaccatctcaaattcttccaacttccttttcttcaataggacatctttcatgaactttaggtaagttggcatctgttccactctatgaatgggatgttgatgtgcagtatcttgaatatttcaagaaatttcgaaattttgaagataagaaattttgatgtgatgatcaatgctgatgggaggtggtgtttctttttgttgaagaccgttagtagtcttcttcttctcttgtgttggtgctggttctccctcttcttcctcctttggtttatcttggtttggcccagcataattctaaccacttctcaaggtaattgcattacaattctctctggatttacttcagtagtactagaaaagttaccttgagccctattagtgttttaagaagccaactgccccacctgggtttccaatgttggaattaattttaccatctcttcttttctctcttattttcgtgagtgatgatacattaagagaagaaaacaagggctgc

SEQ ID NO: 361515 - DNA, 1038 bp, Cannabis indica
ctaaaaattaacaaaataatcacataataacatacaatagtataaaataaatagaaacccccaaatcagattctatcaaacagatagaaactcatatcagttatacatcaatccaagataaaactaaaaaataaaaaaaaaaataaaaaaaaaaataaaaattagatggtatgaacaatacacaatttatatatctctttgtctcttcctcttgacttaaaataaaaattcctaagaatatactattaatatgaaccaaatctctgtaatatcccggaaaataaataatatataaatagacatattttattaaatatgtaattattttggtaacgtagtaagattatgatcttgcttagggtaattattgagaatttactcaatgaaataaatagcgtaatttattaattacggagattatattgggatatgtgagtaccgaagatatcaatttcgaaatagaatatttttttttcgggcccggtaattgtggaaatttagcgatgtggttagtaatgtcacgacgttaatggaagaattattttgagaatattccggattaggttagaattttattagaatgtcgggttgagggcttagtgaaattaccaaaatgcccttaggttattttagagattttttttagctttgtgggtaatttaattattctttaaataattatacttttattcctttttattttttatttaggggctgagactttttttaaaaaaaaaaataaatagaaatagaaaagaaagaaaaagaagagaaaatcttattatttaagttacttggaggctaagtaacttcatcatcttcaactcctctcattccctctctcgggcaagcttgagccagccattaggagacttcttttcctcagcaaatccaccatttcagagttgaactcaacccccaagccaacctagaaccttgaggtaagttcctccttatgttcttggtgatttcctaggttttaagctaggtttttattagttctttatgggtgttaatggctgtaggcttagatgagtt

SEQ ID NO: 361516 - DNA, 497 bp, Cannabis indica
tacattcatccatctcaccctttacgcaacataatagccacctcgcatatatctttacgatatgaagaatactgcgacgagaagcctatccataattagcattttttcttataaagacggtaaagaaggacaactcacattcaacgagaaataaccttcttagtcagcataaccagttaaggataaagacaaagaacggttgggtagttattaagtactatcccatgtgcataaaaataaaacatggggaatgtccacttttcatgaacagttgtacatgaatagatcccaataaaaataattatcatcctatacacttataaatagggccagaatcttaggaaaaggggacggaaaaattaagagagaaacttttatctacatttatagagagaattgtactctatatccaaaaaaatatccgtaataagaaggacttgtagagtatataaattttaactacaaaatcacgtaaaatatcttgtattcatttatta

SEQ ID NO: 361517 - DNA, 548 bp, Cannabis indica
ggcaatgagtggagtagcccatgttcttatatatggctcaattctctaccatttattccccctcaagatgatgactattttttgctcatcaatcttgaaccgtatcagagtggacatggtcactatctgtataggtgcggatcggataggatcacttgcccgcaagggatatggctctgataccatgttagaatttgaggataagatgaatgaggttccatcccaaaaccaattggcaatgggaggagtagcccattcatcttatatatcacaatttatttccacacattatcaatgtgggactaactctaatactatagcgccaaaagtatggcactatagccccgatttcggaaaaaatatttctttgcgctaaaatgaagcctcgaggagtaccgcgtggcgctatagcgccgtacatgtatttttgaatttaaatcttatttctaaatagattctttctatattttttgggcctatataaagaatgatgtaactcaaattttgggatgactggagagatacaaacaagtaactttgagattaga

SEQ ID NO: 361518 - DNA, 573 bp, Cannabis indica
acagtgagtctaatttagtaagccacaagtagtttataacgattgatatatgataaagtaatataaagacacaagaattttttagaggttcagccccgagcagttcggtaatagtctaatcctcgttatttgtattaactcaagaacaaggagaaaggttccttttcttatagctcttttaacaatatctttgaatatgaattcttagataatatctcttaagtaaaatcactcaaccagaatgttttcgaccctttcccactgaacatgcatcactatttatagggctatgagcttggagaggaagtattttcccttctcgttacaatggatataagcagaaagattgcataataaatacagaatacactgatcgtgggatttagacagcttgccatatctctgcaatttgatccccaagttatagggatttggtcgctctgcgcggattgctgatcgcttttctttgagcatggatacgaggcatcctgttcggaccatattctgcgagtagaatttcagaattgattccacgtgtcaccatcatgcgatgccacgtcagagtgcaaaaat

SEQ ID NO: 361519 - DNA, 609 bp, Cannabis indica
gaatataggttggcagttatttaaatttaaaattaaaatatataattgttccccgaaacgtgggctttgactacgtcccattttaacacgtgtatagctaaaagttcgcataactgtttgttactcttatctttgaagtagtggatacggacgtgggatagaagcacctcgctagaggagtctcgctagagacatcttgctttgtacataggtgaatgacttggtttatatgtatttcaacaatggcatgagcaccagtgtactgagcaaacttaagaactgctctttgaccataaagccttgcatactggacaatcatgtccttcaagtccttaagttattacacttagtcattataatgtgggttatacgccaagtgtttcttcaatcaattcgcctcgtcgatactttcttatgtgtagcgagatggatgtctcattatgcattgtctgtagttccctcgagattatgcctttcgaggcaagatagtttctcgtcaatacatgaattgatagtttctatatccttgtctcgcttaagactatacagccaacgagttatgaacatactctatttattctatatttaatgagttattccattttgcat

SEQ ID NO: 361520 - DNA, 901 bp, Cannabis indica
cagatcagattgcagcttcaagttgtgaagcttgcctacaacaaactcaatgctagatctgacccatgtccctctgcttaaactaaggtgaaaatctgaaatcatactagctacctgcccgggacactttcctgcttagagcatcggccactacattcggccttccccagggtgataaaggattttcacaatcgtaatcctttactaactccaaccatcacctctgtctcatatttaaatctttctaagtaaagaaatatttgagacttttatggtcagtatagatttcacatctttctccataaagataatgccgccaaattttcaaagcaaacactaccgcggcgaattctaggtcatgagtcggatatcactgctcataatcttttaactgacgagaggcataagcaataacctgatcgacttgcatcagcacgcatcccagaccctgtctggatgcatcacaataaaccacgaacttttctttgtcagaaggcaaagctagcactggagctgtaatcaacctctgcttcagctcctggaaactagcttcacacttgtctgaccatacaaaatgctgattctttttggttatctcggttaaaggtgttgagattttcgaaatcgcttctacaaaccgacaataataaccggctaaactcaagatgcttgtgacttttgttactgttttcggtcttggccaatcccttacagattctatctttcctagatccaccttgatcccatccttgctaacaatgtgtcctagaaaggacacctgagacaatagaaattcacactttttgaacttggtgtaaatcttgtgttctcgaagccgttgcagaaccattcggagatgtagctcatgctcctcttttgattgagagtacacaaggatgtc

SEQ ID NO: 361521 - DNA, 1264 bp, Cannabis indica
atacaagaaaaatgcaagttgagccgtaaagtaggtcacgatacacagatttgacatgaacacgactcgagattttacgagtttaacacgacggcacgaaaattttactacttgtatttgtgttttatcaattttttatgttacgggtcatgttcgtgtctgtcatttaaaataaatttcaaaatttaacataacacgaacatgacatgatgacattaaaatcaataatttagtttacaattcgccaacacgatatgcaattttgtgggtttgacacgacacgaacttattcgagtcgtgtttgtgtctgtgtttttttaattttttcgtgtcatgtgttgtgttcgtgtcagcaactttgtagtaaatttaagacctcagcacaacacgaacacgacacacaccaacaccaattgccactccatctgtaaagcatgatgagcacaagaaagttcaattccaatctaaatagcacatgtaaaattgtttacaatgcatgattggctacagtatgtgctacttgattagcatccctacaaataaaatttaaaccaattacacaatcatgtgtaatattaatatattttaatatgaattaaaaaatatttattaatatttatttttgagtaatttgcggcgtaaatacctaagtttaactctttattgcagataaatacctaagtttaatttttcacggtaataatatctaagttatatatatttctagaactttcctagttacctggccattcagtgtcaagttattatccacatgtaaatttaatgatctaaaaaaattagagtctaccatgtggccattaacttgacacttaatggtcaggtacttaggaaagttctagaattttagcttattaggtattattaccgtcaaaaattaaacttaaatatttatctacaatcggaagttaaacttagatatttatgctgcaaattactcatttattttaggaaaatttgtggcaaaagtccccaaaaaggtcactttgatgcagattagtccccaacctccaaaaatagcggcaatagtcctcaaggtcacactttttatttgtccgttagtcctaattttaactgagccattttcttttttttaaattgccacgtgtcaaaatactattggtccaaattattattttaattttaaaaataaaataaaaataaaaataaatatattatttaaaaatgattttttttctttttctttttctttcttttcttacttcttcgtctgtcttcttcatct

SEQ ID NO: 361522 - DNA, 632 bp, Cannabis indica
tcattatgttggaaaccttggaaaataataaatatgtttagttttttggtatttttgcaaacatatctgcttacttgttattttctgaatttgtgtatgaatttattgaaccaaatgatttacttctgtttattgatatttgtagtgtcaaaatgtacaaaccacaccccaatcctcatctagaatatgcctctaggaatgaacttcaaagtgtgaagatgactcctggtcagagtaacacttcacacttgctcatgatgaacatgaaatttcagaaagcagctaagctgggaattgttctatcttaagagcggagagttcattgctccgacaatcctactacttcaagctcagttgagaagaattccacttcctcagattatccttcacaacaaattgaacaagcaataagaacaatccaaaaacggttaagcaataatgctttagtttttgaatcgtgtgttttagagaatgataaatccatctggattcttgattctcgatctacaaaccatgtcagttgttcattgccattgcttgaaaactggaattttttgaaattcagagagtagaaacttaaagttggtaatggcgaaatggtatcagttagagctagaggaaaagccaaactc

SEQ ID NO: 361523 - DNA, 494 bp, Cannabis indica
tgccctcggtcccgatcacggacccagctctggactcgacttaaataaaatcaacaaatgaaaataaaaatgaaaatttataaaacacatttttgttttttgtttttaaaattgaaaaagaaaaatggttatagaacacatttttatttttcaaaattaaaagtttaaaaataaaaattttacttttatgtttgtgcttaaaattttttaaacaaaagtgttatcaaacatcaccataataaatttgttaagaaaaatataaaagaaataaagaacaaattaatcaataaaattgaaatgttgatttaactttaaatataagaaaaccgagagaaaaattaattataatataagttaaaaattctaaaccgaatatgaagatcggattcaataatgtatgatgattttagttgttaattaattaattaatatttagaaaataatatttagtagctaaaacaaaatatctataaatcttatttgataattttttt

SEQ ID NO: 361524 - DNA, 562 bp, Cannabis indica
ataaaaagtattcttttaccagatagaatcaatagtataatttagtagtaattagtccaattccctgtggttcgacctcacctgtgtgagtttactacttgattgcgtatacttgcgtagtgatcataaatttagcaacacaggggcgcactacaagaaatgtcacttttaccagcacagttcgctactgcactggtaacttttaccagcacatttcacaaactacactagcaaagaggtcaaagttttacctgcgtacaattgtagtggctaaaatctaacttttaccagcgcatttatgcgctgggaaaagtcatttttgccaacgtttttttttatgctgacaaaagttctaataccaacattgatttgccaacccccttttgccaacacatcacaagtaaattatattttaccagcataataccaactttcgttagcacaaaaatgtgttgacaaaagtgacatttcttgtagtggcgggcataatactatccgcaccatatccaaccctaatatagatatatataatttcttttttattcttaacatatatatagta

SEQ ID NO: 361525 - DNA, 796 bp, Cannabis indica
gagaaatatttggtggatatgcatttcaaagatcattaagttgaatttttaaattgtattcaaacttacctccccaaaaatttgattttcatattgatgattgtataaggtctatgattagttactagtagttgcctaagtccttctagggaatatcctagtgataagaaaatttcaaaatgatggaatggttatgtcattagtgtaaacaatttttagattcatggatgtcttgatcatgaccttaagaaaagttagaactgttaactaaggtttgcatgtttgatagctattctaagtgattaggggtggaccatcctatggtgattaagataatatagtgtttgtttcaataaatactacttttctaagaatatgactaaatcggaaaataaagtaccaaagtagtggatatatttttatcttgattctaaattgttctattagcttattctccataggatgatcccactgcctctgttgtattgacataaccaatgaggacaataccatttagtgttcttagacagaaagccatggtgccttgtcgtagtgggatggtttcaaggaactcaccctgttatgacttggaagacacttgtgattaaaatccattgtttgtttaaataagtaatggattgtcagaataaggaactaagaagtaaagacaagaaactataattaaaccattcatatggtgtaaccaaaaagttttctattacaaggaaagaaaggaattttgaaaataagtctattcaatggacttagcaaaattcctaaacctagtatataggtt

SEQ ID NO: 361526 - DNA, 928 bp, Cannabis indica
tgattactctggaggtggagtagtgatttttggagaagtgtaaaaatctatctgaagtctctaactctatcagtgagactgaatgttaaagttgtaggaaggatacttattcagcttatggaaagttctaaacagtttttgacacttaccaataatgaattaacaagtagtgttacttcctcactaacacagacatagttgccaaatagtgaagaatccagtatcccaagagcaatggacatccacattaacttttaaagggaaccaacattcgacccattaggaaagtcaggattccataattgtaaatcatgttcccaaccatccacattattggaatcccaaaacaaaagttgtaagaatcatcttctctgagaaactttaactagtgaatcaaataaacaaataacatgaataagagttcatgataactcaggatttaggtcgatctactattgatctgttgcaacttattttactaggatctagatttactaacatgtatgtttgattaacaccctaaatatgaattctctaatacgatgaaattaaacacataagagtttagaaagccttacattgatggcagtagaataatatgactccttctacttagatctctaacccttattcctttttgtcgtagagaaataacaagatctgagcctggatctccttctctctttcgggttggttaaccaccgtcttccgcactatgattgagtacttgacttgctatgtgtgggcaaggtactctatcgctataggcttgaagattgatgaagaacagcaagaagggaaaaatcactatgaaaaagagtctctcatctactagttgtttaacaaagttagaaactagatttagtttggatgagaatgagagcatcatgttccttttatagtttttcaactagggtttagaatttaa

SEQ ID NO: 361527 - DNA, 750 bp, Cannabis indica
gggggtcagtttgttttgtcaaatgaacaatatcctaatagtatgaaagaaaaaaaaaagatgaaggatgtaccttatgttgtggttctaggatggttaatgtacgtgatggtgagcacgagatccgacatagctcacactttaagcatcctaagtcgattaatgtccaattcaagcattgaacattggaaggcccttaaatggttatagagatatttatagggcacttgggattatggtctggcctatgagaaagcaaaaagagaattggagttaaaagggttcgtgaacacaaactacgcctcgaatagagataccaaaaaatcaaccacttcctatattttcttgacaaaccagaatggtataagctggaaggctcagttacagtccgtggttgctctttccaccacggaagcataattcatggcaactacgaaagcttttaaggaagcattatggcttcgctgaatactttatgagttgaaacaaaccaaagggggagtgaccgtgtattcagatagccaatcatcaatttatctttgtaagaactcagtttatcataaaaataacaaacatacagatatacggctttacaagatcagagagaagatagaagaagggttgattgatttagagaaggccaggatagaagataatcctgataatgttggaactaaggtcttaaacttaaacaagttcaagaattggttgaacttgatcaatctcagaagttagtatactgagattcct

SEQ ID NO: 361528 - DNA, 543 bp, Cannabis indica
atactgatcgacactatcacatcggcatagctagagtatgactagagtaccgagtataggctgctattatgattgatagtattgtcgtacgaacgttctagacccagtaccgtgttggacacggggatagggttatggttgggtgcatgggcacctaattataatcctggccatatttatgatattgattatgcttttcttactgagtctgacgattcacagatattgtttgcatgtgtaggtaagggcaaggttaaagttgagcagccgtgagagcgagcagatgaagattgtatatgtcggggcggttactcctagaaggtacgatctttgggatagctggtcatattatgtatagttgctaggtgataacttttatatcaaatacctgaaacagttgtaaatgttttgtacacgggatcccgattatatatatgttattaattttagtatttataagtatttaaatagatttttaattattcacgattttcaataatctcgttgattagcaacgagttgcacaattaagttaaaattacg

SEQ ID NO: 361529 - DNA, 521 bp, Cannabis indica
atttgattgttcttcttcctctattattgtgatttattcatatttgtgctttttcatggttaagcttgatcaccttttgcatgttctatgatctcaatacaaaaatctgaaaaagtgagtgctgagaatgctctaaaatgaatagacataggttttgatgtgaaacgagagtatttacatagcttatgtgacttttagattattgcttaatgcgaattgtatgttgttctatcttagagatgcagtagttggcatgcaatttaagacctttatgatatgaaaagagtttaggttaatttgtaatctgtcatcacataggaggaagaagaatggttaattagtgttaataattgggtaatcaaagcaattgaaatcatatacctaatttcacatccattgttaaagcttttatttgtttgtcgtatttaattttattttgtttattttgttcaacatttatctattcaattgccaaatagaaacaagaatttatttgattggtacttaactgcagtcctcgt

SEQ ID NO: 361530 - DNA, 433 bp, Cannabis indica
cggtcaacctgagtggaactgttgctcgacaatttataggcccctaaataacgttattcgtaaagctgataagtgacacgctaaatcactttttggggacttaaaattgaaactaaaagtttttctatcgatggataacatggaaatatgctaaatatcgcaaaaacaagaaaaactagggtttcctaaactaccccaatcggaagtctaatccaatgggtttcctggggaccaatcgaaattctggttcctacaggtcccactgaaccgatcatccggttcaatgcgggaaacacaaaaaacatcacaaacaagccaattcgaccccaaatgatctaaaaccttctaaacctcctaattacatcacaataaatagaattcatgcaataaaatcaagaatcaaccacagaaacacaaatcaccattaaagacc

SEQ ID NO: 361531 - DNA, 544 bp, Cannabis indica
aacaactcaacattcaacaaagaaagaaatagcttaagagggaaaagggggttcggtttgaagaagaagaaacccagaaattttagcaaaaaaattcaaatagaaggtaagaaaagctacctcaaatccaagcaagaacaaagccccaaatctccataactaagctttcttccacaagcaaaataccacaaaattgaagctagaaaaatgagttttttgagagagggagaggctggctgctagggctggaataatgcagaaaataaagtcgtattttgcttaatatttccctttcaatgaatcgtaacccaaagtgcacaattactacattgcccttagggccaaattcacattttcaagcatttaagggaaaaaatacaattcttatcacatttgatacatgaattataaatttcaaattttttatataaaataaaatgccaatcaaacattccaaaattgtatttcagccccgaaacccggttcggcccgaaatacccggttgtgactataccgccccaacttgtcagaacacacctgaaaa

SEQ ID NO: 361532 - DNA, 421 bp, Cannabis indica
aacatacttgtgagtagatctaagatcctggtaaaataaattccaacagtgtgtgaatatgttctttcctgtctctcaatcacagtatttcattagttgagtacatacaatgatcactaaattatattcatccaaattaaatctaatagaccactttattcctggagtgttgaggcttgcttggaagaccctggtataaattctttataagttcttttggattggatgttcgattgtgtaatacaaaaaaatagcgaggaaaccctgataggtaataagaggtaaaaatctctaaactaatagttaggtttgtgttatgtataattgtgttgagatccgaggtttatggttcatatcagattcaacaaatttttattattaaatttgattgtattctcttccactgcgactctgatatgaa

SEQ ID NO: 361533 - DNA, 759 bp, Cannabis indica
aaagagttttatttagggcataaaacccaacacttagtccatgaaccctcaaagtccataacacaggctcgtagtaaatcttctagtatctgaattgttctctctaattgcccatcagtctgagggtgaaaagctgtgctgaactttatctttgtacccatagctctctgaagagttacccaaaatttcgatataaactttggatccctgttagaaacaatggatttaggagctccatggagacaaactatctccttcacatatagtttagcatactgatccactgtattagtaattttaactggtaaaaaatgagctaactttttgaaccggtccactatgacccatactaaatcatacattcccgtggttctaggcaaaccaaccacagaatccattccagtgtattcccactttcatttaggaagggctaatggttgcaataaccatactgacctctaatgttcaacctttcttttgctggcaggttaaacacttagatatgtagtctaccacatctcttttcatcctataccataaaaaatagggttttagatcctggtacagtttggtggttcccggatgcaacgaataaggtgtggtgtgggcttcatccaggatttctttcttaagctcaccaatattaggaacacaaacctgagctttatacagtagcatttggttacttgagattgaaagctccttaggccgaccgaccatcacctcatcttgaatcttgattagctcaggatcttccaa

SEQ ID NO: 361534 - DNA, 630 bp, Cannabis indica
attagtgtattctgtatttactatgcaatctttctacttatatcaattgtaaccagaaaaaaatacttccttcccaagcttatagccctatatatagtgattcatactcactgggcaaaggggtcgaaacatttgtctaagaattcatattcagagatataattgtaagagctctaagaaaaggaaccattctccttgttcttaagtcaatacaaataacgaggattaggctattaccgaactgctcggggctgaacctctataaaatccttgtgtcgttatttgctttattatactatactcgtattaaactacttgtcgcttacaaatcagactcattgtcgttggctaaaagcgaggtcaacattttggtgctctcattgagagcagaatcaaggatcgctctttatttcaaatctaatcacaagtacaatggtggtacaaacatgtaggggcatggtagatcctgcactgcagaacccagggagcacaagggttctgccaaccgtaaatcccaaacagccatcaactgtaggtcatggtgtgacgactcctgtgagtgaaatcgagcctagtgtgcaagagactgggaataccagttcagcagccagctagggcattcataacaca

SEQ ID NO: 361535 - DNA, 1037 bp, Cannabis indica
tggagttagaacacaaagcttattgggtaatgaaaactctgaacatggatttaaaggctactggacagaaaagattactacagctggatgagttggaggaatttcagaacgaagcttatgagaacgctaagatttacaaggaaagaactaaaaggtggcatgaccgaaacttagtcaggaaggagtttcaacctgggcaacaagttctacttttaaactcaagactaaagttgtttcctggtaaattaaagtcaaggtggtcggggccatttacagtggtcaaggtgtttccttatggagcggtggaactgaaaggtgaaggccctaatactttcaaagttaacgagcagcggttaaagctctacttgggaggtcaatttgatcaagccaagtccgccatgattctagcgccactatgaagaactcgatcaacgtcaagctgtgcgacgataaaggcaacgctaattgggaggcaacccaagtgttctttatgattaagttgagctcttttatgttttagtgttatttttattttctgctctgtttagttctctttaagaaactggtaaaacaatctttagtttcttgttaatttagtattgaaaaaaaaattgaagtacgacccagtggccgcggctagatgtagtccgccgcggccaaaagggtcttacagaatgaccaatttttcatggttatttggccgcggcaaaggcatatatggccgcggcgaaaaggttcttacagaataggcaattttctgggcctgtttggccgctgcaagatggtctgacacgggatttaaaggccaatttccataattcaaaaatcaaattccctcattctcaaccctaacctccacatcgaaaatacttctcctccaccctatttttttcatcaaatcccactcaaaagcccttttctctcaaatctaaccttaaatcttcatcccaaatctttctaaatcatcattcccttcatcaaacactcttttcctctaaaaatccaatcctaaatccctaaacctcacccaaatttca

SEQ ID NO: 361536 - DNA, 523 bp, Cannabis indica
ttaaaaaatttattaatttttaatttgaattattattattattttttaaaaagttaatttgaattatttttatataagtatttattttcaaaaaataattttacttacgaattttactatcaatttttttatactaatagttaactataaaaaaattgactacttaagtacttttactaccaatttgtttagatacataattttactataattattttttaaattaatttgcgttattaatttttttttatcaagaatggtaatttctattaatcaaatcaagccaattacattaaaagagaagcttacaactcaattttatttatgctggacaatttcttttccggtacaattttataagtctacttttgaagctgtatttaatactactatttatataattcaaattcatacactttcttttttatttatgaacaaatttgggtttagccaaatatcataaattgcacctcttaacacatttttatgaatataatctaatttttatgacacattctaatat

SEQ ID NO: 361537 - DNA, 730 bp, Cannabis indica
gtgaaaaatttactctttacaatattgtaaggtagcgtttggttagaggtaaagaaatagaatagaaaggaaaggaaacaattttcattccattcatttgtttggtctttttcccattctcactgctatgttttcattccttccaaccaaacgccacataatagtttagttaattattggacttttttttcttttttgttctatcacattaagggagaggaattgcgaaagcttattggagcatctgcttatatcgaatgcagctcgaaaacacaacaggtttgaaaacacaaaacctttttccccttctttctgatgaattggctttgttgtcttaataaactcatcttgtgtatatacacagaatgtgaaaggagtctttgatgctgcaatgaaagttgtccttgaactacccaaaccgaagaaaagaaaagcaaagcattcaaggcttgcaccataatgtgatttgaaagaattaataggtgtaattaaagagacaacaacaacaattagaataattaagagttcatgattggtattatccacttgtgtaatcttcttatgaaactctcttaaagaagaataagaattaatgtggtcttcactattgttaagtagtatgacttgcttatatatttatataaaattcaggtttttatttattatttttttattaaattgttttattatataatcaaagtttgtaaaatctaaggattagtatgttttg

SEQ ID NO: 361538 - DNA, 938 bp, Cannabis indica
atgttggatgagactttatctttgatacaactttatacacatcaataatgcgaacacaccattgcaatgcacgtctcatagttccatgattagaagaggaagccactttgaagacataagtctcaataacatcctccaagtcaagagaattttctctgatttggacaatcaaatggccaactctctcattggtaccattcctaacccaagcatcagcatcttttaagaaagcactcatacattgaagcttgatttttgcattccccacttggccttcaactccatacaagaacttggcttcatcaattagtaagtctccaattctttcaatcacaaatgaaacaacagcatctgccatttgatgattttttctcagtaagtgaactgaattaaattgaattgaattgtatgatatgatctaacagcaaaacagatcactcatttaagcatttctatcccaagtggtgttgttggtattcaatattggctgcttattttgttcttttctctgattttttttcttatccttagactgatttagaggtggtcctattcctatatgtgtggagtagctaaaaggcattcagcattattggtattggtaggcccaccataataagcaacttccaacaaggaacccatcttcaattggttgacttgactctccttgttactctcttaagtcaattttctaactgtggctgtggctcatgtggttctaactgtatttttctgaggagttcagcggctgcaaatcagatttctcaccattctgcaatggtggtatgccaagactaagtgattgcttttatgatttgcctaatggaatggaagacatataaaaattaatgccgagttgtagtggtgtggtagtgggaggtagtagaatcatttcacattgtgatcatataaagaattccgagttgaaatgattgtta

SEQ ID NO: 361539 - DNA, 1041 bp, Cannabis indica
aatgtctgaaggttgttgattaactcgtggaagtcaaaatccaacaagttcatgacataatttgatgtaaatggcagaaaagttggagtcaaactattcaagatcaaactcacttgagttatctgatctataatagctccatgattctcagcctcttggaagtaactagtcatttggagcaggtgatcacgcacgttctgatgaggtttcatccgtgcattgatgaaattcttggttgcctcaaaatgagcttaattgacgccatcctaaacagttcagtcaactggttcatgatatctacaaccgtgagagtattggcaaaccttgttttcaagttgtcgaccatgctagacagcataaagtaccgagctttattgttagcattctgccaacgctcaaatttttccttgactaccttggtcgcattctcacctggctgctcaagagcctcttcagtcaacacaagcagggcattttcaccaatgagagcaatgttaatgttctctctccatttgacaaagttagctccagagagcttgttgtcaatcaacagtgacaccatggggttgttcatagtcatattgggtactacaagtatcaataaatagaaatcaagtaaggtttaacacaaaatcatacacattcaaaaattattagcacttagcaagtaggaatgactaatgaaaatactaaaacatacaatcttaaataatttccaaggtttccaacaaactgacaccagtgcttcgtattgggcgagagtcaaagatatcaatcgttgaacatagtagtcagctcatctaaaatgacaaacattctagcaacctttcgatcaagatgagaatccagggttgtcccgtttaggcgagagtcaaggccattctatcttacgagcttctaccattgttttatacttttgtaagtcttactcttagcagccactattagggtggacgttactaagaataaaacacttacaaataatacttatctttctagattctacgacattaaatttctaatgaacgttcatctattagg

SEQ ID NO: 361540 - DNA, 616 bp, Cannabis indica
ggtggtggagagctgacaccagagtacccccttaaagagcattctgagcttttagccttctaccaggaacatagatgatttttgctctgtagacatatgggaagcaccatataccaaatcacctagtttcgccaaaccgattgcaccattctatttgtagacccaaataaatggtgaataccaagtcccgtcccgatccggacaatattgaagatatttacgaaaatgccactgcatacaaactaagcatcagcatgccacctgcatgcaccacaacatgcgccaccacttggccaacttgtgggcatcacttagcttgtaacgtgccatcatagactgcacgtaacacgcgtcactaatgagagtgattgaatacagtttttagtgacacttcacatgtgtcactgaacctttttacattcactctctgcgcgtcactgtaggcatttagaatcaagttttgtcagactgaaaaagtaacagcaacacacataaagtgtccctatatctttttttttcttttttattctctatcaatatttttggagatatagtgacccacacaaaaagtcactatattagatatttttctaaaaaaaataatatttaattgttt

SEQ ID NO: 361541 - DNA, 540 bp, Cannabis indica
atttaattgagtggattcaagcttgttttgttgttagttagtgggaattaaccatgtataaagctttaaactcaaaactttggtttttatggtaaaatgatgaattagctgctgtggttgttgtttgtgtttgggcttgttttctagtgttatattatggttatatatggtgaattgagcaggttttgttagctaatttgtgggatgagcaagctttgagtttttgaactcaagcttgactcatcaatggtgatttttgtaatggtgcatgaagctgtgttttattgctttgttattgacctctaggatgtttagaacaggtttggaaagtttggggaggattggggttgaattggttgagatatggaatttttagtgtttcctgcactgaaccggaattccggttcaaagaggcctgtaggaaccggaattccggttggcttccaggatttcctcccagaactggaattccggttggggaactggtctaccggttggggcaaatttgggaaccctagttctccccatttttgtgttatt

SEQ ID NO: 361542 - DNA, 553 bp, Cannabis indica
acggagatcttcttctcggtagccaacagcttttggcctcgcccaactccaaccgaacagctccagcttccgccctggcctcctcagcttccgttttggccaagtccgcctccgccttcaaggtgtcggacagagccgcactcttagaagcaacaaacttagcccaagagtaagtgtaagccaacttcagaccggcctgaacaaaggaaaaaattcagcatatggagctaagtgtggaaagttaaaggaaagtatcaaaaaagacttaccctggtgaactccttcaggactttgcccaccaacacatccagagatgagtcactatcggcaccagccagttgctcactaacttcaggaaccaaccggttcatatagtgggccagcatctccttgccctttttggcctctggaagcacgagcaaagatggagtcggtgcctgcaccctctcaggagtactcctgaccagttcagacccaaccattggcggtctagattccttagacttggcagacttgggggtagaggggtttgcagcagtcagctcctcagaaa

SEQ ID NO: 361543 - DNA, 689 bp, Cannabis indica
actaataataatatgccacattttataatacttcacaccttaaaatgtccctttaacattttttttgaaactttacctaataactaataaatcccctcaataattttataccaaagtatactttttattttcgtcatgatcactttattgattagaaaaagaattacatcaatagaacaatcatttcttctatctaaaaaagcttcatcatctataagaaaggcatgcttagccaattcatgagctgcaacgttaaaattgcaactaacatgagaaagagatatcccacaaaaattaaataataaagctttaatatctaaaactaaaacaccatattcattatctcttagtctctttctctcctatcctcaaccaaattaaaagaacaccatcaccttagccagccgttccaatccctcttgtcgtcgcacgtccgagatcgcaagacagctagcatctcacctccacctcattgtctaagttggtactgaaccttcataattaatggataatattttttgcgtaaaaaaaaatcatgaatggtattgtatttttttcagcatatggtttgtttgcatcatagttgtatgtttttggtagaatttgtgtgtttttttatctatgaactaagtagatttggttttctgcatcttttttccatttagctatttttttcgatagattctcga

SEQ ID NO: 361544 - DNA, 637 bp, Cannabis indica
agttacagatccaatattaaatcttcgctcctaaaagaacaaacttcaaatacacacaatactaaactaattatttcagaaacaaaaaaaagttaattatatatattggttattttaacaaactagcttagttttcaaaagaagaaaagtagtttaatttttggacaaattctaacaagtaactagtaactagtaactagtaaacttgcaatatttaagcaaataaaaaactttttatgtatatataaagagtgagattgtatgaccaaaactggggtttgaggttgttttagagagggcattttcccaattttttaaaatgaagtagtaagagaaaataggggaaaataaatctttactcactcactcactccaactaatcaattagattatgttttatttatactgagcaagggcttgattgaaaaaaaaaagaagagattttaggatctatttgttaattaagaggctttgttaagtctaattaataaataagataattggtaattttatttgataattaattatagggtaaattgcagcatatatacctaatgtttcagattttatacacttaaatacctaatgtttatttttgcaggcaaaaatatctcatgttacaattctcttacacagt

SEQ ID NO: 361545 - DNA, 641 bp, Cannabis indica
gccccaaccacgtaaaaagtcttcatcttactttcttacagctcattattataattacattttaacagttgccgaaaacctcggtcaacagtcatgataatgaattatggattagaatgggaattatatcggactagtttaaaattctaagttgtcgattttgtggaatagttagaaatgaccaaaatacccctatgttctgttttggcttaggtgtgcattaaggttaaaatggtaattttgttaagtttaattctttgttttatttaatgctttcgtatcatcctaagctgaagttttattttagctaatacattaagtttattaaataagtttagaatggaaaagaatgaaatcaaaacctatctctctctcttctcttttcggttcaagaacccagcagaaaaccgggaaaaagcttagctcacttcatcaattttctagtaaaatcttcaaccctaagagctaatcaagttgtcgtaagtgttcttcatgtgttcttgatgatttcttaggttttgggtttgatattagttggggttttggtgacttcgggatttaggtattaaactgagattagaacaagtttttaggcttagattggagtttgtttatgcttgatttggttagaatcaaagctg

SEQ ID NO: 361546 - DNA, 521 bp, Cannabis indica
ttttttttttttaaaaaaaaagtaaaattatattggtaaacttaatattattataaaaaaatttataatattttttatttttaaatatttaattttttattcttttataattttatttaattttaaaatgatttatgaaaaaaatattaggtctacaaatataaacatgtcacgtgtagagtgtatacataagcatatagtgaccattaatcggatcacaccaaatttaaacttagaaggttaagtgcaagtgaaataataattgggaggtaaataataacataagtatttaaagttttgaatttataagcgccataaatttaaatgatttttttagcgagataaatatctaatgtttataaccgtaattattttccaattttgtcagtatatactcaattattatgttaaacaaaatacatgtaaaacaataaaatttataaatatttgggtaaataacgggataagtactcaacgttttaagtttgtaagtggcataatcaatgtttatttttagcggc

SEQ ID NO: 361547 - DNA, 566 bp, Cannabis indica
ttagagggacatgcttcatttgcaatagaggcgagagaagccttatggtattgtttgttgggaatattttaccaagatttagatttactaacaagtatgtccattgacatcctaaatatgaatatctctaaaataatgaaaataaacacataagggtttaagaaaaccttacattagttgcagcagaatataatgactcatttcgttcaagatctctagcccttgattcctttctatcgctgagcattatcaagatctaaacctgaatctctttctctccttcgggttttgttaccaccgtcttactcactatgattgagtacttgacttgctatatgtagacatgacactcttttactatgggtttcgaatgtggaagtataatgaaggatgctaaaatcactatgggaggaactctctcatctaggttgaatgcaatagttaaattgtcaaaagtttagttgacaagaggatgagatgagagcatcatgttctttttatagtgtttcaactagggcttaaggctaaattatatggattaaaaaagaataaaatattgggcaata

SEQ ID NO: 361548 - DNA, 533 bp, Cannabis indica
atgaagccttcggcacggtcaagaaaattgctcattgaatctaccgggccgttcttcgttatgtctttccagagctcatcgaggacttcaatgccccccagtatcgcggacaactttccatcttcagttactcttgaaaccttagtcacctccgtcatgaatctgctgatgtaggcccggagaggctcccttggtctttgcttgacttcaacctggtctcctaggtgcaacggaagttggtgggaggaggaaaattatgcatggaattccgaggagaaagctttccatgagttgaactttccaggtgccagtttgaagtaccattgctgggcggcttccgagagggtagcaggaaaaattcttcagcatacatctccccgtattccttgtagatccatctccatctcaaaatacttgaggtgggataatggatcttccttcccagaaaaaaacctccaaggttttttaaacttgtggggcaacgccaagagattgatctcgagggagaagggggttccacgtgctcggtccaa

SEQ ID NO: 361549 - DNA, 727 bp, Cannabis indica
aatcattcaaaataattttttcttaaaatctaaattaattttttaagatttactttaaaaagtgttaaatatttttcatgtttattttgaggggtacgatttgatagttgtcaaaatttaaggttcatagttactaatttacaaagacacgtcatcatttaaacggaatgatgggacagaacctaccagaatgactaaatttctgtagatgtaaaagttgaggggagattcttaacaagccgtaagagggtaaaatcagtattgtcgaaagttcaggagtaaaatttactaattattctaatgataatttggaagagtttgtatctagtcggaattatttttttaagtaagactatttttaatgcaaaatgtaaaattagtgcttaagtttgatacaaaagttaagtttttgttatatttagctcactatttataattgtagtttaatataaagaagtaaaaaaataaaattattgttgatcatcatttattattgtatcaaaaatatacaaatattagtacttaaataacaataatattataaataaagatgataaaaaaaatatagtaatacacaattttttttagtattttattggagatgctctaacactacaaaatataaataatttttttccctacaaattgtatccggtactcctaaaatgcacttcaaaaaagaagtaatactaatgtatctcttattgttacaagaaaattttgtagt

SEQ ID NO: 361550 - DNA, 802 bp, Cannabis indica
tcaatcagaagaggagcatgagttacatcttcagatggttttgcaacggcttcgggaacacaagttttatgccaaattcaagaaatgtgaattttggctatctcaagtgtctttcttagggcacattgttagcaaagatgggatcaaggtggatccagggaaaatagaatctgtcagggattggccaagaccgaagacagtgacagaaattagaagctttttgggtttagccggttattatcgtcagttcgtggaagggttttctaaaatttcaacacccttaacccgaacttacaaagaagaatcagcggtttgtttggtcagataagtgcgaagctagttttcaagagctgaaacggaggttgattaccgctccagagctagctttgccttcagacatagagaaatttgtagtttattgcgatgcatccagacagggtctggggtgtgtgctgatggaagccgatcgagttatcgattatgcctcccgttagctaaaggattatgaacagcgatacccgactcatgacctagagttggccgcggtagtttttgcattgaagatctggtggcattacctttacggaagaagatgtgaaatctataccgaccataaaagtctcaaatatttctttactcagaaagatttgattatgagacaaagacgttcgttggatttagttaaagattatgattgtgagattctctatcaccttgggaaggccaatgtagtggccaatgccctgagcaggaagggtcccgggcaggtagctagcatggttcagatctcacctcagttagc

SEQ ID NO: 361551 - DNA, 1056 bp, Cannabis indica
ctctctctattttcggccctccttgagcagtaaggaagtggatttttcctttgtgattgaagctcattttaatcagacttagtgatctctaattgctggtaaggtttctacatctttcttttatgtttccttgaatttttgaagagaaatggtaggttgcatgcttagtttggagttgcttgttgctgctgtgtttatatgttgtattcagaggtttaagcatgttggattgagtggattgaaactgttttgatgcatgtttggttggttttaaattagtttagagttttggtaaaaaaaactatgtttttcaaagagaaatggttgaatatgttgctgcacttgttgttgatgcttgctgttgttttcagaagttattatatgcatatttaggtagattagagctggtttgaatgcatgttagttagatttaaccaagtttgagttttgaactcaaagcatggagctttaatggtgattttcgattctgtgttttctgggctgtgttgatgccttagaaatgttctatggggtatttagagcaggtctggaaggttttgtttgaattggatttgatttgagaaagttatgaatgtttgattgaatcctgcgaggaaccagaattctggatgtgcaaccggaatttcggatggggttcaggaattcccagaaccagaatttcggttgcagaactggtctgccggttgggggactttcaagaaccctagtttttctcgttttatgttatttggggtattgccatgctttttatcgatagggaagcttttaatttctagtttaagtccccgggaagtgatttagcgtatcacttaatagtgttgtgattgttatggtttaggagcctgtaaacagccgtgcagtttgtttcactatggttgaccggcacacatgaattcggaatcgaggtaagattagtataaaagtatgcatatgtattacatgtttagcgtgcatgttaggaagcatgttagattacattagatatgtatgttggctttgtaccatttgattgtgtcacatcggtacaggctagag

SEQ ID NO: 361552 - DNA, 1412 bp, Cannabis indica
gctgagatgtgttctcagtgcagatgaagcttgtaaatctttatgtgttttacttctttattctcaattcaagtctaaaattcatatgttgaaatcaatcaacctaaaggcaatcaacttggtaatctcgatcattaaaatcaacaagttgtactttcatttctaaaatcaatttatctcaataatcccattaatattactgactaaaactattgtgacatttttggccttgaaggtcgtcaaaattaaaaatatttttattcacaagtaacttacactatatttacatattctaaataaatctctgtaattaataaattacacttatccacttatagtaaaatttttaatttatgctaaattagattagtagtatcataaacctactcattaatacctaattaactcataatatataataaatcctaattattcataattaaatttttgaaatattacaaaaggtatgactaaattctattattcagttatattattattcagttatatgatattattttgaaatttgaatttaaaattttaaattaaagtataattgtgaagacttggtttgactcaagttaaatcgagtatatatataataaataaataaatataatataatatgtatgtaaaaaaaaattaatatatgcaataaagcagtatcccctcagtccccctctctctttacctatcactctttttctctctcttcaaaatgcaagaaagaaaacccacaaactaccataaccaccacattccgacgacctacctccggccaccgaccagccccacgcgccggaccactcgaacctcctaatgccggcgacctcaccccccaagcggcgccgctcctttcgccgccgttagcttgggatcgcaagtcaaaggttggtgattcaaactttgaacggatttttcggtcaccttcggtgtccgtttgacgagacgtcttcaccactaaactcagctcgtcgaggagaacaacctacactaaactatttttcccggttcactactttttccggtgacatttttatagctccgcccttttcggcgacgttgtgtaccgttttgacaaacagttggcatgggtttgatcaactcgtcgaggtggtcgttttgatgtacactactcctatttttggtgacgttccagtacaccaatttttactgccaccgattgttaatgtgcactgtttaggtgaagcttcggaaccctaaattttaaatatagtcatattatatgtcgttggactcggttttgaatgtagaatgcgataatgataattatttaaccatttggtggtataagtgagagtaatatgtaagagtggactaaacaattggagctcgggacttaagagcttaagatcgtcttttggaaaaagtttaacgactcgggagaggta

SEQ ID NO: 361553 - DNA, 827 bp, Cannabis indica
ggtgctatgtggtgcaggtaagaaagtaagaagctgcgttcgaccatgagtcaaaggtctccgagcaatatacatatcagtcgtggtgtcttagcttccgagaagcagaatcgacttcttttctatgtttagaaaggtaactttaatttttgtaacagtgattttgtaacctattgtaaaagaattttataaacaggagagatcttcgtattatggtgtaataagtatgaaagttttatttcaacttaatcaaaaagtttttaattaaactacactttttctaaactaatagattagaaagaaataagtttgtaaaagcacacatgtggcgtccctgagggtcaggacgttacaacatggtatcagaacgaccaagatttaatgatcctgaagactggcttgatatgtacattggctgcgaagactcgttcgactcatggcttagtaaatgctaattgttagttgattaatagactatttattgattgtttgaattgcctgcttatttgaaatgtgtaagctgttagagaaacatgataagttatgataaaattgttaaatatgtttatgtatatgtggtaacacatattagcatttattctcgtttgaaagatgttaatgatggaaagaaatggtcgcgagtgtactggaagatgtacctggggcgatctagtaagaataatggcgagcttaccaggctcggagttggtagtatgagtacgaattttccactaccataagactaggagcaaatgtatgatagagacgttggttggaattagtgaaagattacgactgtgagattctctatcaccctgggaaggcca

SEQ ID NO: 361554 - DNA, 614 bp, Cannabis indica
tctttggtatgttgctccagcattttttagaccaaacgacattactttgtaacaatatagacccatatctgttcaaaaacttgtatgttcttggtcgggtggatgcattttgatttgattttacccggaataagcatccatgaagcttaatatttcatgccctgctgttgcatccatgagataatcgattcttggaagtgggaaatagtccttgggccatgctttgttgaggtctgtgaaatcaatacacacacgccatttcttgttcatacccaagctgggtagaaaccttcaattatgaaattgttgttgcgtagcttttctacttcttcctttagggctagtgctcgatctttgtccaatggccttcacttttgttgaactggccggaaattgggatcaatattcagaacgtgctaaatgatagaaggatcaattccgaccatatccgcatgtgaccaagcaaaaacgtctaggtttgctctcagaaattttatcaattctcattttaattcgagcaacaaatcctttccgatctttatttttctggccgggatatttggatcgatcttgatctcttctaactcttccacaggtccaacattgctgcttgg

SEQ ID NO: 361555 - DNA, 1366 bp, Cannabis indica
gaaaatactatatattttttaaataaagttcaaaaaacacttttttatagcccactaaatttaagattagtcctagtttcaatgaatgtttatctgtccatctctgcctgtgatacctaatactactatgaggtgacatcttacaaatcgttaataatttttcatataattgtggtgttgctcaatattactagtgcctaattctacaattcaaaaacaaaagtagtttaatgtaagtagataccacatctccatgtgaaattcccaagtgggtgagagcagaagctagcttgagacaacgttgataagtttggttccaagtgtattggatagagccatagataagagatgtgttatctctataagccttaaaagaacgctccaaaaagccaatgggagacaaaggaacatcatttgcactacactcaactataaaccccttccatgcctgaaattcatatgaaaaaaaggttcaaaattgatatggattggaaaaaatgtaattactttggctttgagtgaaagaaatatttgagtgaaagaggaggggaagatgatgattaatactaaaaaacatttttcacttatacacaatgaaaatgatgatgatgaaatagaaatccacttagccattgtttgttattatgattaatataaaatgtgattgtatatatacaaaagtacaatatatttttttctttctatatgtggtaaaagtcaatacaaagtaatgaactaggcccatttaattgagcatcctacgaaataaataaataggtgagtggaaaatttttatagccaccctattccataatttagtggggatgccaaaagtttgaggaaaatacaaaaaggattatttcacaaatagataaaaacaataaaaataccgttctataaaattttaaatatttttataaattttaaaattttatttacagaaaatatagtatttttatattacactcttgttgatttgttattgatttttcgttatatgtgtgttatttttttattttaatgttattttcttgttacttttatatattattcatgttatttttatatagaagatcgtataaatgtataaaaaaaatctttaaaatgtaaaaaattttaaaaaaaaataatattttatataattatttcaaaataaaatacataaaattgaacatagtagaataagaaattgaaagattttattaaaattgttcgtttagaaaatccctgaaaacctaatcatatgttcttctctctatcaaaacaataagattgttatccttattactaaactcgttaaagagataaaaaatttaaaagaaaatattttggaagatttaaattactcctcataatcctacatgct

SEQ ID NO: 361556 - DNA, 644 bp, Cannabis indica
gtattctaaatatgtaatatatgttcttaccaattatagatattgtaagcaaaaaggaaaccttccctcaagcatgtatccctataaatagtgatccattctcactggtaaagcagtcgaaagaattactttagagagatctaagagagcatactcagagatttcattgtgagagcttcaagagaggaaacattgtgttctttgttcttgagttaatacaaatcaaggggagtaggctattaccgaactgaaccactacaacattttactctattagcggtagacctctccaccgctaataccccccaaattggtcgctatagggtattagcgtgggatctcccccgctaatggtccaccactaataagtggccgctattaatagtattagcgcagaattggttcccgccgctaataataccattagcgacggagcattagcggcaggaccccgccgctaatgttctttgtcaatttcgtgtttcgtagaatgacaaagagcattagcggcgggacctaatgttaattaaatataaaaaaaaaatttgtaaataacattatttaaatatataagtaaataattaattgggataattgcggcaaaagtccccaaaaacttgaggttgatgccgattagtcctcaa

SEQ ID NO: 361557 - DNA, 579 bp, Cannabis indica
atcaaccattagatatttgatccaatggtcaagaataaaatacccatacataggtaatacccattaagagtatacccatatatatatatatgtgtgtttcaagtattacttatattttcatttcaataatatgatgtttgtttaaatgatataactataatacttgaatctaaaggaagcttggtcccctcctcctccggattggattaagcttaattgtgatgtcaaggtgggattcaatagtatgtgcattgctgttgttgcaaggaattattttggcagagttattagagttcagacggctggggaagatttctcggaggttctttgcggagaagcgactgcctgttgcttagctgtctctgtcgctttagatatcggttccaagtttgtgattgtggagaatgactcgagggtggttatcaatgctctcaatgggatagattctcgttggagtcttgaaaactatgtttcattttgtactaagtcttctccctcttttattagttgtaatttttcttatgttcgtagaacttgtaattttgccgctcataacgtggctagatgggcgtttgctca

SEQ ID NO: 361558 - DNA, 1033 bp, Cannabis indica
ggacagaaccactgttaccccacacagtggacgaataccacggacggaatccacaagacttcaatgtcacaaaagattagaagaagaatacagagattgcccaagcatacttagagaaagcctcacgaaaaatgaagtgggcagatcaaaaacgccaaccatgggagttcaaggcaggtgacttagtgttgatcaaactgcagccagaacaattgagattctgtggggacaaggacatcagactcgtacgcaaatacaagagccctgttccagtcatctccaaagttgtcctagcatcctacaaagtcgaactaccttcttggatgaagatagacccggtccttcacgtcagcaagctcaagtcgtatcatgaagatccagaagatctagcgtgcaaccagtctactagggacgacatcagcattcaatgatgcaacattagagaaccagaagaaatccttgccgaaagaactattcgtatgaagaggaagaagagaaaagagtacatggttaaatggaagggcctcaccgatgacgagatcaattgggagaaggcggaggacttgcagcagtttatgtagaagattgatgatcatgtagacctcattggggtggggagacttttgttgattagctttctttcttttgtatttcctttcagatatgtatagagagctataatcatatatgttcttggaaatcccttgaaaccccattaagctctttaggggggtgacctggtgacttatgaagcaccttgtcaccagcatgataggagcctagctgtgtactcccttgccctatcaaggccatttaataataaaacgatatttaataatgcttcttgtgtatgcttctatgttgcctttgtgatgcctatttattgcctttgttgggccattgcgtgccatttgtcgatatgtttactagtggattgtgtgagattggtccttggggacgatttgtgtttgcctgctcatgcttcttgtttgcactcaacatgtgcgagacatgtatcgtgcctaacctttga

SEQ ID NO: 361559 - DNA, 1018 bp, Cannabis indica
ccaactgtccccccaagaagtgttgttgggagttttgtcccgaaaacagatccagtagtagtgaatgagcagacccctactaataaagatgaggatagggttgataatgtatttgaccagtgatgagtttgatgctcccttttacaacaatgatcctctggtaaatttgaacaaggatggtgatgcgaagttgcaggttgatgaagttatagaggtacctcctttgaggttagaactacctccactacctctaaggaaccagaggatggagcaagaaagaagaacccctcgtagtgaaactcaccaaatcccaggcactagtagcaaccgaccaggtcctcctcgtagtaccgtaccatctgattttgaagtttgtacaaaattcaaacctattgtgtggacaatagaaagcatagagaaaaataatatttatacaacttcttttagcggtgcaccttcatgggaaatatacgttggcaagtgttacacaaacaagactgaattgaaaaatgtagtgggaagatttacattgaaaataaattttgagttcatgatgaagaagtctagcaccgatgttttttacgcaacttgtagggattcaaattgcaaatggagagtgagggggaggaagaaggcatgttgtgacatgtttgaggtcattgtattttacaatgaatacacatgtaacctggattctagacatgctaataaccgtcaagcagcaccatgggttgttggccaccttattaagaataagtttagattagacggaactaagtacaagacaaaagacatacagagacatatgtttcaggactatgacattaagatgagttataagaaggcttggaggtgccgggagaagaaacttatgtatacgagaggtacgctagtagaagcttatagtcagttacatggttacttgtacatgctggaatagaagaatccaagtactattatagagattgtcattgtaaagcccgcttagttaatttggaaattagcagttatttatgtt

SEQ ID NO: 361560 - DNA, 679 bp, Cannabis indica
cacgtacaaaacttgtgtgtttttacttttctgtactgtttgttttcctggtttcttctggagttacagagttgttttctgtagctatagaaaaactgtttcattatcagtttcattatcttttaattaaataataaactggaatattaaaatacaaaatttcagttatgatcttttctaattcaaccaattctttctctatcttccctctaattcaataaagtcttatttttatgtgtttgctcttttcatgataaatcgaattctcgcaaagatgaatggatgactggctattcgagtacacaatcactccaccttttatttgtttcaattcaaatagaatttcccaaattctacttacgcggtggaaagggcaaccaactgtaactgtgccttccagcatatacagttcaagtttgtcatgaaaacgtaaaaagtgtgattttctcgtatatgtatttgaagcatagttagcgtccgcaaaccctttcaactccaattcactttttactttctcataggtgagaccataatcctaaatgcatgttaagtaccttaataatcatttgaaggtcttccaatattcattgcttgcattggacatgaactaagtaatatatatatatatatatatataaatatatatatatatttaaaataattttttctttttttcttt

SEQ ID NO: 361561 - DNA, 767 bp, Cannabis indica
aatggtgtaaaaatcattatcaagagaaaaaaaaaattattactttgaatactaatgtttatagggtttcttattgtttggaaaggaagaaaaaaaaactatttatcttttttaattaagtggaaaataattaaatacaatattaattataaaataaattaaattcataatttttttaaaaaatttattatttattataaataccgcgcaaaacgaagacgaatataaaatttacggaaacactaattaaagcagacttaccttatattaatatagtataagaatatataacatctagatctaattaagaaataaagttggttcaaaattttttatatctactctttttttatggattcagtagttataatataccattagtgaaaaataaaattaaataatgtataaatttctttctcaaattaatatatatataaatattttacaaaaatattaaaactaaatatattaatttattatattataaaaccgcgcaaagcgcggtaatgttacctagtatataatataaaggaaagcatcaacaagggaagagttagtgaaattacttcggctggtctatacataaagaagatctgtattgcatattgctgtcaaacatctctgccatcttaccccatagtgtaatttttgatgtgatcgaactgtaaaatggaaaggtaaaatggcattaatcatattattggtgtgatatataagatatactactcctacattaatcattattttttaatttcactgctcatctc

SEQ ID NO: 361562 - DNA, 805 bp, Cannabis indica
gtaaaaattataattaattataaattataattcatatgactaaatatctgtaattaagatatttattacaaaattataatttatcgtaacaaaatgtgtttttaattataataaatgaaaaaatatatttagtcacaaaaaaattatgttgttactaaaagtaattttttcttacaatataaatatatatagaaatattgtgacataaattttgtaatttcatatgttaaaattaaatacttcactttaattttaacaacatagatatctactttttaatgttatagtcataattagttttaggtaattttatatatatcttttaaagagtaatttgcagtgaaactcctccaactattaatttacttgcaaaaaactatccaacctcatattttggtaggaaaactctcctaagtactgttccgtttacatttttaaggtgtcgtctgtctagcctcgttaaatcctaattttccccacgtggcaatgacaagtcactaaaaaattatcctacgtggtcatattttacaaaataaaaattaaaatgagtaattaaaataaaaataaaaataaaaactttataaagagtaatttgcgacaaaactccccaactatcaatttacttgtaaaaaaccatccaaccttaaaattttttacgtatgattttttgtcaagtaaattagataggttgggggggggggggggggtaagggggagggaggggttgctgcaaagtactctatatattttgaaaaataaaattaaaaacttaataaaatagtacaattactaaaaatatgaataa

SEQ ID NO: 361563 - DNA, 767 bp, Cannabis indica
ctttcggactgtccatctgtctgaggatggaaagatgtattgaactttagtttggtacctatagcccgttgtaaactttgccaaaactttgaggtaaacttcggatctctatctgaaactatggattttggtacaccatgcagtcttactatttccttgacgtataaatctgcatcctgatccactgaaaaggttgttttaactggtagaaaatgtgcagacttcgtgaatcgatctaccacaacacaaatagaatcaagtaaatctgtggttctaggtaatccaaccacaaagtccatcatgatatccttccatttccactaaggtagggttaaaggctataacaaccctgtcggtctctgatgttcagcctttatttgctgacaggttaggcatctcggtacgaattctaccacattcttcttcattccgctccaccaaaagtaaggtttaagatcttgatacatcttagtggtgtcgggatgcagagagtatggagtggtatgagcctcttcgagaatttcattcctgagttccacactattaggaacacaaaccctggttttgaagaatagcatcccattgtttgatattgtaaagtctctggcttgaccagctgaaacctcttctctgatctttactagctctggatcagttaactgagtgactttaattcgttctaacagatcagattgtagcgtcaagttatgaagcttgcctacaacaaactcaatgctagatctgactatatcctctgctaactgagg

SEQ ID NO: 361564 - DNA, 547 bp, Cannabis indica
tgaaatgagttttatttaggggataaaacccaattggatttccttctcttctgctgaatttcaggttgtaggtatacttcaagattatgatgaggcccaaattttcaatagtcaaagctcatttgaagactgtctgtgggaaacgagaattcactcgacaacatttggcgccgtctgtgggaaacgagaattaaaatattattcatttcaagtaagaataccatcatggctggaaaccaaacaaacggaggtgctaacaacgggtccatcaacatcggaatgatgaacgtaccgttatccggagctagaacaccgcctgtggacgtcgttaatggcggagtagggaggagcaacatcagacctctcaacctgttccctgaaacaactgaccctcaagtcggggacacgtccacaccaccagcaaccatgcactttccccctgtcactccggtggtggtatctgagggaattgttggaaattattttaccaggatcttagatctacccacaagtatgttgattaacaccttaaatatgaactttctaa

SEQ ID NO: 361565 - DNA, 90 bp, Cannabis indica
ttggcttcaggaaactaataactttgcacatttgtttccttcagaaaaagcctacacgccactttctctctcttttcttctcttctattt

SEQ ID NO: 361566 - DNA, 634 bp, Cannabis indica
tgttctttgtatcaacagatactgtgggaggatgcaggggtggatccttgggaggatcagtagggagttcgacgttgatctgctgtgaagggatagtaggagcagggtgagatgttgcagtaggtttagcaaataaaatgtcaggatcagaagttaaagaaccttttaaaggaaaaattatttcataaaatataacatccctagaatggaagatagcattgttgtcaagcttaaggagtgtgtatgctttcataccattggcataaccaatgaatatacaggcataagcatgggggaaaaatttatgtctcttgctagttagagagaaagcatatgctagacagtcaaatgttcttaggtgattataggcgggttacttgtgtgcaagagttcaaaggcagttttgtggtgtaataagggggtaggggtcctatttatgagataaacaacaatgttaatgaggtgaggccaatacactaggggaagagaggattggaaagcaaatgcccaagcaacatttaagatatgttggtgtttttgctcaactactgaattttgtactgttgaggtgtttcaacacaagagtattgatttggatacccttttgagtataaaaaagatagtctatgtttag

SEQ ID NO: 361567 - DNA, 572 bp, Cannabis indica
gtgatagtctaaactgcaaaaatcgcagaaactgcaccacatgcacatttttttgcggtgtgatttctacgatattttagttttgcggtgcgggtgcgggtgcggtttaagaaattaaaaaaatctgcatgtgcagattggtttaaaaaaaatggtcaaaaactgcaccatctgcaccgcaaacaatcctaatgtgagccttcttaacaattaatggatcattccatatgtgacataaacttattttaaataaacaatgtgctttaaattaggtaaacaatatgttttattaggtaaataatatgtcttaattttagtaaataacatgcaatatcagctaaacaacgcgctttaaaataattaaagtaaacaacttgtttaaaataaaataaacgacataccttaaataaagtaaatgaaattactatcctataataaagtaaacaacataagtaaatcgtatgcattaatataagtaaacgatatataatattaagtaaatgtgcctaaacagtgacggacccaaaatttttaatcagtgggggcttaattattataaaaatatttattat

SEQ ID NO: 361568 - DNA, 745 bp, Cannabis indica
aactgcatattgaagttcaaacataaaggtacgaggcatttaaatataaaataaagaaaaagcaaagttggctatccaactttgcaaattcgtctttacaaaaagtgccacaaggggcaaacaattgtctcggctctaaggccatttgaaaaaaaaaagaaaagagaaaaataaaaaccaagcctacattgtggaagacttaaatatatcttcttcgtccgctgcctctgcctcttcttcctccttcctggccttctcatagtaagctaaagtttcctcttcctcctccttgaagaagctcgtgtccatgttgggattcgccatccaggctcgataaacggtacagaggctgatcttattgcatcgctctgcggttttcgcctcatttctttcgagttcggtttctttccctttaagctcgacctctttctccacaagcgccttcctgagttcattgcattcatcgactttggtcatggtggcttcttcaaagtctttctttgacttctcagcttcctatttgagatgagtgacttcttgttgagcgttgttctattgtttaatcacgacctcacgttgagctagtgattattggacctcgccctccaggtatttgtgccgctccaggattcgccaatgggagggaaaagagaggaaataagcctggagagttacgagcaaatgaatatgaagaacaaaaaaaaaaatacaacaaacttaccatgagggtatggtgcaagttcct

SEQ ID NO: 361569 - DNA, 774 bp, Cannabis indica
atatatatatatatatgcattatcagatgcattacttaattaaaaaaattaaaaattttaaaaatacatatatataatcacatttaaatgacacaccaatgtagcaattaatagctaaaaaaaattcttaaaatcaaaatctcaaactccatttcgaaaattaaaaacaaaatacattacctaattaaaaaattaaacatacatgtattttacttaatatatatcattttattgaatctaattaaaaaaaaattaattatacgtacattgtaacatcagtacatataatatatatatattcatttttttttagattgagtttgaaacagaaatatatatgatatatttattatatcaaatcaaatttgtgtgtgtaatatataatgagatcgaacttagatgtatgtaaagagaagagttaattgctgccgacattatgcaacgacgaaaatccactaagggccagtttggtacagctgtgctgtgggaaaaaacagttgtacatgtgttgtgagaaaaaacagatgtagcaaaagtactgtggaaaaaagttgagctacgtgtttggtaaattataaatttcaaagtactgtgagttgttaaaatctattagaatgataatgataatgttataatctagtttattataatcacaaatatgtaaaaattaattttatatcatattttattttttttatatattttaaatttttttttcaaatataaatttatatgtatttgataaaaataatttatagtattttttttttatta

SEQ ID NO: 361570 - DNA, 731 bp, Cannabis indica
tatctattcaattctcatccatgtgatcttgtgattagatacatacatccatccacgtgtatatatttcatttattatttccaccaccacatattgtaaaatactccttttaacttaaaaaaattaatcgttttttttttttaaaaaaaaattacatttttatttggatatgaaatttagtagtttttttgcagttttttatttaaattttattggcgacttattagttttttagttgaatgtgataagttttcattctaattattaaaaagggtataatttgtttattaattgattatgctctttgaataatatcatgataatgataatgataatggagtttatatgattcaacacataagcttaaattaatactctcatagtctcatgggtgtgtctctctctcatccatagctttaaattttaagattataccatgaaaacatgatctcatctttctttcttacacttttttttctttctctcttttattttttactaaaaatgaatatgcatgcaacccacaagaaaatttgctttgttttatttggagagatactaaaataagtaaagacaaaataatataaatacatatatataacttatcaaaataatctcttttcttagctagtcttgaaagattatgcaacctactatcaatatcaatttttctcctcactctctctcattctattgtcacttgtttaggcatggtattattattattattg

SEQ ID NO: 361571 - DNA, 478 bp, Cannabis indica
attgtattttaaaatatagtataattgttagattgtgtaattactaccctagtaattataattgtgtaattaacacactagtaattacacagttactttcaagcatacttctaattttttacatacttaacttctcttttttttagcaaaatccttataagtttactactttttgcaaatttgaggcgcctgttaaataccaattagatgatcactgtgtacacttgagtatacgtaaaagtaaaattttgaaacctatacagtaataatcaagttgaaatttaacagtgatatcagcacctcaaatttgcaaagcaaaaaaaaaataacataaggacgtttgccacaaaataaagagtaagggattaagttaaaaaatcaaaacataaaagggtttgtcgcaaataatattttcttatatatgtggttgaggagtgctactgtcaacctcttattacaatctcttagttaacctcta

SEQ ID NO: 361572 - DNA, 689 bp, Cannabis indica
atgataattttttcccatattgacataacttatagagatctcttatatatctttcaaatatgtatatcatttatagctacctatatagaaccactttaaagattcaattatgatcaaatatattatgtctgacttctttagggagtctcttctagagtaccattttcatcacgattattatttttaaattatcaatactttattacattaaggtatctccatgagtacctctagatttgacatcttctagacaaatcaaatgagcatttattaataatttctatatttttcatttacgcttcgggcatttttggactcattctaactcaactttaaataatattaatttgtagttggcatattttattttgaactatattattcttatgtactttgtgcaaggattatttttcaaaagtcttcatcgatcccagttgtatttctctccgcttaatcgaaagaatttctaaaaattgtgaaatctaataatatcaataaacgtgtatggatttcaatatatcacaataaatcaatatttgtttaaacacatatatactatatgacattgaaattcaggtttaataaatataattatgaacttctttcatttctaagaatgagtcgtacgtgtataattagaaatacataaatttataaatcttgtaaagagtaaataccattattttgtt

SEQ ID NO: 361573 - DNA, 660 bp, Cannabis indica
ataaataataaaaattaataattaataattagtacaaaaataataattaattaaacaatacaaattaatacaataattaataattaataataaaacattaattaataattaataaaaataaaaaaaacaataattattaaaacaaaaaaaataaatacaataattaattagtaataaaaaaataacaataattaattattaataataaaacaataattaattaaacaatacttaataattcaatacaaataaaataatacataaaacaaattactaaatcattaatatttaaaaaacgaaaaaaaaaattcaactcgggtctgatgggtgcgattggcccgatagggtacccatcagacccatcggtccacaatctaagcatcggcccatacacccaaacccagccatcggcccatacaccctaaacccagccatcggaccctatcatctaaccatcggacctgagccaaagggacccatcggaccatcggaccaagctggaaccatcggaccctggttcttccccagatctgaatggccacacagtcccattttcaccattttcacagtccgaatctcattttcacggatccgaatcccattttcacaacaaaattcttaaatctaaacaataatatttcacaaacaatcccaaacaaa

SEQ ID NO: 361574 - DNA, 493 bp, Cannabis indica
atttatttcgtacaacaattttttttttccttaaaatacattattatatttacttttattacaaaatctagtctagttattgtatttccataggtgcataagtgagtgtgttgaaataaaaaactagccaacacttgctcgttagattggcgagaaaaaaataaaagttaagtagattaaataagagagacacacataatttatagtagttcactatccgtgtcgcgatggtaatggagctacgtgtacttcgagtttttattactcacgagaatacaagaaaattgattaggcaagagctctatatttctagagagagaaactagagagaaatgctttgaccatatgagaattttttagaatgtaaaaaatgagctagtgaaactatcattttatagggaaggaggtccattaaaataataataaaattttacaaaaaatatgaaaaaatattttttggttgatcttgaccattgatgacgatctaatggtg

SEQ ID NO: 361575 - DNA, 527 bp, Cannabis indica
gatgaacatttcctcataagtaactaaccacaatgaatgatttcaactacatctctcacaaatgaacaatatgacctctatttatagagtattcactcccatatgaacatgaataaccaccataaagccattggatgttaccaatcataattgggtgtatggtattaattggatgatttggaggagttttaggctcttagaaagactcccaaactttcaaaaatatatgcacttgtatactgaaaaaagtaattagttactagttaccatttttttttagctttagccaattcttctctaaagtgttccaaatcacttccacttgattttgagccatttatacaccttataaatgaataaatcaagtctccaacatctatattttcaatagctatcattcattcacattcataaataattagtaacatttttttttactaatttaagagttaaaaggaattgagaattacatattcaaatgatcatcaaaattaaagaatttgtaactcctattttgtgatcattct

SEQ ID NO: 361576 - DNA, 358 bp, Cannabis indica
ttcgaggcacatcattagcattaaatgtccatcttttccaattttccttgttctcatccgtcagatctttattttttcaagttgatgttgatcatttttaaagtataaaacttaagggaaaatacttatttgccatttctgcctttcgaaccttcaagcttttctacgaaaaatcatcttcatttttcatcaccttgcatgccctcattgtccttgacttattttctgcgtattttatcggatttcatctttaatcttagaaactctcagagcccatcatcgcattcatcacgattccaattgcgaagttattcactacccaaaaatcttcaaaaatatagtaagtagtttatgttgg

SEQ ID NO: 361577 - DNA, 769 bp, Cannabis indica
cccaggctgcccaagctgctcagaaccagaattgggaaaacaggtttacagaatgcaactagaatcaatgaacaagaagaagtgattcgacagttaaaacagcagggtgctcctgcagtgcctgttccaaaaatacctgtggcacctgcccctgctgtgtaggccgaaccggttgttgtaaagaaccggatggaacccctgtatgaaaggttccgtaagcaggcacctctagtcttcctgggaggtctagatgttatgaaagccgagcaatggctagctgtgatcaccaggatattaaatttcatgggtgtcactggaaatgatagagtggtttgtcccacttttcaatttcaagaaggtgctttagtttggtgagacatggtgtccatgatacatgacaatactacaatgacctgggagaaattctaggagctgtttaatgctaagtactataatgaggcagtcagaagtgcaaagagaaaagaattcacccatttgactcatatagaaaatatgagtgtatacgactcagtttgatcgattggcgaggttggcctcaggaattgtgccaaccaatttcagtaaaaaggagaagtacctagatgggttgaatgcaaaaatcctacacgatttaatgattactactgacgacaaaaccacctatgctgaaatggtggataaggcactgcgagctaagggcgcagtaggatgtatgatagagtttgttgggactccagctgttggcggggctcctacccctcctgcatca

SEQ ID NO: 361578 - DNA, 617 bp, Cannabis indica
tgatcaaacaagccttctgtgagaaagatagcttctgcagttgccaataattccatccaggcctcattagccaaaattctatcaatcttggaataaattctatcagctacattctgtttattactccccgtaaaaaacttcccgagtatttaatgtctttaaggtgacagctagaaacacaatctgcaaaagcattcaaattaccataccttactctgtcacctattctttcttccttatgaaggatgtcattaaagtcccctaatactatccatggatcagtactagaaagaccttgtaaaccctgccacaattgttgccttccttgttcatcattaaatccgtatacgaaggttgcataaaattgatatttaccatcaaaagttgtaacccgaatgtggataagttgactcgagcaagtcaggatacacactatgaactgattgggattccaagctaagataatccttcctcccttatgccaagccaaattagtagtaaaacaccaacccgaaaacatgttcatatataaggctccaagctttggagccttaactctcgtctcaaggagaccaaccaaaccaactttttgaatagcaataaaatgcttgaccata

SEQ ID NO: 361579 - DNA, 573 bp, Cannabis indica
tatgatattatattgatctagagcagttggataggtttggaatggtttcggctcgattttgaggatgaaaacttagaacttcctgcctaccaaaaccgatcgaccagttggttctggtattgtagaaccggttgatcggtcggcctgtaggggaaaattctagggttttctccttgaatctaatattcactcggggtgttttcaagacctggtttagggcatttggaagttataaaacctattttggagctagtgaaagttaagatttgtctagttacgggagttagtgttattcccggagtttttgatttaaggtatttattgaattttattgtcgtgacataggacctcggatcgtcaagttttatttccactcaggtcggtccgcacgcctgacatttaattgaggtaagaaaagctttatgcacttctatccctagcggcctggaactgtttctcaaaatccctagacagatgctcctaggaagttattgagtggtgagtaaacttgttaaactagctgcttgttactccaacaagcgaggtggggaacaagatacagcgtaaattgtt

SEQ ID NO: 361580 - DNA, 587 bp, Cannabis indica
tttttttctaatattattataatataatttttgaatttttggtgatttttaatttatttttcgactgagtttgataattattattaaagatataatagtcatacatttaaaaaaattattaaaaatgatttttgaatttttctttcaaattttaaattaaaataaattaattgagaatttgctcaatcgttagagcatattaactttctttatttaatgtttcttggttattatgtactctccatcatcacctttttgtagggttgtaaaatgggttttgacatagcacacaaatacgaataggtacgatacaaattttacaggttagggttgagaaaattaaatgcgggtagaaaatggttcaacacgacttgacacgaaataaaaataggtcaaacactacatgatacctgcttaaacacaaatttgacacatttgatacgatttttaaataaaataaaataaaaaattattaataataatataattatgtaagaatacatatttagtgatttattgttaagttaaaaaatttaaaatttaattttcttcaccatgaaatagaaatattttaaattttttaattt

SEQ ID NO: 361581 - DNA, 582 bp, Cannabis indica
gcaagaaagaaagcataccaaaagcaaccccgagctggtacaaacacctcagccaagtaacaatgaagacaagccaacctagaaactacatgtagatgggtcggctacggatcaaatatctagtgcaggaattttccttgtcacgcctggggggcaacacctacacgctgtagtcaagttcagatgcaaagcatctaacaacgaagccgagtacgaagctctaattgttgggctaagactagcccaggagatgaaggccaaacacattgaaatctgcagtgatccacaactggtggtaaatcatgtatccgaagaatacgaggctcagggagaaaagatgattgcatatttgagaaaaataaatgattttctcgcacaattcaaaagctacggtcttagacaaattccaagagaagaaaatacaactgcagacgcattagctcgattgggaagcaacaatgtaagtgacaaggcaaacttgattcctatccagttcctcgaagagcctaccatcactggcacggaagaaatcgaaatgattgatacatccccaaaactggatgacaccaatagcgacctacc

SEQ ID NO: 361582 - DNA, 607 bp, Cannabis indica
gttttttgaatcccgaaggaaaaggggtactcatgatatctggatgatacggcttgagctctttgtctgagtcgtatctagattgtctccctagttctcccacttgatatctcctaaacttgtcctccaactcgtttattcgcaattggatgggatcctcttgctttggaccgaactgttggagaaggtcaggtttctttcaattaaagtgctctcgcagatctggttgggagtaaccgctgacagacctcgtcttactcatagatcgtgtcctactcatagacttcgtccaacatatagacttcgtcctacacatagacttcgtctttgagtgactcgcggatttgctagttcccatgctttcttgatcattagctcgttgagtactttctcctctttgagttgatcgactgtgggtccttgaccacctcgaggtcacacttgcctcttcacgctctgttctttccccctgattctggtttgtcgcatttcccccattagggtctgtacgagcctttgctctatgggttcgggaagaacgttggtgattcctcacaggtgaccttatttctccaggctgagtcccaagattctcctcattttcatg

SEQ ID NO: 361583 - DNA, 559 bp, Cannabis indica
taccaatattgaataatttatgtctacaaaaaaaaattagtctaataaatgcacaattaattaaatttctctttttttcttataacactaaaggctcgtttacacaacttttggtaaaactaaaagttgttttttgaaaaaattgtgataaaaatgtgtttggtaaacagtcaaaaaataattttttcaagaatttttagagaagctatagctaaaaggtgaagttgctccaacccaaattttagaagaagttgttttaattaaaagactataataaatatttttttgtactaaaactatatttacttatttataacatatttaaaaataaaaaaataaaaaaaactaattataataaaataaataattattaaatctcttatttttttaaaaaaataatttattttattttagtattaacaaacaacatcaacctaaaatttttattatatatttgagtttttaactgttttttacattggataaaatataataaaaaattaaaaatatatataaaaaaaaaaatattatatataataagttccttacatatttgtga

SEQ ID NO: 361584 - DNA, 526 bp, Cannabis indica
ggggtgccttactcatgtcttaagaaagaaagatggcaaactagaaaagcaaactgaggtttgcatgtttgttggaaattctaaggagactagggtggactatttcatagtcagaaggatgataaagtgttcgtttccacaaacgccactttccttgaagatgactaattaagaacttcaagccgcaaggcaaagtagtattggagaaaatgctttcagatataactccttctaatgttccatcctcttctactcaagtagaggataatcccactccctcggttgaacctttacaagttgatacaactgagaaatctaccactattcatgttcagaagatcatggcacctcgtcgtactgggaggatttctacaaaaccatctcgttgtggcttggatggtgaaatcaatatggtcgttggtgacggtattgtgaacaatccattaacctataaacaggcgatggaaagtccagaacagaaacaatggtcagccggcatggattcagaaatggattccatgaaaaa

SEQ ID NO: 361585 - DNA, 524 bp, Cannabis indica
tccaagtccaagtcctagttccagtcccggtcgacttttggttttggttcaaattttgggtcacaaggtacgggttcatgtccccttttgcggttgggactgggtgtaggtgtgggtgtgggttcgggcccttgtcacggttcaggtcaagggctgggtctaaaatctagacaccgactactagttttgtccaagccttgggtctagatccagatcccaatctcgggtcccagtctagttccatttctagagccgggtcatgagctcggtcttaggttcaggttcaggtcttggtcgggtactaggtccgagtcctagttctgtttcccaggttctatcctgattctgggtccaggttttgcttattgtgttggttttggtcccggtctatgttggggttcgagtcttagtctcagttcgggtttaggtctctgtctgggttttgatttgggttcgggtttgggtttaggtcctggtccttgtcctgtccttgttcggttctagttccatttgcgattttgagt

SEQ ID NO: 361586 - DNA, 775 bp, Cannabis indica
ttccaagtatttgtttcactgatcctaagtccttcatagcaaaagacttgctcactcttcctttagcttctgaatctttctgccagcatggccaacaatcaacatatcatcaatatacaacagaagaataatgaattatcatcagaaaacttctttgtaaacacacaatgatcagaagtagttttggtatatccatggctcgacatgaaggaatcaaacatcttgtacaactatctaggtgcatgtttgagtccatataagccttttctaagcttgcacacaagattctctattcccttgattttgaaaccctttggttgatccatgtaaatttcttcttccaagtcaccatgaagaaatgcagttttcacatcaagttattctacctctaaattcaatcgagtagctaaaccaagaacaactctaatagaggaaattttcacaacaagataaaatattttttcaaagtcaatacccttcttttgaccgaaccctttcacaaccaatcgtgccttgtaccattgtgagccattattttcagtcttatgcctgtaaacccatttgttcttgagatctttcttccctttaggcacccttaccaagtcatatgtgtgattctcatgtaaggatcccatctcttcttgcatggctttatccactccttcttatgctcaagtagaattgcttcttgataagtttttgactctccaccattagtgagcattacatactcatgaggattgtatcatgaagttagtttacgctctcttgtgga

SEQ ID NO: 361587 - DNA, 250 bp, Cannabis indica
agcattaaaagtcaagtttggatctagaaagtctttgtggctcttacttatgcttttcggcccaaccagtctatctctagggttagtgatcttaaattagataatggagattggaatagaagccttattgtgtcgttgttttcaacagatgagactttacaaatcttggctatccctcaatctaaccaacgacaagaccgacttatttgacattataatttgtgaggtggttattgttggaaattatttt

SEQ ID NO: 361588 - DNA, 555 bp, Cannabis indica
gataggaaacaacatatatatagctagttaaaacaatgtagaaaaacaatatttagtattttaagaaaaaataaaaataaagaaattaaagaaaacttcaaatctaataaatatatagttaaaattaaacacggtagtatttttgtaaagtttttttattctttttagggttgtaggaaatttaactatgatacatagaaattaatctctgtaattctagattcaagatcacacttaaataaacaaatcaataacaaaaaccagcaaacacattaaaccagaaaaatataacatagatgaatttaaatggctgtcagacacaatagcacaaagatttatactggttccgatcctaagttcaatgtgaacttggtcatactccagtttgaaagtattgccactgtaagaaccattattttttgtagtgacaaattatgtccagttgcattccagttgcgtctgggactcgtagtgttttgtctggggttcaactgttagtgttagtgttagtccacgtcagcaaagatattttaagttttaattgttcagatggta

SEQ ID NO: 361589 - DNA, 437 bp, Cannabis indica
taattactaaaaaaaaaaaaattaaaatgaggacatttactaacatagccttatgatttatggtcatttgctattttttttttaaatgaggacatacactaacatactccaatgatttggggctatttactataatttccctataattattgagactaggtgataggtattataagttaatgacaaactcaaatttgatctgatcgatcattaattcttttgaaatttaaaatttaaattcaactcatttatgaaaggatatttacattacatactgaattgatcaacttttttattcttttactgtggggcggaattttttttcaagagtactgtattttttttcaaaagtactgtgtactgtgttaagtttttacttactattttacggttgttttttagttgttccacttgttatttttagttgttttgttttg

SEQ ID NO: 361590 - DNA, 725 bp, Cannabis indica
gactcactaggctcccatgttttaaaagcaccaaaagacttgtcaggctcattcatttgcatacaaaactgaagcgaagatggtttgaaaggcttacagccagtcgaaagtgatttcatattactcaaagtcaaattctttggagccccaaaagagtcagaagaagacccatttacaataccaactacattttccttatcatcgctttcttcttcctgcttcttcttcttcttagtattattattgtcgtttgagattgatggggtttgctgaatattgtcgtttatgggagctaaagggaaagaccgtcctccttcgctactgctacgattatgacgaagctcgttgagtaaaagagggttgtcgtaaagggagttgtatgatgtttgtctaggaaatgaagattttttacacccagaaatcatggtgggaaaaattgggttgtttggaatgagaaagattggattttgattaatgggttatggtcattatgtaggataattagtctttgggaaagaaaatgatagatttagtaggagaagtatagaagtacatgtacatgagtttttggtggtgtaactaatatatatggtaatgtttgaatttgaaaaatgaagaacaaaaaaaaaaacacgggaaagtgtgtgtgattaggttaggtggaaaatatgggagtaacggtaaactattggaagcttttttttttttttttttaagtttattgg

SEQ ID NO: 361591 - DNA, 601 bp, Cannabis indica
atcaaacgaataactattagcaaattatttaggcaactataatacaactgtaatgcaactattgtgaatacattaaaaatcagaacagtgtttccacatacgtaactctatctacatgtctcttaatgatttattatgaataaattcaccatcagaaaaaaagaaaacaagaaaaatacaccaggataaatattttactatagtattaatgtaattttttttagattatacttgagttggattgtttgggaactccagttcaactttttgagatctgcctttcatggatctaaaaattgaagtcaggatattattttatgtaaattaaactggatttccagttgaatttcagttttgtagtagttttttttacacttttttatgaattcgaagcagcccctgttttgattgattctggtcattttctcaggtgaagtcgccggaattaatggtggttctctttctgattgaattttcgtttctgttgcgttgggttgcggcgtagttgcacgatagttgcccaagaagcatggatcctgggttgaaggtgtgtgtgagtggtatttgtgtaatttttttatttgggttgtatgtttgttta

SEQ ID NO: 361592 - DNA, 668 bp, Cannabis indica
ttttttttttttgaaaaaagattgttaattgtctaatcaatttaattaactatggatttagagatggaaatttatacagcgggaatgggtagtcgcggagacccggccctaatgaggtggggatttccgtcttggtggttaatgggacggtggtaggggataatttcaatacccaaagagaggatggggcagagacaggaataatactatccgcaccatatccgaccctgatatagatatataaagtttccttttcattcttaatgtatactagaagaaagctacgtgcaaagcacgtagacttagttttatgttaagtgctttataatttaattgaaaatgatttaataaaaatcatataatttaatttattattatagtcatattcaattttttaaatagagtgatttattcaagagaaagttatttttatgtaaattcaagtaatttaaatgatgttattgtaacctaaaattagatattgattgtaatatagtagttataatgaattaatatgtttgtgtgacgtttgaagaaattataataatgtaagagaaatttacaaaattattggaatttgggttagattatacaaaaatactgtcatatagaaatcttttcaaaaatactgtgtttttataaaacaacagtggaacacaaaacaaaac

SEQ ID NO: 361593 - DNA, 791 bp, Cannabis indica
tgtacccagaccagaattgtgacgcggacctggacctaatcttggacttgatcccaaacacagacatgacctagatagggatccggataagaaccttgactgggaccaagtcctagactgggatcgaaatgctgaacctagatctggaccgagatcctgcccatacccaagcttggacttgcacgcgggacatgaacttggacttggacacgaacctagaccaacatcggggtctagacctcggcacaaacccaggcacaaactcggacccaaactcaaacacccacacctagaatcagacccaaagctagactcggacccgtacctaaacttgaactcagaccaggatcacaaccaaggacatagaccaagaactgaatctagacttagatcggtattataactttggactcagacccaacctagaccaagacccaggacgggaacccacacgcggagcctgatctggacctagattgaaatcggatcgaaaaccaaactcagaccaggactcgaactccgacctgaactaaaacccaaactcgaactcagaatcgcaaatggaactagaatcgaactaggactaggaccaggataaggacctaaacccaaacccgatcccagatcaaaaccgtaacagagacctaaactcgaaccgagactagcactcgaacccaaacctagacagcgacccaaacccacacaataaccgggagttggacccagaatcaggatatggacctaggaaacagaattaggaccgagacctagtacccgacccagacccgaac

SEQ ID NO: 361594 - DNA, 880 bp, Cannabis indica
tacagaacaaagtagtagtttaacgtgcacaactttgtttctacaatgacaaaacgactaaaatgaacaacaacaaaaactaaaactaaaaaacaaactaaactataacataataaataaattaaagttacatcatattatgacaaacaaaataaattaataagaacaaaacctaaaaaatactataaccaaaataacttaatagacaacgaaataaacaacataataactaatacctatttaatattaaatattaagttggcatacaacacttacgtactaaatttaaaaaataaaataaataaaaataacaacaaaataaaaaaaacaaagtaaatatacattcatttctcttagttgaaccactaaataacaaaaaaaaaaaaagtagcatgaactccactacaatatgcaaattacataaccatgaaaataactctaagaaagtaaaaaaacaactactaatatataaaataaaataaacatgtatatatatatatatattcattttcacttggttgaataactaaaaaaacaataaataaacaatttactataatatgcaaattaaataggcatgaaaataactccacaaattgcatcaaatcaaagaaaaaaatacacaaataaacgatataatttttttttaaaataactacttaatatttgtacatcaactcaaaaaaatatctacacatttaataaataaatatatactcattttttttcttagtttaaacaacctaataacaacgaataaataacagaataacaattctattttaatatgaaaattaattgagcatcaacttaaaaaaaataaaataaacaacacacaaattaaataaaacatgtacatatatttatttctcttggttaa

SEQ ID NO: 361595 - DNA, 671 bp, Cannabis indica
gggaaatcaaaataatcgagtgcaaccgtcaaccgtggagagagaaattcgaattttcaaaatattaattgtcagagcattaattagccgaaaaccgaagggacgcccaatcagcttcacatcgagtctcgaacggtcatgctcgacacgtgtcccctttcaaaggagccagctcggaataagtctatacgcaacctcggaggtcccgcacagacttggggggcaaatgttatcccaaaattggcactctgacgtggcatcacaagaatggtgacacgtggcatctacttagagcacctggtcggatcaacatgccgagcaggatgcctcgctggcatgtccataatggaatactcaacgagccgtgcagaatgagcaacacttagcgaattcagccaagcacttcgtgagtcaccagctcaatccctataactcagggatcaacttgcgtggatgtggcatacacacgatcccactatcggtgtattcggcctcaatcccacgatccaagcattcagcaatgatcacacgatctttctttttatgcgcattataacgagagtggaaactcttcctcctcaagtttcctgccctataaatagtgaggaatgttcactgggcaagggaccggatggaaaaactgtaaacagagattatacgccgaaacgcta

SEQ ID NO: 361596 - DNA, 747 bp, Cannabis indica
atacctatccaaatcccaacaatccaccgccttaaagatttcgataactttcccaaaatgttcaaattgcgaaaacagaacataaaacaaaaaatattaaaaatgatgtgaaagaaaaataaaataaaataatatacatatttataaagtaatgtgtataacataattaagatattttctaccgacattcccaactaacataacatgcattttctaagtctaattatatatttagctaaattatgtcgtgatattattattacgagatacataagacaaaattacatattataaaaaaaattagacaataaaattataatatctctaaaaaaaaaaaaacagcacactcagcttattagaaaacacatttccataaataataaaaaaaaacattatatttccaccgtaataatttatgcactctatacattataaaaaatcattaactcttaatatttttttcttaatttttcttcttcatttgcttgtggtgattttaataatttgtttatattgtttcatttttctttaaataatgtaattttatttatgatttaagttatataaatatatatatcattttttaatattaaaatgtattttattttgtatgtgtattttaaattaaaatataataagaaagaaaaaaagtaatgaaaagtgagcataaattaaatatatataatttatacaaattaaaaaatagtaaaataagtatatttacacaatttttcagtgcaaaactgc

SEQ ID NO: 361597 - DNA, 758 bp, Cannabis indica
agccaaccaatccgcccttgaccgcaatttccaatagcactcctcccgagacaaaagatcattaagagtagtctcaagcctttttacctcatccattcgaaccaacggagcggctacactaaggagatcatccaactgtttctgagtttccctcaccctcctcggaatcgaaccaaatttatccttattccactcccccaacctctcggcacatctcccaaaaatatccataatactgtcttgactatccagaggaacatcaggctccaaccacgtctgattaacaatgtcatgacactcatcatctttcaaccaatgagtttcaaacctgaaacacctctttttatcattcttctgaactcgaaccacattttccaaagtagccaccaccggtctatgatcagaatgtaggaaatccccattaataattcgaaccgatggaaataagttatgccaatcctagttacaacaaaaccgatcaagcggttcctgcacatgcgcaacaccttgccttttattaagccatgtaaaacattgcccctcgaaccccatatcaaccaatgaacagctatctagagtctgttggaaatcattcatagcagaaaaactacgaatgatttccaacagactctagatagttgttcattggttacttaaatgtacacatattacgttttaattagtctacctaattttcattatataaataaaattaaaataagttaatatttttaaaaaaatagttaaaaagtaaaaaa

SEQ ID NO: 361598 - DNA, 591 bp, Cannabis indica
ttaaaccctaaatataaattctctaatacgatgaaattaaaccaataaaaattcagaaaatacttacattgatgcagcagaataatatgactcattccgctcagatctctaacccttgttcctttctatcatagagtaataacaagatttgagcctagatctccttctctccttcgggttagttaccaccgttttctgcactatgattgagtacttgacttgctatgtgtgggcatagtactctatcactatgggagaattggtgaagaataataaatgagggttcaaaatcactgtagaatgtgtctctcatctactagtagtcagtgaatgaaaactaggttttggttggttgaattgaattgttggatgagatgagagcatcatgttccttttatagtatttcaactatttaggatttaattatatggattaagaagaataaaataatgggaaaaaaatccatcactagtggacggccatacatgagcctcactagttacaattctgccattttatttcaatcacttattcttcttttaataataccatattttctaatttcaatcttattaatgtcaaaactattta

SEQ ID NO: 361599 - DNA, 660 bp, Cannabis indica
caaccacttgactacttcttttctcacaacttccttcataggtggattgagtctacgttgtgcgtcgattgttggtttggcattctcttccatcaggattcggtgcatcacagttgaaggactgattcctttgacatcacccagtgtccaagcaatggccttgttgtgagctcagagtaccctcagcaatctatcagtttccacatcagaaagagaagctgacacaataactggcagctttttgtcttcacccaaaaactcataccgcaagtgactaggaagcaccttcaactcaagctctggaggtttttcagtagatggcatcagctcttttggaactactcccaactcctcataataccttctgttcaatggcccataggaatcaagccatttcacataacccattacatcttgtccctcttgctccgtcaattcatcttcagttaggctcagttcgagaggatcatctagcagctttttctcactcacaattgtatcaatcaaatcaatgaagagacagttatcacttgcctttgggtatgtcattgcctttaacacattaaagaccacttcttctccttggactctcagctttaattcacccttctggacatcgatcaaggcttggccagttgccaagaatggtctcccaagaat

SEQ ID NO: 361600 - DNA, 706 bp, Cannabis indica
ctactgaaaacacaattcaacactagcaacaagaacatcaaccaaacttgcaagaacatgcatgattctctaactttaaaaatcaagaactaaaagagagttgctagaaaccttacctaaagctcaagaacactaaatccttgctgtaaactgcttgaattgttgaaaaacaatccaaaccctagctgcctctaggtggattcgaaagagagagagagagagagacttgagagaaaaagtgtaactttgacaaattcttattttcttaaaataaaatggagtaatgacttagttttaccaaaataattcagccaataatcataaaaaaaaattagcttaacttatcccacaaaagagaaaatacaacttgatacaaaagaccattttgcccctttaaacactaaaaattactaaaagtcactaagggtattttgggaaaactctaaattcccgaccagtcccgacattcccaaagtctagcaataccgccccgttatactaaaatactaagatgtgattctactgagccatacaccgcgttccaatgttgtcgagcaccgaaaatgcaaaattatgaaatttctatatatgacatataaaatgcattttgaattcaaaataaatcatcataaataattttcataattagaccctaattatctgctaattttcaaatttaaactaagcggtctttacaattatctcc

SEQ ID NO: 361601 - DNA, 505 bp, Cannabis indica
aaaacagggttcggagaaaacccgagaattttcccctgtaggcaaccggtcgaccggttctagcacaccaaagaaaccggtcaatcggcttctggcagaccaaaaaaattctgggttttcttccccagctcgaaccaaaaccatcacagacctaaatagcatttccagaacagtataacataccaaatacaacatattcaacacatcaattaaccacaattcgtcaattagctcaaaatcactttctctaatgaaaattaatctcaatttattacttttaacacaaatccaaccaaacagcccctatctccaatcaaattaaacttaaacaagcttcaattcaaccctaagaaccaaccttaacttcaatttataccccagcccaaaattcgttaaaaccttcaccaaaacctaaactaaactcaagaacaatcaaaggaaaagtagaaagtgttggaatttattttaccaggatcttagatctactcacaagtatgttgtttaa

SEQ ID NO: 361602 - DNA, 512 bp, Cannabis indica
cttggtaacaacattaatgacttggaagaaaaaataaaatgttgtgaagctgaactgtctttaaaagaatctaaaattatttctttaactaaggaacttgaaaacattaaaaagaatgtcaacatgctaaatctgggttctaacatttttgaaaaaattcaaaaatctagccaaaaaaatcatgtaggtctgggttatgtttctaatcaatatgatttcaacacaacttttgttaaatttgatatgcttgtttcaggaagaactatttctaccccgcaggattctatcactacagcaaaacaccttgctgttacagaaaaaaagcagcacggtaagtttgacaattccaaagggaatggaagaaatttcattcctattttccatttttgtgggataaaaggtcacattcaacctaagtgcataactatgcaaaacatttttaaatataattaacttggaaataaacatggtttacaaaaacaaaaataggttgtcaaaaataaatgcttggt

SEQ ID NO: 361603 - DNA, 450 bp, Cannabis indica
ttgtccttttggtacctatgcctttcggcgtatgccatttggcctgtgtaatgccccagccaccttccagcgctgcatgatgagtatctttagtgatatgatcgagaattgtatggaagtatatatggatgatttgacagtctttggtgattcatttgaatcaagccttctcaatttggaagctgtgcttaaacgatgcaaagagaaaggcttggtactcaactgggagaagtgtcatttcatggtgccatctggcatagtcttggggcatattgtttcacaacgaggaattgaggttgatcaatccaagattgaactcatatcaaagctgcccgcccccaagactgttaaggatgttcgatcctttcttgggcatgctggattctataggaggttcatccagaatttttcgacgatagctcgacctttgtcaaacctcctggcaaaaga

SEQ ID NO: 361604 - DNA, 750 bp, Cannabis indica
actgaagatattcattgatcccttagtcaatgaatcagccctttttcttcttttttggaccttaagttctaagagctgcctagaaaagtgatcaaaaccatttatgccttgcaactttgactaaatgaacaattttattttttcagataatggtgtatgaaaatccataatgttattgtactgtctaattaattagttttttattttaagcaacttgatttgagactgaaaaattattttacctgaaaacccatatccttaggccagctgcaattaagtacttgtatgtgggcaaaactgaattttcagaatctttccaattcttgatcagaacatcactgttaaatatcaaaatttcatcagaaaatttaataaaataatttataaaatcaatcaattactccaacccaactcaaataaatcaaaaacttcattgtatattagctttctgacactcaatatttttaacttaatttttctttaaaataaacaatagaattacttttaaattttattttaaaataaacaatagatttacttatttattttacaataataaataacatatattaaaaagacaattagtattttagtcttccgaattttgacatgtactaaattatgcattctgaactttgtagaccgttaaaaatccctcctaaattattgaaattgttgaatttaaggacttttgtctaattttaataagaaaagtctaccatggaggaaagttcagggagcatgatttaa

SEQ ID NO: 361605 - DNA, 509 bp, Cannabis indica
aaaatgatttttgcagaaaaagcttgaaagtttcaaagggcaaaaatggtgaaatgatgattttctcttgagttttatactttaaagatgatcaccgttagattagaaaagtaaagatctaatggctaagaacaagagagaattggaaaagataggtaattaatgctaatgatgtgcctcgaaaccatgaactaccataactcaaaagcatacaagttttcaaaattgggttaagacaaaaatactcttgtaatcatttaaaaagttttttttatttaatgcaatgttatacctgaaattcggctacacttcagaggatgacacgtgttagttagtggaatatgaaccacttggtataataaagttatatcatttaatgcaaagaggaataactcattaaatatagaattaatagaatatattcataactcgttactgtatagtcttaagcgagacaaggatataaaactattaatacatgttgttaattccatttttggcatatttaa

SEQ ID NO: 361606 - DNA, 600 bp, Cannabis indica
atactaaaactcaaacattaaaaacacacacaataaaattcgaacccagaacttaacacacacatcagaataaaaattaaaccataaatgaggatttatgttacggtttttgaatttcagtatttattagcaacaaatttaatattataagtattaatgtcataaaatttttaataataaatttaaaattttaatataattttattaagtaattattattaattagtatacgcaatttattttttatatataatttaaaatattttatatatctgcggcgaagcgcggatgtttactagttatgttataaagctgagatatgaccataataacacccttaagtgtaatgttgaccacaagtgagatacactgataagaacggttttgaaatcatataataagttttctataaatttatcaatttttataacaattcgtggggtcaagtcaaacatcatcttatacacgtcatgtctggtttctattataataacgagattttgtaaatgaattatttcacaaatacacaaaaacaataaaaaaattacaaaaatacggtttcactgaattttaaatatttttacgattttttttatttta

SEQ ID NO: 361607 - DNA, 842 bp, Cannabis indica
tgatactattttttgtggaactctgtagcgacatagaatgtttttcacgacgaagtcgagcaccttttttgaagttatggtggccaaaggttctacctcaacccattttgtgaagtagtctaccgcgactactgcacatttaactctaccctttccttgtggtagagatccaatcaaatatatcccccacacagcaaagggccacggggaggtcatagaagtgagttccactgaaggggctcgtggtattgttgagaagcgttgtcacttgtcacaccttcttacatactggagagagtcttgactaatagtaggccagtagtatccttgccttattatctttttagctaagctatcccctccggcatggtccccacaaaatccttcatggacctccttcaatatgccttgtgcttcttcaactgtcacacacctcaataatggcatggagtatccccttctgtacaattttccatccaacagagtaaaccttggtaccttatatagcaacttccttgcctcactcttatcagaagggagactcccagtagttaagtaatcaatgagtggagtcatccatgttatttgagtatcgaccagctccatgtcagcctcttcattttcctccacattgatactcggtttagggaggaactctactgggacaacgttgagtgtatcagcttccttagtggtggccaaccttgctaaggcatcagcattcgagttttgttcacgaggtacttgttctatagagtaatactcaaattgttggaattgtttttgtacttgcgaaaggtagccgccatttttaatcctcttgcctgatactcacccaatac

SEQ ID NO: 361608 - DNA, 1272 bp, Cannabis indica
atttgattgaaaacaagctgagaatcactgtagatctctagttattcggctttgatggtaaatcccaatcaaagtcctactaggagtgcctcatactcaacttggttatttgttgtggtaaatttgaactgcagtacacaatgagtgtgaaatcctttgggagttacaaggatgagacctactccaaagccatgctcatgggaggacacatctacatagagcttccaatcctaagctacaatcccaggcgtgtggttctggtcttcacaaaccatgaggtcatcttctttgaggcctctgcatttagtgattaaatcaactaatgctcagcctttgattaatgttcgaggttgatagataattttaaactgaccaagctctactactcatttaagtagatgtcctgatgcttttggcttcatcaagacttgcctgagtggttggttagccaacactttgattggatgggcttgaaagtacaaccttaactttctcgaggccaatactagacaataagctagtttctaaatggagggatacctaaactcggccctaatgaggcacttactgatgtagtacgtgttggaaatattttactaggatttagatttactaacaagtatgttgaattaacatcctaaatatgaattctctaacaaaatgaaaataaatacataaggatttaagaaaaccttacattgattgcagtggaatatattgacttcttccgttcaagaactctagcccttgattcctttttgtcgtagagcattatcaagatctgaatctggatctctttctctccttcgggtttggttaccatcgtcttactcactatgattgagtacttgacttgctaattgtgggcacgtcactctttcactataggtttcgaatatggaagaacaatgaaggaggctgaaatcactaaggaaggaactctctcatctaggttggttgaatagtcaagtttggcattagtttgacaaagtttcaagagaatgagatgagagcatcatgttccttttataatgtttcaattagggcttagggctgaattatatagattaaaaaagaataaaatattaggcaaaataaacttcatgggcgtacacttaagtggaccaatttctagttagatttttaccaatttatttcaaccacttattcttcttttcaataataccatattttccaattcaatcctatagatgccaaaactatttatttaataactatgattaattattaaataaaattatcatttatgta

SEQ ID NO: 361609 - DNA, 604 bp, Cannabis indica
aaagggaatatggatcgatgcaaatttctttatatggaataactcattaattacatgagtatcagagtatatttgtaacctgtagactgtgagatcttaggcgaggaatcaatatacaaactggtgcttagtatattagtgagaaaccatatgttgctgaatgcaaatagctaggcatcaaggagtacacataggaagacaaaagcgagatatataaattgcgaaagcccttagtgtacaaactaagtgtaacagtcgaagctcgagaccaagtaagcgaggtgccagtctcgctatggaaaggatccctgtaacttcatccaattaacgttagtgagactcacaatcctggaaagtcaagaagttaacattcagatgagcttagaagaactctttgtaaataagaactgcgatcgacacaagacatgcatcatcgacctcggaaggaaaaaaggcccaagctcgctatgagatcactggatacaagcttctgtcgaggcatctccagatacaataattaaagacatgttgaaaacacaatcattttgacccggtaaaagcagaaaaatcacagctgtatgattttcaaatcataaccgcattt

SEQ ID NO: 361610 - DNA, 1063 bp, Cannabis indica
taaaaattaaggaaaaaaaaattaaaaagaaaagtacttatttatttttttatcttaccaataatatctcaatatactctccatttgtgtacaaatcaaatcaatacacacgtactcatcttagatagaaattaaaataaaacaatcattactaaaatatatatatatatatatttgaatttacactaaaatatatgtatccattaactaaaataaataagctagtatatatatttatttatattttgaagtttgtatttttttttaaatattattactaaaaaattaatatttattatatattataattttttaaaaatatatataattaagtgcggattggattggatcagttacttttgaggtcaaacaacatccaatccgcacaagtgggaattttagatttttcaatccaatccaatccgcctaagtacggatattcgcattttgcatatttgattagattggatcgtgcggatttgattggatcgaatagtttgtgaacaaccctaacctttaactttttttttcttcagatttactattttggttgcttcgggtacgttacctggtggtttctaatttctatgtaggttgctatacggattttggttgcaatttaagttactccattaatcgtaaaagaatttctgtgtgaaattccataaaataacaaaaataaaaataaaattattttaaagtagtaaaaataaaaaaaaatcctaattttatttttattttttacaaaatgtgaacaaaatcctttcatatatattaagttaatattaagtgcaatatatatttaattatatttttagtttttattttaattatatatattttagttgtataattaattttttatgttatttaataaacagtattattttttattaaaacatttttcattttaaatgttatttataaatatatagaaaataatatttaaaagttgttgttaattataattttaatttaatcgcgacacttttaattttataatagtttaaattttttagaaatattatacattttttttaaaaaaaaaattataataacaaaa

SEQ ID NO: 361611 - DNA, 993 bp, Cannabis indica
tactaggatcaggaagttttgttaagtccattgaatagacttatatttcaaaatttcctttcttgtccttgtaatagaaaacctttggtaactccacatgaatggttttagccatagttctcttggctttgcttcttagttccttattctgactatccattacttgtttgaactaacaattgatttcatcacaagtgtcttccaagtcataatagggtgagctccttgaaaccctcccactataataaggtaccgtgactatttgtctaagaacactaaatggtattctcctcatcggttgtgtaaagataacagaggcagtgggatcatcttatgaaaaataagatgatagaacactattggaatcaagaaaaatatctcccctactttgctacattattttcaaatttagtcattttcttagaaaagatgtatttgttggaacaaacactttctaatcttaatgatcataggatggtccagccctaatcacttagaatagctatcaaacatgcaaaccttagttaatagttctagcttgtcttaaggtcacgatcaggacatccatgaatctagtaatggtttacactaagtacacaaccattccatcattctgaagttttcctatcactacggtattttcctagaagacttaggcagctgctagtaactaatcataaacctttcattatcatcaatatgcaaattgaatttttagggagataagtttggatacaattcaaaattaaacttaatgatctttgaactgcatatcttcaaattatttctccacccctattagttcgcaagatctttaaccacttaccttaatgggtttctgtgacagtcagtactcccgtgatccgtaaggggaaataccaggtaagctgtgcaatcccacaccacctggagaaggtcaagtgtgatgattctgagactgtgaaggtatgggattgtacagttgaagagagcttaaatggattgattggtact

SEQ ID NO: 361612 - DNA, 643 bp, Cannabis indica
attactataatttatgatactgaaaagagatataattaattcccttaataactttagcattttaaatgaaaaattaacagagctagaaaaagagagttattgagcgagagagacgaagggagcagtgttggagttggagaaaatatatatgtatacataaactatttttatacgtaaactattttttaatttattaatattaatataataataatataacttatatatatatacataaacttaacttaaatagtatacatatataaatttatttatattttttataaattcggtcggtttcagttttttcggtcggtttgctaccgaaacaaaactgaccatttaaaggcggttttaaccgttaacgattttttcaatttttcggtttaaacggttttggttttaacggtgttcggtaggtcggtttgaacagtttgaacggttttctgatttttttgctcaaccctaggcctcacttggaattttgcagttttcacaatttttatttatagtttcttaaaaacgccaattttccaattctaacaatttaaatgccaaaactagttatttaataactaaaatagattattaaataatattgtcatttaacataattaaaattagacatatagagtctcttaat

SEQ ID NO: 361613 - DNA, 774 bp, Cannabis indica
caatccgcacaagtgcggatatccgcactttgcggattggattggattggatcgtgcggattagattggatcgactattttatgaacacccctacttatacttgttaatcgctataggtgtaattagctaaaacttaaaattaataaattgatttatactaaagggtgtcttggtttggtttggcttggcttgttaacaattacaaaattatatgatcttccctcaaaatccactattaaaaaagatattacaaattataagaatatagtaatggagatgttgcttttagcttcttgtggaatttaattagtacttaaataacttagtaatggagatgttgattttgaataaattaaaatgtgaaatataaactattgcaactaaattaaagatctgtagaattgttaaaaaaaaaacagttctataggagaaagaggtgagataactgttttagatattttgttcggtaaaagttaacgatctgactcattattatattaaatgacaaattagactatgtatcttttaaaatcttacaaattaataccctaaattgatcttttgtcaaaataaaattaataataactcgatctataagtattatgacaagattaattatattttttttacatttgttcttactaaaaaattttactaagttagttatatgataaaatattattgagaatttagttcacgttaatattttgtatcattttaacaaaggctaattaatattttttttccctccgaactttgacatgtatcaaatt

SEQ ID NO: 361614 - DNA, 483 bp, Cannabis indica
agtagatcctggtcacagaatacaaaactcatattccatacataaacatactgtttggatccattgacagaaaatagatattaacaacttatgaaagttatactaaattttcaatgcattctaggaaactgaaagaaaatttctatttggaatctaaaattaaaagtcatatacttaaatttataccaaataattgttgagttattattctagcttggaccaccactaataatctaactctaagtttaagttgcctctagtaagcacatatatatatctagaatattctaagatcgatgatttatatcattttgggatagaatgtcgcgaatatagtcatctacatcattcaatttcataggagaaaataggatgacatcataagcaaatgatttataaactatttatccaatgaaaatgctatcgaagcaaattataaatgaaaaagctaagaggaaaaactaaaagataatttcgattaaa

SEQ ID NO: 361615 - DNA, 574 bp, Cannabis indica
ttagggcacaaaatccaacaattacctgctaaacaagggggtgaaacctctattaatatttgtatcacctttactattatcgttcttatttacaggttacgacctttactatttgccaagttaccaccataacttggatgtaggcatgcagcttgaggttggcttagtctcttctttcttttattttgtcaagggattctgccaacaaggtgttgtttacttcttggtcataggttatcctcctatatgatgacatctccaattcaacatgcaacattgcttcctagccataggctaatgaaaatggtgttttcccagtggtcatcttctcggtggtcctatgtgaccagagtacctctgggagtaattgaggccaattgtattttgcctcttctagacactttttcaaagtgtccttgagggtcttgtttacagcttccacctgcccattcgtttgaggatgagcaacgccgtaagagcttttgatgatattgtgtctgttgcagaagtcagtgaacatgtcactctcaaactatttcctgttgtctaacacaatcttctatggcagtccaaa

SEQ ID NO: 361616 - DNA, 719 bp, Cannabis indica
acttcactttctatgcagcaaaatcagaggattcgtacaaccgtgcaaaggaagagattgaacggctaactctaatgttcaaggaagaatttgagttgaattccaatctggaaggagagacgccacaacctggaagatatcgtaacaaccccaacattattaaagaccccgaagttgtaagaacaaagggtacgagaaatccaagggaaggaccaaacggggagcagatcccaagaaactcaagacattgtcgcatttgtcgctcatcagaccatgattatcgacggtgcccaaatcgtcaacataatactggatctcaggggcaacaacctccaaacaatcaaccaacatctgactcattcaatgaccactccaacgcgtatttctcggaaccgccttcctccacacaagagtcttactatggtcattcttataactagctacttttagccattattgttttaacgtttatgagtctcattattgcttcaaaaattctagatttatatacttctttaacgtttatgactctatttattgcttcaaaaattctacatttatatacttcttggtatgtttgacgagtttaaggtaattttctcatcttcaacaaatttaaaaattattattgacgaacaactaaattattttacgtaaaaaaactcaatcttaaaactaaaaaaaattacaccaacttaaaactcaatgtataacaacaa

SEQ ID NO: 361617 - DNA, 507 bp, Cannabis indica
aataataggtttgttaaaaaaaaaaatgaacaaacaatttgaacaaacaaacacacaatgtaacattgtctggaaagtaggttaagatatttttattttaaaataaatattttaatatcttaacttgaatttaaattaggttgttagaaaatattaaaatctaacaaatcctaaactatcttatattcaaatatccaactaattttcaaatatctagtttatttaaaaaaaaaaaataaattaattaaataactaataagataatataacataatatcttaatttgtaaattgagatattactaatgttatatttcaaatattataattttaataaattaaatttaacaaaataaataatttaacaatagatatttatgttgagatattatcaattttaaaaaataaataaaatcaaatattctaaatttgaaaattttaatggttagaaaatcttaaaatatctattcaaacaaaattaacaacttttcaaaattttcatgtattt

SEQ ID NO: 361618 - DNA, 612 bp, Cannabis indica
tgatgcgatttttttcgaaccctcagaataacaaacccacctccgcattacaatgaccccatgagaacgtcgtacatcatctttccttgtgccaaaacccatccgtttcgcgtacatttcgtagaatacttcccatttttctagtttgtcgagactcttgcctagcacatcgtgtatttcaatctcattcactggttttgtgatgtttagctctgctgtgatggattcccattcataagtgtgttcgtcattcatgttggcttgttattgatttctaagaattgtcgatgaggagtaagggaaagagagtgctgaggggattgaaattagattttatgagtttaaaagcccgagataatagggttgtatggagttggtgatcacatttaaagctgttgggctgatattaatgggcctctacaatattagaatctgaattcaactcctctcgtacgtctgaacagtacaatagtacatattgttttattttcattccaaatgtaattgtaaaataaggttatttcatgagtgtaaagggctgatattactaagtttaaagggttggtggtggcatttaaatagattggccttatgttaatgggccttcaccta

SEQ ID NO: 361619 - DNA, 543 bp, Cannabis indica
aaaatactgaattttgggtaaaatttaaaaattttactgccacatagaattttttacaaaaatattgtctttttataaaaaaaccgtaaaataacaaaagagaacaattaaaacaatagtggaacaactaaaaaacaaacgtggaacaatagtgaaaacttaacatagtacataatataaaacttacacactattttctaaaaaaaatacggtatttttgaaaaaaattctgccccacaataaaaaaaagttggaaatttcagtatgtggtgtaaaaatcccaaagtaaaagcttctttttaaaaaaagttgtaataaaaaggtatttggtaaccagttaaaaaacaacttattgaagaatttataagaaagctacaactaaaaactaaacttggtataacctaacttttagaaaaaactattttgattaaaagactctatcataaattattttgtactaaaaatgtatttaattatttattatatattacgaaaaaataaaaaaaaaatgaaggaaattagttttttttttattttgttttt

SEQ ID NO: 361620 - DNA, 596 bp, Cannabis indica
agagagagagagaaactcaccaagaacattctgtataaaagctctcataaataagaaagactcgtggactacggctcattaatgcctgaaccatgtaaaaatcacctgcattaattattcttaagctctcatcattatctcatttaattggttgccgaaaatctcggtcaatattttggtgctttcattgagagttgttggaagcgtcgttgagaaaacaacagtcaaagaatcagaacaataatggtggaaactcaaaacaacacacgccaacctcgtcccccctaggatccttataacccaaaaggcgaagaggtgacttcacgggtaaatgtgggctctgaggatcgaaatgagacgaacgatgaggaatatgaagaaagcatcgaagggtacgacatttacgacgaagctagctatactaaactgctggtcctaaggcaaaaagcggtcgatcataaagccgaactggccgcccaaaaaagaacagaataagaggatgcaagagataatggtcgccatgcaaaaagctatggaaacggctagaatacatgtacatgttggaaattattttaccaggatattagatctactca

SEQ ID NO: 361621 - DNA, 666 bp, Cannabis indica
caggggccggccctgcatacagtcaaatgctgatgtaagatttaggtgtatatgtatagcttttttaaaatttggtaaaaaagctcttttagtgtcaaatgcattaccagacacaaccaccaaaaggtaaaaattcaatctttcaacttttgagcatgctagttgcaaaaatagaaaaaagaaacaaaagtataatttgaataaattggactcatcaactttgacatgcaatcttaaaaaaaataacataaggtgaattttaaaatcaagagggatgaaaattgtaatgcggtgagatataagaaacgtcttgtagcaaaaggttatactcagaaataaggcattgattataaatagactttctctatagtttcatcgaaagactcttttaggataataatgatactctttgctcactttgatcttgagtttcatcatattaatgtaaaaataatatttgtcaatgatgacattgatgagacaatttatatgaagcaaccagaaaactttatttttggtaacccaacgaatatggttttcaaattaagaaaaatctacctatggactcaagcaaacttctcgtcaatgatatcacaagttttatcaagtaattatctcatttatttttttagatgaatattaactattgtgtatatcataagttca

SEQ ID NO: 361622 - DNA, 595 bp, Cannabis indica
tcattggccttacagaatacatagctgtcatccacaaaaagcatgtgagataccataggagcgccccgtgcaacacgacaaccaatcaaccaatgatgcctctcataatgctttaacaacaaagagagaccctccgcacaaatcaagaacaaataaggagacaatggatctccttgacgcaaccctatgcttggagtaataggccccgttgaatgacctccatgagttacattatacgagaccgtagtcacacagaacataatcaactgaacccaatgttgatcaaaacccattcggatcaacatgttctcaataaaaatccactcaacccggtcgtatgctttactcatgtccagtttaatcgccataaatccctccttccctactctcttccgcttcaaataatgcataatttcaaaagcaaccatgatgttatcagaaattaaccggcccagaagaaaagcactttgatcacttgagatcaccacaggcaagacctctttaaaccggttcgccaacactttgaaattatcttataaagcacattacatagagatataggacgcagatcagtcatagactccggatgtttttt

SEQ ID NO: 361623 - DNA, 840 bp, Cannabis indica
aagggggttaaaaatgggtaatactaatatagacaccattaccacacttttataatagtaagatattaagaatagatcgatcatactatcaaccgtgattatatattcttttatatttatataaatatatattaataaaaaaagaatattagattatttaattatatgtagagtaagaaaataggtaaatatttattaatttcaaacaaataattttttttgcaatggattctaaagaataattaataagataaaaagatgaaaaatcaaagtaaatatttattagattatttaataaatacttgacaaagataaaagataataataaaatgtgatagtgtcaattcaataaagataaatttgttttattaaaaatgtgataataataataataataataataataataagtcttttaaaaaaaaataaataagtaatattctctttattatatcaggacatgtttaaaacaggtaaataaagtataaaaataaaataatgaaacaaaacttaaaaaaaaaaaaaaaaaaaaaaaatacgtggaaccattagaaaagattgtgacctgtagtcttgtggagctccgtaaaatagaagataaaaaaaatgtagaaaaaaaaaatagaagttcgtataaatgtaaaaaagagtgtcaatttagacaatttgtgtaaaaattccataccacaatgaaaggaagttatatttacaccccttagagttctatttgtaccccataaaataataaatacattaaaaaaatatataaacttaaataatttttcaaaattactcttaatattttttttaaaaaaaattctcatattattttatgttaat

SEQ ID NO: 361624 - DNA, 606 bp, Cannabis indica
taaagatgagcaatacactaaaggatgctccggatgatggaaacggggaggaaatggaaggttcacagcttattagacacaaggttcttgttcagccgacttgttgacaggtaagacacttagcaacatacttagcgatgtcatttttcatacccggccaccagaacatggctttgaggtcttgatacatcttcgttgaccttggatgaactgagtaaggagtcgtatgagactcattcataatctctcttttaatatcatcatccataggcacacaaacacgattcaaaaattgtaacactccgtttcatccactgtaaagtcactaatcttcccaaccgaaaccctatctcgggatttcactaactctggatcttgcaattgtgcttccctgatttgctctaaaagagtatattgcagggtgatattagccaattgccctacagccaactcgatattagctcgggtcttttcatttgctaattactgggagatttgtttcacagtatttatctaactctatccctttctaatcaaggaatcggcaaccacgttggccttactagggtgataaaggatctcacaatcataatccttcacaaactc

SEQ ID NO: 361625 - DNA, 985 bp, Cannabis indica
atagctagaactctcaagctagtacaaaactttatttttgagcaataaacatcaagcaaaaaacttaatttcaaacatggaaaacaccctaaaatctcatcttgaactcaacaaacacaaccccactacaaattcaaacaatcaagttcaaattcaacaagattaacataaattcaagtcacatgcatttcaaggaaataccacacaatttcttacttttctacataaaattttcagcgataaattcaactaaaaatcagcaataaaaagtacctcaagttccaaccaagatcaagctttaacaccctccaattttaagcttgaacaccaagtaaatcaccaattttcaacaaaatacaaagagggttagagagagagagggaaggggatggttttgtggagaaagaactagcaaaatcaattctcattttcacaaaattcctttcttttattgaatataattcaaaggtcaaaatgaccactttgccctcagggccataaagcataccaataaacatttaagggcatatatgacatttcacacacaattatactcaaataaatttcagattaatcacacaattcaaatgccaataatttatcctagaattgtattttggccccgaacccagttcggtccgaaatacccgattgtgactatactgtgccaacttgtcagaacacacatgaaaaaggcaatacgggcataccatataataatatagttctataagcacatttataaattaatttcactattttacccttctcgggtcaaaattactaaaatgcccctgactaaccaacgaggtcttaacatatcatatctcatataaattctcatttattaaattatatagtaatataattctacaataatacacaattaactagttagggttttactaatccatttcttaatctgagggtattacataagtactcagtcaaaagagaaaatatatatatgtataatataataaaa

SEQ ID NO: 361626 - DNA, 812 bp, Cannabis indica
aaaaatatttttcagtcatactagcttgtactccagatgcaagtaatgatgaacaaatgtctcttgttttaagatgtgtgaatgtttcaaaaagtccaatatttgttgatgagtattttctaggattcataaaagttcatgacacatcagggcttggtttgcttaatgaacttttagatgcgttgaatattcttggacttgatgttgataatataagagaacaaggatatgacaatcactacaacattaagcacaattagtggcgggcccctcggccgctattggtccaccaactggccactaaagggcattagcggcggacttcggccgctattggtccggcgctaatgcttggccgctattaaaggtattagcggccaaaaaagaggtccgccgctataaatagtattagcgacggagcattagcggcgagatcccgccgctaatgcccttcagataaaaaaaataaaatatatatatacatataaataaatagttttaaataaataattatttatataaatatttaataaataaaatctaattaatataattataacaatttaataaaatttattaataatttaaaattgtctccaaagtaattaacttaacatattaatcctaataaaatattgtctcaaaattaaactaaattattcattaacatcttcattcaggtctctaattatgaagtcttaatctggattattttcggtacgagtccccgaagcccgtggcggagaaggcacatacgcttggtctgatgataaacccagcgttaaattactgagctcagcttggttgaaaat

SEQ ID NO: 361627 - DNA, 660 bp, Cannabis indica
cacctgtatatatagatgtgactccgttgctaactcaaactatatatacattagcttcaaatattgtaaattaagaattacaagagcagactttaaaaacaattatctattgcaaaggaaaatagttgcagttagagaagtcacatgatcaagaaatgcattgtacggactcatgactcgacattcacttgtcaatttaccctagatagtagggattgcagcaaccaaaacatgtccaagaccacgatcctggtgctctggttgccagcaaacaatggaagcttaaaatccatatctccagattaaagaaataacagattgaaagaaagaaaaatgaaaagtgctaaaatatcaagattaacacaaggcctccgcttcttactcagaaattaattgaaatatatacaattgatcttattcacttacgtccaaacgttcaattgatcttgttcttccttttcttcttccttcttcttcggttcctccgcttctgtttttgctgatgagcttgcctcgtcgactggggcaggggttacggatacgatggattcttcgattgcttccacagtcttagcgccatcgtcatccacagaagcaacctcggtgaccacaactacagccttctctttctctttctctgtttcaaccttcgaagcctct

SEQ ID NO: 361628 - DNA, 510 bp, Cannabis indica
ttcaaacttgcataaatccaatctcatacaccaaaaccagctacaagaagctatattcaactcaaatgaaccctagaattcgaactatcaaacaacctaaccctaacggccactaatttgcaaaatcactactcaacaaaaacttaaaattcaagaactaagagatagagatgctaaggcttaccttggtttgatttcccttgaaattctttgctaaaaacaccaagaatcagcaaccaattccttggttaatggctggttcgaaagagagaaggaggaaaagagggaggttctcttgattttggcttgtttttcttattttctttacttctttctaaatgaaataatggtttaactaaactaaaccttggctgaatattcaattgctaggtgtcaacacctagggctgccaccactctccactattaaaaaaattactaaattacccttttgttataacctaagtatttctcaaaactaggggtaaaatggtcaaattctataaccccg

SEQ ID NO: 361629 - DNA, 747 bp, Cannabis indica
aggtaatcaatttaccttatacggttttcatcacactttttaatttttttttcataaaataacttttttaaaagaaaaaaaatatatatttttgtgaattttttagcataaaaatgaaaatttccattaggattttaggatttatgggctttaacaaactttggtaaattttaggggttttgggtttatgggctttctttaatattgttttctaatagaacttaatattgttaaatgttaagtaaacttttcaagggtttaggtgaaattagggctcgttttgtacaccgtattgcattgtattgtgttagattgtggtgtattgttaagtattggtattatttaatataatacaatgtttgatattgacttgtagtaatagattgtgtaataaagttataacatattttcaatacactcaacaccaacaccaactacgagtccaagcctgatttgggtctgggtccgggtcgcgagttctggattcgagtcggggtccgaatccaggcttgggtccgagtccggggtctaggtctggggttcggatctgagtccgagttcgggtcccgggtcccagttcgggtctcagtccgaatttaggttcaggttcgggtctgagtccaagtcccgagtccggattcgagtcggaaattggtgttgaccccgaatcctttgtaaatattataatacaagctaatacggaccatttgttatgtattaaataatacaacatatattgtattaaaa

SEQ ID NO: 361630 - DNA, 1408 bp, Cannabis indica
accaaacaaacacttttcacacactttgagccaaaatttgattttattcatcttaagtgtgcttgcttttcactctaggtttccattgtatcatcatatttctagagtgattttagcttgtatatcaaacacatttccatattgtgattgaggtgaggttggcaccggttttgtaaacaacccggaaatagtgagattggcactttaacaatccgagaaagaggttaatagtcctcgggggtgcgaaactattgtaagaggtttggaaataccttggtgaaaatttcccggttgtaagggttagtcaagcccgttaacttggctcgatattggaactcaaagctaggtccatagctttgaagaccaaggacgtaggtggcatagttctaccgaaccttgtaaaaatcgagagtttgcattttctaatccttaaactctttactttacaagtttaattatttgtcttaatatattgcttgccatactacttgcttttacttgattaattgactaattgcataattttgtgttaaaagttttaattttccgaaattagtttaaatttccaattcaccccccctcttggaaacatatcttgggctaacaattggtatcagagcaagggctcaaattatttgattagatttcacaatctagagcatggcgtttccaagtaattcacaaaataacatgttagaaggttttagcacaaatagagcaccatacttcaatggagtagattttccttattggaaaattagaatggaaacttaccttcaatctattgactatgatttgtggcatattgtgtctagtggtccttatgttgctaaacatgtcataaatggtgttgaagtaattaagacttatgaagcatatgatgaaaatgataagaaaatgctttctaaaaatgctaaagctaaatatgctcttatatgtggtttggatagagatatttttaaaaatattgaacaagcctctaccgcttatgatatgtggaaaatgcttgaagttactcatcaaggaactagtgctatgaaggaaactaaaattcaaatttattccactcaatatgagaactttaagatgaaatcggatgaaaccattgctaatatgtatactcgcttcactacaattactaatggtttgaactctcttggcaaggtacttactcaaaaggatatggtgaccaagattttgagaagtctcaccaaggcttatcaaggaaaggtggttgccattcaagaagccaaggatctctcaacacttcccttggaagaactaattggctcactcatgaaccatgaaattttcatgagtgctcaagaagaagaggaagttgagaagaaaaagaagactattgcattcaagtcttcctcctcccatgccattagtgaagaagatgagg

SEQ ID NO: 361631 - DNA, 595 bp, Cannabis indica
  modified_base (504)..(504): a, c, t, g, unknown or other
ttatttaacattttttttaaaaaaaaataacttactcattaatccactatgagaggaaggtagagaaggggcggtggttggactaacgagagaaggttgggtagctgagtatcctcagcagatgtaggtggtggagctaaggaggttttttttttttttttgaaaaaaaggaggtggctgatgctagagagagggatttgatttgatttgatttatttttttttttgtttttttaggttttgaaaaaaaattaaatggtaattaatggatacagatttctcttaaaataaatattatataaaataggaaaattatcccatatactatttaatattttttttttttctaaatttacggtttgggtttctcaggtagtttatcagatagtttctatgtgggttgctatacggattttagtgacgatttaagttactccattagttgctatataagtttctatgtagaagtttgtaaaaatgacaaaaaaaaaaaaaaaaaaaaaanaaaaaaaaaaaaactaaacaatttaaaagtagtaaaaatagtaaaaaatacccgttattactattaatttttaagtataatactatcctaa

SEQ ID NO: 361632 - DNA, 632 bp, Cannabis indica
gggggatttgctgcaatggtattggatatgttgttaggcctccatcatcatccaaatgccctaaagtctcctcagcccagtccatgatttcagaaatattctgatcatcaggtggatctccacgatcatcaacttctccatctccatcatcatggtcatcatcttcatcatcaccagcatcatcatcatctccatcatcatcatcaacatcatcatcatctccatcatcatcagcagcatcatcatcttcctcagattctaatgaagaggaggatgaaatatcaattatcttaggcacaatattacctgattgaggactgcactcttgcacaaacttgttgtagaattcatcattaggattatgatggcctcttggatttacgacaacatctggtactaattcactgtcagatggcaactccttcagaatgcatttgtccaatttagcaggttcgggttgggggacatgccttactgcctcctcatccagtctccattcaactgcgaaaactggatctggcaataccaaacatatgttgacctccctgtaatttcttgttgggttttgtgacctaaataaaaccctttacaatcggattagttatcaatataagaaatttgaagtgatttat

SEQ ID NO: 361633 - DNA, 585 bp, Cannabis indica
gatatggtgacatcccaatcggtattttaaatgctaatctatacgcccatagtgcatcatctaactttcgtgaccagtcctttcttgatctatgcactgttttctccaaaatcatctttatctcccagttagaaatttcagcttggccattactttgctgatggtacggtagagcagttctgtgacagacgccatatctcgagaggagtgcttcaaactgtttgttgcagaagtgactcccttcatcgcttatgattgctcgaggagtactgaaccgagtgaatatattcttttgaaggaaggggagaactattttaccatcattggctggtgttgctgcagcttcgacccatttcgaaacatagtccacaaccaataagatgtacaaattgctaaaagatgaaggaaaaggacccatgaaatctatcccccacacatcaaacaattccacttccaagattcctgttaaaggcatttcgttcctccttgagatattacatgttccctgacaacgatcacatgcctttacaaaactactagcatccttaaaaagtgtaggccaaaagaatccgctctgcaacacct

SEQ ID NO: 361634 - DNA, 815 bp, Cannabis indica
atatagtttctttaatttctgctttaacaataaagactgaatatttatgtgttgtgtttgagaagtactatagttttatagtaccttaattgttttttaatttgattatcaaatatatttttattgtaatttgttgcaagatgttgatgactacagtaagtggttcaaataatggatagatgtgtttctaatttgatggtggtggataaagttgagtgggatattgggctattaatgatatgcagctcttagtccatctccaatttagcaccaataatgagtttgtggtatatttaatctattatttataattgtgctacaatgcacaaaatgtaaaataagttaaaaaagtaattagaaaaatttatataataaattaaaaatttttttaaaaaaaaattacaaaaataagtcaaacaaaaaaaaaaaaattacattttttactctttgaacttttttatttacaaaaataccccttgagtactaattctaccatagataataactctcctccgaacacagcttacaacttttatcgtactgtgctctctaaagagcaactcttctcaaaatctcaaaaggtgctgagttggaatctcattctaatttcttgtggtatatatatattatttatagttgtattgtagttgatatgtgggtatttctttggttattttttgttgttttatagttttacttaatgttagttgtcatgagatttgtattttttcgttgtttttttagttgtttttttttagttttttgtccgaacaaagttatatttttgtaaccattgacttgtgagtatcatgaac

SEQ ID NO: 361635 - DNA, 525 bp, Cannabis indica
aaataaaatgttggtggtggttggggttggggttggagctagaaattatgagagagagagagagagagttgagaatacaaggtattgggaagggctgtgagtgaatatactatacatgttaggatttaaggttttattaggattattataagagcattgctattaggcaccagtggtatttggcaccttctcgacatgtcgcgttacgattggctagcgatactccctaaaaactattagattaaactgtatactataagactcgatacttaattggaccaatagcaatactgacacatagaagggtgctagccaccactagtgccctttaacatatctcttattataacatggatttcgacccatttaataacacgtgcatcttatggcttcggttattttatttaccaaataactaaaatcatttagtacacataataaataaccaaagtcataaaatattgcgtgtatggaagatgtttcaatggttacatttttattgtaaccattatgattacatttttt

SEQ ID NO: 361636 - DNA, 691 bp, Cannabis indica
gagttcgtctcccatctgactcacgttcccgcctaaaagatatgccgcttgtgcctccctgaactccatctaccaggttcaagacatcagctctgccatggttgtggtaggtacttgtggtttatttcttcccctgatactttgtctaaggcattcgatcttactcttgtctcctttttcagattactgcggagacaaccgcctttccaagaccttaattaaccatggcttcgtcatgtcagaatttgggggcatagacgaggccgtgaggatcctgcgggacttgtctgtcgaaaggcgggcgatccaagaggaggctgatcgaagggaggccctcggaggcgaagctcaaggaggaggctaaacagagggaagcccaagtggaggcgcagctctgagaggaggctaggcagaaggaggccgaggtggaagtgaggcaccaggaggcgctgaaggtggagggtgaggccgctgcccgggatagacgtgagcttcgggaggctaaggaggccatggaagaaatggctgccaaggtgaagtccctagaggagttgcaccaggcagacttgcagtctaaggccaacctggccgtggagttgaaggagctgaaggactttagagaccaggccttgaagaaggctaaaagagatgagctcttgacccccgtctcctgcaagcactgcgtcaagcg

SEQ ID NO: 361637 - DNA, 732 bp, Cannabis indica
atctatttataaataattataaattttttaaattgtattaaaatatcataaaataatttttttgaaaaatatctaatttaagttgttttgaaataacaaatttttcaacttattttccaaaatttaactaaataaaaaattaagtatcttaaactaatcaccttaatttaaaaaaaatatccctatttaagttgatataaaattaattaattttccacttaaaaatacttttaaagaatatctgaataactaatttcctaaaaaattctacttaattattaatttcaaaatattctaatttaagttgatctaaaattagtttgaaaaactgattttcaacttaaatatattttgtatgaaaatttaaataattaagaatatagaaatatctaattagttataacttcttaatttaattaaatatagaaaaattcatatagtttatcttgaatatatttcattaaattaagtgtgtttttcttgaattaatttcaatataatctgatgaaaaattaatttcatgtattttgaaattaattatgttgctaatcaattttattaggttatgttaacgtagattttcgttaactaaataaaagcctatatcgtgagggatttgcgcagaaaatattagcagtaaagaaaatagaatgaacacatggcttttttacgtggtttcgcagttaaaattctgcatagtccacgagtctatcttattagatatttttgata

SEQ ID NO: 361638 - DNA, 515 bp, Cannabis indica
ctgccgtcttctcaaatgttgatgttggtgataactttgtgaataaatttgcaagattgacacttaattgaatttattgaacaccaatatacattctcttgaaatgtataaagaaaaatttggtaaaatttgttttaattctattagttttgacattttatcttattagatattttttttaaataaattaattttggcaaaaataacatgaaattttgaaaatttgttcgtttaggtttgaataaaaattttagagtttctaaccataaaatttacaaacttaagatattttttttaacaaaattgataatatcctaaccataaaatatcttattttttaaattatttatttttgtaatatttaatttattaaattataagattaagaataaaataataggaatatctaaattttaaaattcaaggtattatattatattatcttattagatatttaattaatttaaattatttaaataaacttgaaaatttaaaaattggttagatatttgaat

SEQ ID NO: 361639 - DNA, 626 bp, Cannabis indica
aaaaaatatttaccttttaaaattatactattttttttactaattttgaaaaataccatatttttttctaaataagggcccaaactattttttttttctgtggcccactaaaagtcaggcccgaccctgattagggcatttattataggatggttgggagccataaatgagaaagacaaaaaacgaacgattaagagaaaacaacacggtttgtcagaaagatttgaatgaaagagcaaataacaagtggcaagtagaaggtaaaatgtatacacctagaaagcaacagaacgggtttgtaggaagcttcacgaagaagaagactatattatttatttgatggatataaactagggtattaacttcatcatttatctactttatttttatgtaatttttttattatttttatgaaataccttaagaaaatttacaaacaaaaaaaaattcaacgtaatttttttttccaaaagaataatattttgtgtaattataaaagaaaagaataattacataatgcactatttttataaaataattacattttacgtttaaagaatgtttttttatatatattttacagttttctaaaaaaataacacgaaaacaacataaaatcaacaaga

SEQ ID NO: 361640 - DNA, 602 bp, Cannabis indica
gggcacaaaacccaacagatgtacactggaaaggaagatcccttatcccatctcaagtattttgaaatgcaaatggacctgcaaggagcacgaggagatgtatgttgcagagtttttccttccaccttctcagaggccacccagtaatggtaaatcaagttgacgctcggaagagtcatctcatggaaggctttctcctcagaattccatgcacaattctcctgttcttgccaacttccgttgcacttagaaaacctggtcgaagtgaagcaaagaccaggagaacctctccgagcttacatcaccagattcatgacggaggcaattcaggttgcacgggtgatcgaagacagaaagttgtctgcgatactggggggcattgaagttctttgagaactttggaaggacatcaggaagaatggaccaatagattctatgagtgacatccttgatcatgcgtattgtttgattaagcttgaagaagccatttaacgagcagaggttttgcaaaaaccaagcaagcaaaaatttccttctgctgggacatccgtccatctccccaagtacccaaagccattcaagctcgggtggtaaacggtcca

SEQ ID NO: 361641 - DNA, 487 bp, Cannabis indica
tttttttcatccccattgtcatcttacttgccactatctataattacatagtgaacagttcattacatagtggactgtaatatgtttacaacaatcatccctaaaatcatgggatttgattacatatcacgtagtgtaaatgcggttatgatttgaaaatcatatagcggtgattttctcgcttttgcaaggtcaaaatgatcgtgaattaaacacgtctttaattattgtatctggagttgtcttgacagaagcttggttctagtgatctcaatagcgagttggggccatttttccttccgaggtcgacgatgcatgtcttgtgtcgatcgcgattcttgtttacaaagtgttcttcgaagctaatttgaatattagcttcttaacttgccagggttgtgagcctcgctgacgctaacgggatgaagttataggaagtcttcccatagcaagaagggcacctcgcttactgttggaaattatttta

SEQ ID NO: 361642 - DNA, 881 bp, Cannabis indica
cttcaaagtactcttggcatgtgagaccttgtgcaagagtatccattttatttttttgcgaaaattgggtataacatttgcccccccaaaagtatttgcttgtaagccttcaagtaatgcttttgcacttttcccaaggcttgtacgaaaaatacttctttgtagagtgtatgaatgtaaattctcttctgaaaatgtgtgcatgggtatgaccaatgtccttgattgttgtgaagagcattgttatgaagaggtgtgcatgggcacgaccaatgtccgtaatttttgtgaagaggtgtgcatgggcacgatcaatgttcttggacttgtatgtgtggatttttaaagcacgtgacatttccttaaaatgggagttgagttatatctcatatctcatgtggtactcgagtagaattatttctcttgctaaattttgggactattgcaaggtttaaaactttttactcaagtttttaatttgaaacaccctaatactaaggcacgctacagtgaattttcaattgcagtgatatctttgctaatcaaagaaattttcttaaaatcatgtcaaactaaaactttagaattaactatgaaactttataaacattatataaatatttacaaaagccaggatccagtggctaaactttttataaaatattctgaaatacaatagtcaagtcgcacaacgactacaaagtgaaaacccagatgtcccaagactgcacactccaggtcgcgccgccatgacatgtacaacatcaccctagctcgaggcttactcatgttcagccttcgcctttccattacctacacatgaaagtagaaatgtggctcgatagactcaataagaaaagcatataacatgtcatataata

SEQ ID NO: 361643 - DNA, 554 bp, Cannabis indica
cctggatactgacgagaagctttggagatattttattcctctcgcagaatttagtgaacaagtttccattaatttgggttccaatatcggatactatcttcatgggaattataaacctacagataatgttcttgatgacaaagtcaaggactttcttccaggttatagaaatgaggggctcgacctccgtccatttagtgaagaaatcgactgctactaccgcatacttagctccttcttgcccagcgggtaatgccccaattaggtcaataccccataaaggaaatgggtagggtgaggtcatcattctaaggtttgttggcggtacgcgaggtatatgttaaaacctctaacacttatcatatttcttgacaaactcgtgtgtgtccttattgattgttggacagtaatatccttgtctaatgatctttttagacagacattgctagcccgcatgatccccacagaagccttcatctctctgatgatttcatttgcttctgtagggagaacacaccaaagtaggggcatcgagtaccctcttctatacagtt

SEQ ID NO: 361644 - DNA, 655 bp, Cannabis indica
tggtaaaataattccaacacaacctagggtggagttctcttccaatttgagaggctattaggtgtagatttgaaaatttgaacttaggtaaaaccccaagcttgttctattatgagtttatgatgtttttggaaggttttgttaggtttagggattgttttgatgaatttgattatgtgttgataattttcgtttagggttagcttcagtaggtcttgaatgatgttttaagattgctggtattattttggtggtgatttctgaggtttgtcaagtttgagttcatggagctcaaacttgactcaacaatggcatgttgagttctgttgtgtttttcttgctactgttgtgtgggaattgttttagaatgtgttttcaggtgttctggaaggtatggttgcatttagggaagatttggacgagttatgcgatttttggggtttgttggtgcaaacaggtccaccggttttacaggtgttaggttatttttagtattaattttagattaagtttagtatatttttttattgagttttaatcgtgtttggagcatttttatgcttgttatcttttatttgtgcagatttaaaatagaaaaagattagaaaaatatcagagaaaaagattggaaaaagataaaaatatcatgatattt

SEQ ID NO: 361645 - DNA, 528 bp, Cannabis indica
aattaaaactttctttaattacttaaaaatactaaaataatagtatatataaccgagatcccgttacaaaatatttacaaatgtttcatagtgcataatacaaaagttgtcgcctggcgattaaataaaatacatctagctatcccaaagaccgtacgctccaggcctaaccgctctgacatgtacaatcttcatccgctcactctcacggctgcacaactttagccttgcccttacctacacatgcaaacaatatctatgagtcaacagactcagtaagaaaagcataaataataacataactataacccgaattataatcaagtgcccatacacccaaccataaccttatccccgtgtccatcacggttctgagtctagaacgttcgtacgataatactattgaccataatatcagcctatactcggtaaacgagtcatactctggtcatacagatgtgatactgccaagtagtattgaaattttattttaccaggatcttacatatactcacaagtatgttgatt

SEQ ID NO: 361646 - DNA, 1158 bp, Cannabis indica
tgattactctgggagttgagtagtaatttttggaggaagtataaaaaacctatctaaagtctctaactctaccagtgagattgaatgttaaagtggccaggaaataagctatcagataaatattcagcctatgaaaaattctgcacatgtttggcattattccagtaatggattaactattagtgttacttcctaactaacacagatatagtccccaaatagttaaaatctagtatccgtagaggagtagacatatagaaaggaatttcacaatatcaaagaattttttactaaggaaatgtaatggtggagaaagtttgtattgaatacaacctgtgagatcctattacaaagataatactacatactacacttgatctggacatcaaggtactgaaattaattgaaatgcacttttagttttatattagtgcaagtgggagtttattgagttttatgccctaaataaaattcatttcactataattagatttactaattaataaaaacatataaatcagtttatggttcacatgatttatttcatgattatatgtttaatgtataaattctataaatccataacatatagttattcatgattatagtgttgtcaacacagttaaatataatcatgattatatgtttcaaagtttaagtcccgtgagttttcaatatactggatttcgactgacatgataatcagctataggagcttacttacaccttggataagtgttatgtccttttcagaacattgacaaattatgctaggatcggacatgtagagtatgcattggactggagcgatattaaatttggataagatatcataaacttaccgttatatctatctaatttaatatatgttagttgatcttaagttaaaagatcttaatcgtgatatggttaggttctgcttcaatgtattgtctatgttcttacgttgttcgttaaattttggccagtcgaatccttacttcttaggaacatgatagtataattgagtgggagcggtaatcatagatatagaatctatagcttctataagtatttagaagtgaaatgatgatttcttttgagcttggcttgatagagataaatgattgagatctcattttagtaataatattagtttactgaagtatcatttatagg

SEQ ID NO: 361647 - DNA, 1055 bp, Cannabis indica
tctatttgcttaatttcataaacgaaagcagtagctatggagagaagaattctaatggatttgagcatggcgaccagactaaaattatcctcatagtccacaccttctctttgggtataactcttagcgaccagtctagctttaaaagttttgacttcgccacaagcacctcttttcttcttgtagacccacttacatccaattggatgataatcatcatgtgcgtctacatattcccaaactctgttctctttcatggaatccatttctaaatccatgccagctgaccattgtttctgttcggaacttgccattccgtgtttataggttaatgaattgtcatcaataccatcaccaaaaaccatattgatttcaccatccaagccataacgagctggttttgtggaaacccttccactacgacgaggagtcgtgaccttctcaacaggaacatttgtggtagatttcttagttgtaacaacttgcattggttcaaccaagggagtggaattttcctctacttgagtacacgaggatggaacattagaagcagttatatctgaaagcatttattctaacactactttactttccagcttgaagttcttaatatagtcatcttcaaggaatgtggcatttctagaaacgaacactattatcatccttgcgactataaaatagtccacccctagtctctttagattttccgacaaataagaaaacttcagttcgcgcttcatgtttgccttctttctttcttaagacattagcagagcacccccagattctataatagcgtaaactaggtatacgaccattccatagttctacgggtgtcttagggactgatttagaaggaacaacatttaaaatttcattagccatctgaatagcatatccatagaaggacgttgacagggttgaatagttcagcatatacctaaccatttctaaaagtgtgctatttcttctttctgcaactccattttgctctggagtgccaggggcagtatactgcgattcaattccaagttcaattaaatgatctttgaact

SEQ ID NO: 361648 - DNA, 700 bp, Cannabis indica
attattacagttaattattttattttttttatttaaatatttaaaaagtaaaaagtgaaataagttgaagaattttttagaaaaaaaatggctacacttgttatcgattgagtatgaggcctcatatttagttcatctaattgtaacaaaataattagatatcatttaaaaataattaattatttaaaaatttattataagaagaaaatttaatttgtgtaaaaagaaatttaatttttgtaaaaaaataaattttattgtaaatattttaactaaatggcttaattgttaaaataattagagtaaggatttaaatataaataaaaaaaattatttataaatattaattgctaaaagagatcttgttaaatatttaataaattattttaagaaaaaataattaattaattctaaaaaaggaatgtttacctattagtaacctgctattacatctcaaagaaaaatgtaaccatgatggttacaataaaaatgtaactattgaatagtcacccataattaaatacttaatttatcaaattaaaaatagatcaattaaattatatattttttttatcgaaattaaaaattttattctgtaatttctattataactacaaaatatattttttttttttataattatgtacattgtacttatttaagatcgccattaaattttaatttttttttgaataattta

SEQ ID NO: 361649 - DNA, 631 bp, Cannabis indica
tgtaaaaataaaaaataccctaaaaagaactgaaattataatgttctacgatttgtattagaggcaatctgtatcgatatatattaaaagactcgtgttataaacactctcaatgtatacatgtattgatatagttatatataaatatatatatatatacatttggttcaaaattgtataataagtagcaagttaactcacacttgtttctcaaaaaaaaaaaaaactcacagttgctgagctataatcctattttcttcaaaatagagaagaaaaaggtgaaaaaactataaaagataactgtattatatgagctattttaacttaaattttaaacaatattatagtttttctatactttataaagaaattctatttatttttcaaataatatattaataactgcttaattaatatatattaatataattagaaggagagatttagacttagtacctcctctttgtgaggaggtgtaaaccaataaattatgactatgatcatatttttaaggttaattagtgtaaaaatttctagtattgggaaaaaaatagaaaaatacaaaaaaggaaaaaaaattacaaaaatactttgggccggcccattaaacatttatacagtccacatacaa

SEQ ID NO: 361650 - DNA, 510 bp, Cannabis indica
aaatttaatatgttatttaatgcttactcaataatttattaaaaaatataaaataataataatacaaagctaaatgtaaaatttaataataaaataataataatgtaaattatttaattcaaaagagtatgttagttaaaatttaataataaaatattaaaaattgtataatggtaaatataaaagcataatatttattgtaatacgaattttgtatcatgctatattcagatcacttttgattatttgaaatttttgcatcataatttagcacaccattagagtagacttttaacaaagtgagctatatattgtagttgcatcacttatttacatatccattggagatgctcttgttagacttttatttgggcttacattaaattttattagttttattaaaacttgggttgattggatagttctttgctgtgttagcccatgttgttggtgatcaattgttaatgggcttagcatctgtgagtaaagtctaggtgaagcagagtgtgg

SEQ ID NO: 361651 - DNA, 1030 bp, Cannabis indica
tgcaacaaggtttggttgtttggcaaggatgaagataaaacttcatcaattcggaaaatatcacgttgttgaattcaatgcagagcatacacatgtgacttcaagccctagtaagagccacttacataggtctcaaagaagaataactcctgctcaagcatctgaaattgaattggcagagaattcaagaattgctcctaaagccagtatggaactaatgatgaggcgagccggtagacatgaaaatcttagatttattttggaagattgtcggaattatatacgcaccaaaagaacaattcaaatgcgcgtaggagatacatgtggtgttcttgaatatcttcaaaatatgaagtcaaaagattctaatttcttttatgcaatggaagcagacacagatgatttattaacaaatatattttgggtagatgcacgaatgaagaaatcatatcacaactttggtgatgttgttagttttgacacaacctaccaaaaaaatcatgattgtcgacctttagctatgtttgttagggtaaataatcataaacaaacgactgtatttggggatgcattgttatatgatgaaactgctgagacgttaatttatgtggttatttgatacttttatagaagcaatgtctgaaaaaaaaaaaaaaccaaaaacttactgatcaagatgcagcaatggcaaaagcattaagatccctatggccagaaacttgtcatcgcttatgtatttggcatatgtatcagaatgcagcaaaacacttgacactacaacatttatggttattagaggcggaggattctgctggtaataatccccaagtccgctggtaaaagttaatagcagcggggtccgccggtaataatctgccggtaatgcttggtcgctaaaaatgggtattagcagcagactgacacttccaccgctaataatagtgtcagacacataaactgacattattagtagcggcggaccaatctgcctctaatgcttttttgttttttttttcattacatgttaata

SEQ ID NO: 361652 - DNA, 591 bp, Cannabis indica
gaaccttgaactgaaccaacaaaaaacaattggttcctcattctctggttggaaaattaccatttctcgtttgcaatcaatactagcagagtatttggacaaaaagtccattccgagtataatatcaaactcggccaatggtaactccacaagatcagcactcaattccctgcttgcaactttgattaacacagatctagcccgctttcttgaaataattaattccccattaggcaataggattccaaatcccatctcaaacacattgaaatatgtagtgggatgttgttacaagtcctctggttacaagtcctctttcttcaactggggacaatctttcttgaggtgccccattgatccacactgaaagcaagccctctggttacaagtctcgaggtgatgtttcttgcagcacgggcactcaggataaaagtaggtctgacatccccctttactctggtttccacgaaacctcttattttaccctgaacctcctaaatgtggaaaagttctcttcttttgctcaataatggaatcaccactctcctttcagggccagaaatagggagagtagtggtcccaccagcacca

SEQ ID NO: 361653 - DNA, 615 bp, Cannabis indica
agtgaggcctcaaggaactgtaccgacatccttggctagccaagaggagcctatacgccggctaggaactgtgcacgagctgtctgaccaagaagtgacttccaaacccaaggagcctccgttcgactaagggaacctgacctcttcaagaaaaattttacaaagctatcctcaacttgcaaaaggttggccttctcttagcagtgctatagtgacctgccagatcctgcagtccttgtcctgccaagtcctggcaggaccacgactgaccaagattttcgtggctggaccatcgccaactagacttccctgtaggtctatgggcggccaagattgacctatcaggacactatgtgcagcccaaaacgtggaaactaggcatgggctgtgaattgggccctaaaagcctaatagaatggctgaatactatctagattcaagggtactttagtcttatataattatataacaaactatgtaaatatctaggatgtaaagttgtcatatagggtttaagcctcctatataaaggtcttaaccctagcctagaaatctaagtcacttagcctcctaatagctctaagtatgaagccatattctctcctctctctctct

SEQ ID NO: 361654 - DNA, 1038 bp, Cannabis indica
agagaacatgtgatttagaacctagaagatctgaaaggagctaggttaaatagtagaatctgtgattcacattaggaaaagggatagtaattaggcattaacaagtgggtaaatatatcaacaggattctcttccctatcttctcattttgattaacttctcattcacatcataaatttagtctagtggttttcaatccaattccctgtggttcgacctcacctgtgacagtttactacttgattacgtgcacttgcgtactgtttataattttcgtaacaagttttgggcgtcgttgtcgcggaattgtttaaagattaattttgcataagattatattaaattattttttggtttatctttcttgctaatttctaacctgtttcttccaatactgtctttgtatatttcaagaattgaaggtgtatgcgacgtcaaggacagggtgtcatattgccggtcgatcctgaaattgagaagacttgtaggagaaacagaagaaacaagaggcaagaaagactttccgcaactgctgaaacagcagaaatcataattgagaatgctaatggtggtaacaatggaggcaacaacggtaataattgaggtgccgttgaagatcaagcaaatggccgtagtctgagagattacattctcccaactcttacagggtttcaatcttgcataatgccacccgctgtagatgccaaaaattttgaaattaagcctgccatactccaaatggtgcaatcttcagtccagtttggtggacttccctctgaagaccccaatctgcacttgtaaaactttatggagttatgataccattcgcttgagatcttttccattctcgctgagagagcgagcgaagagtttgttgatctccttgcaactgaattctatagcaacatggaccgatttggcaacaaagtttctgtcagcgggatagtgaatctctcaatgaggcttgggagaggttcaaggatctcatcagcaagtgtcctcatcatggtattgagaagtggatgctggtccacaact

SEQ ID NO: 361655 - DNA, 574 bp, Cannabis indica
ccttcaagggtacagagaagactttgtctttctcgatttctgccctttctctttcttttccttactttgcttatgtgtaatgtcaccatctgtgagattcttacacccgactcttgtccaggaaatccttctaaggctttcttgttgacaaccgtccggagggggcctctttccagcggttaggggacccccattcccttttttggacttagggtttggtaaggggcctgactgctggaatttttactctttttcagaaccaaaatgtctacatccagttctaaatcttccaagaaaagaggaaagcgcttggccaccttagaagaggttacggtgggtcccgttgcctaggaggggtataaacctcgtgctacgggatgggaagcggccaagcttcactctacgttaacctgccctcaccaactggagaacatagtggtggtggctggcatcaaacccgcgacgtccgggacgtaccaccggccgccccgtgatgcggagacgcccaatcacaattacggaggcttcagagcctggagccagacgcatttgatgaccgggggcctatgcttct

SEQ ID NO: 361656 - DNA, 1063 bp, Cannabis indica
ccttggttggatgattccttgttccctagggtattgtagttccatttagtaatagcagaaccttaagttagaggttcaagttttccagattagagttttaatgtgtgatttacccggttatgttatgtgattaaggcatccatccagcatgagactttccattcaggtcgaccaactcacttgaatttagaaacgaggtaagcatagtgtagatcatgtgatatatatgcgaatgtatgtatgtgtgaaatgtatatgcatgcttattatggttgctacactaccaacacttgtacagaaatggtacttagtgtattggtatagtgtacactatttaaagagtacattacggtgttaccaacacaagtatgagaaagtatagggtgtgtgtggtatatcacttagtggtactcaggatacgaaacaaaccctaccaacactcgtgcaatgtggtacagtggttgaaccctagtatagaacattattactcatttgttaagccttgtaaataggtgtatgggtgcctaaatacaagttgatattatgtgatatgttatgtgcttttcttactgagtgtcgactcacaattttactttcatgtgtaggtaaaagaaagatgaaggctgaacaggaaacctcgagctagggtgatgttgtacatgtcatggcagcgcgacctagagtgttcggtctcgggacatctggggttttcattttgtagttgctgtgcgacttgacttttgtgtttggaatattttgtaaaaagtttaaataacgggatcccgtcacttgtaaatatttatataaagtttcatagttaattctaaaagttttaatttgacacgatcttcaagagttttgtgatgtggcaccctagaaaggatcaaatgtaataattaaaatcgtcattttttaagaaaccttcgatgggacaaccaaaggtcaccacctcgtgacatctcttcgcctgtctctcgactatagtttcccttaatgacctcatttgttagtcgtgaaactaggagcatgtgttatagtgcgatttttctcacctagaaactcg

SEQ ID NO: 361657 - DNA, 710 bp, Cannabis indica
gtttttatattttcttatatacaactgacatttgcaaaaacaccgtttttcaacttatgtaaaacacaaaattcaaaatagtattaacaaaaaaatagagaaatactagaaagcactagtggtaccctagctagcactcttctatgtgtcaatattattattagtccaatcaagtatcgagtctcatatagtttaatataataatttttaaaaaatatcgccaaccaattgcaagttgacatatctgaaggtgctacaaagcaccactaatgacaaatagcaatttaaaaaaataactcacattaatattttacaaatcgacatttgtattatgggacccacgtgttttaacataaggaaatttcatttttaatgcttaaaaaaataccctctaacaaaatttagactcctaattaatttatacaattaaatgctattattttcaatttttacccaaactaccctccctttcattttccttctctctccctgtctctttctcttcctcactctctcttcttctttgtaacgtccgtattttataataataaacttgaaaattagttttaataatttatatattaacaaacacatggatcgggatcccgaacgtcaaaatataagttaaaagtactttactattatacacatgtttataatttttttttaaaattttgcggacaagcatactcaaaatacagactccaaaa

SEQ ID NO: 361658 - DNA, 1059 bp, Cannabis indica
atttaattaatttaagttcaatttatctaagattataagaataatctcttaattataatcattttgtttagaaaaaacaacatttgattccaattatgatgatatcatttactttatttagaaaaattggttaggtactttaataagtgtggtaagagaaaaatattggacatcagttcattggaataacacaggtgataaaagaacatgatggaacaaaaagttctaaggaacttataaaaccatagagtgaattcgagtcatttactcgcttcattgagtacacaaaaaagctacgctcatttaaagcgtaagattatcgagttccaaataagagattttatttttctttgagtattgcctataaaagggatatgtagagagggaagttaaaccctaaattcattaatacctttctaatactggagtaagtaagccaggtagcctatcagctagccttgactcctgcattgttcgaagtgtataatgtgtttcatatatcaatgctgagagaatatgtatcaaactcgactcatattctgagctgtgacgattttgaacttcagacatatttatatgggaaaaataacttgtccaagttttggactggaaaaaggaagtactacacgtaataagacaattccactatttaagaaagtgctatggagaaacagtaaggtggaagaagtaacttaagagttagagtcgtgaatacgagagtaatatcccgaattgttcaagtagatttcgagaacaaaatttttataaggatagaacagttgtaatatcccagaaacctaattatgaataattaagatttattacaaattacgaattaattaggtggtaataagtagaattatgatcctactaacttaatttagcacaaattataatttttgctataagtggataaataagcgtaatttattaattacggagataaatttaaaatatgtggatataatataagttatttgtaaaatattttcagattcgacgacactggagacccgattggaggctaaaaatgtcacaacagttttagtcagtaatatt

SEQ ID NO: 361659 - DNA, 1325 bp, Cannabis indica
tgtgaaaccctttggtgcgtgtttcagcaccaaaggggttcgttggacgagagcgggacccagagtcccgactattgatttagagttggaagggaagaataagagcgtgaattggagaatacatggtgctaattcgatggtgggagttaataagaatgtgatgtgtttgggatttgtggatggtgggttggagccaagaacttcgattgttataggtgggattcaattggaggataatcttttggagtttgatttgacaacctctacacttggatttacttcttcacttctagtcaaagacacttcctgttccaactcccaattctaggctcatctttaaattttcaaaaaatgtcatttttcttttatgcatattctctttaattattatggtagcaagtttattgtcttttgcaactattttgtttgtaatttttttttacataatcatggctttttttttaaaaaaaaaataataagctaacttcactaactaacatcttcaataacagataagatatgagtcgtaacattccccatactaatgatacaccagttgtaaaacaaaatgctctagcaatactatgagcgatatcatttgttaatcgtttaataaacttgacagacataatatttagttgagatatcgaaaccttacactcttgaataattaaaccatatggagatacatattaacattacttgcaattgcagaagccacattcaaactatcggactccaagatcatatttgactatcctttttgtttaatccaactaaatacctccttcatgccaatagcctccaccatgttccagttcaaaatcctctttgagctagattggatagcttcaacaaaatccctttcattatctcgagccacaatatcatagccataatatcaaacattgtcaaacatagtcccatcaacattaaccttaatcattctcttttgcggtttcctccactgctcctgactctcctccactgctcctgactagggatgcacacggggcgaggaatgagcggggagtgctctccccgtccccatccccgttaagaattttaatccccatccccgccccatcctcgcttattccccatcggggacggggcggggaatcccctaatggggcggagacgggacggggaatcccctattgtaaaataaattttattttaaaaatttaaatgtataaaattattaaattacataaaagataaaatattacatattatttactattcaatatagtaattattatgtaaaaacacaacttcaaaaattgtaaaaatgatattaatatactaaaaaaataacaaac

SEQ ID NO: 361660 - DNA, 567 bp, Cannabis indica
cctaatgtaatgaaggctgagcaacggctcacagataattgaacgaattctgaattttatgggggtggttggaaatgatcgggtgacttgcgccacatttcagttctaggaggatgctctcgtgtggtgggagttgataaccctcacacgggacgtcactgttatgacccgagaagaatgtcggtaactattcaacgccaaatattacaatgaagctatctgcagtgctaagcggaaagaattcactgaactagtacaaactgaggagatgtcagctacagaatatactacaaagtttgatcgattggccaagcttgccgtgggtatcgtgccaactgacttcagtaagaaagaaaagtacttggccggtttgaatgtgaaaattaggcatgatctggtgatcactaccaatgaagcaaccacttatgctggaattgttgaaaaagctttgagagccgagggtgctgtgaaattccttcaggagcctcgagtgactcagaatgttggtggaactattggaatttattttaccaggatcttagatctactcacaagtatgttgtttaa

SEQ ID NO: 361661 - DNA, 812 bp, Cannabis indica
cagatttactaattaataaaatagtagaaatcattttatgttacatggtttacatgatttatttcatgattatatgtttaatgtataaattctattaaatccagaacatatatttattcatgattataatgttatcaacacagtggaatataatcatgattatatgttcaaaagtttaagtcccacaatttgtcaatacactaaatttagactgacatgataatcagcaataaggtatacttacaccttgtgtaagtgtttccagggtattggcaaagtatgccagtatcggatgtatggagtatacatcagattggactgatattgaacttagataagatatcataaacttaccgttatatctttctaagtcaatattactggttaatcttaggtcaatagatcttaaccctgagataattaggttcgatctcaattatattatttatgttcttagagtagttcattaaagctcggatggctgaacgcttacatcttgggaacatgatagtataattgagtgggaacgctaatcatagatatagaatctatagcttctataagtatttagaagtgaaacgatgatttcctttgatcttggcttaatagagataaataattgaggccacatttcgacaattatattagtttactgaaatatcatttataggtagcaaagtattttaaggataaaatacattgaagggtagaatagtaaatttgtccctattcaatgtagattatgtatagaggatctttgactatttggattgtaacaatagataataaataatgtatctatatcttggtac

SEQ ID NO: 361662 - DNA, 853 bp, Cannabis indica
gagtctggtttggtctagattttcatttttttcagcgatctctaagattgcaaactcttcagcgatctccaggattgcagaattggggagaggtgtttagagtctggtttggtctagatttttatttttttctaaccaaaatagtaatgttgattttttaaaattgaaaaccgaactaaaccaattaaattctcaaaccaatctacttaagaacagattagtttggtttaaaaccatagtttgtaattcgtaattgttttaatattttttattgagttatttttattttaaaacttataatacgtaaataataataaaaataaatattcttatcacaatgctatattatcaatattaggcttaagattgttgttaaatatcaatgtttaataataaaaaaaatcatattaagtatatagaaagaattaggcagtttggtttggtttgaaacacagacgagtattttaaaactttgatcgaaccaaaaattataaacagtccgaattgaccaacccgttgacaccgaattcatttgatccgatcttaaatgatttggtccgaattagttgaaatttaaaaccacgaattacagattatataaacatccctaattggagattagatgtctagcaccttatccctttttagttatatataaatatatatatattcaataaaaattatgcaataaaaataaaagagtagcctaaaaacattttttgatacatttattttgattgagtattttagtttaattaagttgttatgtattatgtacgttatagttatttaaaaattatttataaatttttccaaaaaaattttaaattaaatttatcagtatttgctaatt

SEQ ID NO: 361663 - DNA, 552 bp, Cannabis indica
gtggtagtggttgattactttactaagtggactgaggccgaaccactcgcaaccatcacatcaaagaaagttcaagactttattatgaagaacataatatgccggtcaatggcaagcatttcgacaaccaatcctttactgatttctatgcgaaccatggtatcatcaaaagtttctccgcagtggtgcatcctcaggcaaacggtcaagttgaggcagtcaacaaaaccttcaaggttacactaaagaaaaaacttgaatatgccaaaggaaactagctgaagagcttcctgaagtcttatggtcatgccgtacaactgaaaagacagaaactggacaaacaccattcgcaatggcatacggttatgaagctatggtgcccgtcgaaatcgaaccaccttcccacagaagactgacatacgatcaaggtaccaatcacatactccttgcagaatcacttgatgaaatcgaagaaaaccgagcagctgtaaacttaaagttgatggtccatcaacaaaaagtagctcggtatttcaacaaacaagtgaatgc

SEQ ID NO: 361664 - DNA, 626 bp, Cannabis indica
gctgtgtgctgctgtgaagaagatatgagctactatgaagaagataaaagttgggttttatttttaacttttatttggctcacttaagtattttattggggtttttcattaatgtttattgggcttttttaaagatttttaagtcttttatgttaggcagcagaaaactaaatttaaaataccagtttgggccttgttttagggcttaaatagcccatttttcacccaaaaatttgaggtgcaggcctctgacgcctcaggcctcaactcaacgcctcacttcttctcagcaaggcgcacgccttgatgcacttttcaaacgcctcagcttgaggcgcgccttaaaaatgcctttttaaacgttggtaggcagcagcatgcaaatgtcaatgtaattgaaattctcatatctcatcaatgatttcccatatctccttgtaatctttttcttctccaaccaaattatttgctatcttttccttcgccttatcctttgcattatagagaaatccaatagttggttccttatcaccatcaactaacattagcacttcaactaaaggacttctggtcctaatagcataaatcacacttggccaaaagttcttgtccttcaaaactgtttt

SEQ ID NO: 361665 - DNA, 588 bp, Cannabis indica
gaaaataaaaaagaatatgttctcttgttatatatacttattatttgcctgctttggttatactaatgacaacaatgttcatcatgttcggtgcatattattgtttcacgacctagtctctatgtcaacataggtagatcaggtgtgcgtgcactcacctgtaggtgaaagacctagaatctttatagggagtgaattaaatctgaaccctgatattatggtggttatcaggtacgattacccggttatggatgccattttctatgattggtattgagagctaggggtctagtggacggtgtgatatgtatttgacgcttgattttgtgattatttgtggtctatactttgtttatacattttgatactggtgatgagatattttattttacaaagctaataaccatgcacgaattttattaaaccaagggtcctttgatattagttatttttctacagggttttttaagctcaccccctattttctctaattgtaggaacttagtttgatgctagtggatgaggattgtaccgttgaggatgaaagtaaatattagtttagttttattctactctttaatctttcta

SEQ ID NO: 361666 - DNA, 1021 bp, Cannabis indica
gggcctaccggacgacccccaaaaccacgaccggccactcgcctttctcaatggcgtgcagttgtgaagcaatggtcccggtagaaacgttattcccgtcccacaggagatcgacttacgatccagctacaaaccaagctttattacaggaagtgctggatcaagtcgaagaactccgggacgagtcgcaaatacgaatggcagcttatcaaaagaaggtgaccaaatattttaactccaaaattaaaaacagaaaattcactattggggatatggtcttaagaagagtctttccagccacccaagaacccggagtgggggtacttgggccaaattggaaagggccatatgaaatcgaggacaaaatcggctccggaacttataagctaaaaaggatggatggaaccattgtgccaagggcctggaacgccgatcacctccgaaaatattaccatagtccaaatgtgtaacttaggctttgtttaaaggatttttatcgtctaagtgtaggcaacctctgaattttaaataaaattgattgccttaaaaataaagtttttatgccactcaggggggtactaaagcataccacacggacaaataaaaaacaagccgaaagtaaaatatcctaacccaaagggcatgtccaaaaagaaaaactatgcatcaaaaaagcatatgtataaatatcctgacccaaagggcaggtccgaaagaaagaatatgcatcgatggaaaaaaaaatcatgtatataaaaaccctggctccaagggcaagtctaaagaaaaaaaatatatatatacatacaaagggcccgaggacaggccttaatcattgtctccccttagaaaataaggcagctattaagataaagattgtcttaaataaaagaaaaatagttgtaaataataaaaaaaaaggaaaataagaaaaagcttggtgaagtgagctggattcaaacggcctaattaatgcgaggaggaaggcgaggaccaatacgcgcctcaagcatggcgtcaa

SEQ ID NO: 361667 - DNA, 1030 bp, Cannabis indica
tcctctggccagtttcctttagcatcctcgaaccttttctttaatgtatccttcagggtcttgttgattgcttcaacttgaccattttcttggggatgcgccactgcagagaagcttttgatgataccatggttcgcacaaaaatcagtgaaggactggctgtcaaactgtttgccgttgtccgaaactattttgtacggtaatttgaactggcagattatgttctggtatgctttcttctttgcctgtgcattctaccacaaagtctgctagggcctggcctttgattgctgttcggttttggaaggtaatttcgtactgacccagttccactgcccacttgagtaaccgtctagaggcgtctggcttttgcaatatttggcgtaagggttggtaagtgtatacccgtacaggatgagcttgaaaatagggccttaactttcttgttgctagaatcaggcagtaagcgagtttctctatcaatgggtaccggccctcaacctcaatgagtcttttactgatgtaatagaccgggtgttgtatgttgttttcttctctgatcagcacggcactcacagcgtgctcagtgacagctaagtatatcccaagctcttctttgtccagaggtttcgagagtacgggaggctttgcaagttacgtttttagctcctaaaaacctttttcacattcttccgtccactcaaattgcttatttccccgcaggatgttaaagaaggggacgcacttgtctgttgattttgaaacaaatctattgagtgcggagattctgactagttaaactttgtagttccttggttcttgttggcggtttcatatccaggagggcttgaatcttctctgagttggcttcgattcctcgggtattgacaataaagcctagaaactttcccgagctgactccaaaggagcactttaagggatttagtttcatgttgtacttcctgaggactttgaagcattcatccaagtcatctatgtgccccccagccttcttggatttgacaagcat

SEQ ID NO: 361668 - DNA, 754 bp, Cannabis indica
tttattttttttattaatttaacatttataaaactggttcattataacactgttagaactggttctattttaattataactggtttaagttattttgtgttatttatttttattcactatgttatagaaccagttatattttaattataatcggtttacgttattttgtgttatttatttttattcattatgttataaaaccaattctatttttaaattataaccgatttctgagttattgtgtgttatttatttttagtcattttgttgtggaaccgagtctattttaatttatgtcatttggttttttatttaacctttaatattcttcttttctatcattcttttattgtgttgaaatcaataataattttaatgtgatagtggaaaagattaataccgaatacaacatgtcatatcttattaggatgacaatactatatatatatatataaactatacttgatatggacatcaagaagatgagattaattaaagtgaaaattatatgaaatatgggatttcataacaaagttagaaaaatatggcatttttaggtttgccacttttctatggcattttttcacatttaagttttttatggtatttgatatgccatatttttataaacttattatccaatcccatattttatgtttttgtttttagcttaattagttttatttatttttttaatttattttacacttacattttagggtttctttttatttgaaaaatttacaccaaatac

SEQ ID NO: 361669 - DNA, 627 bp, Cannabis indica
aacattcattagcaatttaacgccataaaatctcgaaatataagtattattgaaagttttttattcttagtaacgtccaccccaatagtggcagctaagagtaagacttacagggtaggaaacaatggtggaagctctaagatagaatgaccttgactctcgcctaaacaggacaatgctagtttctcatcttgattgaataaaggttgctagaatgtttttcattttagatgagttgtctactctattcaatgaatgatatcttttcctctcgcctaaacgggacattgtaggagtttgtgggaaaccttaaacattatttaggattgtatgtttttgtatttttacttgtcactctgacttgctaagtgctaataatttttgaatgtgtatgattttgtatttaaccacatttgatttctatttattgatatttgtagtatctaatatgactatgaacaaccccatggtgtcactgttcactaacaacgagctttctggagctaactttgtcaaatggaaaaagaacattaatattgaactcatatgtgaaagtgccctgtttgcgttcactgaagaggcacttgagttgccaggtgagaatgcgaccaaggtagtcaaggaaaa

SEQ ID NO: 361670 - DNA, 539 bp, Cannabis indica
cctatggcaaactgaggcggctacttcaacctctagccagactgctgatgttccacatgttcaaacaatagatcctcctgctccagttggcccagaagaaccgaaccaagagcttgggactccaactgcttaaacacttctctttttatctctttattttatatatcttattcggcctcagggccttttctaagacatcatgaccggccaagcagtctttaaacttggaattatttttcatttttcagacaatgggctgacaaggcaacttttaatcctggtgttacgtgcttctgttatccttaatgaatttcattctctgtttataattgtcgtgcaattgtgattgttttattttttaccaaatgctttgtacaggtataggtgccccccaagtgaccgagcagacgtatgactcttggtcacttgtcttttacaaattatattgtttatctgttcggtgttttgggtttgaccaaacctttttgtatgcattgtatggtaaattgaaacatgctgataatttcgactcaatctga

SEQ ID NO: 361671 - DNA, 565 bp, Cannabis indica
taaaattggaaaaaaattgaattttggggaaaaaatcccaaaaaaaggattttcgggaaaaatcccacaaaaatcgcattaggtgaggtggctgtgaggaggctgctagcagcctcagcgcgcggggaaggatggagcccagccgaggtttctcggtggatgcagcctcttggaaggaaacgtgcagggtcctcgtgggcgtgaggctcggcgttagacaatgcttgtccgaggcacacgcgcgcgagcggcttcctagtccgaagcttgttgcgtgcgatttagcatccatgacacccgattttccaaaattcataactttctcaatttttatcggaattaagttccgtaaaaacgaaaattgcttaatttttcacaaggaatccaaataaaatattttgaaaaatagaaaaaatattttttcatggcaaaaggttctgtacaacacatacatttatcaaataacacttaaaccacatgaaaccataccaaatacaacaacaaaacatcgttataattcatatttcatagaaaataaatcataccaatggctctggtgccagtt

SEQ ID NO: 361672 - DNA, 556 bp, Cannabis indica
gtctttaatatattaaaattcatataaaatcacgcatattgaactatataataatatatttcctccgttatacataattatatagttagggttttgctactccatttcttaattccgggtattacagtgcagctcgttgctaatcaacgaggttattgaaaaccgtcaataattaaaattttgcttatttaatttaaacttaacataaaactttttataaaattttgggttcccgtttacaaaatacagttacaaaagtttactacacatttacaaaatatttgtcgcctagcgactaaacaacaaaagccctgatgtcccgaggatcgtacgctccaagccaaaccgccccaacatgtacaatcttcacctgctcgctctcacggctcctcaactttagctttgcccttacctacacatagcaatagcactgtgagtcgacagactcagtaagaaaagcataacataataaacatgctaatatcccggttataattaggcgcccatacacctaaccataaccctaactgaatcaggatcgatcttgacaaagtat

SEQ ID NO: 361673 - DNA, 1437 bp, Cannabis indica
gtaagtttttctcattgctccaacttttgttatttttgtttttcattgtttcaagtttagaaagtttctatattataatatacatatttaaaagagatgatgtgtcgtcctaaaaaattatttgatgttagtttttttttaattggatgatttaactttggtgattttttttaaaaaaatcccacaccacttataaatcattgtaggtttatactttgtggctatatacatgtcactatatcatttattttgattagtagtaaaactaatacaaatgaaactacaaaatctaaaatataattatggatattttattaaaacaatttctttagaatcttgtatcaggttgatttttggatacaacttaaaaataataatttaaatatagttacgaaaatattcaagggatcgctaattgtaaatagggcctagaagatatcagatcgaggtaagaaaaaaatagttaatacttttgttgaattaattgtattaaaactgttgaatatgatagtttcggtaaaatagtatttagtcgatggattgtatggtgatgtcgtaaagtatataataatagttgttaattaatatgaccattctcgtgataacatttgatatgttgacgctgattaattcaaaatcttgaaactcacccaatagaaaaaaaaaataaagctcgagaatactacgagttcagggagatgagtttgagatgtaaaaataaatgagaaaattgaaaatatataaaaagtaaaaaaaaaaaaatctatctatatatattttatgaatatttataattcgattgatttatattatacctattatagttttattaaattttttatttacaaaatacaatttaaagttttcaaattataaaaatgcgacttctcagcaaaaagtaaaaaaataaatgaaaaacaataataaaacatcaacgcaacctataaataaactataaaacaactaaaaataatgagaaattagcatgacaactataaataaattataaaatagtaaaaaaataatttattatttatactaaagtccgtatttttataaataaaaaagtttaaactgtaaaaatgaaaatttaccagtgtcaacatacttttgtaatttttctaaattttttatctatgtaaaaatttcattatttattttaatttttaatatatagtaattataatttttaatttttatatatatatatatatttttatttttataaaattatttccattttaaattatgctatttccatttcgaggttatcctatatctattttataaaaatatatatattcgagattatgctatatctatttttataaatgaataaaaaattaattataaaaatataaagaaataaaataatcaattataaaagtataataaaaaaagtctttaatttgatgttattttttttctcatttttta

SEQ ID NO: 361674 - DNA, 613 bp, Cannabis indica
ttgtatttaaattatttttttatcttttcaaattatacatgaaaatagtatttttgtaaaataaggcaaaatatcggggcgttacaataaagaacaaattgaactcaaacaaatacactaaaaaataaataaattatacccaaaagaattacactcaaatgtatattcatatcaaatatatattcatagactttatgagtttcaaaatgaaattcgaagatgcaagagaacccagaacactaagaacaaagacttgcccaagttgctagaaagtcccgtcaacaaatctagatacgacatcgtctcgttcacccaatgggcatcgttcgtgtacttgagggtagaccgattctgcgtcgcaatcgtactggaataggggtgcctcactcatcaacgcctcgaggtagttcttcgtctcaatcgtatagaacaggagcacaacacctcgaggaatttcttcatcgcaatcgatcggttcatgtttgaggcagaggattcgaggttcgtggagatagagaatttcttcgtccagtcgaccgtcgcttgatttatttgtaccggagtcgaatcggggggcagtggagacaccgaagtggaggcggctttggatgat

SEQ ID NO: 361675 - DNA, 809 bp, Cannabis indica
ttatgtaagtttacattttaattcatttctatttatttctttcaatttattttgtattaaaattaaccatttaatttatttgtttgttttaggagcaaatggttgaaatagcggcaactcaatcagcgcccattgaagatcagcctgatgagactgctgtcgatcctacacaataccctcgagacttgcctgttgtgacgcaagtactcgaggagcgatctcgacatttaagaggctttggccatctccccagactaaagggagttgggtccaaaagagcacctgccacgaattcttcagccccactgactgttacaatggaacagtacgaggctttacagaaaaaagtggaggaagcagagcagaaaactcaatatacgaggcaacaatatgaaacacaacaactctacctgagatgattccaagatcagtttgagtaactttctcgagctgtctcgggtttcaacttgccacccatggatcttgcaccattgcccactcctcctggtgttggatcgtcatcgcctgctcctggtgctggatcgtcatcgcatcctcccgagactcagagaaacaacgacgatgacattactcgcctatagatcattagatattttatataccaattagaactttactttttttatcatccaattcgaacattttttaatgttttgtttatagactaattttagtacaacataatataattaatgtttgtttatcttttaatgtaaatttatgttttttttttcttaaatataaaatataatataattaattttgggtttattaatataaaatataat

SEQ ID NO: 361676 - DNA, 637 bp, Cannabis indica
gaacaaagggcatctccttgctctttctccgactccggcgaacaaagggcatctctttgctctttctccgactccgacgaacaaagagcatctccttgctctttctccgactccgtcgaacaaaggccatcttgttgttatttctcccatgtactatcgaggcaatgatgcacgaaaataaaggtaagtttgaaaatgatattttacacttgttagaaaattaactcatgtgaatactaccactaaattttatacccttatataataatgatgaggatgttttagaaaatataatacttgtgaaatttagtattattttggggtttccattccttataattttggtcatgaatccataaaagagagcaggaattattgtatgacttttcttttttttttttgtttagaattattttactaggatttagatttacaacttgttgtttaacatcttaatatgaatttctaaaataatgtaaataaatacatataaagtttatgatgacagcggaatataatgacttcttccgttcagatctctagcccttaattcctttctatagcagagcattatcaaaatctgaacctgaatctttttctctctcttttttgttaattggattcttcagagtcttac

SEQ ID NO: 361677 - DNA, 601 bp, Cannabis indica
cccgacatgtataatcttcacctactcgctctcacggctcctcagctttaactttgcccttacctacacatggaaacagcactgtgagtcgacagactcagtaagaaaagcataacataaaacatagaaacatctcgggttataactaggtgcccatacacccgatcataaccctatcctcgtgtcccacacggtcttgagtctataacgttcatacgaaaatactatcgaccataatgtcagcctatatttaatatgctagtcatactctagccttattgatgtgacagcgtcgatcaatatttcagtcaacatatatttattagtaatcattgcaattctaagtatactattactgctatcaatgtattctaaaaggaaatactaacatgtatgctaaacatgtaataatatatgcatgaaattatactaatcttaccttgattctgaattcagctatgccggccaacctgagtagaacaactgctcagagaattacaggctcctaaatcacatcgataacaacacgaataagtggcacgctaaatcacaaccggcgacttaggttttaaccaaaacctatctactgtaacttaacatg

SEQ ID NO: 361678 - DNA, 570 bp, Cannabis indica
tttaagaatatgaattggaaaaaaaaaagttaaaaaaatttagtacaattaaagatataaattttatataaaataaaaattattaaaatagggtgcttttagaaaattttggggtgtaaataaaatttcccttaagagaccaataaaattacatctcaaccattattttaaggaaatggccccaaatacaaaaaattaattaataaaaattcatttattacatattatctttttaaaaaatacatatataataacaaaattaagttatataaatttgttattacaactattaaattataatatattatattattaaatatatacgacaataattaatatcataacaaaattataacaaaattaaaattaatatttaataaatataatatatataagactaacaaaattatatgtgtgcctatataactgaaattcttagtttacgataaatttatgggtagctttttatttttatttaataaaataataaaatattatttatatataacaaaataataataaaacaaatcccattaatatttgaatatttgaattgatatttcatattat

SEQ ID NO: 361679 - DNA, 1577 bp, Cannabis indica
agatttgtatttttaatttttctttttatcttacaccatttaagtaatgtttactttaagtatgagaatatctaatttttagtttattttttggattaacttaagaacatatttaaatcattaagctttcttaaacactaatatattgcattcggtattcacttttaatttgacaacattataaactataatatttagatacacataataataatctcacctaataactaacaatattttttctttaatttttaatcgtatcactttcaaataacataaaaaaagcttagcataaaatttagtatacgtgcctcgcacgtagtttttttgctagtatatatatatatatatatgattctatgtacttttagatatataaataaataaaaataatatttttcgtaaataatggtcctattattaaatttaagagtcttgtaaaggaaaaaaaaaaagtaaaatatatacatacatatccataaatcgatcgtgacgtattgtggaaactgtatttaaaattaacagaatattacatcactttggtctcctgatggtttaagtaattatacaaaaaaaaaaaaaacaaactaaatatgatttatatatacataaaacttgtattgaaaaggaagactcatgaataatgaatatatatatataattatatatactacacaacaaaaaaatgtttcaatagaaaataattaataaattcatgaaaatatttattaaaaaaaacgatgaataacattggatgaacatatacatttaagagtgaagagtaaattgaatgaaaaataaccttataaatgatagtctgtcgtctactgtttttggtgcagcagatgaacgtcaaatggagtgtaagagtcatgaattaattgttaaatttatttatgaattaattgtgaaattaatttttacaataagagaaatcattacacatgtaaatggaagatcaaagagaataaagtatggttatcagttataatataaggtaggatcatcagttataatatattaatgatcataattattatttatacaagcatatatataaattaagtttttaacttgtgagttacacgcacttacacatgagctcttgattatcatcacatctatatagatagtattttaatttaaaaatttaaaatgatatactaacaaaaaaaaaaatgaaaagacacatgcattattacttttatttaattacttttttaatagcttgtcattaatgtaattagtattaaatagaaaaaatatttaaaaaagtctaaaaattagaaaaagagaaaaaaaaaatagaataaattaatagatttggaataactttagaatgtgacatttatcctatatttataaaatttatatttataggttactaatatttttttaaaaaataatatatagatactatgaaaactttcagtgtgcattctttaaagttgaccataacaactcaaattatgtatctattaaacaaaatgtaaattataagtggctcaaaataacttataataaacacataataaatatataaatctaagaaagaaaaaattgaattattgacacat

SEQ ID NO: 361680 - DNA, 354 bp, Cannabis indica
cattcttttcttatgttttcattcctcccaaccaaacgccacctaagtgcggatttcatattttgaatccaatccaatctgcacaataactcaaatccattccaatctaatccgaataagtgcggattagatcggttttggattggttactttttaatattaaattatttaatatttatgaaaaaatatattttttttcacataattagcaataaaataaattaaagtattgttattttatgtctccaacaataacaaataacaaatttaaaaaaagaacaaaaattgtatgtataaagaaatgtttaattttgctttgaattgtacgtagaaaaaaaattataaataaaaata

SEQ ID NO: 361681 - DNA, 556 bp, Cannabis indica
cagatcaacgggaagcatggtgatttgcgggatcacttggacaaaaagaaacacgcaccggcagtctccgcaggaacgctaaagaaggaatcctggctgagctagccatactacgcaaggatattgcgcgagtctcgcggagacaaaatggggatgactcagactctgactgggaggaccgggagtagtgcgccagacgaattttggaggcgaaactccccaaaaattttaagatgcccgaaatggcaacttacaccggggacacggacccgagcgatcatttgtctcggttcaaccgagtaatgacggtcatgagagtcagcaatgacgccaagtgcttatgctttccaataacgttaagtgggtccgctgaggaatggttcaaaaagttggaaccaggatctgtggactgctggaacaagttgcaagttagtttccggagagagtttgttcccgcaagaaagattaatctcgaagtcagtgctctgactaacatcaagcaactacccacagagacattgaaaaatttcataaagaggttcaaggtagaagcctc

SEQ ID NO: 361682 - DNA, 359 bp, Cannabis indica
ggtatacttattattttgtggagtataaatagaatttcttaatatatatgtatagggtttatttactggaagcctatttgtttctacctcatcaaatggggaagtattttgggccaatgagaatgaaatgagtgaacggtacatgttatggtagtatatctatgtacatgtggcttttttttcagtttttttttttttttttttgagttgaaataattttctttatatttaaataatttgttatttaaaaataatagttttttaataaaaagatgtgatttaggagcaaatatcactcaataaaatatttttaaacaaaaatattaatactttataaatattaataattatgtggatgt

SEQ ID NO: 361683 - DNA, 347 bp, Cannabis indica
gggcataaaacccaacatattaccctagtgatatatgtgtgtaaatgccatgccttattaaatgtaatgagattcagggattatacgcttaaggcataatcaggttggactcggtaaccataaccgagatgaaccatgctaaggccttattgtattcagacgtgtgagagcaacacgtaggctacgccacgtagatataaaacgatttgtgagtgcaacacataggtctacaccacgtagacataaataggcatgtgagtataacatgtaggtctgtgacacacagacatatatgaatggcattaatgtttaaatagtatgatgagcatattatatttgttatgatt

SEQ ID NO: 361684 - DNA, 534 bp, Cannabis indica
gacaaaagtccttaaatttaacaatctcaatagttcagagggaatttttaacggcaaaaaaatttaaggatatagtttggtatatgtcaaagttcggggaaaaaattgctaattagctttattaataattagggaactatgctttattttttttagtattaatagagtgatataatataaaatataaaattgtgatgatagaattataaaaagaaaaaaaaatgttaacattatagaatgatggtattttacaaaatatgttaaaaaaaatgtagttatttgtgacaaataaaaaaaaaaaagatagagataacatagaatatatgtatttaaaattaaacacaagataaagagaacaactcaatttatctaaacatgtattatttatctcctttggaacgccgtattaggtcgtattgtattgtattatattatattaaattatattttaggtaatatttttatgtaaaactatatgtggtattaatttttatggacacctaaatatataatattttagtataaattaaagtt

SEQ ID NO: 361685 - DNA, 523 bp, Cannabis indica
atttatgccgcaatctaccctatatatttatagcacattgttttggttaaattaaatctaaactacattatatattaataagaatatagtaacatattattttacacagttaaacataattaatatattttttttacaattatattttcttttataatataacaaacttatttgttaacacctctgttagtcatagggactatttagaatgggttaatgctagtaagagaatggtcatgtaaaatattattttgtttgttttgagggtttagccttgaattgttactccctaattagtaatataactacccttgaggagggtaatgttaataccttaaaaagggtagggttgaattattaccttccattatattaatttgaatagtatttttgaattaataaataaatttaaataccaataatattatcatttattataaataaaatattataatatatatttagtttgtgagattagttttttttttaactgagttatttttatattattagcaataacata

SEQ ID NO: 361686 - DNA, 528 bp, Cannabis indica
gcaacaaacatttcccaattttgagtttcgtagtgggaacacttgggtcaatttcaatttcttctagttcttcccccggccctacttgacaatgctcttccccttatccaaactctgactggaggattcttcctttttgaccttagttagggcatggatgtaacattcccgtgtaatttgttgattccctttcaggctccataccccattctttgttaggaacttgacgaacaaatggaatattgatgtaacaacttttaagtcatgtaaggctggtcagctcaacatgacgttaaaggctgatgaaacatcaagtaccagaaattgtgccaccacatttatgctctttggagctttcccaacagtgaggggtaggcaaatttgccctaaaggtgcaacactctgcccagagaaaccatatacgggctggagacaggggatcagatctttagttggagccccatttttttgtatggtgttttaaataggaaattttatgaggctccattatctatcatagttcaggcc

SEQ ID NO: 361687 - DNA, 713 bp, Cannabis indica
tggtctagtgtggcccaaacatgtacattttttgtccagctcctgcactcatggctgatcaacaacagtcttaccctttcctgcacagtagagcacccgtgagccaagcccagcaagacagtataaaatatatcaataatatgctcatcatataatataaacagtaatgccatttaaatttgtctgtgtgtcacagacctacatgttgggctcacatgcctgtttatgtttacgtgacgtaaacctacgtgttactctcacacgtctatttatgtctacgtggcatagacctacgtgttgctctcacacgtctaaatacaataaggccttagaatggttcatctcggttatggttaccgagtccaacccgattatgcattaaacgcataacccttaaatctcaatataattatatacttagcatggcatagcatttactcaacttatatcactagggtaataaccctaggctattaaccgctcatattagggtaataaccctaatcccggttacaattactcacacatatcatattcaacataagcgccaccgcgcatactctacgtgcaaactgctgtcttacctgatgttttgcaataacagagattccaaacccctgggtgctcctgatcaagtgtcggtaatcctagtcacacaactcgggatttcacaaatagggttaatccctaatttcactttcacataatataaa

SEQ ID NO: 361688 - DNA, 607 bp, Cannabis indica
atataataggtaatcaatttttttttaatagaatcaatgttttattatatatttccgtttttataatttattagtcaaatgtaatttatatgcttttattagtcacaattattaatctgaatgttgttttcacattttgttttttatttgtattttattcactctatattatccaaactaaagccataataaactctaattgtttcataaaatgtatatataatttttttaacgtaacaaattaatagagtctatataattatggtgttataatttaattattctaaattataaaataagttaaacataataaaataattttgaaacgtaattattattagtcaaatgtaatttatatgcttttattagtcacaattatttctcttaatgttgttttcacattttgttttttatttgtattttattcactctatattgtccaaactaaagccataataaactctaattgttttatgaaaacgtatatataattttttcaacgtgacaaattaatagagtctatataactatggtgttataatttaattattctaaattataaaaaaagttaaacataataaaataattttgaaacgtaattattatt

SEQ ID NO: 361689 - DNA, 745 bp, Cannabis indica
ggatgttaattcaacatacttgttagtaaatctagatcctggtaaatattccctgcaacatatttaggatgttaattcaagatacttgtagtaaatctagatcctgttaaaatatttttaacaactggccttaaagtcatggtaatgatttactttcatgtaatatggatttaaaacgatgaatattatttttgtgttgattttggatatgttcatgttggtttatgtgctatttgatgaatgtatgtaatttacaaaaattttccatgaaaataatcctatttccattctaaagataatttatttggattctttatgaaaaattaagcaattttggtttttacggaactcgattccaataaaaaaattgagaaagatatagaggtttgaaaaattgggtcaattgggtgtcgagggtggtgcaccatcgcaccagaccctcagagaagacgctggtccgcgcgtgtaatcagacatgttttgtctgaattcctcagtcaggactgccttcagacacgcatccctcgcccatggagaccctacatgcgccgagatttctcggcatgacaccctgcaaactccatccctgtgtgcgcgtatgggctgtttgcagccttcttgggctacacgtgcagccacctgggcagcaatacccaaaatccattttttgtggattttttccacaaatttctttccaatttcaaaccctaaaaatcaaaataaaatattatttttaatatttaaa

SEQ ID NO: 361690 - DNA, 589 bp, Cannabis indica
agcaaacaatcacttaaaaattcatcttccatcttgttgcgaagtgtagtcttcactatattcatagctgaaaaagatcgttctgtggtagctgtagaaactggaagtgtaagaataagagttatcactttatacacaattggaaaaatctctgcttttctagtttttaccaaccactgacataaatcagaaatggttgccaaaacattaaaatcaggaagttctcgtacatgagcaaaatgttcaaattgcgtccttagttgtaccatctcgtattctgtaaaatcttttgggtaaaatttttgtaccaacttgcaaatgtcatcaattctaaatgatgtgtgcatctctcttggatctaaagctgaactgagaatgagtaactccactgtgatatcattgaatttgttgtttaattcttgtagttgaaagtctatcactgcattgaaaagatcaactctgtaataatgctccactgtaattgcatcttgttgaccacgacttcttcctctttttgcagtataatgagcattaaaatctggcacaggtatattaacaagctcgcaaaaaagatttcacctcatcaact

SEQ ID NO: 361691 - DNA, 626 bp, Cannabis indica
tgattatatatgttgtagttttataagatcaagtattagtaaatatttttttaaaattttgaataatttatagtgttagaatacaataatatgtgcaacgaaatatttaaatattatcgaaaatttcagattaaaactttttattagtatcataatagataaaaaatataccgaaatgactcaataatcactacgaaaaaataattacttctagtaataattttttatcacaacataatttttttttgattaaatgtaatttttattcacaataaaaaattacttgtgattaaaatataatatttaaatataaattgttactaatttaattttagtcacaacaagtattatgactaagaacacatttagtcacaacaagttgtaatttttataactaataatacatttagctacgaatcttttactcataatataaaaataataatttataattagtcacaacttttttacttttagtcacaatttttaagtaagatttttttatagtaaatatactatatatatatggctaattaggatttttgcccctgaacttttaaggtcgttaaaaatgccccctaaactattgagattattggatttagggacttttgtctaatttcatt

SEQ ID NO: 361692 - DNA, 211 bp, Cannabis indica
ggtcaccctgaagaaaaagctgctggcctgcaaaaacaactggcccgaagagtcgccaagagtgttatgggcctaccagaaacgttattcccgtctcacaggagaacgacttatgatccagctacaaaccaagctttactacaagaagcactggatcaagttgaagaactctaggacgagtcacaaatacgaatggcagcttatcaaaaga

SEQ ID NO: 361693 - DNA, 517 bp, Cannabis indica
cacgtacaaatctcttgtgtcaagtaatttaattttctgtaattatttttatattttgctggttctggtttgtttctgcaaaactgttttctgcggtaacaggattgcattctgttgctgcagactattacagttatatatttattatatttctgtaatatttattgatatttgcaaaaattttatttttcataccttaagccacattttaagagaaatgctaaagggcaccagtggtgcctaacaccttcctatgtgtcaatatcgttattggtccaactaagtatcgggtcccatataatttaatataatagcttttagagagtatcgctagctaatcgcaatgcgacacgtcgagaaggtgctaggcgctactggtgcctaatagcaatgctcaatatatctatatggtaactcatgtattaatattgaaatttacttactaaatataactgatagttaattactcccctaatttaaaccaatatatatatatacgggtgactattcaatggtt

SEQ ID NO: 361694 - DNA, 527 bp, Cannabis indica
aaaaaacagataaagggggaaaatgggaaataaattcccacttaagggaagttaccgtaatcatcagatgatgaagaatagagatacatcatataggaataagaaagaattggaaaagatgggtcattaactgctaatgatgtgtctcgaaaccatgaaccaccaaattcaaaagcatgcaatttttcaaattgggttaagaccaaaataccctttgtaatcatttgaaaaatactttttattaaaaaaaaactttttaaggggcaattgttatacccaaaattccactatacttcagagcgtgacacgtgtcaatcaagtggaatatataccaccagatataataatgttaatatcattaaatgcaaaatagaataactcattaaatatagaattaatataatatattcataacctgctgactgtatagtcttaggcgagacaaggatacataaactatcaattcatgtattgacgagagaccatcttgccttggaaggcataatcccgtggaaattacggacaat

SEQ ID NO: 361695 - DNA, 1040 bp, Cannabis indica
ggaacccgggcttggacaatacccatagtcggtttcttgatcggggactcaaagaaggacctgaagctggagcaggacctagacccagacccaaacctgggacccaaaactgaaacctgaaccaaaacattatcaggaccttggaacatgatcgggatagtgaccaggatctggaccaagacttggatccacaactagaccagaacccagccccaaaactcgtgctcgaactcagtcccggacccaaactaagattgagacttcaacctgaactcgaactcgaactcgggactcgatcctagacctagacgaagcccctaacctcaaatgggattcagaccaggacattgaaacgaacccagacccggaccggaataccgactcagacccagaccaggatcaaaacacaggacctggaccacaagacgcagaccctgacccgagacacgaacctcgactgaaactggaatctaaaaaacccgtcacccgtactcaaactaagactcagaccgcgaccacaacctggacccagacccggacccagaaccaaacccagacccgaaatcagaattggaactatgactagaatccatagctgagagcagaaccgaacccaaaccataacccaaattcaggaaagaacttgacagagaccttgactaggacagggacctgagacctgggacccgaacatagaccgagacctggactcgacctagtcctaaacccttgctggaacctgatacccatgatccagacaaggatccaaaccctgacaaggacccaaacctgaacccagaccatgattgggacctagaccgggacctagactaaaaccaagactccggacccgaactcgaacctagacccaaaccaagacctaggaaccagacacagatgggggacatagaccagggacccaggcctcgaaacccaaacctagatctaaattcgagattcgaacccgaaccaggacctgatttggacccaggaattcaaagtcagacccagacccacaacaaaaacctgccctggaccca

SEQ ID NO: 361696 - DNA, 565 bp, Cannabis indica
ataggctgcccaacttctgaacatcccatggccggccagcctttggcctgacaggatttcggtgcgcagctttcatacgtggacaacaaacaagatcacaaattgggccttaactacccacaaaaatacagggaaaatatttatttttgaggggcattttagtcatttgtattttattaatttaatatgtaaataatagtttattttacctatttctaaaaggatttgaaaggtgtaagctctcttatataaagagccttagtcaaaccctaaaaccgtaagtcattaagtctcaaactcaaagctataagtcttataactcatatctttctctcacacgcccattgctcttctctaacttgagatttctcaactctgattcctacattgcaacctttagagagctacttcagatcccatcactatagtgatctgagtagtattatctctcggtatcaatacagctaaaagggaagtaggtatttacccgctaactaagagggtcaaacctctataaaattctatgtctatctactttattcttctaattgtgtaacacgtggca

SEQ ID NO: 361697 - DNA, 702 bp, Cannabis indica
gaacccttatttataagaaaatatggtattttttaaaatcagtaaaaaaaattgtataatttcacaagggaaatattttttttgagcccctgatctaggtgggtcctaggcacaggcctagcccgcctatgcctagggccgagcctgtatactttcacattgttcttaatttttgtgcatggtgtaattattttgttttattatttttgcaacaaattattaagttatctattattatatatattttttaaaaaatcataagttaatctcttacttttaatattctatgatattttatcataagtttctgagagattttttctccatttagtgacactctctctccatgcatctccatctaaccatcataaccatacatatattttttatgtacatattttttttcttcatcttattctttttttttctttcatgtcaaattttcctttttgatttcaaaaattcgattcgggaccatcaaattataaccactcattcatactttctcttcatctctattttattattataattatactctatgtatatatggcaaatttattgagaatatagtgataacataacgactttgaatatagtgtcatctataagtgagagacggtgatgacaacaattttaaaatgatataatatgaatgtttttttttttttatatataaatttatcaattgtactttaaaat

SEQ ID NO: 361698 - DNA, 694 bp, Cannabis indica
tgctgatttagtgagtctgtcaataatcacacagacaaaatcctattgtttgttattcttcggtaaccccatcacaaaatccatagcaatgtcttcccatttccactcaagaacatcaagagattgcaacagtcctgcaggtctctagtgttgggccttaactccctggcaggtaaggcattttgctacaaattctactatatcatttttcatacacggccaccaatacctacttttcatattgttgtacattttggttgaccctgggtgtaaagaatagggtgtagtgtgcgcctcttgtaagatttttgattgcaactctgctttattaggtacacacacccttgccttgtatagtagaatgtcctcttcattaattgagaagtccccgactttctcattttgtagttcgacccgcttcttgattaaaaactcatcttgggcttgtttctttgatcttctctaataaatttgattcaattgtgaggttagttagctttcctgttactaactgtatcccagatctctcgatttcctcttgcaacgacacttttaatgcccttaacattgacaagcttgcatagttgcgtctgctaagtgcatccgccactacgttagcctttctaggatggtatagtatctcacaatagtaatcttttaccagttccaaccaccgcctctgtctcatgttgag

SEQ ID NO: 361699 - DNA, 771 bp, Cannabis indica
cttttttgtctaagatatatattttatatttttgctgacatacctagactccagacccggacctaaaccaggacacagacctcagacccagactcggacttcgaacccagacccatacctagaccccggacccagatccgaactcagacaaagaccaagacttaaaccctagaccccgtacctggacctggacccagaccatggatcctcgaccccagacccggacctcaaacccaaaccccagacccgaaccaagaccccaaatctaaacccagactcagaccccagagcccgaacccgaacccaaaactcgaacccttgactcggacccaaccctagaattcagaccctggacccgaaccaagaccaaggagactcgaacccacacttggaccttagacccgaactcggacctagactcagatcggaccccgtacctagacccagacccgaactcgaaccccagactcgggcctcaaaccccaaacctagaccagaacccgaaccttgaaccaagaccaagactcagacccgaactcaaaccctaaacccagactcgaacccatacccaaaccctggacctggaccccagacctagacctagaccccgaaccccaaacccgaaccctggcctcgaaacctagacctggacccggatctagaccccggacctcaaaccgagaccaagacctaggaccgaacttggacctaggaccccggactcggacccaaacctagactcccactacaacatataacactaatagcggc

SEQ ID NO: 361700 - DNA, 661 bp, Cannabis indica
gaaagcacttgattctttattttggatgaaaatttaaaaaaataatgttgacttgtgtattgaaattaacgttctattgttattatgaaaatgaaatcaaaataagtaggagtgttcataaaaaccgaaaaaccgaaaccgaccatcaaaccgaccaaaccgtaaccgaatttttggttccacgtcatcaccgaattcggcggtcgttttggttttgaaatgaaaaaatagtttaaccagaaaactgccaaaaactgcctaaaaccaccaaaccgaaaatcgccaaaaaccgtacggtcggttttatacggttataatttctaaacggtcggttataaaattgcaaaaaccgaccataaccgaccgattttcaccctaaaactaaagtattgaaattaacattaaattaacataagctggctccaagtcgatttgtttctttcccgaaacgcacttgattctttatttttggatggagacgaataaaatgcttaggatacttcttcaatattgtgattggaagcaccccaggttgataatatgtaaacctgagtgctaggtgctcaaaacttgaaagtgttttgattctaattctaatacctcaaatatgttcgtgacaagtctgattcatgtcaaagtagaaagtttgaggcatttgcac

SEQ ID NO: 361701 - DNA, 735 bp, Cannabis indica
atatgttttctcaaaataaaaaaaatatatatatcagatattttaaataacttatacactagaatagattgggaaaagaaaagtagaatcatcacagcaaaaagtaaaaagattctcccttaaaaaaatatacatgtatacttaaatcaactatttgcttttttcccaacaacgtcaaaataaaaaaaatatttaataaatattaatatttttttaataatttttaaaaatattatttatttttataaaaaagaataaaaaaatttattttttctaaagtccaaattaacttaggttgctctgcctttacagtaactattttgatgtgaatttctggcacaaaagtacattttttaacatattgagatttctaattcataatgaaatgaaatactggttgtaggttcaacaactgtgagcttcgttcattaattattgttgataagaggtgagattattgtctccaaattcttgaactaattaattacttatcattttaattccttttttatagaatcatgccatgttataattattaatgtgtgacttattatggtaatgatttaaaattatgggagtcacaagagaatgttactttaggagaccttatataggtatattaatatattcttaatgcaattttttatatagtgtttaagagcatctctaatggtagtattctttgaagatgttttatatctccacatcatccaaaatataatattatattttatt

SEQ ID NO: 361702 - DNA, 651 bp, Cannabis indica
tatttttataattaaagaactttgtgaaaagtaaaattaaaaaactgattttatataaaagtttaaaaaaccaaataaaaaaagtaccaaatttgaaaaaatccctaattaattgttaatttggttgggattaccgattatttaggaagagagatattaattaggttatatgtaaggggtcgcaatattaggaggaataggttactgtgggaaacatgaatacgtaaaaaataaataaagattttttttaaaaaaaaattgtaattatatgaaataattagttttttatgataaaattaaaatgatatatattattatttttttgtcatttttaattagagtttttacaccacatacttaaatttttaattttttattattttactgtgaggtgaaattatttttaaaaacactgtgtaaaactgtaaattttagactgtgctttgtgtaaagttcttacgcttgttccgcggttgtattttagttgttctactgttgttttaattgttctgctttattgttttacgattattttataaaaagatggtattttgtaaaaaaatcgtgtgacggtagaattgtaaatttttgtataaaatccagtaatttttgtaaaaattcctttttaattggccatggacttaacttaat

SEQ ID NO: 361703 - DNA, 592 bp, Cannabis indica
tcatcacctgacatcaatcttatttcggacataacagcttttccttttctgagcacgggaggggatggccgaacaggtgaaatgggctccctcatgcgaatcgcatgttcaataggcctgggcgaggccaggaggttcttcttcctcttcagtggagtcacctgctcttcctcagcatcatcctcgggattcaagggctcctgagcatactgctcagcccttacacctcccttcaacttagcttcacgcttaagttgaatgagttcattctcctgatgagctcgttcggtccggctagcaccagatttcctcttcttccccgtcatggacttagaagtaaagtccttgggatagagccggtacctcacaaagttatcttcgaaggtcaactgtataatatttcggtcttcccccggaagttgggcaagtttttgagctctgtccctaagagcaagagtgaggggagggtggtgataggttggaatctactggaaccgagtttgagtgatgcccgtgccatgtaccatgaagtacttgttagaaatattttaccaggatctagatttactaacaagtatgtttcattaacatc

SEQ ID NO: 361704 - DNA, 545 bp, Cannabis indica
tttttttaaaaaaaaataactaaaattaatatttttgtgatttaaactacttagtaacaatgtgtaaggcgaaaatataaaattttattctataaagatcactttaacctaattaaatatattttatatctaatactataattcttattaaaatttgaagtgttgacatgatataaatatgtaattgctccactttaattttatttccactacaacagttttttatattaccggcggaggcatccgccggttttaataagccagacgccggtaataattaataccggcggaatccgccggtaataatccgctgcgattaattggtcgctattagtggttattagcgacgaaaatggtattccgccggtaataatattaatatcggcggattaatagcggtggggtccgccagtattaatgtctgcacttttacacgcagatgcattaataccggcggaccccaatcattgttccgccagtattaatatttttaaatattaaaaaaaagccattattctgattatttaatataattaaattaatta

SEQ ID NO: 361705 - DNA, 533 bp, Cannabis indica
taaaaataggaccttaagcttaacttttaacaacttttttttaatacaaccaacttaaagacaattcctaataataacagatacaaaaaaaatgtaaacagttttgtcatagcacttttagatcggattataattaaactttaaaaatcaattcagggtcctatttgtactattttaaaaaatacatggtccattttgtcatttaacaaaacacagggtctaattggtaacttttgcaaaacacagggtctaaaatagtatttaccctaaattatatgataatataatttcacattaatatataattaaactagttaggtttgctaatccggtttcttaaaccttagggtatcacattcttctcttattatatatgtattatattaatgtgttgtattctttttcttctacctttcatatatatatatatgcaatatatatagtgtatatatatgtgtattgtaatactaggagaaaactacgtgcaaggcacgtatacttaattttatgataggtgttttataatataaatg

SEQ ID NO: 361706 - DNA, 752 bp, Cannabis indica
taacaaaataggaaatattaattttttaatatttaattaatgattataaatatcaactattagatatttgatctaatgatcaagaataaaatacccattaagagcggctgggggttttgtgcatacagaggaggaaattagtgcagaaatagttcaatatttttctggtttattctcttcaaatggggttgataatgaggctttgaaccatgtaatttccactgttgatacagccataacacctgatcaaaaccagcagctgttgctgccgtttacagctactgaagtagacaatgcactcaaatctatggctcccgataaagcacctggtatagatggaatgtcagcaatgtttttccaacattattgggatatagttgggcctcttgttactcaaaatgtgctgaaaattctgaatgaaggtgaagatatggattccatcaactcggctttaattacccttattccaaaggttgatcatcctaagcttgtgagtgaatttagacccatcagtttatgcacggttctttataagttagtgtccaaagttattgcagccagatttaaagatgttttgccctatgtgatatctcaaaaccaaagtgcttttctaccaaatcggttaatcacagataatgttcttcttgcttttgaactggtacattgtcttaagaacaaaaaaagaggagaatgggttatgcagctttaaaacttgatatgagtaaagcttttgaccgtgttgaatggtcttt

SEQ ID NO: 361707 - DNA, 732 bp, Cannabis indica
ctgataaggaaaataacctgcatttacataagtatgtcaaggccgatcaaaatcagagaggtgataataaccaagacttgctacctccactagtagatgggcatctgcaagtcattgttggaggcccacacatagttggagattcgggcaatgctcgggagaggtatgcccgaacagcatagcacgaagaagaacaagtgatcctggccgtagaagaaagaaagccttaaatcccacatgcaggagggcccaccataacattcaatgaagaagatggcgtcaagatcaggtttccgcacaatgacccgctggtcgtagaggtccagatagccaacaagatgggggccagaaccatgatagataatggagcctcttccaacatctaattcaaaactgcctatgagaagatggggctcctgctcaaggatctagccccttgtctcctgcctgtatatggtttctccggccaaggagtcgcacctctaggacaaattcgcctacccctcactgttggacaagctccgacgagcatgactataagggcacagtttctgatattagttgttccttcagcctttaacgccatgataggccgaccagctttgtatgacttaaaggctgtcacatcgatattccactcatgcctgaagtttccaacgaagaatggtgtagggtgtatgactgctcgggaatgttataaccttgcagcggcaaggctaagaaggaagtatc

SEQ ID NO: 361708 - DNA, 955 bp, Cannabis indica
tttttctaagttgctttgaggttttaatctgactgctcttttcttttggttttcgcagatagaccgtctcgtcccacactcgacgcgactcgctgagaaacagcagaaattcttggaagccttcctgtacaagatcgcgactggagattattatgtacgactgctaagcttcgcgaacataaactgattcctgagaacgcgagtctttggagagagccggtgtataaggaaccttttgaaaagcagcaagagcgaattgataaacgcctttctaaacaaactcctcgaccatcatcaggtattttaaactttaggtgttggaattttatccctagttaattaacccttgttgtttttttttgtaatcgcagaaatgaccttcctaaagtctgacaagtcatcttcagaggagttgcttcctcgtgctgcggagttagcttcgcagttcatggctacgtttgcgaaggcttttgctgtagggcccaaagaagttgaaatcgcgaagaagcatattgctcagcttcaagaagatgttaagaagctgaagcaggatgcgtcttccaaagccaaggaactagaagaactctgtaaggccaaggagcaggtcgagcttgaagccaagtcgaagattgaagagatgtgtcgcgacctggaaactgagaaggagaacggcaagaaacagtacgaccaggcggtttcggacaacatctatactactctttccaagattccagacttcgacttctcaattcttagagcgaaagccgcagaaatggccgaggcttttcgcgctatgtcacccacaccaactcaaggtggtggagggaaccttctcgaggagactgaagtcgcgaaggtggaggaggttgagaacgaggtggccagtaaaggcgcggatgaatctgttcctgttgctcccaacgcttgatttttctcttctatgtttgaactattt

SEQ ID NO: 361709 - DNA, 998 bp, Cannabis indica
aatagtttacccatggaatggggcagtgtagcattggaaataggataagttcaaaaatacttttttttttttatatatccattaatcaaaaatactttcatattatattttattaaaatatatctattttttttttaagtgggttgcccaatatatctttactctagcatataatttacattaacttaaaggagagataaaaattaaaacaagcaaaataaaatggatatacaatgtaatttcctcattagaaatcttctattacaatctcatattacaccatcttcaattcttcaatggatcaaatttgatttcaaaaaataaatcaaacctacatttagcaattatgtttcattttgtggacaatattacatactattattatttgaataatcaatatttttgtttccatcaactttagacattatttaactcattacttgatcatactcttaaaatatacaatttgttaaaaaaatttcctagtcatagaacagttacataattatatctcttttattaaattccatttattttttcattaaaaattaaaatttttatcccataaactttgaacaatataaaattttgtcccctttttattttttttttaaaaaataaaatttataatgctctattaattctgaaaaaattaacaaaaattattaaaaatctaataaaaatattttttaaaaaaattaaattattcctaaatttttttcaatctttattttatttacaaacacatatcttaaaaaatcaaaaccaaattccaataaataatttcaacaaacgaagatttttttgaagaaaaaaattaaatttatttatacttataaacttatattttaaaaaataagggccttttttttttacattttttacactttcaaaacagtttttatttttttatttttatattttacagattctacaaagaaacctctattgcaactagcgctgcaaccctaaattgcaacaaaaaaatcgtaatgaaa

SEQ ID NO: 361710 - DNA, 558 bp, Cannabis indica
ttgaagggtagaacggtaaatttgtcccgattcagtgtaaatcatctatagaggatctttgactattagcattgtaacaatggataatcataacgtactatatcgttgtacatataaagcgttctatataactgatagtgctattcaattccaaatctataatggcgcaaggtgaaaataataagtttggaatttacttagtgaattttagatctacttattggaagctcggttatataggcccatggtcctctaactatttgagataatactgcttccagactcagttaattggttttagttaatcaattataattctaaaattagactatgtcctatttaagaatttttactaagcaagggcttaattgtgaagaaaagaagtttcggggtcaatttgttaaataagagactttgtatggtctaattaataaataacataaatgataattttatttgataattaattataattattaaataaatagtcttggcatttataggattgaattggaaaatatagaattattgaaagaagaataagtggttgaaataaag

SEQ ID NO: 361711 - DNA, 923 bp, Cannabis indica
aaaaaaatagttaccccaattccaaacagtgttcgagaggtatgaaaggagtgaaacattagacggatcattccttttagcgtggcattagagcatctccaatagtagcattctttgaagatgctctatatctccacatcatccaaaatataatattttattttatttttcttatacattatttttggcacttttacttttaaaatcactccaatagtataatactttttaaaaatactataattatgatatcacatattgttatgtatataagttttttttctttattaaactattatatatatatatattgcacttttaatattttattgtataaaaaagacatagcatcaatcccattgtgtggcatccatgccattgtgtggcatcaatggaaatttcaagaatagcattcttttatctccaatggtatagtatctctatattttgccacataagctttccacctcatcaagcattctccaaaatattagcattggagatgctcttacatgcattttggattgtggttgcccccttctaaaaatacatctccaattggttcctcattttcttactttgcttgctgattgcgccgtcagctttgctgttggccacatttccatttccagctgttgagcttgttataggttttagttttaagttagtctttagtttcattgaatctgtaacaatataaataccactgtattaagttgtccttaaaaagtcgcttttaataatttgcgtctaaaaatatgatttgggacgataaaaaagtcacctgtaattatgggcgacaaaaaatataatctatgaatttttgaattttacttttagaggtgacataataccttaaggtttaagaaccggattagcaatcctaactaaattaattatgtattaatgaaaaattatattat

SEQ ID NO: 361712 - DNA, 891 bp, Cannabis indica
tggccttggcagtagcctcgccctcggccctcaacgcttcctggtgcttcgcctccagcctatccctccgaagaacctcctctcgaatcatcgcttccgcctgggcttccctttgcttagcctcttcttcgaacttggccttagcaagagcctcctgctgcgcagcctcctcctggaacgcccgcctttcagcagaaaagtcctgcaggaccttcacgacctcgtctatgcccccaaattcggacaagacaaagccatgattaattacggagggatcctaacccactccgtgagaagctccgggtgttccacagcaaggaacccggaggagtagaagaagcggtgacggtactccttgacgtgtttttgctggttgaagaggaccgggccctcattcaaagggtgggcccggaagccgtaaaagccgtccttaagtttttcccccttcttggggacagaaacgagttcataaaaatacaatatctctgccggactgggagagccccagccccgggtagagtaaaaaataaataagcctgaaagcaggcggtaagcttgtggaataagttggtatggcgcaaggccgacaaatacaaggaaattaatgaaataatcctgaaggggaagcatagccccggtcatcaaatgcgtctggctccaagctccgaagcctccgtaattgtgatagggcgtctccacgtcacggggcggccggtggtacgtcccggaagtagcaggcttgatgccggccaccaccacaatgtgctccagctgatgagggcaagttaaggtagagtgaagctcgaccgcttcccaccccgtggcacggggcttatacccctcctgggcgacgggacccatcatcacctcttccagggtggccaggcgctt

SEQ ID NO: 361713 - DNA, 962 bp, Cannabis indica
aaacccaaatgccaaagttgcactatttgtacccttgtaaatgagggttcatatcccatgtgggactctttccaactcacacacactaagacacttatatattttgttaaaagattcttaatatttccaacaaatatcaatttcattaatgatgattgataatgtcttgattatccacatataatgatacaatttatgtagatgtaacaccatgttttaatttatttaaaagtaaaatggttataatgcatatataataatagtaagttttcaatatttgttttagcaatttttttagtgatttttttttttaaaagtataaaatttactgttacgtataaaattaatcttttatttaaaaattgagaaaaaaaaataaaaaaaaagaagattaatttcttattaaaaaagtgaaaaaaagagaataatgtaatatattatgggtgtgcataaatcaatccaatctaatgagaaccgactgatccaattacaaccgacagccaaacattagatatccaattgtgatcggatcagattgaatgttatttttaaatatccaattgaatcggattggatggtggatggggtgtgtaaaaatccaatacatgcaatatccaatcgaacaaatttgtattttcatttagtttggatgagtaattagattttatattgttatatgtcgaatctatatgtatatctgaaaataaacattaaaattttactctttttttcttggattggatggatccatgtccactccaatatatactggacctaaaatattggatggatccgatccaaaaaatactaggtttaaaatattagataaacccaaattaaaccaataaatatatatgaaatacattccatggatagaaccgatccaatccaacacccaatggattttggatggattggatgactaaaattgattggattggatcggatagtaaaatctaaca

SEQ ID NO: 361714 - DNA, 691 bp, Cannabis indica
caaccatttggcttctcctctcgaccgggctcccaatgcaaaggggcctcccggaagccgcctgggccttggtataagccttctcctgggccttccggtagagatactcctagtacatcttctccgcagtggtaataagctcatcccagaaggtcttctctgcggccggaaccctcacgttcgggcagataaccttagaaaggttagagtcctccattgactggtgcggcaggattagcttggccttccggcagttctccgtcgtgaccaagcccccgacatcgaggtcagccctatcataagtcgcgaagacctgggcccgctgaagaaagatctgagtaggcgcggtccgttcgtatggagggatcctgacccactccgtaaggagctccgggtgctccacagctcggaacccggaggagaagaaaaagcgatggcgatattccttgacatgggtttgccgattgtaagggaccacgccatcattcgaagggtgggcccggaagccataaaaactgtctttaagtttgtccccctttttggggacagaaacaagttcgtaaaaatacaaaatctccgccggactgggagagccccatccccgggcggagtaaaaaataaataagcctgaaagcaggcggtaagcttggggaattagttggtatggcgcaaggccgacaaatacaagaaa

SEQ ID NO: 361715 - DNA, 577 bp, Cannabis indica
aggagttctgcgtgctcggtctagctctagatcattatttctttgtccagccatgtcgtgaaacatatttttcagctcgtctagctaagcttgtacggctgggctgacctgctcggcattctggtcaatttggattacgtcatcatctttctgagcggcgatttgagtacgggctctgggctgcacgattgtcgtaacattctgatcgtctgctcccctccttctgtttagatcgttccttaggccatgggttgtccctaacctttcgaacacagaagcgcctggctgccttagcggttgattcacttggttgacgggtggaatgacaccattgatctggttggaaccatcaggtatgactcctcttgatgaattaccagaccaggtcttctcgcctaccgctgggcgcacgagtggaactcatgaccggggattgggcagctgaccattttcagtctgggaagtgttcatcattggatcctcgtccgtctctactaggggaatgacattcggcgaatgccgacctacattttggtaggctcttcgtatcagcacggtagcttgccgactacgatct

SEQ ID NO: 361716 - DNA, 361 bp, Cannabis indica
tccttgaaaatctaacctgaattagctctggatattgagtcctcatatcagactccaactccaaagtggcctcttccactctttgttattcctccaaagtaccttaaccaatgctatagttttgtttcgaaaaactttcttcttcatgtcgaggacttgcactggttgctcatcaaaagacagatccagttgtaactccaatgcctcataactcagaatatgcattaaatcagatacatacttcctcaacattgagacatgaaatacgttgtgcacaggtgactaatgctggtggcaaggctaatcggtatgcaacttgttcaatcttttcaagtatttcgaaaggtcctataaatctagg

SEQ ID NO: 361717 - DNA, 634 bp, Cannabis indica
tcgagagagggaggaagacagtgagagaggagggcgatggtgcggaggcgtcggtggggttttggagagttaagaatatttttgttttagggtgtgggaaatggagaagaaataggtgagaagaaataggtgggcatatgaaaaatagaaaagaagtaggtgggcacgtggaaaatgtggcgagaagtaggtaacgattttttattgggcccttatacccgacggtaaaaccgtttaccgtcgggtataaggttccaataaatttacgattttcaattaaaattgtcacctattcctgtaattactgttataaaccattgtgaatactaatttttcccaacggttttaaacatttacttaagtttttttagcaacggtctttcgaaaaaagcatttttaggacctcgtaaattctgacttttgtagcagtatttagtatacttaaatgtaaaattaatttgttgttttaataatatatatatataccactaaattagaaatagtatatgagctcgtttggcacagcttttgaaaaagcttaaagttgatttttgcagtaaaaaacaactttttgaagaatttttagagaagctacagctaaagctaaaattgctccaacccaacttttaaaaaa

SEQ ID NO: 361718 - DNA, 569 bp, Cannabis indica
gggtcccgagtccaggtttgggttgggatccgggtccggctccaaattcgggtgtaggtctcatttggagtccgggtcctggtccagttatggttcaggatctaggtccgatttcagttttgattcaaagtccaagtcctagttcaagtcccggttgagttctagttttggttcaaattttgggtttacgagttcgggtccacttttgtttttgggagtggggtcaggtccgggtgtgggttcaggtccttgtcagggttcaggtccagagctgggtcccaaatccagacatcaactacgggttttgtccaagccctgggtccagatctagatcccatcttgggtcccagtctggttccatttcttgtgctgggtcacgatttgggtcctggttcaagttcgggtctgggttgggtactaagtccaggtcctagttctgtttcccaggtccctatcttgaatctgggtccaggtcccggttattatcttagtttatgtcccagtctaggttccggtttgagtcctaatcttggtttgggtttaggtctctgtctgggttttgatctggg

SEQ ID NO: 361719 - DNA, 563 bp, Cannabis indica
tgcaatgaataaggtgtggtatgagcttcatcaagtacctccttcttgatctcttcaacattagaagcacaactcgagctttaaataacaacattccactgttcgagactaaaagtctttaggccgaccagccattacctcgtctcgaacctcaactaactcaggatattccaattgcgcttttctgattttttttcaaatcgatcagattgaagtgttaaactgtgtaactttccaactacgaattcaatccctgcgttaaccatttcagagactagttaagggctaacagaacagtagtacaaacttgcccgaaaccctttttactcaaagcatcagtcacaacattagccttcccggagtgatataaaatttcacaatcgtagtccttaaccaaatccagccatcttctctacctcatgttcaaatccttctgggtgaaaaagtacttgagactcttatgatcagtataaatctcactttctttttttttttaccataaagataatgtcgccatatctttaaagccaaaaaccaccgcagcatgttctaaatcatgagtt

SEQ ID NO: 361720 - DNA, 560 bp, Cannabis indica
ttagtcacgaaaattacaatttcctgtgactacatgtatttttagtcacaatacttgttgtgactaaaataaattaatgacaacttgtaactaaatactatgttttagtcgcaagtaacattttgttgtaacaaaaagtcacatttagtcaaaaaaaattgtgtgactaaaaagttattactaaaatttacaattttttgtagttccttattataaatttggcaagaattaaataataacaacgtttttcatccagtgtagtagaagtagcctcaccattcatgtgaagttctgaaattgatcaacatacatgcaaagacccatagcccccacatccattgtgagactattcgggttacaaaaagacattcctaacacactactatctattagatattagaaaagcagaaaagaaaaaaacacaattcctaattacactaattatttactattagatgtcagtaaaaaaatattcttaataattaatatatgtaatatttttgtgcaaaagttattatttataagaagtagtactattgggtaatgcttgatttttcttt

SEQ ID NO: 361721 - DNA, 634 bp, Cannabis indica
gtgtctaaatagttggaggtagtgtctttgtgaataataaatcgtcttgtgaattataatagtttttataattaaaatataatgacaattgttgtttttcctataccaaagttacccttaagctaacgaaatattttgtatagtttttagttttatttttgtttttaaattttttaatcataaaaataaaagtaaatttatattttaaaattttgtttataaaaaacaaaaatttgttccacgaccacttttattttttaattttaaaaatacaaaataaaagtgtgttctgaaatttaatttttatttgttgattttatttaagttgggcctggggccgaggtttgggtccagcgtcgggggtgggggtctggggccaggtccagggtccgagtacgagtacgggtttggttccgggtccgaatccaggcaatggcgaaagtatgttgcttgctgctggggccatgacctctccttacattttgatttttaaatgtatatacatatattcataggctccttatattaaatgtttttgttttgggaaatttacatggtatactaacttttgtcatttttttataaaaatattgtcaggcggtattttacttttctactgtatttttttataagt

SEQ ID NO: 361722 - DNA, 1002 bp, Cannabis indica
gaagaaagatgaattcgtatacctggagaagctgttccttataggtggagagattggaggcgagctcttctatgcttacctcttctccctcttctcctccttccattttctttttgaaagaaaaaaaaattaactattaaatttcttagaagaaattcttttgccgaatcttgaatgaagaagggatttgagatttgggagtataatggaattggaaagtggaaacccaaacggcaaaggcttcccttctttgtgtcttggttcttgggtgcttcagtgtgttggaatgaatctggtatgtatttattttgagttgacgatgttttcctttctactcacgaccccattcttcggcccgtttagcccaagtcgcacttttattgggtttttttttagaagtattacttattctacatttttattacaaaagtacattcacaaagtacacctcgcacgtcggacataaaacaatcaccggtatttttgaaactacaataaaaaaatggtagaaattacgggtttttgaaaagttttcctataaatatggcatatttatgtttgggaaacttacaaaaatactgtttttttaccaaatgttttcaaaaatactggaacacagcaaactttacatttttactgtccaagtccatttttatttcttatatactgtccagacccaatatatttactaacaaaacacaaacgacacctctccttcgtggttggggacggacaaatcaacagtagaatcatataaaaaaccataaaatctggcaaagagaaaaaattactaaatcaacaacaaattactgttttgtagtgttattttactattgttttaatatgaaaaaaaggccacataaatgaaatattgtaaaaaatgacaggacatggaatctatatcagttctcataaagagcaatggacaatggaaaaaagaacataattatttcaagagaaggtgacaatcctataaaaaaacataagaaaacactactaaaa

SEQ ID NO: 361723 - DNA, 535 bp, Cannabis indica
aatgcgacttgattgctcaggagaagtctgacacctcacggagaggctttatgctatgcgagcttccgggagcaccttgcactccgggtgcctcctccgggacctatgcccagggtgtttcctcgtggcatacaaggacttagcaaatatttataagttacttgatccaagtttccctgttcggttggtccacgtatattgggtgcaatcaggggcaacaaaatctaacctaaccctaagtggtttcctataaataggtagtgatgacttcaaaggaaaaagatgatgcgactcattccttcagtaaaattttgagccacattcaccctcctattcgaaaccttctttctctctatgtctcttcaaaaccgaagccatatagtgaaaagagtgagtacccacacacatcaagtggtactcattcatagtgtgtaaggttgtgaagaatccagtttcaagagaaggagattcagactcagatcttggtgatactcttctacagaaaggtgtttaaacgcccaaatgtgacttccac

SEQ ID NO: 361724 - DNA, 599 bp, Cannabis indica
aaaaaactcactatctaaatattatattagaagagttaagaatgaacagttaatagctaagatcccaggagtttactaaagtcttcttatttcagctccatctgcttagacttggattgttatcctagcgagttaagatagatagttagacagaagtgtggagattgtccaacttaaagatgaagctcgtcttttctttaatttttgaattaattattttatttatcaaaaaatttagttttaattattaatttgggaattttattccctattttatattattgcacacaattcattgttatatttttgagagtattaatataattttttctctttaaaagaattttattatgagtttcttttatgaaattgatctttatattctataacttgtatgccactgccgaattatatttatatgtttatcatacttttatgtgtttttatttttattatttatacaaaatctatggtatattaatctctgtaacgagataataccgcataaatacttagattttaaaattaatgtttatgaatgattgtctattcttaaacaattattaagattttaaatattaaaagatcttgtgatctga

SEQ ID NO: 361725 - DNA, 545 bp, Cannabis indica
ccatttcttgccaactttgctcaaatttcccagagagaaaaaattctcagacccagaaaaacacttttgaaaactttgcattttttcccagttcttcttcgtttgttactgtcagtccttctcatcttcattcgattcacagcaggacccccagtctcaacgcttcattgtaagttccttgcaccctttgctttattgttaatatgcacggcatgctgttacttatctgcttgttcttttctgggtttgtattcgaagtttctgggaatgcaaatgtttagattcttcatataatcggtttgggttcactgctctagtgataggattactcttgtcacgcatttgttgttattttttgtaaaagaccatacgttcttcgtatagtggtcgcttagggcataggatagattgttttctttctactttctgccctttctttttctttagtgcgcaatgcagtcttctgtgaatttattgcacccgactcttgtccagggaatccttctagggtttcgtgtatgacaggtgtccggagggggcctctt

SEQ ID NO: 361726 - DNA, 500 bp, Cannabis indica
ctagttagggtgttacatatcatatatataactcatatacatgttatatattatgtatctcacatacacatatcaacatgtaacatattcaaatatcatattatatatcactatattaatatgacatatacacacatacatatacaactcatatatatacatatatctcaacatagaaaaatatgtgaatatatattttactattataaaaaatagtaaatcaaaaaatattataatcttacccttgtattaccacatgttgatttctcacctttcattgaagcaaggtaggaaagaataaccttttgactgttgcgaaattgttgtgctccaatagaattatcaaaccaacaagattacagctcaatgacaaataatacaaaggacaaaatcacggaataaataatgttacaacactaaacaaaatatacacataaaatagataatagagatgaagagagggattacaactcaaaccaaaaagctacacatgaaacaca

SEQ ID NO: 361727 - DNA, 556 bp, Cannabis indica
tttttatttaaccaaatagaagttaaagtttaattttaacgtacttaactacactccctgtgggatagacctcactcctggtgagtgtactacttgaaacggtacgtacacttccgtgtgaaaaatatcgcaacattcgctagaattttcagaatagacactgcaggagcaccctgctgtctcaatcattgaatttcattatcttgcttattgatcctggcttgcataactgcaaacctattttcccaattttgggcatcctgagcgacttgggcagcttgggcaacctgtggcgggttaacatcactccagccacgagccctgcccatgagacctctacctcggccacggacatttgagggaatctgagctccctgaacttcattagatccatccgaatcgccctggctcctggtatttcacttggcgtccatactaatctgaacagcctgcgtaaccaagagctagtctggtcagattgtgatcaaagggaacttactactgctacttatttggaaattaaaaacatgcgcccattctactatcaggctactaa

SEQ ID NO: 361728 - DNA, 502 bp, Cannabis indica
ataactagccacttgatcacttctttttgtaccacttccttcatgacgggattcaaccttcgctgatgctcaatagaattacaacaaccagcttctaagagtatcttgtgcgtgcaaatcgttggcctaataccccttatgtcaaccatagtcaacctgattgctctcttatgcttttttaacacatctagcaaggcaccttcatcttcggcttccaagtttgctactataataaccggaagcgtttcattcttccccaaataagcatactttagatgacttggcaagggcttcaactccaacttcggtggttcttcgatggagggttttggaggcttgaaattactttccttcaactccaaagattcaaagggcttcttgaatttagggacaggttgcaccggctccacccaagcaacttggttgtcttcatcttcactcaagtcttcaagctcatcaagagaatttataaacttctcatccttccaagcttccttgtgaa

SEQ ID NO: 361729 - DNA, 590 bp, Cannabis indica
ataacaatctcatacacgactcagtaaaatgtagggtagggtatctctacattcaacggccttatcccgtatcataccccaccatggtccctcactttacctgagacgttagcatacaacatacaacatacaacatacaacatatacaagtcataacaaccataatccatttatcaatttacaaactcatattgtgtccataccacacattctcagtaccatatacatatttcataaatcatattctaatacataaagaatctaaatttatacagataaacacatacaaaactatctaatttccttacctcaagtcccgctgcttaagacttgttatctcgccactactacctataataaaacatgagtcatggccctaatattaaaattcgtactcttatagtacagcagaaaacttactatttttgaccaacaactacactaattcagtaaaagttgcattcataaaaaatatagccaattaaattatctttccaatgatataaagatcactaaaaatggactaaaaatgagggagttatcatagttttactgaaactatttctgagaaggaatatagagtaacgaat

SEQ ID NO: 361730 - DNA, 505 bp, Cannabis indica
acccatgttttgaaaattgttattgttattttttttttaataaaggcaacattagtatcttaacgccagtttatttatggcatcttattttacgtaagtaagggcgttacatcatggatcttagttattgtgaaaaactagacagatggccgaaacagaatcagaattggataagcagaacgcatcgcaataggtcatttgtcaacctgggcgctgggtaccctattcctgagctcctaggatctcgttttgatacttccaaggttcttgaacttgagaggataaggtatcctaccccattttcaccatttcagattcattggtcaaatcatatttaacatttgagcaattgaaggcaacgtcccaaattgattgttaacctgggagctgggttgttaaaaatattttactaagatttagatttactaacaaatatgttaaattaacatcctaaatatgaattgctctaaaacaatgaaataaacacttaagagtttaaaaaaaa

SEQ ID NO: 361731 - DNA, 891 bp, Cannabis indica
acggagaaagattattagagattgaaaaatacaaaataaacaccaaaaaaaaactatcgataaatctatacaaaatttatcatatgatttcaaacagttgtcatcaccgtacctcacctgtatatattcaccaccacattcaaaaatgtgattatcattgtatcctatttgtagtcattactatccttattaataagtttcacttgtatataagaaaaataagtcaattagctaactactcacttttaacacatgactgaattattttgttataaatttatcacttgtatactcctaagtactttggcgtaatgaattattcaataaatcccaattctcaaataaatttataagcatagttatatacaattaaaataaataaataaacgtcaaaaagaaaaataaataaattatttttttaagttatcattaaatactaaatcacagtaaatatattaaatttttaaaatatactaaattattgaaatcatgtttataatgtagaagattaaatgatggtttatggttataaaattttaagtaaatatttttgttttttaaataaaatttaaatttaaatatcgttggttgaagtctgttgcccctgattttgcccaatatacgtggaccaaccagacaaggacacgtggatcaagcaacttataatccaaactatttgctaagtccttatgtaatgaagcagcatccgggacatgtctcccggagaaggcatatggaaccccatatgctcccggaagcccaagtaacgataaggcatctccgcgaggtgtcaggtttcccctgagcaatcaagtcgcatttaatgccgcatgggaggaagcgtgttgggactgctacacgcaataaagtctgacggcacaacctccaacc

SEQ ID NO: 361732 - DNA, 668 bp, Cannabis indica
ggtacaaacagtagcaaaatagatataataaagatgatatattgatattaggagataaaagaacaaggttgctgggtattcgagagaactaaccacagtcaagtaaagtccgttggtagctcacttagagcaaactaactaactgacgataacgacttataactgcctaacaaactaaactaactatctgatagttagattctgttattcttgattgcttaatattcatactgagtatttctaacatcaccaagggtggtcttgaacaccgtcaccttattttttttttgacaatgaactttcattgaaaatattcaaaagtttatacatagagaaaagatgaaaaatcatctatccaaactagtttatcatccaccttgagtgcacgaactgctaattcatgtgtacaataaacatgaatcagagatgcctcaggaaaactggatagcaaactagcaaaaaaatctaggaaagatcctactttaaaacaaagaagaaggatctcctagaatatacagtaactgaaaataatcaactagactcaaaagatttattaagtagcccaatgcaagagaccaatccagtgcaaccactaaagctacataagtttagcttctgctaatctgctgtgaacctccctacaaaaccaaagaaaaataaataataat

SEQ ID NO: 361733 - DNA, 1052 bp, Cannabis indica
tatgtgtattatatgcatgttgtattatgtgatttggatactactaacactagtacagttgcggtacgaagtgtattagtacagtatataatattcatagtgtacgatatagtattaccaatactagtatgggacgagtatgtagtgcatgtggtacaacatttagtggtactcaaggtgtagttcaattctaccaacagtagtacgagacaagtacttagtgcatgtagtacatgggtcgtacttctgttaagaacgttcttgatgcatctaaagccttataaataggtgtatggatatctagatacaagatgatatgatgttatatgttttgtgcttttcttactgagtttattgactcacaaatatgtttgcatgtgtatgttaaggaaaggcagaggctgagcaccagcaagtccgaagcttgagaatggttgtccctattatgatggttagacctagagagttcgatctcgagacgatttgggcctttattttgtagtcccgtagtgacatgtttataaaatgtattttgaataaaattgtacacagttcagacgggattccagcttttatgcacgattatgtatttataaaagtttcaaatttagttaaaaatttaaatttgacacgattttttgaaaaactcttcgactagtaatggcgtgcacaataaaagaaaattattgtagcatgcttaagtaatagggcgttagaccagatctcaaactaactcaaaatccttcaaacgcagggccctaccgtgtcagattttgtcctctacatcagcgtggcggagtgtgtacactactaaaaagaggtcacatttttgtccaacgtcataatctctaacattcttagtacaaaaatgacatcgcatgacatcgaacacctttgaatggtccctgcttgtacagacaattttcacctcatgaatcgggcctcattcaattggcccaaagtcaataaacattgtattttaccccataagatgatctatttgataccttaaaatcctacttggtccgagtatgcccatacccagttctttc

SEQ ID NO: 361734 - DNA, 557 bp, Cannabis indica
ctcattttggatatgatatttaccataattttgtttttttttaatagaaggtgaaaacttcattagtttataataaccaaatcaacaattatagaagaatgtacaacattaagaatattgttgacattaaacatacaatctgaccaagaacaagaacaagaaccgcgagcaaaacaatgagcggttttattagcagatcgcgtaacaaaagaaacaaaaatattaaccagacaatctaaaaaacttttacaatctgaaatcaatagaccaaaaacagatgctaaagataaagaactttggatagcctggagtgcaacaagtgaattcgattcaacgatgacattcaaccactttttccacttgatccaacttaaagcctctttgatcccaacagcttctgcaacggctggttgaacattgcctttttcagccaccacatcactgtaccactatcagaaatgtgatatttttactatttcgattaaaatgattgttagtgcttgaaaactactttttctttcaatgtgtccaatagaaaagtgatgcacaacggtctt

SEQ ID NO: 361735 - DNA, 1004 bp, Cannabis indica
atagaccgtatttttgccttcttgatcattgttgtaacgagtatctctcctcctcgcattgatcgactatgggttatcgtgtgcctcgtggtaacactcacctcttcacgccccactcttctctcttaggtatgattcatctcgttccccctattgagatttgtgggagctcctttcctataagtttggaaagaacattggcgatctcttaacgatgacccatgtaccccaggttgtgtccccaggtttcccttatttctttgaggaatttttggttcacaagtacatggttgatcatattgtttctagccttcaaggtatcccccagtttccccaagttgtctttcctaagcgttctggggattccttcatgctgcctcctgccccctggtctatgagtgtcaaggttagccttacaattctctctctctagggtcaggttgattttgggagctattctcttgtgttgccctggctacagctgcgtcacactctaattaagcattatgctggtttgcctcttccaatcgatgcctgagatggcggttttctaattcgacgattggtatatactttggcaaatcataggctcaatccccatcaactagactgggaagagaactgccatcgttcattctaggcccttcaagtttggttcaaagattctgggttttcccggagcttgtggaccgttcaaatgataagtcaaaagatccttggggactcttggatcttttccaggacgatgagtggtttcttcgtgaggattattttcttcgttgtcagccataaagaggattattatttttttatgtaaggatgattttttctgagctttttacgaaggttctcaataaaagcacaaaaatgttaatgtagatttttgttaactagatataagccttaacgatgataagtttacacagaaaaataaaaagagaagaatgaacttgaaggttttttacgtggttttgcagttagaattctacatagtccacgagtta

SEQ ID NO: 361736 - DNA, 2106 bp, Cannabis indica
aaaagaaaaaaaaaacttagtctctgtaaagcttgactaaggtggataactgctttgacatctcttgctgaacttcctccatggcagcaagacgattgttcaccagctgaacctcatttttgacctcctggatttctgcagcagcagaattcgagcttgcagcagcaacagcaccagctttaggcctcttttgaaacacgccatcaaaatactccgagggttggaatgttgttccagtgagtgaaggctcaagtgtttcatgagattgggccacatttttctgagaggacaaaaccttaaagattagatttggaaacacaagcttaaaagttggctttttacctcttcgaaatgagacaatttggttcaaaatgtgggaggccaagtcaatagatgctccagaggtgatacggtagaggaatgaggccacatcttgagacaccacagtcttgttggagtttggaacccaattgctaagagcaaaccgcataagagatgcatgagcaaatgtgagatgtgtaatccgaagactctcccccgatttcagttcagaccgtgcaccagtgagttcagagagcatcaattcacgatccatagacataatggcatttgagacattctctggaagttgcaaggcttgagaaatgtctttttcagaaaaagaaaaccaatgtcccctaacatacacttttcgaaaaagtctagaattctcatcaagaaaatcatcagtgaggttagcatagaaatctttgacaatgtttgcaatgtacccattgaaaccagtgagagtgttttcccattgatggaattgaataaacttaacaattccatatacccgatgagcatgcaaatcgtaattcctctcactctcaaactttcgggtagcatacaaattccaatcacgctcattatcacgatagtaaaatcgaggacaataggaaagagatgtaggaacgttaccaggagaggattccttcattggctgcttgcctttggcagcagcagaagcctttgctgctgaagaagatcgagcaggagttggagcagatttggtcaatggaggctctggctcgagttcagtttcctcactgtctgaggaaactccaatgtcctctggaatctccttctcagaatggagagaaacggatttgtcagaggagacttccattggttcttcttcttctgaactcgaagaaaccgaaggtggattcgtcttaagcttcttcttggctggaggcgctggcttgtcacgacttcgagatgatcaaagttccttctcgacagaagcttgctgggcacgagtgcgagtagaaggaccaattggggtagaggtaggaactgatgcagcaggaggaggaactgcagcaggtcgaggagattcctttgaagatgaagaagatgaagtccaagttttgtaaggacgcacagattttcgagccacttgcttaggaaggcgttttggcttctcgggctgagattcacgctgaagaagcgatgaatcttctatttttgcagcagcaggaggcacggttgaagcagcaggaggtacattggagggggttgcaacagtttccaccatctttttgggatgccctaggttctttgttcttaccattttgatctgaaagagacaatgaatagcaaacaagcaagagagacaaaaaaatagaatcgggtaggtggtgagaataaatgacaaaaattggtttaaataaacatggaagcaagaagaaaaaaggaaaccaattttgagattttgaaaaataaccgccagcccatgaacaaaaaggaaaccgcccactatcttgcaaaaataaacccctttcccctttttttaaaaaaaataaataaaaggaaactacccacattatttccaaaaatattctatttaagacaatctttcaagattaaaaacacattaccatatcaaagatcaacctttaaatggaaacatatcaaaataaatcaaggaagaataaatattgatacttaccaattaagcacaaaatttccttagcccatgaatcaagacaccaacgcctccctctctttatttttttttatttttattttttttattatatttaaagaatcgaaaataaaata

SEQ ID NO: 361737 - DNA, 808 bp, Cannabis indica
  modified_base (104)..(104): a, c, t, g, unknown or other
attcaaggtcattcctattttatcaactttcactgtgtttcatactcataaaaacctttttctatgtagtcatccttagggatgagtctactagaaaattaaanctacaaaaaatacttatctttaagatcgtacgatgtcaaattatcgtaatgggtaaccttccattaggggacgcaagcgtctcgagctcattaaaacacaaccttagaagatcaacaataaagaccgaatgtacttataaaaaaaagtcattaatttgaagaaaatagtatttttattcaactatttatttcgacaatttattttaatatatttattgaaattactaacttaggaataaaataattataaaattaattttatatccaaagtataaattttattctatattaatgaaaattattaacttaggtagttctgaaaataaattaattattttccaaccttaagtataaatattcaaattaaaatatttttttatgaaattacttaatttaggtaggtctaaaattaataaattaattttataaccaaataataaaattttcaataaaattaacacttattattttgaaaattaattacaaaattaactttcaatacttatgtattaatttcctgtcaaaataaaacatgaaaaattactaagttaagtggttctaaaattaattaagaattaatttatagcttaagtattatttttctatctttgattatttaaatctatttattttagtatcaacatatttatttaattaaaattactaatttagttaaactaaatataaattttaatttaatattt

SEQ ID NO: 361738 - DNA, 644 bp, Cannabis indica
ttttattgacatatttattaaaatagacaaaaataatttttgtggtacttttaaaattggttttgtttgtgcatttattattttcaaaaatatgttttcttttcttactatgaaaagtcttttaaatcagtttttgactttatttgtgaataaatatgagttttctttatttagattatttgatattatctttgtatttttaaggaaaatcttaatcatattatttatttttttttatctgatttttcaatcaagaaaccgtgtacaaggtgttagagataaaggttaataagtttccttattaatttgtttatgaaaactttgctgaaaaattgtccaagtttaatgtacctgtttgaacggactgactgtctgtttaaacagattctgacttgggaagattttctatttattgacctatttgtttcttgattccttttccatgacctttagggtttctgaagtgtataaatatacccttaggtcgttggtattggttatctctcttggggctcgtttggaacaccgtattaggccatattgtattgtattgtattgaattatatatcatatttttatataatactatgttaaactttaattatactaaagtattatatatttaggtgtccataaaagttaat

SEQ ID NO: 361739 - DNA, 619 bp, Cannabis indica
ctgaacacgaacttgggactcgatcccagacccggacgaagcccttgacctaaattggaattcggaccttgatatggacacgaacccataccgaacccaaatactgacgcagacctagaccgggattgaaacacgggacctaggcccagacgcagacgcagacccagacacgaacatgggacccagaaccaagacccgaacctggaccttgactcagatctggactcagaccgagattcgaaaaactcgtactcggactcgaaataaccctcagaccctgacaccaacttggacacagacccagaccctgaaccaaactcggacctagaataaaaactggaaattatgactaggacccagacctaagacgataaccaaacccaaaccataactcaaactcagaccaaaacctggaccgagaccttgactaggactgggacctgagacctaagacttgaacctggactaggaccgggaccgggacttggacctgacctggtcctaagccctcaccggatcctgacactcgcaacacagaccaggatctagacccttaaaaggacccaaacctaaacccagacaaagatagggatcgagacctggacctgaacacggaccg

SEQ ID NO: 361740 - DNA, 1093 bp, Cannabis indica
tgacccaacgcccaggttgacatctagcgctcaagttaacatcccagcgcgctaggttgacatatgacgtcaacctgacactgagtaagtatgaaaaatgtccaagggatggactttaagatgactaagtaatattttgacatcacttattctatttttgtattctggcaaagctggtcactagttcttggagatgttgctattctgcagaaatgagagactcgaaactcttcatttctgagtgagttttcccatgttggaaatgagaaatgtgaagttgtgaatttgacttctctgactttatggatcttagttattgtcaaaaactagagggacgatcaaacagaatcaaaatcgaataagcaaaacccaacgcaccatgtcgtttgtcaacctaggcgctgggtacttattcatgagctcctagatcttattttgatacttccaaggttcttgaacttaaggacaaggtctcctactatgtttttgaccattctggattcattagtcgaattatatttgacatttaagcaattaaaagtagcacactaggtttgttgcgaacttgggcactaggcccaacaccaagtcaacctgggcgctgggccctattttcaggggcttaggtttgtggttttctccccgagtttgcttaaatcttcattatttctaatgatagaaaaaaatgtagggaacacttttacgtgaacttgattagaaacaactcaggttgacaatatgtcaatatgggcgctgggtcccaattatagcccttcaaaaactatgtttggtcctaacaaatagttgaatcttaatcttttttgaaaatgaagaatatgctcagaagatttcttgaaagacatcatcaacattggcccatgttgataaaatgtcaacctgggcgctgggccagccccaagtgtcaacttgggcgttgggccttgctttcggcacatagaatgtgttgtttcttctccaaaagtaccctatttccccatttttgatgaagacaaagaaaatacaaaagttgaatcaaagatttaatacatggaagacactcagattgataaattgttaacttgggtgttgggtg

SEQ ID NO: 361741 - DNA, 671 bp, Cannabis indica
acatctcagccgactagtgcttgggttcctcgaaccagggtaatctcatctactaattctcaatagtttcgtattacaatctccaattctctctaaaggaatttaatacaaactttacaacaattagtaatgaattaccaacaacaatcaagaatcctgattgttagtgcacaatcccttgtgcagcaactgagctcttcttcgacatttcttcaacttgaaatcaattcagatctgatgacaaagttgacactacactaatctttctaccattgatgaccatcttcaagctatgcaatcagacatgtagatacaacaacaagaatagcaagatacgacactaagtccacgaagacagctgaattaacaaaatatacgatttaatggataaactgtttatagactaagatcgactatatatatccacaaaacagtccacctggcactaactaaaacttaacaacaaccaacttaacagaacgctagtgcagatataacagacaaaaactctagacacgactagacattgtacataactaaagtgtcacaaaataatgacacttacactaacaatttaaatgccaaaactaattatttaataactaaaatatattattaaagaatattgtcatttatcataattattaattagacatatagagtctcttaat

SEQ ID NO: 361742 - DNA, 593 bp, Cannabis indica
gagagagagagagagagaaagctcaaactgagtactttacccctaaaaaacaaaacctgggtacggttgtcagtgctagcaagcgccgcaaccatcttcggagcgaccttccgtgtgcgactcgacatgcgacgcgatgggttcgaaacgtcgtcgtccatagtggtggattccggtaacacgtcgtcggaattgattgattgcacccagaatatgttgaacgaaaatatgtcaaagattaaagggtttcttttgagtaatatcaacttaaggtgttccaaaaagtaaaatttgtcaaaatagtcaaattgaaatttgcaaaggaaaatttcatttaggctaattaataatttttttctttgaactttgacatttattttattaaatcatgcttcctgaacttttttagttgttaaaaaatccttctgaattattaagattgttagatttaaggactttgtctaatttagtaaaaattactaacatgaatgaaagttacagaggcataatttagtacatatcaaagtttgaggggaatgatttggtagatatctaagtctgaggagcatagtttagtacataaacaatcactg

SEQ ID NO: 361743 - DNA, 549 bp, Cannabis indica
gagaatatcataaaagttatcatatcctacaaatattagttattatttgtttagaaatttttttttaaccaaatgtaagtataaaaaattaaatttcccttttcagaattaatctgatttgataagaatattttatatttatttttgtcatgaataatataataggagcaattagcaaaaatgaaaacgaaacgacaagttgtttttgttcaggagcaatcattagatgacgtttgcctaaggagtgttggaacttggaaggaagggcccgaaggggtaaggtggtctgcaatgtcatcgtgtcgtgttcgtgtcatattttatacgattcgcttttatatttcgtgttaggcgtgtcgattcgttttttgactcgtgtctacttttcccaatcctaacccgacccgtaaaaatttgtgtcgtgttcgtgtcgacctactgtgacccattttgctattattaaagttggagttgtagagaagaaaaataaatttaagttctattagaaaacttatatttatatatagttttttttatatataataaaaa

SEQ ID NO: 361744 - DNA, 814 bp, Cannabis indica
ttcataatatcacattgcctaataggcaagtcgatgctttaatctgattatcctgattgcattgcttaattaggcaagcccatgccatagtctggcacccatatattgcataactgcatcaacctaataaaggtgagcctgtgcaaaaaaatctacacccatgtatcatataattgcatcacctaatcaggtgagcctggcaccaatatattgcatcgtctaattaaataagcccgtacctacgcccggtacttaacatatgtgtctgacactcgtacttacgcatcatctaatcaggtgagcccgtacctacgctcggtactcatcatatatcagtgatgcccgtagttacacccaatatgtctccaagaaaattgcatcacctattcaggtgagcccgtacctatgctcggtactcatcatatatcactaacgcccgtacttacgcccagtatgtcaccaagagaatcgcatcacctaatcaggtgagctcatacctacgctaggtaatcatcatatatcacagacgcctgtccctactacaggtttgtttccaggaaaatcgcatcacctaatcaggtgagctcgtacctacgcttggtactcatcgcatattattgacgcccgtacctacgcccggtatgtcgccaggaaaatcgcatcacctaataaagtgagcctatatatcacatgcataatatcatcacattttcgatactcaactaatcaatcttttcattatataacaaaaataactatatctcaatattaatcaattcattgtaatactaattgtattacatacaacgtacta

SEQ ID NO: 361745 - DNA, 642 bp, Cannabis indica
agttctcgaaataactaaattaaaaactagtttctaaaataaataattcaagaattaatttttgaattgattaaataaaaaaccagatgacataaattaaaatagactcggttccacaacaaaatgactaaaaacaaataacacataataactcaaaaatcggttataatttaaatatagaactgattttataacataatgaataaaaataaataacaccaaataacgcaaaccggttacaattaaaatataactagttctgtaacatagtgaataaaaataaataacacaaaataacttaaactagttgtaaataaaatagaaccggttttataacagtgttataatgaaccagttttataacaatgttataattaataaaaataaataacacaaaataacgcaaactggttgtaactaaaatagaactagttatatagacataatggatgagtatttttgaggtagatatggcatgggtgtaattatttggtgggttggagcatgttgaatggatgtttctgtttaagctattttatataactagttttggtgtgtgagtttttatcttagttgttttatggaaccaattttttgtcttaaatttttaattggttgctaaatatacggtttctttatatt

SEQ ID NO: 361746 - DNA, 950 bp, Cannabis indica
aaagtgggttatattaaaaataaaatttttgaaaattgagcttagagtcttatttttactattttagaaaatatagaatccattttatcatttaacaaaacagaagatctaattggtaacttttacaaaacacaagatctaaaatgatatttaccctacattaaatagaagaataaacgctaaaataggtaataaatggttttgttttattgttctttttcttacatatattaattttgtttgtataattacttacttttgttatataatttttatatttctttgttagataaataataaatgagtgagcctagagtgcgtttggaaagccacaatgtaattggatttgtgtgtaattggaggtaatcacacaatttgacatgtttgtctgaccatgtaattatactgtaactgtgtaattggaagtaattggtagattccaattacactctccaattctcatgggccctcatgagaattgaatgtagttacactgtgtaattactaaaaactttccatattaaatattagctactaaaaaatattattttctcatgtaattactaactattttgccaaacaatatattaagaattcgtatgtaattaccacctcatatcaaaacacattacacagttacttccaaacacaccggaattgttgcttttttttttaaacaactcagttgttttattttattttttgaatgaaccatttaattcgttttagtacccaatttacatgttcaattttaaaataaaataaatcaatatattttataatgaaaccattaattatagaatgtgatataaattgactaaaaaatcatatgaccactaatttataattataactactaattaaacaacaaaattatatttaaatagtgtttggttggaggtaatgaagtgaaataaaatacaaattaaataatttttatttcatttctt

SEQ ID NO: 361747 - DNA, 638 bp, Cannabis indica
tgatgctctcattttcatcacttttaacctaccaaatctagttcttactctgtctgacaactagtaaataagagacaccttttatagtgatttcgaaccctcctttattgttcttcaccgattttttcatagtgatagagtgtcatgcccacacatagcaagtacttaatcatagtgcggaagacggttgtaaccaactagaaggagagaaggagatccaggctaagatcttgttattactctgcgacagaatggaataagggttagagatctgagtggaacgagtcatattattctgctgccatcaacgtaaggttttctacactcttatgtgcttaatttaatcgtattagaaaattcatatttaggttgttaatgaaacatacatgttagtatatttagaacctagtaaaataaatcccaacaactagcctcagagccatggtaatgatttactttcatcaaatatggatttaaaacgatgattttttgatttgaatgtgttcatgttgatttatgtgtgatttgatgattgttatgtaaattatgaaagttttccatgaaaataatttatttggatttcttgtgaaaaattaagcaattttagtttttacggaacttgattccgataaaatttg

SEQ ID NO: 361748 - DNA, 863 bp, Cannabis indica
atgttaacatacttgtattttatgaaacaagtagagaatgtataggagtgagatcattaatataacattttcgagaaatatatagattacactcaataaaaaagtatcaacacaagcagtactctatgatgataatactacttgcatcgctcaactaaaaggagggtacattgacggaaatagaatttaaacatatttcaccaaattcttctttatacatttcaagaaaatacatattggtgttcaacaaattcaatcaagtgtcagtcttgcaaacttattcacaaagtcattgtcagcatcaacatatttgagaagatagtttacaagattagaattcgtcgattaaaagatctccatgaatgcctaaatgagggagagttagtttacactgtactccttttttttaccaagttttttagcaagatttttaatgagatagtttttatggccatctaagagggagtgttatgaaatattatttatggatgtccaaattatcaaattaattatcaccattaatgcaccactttctagttacaattttgccactttattttaactagttattcttctttcaataatactatattttccaattcaatccgataaatgccaaaactatttattaaataattataattaattatcaaataaaattgtcatttatattatttattaattagaccatacgaagtctcttaattaataaattgaccacaaaacctcttttcttcacaattaagctcgtgcttagtcaaaattcataaataagacatagtctaattttagaattataattgattaattaaaatcaattaactgcaaatactctcatttatatagaacgctctatatgtacc

SEQ ID NO: 361749 - DNA, 723 bp, Cannabis indica
agaatttgtatcctctcaattatatcgttggtagaattttctcattgaatttctatttttttgtaaaatatttatcttcaactacaaaataattgtaaatttctttcctttaattgtatttttttttgagataatgcgtataactataattaaatacaaaaacttatttaattaagggataattgcggcaaaagtcccccaaaacttgaggttgatgccgattagttctcaacctcaaaaattggcggtgaaaatacctaaggtcacaatttttgtttgtccgttagtccctctttctaacagatccgttaaattaaaataaataccacgtgtctaatttttaatagtccaaataataattttaataaaaaattttaaaataatataaaaaataaaaaacaattattttaaatcatgaaattactttttttctcttttcttttcttcgtcatcttcttcacacaattcccaatcccagccatgaccctcaccccatgcccatctcagccacgaccctcaccaccaaaaattcaccaagaaaattcatttgcaaaaattagggtttctaaatttttttattgtaaagtaaaaaaatatctcagatggggaaattaatgtctaatctcgaccaacattgcaccaaagccctcaatctcattgtgcttcaaagatcgacctgttcatcgaagagattgtgatcactgatgctcatgtcactttcta

SEQ ID NO: 361750 - DNA, 592 bp, Cannabis indica
atcttaattatatgtttcaaagtttatgtctcatgatttgtcagtacgttagatttacactgacatgataatcagcaataaagtttatttatacattggataagtgttatgtcctttccaaggcattggcaaaatatgcatcagatatattgagtatacatcggactggaccgatattgacattggtagatatcataaacttactattatatctatttaagtcaatatcacctagttgatcttaggtcaatcgatcttaatcttattatggttaggttcgatctcaactgtattatttatgttcttagagttgtttgttaaagctgaccaatggattggcccaatactcacacaataggaacatgatagtataattaagtgggagagctaatcatagatttggaattttttagcttctatagatgcataggaatgaaatgatgatttccttcgagcttagattaatataaataaatgattgaggtctcatttcagtaattatattagtttactgaaatatcatttataaatagctaagtgttttaaggataaaatatattgaagggtagaacgataaatttatccccactcg

SEQ ID NO: 361751 - DNA, 629 bp, Cannabis indica
gcttgatctgaccatgtcctctactaactgaggtgaaatctgaatcatactagttacctgtccgggaccctttctgctcagcgcatcaaccactacattggccttccctagatagtaaaggatttcacagttgtaatccttaaccaactctaaccaacgcctctatctcatattcaaatctttatgagtaaagaaagatttgaggttcttatggtcagtaaaaatttcatatttctcttcgtagagataatgctgccaaatcttcaatgcaaacactaccgcgacaagttctagatcatgagttgggtaccgctgttcatattctgtcaactgacaagaggcataggcgataacccgatcagcctacattagtacacaccccagaccctgtctagatgcatcacaatagactacaaacttttctttatcagaaggtagggctaacactggggctatgataatctctattttagctcttgaaagcttgcttcacacttatccgtccacacaaatcgttgattctttttagtaagctcggtcaagggcgttgaaatcttagaaaacccctctacaaaccgacggtaataaccagccagacccaagaaacttctaacctctgtaactgtttt

SEQ ID NO: 361752 - DNA, 624 bp, Cannabis indica
agcaaacgccgaacgtcattcccctgggagacacggaggatgaaccgacgatgaatgcctcccaaaaaaccaatggtcagccgtccaatccctggtcacgagttccactcgtgggctaagaggtaggcgggcagaccttgtctgagaattcatcaggaggagccatacctgacggatccaatcaaaataatggagttatttcgcctgtcaaccaagcgaatcaaccgctaagacaaccatgctcttttgtgttggataggctgggaacgaccgatgacctaagggacgatctaaacagaagaaggggaacagacgagcagaatattgcaacgatcttgcagcccgaagcccatactcaaatcccgtctcagaaagacgctgacataatccaaaccgaccaaaatgccgaacaagtcagcccagccgtacaggcacagcttgacgagttgaagaatatgtttcatggcatggccggacagcgtaacaatgatcttgagttggaccgtgctcacagaactcctttctcaccatagatcaatctcctgccactgcctcacaagttcaaaatgccaacgtggaagatgtacactgagagagaagatcctcttgttggaaattatttta

SEQ ID NO: 361753 - DNA, 940 bp, Cannabis indica
ggtgtatgggggcctagatacaactcagtaatatatattgtatgttatatgcttttcttattgagtctatcgactcacagatattatgagtaggtaaaaggaaggataaagctaaatagtagtgagtgcagagctcggggattataatacatgtcgatatggtgtgacatggagtgttcggtctcaggacagtgtgacaggttaattatttcactaggtcattttgggaatctagtttactagtttgggcagttttcaaagccttagtttttatgtttccttgatatttaggatacttctacgctttttattgatgggaaaacttttagttttgagtttaggtccctaaaaaggttttagcaagttatttatgcatttacgtgattgtgatataaggcatccatttagtgtgattttccattcaggttaactgccacacttgaattcggaaataaggtaagactagcatagaatatatttgtatatgaatatgagtatgtgtaatatatgcatgcttattatgtgatttgtatgctaccaacactagtacggtagcgatactgagtgcattggtagaaagtatgatgttcaaggagtataactgtgttaccaacactaatacaattaagtacgcagtgcttgttgtaaaacactcagtggtacttggggtatggttcaaaccctaccaacactagtatagtagccgtacgtagtgcatgtggtacagtaatcgtaccttagttaagaacgctcttactcatctgttaagccttatggataggtgtatgggcgcctagatacaagtttgtaatatatattgtatattatatgcttttcttactgagtctatcgatacaaagatatttctttcatgagtgggtaaaaggaaggctaaagttgaatagtagtgagtctgaagctcgaggatgattgtacatgt

SEQ ID NO: 361754 - DNA, 1343 bp, Cannabis indica
agtagccttcttttctgttgatgttagagttggtgccggttgatctttaatctcttcattcactggttgtatcatctcaggcccatcatatttcttaccactcctcagggtgattgccttgcagttttctttaggattcacttcggttgtactaggaaagtttccctgaggccgagttgttatctgagttgccagttgccccatctgagtttgtaagtctttaatggaagatcttgtctctgtcatgaacttcaataataaatctatttgaagaccagaatttccactagagttttgttgctgagtctgttgttggttctgtgactggttctgatttctctgttgatagaacccactgttccttcagtttcctccttgattaaaccgatagttgttgttgttttgagagtaatggcttttgcttcatccattagcaaattattcacatcttcctgacattcagaataaggatgaggacctccacatagctcacagaccacttgagcttgcttcacttgaacagacatcagttttgttagggcctctacctgggctgtcaatttggtgatagcatccacctcaagcatcccaactaccttctttgtcgactcctctcagttggccattgctgattattcaaggccatctcttccaacaaatcataggcctcatttgcacttttcctcataaatgctccaccagctgctgcatctataagggttcttgtgttaccaaccggaccgttgtagaagttgtgaaccagcatccacttctcaataccatgatgagggaactttctgatgagatccttgaacctctcccaagactcatggagagattcattatcctactgacagaagttattgatttctcctcgcaacttggcagactttgctggaggaaagaacttagatagaaattttgttgccaagtcattccatgtggctatggagttcagtggcaaggagttcaaccaactcttggctcgttctctcaacgagaatggaaacaatctcatacggatggcaacatcactaactccattgaatttgaaagtctcacatagttccatgaagtttgacaagtgcagattgggatcttcagaagggagtccaccaaactggactgaagactgcaccatttgaactatggcaggcttgatttcgaagttgttagcatccactgccagtggcctgatgcatgactgaacccccgtaagagttgggaggatataatctctcaagctacagccattagcttgatctctcaagcgtgcaaaagccatgaaaaacaaaaggctgctgcttctggtgatgctacacttaaaggaaagtgtttctact

SEQ ID NO: 361755 - DNA, 679 bp, Cannabis indica
tatttaagttccaagaaaaatattctaatttaagttggtctaaaattaattaacaaattatttgtcaacataattatatttttctacttaattaaatattagaaaatataaattagtttctggaattcactatctagaatcttttctttaaactaagtgtgtttttctaaattaattttaaaataatccaatgaaaataatttcatttatttcaaaattaattatgttgataatttaatttttattaggttaaactagtataattagcctaatacgattatttaaataaggcaaatggatctttactgttggggttgttcatgtgagggagggctgggtccagtatgtcgtacccactattaatggccccctaactctcacacaaggcccaaaggagaggaatttaacccttcattatataattgttattcattgaataaatccaatactaaatgagcctaaataaactatcatcggtgatattttattttagcaacctagtccatttatctatccaaaaataaatgggttcctgcatgcatctaatcccaaaagcaaatatataggctcacacatgtcaattgatttggatgggccctatcatgcttctatgtttacacatatgaaagaaatacaaaatttacatgttacaaattatttataagatctattgacaatt

SEQ ID NO: 361756 - DNA, 488 bp, Cannabis indica
aaatatactaaacttaatctaaaattaatactaaaattaacctaacacaaatattgatactttgtgaacttacttgcaaaatgatcaagaaaagattagtaacaagtaataatcaattatttgtttatcattaaaataaatgagtgactgacttttggtcaacattcttccctttttgatgatatcaaaatatttaattatttaaaggaaaagaaaaggaaattggaacatgtagagtttagctcccccttaatatatgcatatattgatttactcagtttacctttgaatatttattgttaccttttcttgacatgacaaagctccaccttaatcatatattcaataaattggttaatacttgaaagcataatatgatcattaatgccaaaataatcaatttcaatatcccccccgttttgattttatcaaaaaggatggcatggaagcaaggtcaaactaaatatatttctcccccttaatcatac

SEQ ID NO: 361757 - DNA, 370 bp, Cannabis indica
aaaataaattccaacagtatatgagattactcctcactgttggagaaaatccaataaccagaactctgatggcacagtttgttgtaattgatgttctctcggcttccaatgccatgatgggctgaccggccttatacaacctgaaggcggtaacatctatctacgacccctacctgaaatgcccaataaggtaggggtttggatgttgagagaagaccaacaatctgcacatcactgttataattttgccttatccaaagccaaggaaaagaagatgcatccataagacatgaacattgtaaagaccgcttagtttaatttggaaattagcagttaatcatgtttagttatgaaaattatttatagctat

SEQ ID NO: 361758 - DNA, 535 bp, Cannabis indica
atttcccatattttcttttaggggggaaccgaggcatctgaggctcttttgaaatgattaccccttttcgctgtttgcctatacatacgagtgagcatttgtccacaaattcattttcaccaaccttccttgctaagtaagttcagagtgaaaagagaagtttttggattcaagcgtgctaaagtgctttcatcaaaactgctcgtttggcttgacgcaacttggacccagacgcttgatttcttgagtaagttctcgatttcttttatgtttgctatgcacatttactttctgaatgcactttcaatttcgctgtagatgagatgtagaaaaccttaagattagaaactcagcgattttcctttgtcacggttcatgcgatttcatcgtccgtaatgcttattttttgaactgcataatgcctgtctttcatcctgcttattctaagcttcatgagattttcttgccctaactcgcgaaaatttcaaacttcctgagttttgacttttcgttgaatattctcattcttcaatct

SEQ ID NO: 361759 - DNA, 758 bp, Cannabis indica
gctatgagattcccggatgagattgaagaatgttcacgtttgagtgtgattgattctattgtggctgaaagttttcacaaggaagtgtggaaggatgagagggtgataagctctcttgaagatcttgaagctttgagtgaagatgaagaaacccaagttgcttgggttgagccgatgcaacctttccctaaattcaagagatcttttgagtctttagagttgaaagaaagcaatttcaagcctccaaagccttccatccaagaaccaccaaagttagagctgaaacctttgccaagccacctcaaatatgcttatttgggggagaatgaaacgctgccaataattatttcagcgtgtttggaagctgaagctgaaggtttgttgctagaagtgctgaagaaacataaaagagcgattgggtggactatggcagacataaaagggattagtccagcgatttgcacgcacaaaataatcctagaagctggctgtagtaactccattgagcatcaacgaaggttgaatcctgttatgaaggaagtagtgcgaaaagaagtgataaagtggctggattatggtattgtatacccgatttcagatagttcatgggttagtcctgtccaatgtgtgccaaagaaaggaggaatcacggtggtggctaatgcgaacaatgagttgattcctactcgaactgtgacaggttggagggtgtgtatggactatcggaagctcaacaatgctactcggaaggatcattt

SEQ ID NO: 361760 - DNA, 589 bp, Cannabis indica
ctcatggacctcgtcctgctcatggacctcttccttaagggacttgcagtcttactcgtgcctgtgctttctcgatcattattgcaacaagtactttctcctcctcacgttgattggttgtgggttctcgtgcaccctgagataacactcgcctcttcacgccccattcttctcccttgggtgtggttcgttgtatgccccctactggggtttgtacgtgtcccttccctattggtttgggaagaacattggtggtgcctcgttggtgacccacgtgtcccaggttgagtcctaagattcccctcgtttccacaaggaatttcctgttacctggtttctggtcgccttctattctcatttctgtgagaaggttctggctgatcatttgcttgttcatcttcagggggaaccacagtttcctcaagttgcttgtttttagggggaccttcagtttccccaggttgttcttgctgagcgttctgagggttctcctgagccgtctcctgtctcttggttcgtgagtcgcgaggtctgcctcgtggtcttcttactccaagatcaggttgattttgagcactattctcctatg

SEQ ID NO: 361761 - DNA, 518 bp, Cannabis indica
gaatcgccgaaccaggaccctagaaaaagactaggaccgtgacgaggacccgcaccctgacttagaaccaaacacagacctagcctcaaacccaaactgagactgaaactcgggactggacatggtcgtgtacctaggacagaactgagacccgtacctggacctaaatctaggagccgatcccaaacacagacttgcacctagatagggatctagatacgaaccttgactaggaccatgacatagactgggatcagatgtggaccgagctctttacccagaccaaaacttggacccgcactccggagctgaacttagacctggaccggaacctagacccaaatcggggtccagacctggagacggacccggacgcagacacggacccaaaatccaaaccaggactcgaactccgacccgaactcaaacccaaacttgaactaaaaatcgcaaatggaactagaaccgaacgaggactaggactaggaccaagacctaaaccaaaactcgaacccaga

SEQ ID NO: 361762 - DNA, 571 bp, Cannabis indica
tcccttgtaaagtcctttatttttttttatagtgaaatgacaactaataaaatacaaagagtcttaatggagactctttatttatccgaaatgaagttacgcctataatagctccaccatttttcttcttattgtgtttgctccttcaaaatgtagaagttattaaattttaaaataataataataataataatatattttttgaaagaagtaatgacatcaatttactttgtgatcttaattatattttctcccttgagttattgttactacatgtgctgatatttcaaaatctaagtgatcaagttaagaagcccttgaactctagttttgaaaaacatgattatttaccaaatattgttagacatttatatgtataaactgaaacatatatatttatgtataaaatgcggaatcaaatcaaacatatatacactatgaataagaatcgaaatacctccagccattgatttttgagcttcaatcccacacaagctttgatctgcaaaggaaactgattgatgtgggtaatcgggcttcctcgctctctcaactctctttagatggattt

SEQ ID NO: 361763 - DNA, 715 bp, Cannabis indica
aaagaataaaaaataatcaaacaaaatagtatgaacaaaattcatacgtacgatcgcagtgggattcgaacccacgacctttagattcggagtctaacgcgatatccactccgctatgcgatcaagacattagaaaactgaaggattttccaatataactcttaacaaagttcaggttcagcacaaaaagatagagaagagaatcgagaaacaaaaaccctagcgtaggcgacggcaataatggatctaaattagaatagatcctaatgaaaaccaaaaccaaagatctcaaggaaaacatctctgagatgaattagaaagagactaaaagagagaacacaaaatcaaagaagaaaaaacgtacctttcgtaaaaagagagaggaaaacgccaatgcggggatcagatctctgaagggtctcagcagaagcagtcgaaacgaactgagcgacaaaggagccaagtttttttaaagagcagaccgatgaaattgaccgggaccaaaaggatcatttatagaagactcaatacagtcccgatttcattttaagggaccaagttcctcaaagcttcttgaggatagtggattttggttaaaagtatagaaaattctataatgcacccccttaaaaagatacaccgatacatctctctctgttttagtatccgaaataattttttagacaaattttttctcatagtcatgtaaattata

SEQ ID NO: 361764 - DNA, 850 bp, Cannabis indica
tctctctctctctattcggccctctttgagcagcaagaagctggccattttctcttggatttcaagctcatattagcaagatttagtgatctcaaattgttggtaaagtttcttcatctttcctttaggtttcttggaatttttgaagagaaatggtaggttgcatgctagttttggagttggttgttgttgctgtgtttatatgttgttttcagagatttaagcatgttggattgagtggattgaaactgttttgatgcatgtttggttggttttaaattggtttagagttttggttcaaaagctttggtttttcaaagtgaaaatgtgaaattggttgttgtgcttgttgtttaagtttgagaatgatttctgcagtttttatatgcatgattatgtagtttgattctagttttgatgcttgtaggtgagctttagccaagtttgagttttgaactcaaagcttggagctcacatggcatttttcgtatctgtacttgctgggttgttttgatgctttagaaatgttctttagggtatatagaactagtctggaaggtttggtttggtttgggtttgatttgaaagagttatgaatttttgaaagtttcctgcgaggaaccggaattccggatgtgcaaccggaattccggatgagggttcaggaattcccagaaccggaattccggttgcacaaccggtctaccggttgggggattttcaggaaccctagtttttctcgtttttatgttatttggggtattgccatgctttttatcgatagggaaactttaatttctagtttaagtccctgggaagtgatttagcgtatcacttattagtgttgtga

SEQ ID NO: 361765 - DNA, 684 bp, Cannabis indica
tttatagtatagacgagcgagtcatttctctcaaatggaaagctgacattcaaatgatgtagattgttggagttcaccctgtccccgagaactgcaattgtcagatggagtgttatgtcttctgcgaaaaagtgacaaggtttacattatcaacctcagagagataggggaaaagctccaactcgctatcaaggtcattggtactaagttcttatcaagacatcccaaaacattatgatttataatgtgtttaatacacgattatcttgacccagtaaaagcagactaatcacagctgtgtgatattcaaataataaccgcatttattttacgtgatatgtaattaaaccccacgatttgaggggataattgttgtaaagattacagtaaactatataattaactgcctgactatgtaattataaatataggcaaattagatggaaaaagggataacaattactatctacaattactatctagaatctttaaactaagtgtgcttttctaaatttattttaaaataattcaatgaaaaattaattctatttatttcaaaataaattatattagccttattcaattttaattagattaaactagtataattagcttaatacaattatttaaataagacaaatgtgccttcataattggggtttttcatgtgagggagggctgggt

SEQ ID NO: 361766 - DNA, 769 bp, Cannabis indica
tgttttagattttctttgtatgtttatttgtgtatatctgagtatttgtatagttttattttagatttataaaattaacattaaaatctgggtatttattttagatgtaagtgtgatctcaggatgaatatctggatctgtttttttttctttggtttttttgttgtgtcagtgcaaaaccaatgagaatgctatgaaatttaacttttacaattagcgtctgctttcaaccgtcactaacttttggtgccgactgttgaaaattgacacaaaataatgtaatttttgtgtctacggtaagtacatcaattttaacaacagacgctaaaagaataaatgtaagttgcaaaccgacgaaaaaatatcatatttgtagtaataaaattagtctaagcaatcaataactaacacatgttataatagtcgcttaacttcatttaaaaattttgccctagccctccttaaagcatgagaggaccctactaaaaagtgaagaattaatataatcttaccttttttaagggtaattggcggcataacctccttaagtggccaagtttttgcaactaaccctcaattctaaaattttagtggtaaaacttcttaaacccaagttctgttagcacttagccctttccatttatttttgggtattaagtgtcatgttggaatgtccacgtgtacatagtgtacacgtggtacaattttattggtccacaataaatatttaaaaaaataaaaacaaagtaattattttaaaaataaaaaa

SEQ ID NO: 361767 - DNA, 1330 bp, Cannabis indica
ttataggatttcatctagggttaggattagaattatatagaattaaaaaagataaaataatgacttaaataaacctcaagtggccgaaccctatagtgggccctacaggtttcaatttttctattttatttcagaacttatcttttctttcataaaagtcatattttaattataactctataaatgtcaaatatatctatttaataattattattaattataaaaaaattaccatttaatttatttattaattagaccttacaaagtgtcttaataaataaataaaccctaaatcctctcttctttttaaataagcccttgcttagtgaaaattcataaacaacacatagtcttatttagaattctaattaattgagtctacaagataatattatctcaaacaatgtggggaccatgggcctatgtaaccaagctcccaataagtacacctgaaatttattcattactgagtaaatttcagtaaatttcctaacttattaattcttcctgactccactataaattcaaaattgcacacctaattacatagaacactctatatatacactatgaattatctattgtttcaatccaaataataaagatccactatagataatttacatcgagtaaggacaaatttactgttctatccctcaatgtgttttatccttaaaacacttagcttcttataaattatatttcagtaaactaatataattactgaaatgagagctcttctatttatgtctgttaagccaagctcaaaggaaattgtcatttcacttctatataattatagaagctatagattctgtatctatgattagcgctcccacacaattgcactatcatgttccaaagatgcaattattggttgattcatttggttagctttaacgaacaagtcaaagaacatgaatgatatagttaagctataacctaattatctcaggattaagatctattgacctaagatcaactaagtgatattgacttagaaagatataagggtaagtttatgatatcttttccactttcaatatcggtcagtccgatgtatactctatacatctaatactagcatactttgctaatttcctggaaagaacatgtggggaccatgggcctatgtaaccaagctcccaataagtagctctgaaatttactaagtaaattttctaacttattaattcttcctgactccaatatagattcaaaattacactcctgattacatagaacactctatatgctccaaaatgttatacactttgaattatccattgtttcaatttaattaatcaaagatcctctgtagataatttat

SEQ ID NO: 361768 - DNA, 508 bp, Cannabis indica
ttttttctatagcttttattttttatgtgttgaattatcagtttgaggctcatatttggctaacgaaaatttgcattaacacggggtaaaaggcagactacccaagcagaaagctagtttggttttccgagctatttaccaggacttgactacttcaaaatgatatcatggagtccaggcatgaagacaatcactacaacaatgggattgaattagaaggatacggaaggctgtctcaatcccctattttgtgtattctatttatgtaatgaatgttccttcctattgtaaacattgtaagcaaaagagaaaccttccatcatgcataaaggccctataaatagtaatttagcttcactagaaaggggattgaaagaattgctttagatagagatctaagagaaatactcagagatttcattataatagctttgagagaggaaacactttgttctttgttctcgagttaattgtaacaccctaactagcataggcgtattacgtgatt

SEQ ID NO: 361769 - DNA, 825 bp, Cannabis indica
tcctttgggcaagctttgtttagatcagtgaagcctataaaaacccgccaggtctcgttgggctttggcaccagtaccgaattggccagccattatgggtagtagacgtctcaaatcatgccactcgttagcagtttgtccacctctttttctaaagcttttgcctttgctgagtcgaggggccgtcgcttctgctggaccgggggcatgtctagattgacattgaggacatgggtgatgacgtgggaacttatgccggtcatgtcttcttggcaccacgcgaaaacgtctgtggcgcctcttagtgtctttattatttttttcttttttccggttctaggctctttcctagccggaggactttggtggagtcgaggtcgcacaccgacacttccgcgacgtcctccattggttctacaatatttttcggatcccacacggggatccaactcatcttcttccaccatttatggctcaataatttctcggaccatcaacacgggtaggtgggtagcaacgttatagcactgcctaacttccccttggtttcccctcacggtccatatcccagcttcttgggttgggaattttaggcacaagtgccgtattgacgtgactgcaccaaaatctaccaaggccggtcggctgaggattgcattataagttgttgggtagtccaccaccacaaacgtgcaatacttgaaagtgctttggggtgtgtccgggcacaaggtgaccgtgagcctcacttttcccatagggataagtgttgttccattgaaccctgtgagttgagaaccatttggtgacaggtctcggtccgtt

SEQ ID NO: 361770 - DNA, 574 bp, Cannabis indica
ggacaattttgtccctgtcattttgaccaattatttaagttggtgtagggacagtcttggaatttcaccaagaaaatcctacaattatttcacttccttactaggtaaagatagtttattagcaggtaaactattacctgctaatttctccctataatgtatgtacttttgatgagtcatcatgcaatgtggcatgttacatgtcatccttaagtggtagggtagctgaggtggctttcaacataagactacacgtgccacatatcttggcatgttctcaatgagtcacttgcaatggtgtattagtaaggatgtcttttatggtatttatttttgtttagcttaaaggttcaaattccaatcataatttcttattgagaggaattatatttggtcctttaaaatgccagattgttgtgatcttatgggcaatgccatccttaatgagatggaaatcctcgtgtcatattatatagactaattagtaacttcccccccccccccctcccccgaattttgctatcctcttgaactttttttaccgttagaaattcccctcgaactattgagattg

SEQ ID NO: 361771 - DNA, 499 bp, Cannabis indica
tacgatttttttgattttatttacagaaactacggtctttttatgttgtaatcttgttaatttgttaattttttgttgttattttgatgttattttcatgttacttaattttatgtagttttcttgttgattttatattgttttcgtattattttttggaaaaccgtaaaaatgtaaaaaaatattctttgaaagtaaaaatgtaattattttacaaaaaatagtaccttatgtaattatttctatattaaattatatgtgacccaatacttaggtgacatttggtttaccgtaatggtaatgaataggtccattatgttatttgcttttccttttaaacttttgtaatccattacaatgtaatagttattacattgagtattgtaatgatgattatatacgaaaatcaatgtaattcccattcagggccggcccaagcattttgggggccttgtgcgaaattttaaaattgggccgtttaagaaaaaaaaaaaaaaaa

SEQ ID NO: 361772 - DNA, 508 bp, Cannabis indica
aaaaatttgaaatctggtaggatacgcatcttctccgtggccatgctgaggcccaccgcggtagcagcttgctaatgaaaaatttctgtcgagtatttagatttgtattttggacttaacttcttcaatataactcggaatggaacaattaaagatctttcaaaaagctgagaacaagatctaaaacttacatgcttagctccaagtacagttctacttccaatgtcattgaaatttgcaattaagtttttccttgtaaaattgagctcgcggcttctactattttttttttaccaaaatgtgctaaaatccctccaacggactccaaatacatgattagtcttaaaaatattctaacaaattaaaatcatactaatcaataatttaaagaattaattttagaatattaatacataaattgacatttttataagacaacatattgacttattagttgtattgttggttgttgtttaacaggattgtgtgaactatattgaatttttaa

SEQ ID NO: 361773 - DNA, 589 bp, Cannabis indica
aagttttttttcttttttttttctttttttttcagttggcttcattatccattattattaaatgttttgttttacgagtctcagactctgaaggtatttctatgaaattggtcacttatgacactgagtctgagccgacttgttatgactgcctagtgcccgctccattatttcttggcctttctctctctctttttttcaaatatatttttggaaatttataataaataacattgaatcatgtatcataggaaatgtattcattttaaaatttataagaaaataatttttttagggtcagtttggcacaactgtgctatgggaaaaaacagatgtagcggtattgtgaaaaaacagctgtagcaaaactgtagaaagatgagtgtttggtaaattatttattttattataattagtttattattttttttatgtttttaatatgtaataaataagtaaatatgattttagtacaaaaaaaatatagtattttaataaaaataattttttctaaaagttaggttggagcagcttccggtagcttctccaaaaattcttcaaaaaaactattttttgactgtttaccaaa

SEQ ID NO: 361774 - DNA, 877 bp, Cannabis indica
cttcattgaatgggccgagtccaatggcgtgttcgtgctcagaatctgctatggtctccagttaatatttcataaaatttttagaaaaaaaaagtgtaaatattataattaaataggttaatggttaaaataattaaatcaagggatttatatataaataaaaaaattatttaaaaattttaattgctaaaataggtctttgttaaatatttatttaattacttaaaaaatagttaattataattaattaattctaaaaatagaatttttacctattggtaacctgctattgcaggtcaaaaaaaaatgtaaccatatggttacaataaaaatgtaaccattgaatagtcacccatatttatatatataatcagtagttactactaatatatatatatcttggttcagttttatttttaaaaataatatactactataacaaatgatacatgtaaagtataagaaaaataccaaatgtggtggtaatatattattattggtttatttcaatatgaaattttatacatttggatttaataattaaacaatataagaaatccttagcctattataaaggtattaagtgttgtgttgagtaccttaaaaatgtaaaacaaaaatgctaaaagttttaatggtgtattttttgtttctacacaggattggattctgtagtgctatggcttccaatgttactaatcaatcacgtaatgtttttagcaagaagttgatggttcaagaagaggtaataatatttgtacaagcttcttgggcttaaaaattgtgaagagtgtgagtgagtggtagcttaataatgttaatataatggggtttgttttttttttctttgctttattttattagtaattgtaattga

SEQ ID NO: 361775 - DNA, 473 bp, Cannabis indica
tcgttctaatcccaataatcaaagatcctctatagatgatttacactgagtagggataaatttaccgtttcacccctcaatgttcatgacataatttgaagtgaaggacaaaaaggctggagtcaaactgtttaagatcaaactcacttgagttgtatgatctataacaaatccatgattctcagcttcctcgaagtaactagtcatctggagaaggtgatcacgcacactctgatgaggtttcatcggtgcattgatgaaattcttagtcgcttcacagcgagcttaaattaatgccatcctgaacagttcagttaacttgttcatgatttctgcagtcatgagagtgtttgcaaaccttgttttcaaggtgaaagccatgctagacagcataaagtatcgagccttgttgttagcattctgccaacgctcgaacttttcttaactgccttggttgcattctcacctggatg

SEQ ID NO: 361776 - DNA, 828 bp, Cannabis indica
tggactcggactagacccgaacccgaacccaccgggacctaggacccgaatattgatggaggaccctgacctatgaattgggccccaaaaaaaggcctagaacttgggccttagaacatggatcgggatcggggactggccctagacccaaacctggacataggacccacctcgggacttgggatccgggactcgatggttggacccgattcgttgtcgatgtctagatctaggacttagaccagaacgcgaacccaaactcttattaggaccgggacacataccaagacccagacccacacttgggaacaaaaactcaaacttgaattggaaccagatcgagatctttgaacgggaccgagacgtagacccaggccagaacccggaaccagagccagcctcgaaccctactcgagaccgaaacccgaacctgcacctcgccccgaacccgtacctcgtgacttgaaacttgaaccgaaactagaagcggatcaggaccgaggaacaggaccaggaccaggacatggacccagacccaaaactgtaaccggaccaggatccaaactcggacacaaacccaccctgggattgagtccaaaacctggacccaaacccagaccagaacctggtctaggacctagaccttaactaggaccatgatcgggaccccaacccggacccgaaaaaagacctagactcagaccaggaccttaacctgtactccgacctaaactcggacccaaacttgggatccaaacccgaacctgaacttggacctagaccgaggatccggacctagatgggagacctgggccccaaacccaaact

SEQ ID NO: 361777 - DNA, 544 bp, Cannabis indica
attttcttagataaactctgccaagtagcgtggttgccacagaatccatcatgtacttctgacaaaagtcgtgcagcttcttcttgtgtgacacaccgaagtaatggaattgaaaatcctcttctatacataactctctctaatatgatgtatggcacaacctttctcctcattttttgagcttcatttctattgtctgggagttctctagtgttgaggtaggctgctattggcgtcatccagttcggggatgtattaatcatttcaacctcttctgtgccggtgtacctaggttcttcgagaaactagataggaatcagatttgctctatcattcacattgctgctcgcgagtcgagctaatgcattagcagccgtgttttcttcctttggaattcgcctgagagcatagctgtaacgccttaaataattaggcacgctacccaaaaaatgcttatgaaaccctaatcctctaatcgggattactaattaaaatagcgcagaatttaaacttttacattaaacagactgaaaataaacttgta

SEQ ID NO: 361778 - DNA, 691 bp, Cannabis indica
ttaatcacataatcttgattactttccactgtactgacgacaaaataaacaagaatataaatgtgaaatgggtttggatgaatttataaatcaaataaacatttaaatgataacatgaaccaaatgacacacaaagtgatgaaaaatacttctgtttctttattgatatttaaaggataaagattacattgaaattgagttttatttagggcataaaacccaacagtgttgtcatcagtggtaatcataaggtcgtatcttatttttggattcaatccatccaagtacttctctttcttgctgaagttggttggcataatgcctgaggacaacctagccaatggatcaaactgagttgtgtactcggtaacactcatattctctttctgggtcaattgggtaaattctatcctctttgcacttctgattacctcgttgtagtacttggcattaacaatccctggaactcttaccaggtaatggtggtaacatcgtgagtaagggccacaatgtcccaccaaacaacggcatcctcgtggaactggaatgtggcaaaggccacactgtcattaccgatgacagccataaaatttgaaattcttttaataagtcagccacttctcgacttccaccacgtcgggacctctcagaaaaattggaggtgtctgccatctgattcactgcagcaatc

SEQ ID NO: 361779 - DNA, 661 bp, Cannabis indica
aattcccccacttaaataaggtactgtgatactatgtccaagaactttattggtatcaattactattacagcagtaacatattaattggaacaaaatacaggatcaagaataaattctaataatttgctaatttgttcattatattacatttatgtttaatcaaaatatgtgtgccatagagatatgtggtgtattgagtatagtctagagttcaaaatgaactacacacgtaaatagctttatccacccctaagtgttatagagatcatgtggagttatgaatataacccagagttcaattgatataaaaaatcgttgagttacatatattattcttaacttcttccacccctatgagatcaaaagatctttttattaaacaaaatcttaataattgtttaagaattaacaattattcataaacattgaatttaaattcaaagtgtttatatggtattatctctttgcagagaagaatataccatagattttgtataagtaataaaatacaaacacacataaacatttaaatataattggtattggcatacacaagataaagaaatatgaagctcaattcatgaattcaattccttactaaaagaaaaaagtttattataatattctcaaaaaaataatgaattgtctgcaataatatga

SEQ ID NO: 361780 - DNA, 718 bp, Cannabis indica
aaagacccaacaaagaagaaaagagatgaagtacacctccatcatcatgaataaggcagctgccatttttagagaggagtaattgtagaaagtacagagagaagaaaagagaagggggacctaagtgcaagagaaacagaaggacaaaagccctattgtttgcatttcttttcccttttcttctatttttcttttcttttctttcttgtcactaatttctagaaacttgatagttgtaaaagagaggcagtagccatgtatgaacaattcttaatttggattgtaatttttgtgttgaacatgagctaattttcttaaggcttgagtgactatggactgctatgttgggtatgattaactttttaagcatattttagcatttatgcctttgttcattcaagtgagttctcatttttatttgattgttatttcttggccattaataactatttgctaagctagatcttgttccagaagggctagatctagtagtttaacttgaatggagcaagaaaaatcctagatttaggtttttctttgtaagtggaataggaatatttaatttaccttgcataacttaagaattgatgcataattagtgttttctaatctggtttgatataggaatatgtgaatctagatggtagaacttaaattgtgagttttggaaaattctcatagacacataaaaattctgttatcactggcaggaatgctg

SEQ ID NO: 361781 - DNA, 1674 bp, Cannabis indica
atcttacctcgtttttgaattcaggggtgccggccaacctgagtggaacaaatgcttggcgaattacaggctcctaaatcacatcaatcataatataggtaagtgacatgctaaatcactttttggggacctaaacttgaaactaaaagtttccctatcgataaacaacatggcaatacccttaacatcacaaaaatgggaaaaactagggtgcctaaaattgccccaaccggtagactggttcccagctggaattccaattttgcagggtttcccggaattctggttcctacacgtccccctgaaccgaaattccggttcagtgcaggaaacgctcaaaatttcataactctctcaaatcaaccccaaatcacaccaaacattccaaacctgttctatacatcctaaggaacatattcaaggcaataaaacatcttaacacaaccagaatcaaaattgccatcaatgagccaagcttgagttttaaaactaaaagcttgctcattcaacactacaacccgtaaaaccaaccaaatacaacataatcaaacataatttaactacataaaactattccaaatgattacagcagctacaaaactcatctactcaaaattcaagtaaaattcaaacttgaaactaaagaaaactaagagaggagttgctaggagcttacctaaaccttcagattaccaaacacttgcaggaaaaaggttgaattgttaaagaacaacccaaaccctagctggttctaggtgggtttgaaggagagagagaacttgagagaaaaaaatgtgtttatgtctaattttttgatatttcgagaaaatgggaaaaaatacttgttttattaaaatcatctcagcttaacattaataaaaaaaattgatttaattaacttaaataaactcacaaaatgacaaaaaagctaatggggcaaaatgaccattttccccctcccacactaagtcataaacggtacttaggggcattttgggaaattttaaaatctcgactattcctgacattcctaatgtctaactatattaccccgctatactaaaaatactaagatgtgattttaatagccaaataccgcgttccaatgttgtcgggcataaaacatgtaaaattatgaaatttcaaaatatgacacatataaaatgcattctgaattcaaataaattatcgtaaattaataattcaaaattaataaataatttctataattaaaccctaattatctgctaatttctaaattaaagctaagcgatctttacatcatcagtaaccttggtttttgtaacgccctaaataattaagcatgctacccaagtcacttattaaaccctaatcccctaaatgggattactaataaaaatggcgaagaattgaaactttaataacaataagaatgaaaataaactcgtaatactttaaactttataaactaaaagttacagatcttgggatcccaaaaacatttacaaaatattattacaagtccttttttttcagccggcctaagcgacaaaatagagtatcgaaaacacaacactggtagactgcaaccctcttggtctaatatggcccagacatgtacattcttcatccagctcctgcactcatggctgatcagcaatagtcttaccctttcctgcacagtagagcacc

SEQ ID NO: 361782 - DNA, 519 bp, Cannabis indica
tctaagggatatgtgatgttaaccaaaaataagggcaatataacaatagaaattggtgatctattttcttttgtgccattatactttatttttatttgtaaactcatgttcttcttcccttcaataaataccttttggcaattggacatatttttaactttacttatatgtatgtagaaatttaatcaaataatgttaaaataattttagaaaatttattaatatcaacaatttgtctttagaatattaaatttattattttgaacatcattattatcatttgggataattgcggcaaaagtctccaaaaacttaaggttgatgcaggttagtcctcaacctcgaaaattggcgataatagtccctaaggtcgcaatatttgttagttcgttagtccctttttctaacggatccgttttctaattcaaaatgccacgtgtcgataaataattggtttaattataattttaattcaaaataatttaaaattaaaaaaaactaaataaattattttaaaat

SEQ ID NO: 361783 - DNA, 746 bp, Cannabis indica
acacctcttcctcaagtgcctaataccattcattggtgaaacccgcaagaaaacgtgttcccctacctgaaaggtaatgtctctacgctttggatcagcataacttttctgcttgctttgcgaagcaagcattcgagccttgacctcatctattgcttcattggtcctttgaactaattccggacctcagtacttcctttctccagtttcatcccaataaattggggagtgacatttcctaccatacagcatctcatagggaaccatccctattgtactttggtaattttttttgtaggagaattcaattagaggcaagtacttactccatgaaccctcaaagtctatgacacaagctcgcaataaatttttaaacatctaaatggttttctctgattgcctatgagtttgagggtgaaaagttgtgttaaacttcagctttgtgaccaagccctcttaagactcaccaaattttttgattgtaatctttggatccctgtctaaaacaatggatttaggagcgccatggataaaaactatctcctttacatttagttcaatgtactgatccacggtttaggtaattataactggctgaaaaatgagctgactttgtgaattgatccactatgacccatattgaatcatacatttccgtggttctaggcaaaccaacaacaaaatccattgcaatgtcctcccatttcgactcaggaagggctagtggttgcaataaccctgctagt

SEQ ID NO: 361784 - DNA, 413 bp, Cannabis indica
gatcttatacacccatttgcacccgatggttctacaacctttgggtagttcaaccaaatccctaatttctttttgtgacatagaactcaattcttctttcattgcatccacccataatgcagatttaggactattcacaggttctggtaactgcctggctcagaatcatctcgcacattaaactcatgttcctgcatatagacaagatagtcatcgggaatagcaggcctacaggttctttgtgatcttctcaccacaacctcatcgtcccccaaatcaagaatttcatctcgtactggaacttaaggttccacatgagcttctattggaacttgttcaatcacaggatcattagtaggattagaagcggaagcggaagcaacaggtatagggacatgttgggttttatgccc

SEQ ID NO: 361785 - DNA, 606 bp, Cannabis indica
tttggcaacgaagtttctgtctaagttctttcctccaacaaagtctactaagctgcaaggagaaattaataatttctgtcagctggataatgaatctctccatgaggtttgtgagaggttcaaggatctcatcaggaagtgtcctcatcatggtattgataagtggatgatggtccaccacttctacaacgggctgattggtaatactaaaacacttgtagatgtcgcaggtggtggggcatttatgaggaaaagtaaaaacgaggcctatgaactgctataagagatggccctgaataatcagcagtggccaactaaaagaagtcagacaaagaaggtggctggtatgcatgaggttgatgccataaaaaaattgacagcccaggtagaggccttgacaaaactactagctgtgcaagcaaaacaggttcaggttttctgtgagctatgtggaggccctcacccctatgaggaatgcccagtagatgtgaatagtttgccaatggatgaagcaaaagccattgggaattactctcaaaacaacaactttgggttcaatcaaggagggggtcgaaggaatagtgggttctatcagcaaagaaatca

SEQ ID NO: 361786 - DNA, 739 bp, Cannabis indica
tccaagcgcatccgatcaaggtattaaccaaccacccgcttcggcaagtcctcaaaaaacctgaagcatccggaaggctcctcaagtgggcaatggagttaagttaattcgacttacactacattccccgaatctccataaaaggccaagccttggcagacttcattaccgaatgcaacgaagccgaggcaaccgcaaatgtgccagcaccatcggtccccacatggagagtgtttgtggacagagcctccaatgaaaatagatccggagtaggagtggcaatgatatccacgaccggactgcgactccaggcggccctacaattcgacttcccagcttcgaacaatgaggtagaatatgaagccctaatagcagggctgaaattagtttaagccgtaggggccaaaagagtggaagtctacagtgattcccagttggtcgtaaatcagatatcgagagaataccaaacccgtggtgaacgaatggccgcatacgtaacaatagtccgggagctgctccacgagttcacagattacaaaatagaaggaatcccctgttgctataaattataaacgctacgcaagtatacgcaatcaagtagtaaatctcacacaggtgaggtcgatcccacagggaattggattaagtaccactaaattatacttatgattctattcggtaaatcaaaagcaattatgatttaaaaacagtaaaatatgaaagaaattcagaaaactta

SEQ ID NO: 361787 - DNA, 635 bp, Cannabis indica
agagtcaaagataccatccattgaatagagatttcagctcatctaaaatgataaacattctagcaaccttttattcgatcaagatgagaatccagcgttgtcctgtttaggcgagagtcaatgccattatatcttatgagcttccaccattgtttcatacttttgtaagtcttactaatagttgccaccattagggtgatccatactaaaaataaaacacttacaaataatacatatctttggagattctacggcgttaaattactaatgaacgttcctctattagggaggataactcactaaaataagaactatgtagaaccaacaatgcagatcgaatgtccttatcataaagctcattatttaaactgtatttttttctaatatttattttaatctatttatttttaaatatatatttatttaattaaaattttttatttagaataaaattctaaatataaattttaatttaatattcataaaattatacttcgatggatctgaaaataaataaaattactttcgatcttagaaataattttcagtaaatattttgaaaaattattcaatttatgttgtttcaaaattaattaaaaaaattaattttcaactcaaatttaattttctataaa

SEQ ID NO: 361788 - DNA, 696 bp, Cannabis indica
ataatataacttaagagaaatttgcagcaaaagtatttaagaagtttagtttgatgcagataagtcttcaactagagatgtaaacggggcggggcgggtgcggggattgttctcccaccccgcgtcccaatacgcgtttaaattaaagcaggggcggggcggggattacccaacgggggaaagattctcatcgggtatccattatatatatttttttaaaaaaaataatgtctcaaagagaatttttttttaaaaaaaaaacaattgaaaaaactcagtaaaacaataagcataagtggaatattgtgcatagtaaatagagttagtaaatacaaaattggtaatcgaaaataaattgttagttttattttttttataacagttaattaagtgtgattattaatatgcatcaccgcgggtatttttataaaaactaaaatgtctcattactataattaataaaaagcctaaaacacgaaaaatattttaattgtagtagttatgattttaaaacttaagtatatacatatatcatatcgggacgaatatctattccccagctcttcccttattttcgactcgggtatgaacatttaaacacatactcgccccgcctccaaaattcgacctctgcctttgtcccattaggggtgggtacccgggatctcgaacccgcgggtataattgccatcccta

SEQ ID NO: 361789 - DNA, 568 bp, Cannabis indica
aacctatccaagttaaatgaaatagaatctcattaatattatgactaaaaataatgtgttcacatacatacataaatcacgatgtacttttatatcagctagcttaaggctaaaacggaaaaagaaaaagagaacacctctcaccactaccaaaatatatattaaattaatatcaggaatgtggaaaagtaatggtcaaaaagtagaaaaacatgatttcaaacacaatcatatatgaagaaaatataatatataggtgtatagcatggactatgatgatgatgaaagtgtcttagtttttcaaactaagtcattgttaattattcaattaatggtctattgggagaaaagttaagagacccaaatcaaacacaaagatttgcttctattatttatatatgaaaaactaaacaaacctatcataataaatatagggatatgattttggcccgtgacctacttttacggaatgtatttcgtggtacattagatgggttttagagtccattaaatgagtgtcagggtacgtttctactttttaaccataattacacctagatcaatctca

SEQ ID NO: 361790 - DNA, 719 bp, Cannabis indica
aaaataatctacaaatatctaacgtttacttttgtcgcccctaaaactcctaaaagtttcactaaaaaagcgtgtcaaaaatcatgttttgacttttaggggcaacatttatcacatttcttgacaaattcgtgggtgtgcttatttatagttggccagtaatatccttgttgagtaatcttttttgacaagctttgccaacctgcatgattcccacaaaagccttcatggatttctttgatgatcttgtttgcttctacgggatcgaagaacacaccgtaggagaggcatcgaatagtcccttctatacaatttgccttctacgattctatagggaggcactatatacaagtgttttcatgcctcgtttttgtcaacaagaagtttcccgttgagaagatagttaactataggtgtcatccaggtaggcgagctatctatcatctcgacttcttctttctcacatatacttggctcgtttaatacctcaaccggtaccaagtttaattcatccaagtcattctgcgaggctagttttgctaaggcatcggcattatagttttgttctcttgggatttgttcaattttgaaattatcaaactttttcaagttcttccgaaccttctctaggtactttgccatttttaagcctttagcctggtattcccctaggacttaatttacaatcaattgtgaatcactatggcatataagatttt

SEQ ID NO: 361791 - DNA, 695 bp, Cannabis indica
attaactaaatgcaatttattgactaaattaaccaaaaaataggaaaataattaatattccaaataaataaaaaaatttataaaaattcgaaaattttgtttttttttttttttgtaaaaatcacactgtataaacgacatgtcgtttttgcaaaaaaaacaaaacgacacgtcgtttctgccaatatgaagggggctgaaaatgcatagaaaaaacgacacgtcgtttttccacaaggggaaaaacgacacgtcgtttctctcctgtagggctgcttcacaagacggaaaaacgacatgtcgtttacaacgaacgacaactgcaacgtaccccccaaacgacacgtcgttttagccaaacgacacgtcgttttctccaaacgacacgtcgtttcccagaaaacgacatgtcgttttgagtcgtcttcttcagccaaccgggtcgattttgacccgtttttctgcacgtgggtccgacggacccgacccaaacccgatcggaaaagacaattccgacgaccaaaaaggcccaaatcaattccaaatgaatctaaatgcaaaaattaagacattcatatagattttatgcatcgaaaatacataaaacaaagactttaaaaattaccaaaattttctgaaaaataattttgagatttctttgtttttttcaaagtgaattttcatgcttagaacaa

SEQ ID NO: 361792 - DNA, 868 bp, Cannabis indica
gcatcgacattagagttttgttttcttggaaattgtttgattttcaaataatcaaactttcccatgttcttccgaaccttctccaagtatttggccatttttaaacccttttcctggcaattacttagaacttgatttacaattaaatgcaagtcactgtaacgcaccaaaccagctattaaggcttcatactcagcctcgttgttttaagtgtcaaattggaatcttagggcatagtgaaacttaaatttttttcggcgagataagtatcactcctgcacttgagccattttcattagatgctctatccacgtacaacttccaactgtctgtgtctcgctggataagtggattttcatctagaattatcccttctatcaggaaatcttccaaagcttggcccttgatggatgtccttaggtgataagttatgtccaactgccctagttcaatagaccattttatcaatctttcacaagcatctaattttgacaaaacttgtcttagtgtttgattagttaacacctttatcggatgtgcctgtaagtaaggccataatttttgagatgcatgaattaggcatagggcaatttttttaagaggcaaatatcttgattcttctcccagtaaccttttactaacatagtaaactggttgctggtgcttcccctcttctcgcactaatgctgcactaatcgcattctctgagatagccaagtagataagtaaagtctctctagttattggtttaaccaaaattaaaggggttcaaagatatttctttatgtttgtgaaggcttccttgcactcgtttgtccattcgaactttttgttgcctcacacacattgaagaatggtaggaacttat

SEQ ID NO: 361793 - DNA, 980 bp, Cannabis indica
ctaattggggcattacccactgtgcaaggagaagctaagtatgcggtagaagcagtcgacttcttcactaaatggacggaggctgagcccctcggctccataacaagcaagaaagttcgtgactttatcgtcaagaacattatctgtaggtttggaattcccatgaagatagtatccgataatagaacccaatttgatggcgacttgttcactgaatttcgcaagaggaataaaattatcaaaagcttctcgtcagtatccagaccttaggcaaatggacaggtggaagccgtcaataaaatcccaaaggatactatcaagaagaagctagacggttccaaagacagatgggttgaccagctacctcaggtactctgggcccacagaactaccaagaagatagccacgggaaacactcctctctcgctagcatttggcttgaaagcaatgcttcctattgaagtgaacatatagactcacagaagagagttttataattaagaagaaaaccagaaacttttaaaattgtccttggatctacttgagaaaaaacgaactgagtcgcaaatcaccaacactgagttagaagatacttcaacaaaaaagtcaagaaaaggctactcaatgtttgagactttgtgctaagacgagtctttgcaaatacgagagacgaatcaacaggagtgttcaacctgaactaggaggatccatatgtcatcaaagcagtagttggagtcggagtctataaattagctcgacttgatggctgactaatgaagaactactggaacgtagaatatttgcgaccctactgccaataaataaataatgtaactcgcatttatattaagtaattacaaagttttgttctttaaaaattacttaaggggcatttatgtatgattagccaaaattcatctagaaatacattgtataatgcaaacccgtcatttcaattttttttttgaaattaaaaggtt

SEQ ID NO: 361794 - DNA, 576 bp, Cannabis indica
catcttgtttttgagcttcttaactattatgcctcatgtttgtgatgtctattttctctaaccatgttgctttttgttccgtgtagaaatgtctcagaagatgatcgatgctctgaggaagaggattggtggaagctccagcgcatctcccctggccaagaagcctaaaggcggtgagggaacttcttccaaggaaaagacgcatgctggggaggtcatcgatctttccgaggagctgacagttgcaaacccctccactccaaaatttgcccagtcgacggagtctcaaggagggagttcggataggtttgaccaaacgagaagtgggtctgaactggtgcgtacctctactccacctttgccggtgcttccggaggccaagaaaggcaaggagatgctcgctcactatatgaactggttggttcctggggttagtgagcagctggccggtgccgacaaatgactcttctctggagctgctggtgggatgagtcttgaaggagttcacaagggtaagtcttccttgacactcttctttaagtctctttacttggctcaaatactcaagttttttct

SEQ ID NO: 361795 - DNA, 525 bp, Cannabis indica
gatcttccagcaatggattttacaaaactgattaccgaattggaggttattcttatttagaactggcccaaatcaggacttgattttttaataataaattagaggttattcttaaatagagtatctatatatttctatataggtgactattcaatggtttggttatatttttttttacctataatagaaggttaccaataggtaaaaattccatttttagaattagttaattataattaactattttttaattaattaaataaatatttaagaagaccttttttaacaattaaaatttataaatattttattatttatatataaatcccttagcttaataattttaacaattaaactatttaattataatatttacaatttttttttgacaaaaaattaaaattatttttatataaattaaaattttgtcctcataataaattttttgcaaaatcaccttttctaactacttttttttttttttttttgcaaaatacaccttttcttaactttttttttttaaaa

SEQ ID NO: 361796 - DNA, 689 bp, Cannabis indica
tgacaaagtgatgaaggcaataaaaaaaagggaccgacattattaatacataaatatgtaataaaaggatatgcatgataagaaaaaaataaggtagagtccatacccctttcgcgatcacgattcttactttgacagactgaccatatgttattttggcgcatccacaagtcaacaaactttgaggataccccaccctgcctccccttacatgggatttggaacaagtcatacgagggttttgaaacttgaagagaacctaacaaacatgattttgatgccttctctagactccttgctttacgatcatgaggaacatgtcaaatccaaattgtctagccacacgatcaggacgatatgaaataaaagaccaagaaagagatttagagttatcttgaaggcataacaaccactgaggaagacaaatagcgaaccaaaatcctacaccgccacgagaaatattcagattcgatcgaacctcgctcgttaatggtaccacacttccatcatacatgtccagggtgaaataagcatctatgttggtaagatacgagcggaagttgaattctgaaatatagtcaacaatatcagtcaactgtactgagccctttaaacaagaacgaaaccgtgaccaagcacgaggacttgcatccttcaaacatttgcggggtggggcaagcttatgaaaa

SEQ ID NO: 361797 - DNA, 646 bp, Cannabis indica
tttgtcctttagtggactttatgtgatgaaaatatataattttaaatgttatttgttggctgaataaggagtggaattattcatttttatcctttatttcaaaattggaaaaagttagaaaattagaaagaaaagcaaaactttttctctcaactctctctctctatttcggcccctttgagcagcaacaatcttggtgtttctttggttttcaagcagatttttgtgtgcaattcaagctctaggtatagctcttactcttctcctctttagtttcttgaaaaatcaagtaagaatgggttgcatgcttagttttgttgttgttcttactgttgtatgttgttgttgatctctgaagttagaatatgatttaaaatgttgattcaagcatgattgtgttggtgatttgttggttttatcaagctatgaaatttttactcaaaactatgttttttcaaagaaattgatgaatcagttgctgctcttattgttgttgcttgttgttgttttctgagattattttatgcatatctaggaagatttgagttggtttggatgcttgtttgttagatttaaccaagtttgagttttgaactcaaagcttggagctttaatggtggattttgattttgtgcatgaagctttg

SEQ ID NO: 361798 - DNA, 509 bp, Cannabis indica
ctaattagtatgtgattagtattatgagtaccctaatagtttctttgattctcaaaatagcgggataatatatgcttttcacatcttcaaatgttcacattaaagaataaatcacaatactatttttttaggcttaaacgagtaatgtggctaaaaattctttttaaatatgagagagaaataagaaagagaaaatgattaaagagagggaaagatgtcaagtaggtaacgttaattcttgaaaaataaacttaaaataaataaaaataaacttttattttaaaactaaatatttatttaaaaaataaaaaagtaagcgtgtgaaacatagtaattaatataaacattgagataatgtacattaagaaaaaaagtgctaggcatgtggattgcaaagacttaacatgcgagcaaaaaaaacaaaactaattaaaatgaaaacggtatgaaaagaacagtaattttgataattttaaaaatcacatcatttatgtaaataaaatatattt

SEQ ID NO: 361799 - DNA, 755 bp, Cannabis indica
ttaataaatttgaaattaacatagatatttattatagatattctaaccataatatttttaaatttataaattagttattttgtgaaatatttaattgtttataaattataagttagaaaaatgatattttaaatcattttatttatctaaaatttataaataatattttaatatttaaataacctatatatttttgtaaaaaattgaaaatggcttaatttaagatattttgacatataatttggataattgttatttgtttattattttatccttaaaataataattgtctaaccatatctattttaaattgatttattttgttattttaattttatttaattataagattagaaaatgatattgaaaatatctatttagttcttttcaaatcatttatcttattagatatttaatttgatttgataaaaataatttaaataaacatagatattttaaaattagtttgattttaaatttttgtaaaagatattttaggttattttaagaaccctaaattttcaaaatagttggttagttaaaatgataaattaattatcttaatatcttacttcacaatttgttacatgaatattgtgtttgttttatttaaattgtttattcaaaactttttttttaactaaactacattatttatttgtatctaaattagttattgtattaactttgtttaatttgtatccaacttgatctgtattttaatttattagtccgtacttgtcactagatcttat

SEQ ID NO: 361800 - DNA, 686 bp, Cannabis indica
agactcagaagtccatcatcacctgacatcgatcttatctcagacataacaaccttcccttttccgaacacgggaggagatggccgagcaggtgaaatgggctcccttatgcgaattgcatgttcaacaggcctgggcgaggccgggagtttcttcttcctcttcagtggagtcacctgctcttcctcagcttcatcttcaggattcaaaggctcctgagcatattgcttggccctggcaccacccttcaacttagcctcgcgcttaagttgaatgagttcatcctccttatgagctcgttcggcctggccagcatcagattttctcttcttccccgccacggacttaggagtaaagtcctcgggataaagcccgtacctcacaagattatcatcggaggtcaactggataatattccggtcttcccccggtaaccgagcaagtttttgagctctatccctaagagcaagagtgaggggaggacagtgatatgtcagaatctgctgaaaccgggtctgagtaatgctcgcatccttcgccatgaagtactcatcagcaaaacgccctattttgctgatggccttgtcatccgtgccggtcaacaacttgaagcctggctgagagaaataaaagtaccccgacctgtcttgtttgggggtggacttcaaatcgaagaaccaggcaac

SEQ ID NO: 361801 - DNA, 585 bp, Cannabis indica
cattttttttgttttaatacatacatggtatagtgttaagtatataatcagtataagaatgtatgtttaagagatttagaagttttagaggtacaattaagaagttaagatatgtttaggcgaattaaagaggactgcaagatacatggcatgaatatggctggaataatcaatggtatgataagtatgaagttatgtgatacctcagatagttagtattacagaaaaagtgatcattgagcataactacaaatttatcaagattacagatttgaccactatcgtaaagtgtcacaaaggtagacaaaagttgttgtgtaaaactagttaatctcataattaagtcgacttgattgacagagtattggaggaccaggaactagaggagagattagcaaataagatacaatgaagtggtaaaagaatcaagagactacaataggaattaaagtctatgctatccaggaaataaagacaagtgaaacgagcatactcctaaatgagttatatccaataccgattggtggcttaatggatcattaaaattatataaaaagattttaaagggcacaagtgattattttc

SEQ ID NO: 361802 - DNA, 613 bp, Cannabis indica
gggggaccccgtagttaatatcaattatcttttatcatatagccttatacgtctaaattttattacccccacttttagtataattatatattaaataaattaagaattttattaaatcaaacatgtggcatccctattgatcagggcgttacaacattgtatcagagcgccaaggtttttagatcttggagactgatttgatatgtacattggctgcgaagaattgatcgactcattgttcagtaagctcttagttaaaagatagtgtattaattttttgattgcctgattatttgaattgtgttaatatttgaattgtgtgggaaggactatattatatggaaatacttatcagtattgttattacctagaatgtgactgcaggtgtatagattatgcacccgagccggactggtaggggtatcggcgagctagctgtgctcggggctactggtgagggcgagaacccgccacccccaccaaactggaagagttacacgctgcaatgcaagagactattcggcagcagggtgagcaaattagagaattgagatagcagcgagctcagcctgccctaaaccctaatcctaatcctccggcacctctggtagtg

SEQ ID NO: 361803 - DNA, 555 bp, Cannabis indica
aattctgaataatttataatatcaaaataaagttcttgatatttcagtttactacgcgtgttcacaaacttcaaatttattatttacagtaaattatttgaaattgtttaaaatctataaaaataatgttgtaactataatcaacattactataaaaaaaaatatttagacatttgttttcaagtacaaatatttcttaagagattataatagaaaattacagtagcactcctcttttttttagtaagatacgtacacacaaattacactcattactcttctttctttgcgaagcttttttaaaatttgtggattgcgtgaagaattacacgaaatttttaatcttcaaagagtaatcatttttctaaaaataaatatatacaaggagtcttatattaagaggtcatgaaggttggtcccataaaatgcttctacacttgacacttaggtggcgtttggttggaggtaatgaaatggaatggaatggaaaggaaataattttcattccattcctttatttggttgcattttgaagtattggaatgacattccaat

SEQ ID NO: 361804 - DNA, 1263 bp, Cannabis indica
tttaccggtattatatatacaaattataccacttcttttatatattcacatgttattatatagtttaagtaagagaaaatttgaacagtgtacttaaaatagtatttttttacatttaattacagtatttttatttagagtaaatattattttagaggtttataaaaattacttatttggttttctgttttgtaaatgataattcagaccctattaagtttttttttaaaaaaaaaagtacaaaatagactatgagctttaatttttgtcaaaattaaaatttaataataacctgatctagaggtgttatgaccagattagttactattttttgtatctgttcgtggtaaaaactgatttcatgttggttatataaaaaaatgacgaaaattgagtttaaagtctattttgtaccattttaaaaaacatagggtctaaattgtcatttatcaaaacaaatagtgtaatcagtaacttttacaaaacacaggatccaaaatgatatttatcctttttattttacatttttacatattctctttttttaggtttttcactttgttttttttttttttttttttttttttttttttttttttttagaaggaaacattatttttatgttatagaagcaatgtgataataacaaaaaaaataatactccgtgtttttatataaaaaagaaaattaagtaaatatgtaaaaaaagaaaattttcaaaatacttttcatttatgttttatttataatttttacggtttaaaattttttaattacaaaaatacacttataaaatttaaaattataaaaatacactttgctcaagcaaaaagttaaaaaaaaaataactaaaaaaacaacgaaaaatcaacctcgcgataattataaataaactataaaacaaccaaaaataatcagaaaaaataaacatatgacaattataatacagctatgaataaactataaaaaacaaaaaaaatggtttattatttttactaaaaatatagttttgtaaatggtttgtttttattgattttgtaaggccaatgtggctagtttttttgtatggcctaatgtggctagttttgtgtacgaccaatgtggttagttttggttttgtaaggccaatatggctatttttggttttgtaaggctagtatggctagttttggttttgtaaggctagtatggctagtttttggtttagtaaagccagtatggctagttttaattttataatgtcagtatgactagttttagttt

SEQ ID NO: 361805 - DNA, 737 bp, Cannabis indica
caatccgatccgatcacaattggatatccaatgtttggtggtcggttgtcattggattggatcgagttatgcacacccctatttattatttcacttaatggcctctaaaatattataattgtaccttggccctgaatttttaacttatgcccttagattaccctattttttgtaaattattgcaaatatagtcaactttttagacatacaaatgcaaacgcatgactatctattaaagttttccaattttactattttagaataataattacttactgatcagctgaaatttataaaacacgacaaaataattgattactaatttttcaaaattttaaaaatgataatgtgtactatgtaataaaactaacgaaaaaaaatgcaggaggaacgaatgctcagttaacaaagaataacatcacatattatatagagttgaacgtgttcaccatttttacatcaaaataaaattcagggtataatctgtttgttattgatttttagcaattttaataagggtgttagtttgttgttactagtcaaacggtaatacttttggctagttattcttgaaattttgttggttttttagttttttagtaattttgagttagtgttttgggttgtgtgttaaattttaagtttgtattttagattttattttgaagattgtcattctaatacagtagaatctctatttataaaaaaaatcaagtcccaatttgggccagttataa

SEQ ID NO: 361806 - DNA, 750 bp, Cannabis indica
cattgattgatacggcgcattaatggtgtcagacggatactcaaacgtttccaccgccttaattgcaaatcaatctggttcgttgatttctgagaattcgaatcgtgcgcttcccccaccgttcgattggtaggtgacgacgcctgttcctcatgcagctttgcctataaaagccaccacctttccttcatttcggttacttcccatttcttgccaactttgctcaaatttcccagagagaaaaattctcagacccagaaaaacacttttgaacactttgcaatttttccagttcttcttcgtttgctactgtcagtccttcttatcttcatttgattcacagcaggacccccagtctcaacacttcattgtaagttccttgcaccctttgctttattgttaatatgcatggcatgctgttacttatctgcttgttcttttctgggttttgtattcgaagtttctgggaatgcaaatgtttagattcttcatataatcggtttgggttcactgctctagtgataggattactcttgtcacgcatttgttgttattttttgtagaagaccatacgttcttcgtatagtggtcgcttagggcataggatagattgttttctttctactttctgccctttctttttctttagtgcgcaatgccgtcttctgtgaatttattgcacccgactcttgtccagggaatccttctagggtttcctgtatgacaggtgtccggagggggcctcttcca

SEQ ID NO: 361807 - DNA, 509 bp, Cannabis indica
aagtgaatagccttcaggaggaaaggggagttcttcggattgtcttccgtcgactgaaagaagagaagaagactaaagaggaggagtttacagctaaggtcgagaagtacaaatcggaggtgacgagactagaagagaatgttcatgccttagaggcagcatatctcgagattttttatgacttttgcaaggctaaccctcagacgaattttgattacctaggcgaggcaaaagacatgtatctcgagtactgtgcttcccaagtggcttatggcgaacccgaggcgactacttctacttctcgccagaacgttgatgtaccttccgttcagacaacaaatcctccatctcctaccgacccagaagacccgaaccaagagcctaagactctagctgtttaaatacttctccttttatctttgtttttttaatatatcttattctgccataagaacttttttaagacactatgactggccaagcggtctttaaacttggaattatttttc

SEQ ID NO: 361808 - DNA, 623 bp, Cannabis indica
tggagagagaaatgattttcaaaatattaattgtccgagcgttaattagccgaaaatcgaaaggacgctcagtcagcttcacatcgagtctcgaactgtcatgctcgacacgtgtccccatctaaaggcagagccagctcgaaataagtctacacgcaatctcggaggtcccgtacagttttggggggcaaatgttattctaaatttggcactctgacattgcatcacaagaatggcgacaagtggattccacttggagcattttctcggaacgatatgccgagcaggatgcctcgctggcacgtctggaatgaaatactcaacgagccgtacagaatgatcaacacttagcgaatttagcttatcgcatcatgagtcaccagctcaatccctacaactcaaggatcaacttacgtggatgtggcacacacacgatcccactatcggtgtgtttaacctcaatcccacgatcctagcattcagtattgatcacacgatctttctgttaatgcgcattgtaacgagagaggaaactcttcctcaagtttccagccctataaatagtgaggaatgttcactaggcaaaggaccgaaaaattgtaagccgaaacgctgtaagctaa

SEQ ID NO: 361809 - DNA, 527 bp, Cannabis indica
tttacaaaaattaaaaatttttacttttattatatgaatttaaaaaattttaaaataaaaatgttaccaactgactggcaccaaaatttttggattttttcttttggattatttcatatatgaaatgtgcaaaaatttgatggagctcaaaaggtggtcattgctcaatgtccaattcgacggaacaataaaactaaaatttttatgaaaaatattgttagtaagtatatttaagaaatgtaaaactttaaaacataccaaacttcaaaataatattttatgtttcgtggtggttccgatcgttatactcatcttctacggtcaacctacttatagatctaaaataaatatactaattaaaacaaagaccttaaatgtatagacaccggatgcacacggggtgaaaaatttgtggggagtactctctcgtttccatctccgttaagaattttaattctcatctctacctcatccacgcttattctccatcggagatggggcggagaatcccctaatggagcggggac

SEQ ID NO: 361810 - DNA, 508 bp, Cannabis indica
ttggtgaaacaaactcttaaggattttgatattgattttgaatgtacacccataaagtgtgataacactagtgccattaacctctctaagaatccaatattgcattctagagccaagcatattgacataaggcaccacttccttagagatcatatccaaagaggtgatattatgctagactttgtaagcaccgaattccaattagcggatatattcaccaagcctcttagtgatgagagatttagtttcattagaagagagctaggcatgaccaacttaaatgaaatataaggtttgctagctatgaaaaatttcatatctctttacttacttatttatgcataattgttccaaatatgatattaatgagatttatatgcatagatgagaaaatttattgatacttgacctatatgaactatacttgttgaaaactcaaaattataggtcaaaatgtggatttttggtgaactttggacttgtttttaaacaagtgaacatgtgaatt

SEQ ID NO: 361811 - DNA, 634 bp, Cannabis indica
caatgatgtctggatggagcaccaaagggtcaaggcgtccccacttgtaacgaacacactccttccattggattatgcaggaagattggttatgttgggcacagaaggtttcttgaaatggatgatccaacgcgtagaagtaaaaaatacgatgaaaaaattgagaaaagaccacctcctccacaattgtcgggggacgatattttagctcagcttgagtagttacaatttcgtttgcctggaaaacacaagcaatttggtggagtcaaacgtaaacgttctgtagctgagttaaattggtcaaagacgagcatatgttttgagctagagtattggaaggacttgtctctcctatataatcttgacgtaatgcatatcaagaaaaatgtttgtgacagtgtacttgtcacgatcagtgtattctgcatttatcatgcaatatttcttcttatattcattgtaacgagaagggaaacacttcctctccaagttcatagtcttataaatagtgatgcgtgttcactgggcaaaggacgagagatttgaccctagagatactgtctaacaattcatattcagagagactgttgtaagaactataaaaaaaggagtctttctccttgttcttaagtca

SEQ ID NO: 361812 - DNA, 1837 bp, Cannabis indica
ccctgaaaattcagattgtaaaacatctcaatttcatgcttaaacttacaaacttcaagctctcaaacttgagctcaattccaacctacccaaatatttccagcaaccattaatctcaaacaacttgaatttaaggtagagaagaaaccctaaaattccatctatagctcaatcaaacaccacatcaaagatttaagcataagcatccacaaactcaacaaaattatctacaactctttcatacatgcataaacaagattatttcacattattttcagcaagtaatttaattaaaattcagtagggaaactactttacttccaattcaaaggcaaactcaaacaattccaagcatcaagctccaaaattatcaaaactcctaagcacttcttcaattttcaagattgcaaatcaagagggtaagagagggagagagggtcgggtttgaaggagagaaaggccagaatttgctttgttttctcttgaaattcaatcaagattaaggtatatcattaaaagttaaaagactaaaatgcccttagggccaattcccacataattacacatacaagggaaaattgacataacacactcatttaactccaaataaatttcagattatcaaatatcaaataaaattccaaataaacaatccaatttgcatttcgggcccgaacccagttcggcctgaaatacccggttgtgactgtaccgcgccaacctgtcacatcacacctgaaaagacaacacagacatactatataataatatagttccattaagcacgtaattaaattaatttcatcattttacccttcccgggtcacaattactaaaatgcccctggctcaccaacagggtcttaacatgttaaatttcattttaattcacatatactgaactatataataatatagttcctcaatttattaataattatctaattaggattttgctaatccatttcttaattctagggtattacaagggcagttaattacaatcatattgatattccacaacaataatcccctaaaattatgggatttgatttcgtcccacgtaaaataaatacagttaatatttgaaaatcacatagatgtgattattccgcttttaccaggtcaatactaacgtggatttagatacgttgtaaagtgtatctcactgggtcaccttgctgggatagcaacaataaccctgacagcgagctaaagcttttcccatgtctttctgaggtagataatgtaaatactgtcgtttctgctattgaagacataacgctccatgtaacaatcacagttcttggtgacaaggtgagctccaacaatcaacatcatttgaatgtcagcttctatctgagagagctgactcgacggagtagtggatctcattagaagatgtctgaagttgattagtgaaggtaccatgagtatgccttcctatagcaagatggatgcctcactatttgtttttcagattctttcaactgttaggcttagtttgtataatgtatattacatgctaagtgctctaacaatcaacatgtctcgtctacatctcttcatacgtggcgaggttggtgcctcgcgttgtattactgatgctatccttacgatcgtgtcttcatatacaaaatagtttctcgtcgatatgtgaattaatagtttgtacatttgtgtctcgcttaagactttacagtcaacgagttatagatatactcaatcagctccgcatttaatgagttattcaattttaatatctcctaatataattgttgttaatgcagatttttgttaaccaaatttgaccctaaccatgataatctcacacagaa

SEQ ID NO: 361813 - DNA, 612 bp, Cannabis indica
caatctggaggtcagcgccttgactaacatcaagcagctgcctacggagaccctaaagaattatataaagaagtttcgggaggaagccttaaaaaccaagaaagttgatgacggacaacagcttgcccttctccaggcaggcatccgcaccgggactccattctgcaacgaactacagcaggaaggagctgcaaaccttcaggatttccagaagagagtccaaaaatacattaaccttgaagagacccaaatagtggcccatggaggatattatcccaccgggatagcagggtatgtgcccggagcccagccctcgggcactgtgccagcagcagctccaccgatgagcggcacacagttctttgctacttccagatatagccagggccaggccttggaccctgcatcgtcccatttttgaaatccctctaggataaatggacaagccccctcgcactctgctccaactgccagccgagctggtccttcccagggctcgaggagtaaaaggtcctccaaaggcagcacccggacggagaaaaagcgacagaaaagggggtacactccccaatatacccagtacacggagttaacggactcccaagaacgtgt

SEQ ID NO: 361814 - DNA, 802 bp, Cannabis indica
gtgtacaaatataaacgtgtcatgtgtacaagagtgtatacataagcagtctatcgtgacacttaatcagatgacatcttaaatttgctaccagttagtagttcggagggttttactgctaaaatttaaacttggagggctaaatacaagtgaaacgacagttgaaaaggtttaactgctaaaaactctttaaaatgtaatataatttaggggtgtgcagaaagtcatccaatccaattacaaccgatcgatcaaatcccaaccgatccgatagaattggatatccaatcataattggatcggatcagatgtaaattttgaaaatccaatcagattggatcggttgtcggatgcgacatccgatccaatggataaccacccaaaccgatccaattatcatccaattatctttatatatttttaaaatacatttaaagttttatatattcaatatattttatttaaaaatatatattaattgatttaatatatatttaacacatgagattaaatgaaaaaaaatactttaaatttaaaatattaattcttatcttccgaaacgttaaaaaaattgtcaatgcgcattgaataaatttttttttatagcaatttgattatgagatcatgagaattaggttcgactaaactaatgcttattatgtatgttggattattaagttttaaatatatatttatatatatttttattttttaatgaaattaatttaaatggtacctaaaatggattggatggatctaatccaatccaatagaaaactagtcaatgcatctaatgattgga

SEQ ID NO: 361815 - DNA, 796 bp, Cannabis indica
aggttatgatcttcatctccttcaaaattggtcgaccaatcacggcattatatgccgaatactggtcgattactgcgaagtcagccattgatttggctgttactggggcggttcccaaggtgattgggagtttgatcattccttttaatgcgatgacgtcgccagtaaaaccgtatatgctcgacgtcacgggtcgcaggtccttctcttgcaaccccatttgtttgaaggcttggaagttcaaaagattcactgaacttccattgtccacgagtatgcggtggacattatctccgccaatattggcgatgataactagtgcgtcggaatgcgggtgatggacccatctcgcatcactctccataaaggtgatgtcgtcgcattctttcttaaacaatttctctggccgctcactaagattgtttacattggtgagcggcttctccttggcttctttggcatatcgctcttgcgacttgcgggagtctcctgcgatatggggccctccaatgatagttaagatattgcgaggcgttctcgaaccactcgcgttttgattttcttccttgtcatccgctcggggatgaccttcctcgttcttcttatacttatcgaattttcctctccgaatcagctcctcgatttcgtcctgcaagacccaacattctaaagtggtatgaccaatatctttatggtacttacagaactttttggggtctcttctgtcgcggtttcccctgatggggggcggcttcttgaagactccattcctctcttcaatcgcataaatgtggtc

SEQ ID NO: 361816 - DNA, 1084 bp, Cannabis indica
gccttagctttagggcattacatatattttatcagtaacatatattcgagatcaattaccagtaaatgatgtactaactatgttgacgatacatagtcaaaattaataattaataataatcaataacatcatgttatactcgaaatttagctatgtaccagaagttgacacatgtcctacataaggaatgtgaatcaactcaaagaatataataatgatatggtatcatcaaatgtaatttaaataactcgttacaattaaatgcaagtttgatagaaaatattcaaactcgtcgactgcttagtcttacgcaagataagaataataactattaaactggtattgatgagacatatatctgcctcaggataaactcagataaatatgcaacaaaagaatattctcccgcacgagcagaataaaagtagcaacactcaaccgcctcacattacacatagcgtgatgatcacctcgcatcactaatagaaatgaagggatataacgagatgaattatttccaacacttagtattttttcctattaagatggacaagaaggagaactcatgtctgacgagatacaaccttcgtagtcagcataactatctagtgaataaaaataaagagtggtcgggtagttattagatattatcccatgtgtgaataaatgaaacgtgaagaatgtccgcgtttcattaatagttataaatgaatcaatcccaaaaagaataattgccaacctatattcctataaatagggatagaatccacgagaagagggacgataaatttaagagagaaaatcttattattcaaatattaatattgtactctgtatctcagaaaatatccttaataataaggactcgtagagtatgtagattttaactacaaaactgcgtaaaatatctggtatcatttatcatttattacttatttatttctatagtgtatttattgcaaaaaaaggctattaatttggttaacaaaaatctgcattaacaatttagtgctttcattgagagcattggtgataaaagctaaaaaaaaaatccctcctcataaacacaatctacccatattaa

SEQ ID NO: 361817 - DNA, 241 bp, Cannabis indica
tgatagtgtgcacaccccttccccacactcttctttgtccgacggctcctctgagcattttatccaccaagtacatgccttacacatggtctgcactaacatcgatccccatgtatggaatattttaccaggatctagatttacttctatgtgtggtcatggcactcatcactaagggttcgaatagtcaggttgacaaaagttggatgagtgagagtatcatgttctttttatagtgttt

SEQ ID NO: 361818 - DNA, 843 bp, Cannabis indica
gtgaattagggaggtccttgacgtagggcgcatgagatcacttaatggaagactaaggtctccttcttcaactcagagtcgaactcctctcgagatcgctactataattgtgcatcacagacacagatttggtggtcaaggagtactggaaaggtctgccaaagcaccaagtattggtgcggtcggcagaagagaaccgataagattgtgaaatttgagtgtaaatatgatccatttgaatcacaaaatgcaacttatttttaaaaaacattaaaaaacctatttaatgtttttttttatagagtaatctgaatcacaaaaaagaaaaatgtcaacgtagagagatttcccgccaacaaatcagctatttagaccatccttttatttcttattaatattacaaaatcctacacgtatatcatcactaatatataaggtatacagaaaaaatcattctatacaaaatcatataaaattctactaataaataaataaataattcaatcacacacttaatatataaattaacaatatatttaaactaaatactatagtgagccaaaaaaaattgttatgaggcaaaagtgtcgcttcatatgatgaagccgtttaagattagtgtgcaaaaaatagctattatcttgaaggggtgttaaaaaatgcgtgagacttaaccagatgcataaactactttactcaatataaattatttgaaataaaattttatacatcttaccatagagatcactttcttctactttctcctcactacaaaaaatcttacttttatatcacaacgaaatttgtgactaaaagataaaaaaaattgtggctaattataaa

SEQ ID NO: 361819 - DNA, 445 bp, Cannabis indica
gggatgacgattacaggctgttttctagtagtctgataggcttttcgtatcaacacagtggcctaccgactatggtcatcaatgactgcttgctgagcccttaatgtttctatctccttaccactccattcagcgaacatgcgcctctactcttcaaacataagattcacctcagcacggagttcctcctgatcatgatgtaggttgttggtatgaccctgcatgactctagagcagcgcagaggttctggatttcagtgtcatctccaatggttgtttaaacattattagcgagcggagtggctgtgttatgaatgccctggttggctgctgaactggtattcccagtctcttgcacgccaggcgtgatttcagtcataggagtcgtcatactgtgacccgcagttaatgactgtccgagatttacggttggcagaacccttat

SEQ ID NO: 361820 - DNA, 700 bp, Cannabis indica
acacattttattcatatttatattaacattcgaattaatactttctttcctcatttgttatgaaattttaaatgaatcctgttttttttttggaatgtgattgcagattgcaatacccatttgagagtttgattgaaacatcaaaatggtgagaattaatgttgatgcatgcgtcggggaagaagaggctgatgtggagagtgacaggcaaaggcaaagctgtcaaattatattttgtcgagagaaactcttaatattttgtcatcaaaaatatatattttttacatataggagtaggagagtacttcagtggactctctaaattgaacaccacctactctaattctttttgtacaatgtcatggtgaagagcattagtcttttgctaacgtgacttgtgatatgaaatatacatttttgtccttattattgtgttgcgggtgtgtataaatcatctaatttaataacaattaattcatctaattataatttactgttaaatattgaatgtctaattattattaaattaaattagatattattttaaatatcaattatattgaactggatgttagatggaatgtacaaaaattcaaaacaaccgacgttcaattaaaataattaatattttcatttaatttagtatgtagtaatttaattttatgttgttatatgtaaaaaatatatatgtatatataaa

SEQ ID NO: 361821 - DNA, 809 bp, Cannabis indica
ttcttcacagtcttacacactatgattgagtaccaacttgttatgtgtgggcatgtactctatcactatagggttcaaaattgaagagagaaagagatatgaaggattcaaaatagagagaaagaaggctcaaaatttgactgaaaggcttaaatgcatcatctttcaatttgaggtcatcgctatctatttataggaaatcaactaggcttaggtttgaattatttggcattgaaaaattaataaataaatggtaaggatgtgggccctaccactttgcaattttgtcatttttaactatttatcctattttctcaaaaataccatatttaccaattcaaccacttaaatgccaaaactatttatttaataattaaaattaattataaaataaaattgccatttaatatatttattaattagacttaataaagtctcttaactaacaaataaaccctagaatctattttcttcacaattaagccctaccttagtgaaaattcataaactagacatagcctaattttagaattatacaactagtatggggaccatgtgcctatacaatcgagcttccaataagcagattttgaatttaccaagtaaattccccaacttattaattcctcactgaatccaccatagaattcggaatttaaccatcgttctaatcccaataatcaaagatcttctatagatgatttacaccgagtggagacaaatttaccgtttcaccctcagtgtattttatgcttaaaacacttagcttcctataaaggatatttcagtaaactaatataatcattgaa

SEQ ID NO: 361822 - DNA, 865 bp, Cannabis indica
tttaaggtttgagcttaagagctcaaactttactctcacatggtggattttgattctgtgcatgttgaggtgtcttgttgctttgtaaatgttctttgggatatataaaacaggtctggaaggtttggtttgatttggggttgatttgagtgagatatgaatttttgaagttttcctgcactcaatcagaattccggttcactgggacctgtaggaaccggaattccgattggtccccaggaaatccctcagaaccgaaattccagttgggaactggtctaccggttggggcaattttgggaaccctagtttttctcatttttgtgatgcttagggtattgccatgttatttatcgatagggaaacttttagtttcaattttaagtccccagaagtgatttagcgtgtcacttacctatgttatgattgatgtgatttaggagcctgtaattcgccgagcagttgttccactcaggttggccggcacacctgaattcggaaacaaggtaagattagtataacggtatgcatatgtatatacatgtttagtgtgcatgttagttaagcctgttagattacactagatatgtatgttgggttttgtactatccgacagtatcacatcgatacgtctagagtatgactagcataccgagtataggctgatattatggttgatagtaccgtactacttgacagtatcacatcgatacagctagagtatgactagcgtaccgagtataggctgttactatgtcaatagtacttcgtacgaacgttctagactcagcaccgtgtgggtcacgggggatagggttatggattggggggtatggggcgtccgatcgataatcgtgagttattg

SEQ ID NO: 361823 - DNA, 225 bp, Cannabis indica
ttcagccaacaaataacatcaattaacatttaaatttccaatttctaagtccattaaaggacaaaacataaatggggcaaaatgaccattttgccccttcacactaaaataacataaagagcactagaggggtattttgggaaattctaaattccggccaatctcgacattcccaatgtctaatcaatgtagatcatccatagagcattattaattatttggatt

SEQ ID NO: 361824 - DNA, 1645 bp, Cannabis indica
  modified_base (1592)..(1592): a, c, t, g, unknown or other
cgtaagattaatttggagatgagatgatggtctgtttccatgtcttcgcacctctgacatctgaacggcgatggaggacggcaatggtgggttgattggttgaaaggaagaacaagggtgtgatcggtttttcgtctcttcatgtcttctgctggtttttcatggtcagcgatggagaagctaggatgggacaattgggcataaacgcacgatgatgagaaatttggggatttggagattttaggtttttctggttgttattcatggttgggtatgaagatgatataagataagaaatttggggattttagttttaagttttctttattaagttttaatatgttttaatttaattgtaaattttattaagttttaccatgtattaatgtctccattattaaaaaaaatgattgtattatatttggaaaaaaagcaaaaattggtttttatttttattttgaaaaaaaaaaatttaaccaatctatagttgccacgtgtcataataagtacaaaatcaccacttttttttttgaatgaaaaggatgcttttatttaaactttaatatcatccagtgcaattcttagcaaatcagaaggagaattatccttaacaaaaatacaatctgacaaataacaagaattacgcgcaaggaaatacgcgtcctcattagcagaacgcttaacaaaacacaatttgacatgagacatctgtgaaagcaagtgttgacaatcttgaaccaacataccaaatgttgaaggcatagcaacactggtatagatggcttgaacagccaggaggcagtcagtctcgagcaaaatactgccccatgacttatctttaatccaactgagagcctccttaatgccaatcaattcaacaatttcaggagaagatgtcccactcttattaaaagagccagcttcaataatctctccatgacaatctcgagcaatgaaaaccaaaaaccaaaagaatgcattgcctcaaaaacagctcaatccacattaacctttaccatattcacatccggtttcgtccagtgctctacctcctttccaacaaattacataagcatttttttgctaacaaattgaattacttagggattattgccgcaaatttctctttttatttttattttgtaaaatatgaccatataggataattttttagtgacctgtcattgtcacgtgggcaaaattaagacttaacgagactagacagacgacatcttaaaaatataaacggaacattactttggagggttttcccaccaaaatatgagattggatgatgttttacaagtaaattgataattgaaggagttttaccgcaaattactcaaaagaaaaaccataaaaatttcattaagtggtaagtgtctccccacgcagaaacgacagtttaaccctgtcgtttcgcttgaaagatggacaatattatgttatactagtgtagctgacgtgtaaaagaatgattggtcgttacacgtaatttgtcccgcagcttataatattgggctctttcctagttcagctatcgagaggtttctgctctgattttgaagaattcagcaaatcttgaaaaaagngattgagaaaaaagagagagagaatgagagtggatcgttcgcagtcttcattg

SEQ ID NO: 361825 - DNA, 448 bp, Cannabis indica
gaaattaataaaataatcttgaaggggaagcatagccccggtcatcagatgcgtcgggctccaagccccgaagccttcgtagttgtggttaggggtctccgcatctcggggcggctggcggtacgtcccggacgtcgagggctcgataccagccacctccacgatattctccagctggtgacgacaagtcaaagtggattgaagctcggccgcttcccatcccgtggcacgaggcttatacccctcttgggcaacgggacccaccatgacctcttccaaggtggccaaacgctttcctcccttcttcgaagatttggaaccggatgcagacatttttgattctgaaaaagagttaaaattccagcaattaggccccataccaaaccttaaatcaaaaaagggaatgggggtcccctaaccgctggaaagaggccccctccggacattt

SEQ ID NO: 361826 - DNA, 718 bp, Cannabis indica
aatataataccataatcacaatcattaactatgtgcccaatatctattactaccataatgggataaataataattaataaatgtattagaggcacatgggagcaccctaaaactataattggcccattaaattatagtccaccactaattatactcattagcccaataagcctaatataaccccttagggttaagtgttgcatataaaaagggtaatatgtgtttagtatgagtagagtgtgggtgtgtggtgaaaagaaaagggttttgctctcataggttctcttctaccatcttgggatacattgaagaacttggtgtcataggaaaatggaaaatgcaaacatgggaggtatgtgtttttatattgtttgtgatgctctaaataaagtattgatcttggttcataatctgtagtagttcaacaattggtatcaaagctagtatatttgattttagagctcatgaacttaacccattttttattttatgatttattttattttcggattaatatgtttattaatgggtaatgtgagattaaatgttgtagaatgagttttttcttaatatttggggctgttgctatatgtttttatagtaaaatatcaagttttttataaagctcattaatggaggaaaacccatttcgggttcaaaatctttatctattattttgtattttttgaattaaatgggtattgaaaaataatagagg

SEQ ID NO: 361827 - DNA, 633 bp, Cannabis indica
aggatagggagttgagtgctaatttaatagaaatgaatctagcgaattttgatattatattgggaatggatttttgtccaagtactcatccagtatttattgtaagaggaagatggtaatcttccaaccagaaggcgaagaaccgtttctttttgtcggattggttcagggatctcggatcccgataattttagtattaacagcttgggaattgttacaagaggagtgtctagggtttccggccgtggtattggataccactcggcctgactctgttcggccagaggacatcaaggtggttagggaatttctagatatttttcctgatgaaattatgggtttaccaccgcagagagaaatcgatttcgtcattaatttggcacctagagcagaaccagtttctaaggcccttacaaaatggctccagcagaacttaaagaactgaaaattcaactctaggggttgcttgacatagggttttcacgccctagtgtgtcaccttaggaggctccagtactgtttgttaaaagaaagatggatctttgcaaatgtgaattgactaccgggaaattgaatagttaacaatcagatagtatcttacttaggatcgacgatctcttcgtatcaacttca

SEQ ID NO: 361828 - DNA, 682 bp, Cannabis indica
cttcacaaaatatattcagccattagtgatagagtgagtgcccacacacatcaagttggtcctcaatcatagtatataagaccgtgaagaatccaaacacaaagaagaagaatcgggctcagatcttggtgatactctgctacagaaaggatacaagggttagagatctgagcggaatgagtcatttaattccactgcacccactgtaatgtttctcataacttttatgtgtttaaattacattgttttagaaattcatattaggatgttaaataacatacatggtagtaaatctagatcctggtaaaataattccaacaatatgttcttcaaatccctgaataaagttggcctttctatcagccttaatggccacttcatcagacgcaaactttgccaatcgatcaaacttggttgcatactctatcaccgtcatgctgccctaggttaaccgtataaattcttttgactttccagctcgagtagattcattgtagtacttttcataaaataaagtttggaaggcatcctaggtcatgttattcagatcatgaccctgtgatacaatttcccaccaaatgcgggcatcctcacgcaacatgtagatggcacatctaacccgatcattactctcaacccgcatgaaatacaaaatggatgttatcatactcatccattgctc

SEQ ID NO: 361829 - DNA, 508 bp, Cannabis indica
tgtgttaattgccaaaaataatacgatttagtggtcaaggagttttaattgtatctaatatctgttagtagcagacgttatttttgaataaattgtcacttttactatagagtatttgttacacttaggttctttaagtagtatttagtttgaggtaataaaatagaataaaataaaataaaaaaaaataaattgtatttaattttttgtttggttgtatattaaagtatttattttaatagaatgatctttttactattttagtagaataactaatttattttaaaatagaaataaagactattccaatgcatcttattatttttttttatgcattttaaaatttattttattctattctcattcttattactatgttttcattctttctaatcaaataggatcttagtgtttaatagttgagaccattttctaaaaaaaaaaatgctaaaaggtaccgattatgtctaacactctcttcggtatcatactgctattagtataatta

SEQ ID NO: 361830 - DNA, 1083 bp, Cannabis indica
tccactgtgctgacgacacaataaacaagaatataaatgtgataaggatttggatgaatttatatatcaaataaacaaataaatgataacatgaaccaaatgacacacaaataagtgatgaaaatacttttatttctttattgatatttaaataataaagattatattgaaatggagttttatttagggcataaaacccaacatgaaggataaaacgataagttttgtccctacttaatgtaaatcgtctattgaagatcaatgattgttgtgattgaaacaatagataattatagcgtatgtatatttggtatgtagagtgttctatgtaatcaagagtgatattctaaatcaatagtggagtctagaggaattaataagtgaggaaatttacttggtaaattttagatctacttattaggagcttggttacataggtctatggtccccatattatctgagaaaatattgtcttgtagactcaattaattggtttagtaaattaattaggattttaaagaaaattatgtcttatttatgaattttactaaagaatgacaaatttaagaagaaagtaaaagagatattttatttcttaattaagacattttgcgggtctaattaataaatatatttaaatagtaattttgttttataattattaaatcgataaaattggtatttaaataattagaatagaaaaatggtatttcatgaaaaatatagaaagtttcttaaatgaaataaatatgaaagaaaaattgttatgcccatattttgagcattaaatatggacatgacacgtgaacataagcctcaaaaattaagggaacctataaatgtaaggaatgtaatagttaactcaccacgggatatgctacgattaatgatacatttatctcgcgattgtattataatatggttgtcaaataaaagtaatataattattattggacaatattgtcccacatgtattaaatgtaaaagtattgagccatatataagaacatgggctactccattcatcaccaattggttttgagatggaaccccatgattctcatcatggtatcagagccatat

SEQ ID NO: 361831 - DNA, 409 bp, Cannabis indica
actaaactttatatgttgtttatctcatcgtttatcctggtaaaataatttcccacagcaatctgttcttttgtattaatctaactaatattgaacttagtaaaataaaatagtccaattgaaaaatgaaattattcagtaatacaaattgaatgctaagactacgcattgaatttctgttataacataaattaacttgagtaaagataaaggcaagagacaaacaattgaagaaaatctagctctcaacttcatgcaagttgtgtatgtcacgtatatttgttagtctaagatttatgagttggactaagactccatgtgtttgtctgtgtgtggtttctgagctatgaacgcttagaattttagtcctactcatatactttcaaatggtagataataatagaaatag

SEQ ID NO: 361832 - DNA, 530 bp, Cannabis indica
aaagacctagacaactcactgtaagtcatctccaatctccatagtttttaaaatttcttctatgaaaactgtctttgtttgtttcaagatcactgtaaatgatttgtggtttgagttcttaatttttggattttttttgttgatctgctctgttctgtgtatatagattttttgttctgttctgtgtatatattttattttttaaatttatttctatcattattttttttttttgttattttttcagattcaatataaagatctttagcagtttcaaggaggtggacacaaaatttcttttgtgaaatgtatgtttttattaatgtgtatctttttttttgtattattttttatttttattgggtttgctaaagatgtaatatcttaaaaagaatgagaataatgaaaatattaaaaaaaatataatctaaaataaatttattttataaagataaatttttaagtttgtgaattgaataaaaaattagtttatatcttaataaataatataaaattttaaattaatttaa

SEQ ID NO: 361833 - DNA, 583 bp, Cannabis indica
tttaaaaaaaataattaatttttaaatttaaacctcaaaatatcataaaataataatattctattaaaaataaatattattaattttaaaaatgatattttattttaatttcggggtttgaaaattggaaaaaccgaattttggggaaaaatcccacaaaattcggaaattgggtggaaaaatcgttgttgccagcaaggctgcagctgcagcccacgagaggctgctagcaggcctcaacgcgcgcggacaggaggagccaattgaggaaactcgacatttacagggttcttgaccgagtaacctcggtcagctgcagggtgacgcacgcgggacagcaaggagcgagcatgttcagacagtggtttgtctgaaggccatgcgcgggcggatccttcttgtccgaagggtctgtgcgtgcgattgagcatgggcatcccgaaatttcaaacctaaataactttctcaatttttatcggaatcaatttccgtgaaaaataaaattgcttaatttttcacaaggaatccgaataaaatattttcagaaacaaataaaaaaatattttcatggaaaaatttcata

SEQ ID NO: 361834 - DNA, 769 bp, Cannabis indica
tttacagatattcttttatttttaagtatattctgttaaaccaaaaaatgtcgttagataggaacttttaatatataaaaatataagaaatcggaagatatttttttaaaaattctttgagttctttttataaatttattatttttaatatatttttaaaattacacataaaaataaaattaaaatgatttaatattatttaaaatttctatgtataaacaactattacgaccaatttattagtatatatagaatattttttaataaatattattcattaatagtcactaaaaaaattagggaattactttatatactatttttaatcttttctttttcaaatttacggtttgggttggtgatttcttcggtgatttctatgtgaagaaatttatttgttatattcgtattgagttcaagaaatataaatttgtgaattttgtagcttattagtaatattaggtgattttaaaattttatttgaactcaatagtttttttagtgtgattcattaatttcttaagttgataattttgatatacaatatataaaaaatcataccgttattttagtttatcattcaatatatttaaatgatgtagtactcgactgatgtaaaattattttttctcaaaatttgaaattttattattatcacattatatattatttgatcttaaattatattgatgataatgatttttacttatttgatagttgcatgaaaaatataatattttatagtataaatactattttgaatcttatg

SEQ ID NO: 361835 - DNA, 584 bp, Cannabis indica
gtaaagggttttatttagggcacaagacccaacagaaactccttgttgcaaggaatgctgagatgtctcgttacaaggcatgctgtctcattgaggcctatgccgagtcgtcttgttgaaaagcatgtcgagacatcaatagtgcagagaccatgaagttttaggtcctacgcgtgtcaagtacaactcatttatgtgaagttaattggagtttggagtcggtctttgtccacagtcttaacaaagctccgttaattgggtgctttcacccgactaatcttaaagtttagacccatcaattttgaaactaacactaataaacaaacttgtgtttattcgaaaaaataaagtacataagtgtttaatttttaaaattatttataaacttttaataaataaattaattctgttatacatacatttataatatatattcaaaatttataaatatatttatatacatatattataatttcatgtaatatataaaaatataaatattgactatttatatatttaactttactaggtgattgttacgtgccaagccacgtagtgttagttttatttaatattttagtttt

SEQ ID NO: 361836 - DNA, 605 bp, Cannabis indica
acttaattacaccaataacagttagtgctgcacagacccgcaaacctggaaaacccgaacacccgccccgacccgatgcgaaaaaaatgaccaactgaaaacccgtccagtcgggtcaggttcaacttgaaaaggactgtaaccgggtttcaggttcgggtcacttatgagtttatttcggtgatcgagttagaacccgtaatccaaaaatataaaaatatttttttattaaaaaattaatactttaaataattaaagtaattaatttactgctgccgtgcctaactgcctattcgtattctgtaaatactattttaaaattttaagcatgtccaaattttaatgaatcaatgaatgagagtctcactgcctattcgtattctactattcttcttcaatcttcattaatatcagtattcagtaatatatcactatcacacataatatatcactcacccacacaccacgcccacacccacactactcaccgtcccacacccaccgtccacaccaatcgactgactcgactcgtctgacacacccacaccagtcgacttgagtcgtcactcaccattaccacacagcttctgttggaagttatttta

SEQ ID NO: 361837 - DNA, 1029 bp, Cannabis indica
tttttttttacgtggatacttatggtgtgttgatttcccattatatgctttatagtttatagaattttcttcttcaaatatgtctttcgtctttaatatcatgtattttggattgttagcacatattttcacttcgttctttattgtgtaaaaattataatttactttgattaagtgtggttcattagattgttcataatatatatttttgatttgttgttgtttcattaacttgtttcacaactaatgctttgaaattatacttaattaagtgaaaaaattcctatcttatgaaaatactttgtgcttaaatgaaaaatatattttaaaaaatgatagtttgattgagctcaactatcaaggcaacttgggagtcgataaactattaaaaattattaatatatattgtgtattctaacgtcttaataatcttttctacaccatttattcataaaatccattttacgaggccgaagagttgatttacatgtaagagagactttttaaaatcaaaattaactaaaatctaacctagttccaaataattgatgagatttatttcaggaaagaaaataaatattttaatgcctttttttatatttccaaaagcaatgtaattttacccaagcaatgtactattttaaatcatacacaaagcaatgaaagattaagtttttttattaatattaaccgaaacaatatacacacacattacatttaatagctcaaataaccattaacaaataataacactagaaaccatttaacaaaaaataacactacaaagtaatatgattcaattattaacaaataataaaacaatgaaataacaatatttcatcttttgtttgttgtcagcgtatttatgtttccataagataagaagaagaagctatcaatgatacttttcaactacttttttattttactattaataaattttttgttggtttatatgttgatcatattcttcgtgcttgctcaatatttataggtaattcgtagaaacttatgttaaaatattatgta

SEQ ID NO: 361838 - DNA, 1046 bp, Cannabis indica
tccactcggtggggggatcatgctaaagagttatatttttcccacttaggccatttcttgggtcgatcccggatgagctccgaaactcctacacccattcccctggctcatttagcccacttgtcttccagctggtttctcccctcagacagctttctcggggatgacgaagctagcactgtagttcaagactttgctagggatgaattagagagtcggggtaggattagctttatcgctttgttgttgggcgcatgccttcttatcgttattctgacactttgtttatttctttattgcagcagccaagccaatggaagatctcctggcgaccctcgccgaggtctatagcccggacgcttctctgcctctagcctcatcccaactggtgaccccaggaggtcctcgtccagcgcccccataggcacaatagtcttgatagacgaggaaggggaagacgaggaggatgagggcgagcttgcggctgctctcgagcgcaagcggaagggtaagatggttgaggctgagttttccaagaggactcggaggggggacactccggctgttggcactgattcagggatcccttctgaatcagaggagtacaccgtgccgcatggcattgttctcaccccagtctccgcagacaaagagaggaaaatgctctgcatcaccaaacataactatgccttggacgagttcagccggggacacgccgaggtggaagccttgaagaagaccctgcgggaggagcaatagaacaccttacgtgaggacgccttcaggaatccctgggacctgaacatggatcccttgacagactggttcaaccgcttcgtcggtcctactctctccccctttgcttctgagatggcagccagtttgtctcccatctgactcaattcccagccaagagatacgcggcttgtgcctcaatgaactctatttaccaggttcaggacatcagtgctgccttggctgcggtgagtttttgcgattcattcctttcttttcgcttatattttgtcttaaggcatctgatttca

SEQ ID NO: 361839 - DNA, 945 bp, Cannabis indica
tgctctatgttgatgacatactgattttcagtaagtcaaaactagaaatcagtaagcttaaaagcaaactcagtgaggactttgaaaatgaaagacctaggcaaggctaagaggattctaagcatatacattaagagaccttcaataggagttattgttttgtctcaagcctcctatctacagaaggttctctccaaatttggtatgtttaagagcaaaccaattgctacacctattgcacaacatttcaaactatttgctgcacaattacccaaaacagatgctgaaaaagcaaaaatgagtaagattccttatgctagctgtgtaggaagtctcatgtactctatggtttgctcaagaccagatttagctcatgccatgagcatggtaaaaaggtatatctcagatcctggtttagaacattaagaagcacttaaatggaccatgagatacctctaaggtactctgaatacaggaattgtattctgcaaggatagtcagaatcaagaagaaataactggctatgttgactcagattttgaagctaacttagacactagaaggagcttaactggttttgtatttactgctctaggaggctgcattagttggaagtctaacctacagaaagttgttgctctgtcttcaacagaagctgaatatatggcagcaacagaggccattaaagaagctatatggctaagaggtttaactgaagaactaggcttcaaatctgaggacattacagtatattgtgacgatcaaagtgccttgcatctcatgaaaaatccaatgtttcatgagaggtcaaagaacattgatatcaaacatcatttcattagagacattgtgtcatctaaacaggttcaagtaagaagattagcactcatgacaacccagcgatatctttactaagagtgtcacaagaaacaagtttcttcattg

SEQ ID NO: 361840 - DNA, 865 bp, Cannabis indica
actggagttacatggttcacactgctgtataccttctcaatcgtacaccttcagtcttattaaaagacaagacttcacacgaattgctatacaataaaatccccaaatatcagcatcttcgaaactatggatgcttagcttatgcatcccacattcgacatccaaacaaatttgctcctcgagctagagcatgtatcttcataggctatccagaccatatgaaggcctatacattactcgatctcgaaactaaacacatcttccaatctcgagatgttatcttctatgagaatatatatcccttgctcactcacaaaactaatcctgaaatcagtcattttttccctgagcaacaacacaaccaaactaacattacaataccttccccagcccctcaaaaacccatcaccacaacgtccacagacgttttggattcaactactgcctctgataaccccacaccaacaaacacccataccagtaataaagttgcacctgcaacaacaaaatctggcagaccacgtaccaagcctacatatttgcaagattacacttgcaatatgacaaataatacaacaagttctcattatccaatatccaaatatatgtcctataatagattatctgcatcttttcgagcagcaatactggctactgccaacctcattgaacccaaaacttttgcacaagcatgcaaacataaagtatggaacaatgcaatggataatgagatcgatgctttagaggctaatgaaacatggattgttgttcccttaccacctggacaacacacaattagtaataaatgggtttataaaattaaatacaactcagatggctctgttgaaagatgtaaagcacgctt

SEQ ID NO: 361841 - DNA, 529 bp, Cannabis indica
ttgtaaaaaattttatttagggcacaaaacccaacagtgatattgatcaaagtcgcttgcttccatgactagaaattttcgtgaccaatcaagaaaaatgaagcgatgagatggtttgggtgatcttcagttcccaaatgatatgtattacattcatcgtgagaagactgattagaagtagcacgagaaatcatacacttctttttttaaaagataaaaataaaaatcatattagacacacttaaattggtgaaaactacaacacttccctgtgattaaaaattaaatgcaccatgtattgaattattagtcataaccatcaaaaaaaaacctgttctgaagatttactttcaataattaagtgttgatgataactcgggagttgacatttaccaggggattaaaaaaaatcattgttcaacctttttgaacttcttgaacatttaaaaaagatgggtagtttagtttgatttggaaaattgccaaaactcatttaaaaaattaaaatattataataattaaaaaaaaa

SEQ ID NO: 361842 - DNA, 547 bp, Cannabis indica
gtgctgtatgctgttctcttctctgattagcacgacgcttagggaattttctgtgacaactaagtatattccaagttcttctccatccagaggttttgagagtacgggaggttttgcaagttgtgcttttagctcttggaaagctttttcacattcctccgtccactaaactgcttatttcctcgttggatattgaagaatgggacacacttatctgttgattttgaaacaaacctgctaagtgcggcgatccgaccagtcaaactttgcacttccttggttttagttggcgacttcatatccaggagggcttgaatcttctctggattggcttcaattcctcgggcattgacgatgaagcccagaaactttcccgagctgactccaaaggaacactttgagggatttaatttcatattgtactttctgaggatcttgaagcattcgtccaggtcgtctatgtgccccccagccttcctggatttgacgagcatgtcatccacgtacacttccatatttcgtccgatctggtctttaaacattttgt

SEQ ID NO: 361843 - DNA, 644 bp, Cannabis indica
taggaagtgatacttacaaacccaaagaatgctttactccacctccattgttgaatgttcttgaaagcttgaggttgaagatgaagatattggtattttcggatttggggtattatgagtgatttttgggatggcttttgatggtatgtgtagattgatgagtgaaattgggtttttgaatggattgggtttgagagattgaagaaaagatgaaaggattgaagatttaggaaggaaaattttgaattttttgaatgggagaggctagggtcggctgagaagaaaagagatttgaatttttggtgtagggttggatgggaggagaaaattgggatttatagacaaagtcttgagctagtcgcgacttggcccaaggctagtcgcgactagcttaaattcgaaatttagactgtctctagaaaaaggggaagtcgcgactagggtcgcgacttggaaaaagggtcgcgacttccagaggcccaagtcacgacttctggaacatacaacttttctcatttctgtaaaacccgaggtcgcgacccaggaacatggtggtcgcgaccactgggttcccagtctcgaaaattattttattttatttttttttcacgtttttcacgattcaactcgaaaaaataatgtct

SEQ ID NO: 361844 - DNA, 919 bp, Cannabis indica
atcttgttggctatctggacctccacgaccaacgggtcgttgtgcagaaacctgatcttgacagcatcttcgtcgttgaatgtgatggtggactctcctacccatggaattttaggcttcctttcttctacggccaggatcacttcttcttgctcgtgctgtgttgttcgggcatacctcttccgagctttgcctaaatctccagctatgtgcgggcctccaatgatgacttgtagatttcaatctactggtggaggtagcaagtcttggttattatcacctctctgattctgatcggcctggacatacttttgtacatgcgagttatttttccttatcagaaattcagttttccgcttcagattgttgcattcattggtgtcgtgtccgtaatctccatgaaatcaaaaaaacttggtcatgtctctcttgctgacatcttttttcatgggcacgggcttcttgtacggggctagcgactgagtggccatgtaaacactttatatatcctcagtcaagatggtaaatgcagtatacttggcttgattctcctggggagtttgttcggttttgccggtgaactttccttttttcccattcccttgcctattattgttgctggaacatttaccatttgaacttgaattgctcgggtaatgggggagctggacggatgtcccaatggaaggagcttttgacttgctaggtttttgctcaccctctgctcactgaatagcctcttcaagtttgataaagccttcatcacggtcaagaaaatcacttatcgagtctaccagaccgttcttccttatgtccttccaaagctcaccaaggacttcaatgcccctagtatcgcggataactttccgtcttcggttactcatgaacccttagtcgcctctgtcatgaatctgctgat

SEQ ID NO: 361845 - DNA, 443 bp, Cannabis indica
agacttgtaataaagtttgtaaatatttttgggatcccaactgttgtaaagattaaattattacaagttttattttcattctatttattataaaagtttaaattctgcgctattttgattagtaatcccatttaggggattagggtttcataagtattttgggtaacgtgcctaatcatttagggcgttacaccaatattgacattaggtaagatatcataaacttattgttttatatttctaagtcaatatcacttcgttgatcttaggtcaatagattttaatcctgagattgttaggttctggcataaatgtattattcatgttttttgacttgtttgttaaagttgaccaagtggatctttttaatacttatatcttgagaacatgatagtacaattaagtggacgcgttgactatagatacggaatctataacttcta

SEQ ID NO: 361846 - DNA, 676 bp, Cannabis indica
gcacaaaacccaacagaaactaatcaccgttttgggaaagagcccatgtgctccaaaaggtctaccaacccacggtctcgacagaccacccactccaggaggactcaacctgagggtgttctcagcattcggaccacacgttcacagagaatccaacctgacgttggttctagtacgtggacaacacgctcggagagaactcagcgtgggagtggctagaaccctgggacgagggatgaagagcccaattgtggaggtgcccagcctataggagaaggtacttatgaaatagaaaactgccgcctaagacaccgtcaggaagaggtgcacgatggaacgctgaattagaacgtgatgcagtcgcagccagggcgggataggggacgaatgctcaaaattaaccgaaacctggagtgcgaagaccacgaggcagacctcgtggctcacgaaccaagagataggaaaatgcccgggaagaacaacctgggggaaaaatagagataaccccctccgtaagaaactacgaagtaagtagttaagttaccgaccgaaagtaaccttcccttcctacccgaaaaccgtaaagtaggaaagtagggtagggggacggaacccggaaaaacccggtaaacgtagtagtaagggaaagggaaaagttaaacctttccctactagt

SEQ ID NO: 361847 - DNA, 508 bp, Cannabis indica
agttatgccaaaataaaattcagcatttcccgatgtactccaaccggaattttggtcggagcaaccctaaaccaactggaattccggttgtctgggcataaagaacacgaaaaatttcaatctttaagcccccataacctactcaaatcttccccaaacaccaccaaactttccagagcatcaatatatgaaatattgaacatattctacagctcaaacacaataatttcaccaagaatcaaaaagtgccattaaagttccatgaactcaagcttgctttacacaaccaaaatcagagcttacaatcagatttcaaactcaatgaaaccctaaaaacgcctctgaatttaccaaaaataaatcccacgattcaacacaaaatcatgctttaaactaacaactcattaagctcataaacatgaacttcaacctattcaaacccatactttccagctgcaaatacaaccagtaaaatgttgggttttgtgccctaaataaaacccattac

SEQ ID NO: 361848 - DNA, 540 bp, Cannabis indica
ttttaaaaaaagttcggtttgagtggtttaaatcgaccaaaccgaggttaaaaacggtcggttttaagataggttctggattggtcggtcggtttttggattgcaccaatccagaccgaaaattgaattttggatttatatatagaaaaaaaaccgaccaaactgaccaatactcagccctacctgtagttacgattattattaaataaccgacgtcaaacttcttatgattttttttaacttttgaattttgtgtaataacataatttttttttaatttttatttaaaatctattttttttttcatatatatatattattttattattaatatatttaagcataaattttatataataagaataaataaaaattaaattaaaaaattaaataaatacacatttacattagtctaagtgtttgtatattagctatctttttttaatattttacattttataatatgtgtttgcatttttctagtagattagtatttttttttataattttttaagttatattttgtataataattagtat

SEQ ID NO: 361849 - DNA, 1338 bp, Cannabis indica
cgcctaagatagttagggtgttacacaccatctcataagtagactttctaacattaacacaagtctagaaacataatttggtgtagtctgagagtattaaaataccacccttatcgactaacatatagttcatcttttgatcttaagatttaatttattgtcttccaatgttcctttcctggattaaattgatacatactcataactcccactcaacagtaggtgtttggtctaatgcatacaaaaacatacacgagacctctcactgttgattcttaaggaattcttttaatggcttttatcttttctggaatacttaaaactattccttagataaataaaatctatgtttgggagtcaaaagacttcctttataataagccattagataaatgctccaaaatcttactaaagttgcttgcactagagtaagtaaattactaggcataccacaagccataggttaagataatctcaaacgtatgatactaggattgagaagttttgttaagttcattgaatatacttattaacgaaatttcccttcttgtcgttgtaatagaaaactttttggttactccatatgaatggttttaaccatagttctcttggctttgcttcttagttccttattctgactatctattacttgtttaaattaataatggatttttatcaagtgtcttccaagtcataatagggtgaattctttgaaacccttccactacgacgaggtaccgtgacattttatccatgaacattaatggtattgacctcaacggtttgtgtcaatacaacagcaacagtgggaccatcttatacataataagatgattgaacactttagaattgaaaatatctcctctacttttctactttgttctcaaatttagtcaagttcttagaaaagtagtatttgttgaaacagatactttcttatcttactaaccataggatggtccacccctaatcactttataataactatcaaacatgcaaacttagttaatagttctagcttttcttaagttcatgatcaagacatccttgaatctagtaatagtttacactaagtaaacaatcattccatcattttgaagttttcctttcactagggtatttctctagaaggacttaggcaactactagaaactaatcatagatcttttattttcattaatatgcaatctaaatttctaaggaggtaagtttgaatacaattcaaagctcaacttaatgatctttgaactggataaccaaatatttctctacccctatctgttcgcaagatttttaaccacttaccttaatggttttcatcattgctagaaattcatg

SEQ ID NO: 361850 - DNA, 728 bp, Cannabis indica
atatcgatcccaacttccgaccagttcaacaaaaaagaaggctgttggacaaagaacgagagtagccattaaggatgaagttgaaaagctgcgcaacaacaacttcataattgaagctttttacctggcttgggtcgcgaatcacgtactagtgccgaagccgaacaagaactggcgagtctgtattgacttcacagacctcaacaaagcatgccctaaagactattttccacttccaagaatcgattagctcgtagacacaacaacagggcacgaaatattaagcttcatggacgcttactcaggctacaatcaaatcaagatgcatccaccagaccaagagcataccagtttccgaacatatatggggctttattgctacaaagtcatgccgtttggtctaaaaaacgctggacctacgtaccaaagattggtgaacaaaatgtttaaagaccagatcggggaaacatggaagtgtacatggatgacatgctcgtcaaatcgagaaagggtggggggcacatagacgacctggacgaatgcttcaaagtcctcaaaaaatacaacatgaagctaaatcccttaaagtgttccttcggagtcaactcgggaaagtttctaggcttcattgtcaatgcccaaggaattgaagctaatccagaaaagtttcaagccctcctggatatgaactcgccaacaaaaactaaagaagtgcaaagcttaactgg

SEQ ID NO: 361851 - DNA, 570 bp, Cannabis indica
gatggcatctccaccaacgccctgatctttgcggggtttgcctctattcctcgttgattaaccatgaatctgaggaatttcccggagccaactccaaagacgcactttaaaggtttagtcttattttatattgtcgcagtatatcaaacattgcctgtaaatgggtgacatggtcttttgcatgctgagattttacgagcatattgtcaacatatacttccatggtgttcccaataagctctgcgaacatcatatttacaagtctttgatatgtcgcacctgcgtttatcaaaccaaaaggcattactttataacaatataggcctcgatcagtaatgaacgaggtatgctcctggtctggttcatacatcgggatttgattatatcccgagtatgcgtccataaagttaagaagtttgtgaactgcagtggcatcaacaagctggtcaatgctaggaagtgggaagctatctttgggacaggctttatttaaatctgtaaaatcaacgcatgtgcgccatgagccgttaggcttgggcacaagtacgggttcgctaaccaattggggta

SEQ ID NO: 361852 - DNA, 1222 bp, Cannabis indica
aacattgaatagaacgaagaaaagcagtcgctttatctcgaccttctagaagaaaagcgcgatcaggctcacctaaaaaatgcggcttatcagtgacgaaccgtaagatgcttcaactctaaggtcaaggaaagagttttgcgagtaggagacttggttcttcgaaaaataatgccaaacacgaagaacccagggcatggggtcttcggagaaaattgcgaaggaccatatctcattgcaaaaaaggttggcaacgcaacataccgacttgcagaactcgatggtattgcaattcaaagagcctggaatggcgaaagcttacaattttattatcaatagtactcgcactgtatcatttgtactcgctatgtatttatacttagtcatttttacttaaaaattctaagtataggaggtatatacaactatgtactattgatcagtaaagagttatgaaatttttcaagattttgaaattttctacattaatacttattacaccaagctgtagttaagttgcaatcaagatattataaatagcaaaaaatgcgagtacccgtgtactgcgaaaatgttatagataaatatccccgaaaggatgtaaattcgttcaaaaggaaaataaacataaatttgtccaagtacaagttacgagtacccttgtaccgcatatataaaaaaaaggagtttcacacaagtaaatattaaagtaaaatttaagcgttaggagcatcaggggcagatccatctgcgactttgcagacagcctcgtccacaacttcctcattgttcgcagcatcagcatcctcgggaaacggatttcctccaccgccttcagtctgcataggcgacatggctcgaaaagcctcagccatctcagcggcttctgccccaaggattgagaagtcaaagtccggaattttggaaagagtggtataaatatagtcagagaccgcctggtcatactgcttcttcccattctccttctcgatctccaagtcgcgagacatctcctcgaccttcatcaaagagttcttggcttcaagcttgacttgctccttggacttgcaaagttcgtcgagctccttgtccttgtcagccgcttcctgttttagtttcttgatgctctcttgaagttgggcattctgcctcttcagcagttcagcttcctcagagccagcagcaacggctttcatgaacatggtcatggattgcgaagcca

SEQ ID NO: 361853 - DNA, 517 bp, Cannabis indica
tgagttctgctggagccatcctatatagagcttttgaaacaggttcgcctccaggtgccaaatcaatcacaaagtctatttctcattataacggtaatcccggcaattccttggggaatacgttgagaaaatctttaacaactctgactacctcaagcccaagtgtttcaggtctgctggagtcaatcacaaccgctaaaaatcctacacatccactgtgtagtagatccatgactcttaacactgaaatgacagagattcgagacccctgaaccgatccaacataaacaaatggatccttgccctttggctgaaaatttaccattttgtgcttacagtctatacgggccgaatacttggacagaaaatccaccccaagtataatgtcaaactatgttaattccagctctataaggtcagcactcaactccctatcttcgattctaactggcatagacctaatgtgcctattggagataaccaactcctcgctaggcattagggttccaaaccctct

SEQ ID NO: 361854 - DNA, 975 bp, Cannabis indica
ttgtcaagaacgttcctgacttagttagggttatggtcgggtgtatgggcgcctaattatgacccaggttattgctatgttattatttatgcttttcttaccgagtcagtcgactcatagataatatttgcatgtgtaggtaagggcaaggctaagattgagcagccgtgagagcgaggaaatggagtgtaccatctttgggacagtagggcttattttgtgtagtcgccaggcgacaaacttttgtaacttgcattttgaaacggttttaaatattttgtaaaattggatcccggtttagtataagtatattactttagtgtttataattaattaagtaatgttttaattaatcacgattttcaatatactctttgattagcaacgagctgcacatttaacttaaaaatcacgtcaacacgcctaaactagtagggtgttacaatttggtatcagagccgccaagttgtcttccaaagatcgtcacgacatgtacaatcatcattagcgttcagctcatctcacggttcagtaagcctttattgcttgagtagtttattttatagtatgttttaagaaaagtctgataagaagcatgttagtagcctgatagttgaataggcacatgttttaaatttccaatataagcggtaataagtaagttattcttgatcgcgatctgaccagactagcttttggttacgcgggcgtattctagtagtatggacgctaggcgaaacaccaagagtcagggtaactcggttagatccagtggcagtcagggagttcagattcccctgaatgtttggtcaagggagaagccctagaggcagggcatgcggttagggtgatgttaactcgccgtaggctgcccaagaatgggaaaaaaggttttcaaaaatacaagccagaattaatgatcacgatgaaaaaatcagacgcttgagacagtagggtgctcctccgatccctgct

SEQ ID NO: 361855 - DNA, 1402 bp, Cannabis indica
agctttaacatatggagtgaccgattcaatgatacgatccaaattagacgaagcaacgtctggtgaagaagaagaagacgaagaagaaggcaaagaaactgagttaggcctcgacaatgtcgactcatcggagtcagtccgagtctcagcatcagacgagtcgagttgggtttcatacttcaacgacttagagaactgactccgcggcgatggctgaagcttcttttgcaactcatgatatctccgaaccgccggtggattgtagaaccgttcggtgccccgatatcgagtcaaggagaaacctccagaattggacattggtgggagaagagtgagaattaggggtcaaaacagaattaagcacaagttatgggttgcaattgttgagaaatgttgaatattttccacggggtgttgcaagtatcaagggttttagaaagtaaattagtagaagttcaggggtcaaagtgtaataaaggtttttggtcctgaattttctggattttgaaagaagaagatgagagatcaaaatatgtgtacttattattgcttcttcaaatgaggagaaagtcttctttggtttggtccaaacaaaaacataaaaaaatcaacgcctagctttgaacctcttctctatctgaaattaccatctggcccttttattttaaatgcttttggaatttcgctctctctctctttttaattaattgattcatttgtgctactaaacttaaactagttatggcatattttgtaaaaattcttaaaatgtattgtaaaattgtaagagtaagaaatttttaaaatgagagtttcaaacttcaattgtttcacaccaaaattaatatatacaagtatatttattataagattctcttatagaaataaactatcttatatatatatagggcaagactatgataggacaagtatatttattataagattcttttatagaaataaactatcttatatacatatatagggcaagaccattgattttagataatgtggttattatgatataaggtgtatatttttacgataagattgcttgtatgcaattaaaattttatacatattataataatatttaatgatatttattttttaaaaaaataaataatattaataattaaaaattaaaatttttattattttttattttgtaattattattattttttttaatataagtttatttgtaattatatgactatgttagtaagtattcttatttcaaaatttgtagaaaatgacccttatactatttattatttatattatcttttacctatattgttgccccttgatttcgcccaactatacgtggaccaaccggacagggacacgtggatcagataatttataaatattcgctaagtctttgtatgccgctagg

SEQ ID NO: 361856 - DNA, 1499 bp, Cannabis indica
aaaaaataatcaatttttatgtatgatatggaaaattttggtgaattagtatttttcatacaatttttcttttcatgtcaattttgaggatttattgttgagcaggctcttacttaaaaataaaagaagaacgatattaccgaatgaaatttttggattaagtcccggactagattgttctttttaagacattaacgacactgcccaggaatgtgcaagcagtcggaaattgtcggtcgtccttaagataaaatagtctagtcgaaataccactgtataagagctttactgtataatagagaactgtcaaaaaatcacaccaaaaaactactattcggaatacttatataatataatcttaaatataaattgtaaaggtttttatttttgtgtgtgagaaaagataattttttttcccgttggttctgatggcattatataaggaaagcacagaagatagtaatgggaagaaagacgttgattatgggaatgttaagtgagattgtgggaacaatattgaaaataaagagaaaataattttaaaaaatttcaagtggagaattgtgggaacatttgtctttttaccaattaatttcaacacgtttaaaaattattttaattaattgaatgaaaataataatttaataaataaattttctcaaaaaatagagtgacacctcaccgccagcttggcacggtcggacgacggtgtgcacatgtgtggtggttcggtgtgtgagtccttacccatgtgcacaaaactgggtacccttggggccgcaacccatgtgccaaagttgcacattatatacacttctaatgaagtgttcctattggactcaatgcacttacatacttcacttctcacacgataattttgaaaaatttcaactaaagttccaacaattctccacttgaaattttttaaaaatattttctcgagcagtattctaaacaataagattgagcatagataaatgtatctttcgatttgaacatttgccttgtcaatacaacttagaatatactagagtgactcatagtcttgaactctatctctaatgatgtagcatgcacaacctttctcgggtgtagtccaaaagcctgtgttttaaatgccatgcacgtctatcccagtataatgaatgctctaaaaatttacccaaaattttataggaagcggcccccactcccacattcacgtaggtgagtctatcaagagtactcttgtagctcggtactccactccacataaagtatagatttcattaagagtttctattatctcaaccttctatcgcttcaagaattcatacttcacatttcttagaacaatatcatgatctcattcttatcacatcataacttgttattacccattgaacttattttttggaatctccagtatataggtcaggttgccattataagtgattcatcaatctaagggcaacaagcccattcctttcaatgttttaaagactttctctctagctaaa

SEQ ID NO: 361857 - DNA, 755 bp, Cannabis indica
ggaataacagaggtagaagccaaggcagaggttcaaacaacagggagggtttaaagaggcagatcaaattctaaccctagaaattctgatgaaactaatgggtgttacaactgtggtaaacctgggcattttaaaagagattgttatttcttgaaaagaaataacaaacaaaaaccacatggacagggagattctaaatactctaactctaaacctaaatctgatatgcatgatgctaatgttactgatggttatgaaagtggtgaagtgtaccaagttggaccatccatcaaagatgaatggatccttgactctggttgcactttccacatgactaataataaaactttcatgtttgatttcaggaaatcaaatgggggcagagttatacttggaaacaatcagacttgtgatatacaaggttctggatctatcagttttaaaatgcatgatggaatggtcagaactctaagtgaagttagatatgttcctaacctagccaggaatctaatttcactaagtgttctagatgaccaaggcattgttagcaagattgaatctggccaaatgaaaataagcaaaggagccctaactatcatgaaaggacacaaagatggaggtttatactacttaaaaggcacaccagttgtaccttgtaactacactgctcacagcaacagtgatgactcaaatgcaatgttatggcacaaaaggctagggcacataagtgagaagggactgcaactaatgagtga

SEQ ID NO: 361858 - DNA, 652 bp, Cannabis indica
gtttattattttttttatatattttacaaaattacacaaaaataataagaaaactaataaaagtaacatgaaaataaatacaaaacaacaacaaaaaataacaaacaaatcaacaacaaattaacataatataaaaaaccgtattttatgtagataaaataaaaaatcataaaaatatttaaaatttcataaaatcttatttttgttattttgtgtatttgtaaattaattccaaatttatttgcatatgtgtaattttaggaaaaaaaaaattaaatactcttaataataaatttatctacacatatagtttattttttaatcactagattgttagttgcagacaatgcaaagaacaccatatcataacctcatcatgtttttggatcaccgtttactgattccaaactgtatattttagataaattttcaaaaatactattttttatattttatttacaaaaatacatatttaaaattttaaaattacaaaactatattgttatacccgaaattcggctaccatttcaatagaaaacacgtgacaaattgggaagaatatggatcaatgcgtgtaacggtaattatatttaatggaataactcattaaatgcgaaacttgctgatcataatgtcttatgcgagataaaga

SEQ ID NO: 361859 - DNA, 648 bp, Cannabis indica
ttaaatgaaataactcattaaattcagagtcaggtatatttataactcgtagactgcacaatctttagcgagataaggatgtacgaactattgattcacgtattaacgagaaaccatttcgcgtcagaggacataatcgcaaggaagacatcgataatacatagcgaggcatctacctcgcaatatgtagagaggtgttgataaggcgaattggttgttagaacacttagcgtataatatacattatactaactaagtgtaatagcttgaaggacatagataatgcctagcgcgacacccatattgctatatacaagaaggcatactcctggtaggtcccagctcgtttccagggttattgttgctattgagaaccccaaggacatgattgttcagtctgcaaggccttatggtcaaagaccagttcttaagtttgctcagtacactggtgctcatgccattgctggaagacttataaatgagccaagttgttcatgtaccaagcgagatgccccaacgagatacgttttgcagcatgtcttaatcaccgtcagcgttgaccttttaaaagcggtttaaatcacagctgtgtgattttcaaataatgactacatttatttacgtggagcgtaattaaggcccacaatt

SEQ ID NO: 361860 - DNA, 745 bp, Cannabis indica
atattactaataatcataattatattcatagtccctactacaattatattttatttatagtccctactacaatttttttttttttgagataaccctactacaattatatcatctaataatcgttatcttatttataattatcactactacaattaaattttatttatagtcctactatatttaaatacaaataattataactataagttttctttaatgtttgtttaagaaattagagtttctttatacacctacaatactctatattgcgtagtatacctccataaatattccacaaaagactagactttaaataatatatatgtatatattttttttagtgaataaataatatatttgaatatgaatctgaagttggacgacttttgttacacgctttgtttattataacaaaccaatactaatccaacaactgatccatgttgcagaagtctttataattgtgtttacaagacatataggagcagaggacccatatcaacacatggccaaaatgtcgttactgatctctgttcttctgtgtaatatattccttctagttgctcaacaagccacagcccaaccgccaagcttcttataccacttttgtctaaacgacaaaggtaactacaccctcaacagtacctaccaagcaaacctcaatcacctcctcacaacacttcccacctcccaaaacgacaacggtttcggcttttacaatgtctcctacggcaaaggctcagac

SEQ ID NO: 361861 - DNA, 455 bp, Cannabis indica
catatcatcaaccctaagagcgtaggcttgagcggatgactttgcttttgcctttccctttccctgactaggttagcttgtacttgcaccagaccttccaccttgattgtaccctctttgactcccaataggagtaggagtttggaaaccttgtgagtatcccatgttgaaccctgaaccttgtggcctaaactgatgttgatactgagactgctggcccgattggggtgtgaaaccataggatgaagactgagactggtttgttctgggctgtccatgaaaaggagtagactctacataagtccctatgcgtcctccgtaagatgcttcaaatctttgttgtcgttgtgggcaatctttcttcttatgaccttgttcaccacaattgaaacacccgtatggtccattacgagtttttccagatgaaccactactagtgctacccccactaaatt

SEQ ID NO: 361862 - DNA, 870 bp, Cannabis indica
caacaaatgcaaattttagtgcccatagttattttgttgtgccaataggttcgtgcctaaaacaagcaacaagcactacaaaatcggcatgccaattgactgatgtaatggcacgactaatgtggtgccaagctggaaacgtaaactttaataatcatacgtttaggcactacaaagttgtgccaattagattttatgtaaagaaaaacaaaaatatatattttaatttaaatataaattatgaaattaataaaagtgttttctatctcataaattaaaatccaaaactacaataaaagtattaaaataacaataataaaaaaaacattcaaataaacaatacttataacatcatattcataccattacaaataatgatactataatactaattttgtaaactcctaatcgtcattatcatcattctctccaaactgttgttctggaatattcagcatttggggatagtaaggctactgtgatacttctggtatttgtggatagtttggttgttgtatgtgagacatctgctgcatcgatgacaatggttgcatctgagacgttggtgccatatgctgcgtcaatggcatcgaaggcgtatgcggtgtctgctgcattgaaggcatctactgcaaatgtgacatttgatgcatatgtgtcatctgctgcatctgctgaacatgtggtgtgtgttgcatggaagatggttgcatatgtggtgtcttcatggaaggttggtgcatctctggtgtttgctgcatcgatgacatatgttgcatggaagcttgctgcatttgtggagtcttctgcatcgatgtcatctgttgcatggaaggttgctgcatttgtgatgtctgctgcatcgatggc

SEQ ID NO: 361863 - DNA, 656 bp, Cannabis indica
tgggggttccaccaacactcggagtcactcggggctcttgaaggaatttcacagcaccctcggctctcaaggctttttcaaccatttcaacatatgaggttccttcagtggtagtgatcatcagatcatgcctaatcttcgtacttaaaccggccaaatacttttttttctttgctaaagtcagttggcacgattcccacggcgagcttggccagacggtcaaacttggtagtatattcggtcccctccgtttggcaccaactcagtgaactctttccgcttagcactgcggacagcttcattgtaatatttagagttaaacaaatccttaaattacttcacaggtcataactgtgacatccccaagtgagggttattaactcccaccacacgagggcgtcttcctagaactgaaaagtggcacaggtcacctgatcattaccatccactcccactaaagtttaaaatacgctcaattactgtgagccactactcagccttcatcacatcaggacctcccagaaacactggaggtgcctgcttacagaacctttcgtacaacgactccatacggttgccaacaaaaacttgttctcctggcaccgcaggaactaaaacggcctgaggaacatgttgaggaggcacggcaggaggac

SEQ ID NO: 361864 - DNA, 440 bp, Cannabis indica
agaacaagttgcattttttcatcatacttacccaatttgtatgctcccgattcgagaacttcgactacttgatatggtccttcccagtaggtccgagtacacctgtcgtactgtctgtggtgtttagaaatacagttctttggaccatatctcccacaaagaatttctgagccttcacttatttgttgaaataccgagttactttttgttgatgggctatcaactttaagtttgctgtggttcgcttctctcgctttgatcaagagattcggccaggagtacgtgatttgcttcttggtagtacgtcaatcttctgtgggatggtggctcgagctctacgggcagcatagcttcatatccatatgccatggcaaatggagtttgtctggttgccattttcttagttgttcggtacgaccatagtgttgggttttatgccc

SEQ ID NO: 361865 - DNA, 503 bp, Cannabis indica
ttattatgtgtttattataagttattttgagccacttaaaatttaatattttgtttaaataaatacataaataatttgagttgttatggtcaactttaaagggtgcacagtgaaagcttttatagtatatatattattttttaaaaaaaaaagattagtaaccaataaatataaattttataaatataggataaatgtcacactcaatagttgttccaaatctattaatttattctcatttttttctcacatttgctatttttttatttgttcaataaaaaattaaacttatatgtgaaaaagaaaaaaaattgttcaaaatatttaaaatctataaattaaattatattttctttcaacaaaccgcgcaaaacgcggttatgttacctagttattaaataattagatttgacatttatgtggttgaataagagaattggcaatttttgagaaaatgagaaactagaaatgatggaaaaagaaagttggaaaagtggaaggct

SEQ ID NO: 361866 - DNA, 906 bp, Cannabis indica
cgaataaaaaaatttaatatttaaatgtataaaatcgaaaacatatggtatttataccacaaatatccaattatttttttatgtgagactagcagagaaaccctcccttgcgtgcgtcaatcaatctctttgttttatttttatttttgtttttgtttgtttgtagagcaacaaattattggcttatatttgtttttatttttctatattcattctctctcttatctattacttaaaaagaattgatcacaccattatttttttaggtatattattttaatattgtgaaacatatttctgatcacttaaaaagataatcataattaaaagtaatattttagtttatatatattattattgaaagaatggtaactaaactttaaattaaattaaattttatataactttgcttattattttttttttttaaatttagttacttttaaaattataattttaatttaatattattatgtgtgttttgttatttagggtaagatgcaactatgttattatttatttaacaatttttgcattactttgaaaactcaattaaaaagtaatactaagttgaaagaaagatataacaaaattacaaaataatttattaacaaaaattagtatttttttttctgtgatataacttattttgtgatccattttgtttaataaaacaaaacaaaataaaacaaaaaaagatactactttgtttcttattttttttagaaacttaataaaatagtttaataaaattagcttgtttagaatgcgagaaaaagtaaatgaaataataaaatggaaggattactctatatattattttttaactttttttttaattctactagtttgagtttctaaagtggttgcagcgctgttgcaataagagtttctatacgatttttt

SEQ ID NO: 361867 - DNA, 1586 bp, Cannabis indica
ttaaaaatattttctcgagcaacctcaacaactataagacagtgcttcagcaaagatatctttcgatttgaatcttgcatagtgaatacgatttagattttactagagtgactcgaagtcttgaactctatctctaacgtcgtaccacgcaccaatctttcaagggtgtattcaaataagcccgtgcgttaatggccatgcacgtctatcccagtatagtgaacgctctagaaattttgccccaaatttcataggaagcggccccactcccacattcacataggtgagtctatcaagagtactcctgtagctcggtactccactccacatagagtatagatctcattaagagtttctattaactcatcctcttatcgcttcaggacttcatgcttctcgtataactatagcatgatcaacacatatcaactcataatttgttattacccgttgaacctaattcttgggatctccagtcattaggttgggttaccattatgagtgactcatttttctaagggcaatagtcccattcctttcgaagttttatagactttctctctagctagtcctttcgtcaaaggatctgctaaattgtcatcagtgcgtacatgatccactctaacagctcctgttgagaggaactctctaacagtgctgtgcttacgacggatttgtcgtttcttaccgttataataacggttctggacttttgcaatagccgcggtactatcgcaatggatcaacacagctggtatcggtttttcccataaagggatctcagctagcaggcttctaagccaacctgcttcttcactagcagaggctagtgctatcatttcagactccatggtggactgtgctaaaatagtctgtttctttgacttccaagaaacagcgccaccagctatgctaaaaatatagccacttgtagctttggagtcatctgacaaagtgttccagtctgcatcactgtatccttcaaggacagctggaaacctttgatagtgtaatccaaggttcatggttctcttaaggtatctcattggcctactggtaaacctgcacaaaaattccacaagatagacaatgtcgggtcttgtacaatcagtggcatatcgaagactgccaatgatgctcgcatagtcagattgtctcacaccgtcaccagtgttattaaatagctttacacttggatcatatggtgtgcaagcaggtttacagtcaaagtaattatagttcttgataatcttctcaatgtaatgagattgatacaaagaaattccctttttaaacctagttatcttaataccaaggattacattagcttctccaagatccttcatttcaaagttagcacataataatgttattacagcattcacagcatggatatttgaaccaaatataaacagatcatccacatataggcatataatagtgcaaatatcattatcaaatttatagtaaatatatttgtcactttcattcaccttaaagccatgtgagataactaaattgtcaaacttctcacgccattgcttaggtgcctgcttaagaccaaacaaagtgtaaagtcttttttt

SEQ ID NO: 361868 - DNA, 679 bp, Cannabis indica
agaattactaaataacactgatccgtggactaaggctaattaacgccctaaccatgtaaaaattatttatcttttcttttgctcttctttttaattgtttgtttcttcagctcaagttgacaaaatgccaacctaggcgatgggtcctagttttgccccttccaaaattctgtttggtccctagaaataattgaatattaatattttttgaagacagagatgatgctcaaaagaattcttgaaaaacttcaatatttgtggcccaagtttgcaaactgtcaacctcggcatagggctagtcccatgcgtcaacttgggggctgggccctgttatttgtgcccaataattgttgtttttcctctagaaggacctgttttcctatttttgatgaagacaaattcaattcaaaagttggatctttgatcaaatactaggaaggcacccacattgacaaattgtcaacccaggcccagggtgctcggggccttggggccttgggtgctcaaaaatcaacttactctgattctaattgtgatgcctcaaatatgtatgtggtatgtttcgttgatgtgctaatgcatattttggccactttgcactaagacgggctcgaaaactgaaactctaattgaggatgtcattgtaacaccctaactaacataggcgtattacgtgatt

SEQ ID NO: 361869 - DNA, 506 bp, Cannabis indica
caacaaatattgtcttgaaaatttttatcttaataatttttgtctttttcctatttaattaatttgaaaaattatttatttattataaaaataaataattattattttgtcaattcaaaatagattttttcgaaaaatattatactactatttatcccttcctttgacagtgttttaggtggcgattcggggaccatggacttataattctaaactccaataaactagattttttattgagtcccatcaactaaataatttttgtttactaattccataattattccactataaatatgaaattgaactcttagtaattatacaattatatttactgagttttactgcagtgtccattgatataatcgattctagtgattagccctccatgtgttggttcgtaattagttttgattaaattactattttacccttgtaatcacttaattatcctttagtaccattaattcactagtgaaagtataatttagatcctatctaaattt

SEQ ID NO: 361870 - DNA, 245 bp, Cannabis indica
agggcataaaacccaacaggtctaatgtagaccaactatcttcaggaaaaatttcttctatccagtcatcctgattaacaaaatcactaggtatttcttccgttgccttaatggtaggccttcctgttggaattattttaccaagatctagatttagtaacaagtatgttattaacatcataaatatgaacttctaaaatgatacatagtggccgaccatgataggataatgggccccactttgc

SEQ ID NO: 361871 - DNA, 619 bp, Cannabis indica
tcactgtcacgggtctcggtctggttctagttcaggtctcaggtgcggttctgaggtgcggttctaggtctcgacccttgttttgtgtccctagtctggttccatgtttttgtctgagtttaggccccgagtctaggtttgggtttggatctgggtccggctccccattcgggtctaggtctaatttttagtccgggtcctggtccggttacgattgtagatctaggtccaatttctgttatgattccaagtccaagtcctagttcaagtcccggtcaacttcctgtttggtcgcaattttgggtcacagggtaagggttcgtgtcaacttttgggtttgggacttgtttcaggttcgtgtgtgggttcgggtctttatcatggttcatgtccagggctgggtcccaaatccagacaccgactacgagttttctccaagccctttgtccagatccggatctgaatctcgtgtccaagtctggttccatttctagtgtcgggagaagagttgggtcctaggttaaggttcgggtctgggtcgggtactaggtctgggtcctagttctgtttcccaggtccctatcctatttctggtccaggtcccggttattgtgtgggt

SEQ ID NO: 361872 - DNA, 662 bp, Cannabis indica
attccgaccatgtcctcatgtgaccaggcaacaattgttaggtttgcacttagaaattttatcaatgctgattttgcttcgagcagcaaaccttttctgattttgagtttcctggtcggaacatttaggttgattccaatctcttctagttcttccactggcccaatatttttatttggttccccaagtcagggatccacatctttgtccccgccttgggcggttcactatttggctatgttctttcccttgtccgaactctgactaggcgattcttcctttttagtcttagtgttgacctcgcttttagccaacgacaacgaatctatttgataagcgataagtgatttataataacaaatatatgatatagcaatataaagacataggaattttatagaggttcagccccgagcagttcggtaatagccttatcctcgttacttgtattgacttaagatcaaggagaaagattccttttcttatagctcttacaacagtatccctgaatatataattcttagataatatatttagggtatagtcttagctcaactgctttttgaccgatctcttgcccagtgaatatgcatcactatttatagggctattaagcttggggaggaaaagtttcccctctcgttacaatgcgtataaacaga

SEQ ID NO: 361873 - DNA, 593 bp, Cannabis indica
gagttgttacatagtgtgagcacttgtccacttatccaaggatttggtggttggtagtgtttaactcactaaagaaataaccgcagttacctcaagaccaactctacaagctttgttcagtgataatgaagtaccaataagctttactcaacgcttttattcattagatattaaattcaattacatcactatgagctaagttgaaagaaaaagaagtagtggttgcagactttcatttttcatcaaagcttagctgaagtgattcccactacactaatgcaatgttcgaataataatgtaggggacataccttagcgatggacctcccaaccaaaagatgactttattgcatcttgtcgctttgagaggcaatcaattcacttgcatgaggtaaagcaaatctcactgtgaagtgaactatttagggaacagttgctttattatcgtcttagattctccttagatagagggagagccttcatcacttcccccctctcttgagtcgtcttgggaagtagggggagattcttcatccctgatttcttgctcgagatctttttgagaaatagcaggggactcgtcatcactatctc

SEQ ID NO: 361874 - DNA, 886 bp, Cannabis indica
acacttaatattgatgataaatgtggaggttactcatagtaacaactaacttttgtatatattacaaaataatgacaaataatatatattgtcatatattacatattattagtttattacacacatttaatatatattatattatttaaaaataatataacaatcacccactagattgaatattatctctttagtaacaatcttttaactttgtaacatatatttaatcaatcaaaaatattatattaaagtataacattttcccactttaattgaataaatatactcttttaagaagtcttgcttaggtgcattagataaaatatctttcggcttgaattttactttagttattaccacaaagtttgataaaattttagttattgtagcattgaaccactattcttttagttcaaacctgtgataacacacacacccttgctaatgctcacttaagactgcatgtctcactcttggattgttaatggccatgtgaaaattctaattaatggactctctagagaatactccaaattctcataagaggcgacaccacctctagtccatatagttagagttttagtgtctcacaactctttagatacttcttaagcttaagctccattaaaaaaacctttcggttttaaccctcaaatttcaccacatgtactcatccatagataggacaattgagtaccatatttattctattgacttgttattacctattgaacttaatattaaatttttactggtgttaagataggttaccatcaatgaataaaatactatgggagtttaggtcccatccctcgaaaattcatgttttaatcttgtacgaagattaagcgatttcttataatatctcactattgattccatatga

SEQ ID NO: 361875 - DNA, 695 bp, Cannabis indica
tacattgctagagaagactgccatctcatggttgatttagcttttatttgcctttacctggaccacgtatcacctgtgagtacaaaggactcaacaagaaaattaataataataatcatatagtttattattctaatattatcattcatgcacaataagaatcaaaccatcacacattgttcataagatgaaatccaaatcactactggcatcttccatgaataaacacagtatacagatatttggtaatacaaaaccattatacgaataatggaattcatattcattaaatcatataaataatatatttgtacctcatcaagcaactatcttcataacatcacgttgcctaatcaagcaagttgatgctttaatctgataatcttgtagtgcatcgcctaatcaaacaagcccgtgccatagcatggcaaccatatatcgcataactgcataacctaatcaggtgagcctgtaccaaaaacttgcacccatatatcatataattgcatcacctaattaggtgagcccgtgccacaatctgacaccaatatatcgcatcgtctaattagacgagctcgtacctacgcccagtacttatgatatgtcgttgacgcccgtacatacacccagtacgtccccaggaaaatcgcatcacctaatcaggtgagcccgtacctacacccggtactcatcat

SEQ ID NO: 361876 - DNA, 682 bp, Cannabis indica
caaatatatgttctgctgtaacaagatttaaacctattactgcaaatcgttgtatttaattacagtttctaaagaaataaattaaaatactcacaaataccatttttcaattatattgaatggtagtatgtaaagttcatttttattttcaattttaaaaacagaaaacaaaagtgtgttatgtaaagttcatttttattttcatttttagattttatttacgtcgggtctaggttcagggttggatttgggttcaagtcagaggccgggttcagtgccaaggccgtggggggatttaagtttgggtctgatcgaagtccaaaatattgattaagaaaaaaaaattgtttaaaaaaatattgaaagtgatttttttttttgttttaaaattttgattcttaattaaaaattaaaaaatgaaaacagttttatataacatgtttttgaaaaatattttcactttttcaattttaaaaacagaaaattgatcaaaaaagtgttactaaacatcaccttagtattttttagtttgcttttcgttttttttaccttcggacttatattttgttgtagtactcttcttttcttattgaaatgaatcacgtgccttctacaccattttcttatatttatatttatatatataaaatcatttattcaaaaaaaattcttcatatcttta

SEQ ID NO: 361877 - DNA, 754 bp, Cannabis indica
cttcttctctctttctctcttcaatatttcaaaccctatagtgatagagtaagtgcccacacacatcaagtggtactcattcgtagtgtgtaaggctgtgaagaatccagttcaagagaaggagaatcaagctcagatcttggtgatactctgctacataaaggatacaagggttagagatctgagcggaaggagtcatttaattttgctgcacccaatgtaaggtttctcaaactttatatgtgtttaaattacttgttttagaaattcatatttaggatgttaaataacatacatggtagtaaatctagatcctggtaaaacatattccaacaaattgttacaagacggatgtttagggtttctggctgtgatattggataccacacggcctgacacagtttggccaaagaatataagggtggttcaggaatttctagatgtttttcgtgatgaacttctgggtttaccacaaagagaaatcgatttcattatcgatttagcacctggagtagaaccagtttctaaggcagcttaaagaatggctccagcaaaacttaaagaactgaaaattcagcttcaggggttacttgacctagggttttcacggcctagtgtgtcaccctggggagctcttatattgtttgttaagatgaaagacggatctttatgcatgtgtattgactaccaggaattaaataaactgactgacaaggacaagtatcctttacctaagatcgatgatcttttcaat

SEQ ID NO: 361878 - DNA, 277 bp, Cannabis indica
aattaaaattaattattaaataatcttgccagttaatataatcattaattagacttaacaaagtctcttaattaacaaataaatcctagaatctattttcttcacaattaagccctagcttagtgaaaatttataaactagacatagtctaattttagaattacaattgattaattaaaatcaactaactgagtcttacaagtagtattgccacaactagtatggggaccatgggcctaaatatccgatcctccaataagcaaatctagaatttatc

SEQ ID NO: 361879 - DNA, 663 bp, Cannabis indica
ggctttgagagtctttattgattgagcttcaaaatgagagattacaataggaacaaattacacaaaactaagaagcaatgctacaacaatccttcagcatttgtctcctctaatggcagtgatcatagaatacaatgtcactccaattacaacactcaaggcaatttccctctcttcctctcaatcactcctgaactctctttctctctctctgttttattttctccaagtctatctatttagttgaatgagaaggacccctttaaatacctgatgttgcagcaatgttgcaaagtgcccgaacaccaactgtcataactgacagttggttaagttagttaagttcggtaagggtgcaattgtcatttgatatttgaccaaccattttaatagaaatgaattcatttaattttaaaaatgtattcatatcctatatattagtcatgttattatatatatatatatgtgttgttattacttacaatatttatattacagattgtaaaatttatattgtatgacatattgaaaatatattatttaagattagtattttgtatacatcttgaagattagcaaaagttatattcatatattctttaaaataatggatgaacaagtaataaatttttaagaaatttataataatgttctacttgttca

SEQ ID NO: 361880 - DNA, 741 bp, Cannabis indica
ctcagatatgctatcattttgtcaccccgagccttctattcgccagatacatgatttaccactagctgtgaatcactacagatctcaatgtccagcgattaaggcttcgtatttggcctcgttgttagaggctttgaatccgaatttgaccgctgcgtgcaggtgttgccccctagctgtgacaaggtcaattcctgcaccagatagttgatctattgccgacccatccacatgtagcttccaggtcagttttttttcaatattacttggctgtggtattggctcgagatctctttctggtgttctttctgctttgcctgtgcattccaccacaaagtcggccaaggcttggcctttgatagctgttcagggttggaagttgatttcaaactgacccaattctacagcccacttgagtaaccgtccagaggcatctggcttttgcagtatttgtcgtagtggttggtcggtatacacccgaacaggatgcgcttgaaagtaaggcctcagctttcttgttggtagaatgaggcagtaggcgaccttttccatctacggatatcggcctttgggctcgacgagtcttttactaatgtaatagactggatgttgcacgctgtcttcttctctgatcagtgtgacattcacgacatgctccgttactgctaggtgtatccccagttcctcaccgtccagaggtttagaaaagacgggaggttttgcgagctgtgcctttagatc

SEQ ID NO: 361881 - DNA, 732 bp, Cannabis indica
ttctctaattttgtcagtacaagctctattattttcttaaacaggccacatataagatccagatttttgatcattgggtctagacataaacatctagtattaattactttcaaatgttcctttaatatattcaaaatagagtctgtactaataaaactggaggaaaattacagttttataaacaatgggtacttacgccgctaaaaataaacattgggtttatgccacttacaaacttaaaactttgggtacttatgccgctatttacacttatttttttttatcaaatccacatatctaaaaaaaattatttctattattatttccttttaaaaaataaaatagaaaaaatatttatgtttcttaattagaaatactttagtgaagccgttacttattacaattacaaaaaatatatatatatatatatatatttttattattatttaaaaagaattaaaaatttgaaaattattataaaactaaaggattatggttgaattaaaattataattaacaacaaattttgaatattattatattttctttttattaatagtatttaaattaaatatttttttgaaaaaaataatattctttattgaataataacattaagaaaacactaattatataactaaacaatatgcataattaaaataaaaaattaataaaatataactaagtatatatatattattaaaaaatgtaatttaaaatattattaaaaaa

SEQ ID NO: 361882 - DNA, 617 bp, Cannabis indica
atgtgctcagcttcatttccttcgctagtttgagtcccgcgattagggcttcgtattcggcctcattgttggaggctttgaatccgaatttgaccgctgcatgcaggtgttgccccctaggtgtgacaagggcaattcctgcgccggatagctgatctgtggccgatcgatccacgtgaagcttccaggttggcttgctttcagtgctggtcggctgtgttgttggctcgggatcgccttctgggatacttttagcttttccagtgcattccaccataaactcagccaaagcttggcctttgatagctgttcggggttggaaattgatttcgtactgcccaattccaccgcccatttgagtaatcgcccagaggcatctggcttttgcagtatttgccgtagtggttggtcggtgtacacccaaacaggatgagtatgaaaataaggccttagctttcttgttgctaagatgaggcagtaggggagcttttctatcaacggatatcagccttcggccttaacgagtctttcactgatgtagtagactggataatgcatggcatcttcttctctgattagtacggcgcttatggcatgctccgttactgccaggtata

SEQ ID NO: 361883 - DNA, 578 bp, Cannabis indica
gattacccatggtagtcaatttcctttgcagatcaaagcttatgtgggtttgaagctcaagaatcaatggctggaggtatttcgatccttaaattatagtgcatatatgtttgattaattccgcactttatacttaaacatatatatttcagtttatacatataaatgtctaacaatgtatatttttaattttttcccatattctatctatttatctatatgtaaatgagaagtatgagtgatactttcaaatcactctacatagtttttttttattaattctctccttaattctctcattttttttattaattttataatatacaaataaatttattaatcaagaaaaatatctatttaatttaaattttctcatttttatataatttaattaaaaaactataaaaaatatctctaaaaaaatcttataatccgcatgaatttaaaatttttattaaacatataagcatcttcttaaaacctatagaattcttaactatatatatacacagtaaaatatttatttaagaataccctagttaagaataacctccataatttgttataaaaaaattaag

SEQ ID NO: 361884 - DNA, 620 bp, Cannabis indica
atttataataatgttctacttgttcaatgtcatttcccaaagtgaataaaataattttaaataattaatgatattatttactactcaaatatttctagaagaaattagaaacaacaagaaaattaaataccacacaaaatcaaagtgcttaaaatctatgtatcatgcgtgaaattgaataatagtggtcacgtagttgtagaatggatacacttataatcaagtaggtaaaattatatttgactattgaatagaatgggaattgtatacatgttttaatatatcgcaaatttattgtacatttataacatttaaatattattctctgaagagaatgaatagactgaaattctatttcaaagaatacattttttacatatattagtgatgccagaagtaaaattaatatagacatgttttattatttttaaaaatcaatagtttcaaactattgttcgtacaagatatgtatatataattatatatacatttactacttaattcagtttgcatattcctaggcgtgaatgtataatttactaaaactatagtaaaatttgttagtgatctaatataatttaatatatttacatttctcaaagtgataaagaatcacaaaa

SEQ ID NO: 361885 - DNA, 527 bp, Cannabis indica
tttagttttagttgtaaagaaaactaaaaatatcaaatggtatttttaaagtgactttaaagagtcatttcaagagaaatacatacaaaaaatgtgaaaatgcgttgagatattgttgattaatttatttgattttaaatttaaattctaaatcaagtttggctatgtgcatatgtgaaatgttgacatatttggtgtcaaattttggtgaagataatttcaagaaggaaattaaatttaagagaagttatagggacaaagcggtcttctataaattaaaatcaaagcattatcttgatagtgaaatgtgaaagtgtggggtgatactctaatgtgaaaagcttaagacatgcttgttgtcttaaaatgaagtgtaatctagacatgtttggtgtctaaattagtgtttaattttgattggtatcaaaattattgagaatttgagttgtgtgaaaaattaatcttttatgattgaattttcaaagcttaagtacttaaggagaaaagtggtcacaaagtgaacacta

SEQ ID NO: 361886 - DNA, 679 bp, Cannabis indica
atagaaaaaaatagaaaaaaaaatgcaagatgaagtattctgcacgctggcaggagcatttgcccgaacaagcacagacggggcgtcatcatccgaagagtcttcctgctcctccatgacggcttcccctttccttctacaggggtggacgaccgagcaggtagattaggctctctgatccgaatagtatgttcgatgggcctctgcccgatcaggagggttttcttcttcttgagcggcctatcctgctcagaatattcctgagcatactgcttggctcctgcatcacccttcaacttagcctcacgcttgagctgaatgagctccttctcttgctcagctccctcagcttggccagccctggacttcttcttccttcccttcacaggctgaggtataaagtctgttggataaagcttgtacttcacaaagttgtcctccgaggtgaacaaagtgatattacgagcagcatctggcaactagatctcttgagccctgtccctaagtgccaatgttaggggtggacggttgtatattgggatctattgaaaccaagtataggtggtatccatgccttccacgaagtaatactcgtcacaaaacccctgatcctgctaacatccttgtccacggtgcccgtcagccacttgaagtctggctgagagaagtagaagtaccc

SEQ ID NO: 361887 - DNA, 1094 bp, Cannabis indica
attaacttagaaaagatataacggtaagtttatgatatcttttatactgtcaatatcagtccagtctaatgtatatccaatacatctcatactagtagactttgctaatgtcctagaaaagatattcgacgtgtcattgtgtaagtaaactttatcgctaattattatttcagtgtaaatctagtacactgataaatcatggaactaaagaatttgaagcatacaattacaattactttccaccatgatgacatcactgtaattgtgaataactatatgctctggatttaatagaatttatatattaattagtaaagttgtatattaaaatgggttttatttacggcataaaatcccaacaaactcccacttgcactaatataaaactaaaagtgtatttcaattaatctcatcatcttgatgtccaaatcaagtgtagtatgtagtattatcattataatagtatctgacaggttgtattcaattcagcattatccaccattacatctccttattcacaaaatctttaatattgtaaaattcctttctatatgtttactcctcttagggtattgaattttttacagtttggtaactatatttgtgttatcaggaattaacactagtagttaattcatgactaaaataatgccaaaaactgtatagaactttccataggttgaataattatctaatagctttttgggccactttaacatcagtctcactggtagagttagagactttagataagttttaacacttttttaaaattactgctccatccccagagtaatcaccatcccaaatttagattttctagcatcaacacaaatctagaaatatgagtcagtgtagcctaaagggtttcgataaacatcacccttatagactaacatacatgtcctccttaatcataagatttatttgattgtcttctaatgtccctttcctaaactaaaatgatatactcataactctcactcaacagtagctgtgtggtctaattcatgtcaaagcatacatgagacctgtcactgttgattcttaaagaatttttttcttgacctttatcttttctggaatagttaaaa

SEQ ID NO: 361888 - DNA, 916 bp, Cannabis indica
ccgcaaaacaaaagtagtattggaggaaatgctttcagatttaactccaaataatgttccatcgtcttctactcaagtaaagaataatcctactccctcgatgaattgatacaaccgagaaatctaccactaatattcctgctcaaaaaatcacggctcctctcgtaatgggagggtttctaaaccagctcgttatgacttggatggtgaaatcaatatggtcgttggtgacggtattgatgccgatccagtaacctataaataggcaatggcaagtctggaacggaaacaatggtcagccggcatggatttaaaaatggattccatgaaaaagacaaagtctaggaatatgtagatgcacctgatgattatcatccaattggatgtaattggttttacaagaagaaaagaggtgctggtagcgacgtcaaaacttttaaagctagactgttgcaaagggttatacccaaagagaaggtgttgactataatcaaaaccttctcattcttggaacaaaaggtttaatgaaataatcaaaacctacggcttttgccaaaacaaagatgaaccttgtgtttaccaactcaagaataatcaagtggtagtattcttggtcctttatgttgatgaaatttttattattggcaacaatatcaagaaaatgactgacatcaaggaatggcttgacacgcaattcgaaataaatgatttgggtgaagctgcttatgctctttgtatttagatcattagaaattggaagaacagatcccttgctctctctcaaacaacttacattaaaaaggtgctagagatattctcaatgataaataccaaaggggcagtgatgccttctagacctggtatccgtctatctaaggaatagtctcccactaatcttcaagagatagaggacatg

SEQ ID NO: 361889 - DNA, 516 bp, Cannabis indica
tgttctcgtgttgctgtggtggttctgtccgtgtgtgtgaaagatggagactataaatatattttttcttccttctctatggctattttcatgattttttattctgattctcctataaatacatttgacgagctcactgtcaaatgagttatgaggtgtgtggttcttttatgtttttctaaatggttatatctgcttcattgttttacatttgtttttgtgttattttagttttgttttagtagtttttttattataattttacaggtctgaacttgcaagtatagccactattgcatttggtgttgaggctgtgcagaagatagttatttttaatccatttgtccattttttatttgatttgtttttgctcaatcccgtcggaattaatggttgtttttcagttattctggtatttcggtttatgagtgtagaaaatagaggtctcattttttttttgtatttacagtataaaagaaaaaaaaaagaggacaatataaatgtaatttctgccgt

SEQ ID NO: 361890 - DNA, 413 bp, Cannabis indica
tgacttaagtttttaagataggctcgaggtagccatggtcgtccaaaggggtgcacccatcaaagaccaaccttgctgttccacctaaggtccgtagtctctcaatgacaggctttacacaaatagagggtaattcataatcaatctctaacctttgaggctcaaaattattatgtgataatatatttgcacttatataattaaaaaatcatgtgctaaatatttttcttccattaaaaaaaataattagctaaagcttccttttcatttattatgaaagccaaagcttattatcgaactctatgtttttttcattattattttttagtctattatggatactacattgttataacttataagatccatttttttttttttttgtgttatgatctataatttgagttattttg

SEQ ID NO: 361891 - DNA, 913 bp, Cannabis indica
agtcatacgtctgctcggtcactaggggggcacatatacctgtacaaagcatttggtaaacataaaacaatcacaattgcaatgcaattataaacagagaatgaaattcattaaggataacaagagcatatagtaccgggattaaaagctgcccggtcagcccgttgtctaaaaaatgaaaaataattccaagtttaaagactgcttggccggtcatgtcttaaaggccttgaggtcgtatataatatatatatatataaacaggagagatttttgatcaatgttcaaacagttggagtcccaggctctgggttcggttcttctgagccaactagagcagaaagatctgttggtcgagcaggagaagcatcagcagcctagtcagaaggttggccggaagttgaagcagccacctcattcccaccataggcaacttgggccgcacagtacttgaggtatatgtccttagcgtcgcccaagtagtcgaagttggcctggggactagccttccaaaaatcaaagaagagctcgaggctggcagtctccaaagccttgaccttctccttcaaacggtccgcctcggccacctgagcgtccttatcttcctacaggcaaagaaggacatgccgcagagaactcctctcatcctgaagacgatcaacttcagtagataaggtctcgatggtttcctcaaagcgatcagcagcctcgaggttctttattagcacggtgatcttctcggcggcaaacagcttcttattcgcctctcccagctcatgacgaccagctgcagtctccgccctggcctcctcagcttccttcttggccaagtccgcctccgccctcaaggtgtcggacagagccgcactcttggaagtagcagatttagcccgggagtaggtgtaagccaact

SEQ ID NO: 361892 - DNA, 695 bp, Cannabis indica
atactgcttgttgtcatcccaatgactattggttttgtaccaaaatttgtagaaattccatatcctgaaatttttgtatttgttctcaatatttggtattaatatttctaaacaactatttaatccataaaagctacctgacaacaaacagtaaatgatatgaaatacatcagtagttgttcaattataaactaattgcatcaattccatcagattaaccaatttaccttatgaattatgcttgatctaaattgaaaaataataaacaatcctcattatgaaagaaaacactaaaaatattggtacattgtattttttgtcagattcttttaagttgtttttgggtaagcaccaaaaccccttttgattgtgttgtgatcaaattatgccccacaatagaattctaattattatttatggattgttattgtatatttttgaataaaggaggtagtaatgtcttttttttaagtttggatatttgtcaggtttagatcgctttgttgctaagatttacattgcaaccttagcttggacaatttttttggagctgaaatagtgtggctgggaacaaaggaggaagagtatgcatattgtttgttcagttggaatttttgaaaaaaaaagttttgaatttctttttttttctttttttttttaattttccttacaaagataaaaatataaaatttgaa

SEQ ID NO: 361893 - DNA, 965 bp, Cannabis indica
atatttatatagtctaatgataatattgtaataataaattatgagcatgtaatagctggatgtacatatattatggaatattaaaagatattgggttattttttttatatgttttttaatgcaaggtttgactatataggccaaaaagattcatgattagtagtataataagagcttatatattaatttatttataattttggaatactgtatgtttattattatatatagtgatttctctttgtgtgccatttggcttgtattttcttgacaatattagctgtatttgtgtcctaataaatatcatttttttaaagaaaaataacaagtaaataaggatgcaatgttaaaccttcgagccataccaccattaaaccagaagaaagatcaaacaatgaaaatgaacaaaggcagagaaagagagaaagagcagagaaaggtaggagaagaaagaatgatctcattgatctaaacttcagtacagccatttatacacaaagattcataaggaaaatatctatgacagctggacaaaataacagaatgcaacagaaagaaataaccgaatgaacagactataacaaactgaagcaactgtaatgagctggcaccaactgtcactaactgtcattagagtccttaacacctcccctcaaactcataattgtggagtcacaaattgtgagtttgtcccgaaaaatagagaatctttggctggaaattgctttggtgaaaccatcagcaatttggtcaaaagcagcaacatgctttatctgaattagcttctgcataaccttctcccttacaaagtataaatccaattcaatgtgttttgttcttgcatgtagaattggattttgagtgagcatgattgtactgagattgtcacaccatatggttgggggctgaggtaatcgtatatgtagttctgaaaataggtagtgaagccaagtaagttcagcagt

SEQ ID NO: 361894 - DNA, 989 bp, Cannabis indica
agtgaaggactggctgtcaaactttttgccattgtcccaaactattttgtacggcaatctgaactcgcgaattatgttcttcaaaacaaactcttgaactttctttaatgtaatggttgccgatggctcggcttccgtcgacttagttaaataatcaaccgcaaccactgcatactacactccacctttgcccttgggtaattgtctaatcaggtcaattccccaaggactttgcatctgagttaactcgttgggtggagctcgcggtatcttcgaaaatctttggcgtttgttgcattttttaacataggcctttcaatcctcgatcattgccagcaagaaataacctagcctcagaattttcttagataaactctacccagtggcgtgatttccacaaattccattgtgcacttcagacaaaagtcatgcagcttcttcttgggtaacacatctgagcaatggcatggagaaccctcgtctgtacataattccctctactatgatatatcgtgcaaccttctttctcatcttttgagcttcattttgattatctgggagatccccagtgttgaggtaggttgctattggcttcatccagtttggggaagtgttatagtgagatttctctcacctagaaactcgagaccagactcttatttagaagacacatgtacttagattttccaatgaaagctgagacgtcagtaagagaatcctcgaagttttaaacctcactcaagatagagtcagcgagatacagcgagcatgaccaaagtctgatcgcatgattataactcgtattatgcgggacaagagagtaactcgcatgtatcgaagtatgtgcgagtatcctctctacgttcttgcataaacatagagaccgactctctataatgcgagttggtcccaatgaccctacaaccttgataaaccgatatagactcatatgtctaggttctatcagctcgtcatacgatgtccacaaa

SEQ ID NO: 361895 - DNA, 950 bp, Cannabis indica
aaccttgataaaccgatatagactcatatgtctaggttctatcagctcgtcatacgatgtccacaaaggcgactacataagaacgcagacatcctaaacgcaattaagtgttaggcccacgagcttaacattagaatttgaacagtgaactcgcacgttaaaagggcgcatacgttgctgaatttagtaactgctattcatttattgatgtttacgtcatttagtttagttactgtaattcaatgtgtaaacggattgacaatgaatcaatctttgtataactaattggacacctactttgtacataaagggctgatccaccgtgaaatgagacctacgaaactcttgctacagcggactaagcagaccgtgatctgactgaaccactataatcctctatcttattgttgtttccagttttctgtttagcatttcatattcccagtccgagtactcgccgttcttggttgaatactcgcaattgttcttcaagcaattttcttcttgtcattaataatattacatacatttgttgttgcgaattttgcttgacaacatttggcgccgtctgtgggaacgagaattaaagtttcaataagttcaagtaagaaaatcatcatggctggaaaccaaacaaatggaggtgctaacaacgagtccatcaacatcggaatgatgaacgtgccattatctggagctaggacgccacctgtggatgtcgttaatggcggagtagggagaggtaatattttacctctcaatctattccctgaaatagctggccctcaagttggggaaacgtccacacgaccagcaacaatgcactttctgcctgtcactccagcggtggtatctgagggaatcgtccaactaaccactaaccaatatactgcgattcaggatcaactacgcgcactgcaggccgaagtggatggacagaataggtcccg

SEQ ID NO: 361896 - DNA, 664 bp, Cannabis indica
atattttgtgaaagtggaattagggattaaccctatttgtgaaatcccagattgtgtgactaggattactgacacctgatcaggagcacccaagtgtttggagtctctgttattgcgggacaacaggtaagacagtagattgtacgtagagtatgcgcggtggcgcttatgttgaatatgatatatgtgagtaattgtaaccgggattccggttattaccctaatatgagcggttaatagcctagggttattaccctagtgaactgtattgtttaaatgctatgacatgctatgaataataatattatggattatgcgttcaaggcataattaagctagactcggtaaactagcaccttgggtttaattttaatgcagtcttgggttattaccctagaacattatgaaagtaagaaagcgttaatttatggtaatgttattaatccaatgaaaatatgacttagggtttttaccttaagattttatatgatgtggtaaatattgaatacatgcgggtatgttaagtgttatgtgtataaaatataactgggttagacctagtatatatcaccaggataaccaaaagaacgtaatgtatggattacgtatatatatgagtagggttatgcgttcaaggcataatcgggttgaactcggtaaccat

SEQ ID NO: 361897 - DNA, 683 bp, Cannabis indica
atgtacccaatacaatacaaaaaaaaaaaaacaaaacaataacatatactaatttggcagtatactgaccgaaatttaaaaaaaaaaaaaacagtaaaaacgtaaatttgggcgtgtcacagtatttttgtaatacatgggaaaaagttagtaaagagtgtaaatttcccattcttaaaccaaacacagaattactttcagcataatccaatcttgtccagtccagtccaatccttttcagtcctatccagtccaatcctgcgtaccaaacgggcccatagtatataagaatgatacttgtctaattctctttgttcttatgcatacaatttgtgtccttcaatttttttttcttaaaatagtttaataaaaccctacttcgctttgctttcactgtggagataactcgttataaatgaagtaacatcaattttatcaagtaaactgcagttaatgattttattacgttatcagctaaaaagaataaattatgggcataattatataagattttattaaaacaatatcaaaacaacaagaaaattaactaaaagtaacatgaaaatcacatcaaaacaacaacaaaaaataacatacagataacaaaaaaatcaacaacaaattaactagagtacaacataaaaaactttttattttctgtaaataaaatcaaaaaatcataa

SEQ ID NO: 361898 - DNA, 523 bp, Cannabis indica
ccagcatttatcacatttctcgacgtaggcctttgaaacttccatcatggttggccagaaatatccttcccttagtattttcttcgatgaactttgtctcgtcgcgtgattaccacagaatccttcatgtacctcgaacaagagtcgtgcaacctcttcttttgttacacatctaagtaatggcatggagaaacctcttctatacaacacaccttcaactatgatatactgcaacttttctcatcattttccaaggttcattcttatcgtttggatgttctctagtgttgagataagctgctatgggtgtcatccaatttggtgttgtatctatcatttcgacttcttccgcacagatgatgctgagttcttttcagaattagattgggactaagttggctttatctgttactgtgctgctcgtgagcagtgcgaaggcgtctgcagttttattttcttccctttgaatatgcttgaggttgtaacccttaaattgtgcaagcaggtcttgtatcttgcttag

SEQ ID NO: 361899 - DNA, 1028 bp, Cannabis indica
gctcctccagattgggagcagaggtttgcagaaatgcaagatcgaatccgccaacaagatgaagaaattctaaggttaagacggcagggtcttcctgccatgcctcctcaacaagatgatcaggccgttgcagctctaatggtgacagtagaacagcctgttgcttgcaactgcatggaggcgttatacgaaagattccataagcaagcacctccaatgtttctgggaggtcctgatgtgatgaaggctaagtagtggctcactgtgattgaatgaatcttgaattttatgggtgtggttggtaatgatcgagtgacctacagcacatttcagttcctagaggacgctctcgtgtggtaggagttggtgtccctcacccgggacgtcactgttatgacctaggaagagtttcgagagttattcaactccaagtattataatgaagccgtccgcagtgctaagcggaaagagttcactgagttagtgcaaactaagggtatgtcagttaccgagtatagcacaaagtttgatcgattggccaagctcgtcgtgggtatcgtgccaactgacttcagtaagaaagaaaaatacctggccgatttgaatgtgaatattagacatgatctagtgattactaccaaagaagcaaccacctatgcggaaatggtagaaaaagctttggtggaacccccacttttcctactcctgcctatggtagggatggtagtgattccaccactgatcaaaagaggaaagttactcctgcatctggtggctcagggcagagcaagcagtttcgtggaaactgaggcagaggttgacgccagggttactcttaccctgagtccccacgttgtaagaaacatcatccgagagagtgcaaccagaagacatgatttatgtgtggcgtggtggggcatttcaagaaagattgccctcaggcaaagaaagaagaaccgaaatcagaggaaaaacctatacctgctcgggtgtttgctatcacccaagctgatgctgcagccagtcct

SEQ ID NO: 361900 - DNA, 426 bp, Cannabis indica
gccacggactttttagtcacaatctaagaatgataatttaaaattagtcacaattttttcacttttagtcacaagttttgttgtgaataaaagtaagattttttgtagtgtcacaaaataataattaataatttgttaattaattgaaaatgtttattagtatactagttagaagttacgtgccgaggcacgtaaatattagttttatttagagtttagttctttgttgttttatttagattattgtatctaaatatatgatcatgcgaatgatttgttttattaaagtaatatgtgttatcatatttggttagtaaaatataattaggtatatttaagttataacaaaataatacgcattaggtctacaattgacgttgttggatcaacgtgatgaaaccaataacaaacacaacaaggatgaag

SEQ ID NO: 361901 - DNA, 1407 bp, Cannabis indica
ctctctctctctaaactaaatctaaagtatgggcttttggagattagagatcagaactcttctcccctttgagaatagaggaacacctatttatagttattggcggggtcccttttaagttgatattaaagacaattgttataactagcaccagctttcttcagattcatctgatgagcaaatagatggacatacagacttgacaagttaagtgagtgttatcccaacaactccacttgattagactcacttaaactccgatccaaaagaaatgagtgggaacattaaatgtcctgaatgcacaagtttagacaatgcctaaacttgtctctagttacacttttagtgaaaatatcagcagtgttatcatgtgtgcttattttcttcacttgcaccttcttagatgacacaatatcccttatgaagtgtaacttgatatcaatgtgctttgacttttcatgaaacattggattttttatgagatgtaaagcattttgattgtcacaataaactgtgatatccttacatttgaaacctaactcctttgtcccttaagctatatagcctctttgatggcttctgtagcaactatgtattcaacttttgtagatgacaaggctactactttctgtaggttagatttccaactgatgcagcccccaagagcagtgaacaaaaaccctgttaggctccttcttgtgtctaggtttgctgcaaaatctgagtctacaaaaccagtgatttcttccttgaattgtttcttactaaacacaatactagtgtccagagtacctttcaggtacctcattatccatttcagtgcttcccaatgttctgggcctgggtctgaaatgtaccaatggaccacactcattgcatgagctaagtaaggtttggaacataccatggagtacatgagactcccaacacaacttgcatagggaacattgctcatcttggctcttctgcatctatttttggtgactgagatgcagacaacttgaagtattgagcaagtggtgttgcaactggtttgcacttgaccatgccaaacttattcaatactttctgtaggtaggaagcttgagaaagtattaccaagccaggctttggtctttttatgtctatcttaagaattctctttgctttgctcagatctttcatctcaaactcatcactgcatttccttttcagcttgtcaatatctaactttgctttgctaaagatcagcatatcatcaacatagagtagcaaaaaggtttgattattgaaatacacacacgagtcatacttgcttttagtgtatccaatattctgcatataagtgtcaacctcaagttccattgcctaggtgcctgcttgaggccataaagagactttttgagtaagcatacctcatctggattc

SEQ ID NO: 361902 - DNA, 476 bp, Cannabis indica
aagatcctggataaatataattccaacactaacctcctgaaaggtacctctacggcttcattgactaccaaatcatgttcatcatctatatttaaatctacaataggatcattattgtagaagagagtatcgaactccttaaactgactgaatcctgccacttcttgttgttgatctacattggtaggaacctcctcattaacaccaaccctaatattcttttttttcaagaacaaaagatcctaccacacttcaagggagaggatagtagggggtaggctccaaattcccatcctttcttactttggtcacaaataatggcataaattctatgttcgatattgacactcttatctctaagaacactcttagttggcattctttcataataacatttggtagaactatttgctcctccatgtacaaggaaaaactctccaatttcaaccaacaagtctgttgggttttatgcctta

SEQ ID NO: 361903 - DNA, 669 bp, Cannabis indica
ataatataaataacaatgccattcaaatttgtctgtgtgacacagacttgcatgttgcgctcacatgcctatttatgtctacgtggcgtagacctacgtgttgtgctcacacgtctaaatacaataacgccttagaatagttcatctcagttcttgttaccgagtccaacctgattatgcctgaacgcataatccttaatctcaacatatatatttatcacataattaatggagccactgcactatttgtctatttgctataaacctgcgtgttacgctcacacgcatatatatgtctatgtggcatagacctatgtgttacactcacacatctatttacaataaggccttagtaacgtttatctcggttataattactgagtctaacttggttatgccttgctcgcataaccctattcatatatatttacgtaatccatacattacgttctttcagtggtttatcctaataatatataccaggtctaaccaagtatgtcttatacacataactcttgatatatacatacattccatataaactataacatataaaatcttagggtaataaccctaacttgcatacattccatataattgtgacagtcagtagtcccgtgatccgtaaggggaaacatcgggtaagctgtgcaatcccacaccgcctgg

SEQ ID NO: 361904 - DNA, 793 bp, Cannabis indica
aaatattaaattaaaatttatatttagagttatctaaattggtaattttaattaaataaatatgtattttaaaataaaaggattaaaataagtatcaaaagaaaatacaactctttaaaattatgagctttagttataaggatattcgatctccattattggttccacttggttaatttgttttcaatataatctcgagatgctagacttcgtgttattcgttgaagcatttaacaccgtaaagatcacgaaagataattattttgtaaggttttgtctctattagattctaccctaaggtgactacttagagataaatttacgaagtatgaaacaatgttggaagcttataaaataagaataaccttgactcttgcctactcggacaatgttggattcttaatttgtctgaataaaaggttgctagaatggtgtccattttatatgagctgactagtctattcaatgaattatatctttgactctcgcctatcgaaaaactgtatcagtttattggaaaccttaaaaataatttaagatgtgcttgttttgtattttcacatgtctatcttacttgctaaatgtatgataatttctgaatgtctatgaatttatattgaaccatgttattttctgttattaattgtagtttaattttagaatcttcattggttgtctaacttagcttgtgtttttaatgggcaaaattccaaaggattgtcatccgttagacaaaaataatagtgttagatctcgatagataaatatttgtaactacaacatctagttgtac

SEQ ID NO: 361905 - DNA, 667 bp, Cannabis indica
aaagctgtactaaacttcagcttcgtacccatggacttctgaagactttgccaaaatttggaagtaaattttggatctctatctgaaactatggatttcggagctccatggacacacactatctccttaacatacaactcagcatactgatccactgtaaaggtggttttcactggcaaaagtgtgctgactttgtgaaacgatccacaattacccaaactgaatcatacattccagtagttctaggtaatccaaccacaaaatccatggtaacatcttcccatttccactcagggagtgtcaaaggctgtagtaaccctgccagttttttatgttgagccttgatctattgacaagtcaaacaccttgacacataatctaccacatctctcttcataccgcacaaccaataatagggtttcaaatcttgatacatcttggtggtacctggatgtaacgaatatggagtggtgtgagcttcatctagaatctctttcttaagcccaccatggtttgtaacacaaactcgagccttataaaggagcataccagtatcagaaactgtgaagtccttaacatgtccaactaagacttcctctcgagttttaactaactcaagatcttccagttgggcacacttgatcctttctattaggtcagaatgaag

SEQ ID NO: 361906 - DNA, 929 bp, Cannabis indica
aaattcctgaagagtttctttcttgtatagtcgtggtctcatcatcatcctcatctgaaaagtcccagacattgcgaggggtgtaaaaattgacaaggttccaatcaactccattcttcaagtcaggaatgtaatatattaatttttcttgggatgcaagtatgaatggttcattttggtaccattcacgggcaacgcaaacactagtgaaaaaaccatcactttctgtcctgttaccgtttgtgtcccaccacttgcacctaaaaataataacactacaatccttcaagtaagtgaactcgtacacttgtttgagtacgccataaaaattgttaccatcctctccaggcaccaaaataccactgttttgggtcttacgattttcatcccgatcctcgactaagaatttaacaccgttaacaatacatccaggataacaataacatgttgggttagagggatttgcgatggcgtacaactcatctgatacttctgcaggattatctgctcggagttgattgatctatcattaagaaaaataatttaatcattgatgctagattaatacacagtattttaataacaaaataagtagaaagcaatacttactcgagacttgaaccaactaggaaactcattctcttgaattgtctcaagattttgatgacccctaagttgtagctcgttcctatgctcactacatgaaaaatggggaaaatgttagataatgtcgtcactaaagagaactaaattgaatatgaaaaaagtaatcttacgtgatatacttctccacttcattacaattgttcagaatgtaccactctgccttcaatttatcttgcattggtaaagcaacaatggtcctctgaccaattggtcgcccaacatgcttaaatacagagaattccctttcaggcttatttgggagg

SEQ ID NO: 361907 - DNA, 1217 bp, Cannabis indica
ttaagttatttttttttattttactgaaacacattatttttgtaatttttaaactttaatacaaaatttttgaaaatatagtacagtaaaaatgtaaaaataacaaaaaagataagtatttttgtaagattctcaattttattaggaaatttaaaataatatacatattttgcatctaatttacaataatatcctgactactattattgacgtgtcacgtcagccaaatttctgatgttttccagtttttatttttatttttaatttcctgtgtttttaagtaactttatggttactaatagtgctgataagaaatcaattagtcacctttttttttatataaaacttcatatttgagatacattttggttacttataaaacttatttctacacattttagtaattaattagttattttcaagttatattatagtagattataatttaaaatatatttaggtaaccttaaaaattatttttgaaattaataagttgtcatgtaatataacaataagtgtactatgtttatataccaattattttatatactattttattatttgaaaagctaattagttatcgtataatatagtataattcaattaacaaaattttaacatgaatgttaactaagattaaaaaaatgtataaaatagtaactaattattatattagtaactaaatattttttttttgaaatagcgaaaaatatatacttttcacattttgaaatgttcacaaataaagtgactagaaattatttttaaagtttgagaaaagagagagaaataacaaagagagaaatgtatataaatgagggtattgaaacttacccaaacaaataaaaacgttattgatacttgatcaacttatttttaagaattagatcaaaaataaggtatcaagtgtaaaatgcataattttatttactccaaaaacttataaagataccacattttaataatttttattttacataatatttaaggataattacgtaagacattttttgtacaaaaaattacatttttatgtttaaagaatttttttatatatatatttttacagttttccatagaaataacacgaaaacaacaagaaaactacataaggtaacatgaaaataacatctaaataacaacaaaaaataacatacaaataacaacaaattaacaacaaattaacaagggtacaacataaaaagaccatattttct

SEQ ID NO: 361908 - DNA, 532 bp, Cannabis indica
ttcacacaactcaaattctcaataattttgataacaagcatatcaaaattaaacactaatttagacaccaaacatgtctaacttctcatattttaattttagacaccaagtatgtctaaactttctcatattggagtatgcacccccacactttcacattttactatcaagataatatcttgattttaaaatacagaagaccactttgtctctataatttctcttaaatttaatttccttcttgaaattatttttaccaaaatttgacaccaaatatgtcaataatatccaaatttgatttagaatttgaatttgaattcaaaatcaaataaattaatcaataatgtctcaacacatttttagtaaatttatggctcaccccacatttttaccataaagtgtatataaaatatcactttagtgtattttcctcttgaaatgtctctttaatgtcaccttaaaaatatcatttgacattttttgttttctcaacaactctaaaatgctagactcacattactactcacaaaat

SEQ ID NO: 361909 - DNA, 526 bp, Cannabis indica
atgtctttcttttgctgaatgtatgataattttttaatgtgtatgaatttatattgaaccatgttgttttctgttattaatgttgtagtattaattttgagttttcattgttggtctaacttagcttgttgtttttaatgggacaaatcccaaagcattatcatcccttagacaaacataatagtgttagatcttgacagataagtatttgtaaatacaacatctagttttacatttaaagatgataacttagattagtgtttacaacatgaaacaatgaagagattcataaaataagaataactttgactctcgcctaaacgggacattgttggattcttattttattcgaaattatcctttaattttcctcttagctttttcatttagaattttcttaactagtatatcattggataaatagtttatatatcatctgatgatgtcattgtattttcttctttaaaattgaatggtgtatatgactatattcccgatattctatcccaaaatgatataaatcctc

SEQ ID NO: 361910 - DNA, 586 bp, Cannabis indica
taaagataaacttaatatgttgaataatttgttgattgaggtctagaagtgtcaacccactcaagcttccttaaagttggaggcagatgtccttaaggacattgaggaggttgaagctagacaaggtgaaatttggtgacaaaaatctcgagagttgtggctttgggatgggatagaaacactaaatttttccatgcttcgaatatcatcaagcgaaaacacatttttatcgaggcagtttcagaaaatggcactaattggatctatggaagacaagctatttgtaatatcccgataagtctaatggtaaataattaggatttatatttatattatgtgttaatcatgtcataagtgggattatgatcctactaatctatttcagcataaaatttaaattttgctataagtgactaaataagcgtaatttataaattacggagatttatataacatgtgtgaatgtaatatgagctatatgtggaataaaatattttcaggtccggtgaccctgaagatctaataagtggatatataagcttaatttgttaattacggagatttatctaaaatacgtggatataat

SEQ ID NO: 361911 - DNA, 593 bp, Cannabis indica
aaaataatttccaacagtgtcaccattctcgtgatgccacgtcagagtgtcaattttgggataacaatatttataggaaagtcacgaagggaggtaatcatttcaaaggaacctcagacgcctcaatttccctccttaaaagcaaatatgggaattcaaaaataatcaagtgcaagccgtcagccgtggtgagagaaaatcgaattttgaaatattaattgtcagagcatttattatcctagtcagcctcacatcgagtctcagacagtcgcgcttaacgcgtgtccccatccaaaggcagaaacagctcggatgaagtctacatgcaacttcggaagtcccatacaaacttggtgggcaaatgttatcccaattttgttactctaatgtggcatcatataatggtgacacgtggaatccacttggagtatctgctcggagggcataatctgagaacggtgccttgctggcatgcccagagcaaagcaatcagcaattcgcacagagcaaccaatgcttagcgaattcagctttcgcattgtgagtcatcaacgaaatccctataagttggggatcagattacagggatatgg

SEQ ID NO: 361912 - DNA, 653 bp, Cannabis indica
tgattttgtccagattcaatgaatataaaatattcatttatcacaaaatcaattatttattttatttccttaaatagaaatatatttccttaaatagaaatattcttatatttgtaacttataaaaaaaaaacatagtaaaaaagtaaaaaattaataccgcctggcagtatttttgtaaaaaaatgacaaaagttagtataccatgtaaattttcctatgtaattatgtatattgaaatatgagactagtggaatagtcaagtaaaactagtgtatagtattaatggccttgtaaattttttttaaaaatgttttttaagaatttgtaattagttattttagggtaatgtgtattcatttttaagtgttgcaatatatatatatatttatatataaattagttaaattttattttgtataattgtgtaataattattttttttttgaaatggtgtaataattattttagtgtaatattaattttaaaagtttgtatattactagtttattagctaattagatatgatagaacttagaaatttttaaaatgttgaatgtgcagaaaatgcaaatataattttatttttcttgaaagaaaaggtaattgtgttgattaaactttaagttgtaatatatataaattttattattt

SEQ ID NO: 361913 - DNA, 971 bp, Cannabis indica
gcgaggccttctacccctcgtggatatcaaatcctgttcttgtcctggagccaaacgacacttggagaacttgtattgatttttcagacttaaaaaaggcatgtccaaaagattattttccactgccaaggatcgaccagttggcggatgcaactgcagggtacgagctgatgacgttcgtggacgcatattttggatataaccagattaaaatgcatgtccctaatcaagaacatacaatttcgtaaccaacatgggactttattgttataaagtcatgccttttggtttgaagaatgctagggcaatatatcaacgactagtgaatggaatgttcaaaaacaaattagaagaaacatggaagtctatgtcaatgttatgttggtaaagccagtaaagtgtgaagaccatacaaaagaccttacataatgctttgaaatacttagaaagtaaaatatgaatctcaatccaaagaagtgttcttttggagtctcctcaaggaagtttctaggtttcataggtaatgcaaggggcattgaagcaaatcctgaaaaaattaaggccttaatagagatgccatcactcacgaagccaaaagaattctaagccttgataggaagaatggcagcactaagcagatttattttaaaatcaactgataaatgtctaccattctttaatgttttacgaggcaacaaaaaatttggatggacaaaagaatgcgaggaagcttttaaaggcataaagaaacatttgtcaacacctcctttttcggccaaaccaataactggagagactttatacctttacttagctgtctcgaaaagtgaaatcagtgcgaccttggtgcgagaagatggaaagcaccaacaattcatttactatgttagtaagaggttactgggggaaaaatcgaggtatccccctcttgaaaaactttccttgtgactgattcatgcatctcgaaaact

SEQ ID NO: 361914 - DNA, 686 bp, Cannabis indica
aaaataaacagcaaagacctgaaatcgttttgaaacctaaaaaataacagcaaacaactaaacctaaagaaaatcgaaaaacacatcaaacataacaacacaataaattattaatagtgagtaatacaataggaaaactacaataaaactatatacaaacaacaaacaaactacaaaacagatacaactatacaaaaataaagagtcttcattgaaaatcgttttgaaacctaaaaaataacagcaaacaactaaacctaatggaaatcgaaaacacatcaaacataccaacattaaactataaaaaaactaataagaaactacatacgactgattgtacacactaaaaacgaaaacaaaacacagaacctaaagcacaaaaaaacactgaaaataaagaaaacaaaatcaaatttaaaaaccaaacccagaaaataacaaaataaattgttcaaaaccaacaataaagaactaaaaaattgtaaaaggaattataaataaaaaaaaccagagaagctgttgtaaatttgtaaacaagcaccacaaaaagtaacatctaattattggtgcatttcagtttgcacaaattttaatttaatatgatttaaaaaattgctaactaattattgtgtatgtgaattggtatagtattgagcaccgtaaggtgtcacataacaataatagta

SEQ ID NO: 361915 - DNA, 318 bp, Cannabis indica
tgccccttgaactttcatccatgttagactttttactaaaattagaaaaaagtccttaaatccaacaatctcaatagttcagggggcattttcaatgaccttaaaagttcaggggacatgatttggtacatgtcaaagttcagggggcaaaaatcctaattagctttttattattattattattattattattattattaaattgcgatctgcgtatatcgaaagtcgctatctatttgttttactagccatagagtcaatctctcaactcttttcttcttcctcttcttcttttttttcaactgtatttagtctctt

SEQ ID NO: 361916 - DNA, 770 bp, Cannabis indica
aaaagtaaaatattttcaaaacatgttctataaaactgttttacttttaatttataattagaaatcaatttttttaaaaaaaaaaaaatcactttcaatattttttaaacagttttttttttcttcatctatcttttggattacgaccagacccggacccaaatcccctcccgacggccttggcgctgaacctgacttctgacttgaacccaaatccgacccgaacctagatccgacttaaataaaattaaaaaataaaaataaaaatgaattttatagaatacacttttgttttctgtttttaaaattgaaaaacaaaagtggttacagaaagcatttttatttttcaaaaataaattttttaaaagtaaaaattatacttttattttgtgattaaaaaataaaaattaaacataacgcattatttaatttaactaaattttaaaatcaacaaaattaaatgtcattcactttaagagttactaggaatgtcaatggggcgggtcggatctgatccgactctgatccgacctgatccagatcatatacggatctgccccgccccgccccgctggatcagatactcggatcggatctgatccgacccgccttatacggatcggatctgatccgacccaacttttttttttaaataaaaaaatatattttatatctaaatttatattttttttccctaaaatttatttgtttaaaggaactaataataacgcattattttttttctttattattatttttattttatttgt

SEQ ID NO: 361917 - DNA, 695 bp, Cannabis indica
catatgtggcaataccactccaatagacaactcccattgaagatgttctaaaggaaggtactagaattcctttagaaataactaatgatattttataataattattaaatttaattgtgtggggtctaatatttaactgcacttatttatcgagtttttttgaaaactgattataataatgattaggctaaaagaaataagattaagaagaaaataggattagtttttacgtggttaggacgttaacaagcattagtacacaagttactattattaagctcttagtcatggattttataatgtattttttgattatgaaccaaaagaactcgaacccctttgcgtagaggcaaaagtgcaatatttataagaacatatgcttagtgggatgaatgggtctgggtcaattagagtttttgtgctaaagctcactaataaattcaaactttagctattgggacgggtaggtgagacccaatttgaatgagctattttatgtacacatttgactattgatagtgacgggcaaagcatgagctgtcgtagagagaaaggaatgtcgaaagagtgggtgttcttttagaaattattttaccaggatcttagatctactcacaagtatgttgattaacatcctaaatatgaaacttctaaaaacgattataaaaataacacatataagtatgagaaacctt

SEQ ID NO: 361918 - DNA, 363 bp, Cannabis indica
aaataactttgttgtttgtttcgaaaaacactggaaagttattcaactgaagaaagttcttactgtgttatctctattccatttttggatagaattagagatatgtcttccatttattcagatacatttaataaacagtaaggaattcagtatccctagatgagcaatgcatatagtaaaaatgatgttgcataatgttttttaatgaacacaaagaaagtaattgtggagaaagtagtagcttaccacagacttacagttccactaatttaggtttagtcaaatatactacacttgatctggatatcaagataattgattgattgaaatgcactacttattttatgttagtgcaagtgggag

SEQ ID NO: 361919 - DNA, 510 bp, Cannabis indica
tttagaaagttcatattagggtgttaataaacatactgtgagtagatctaagatcctggtaaaataattttcaacagagactgcggaagcgtgcctccgaaatcttggacggaggactcacccatctggcgcccaaggcaccctgcctcctatgaggaactgcctcagcaagctcctcggtgacgtagtcgacgcttgcaacaagggcgtccccgtcagcatcaactggttgcccagcctcattgtactcccatagttagggggttcaatctcctcttctccctcagcagcgggagggctgcccggacgtgcctcgtccagctcctcaacctccaggacttcagcgtccccctcacggtcctcctccattgggaccgccaaatcctattcggcgtcaagcagggtggcaagccgagccacttggggatcagaagcattagccagatgcgtagttttttttcgtacgagccatcattctatggctgggtacggaatcagaagaaggattag

SEQ ID NO: 361920 - DNA, 544 bp, Cannabis indica
tgtgttcttcctacagaagcaaatgaactcatcagagaaattcatgaaggtttctgtggggatcatgcaggttggcaaagtttgtctaaaaagatcattagacaaggacactattggccaacgatcaataaggacacacatgagtttgtcgagaaatgttataagtgtcagaggtgttcacatatacctcacgtcccgccaacaaaactaagaatgatgacctcgccttacccatttgctatatgggcgatcgacctaattggggcattacccactgggcgaggaggagctaagtatgcggtagtagaagtcgacttcttcactaaatggacggaggctgagcccctcatctccatagcatacaagaaagtccttgactttgtcattaagaacattatctgtaggtttggaattcccatgaagatagtatccgataatgatacccaatttgattgtgacttgttcactgaattctgcgagaggaataaaattatcaaaaacttctgatgagtatccaggcctcaggcaaatggacaagtagaag

SEQ ID NO: 361921 - DNA, 770 bp, Cannabis indica
tcaaccaatctcttgaccttgagaagatagtcgcttagtgatccctgcgtcttagcatttcgaaggagagttctgtattggcctatattagcacaattaagagctgagtagtactcacgcaatgtactccaaatttgagctgcaatatcgcagccaaccattccagttaggattttctcaggcatagacgagagaagtcaggagacaagaacactatcctgttgatctcggtcctcatattcagggcttaatcgattggcaagacgatctgcttctgtgttgaacatcattggagcttgtgtaggatcaagaaattgttgcagtcaagctcctttgattgctgcaaagacttggtgcgtccatgggaggtaattgtactcgtctaatctaactaagagagagtgagagaaaactgtaggtgaagtttttggaagagacggatttgtatttgtagcggcttgagacgaacctccagggccttgaacaaacgctattgctgaacgaaatgctctgataccatgtagaagctttgaaagaaagaattcttgtattattaatgttcaaaaattacaaagttaaatcagctaattatatacacaaatacaaggcacaaaagtagaaaacagaaagttagttagaatcataactaactaactaacaaataacagaagtgacagcaaagctaagtgacagttggactctttaggctaggttcactaacatagttgcatttggttggaggtaatagaatgaaaataaatcaattttca

SEQ ID NO: 361922 - DNA, 656 bp, Cannabis indica
gaagattccctccaccaccttgagtttgagtaggcgacatggcgcgaaaagcctcagccatctcagcggcttctgctccgaggatagagaagtcaaagtctgggattttggaaagagtagtgtaaatataatcagaaactgcctgatcatactatttcttcccattctccttctcgacctctaagtcgcgagccatctcctcgatcttcacctgagagttcttggcctcgagctcaacctgctccttagacttgcaaaggtcttcaagctctttgtcctttctacccgcctcttgtttcagtctcttcatgttctcctggagcagggcattatgcctcttcagcgagtaagcttccttagaaccagcggcaacagctttcatgaacagagtcatcgactgcgaagccaactccacagagcgcggaacaagctcctcagaaggaatcttcaacgccttggatatgaactcctcacccacgaacttctcctgcatagccagaaaatcgcgggctcggatagttggcttgatcatgactttctccctttcttctgcgtggtcttaggcagcttcttggaagagtctgtggcaagagtagttacaacatcgctcttcctcttctgggcaataacgggcgatgtcgtcgctgttccactct

SEQ ID NO: 361923 - DNA, 720 bp, Cannabis indica
taaaaagtatcctttcacctactaaagggaaaaaaatgccacacatgcaaggcttcattcgtatctctgaatcaaagtcaaacatcttgattaatatattgacagttgtattggatggaggcacaattaattggaccgatgatactgaaagacattagagttgtggtaatgtcgatgttagaaatgaagaacaacacactgttacaaatgaagaacaaccctctggtcaagctatagaagttggtaacacaattcatgttccacctatgagtgaagccacaagagatgatcttccagtggtcaccccaggttattcccatccatatgttaacctcatccacaatgtatggaccaaaagtgagacaaagtgaaaaagtggattggtgcactgtcaaggcctacatagatcaatattttcattaatgagatcagaaatttcattgatgagatcaaaaatttcattgtttccttcaaagataattatgtcgctgcaacaatagtatattcatgttgaagggcaacaatctccccattgtgaaaggcaacacactcatgttgaagagcaatatactccttattatgaagagcaatttctacaggacgatgttaaaggtgaatctcatcaagttgtgcgagaaaatccaaatagggtaccaaagcgttcacactacttggagccaccataagttggaattattttaccaggatcttagatctagt

SEQ ID NO: 361924 - DNA, 708 bp, Cannabis indica
gaaaaattattaagattatgataaatatagcataaaaaataaatagtcattaaatatagtattatctaactatacaaactaaaatatagatttttttttctaaaaaaaaactatataaaacattaaaaagaaatttaaattaaaattcataaaaataaaaacttaattaaattactataaaaaaaatattaaaaattctctttatatttattttttaaaaaaataaaataattaaaactatagtgatcaccgaagttgtcactcgtgccggaaaagtcaccggagtttactgacagcaccgaaaaagtcgtcggagtagccgccggtgccggaaaagtcatcgaagttggtgccggcgccgtaaaactcgtcaaaattagcattgtcgctggaaaaattaccaggaaattggtttcttgatgaagaaaccggtttcttagtgatttttcaggtaattttaccggtgacaatgccaagtccgacgactattctggagtatgatgtcggtgccggaagagtcgccgaagtagttgtcggtgtcggaaaaattgccggagttattgccggcgtcataaaagtcgtcaaaattggtattgtcgccagcgaaatcactagaaaaattaccaagaaagcggttttttcatcaagaaaccggtttcttcaccaaaaaagtggtttcttcatcaaggaactaattttgttacacaa

SEQ ID NO: 361925 - DNA, 545 bp, Cannabis indica
tacaactgagagttaaacttaactatttatgtcacaaattactttttattatattattatatatctaagagaattattaaaaagtatatgtctattattttttttggtatcagctatcgttgtaattaagtattaggtgtgatataacttaaaaaaaaaataactatcaaaagcaaacatgatcatttcatattgggtattgtaaatgtatcacattcacatacttaaatttcatgtatatttttaaaagtgtatgtaaaaacaatagttttattattagtagggccttctttaggggtatgatggttgggccattgtcaaaggcccatcagtccaagaagccttccagattctttttcattcaagattttttttttccttttctaacattaactcataaggtcccaacatttttgggtttgctaaaaaaagggtttaaaaaattatttaaatttcattttatttctcaaattattttttttcttataaaatgtttgtcgttgaaattccgtattttaatattcccagtttgattatttaattaa

SEQ ID NO: 361926 - DNA, 542 bp, Cannabis indica
cattgactattttttgaaaaacctttttggtttcctcttttctctccacacgtgattcaaaggtaaggaagttactttccttttcagttttttttctgatattgggtaagtaaaatcatgtgtatatattctcaactacccattcacccacgatcaccactctctcttgtctttctattttttgttctctctcaaaggtctaatttttattttcaaagtgtgagagtgtttgtgttctagggtttcaaagagatggccaaaactaagaatgcccaaccattcaagaagtcatctcgtggttctgcctctgcatccccgatctcccctcctgcgccgcctgcaccagcaaccggagcttctggttcgtcgtctgctccgacgaaatctgcagaaaattgaagacccaagctcgaaaatcagtgatcaatctcgcctctccacctgtcgttgcttctcctattgcttcttcaacacctgggtttggtgatcgtgatgaatctcattcatccgataacacattgtcgaagtcctcttcttcgaat

SEQ ID NO: 361927 - DNA, 548 bp, Cannabis indica
tgcgtgagatactacttgattgcgtatacttgcgtagtaatcataattttcgtaacaagtttttggcgccgttaccggggaattgtttaaagattaatattacacaaaattatactaacttctactttggtttatttctcttgctgaatttctaacatgtcacttgcaaagctgcttttatctatttctggtatcttgagtgcatgcgccgccaagggcaagcagttgtattacccgtcgatcctgaaattgagaaaacttgaaggaggagcaaaaggcaagagagagtttcagcacctgctaaaacactagaaatcatggctgacaacactaatgcggcaaataatagaggaaacaacggtaataataggggtgccgttgaagatcaagcgaatggccgtagcttgagggattatatcctcccaaatcttacgggagtgcagtcatgtatcaggccaccggcagtggatgctaataactttgagatcaaacctgtcatacttcaaatggtgcagtcctcagttcagtttggtggcctcccttctgaa

SEQ ID NO: 361928 - DNA, 578 bp, Cannabis indica
tacaacaaacctatagagagtagatcgcaaatttaaaactttaggaagaggggaaatttatattcaaggtgacatctctagattccaatactcatggatacaacaacaactgtgtggagcatcactcaaggagaagaggttaggaaagcctcacttacggacgagagacaagtgagacacaactaagaccaaaatgatgtaccttaaagaatttcatggcacaacaaggatgatacatgtatttgagaagtgttgcgattagaaaatgctcatgcaacataaatggattcaagatacgatgtaagcaaaggatactactatcgacttatgatttactttatggataatagtataagtatgtcgaagtatcgtcataagaaatgattacgagaaaaaaaaaataatcataaagagtgttgattttggtcaaaagagctggtttgacaatagaatgaaaatagacctgtcaaaagtaaaagtcatcaagagttgagaatttttgacagtattgaaagttttcttgaccaaaagggtacagttaacagaaatttttggaaggactctctcaagccgacagt

SEQ ID NO: 361929 - DNA, 779 bp, Cannabis indica
ttatttttacctctttttttaaatactgtaccaattttacccctatcacttcaagatactctccatgtaattctcttatgtaagggtattttgggtacaatacatataaaaagaggtatgtttcaaataaacataaaattagaggtaaatttgattaattgatgaataaaagaggcatttttcaacttaccccttcatttttctggttcatgatggtactggccaaaatttgaaaataggcggatttgatgttgattgacatgtaataaatgatccaaaattatatatacatttaacatttttttctagatgtattttttttttgaatttattatttgttatttagtttattttcattttttgttggagatataaaacaacaataatttgtttcatttgttgttagttatgtgaaaaaataatattttttaataaatattaaataatttaatattaaaaagtaactaattcaaaattaccgaatatcaaacagatcaccgaaccagaggaagcatctcgggtctcctacatcaatagaaaaagccatacaagtacaactgctcaagcatttatccctacattcctctaaattcatactctcattcactcaagaatattgagcaatgccaggaaattttgagtgagaaaagtcaaggaacacatcattctctttgtcatcacagctcagaggactttttctcacacacccttctgaccagttttcattatgctttggcttaaacccttttaaacattggcatattgtaccaacacattct

SEQ ID NO: 361930 - DNA, 520 bp, Cannabis indica
acaaggacattgggcatacgatagaggaatgtcgttagctgaaagacgagatagaaagtcttatcgcgtgaggccacttccggaaatatgtgaaaagataaggcaatggacaaaaatagccatatccgcccaataacccaggcaaccaaggattacaacctccttctcttaaaggagaggatattttggttatctcgggagggccacatactatcggggaaagtaacaatgcccaaaaagagatatgtaaaggaagttaagaatgagcagtctacttttgctccagaatcttctaagaaagcaatgactgaggaacctccgattgtgttctcggaggaggatgtgaagcacgtgaggtgtcgtcacgtcgaccctctggtaaataccatctagctcaccaacaaaaggatgaaaagggtgatgatggacaatggaagttcagtgaatatcctttataaggatacagtgaagaaaatgggacttgaaaaagtaaagttaaaaccttgcatggtaaatctgt

SEQ ID NO: 361931 - DNA, 338 bp, Cannabis indica
atataaatatatattttaaaagttatatattgagaatcatgggttccatctcaaaaccattagtgatgagtggagtagtccatgttcttatatatagctcaatactttaacatttaatctatgtgggacaatgttctcaaatattcccctcaagatggtgattatttttgctcactaatcttgaatcaccttatcacaagttatgccatttgctcgcttatttttattcggatctcaaacgtctttgcactatctggatctcgtgcggctggctaaccatctggatcggtgtggattgaaaagcccgctaggaatgtggctctaataccatgttgcga

SEQ ID NO: 361932 - DNA, 588 bp, Cannabis indica
aaaatctcaaccgacttcttgatgaaaaggagaaatgagatctataaactcacagctgatctaattcgaaccaagcaagctttacagttcattcccccaggcactgctgctatcaatcaaaccctacagcttcagaagccctatggtgatcgaacttccttaggatataagatgctacataaacaagggaatgatctctccgttgagcattctttaccctccaatgtcaattcaccaaagaaggaagatgggttacctgacacctcaatcaccattaacgaatctgactcatctgagaggagacaggttccaactggacccatcaaactcaagtttgaaggaaggaggactgatgctgacaaccttctacagagtgacaatttcattcctacatgtcatttctgtaataggagaggtcacattcgtcctaagtgttacaaattgcagaactacttgaaagccatgatcaatcgaccaaatagtttccctccaccaaataagtcacatggacgcaaacctcgtcgagaatggaaaataaagtccaaaccaaatcctgatgttggtctggttgcgaagctatccatgtct

SEQ ID NO: 361933 - DNA, 1432 bp, Cannabis indica
gtaaagttcatttttatttttattttttgattttttttaagttgggtctaggtccagggtcggattcaggttcgggtcagaaggcgggtttagcaccatggccgtggggaggagatttgggtccgggtctggtcgaagtctaaaatattgattaagaaaaaaatctgataaaaaaaatattgaaagtaattttttttgcttttaaaattttgatttctaattaaaaaatgtaaaagtgaaaacagttttatagaacatgtttttgaaaaatatttttactttttcaattttaaaaatagaaaactgattaaaaaagtgttacgaaacgccacctatattttaccatttttttcaacaatttatctattatttcacaaataccatattttccaattttaatcctataaatgccacaacaatttatttaataattttaattaattatcaagtaaaattttcatttatattatttatttattaattagactccacacaaagtttcttaattaacaaataaacctaaaatctcttttcttcacaattaagccacttcttagtaaaatttcttaaataagacatagtctaattttagaattataattgattaattaaaatcaattaactgtgtcttacaagcagtattgtctcaactagtgtggggactataggcatatatagtcaagcttccaataagtagctctaaaatttaccaagtaaattctcttacttattaattcttccttacaccactatagatttggaattgcactcttaattatatagagagatctatatgttcaatgatatagatatgctatgaaattatcaattgttataatcctaataatcaacgatcctctacagatgatctacataaagcaggaacaactttaccgttacacccttcactgtattttatccttaaaatacttagctacctataaatgatatttcagtaaactaatataattactaaaatgaatactcaaccatttatctcgattaagctaagctcgaaggaaatcttcgtttcacttctatgttcatatagaagctatagattccgtatctatgattagcgctcccactcaattgaactaccatttccttaatctatatgtcatgaggagatccattggtcgaatttaacgaacagattgaagaacataaataatacaactgaactagaacctaaccatctcaggattgagatcatttgatctaagatcaagtaggtgatattgaatcaaatagatattacagtaagtttattatatcttatccaagttcaatattggtcttttcgatgcatactccatacattcaatccaagcttactttaaccaatgccctggaaaggacataatacttatccaaggtgcaagtaaactacattgtagattatcctatcatttaaaccatgtgtagtgat

SEQ ID NO: 361934 - DNA, 529 bp, Cannabis indica
tattttttttacagtgtgggcggtttgagcagtttgagcagtttgatgaacactcatacctacgagtaatgctctttaacttgagtataactcaacttaaagagcaagggacaaactgtagtggccaaaaattactctaagcccaacataaaggcccaacgaccgaagtatttacaaaacctacgcataagtcagaaacaagaacccgtaaacctaatggcacacatgggccacgcccaatccatgccttttgggtcatacccatatttgaatgtccaacccacaataaagtttgaccccaaagtgtaatgttaaggtcgacacgtggaggaagaaggatgttaagtttcccaactaatccacaaaaatagcgatcttccatagcatagcggaggaagaagatcaaccgtccaagtgatacgttgatgtgaagacgttcatctggcaactaacctaaaagatgacgctcatccctagaaaagtggaggaggacagtttctctaggaaaggactgttggaaattatttta

SEQ ID NO: 361935 - DNA, 578 bp, Cannabis indica
gacacatctaataacgaggctgagtatgaagccttgatcgccggcttaaagatagtagaggccttgaaagtcaaaaatataatctgtcatagtgattcgcaactgatcgtaaaccaagtcctcggggaataccaggccaaaggcttgaaaatggcgaagtatttagagaaacttcagaagaacttggaaagattcaattactttaaaatcaaaaaaattccgaaagaacagaactccaacgccgatgccttagcaaaactggcctcgcagaatgatcaggacaaactaaatctggttctggtagaaatgctgagcgagccaagtatatgtgaaatagaagattttgagatgatagatagctctccaacatggatgacgcctattgttaactatttactcaacaggtaacttccaaataacaaaaatgaggcgcgaaaacttttgtatacagcgcctcgttacacaatgatcgaaggcaaactatataaaagagggtattcaatgcccctacttcagtgtgttcttcccgcataagcaatcgatattattagagaaattcatgaaggcttctgcgggga

SEQ ID NO: 361936 - DNA, 653 bp, Cannabis indica
ctatcgtcgcatatttggaaaagggtctcttgcccgatgacaaagtagaagcaagaaaagtgtgacagcgagccgcccgttatgtaatatatgatcaaaggttgtatcgcagaagttttagtcaacccctactcaaatgcatcagcggggaagattgtgattatatagttcgtgaggtacacgggggtatttgtggcaatcataccggaggtaactcccttgcattaaaaatcatgcgacaagggtattactggccaaccttgcgacatgatgctcttccatttacgaagaaatgtgacaggtgccagcgaatagccacatatacacaccaacctccgagtaacctccattctatcacaagtccatggccctttgcagtatgggggattgacttaataggcgagctacctaaagggaaaggtggagtcaaatatgcggtagtcgcagtagattacttcaccaaatgggccgaagccaaagcactcgcaacatcacagcaactaaattgcgcgagtttgtctataactctataatttgtcgatttggtattccatacaaactcatttcagacaatggaaaacagctcgattgtaaagagatgcgacaactatgtgacgatctaggaatcaaaaaggcgttctccgcagttgctt

SEQ ID NO: 361937 - DNA, 1049 bp, Cannabis indica
ctctaaaattttactattccataacttattccagagcttcggggcaacctcacagtgaggagctctttccaaagcttgagccagatacgctgatttagtcgagaaacacctcttactttctagcgtccaaacctatctatctgtgccaattccagagggatggccccctttaagaatgtctgagaccgtttctcagtcaaagttgtctcgcagcttttgaaaatcccactgcccattatttaacagaagttcagccacacagttcaaattgggagaggtaccctcaattggtttcggatagaagcctttccgaagcggaatctagggatctccccagatcttagtattctcaccattagcaaccaacttacaagctccttttctcaaaatggaattagccttcacaacacttttccaaaaccaagaatctgaatctttgtacctgcaactaaggacgtcttttcctttgaggtatttagcaattagaactctacaacacagagattgactttcattgataatattccatccccatttagccagaaaagcctgattcatctctttggttccacccagggatttagggagacaaagtttatccctaaatccctgggtgggcttgggtgttcaattggaagttgtagaagctattcgacttaaggaaactttgagctaaattaagaggagtggccagtaatttatttattttttttttttataaatttagttgtcaaaatatttaatttaatttatatattaaaggtaattaaatattaatttattgtgtgaatttgtggttatggttgatttatatttatttagtatgttttgcatgaattatctttttaaaaaatatttaatatggtctatatttggtcatatttgattaaaaccaatccttaattgatatcttggattttggtttgtatattaggtatttttatggaaggtgttgtccctgattttgtccaaaatacgtggaccaatcggactgtgatacgtggattgaagaagcaagactttgaaataattcgactaagtcttcttaa

SEQ ID NO: 361938 - DNA, 544 bp, Cannabis indica
accaaataggagtaggcgtgcttctacctggaatctgttacgtactctggctaatcagtctaatctaccatggtgtgtgatgggtgatcttaacaatgttttatctcatgatgacaaaaggtatcctgacttcttgatccaaggctttcaacagtctttggttgacagtggacttcaagacatggagttatgtggttatccgtttacttgggagcgtggtcggggtactaatcattggatagaagtgcgtttggataagggtcttgctaatcttgcttggttgaacatgttcacttctgctaagctccataatcttgaaatttcaactttagaccatgctccgattcttatggtcatggttcctgctgcaggtcccagttctgttaagcggtttcggtttgaaaatgcgtggttgagggaacctctttgttattagattgtaaaggatagctggtgttaggttataattaacctatatttcgggtctttaaagttagcattatctcgtctattggtgtctttttggagcagttttacgcttgat

SEQ ID NO: 361939 - DNA, 488 bp, Cannabis indica
caaaaagaaagccttagaaggttttccttgacaagagtcgggtgcaagaatcccacagatggtcacattacgaataagcaaagaaaaggaaagaggggtaaaaatcgagaagacaaagtctcctttaaccccttgaatgacattacgtgaagaaaagatgggtcctagaaaaaaaatacgtagtaactcgaacaccagaaaagaggaatctaacgtgttacacagaaaatcgaaacagaaattcccagaaaactcaaacatcaaacctagaactagctgataaacagtaaagcatgcgatgtacacaaacaataaactaaagtacagaatgcgaagaacttacatgaagcttgagaactgggcgttggtgttaatcgacggtaaagagttgattggcagcgacgaaggaaaagaagtaaaaaatctatggtgtttgagggtttctgttcgagggtttcttttctctctggaaaacttaagaaaatttg

SEQ ID NO: 361940 - DNA, 599 bp, Cannabis indica
catatatcaagtacattttttctttatttttttttcccactcatactactctcattatttgctccatcgtcttcatctctatgccaaattaattttgttcttttttttcttttctaattacattattttatgattacaaaggtaaaaatagtgttaattactttgcaagtgatctcaatgttttttcttaatattaattatcttttcagaataaatttttcactactacaaatatcaaaattcgcgacggtcctaaaaataatttttttttgagaccgtcgctaaaaacataaaagtaactatttgaaactgttgggaaaaatttagtattcccgacagtttaaaattgtagtaaacaaaataggtgacgtttttcaatagaatacaaatttttaggagagccttatactcgacaattttagtataggagacggttttaaaccgtccttatactatacacgacaattttaagccgtcgggtataagggcccattaaaaaatcgtcttctacttctcgccacatttcccacatgcccacctaccttttttctatttcccacatgcccacctattttttctctatttcccataccctaaaa

SEQ ID NO: 361941 - DNA, 503 bp, Cannabis indica
ctatttaagccctcttcaaatgtgtattctcatacctgcacagtctaagaatcatcacacttgaccttccccaagtgatgtgggatttttcagcatacccagtgtttctctttacggatcatgggactctaactatcacatatgtcatcaacataaataaacacaatgataacacccttggaagttttcagcaagagcaatgaagtgtcagctcaagattttcaaaattcgaactgagtaatgtttcctttagttgatcatgttgggatttatgccctaaaagcaagtaattaatgaataatatattagagaatatatgaaatacaattacaagataaattatatattaataataagagtataattattaaatatctaaaaattccttattcatatggagaaagtataatcttgtaagaatatacaagagaattaagattatacgatatgagtaaaactacttggtagtgtattaaaattctgagaatctttaatatggaact

SEQ ID NO: 361942 - DNA, 685 bp, Cannabis indica
aagtactttttaattaaaaataactttttaaatgatcctaggcgtataatcgtatttaaccctttttaaaaattacatgcttttgagttttggcggttcagaatttcgaggcacatcattgagcatttaatgccctgattggccctcaggtggggaatttgattgggaaaattaaacggctgccttgtgactgtagtgacatgcttattgggaagaatgcacaggatggaaagttcacgatgaaaagagcctatgcggaatccatgaagtttgcagtaggccaaagaagcaagaaatgggcgatgatatgggatagtagattacatcttagggcctcgatgactctctggagaaatttgagtggggctatcccggttagggagaaattatgcttcctcactgttaaaggatgtctcctttgtggtagtgaagtggaatccatcaaacacttattctgggaatgcccctttgctagagctttatggttttcgggcccattcccagttggatgcaggaatgtggggaaccaagatttaagcgatattgtgtgtgagatcggagagcagttcaatgaggaagagagatggaaattcctactttgtcggctgcttgtttgagacaatttggtactctagaaatactattatttcaagagtaaccaagttgatatactgacaggaaagac

SEQ ID NO: 361943 - DNA, 687 bp, Cannabis indica
gccctgattagcaaggcctctacggatttgtacaaccatcttattttcctgccaaaactttaagacaaagaacttgtgtttttctctcaatgaaagcaccaaatgttgacctcacttttagccaacgatagtgagtcaaataataagcaattgaataatataattaaaagagaacaaaaatgataaggtaaagtgaacaccagattttaaagaggttcagccccgtgattgtggtaatagcctactccccttgtattgtattgacttaagagaaggaataaaatgttcttcctctttgaaagctcttacaactaatctttgagtaattctctttgatcgatatatttctctctagagtgtatctctctgaagcaattcttttgatccctttcatagtgaggcttggtcactatttataggggcttaatgcatgagggatggttttctttttgcttacaatgcataaaataggaaattacaatgattacataattacaatatatgaaataggaaactaaagcaggttgccatatttctctaactcaatcccatgattatagggattgtctttgtatctgggcataacgagatcattctaaagttattatctcttgtaagttgctcgtcataacaagcttctacttggtcggatgtcttctctacaactctgctcgagtaatcgacaat

SEQ ID NO: 361944 - DNA, 1035 bp, Cannabis indica
gccccgctattactaaaatactataccatacaaaaatatggctctatcggccaaacgtcgcattctactgttaccaggcattaaatatgaaaaacatgaaatttcatatataacataaataacacacctaaaattcaaatatatctccataaattcgtaaatcatatttgaaagtctaatttgtgaattaaccctaattatctactaattctcatagtaaaattaagcggtctctacaaaattgctcaaactttgtgctttgacatgaataagacctgtcaagaacatgttagaggcatcataatcagaatcagaacactttccatttggagcactcggctgcccagtgcctgggcaacctagtgatgcactgaggacccaagttgacatattttaaacctagggcacttccaactacaattttgaagaagtatgctgagtattttcttcttttctgtccaaaactaagaatcaagtgcttttgggaaagaaacagatcaacttgaggctaaaattgggaccccacaccctggttgacatgttatcaacctgggccatttctagtagcagtttagaagaattctttcggttatattctctggtttcttcaaaaattagatttggttactttttagaaacaaacggagccatctaggagccaaaactgggacctagcgcccatgttgacctggtgttgtgcctagcgcatagttgacactttgtcaacctaggtcatttccaaatagttttttagaaagaagtctttttgggcatattctctgtttttcaccaatagttgagatgcaagtgtttcaagggataaaaaaaaatcatttggtggccaaaatcttgaaccatcacccatgttgacattggcattgagcccatcgcccaggttgacactagcgcttagcctagcgtccaagttgacattttgtcaacctgggctatttccaatcacatttcccaaaaagtgttttgggcatcttttctattttttagaataatgaagatacaagttatcacaagagaaaa

SEQ ID NO: 361945 - DNA, 805 bp, Cannabis indica
gagggtttgtgaagagttatggatttcgccctaagatttatgggcttgggttgggctcatatgtatgggcttaattaaataaatataaaaattgaaattttaaaacatgcggtgcggtgcagtttgaatcgcggtttaataattagaaatcgcaaatcgcaccgcattgcgcggtttgggaaaaattcaaatcgcaaccgcaccgcgaagaatttcaaactacattttttctgcaatgcggcggtttgagcggttttagcggtttgatgtacatccctagtgattagggcatccatctaacacgagactttccgttcaggtcggccagcacacttgaatttggaaagaaggtaagaactgtatataatgtgtgatattgatatttgagtgtatgtatatgttatgtgtatatgaatgcttaaaatattagttgcgctaccaacacttgtacaattatggtacagagtgcattggtatagtgaatattatttaagagtacattacgataataccaacacctatatgggaaagtacagggtgttatggtatatcactcagtggtgctcagggtatgaaataagccctaccaacactcgtacactgaggtacgtaatgtatgtggtatagtggctataccctagtatggaatattcttactaatctgtcaagccttgtaaataggtgtatgggtgcctaaatacaagtgaaaattacgtgatatgttatatgcttttcttactgagtttttcgactcacagttctgcttccatgtataggtaaaggaaaaggcgaaagctgaataaga

SEQ ID NO: 361946 - DNA, 636 bp, Cannabis indica
aactaagcggtctttacaattctgctctttttcacttcaatattcgggaaagaaggaaccagaacaagatcctatcagtggttaatgcagaaggagttcgagtggaagatgttaattgtataacagcagcctttcttgattattatcaaagcctattgggttctaacatggaggggagcactcgggtagctaccaaaataatggagaatggtgccaccatcactgatacacatgcaaatctattgttagctaaatacacaaaggaagatgtgaaacgggcagtctttagcattctaggaggcaagttcccaggtccagatggttacagcagctacttttttcaagacaactgggagcttgtgggagatgatgttgctgatgcaatcttatacttccttcattctggccaattattaaaagaaattaattctacagtcctcactcttatccccaagagtaagtgccctaacttggtaagtgactatcgtccaattgcttgttgcaattttctttacaaggttgctactaagctcatttgtagtaggctcaaaagtattctgtcggatttagttgcttcaaaccaaggaggattcatccaaggaaggtttattgcccataatattatgatttgtcaag

SEQ ID NO: 361947 - DNA, 547 bp, Cannabis indica
tatatatattaaaataattataaaggagggctacaaatggaagaagaaaaagttgaaattatatctttagctttgcaacggtttaaaaaagtggttgattggtggtgttgtgttgtgtctctaaagttcaatcccaaataatgattcatgttccaatccccactcgacactatagtctgccacctttatctttctttcactattaacttaaaaagatcacaaacgttataattggctctccattattactttattttctttcaaatgaaaaacttaacacgcaatacagaccggtcaaaaactaattaaaactactcaaaataaataaatattataaatatttaaaaaatttagtaggagtgctataccgtcaattttttgttataacctcttagtcaatttctatgtctgaaaatacatgtcggaatatttttttatttggtaaatactattttgaaccctgtgttttgcaaagttattacaaattgaactctctgttttgttaaatgacaaatggacacatcatttttcaaaattataaaaatag

SEQ ID NO: 361948 - DNA, 582 bp, Cannabis indica
gaatgatgcatgattatcatattagttaaatgtgatttgtaaatgacataggaatatgttatttaccttatataacttagagcaattgtgcttaaattaagattcttaaaattaattgagcataggaatatgttaattaatttatagaaacacaacataaatactttagaaaaaagattatgacatgttaaattcttagttgacattatcaatttacaataatacttatttgtactattattaactttacaattttaggtcaatttaataattctaacttgtttcttctactaattaatgtttaattgttaattaatttttacatattctcatcattttattttatttttgttgaaatcaatttctctgtaattagctttataaattaatttttaatttttaatctaagactactccatttatcacattatcaattgtttgacaattgtgtacacttacacatctaattttcacatcagcaccgtctccaaaaaataatagtcaattttattcccatatttaccatccctatcaagagagaaaatgtaacaccctaactaccttaggcgtattacgtgattt

SEQ ID NO: 361949 - DNA, 718 bp, Cannabis indica
aaaattcttggaatcgaaatcagaaggaaaagacctggtttcagtcatgttaacacagcagggatacttgaagaaagttctaatgaagttcaacatgaatgaagccaaacctgtgatgacaccattggctaaacactttaaactcactaaagaacaggcccctcagactgaagaagaaagaagaagcatggatggcataccatatgctaactgtgtaggatgtttgatgtatgtcatggtgtgcacaaggcctgacctggcctatgccatgagcattgtgagtcgatttgttgctaatcctggacaactacactgggaggcagtcaaatgggtaatgaggtatgttaaagggtccctgaacatgggtttgatctacaaaacaactgaaaaaggtggatgtgaggttgaaggattcattgactcagactatgcaggctgcatagacactaaaagatcattgacaggctacatattcactgctctgggtggttgcattagctggaagtcgaatcttcaaaaggttgtagccctgtcatccacagaggctgagtacatggctgcaaccgaggcaataaaagaagcattatggttgaaaggtctctcaaaggaacttggatttagctctgaagacatgacaatccactgtgacaaccaaagtgcattgcacttgatgaaaaatcctatgttccatgataggtcaaaacacattgacataaaa

SEQ ID NO: 361950 - DNA, 933 bp, Cannabis indica
tattgtactacatagtacgttgtattgtaatacaattagtattgttgtgaattgattaatattaagatatggttattatggttatataatgaaaagatttattgattaagcaatgataatgtgatgataccatgaatgcgatatgccgggtgtcgtaccttattaggtacgggtggcagtgacatatgagtaccgagcgtaggtacaggctcacgtgattaggtgatacgatatgtcgagcatcataccttattaggtacgtgcaacattgacatacgactactgagcgtaggtacaggttcacttgattaggtgatgtaatatgcagggcatcgtaccttattaggtatgggcagcagtgacatatgagtaccgagcgtaggtacaagctcacctgattaggtgatgcgatatatcgggcgtcgtaccttattaggtacgatgacagtgacatatgagtactgggcgtaggtacatgctcgtttgattagatgatgcgatatattggtgccaggttgtggcacgggctcacctaattaggtgatgcaattatgtaccgggcgtaggtacgggcttgattgattaggcgatgcgatatattggtgccaggttgtggcacgggctcacctaattaggtgatacaattatgtgatatatgggtgtaggtttttcgcacggcctcacctaattaggtgatgtagttatgtgatatatgggagtcaggctatggcacaggcttgcctgattaggcaatgcaatgcaggattgtcagattaaagcatcgacttgcctgattagacagtgtgatgtgatgaagataggtactttacaaggtaacatatacataattcatatgattaaacgaatatgaattctattattggtcaaatggttttgtattaccaatatttgtatactgatgtttattcgtgg

SEQ ID NO: 361951 - DNA, 686 bp, Cannabis indica
cccaatggctagcagcctcagattattagcatatggtagtgaaccaactcctgatcctcagctgtatcgatcaattgctggtgcacttcaatacctcctcatcacaagacctgaaatttctttcagtgtcaataaagtctgtcaactcatgaaggatcctcaattaagccattagttagtcgtgaagaggattttacgatatctcagtggtacaatcaatcatggttttcatctcaaaaagtcttctttgcaagaagttgttgcgttttgtgatgcagattgggccactaatatcgatgatcgtcgttcaacctctggtttcaccattttctatggagataaccttgttgcttggcaatgtaaaaagcaacacaccatatcacgatcaagcacagaagcaaaatttagaagtcttgccagtacagttgctaaactcacttggattcactcattgttcactgaactgcgaatcaagactggacgacctcctgtgatatggtgtgacaatctcagcaccgttcttctcacagcaaattcggttcttcatgcaagaaccaagcacattgaacttgatctttattttgtgcgtgaaaagatacttcagagactggttcaagttaaacatgtgccagcttaagaccaacctgtagatggtcttacaaaggcaatctctacaaaccggttct

SEQ ID NO: 361952 - DNA, 640 bp, Cannabis indica
tggcattcagtcctcacagcgatattataaatttttcccttaaacaaactcttgaactctttccaagtcatcacacttatatctcaagtctgtcccactatatcccaccaaatgtgggcatgatcttgtaacataaaggcagcgcagtttactttctctgttcctgtcaaccccgccgttagcaaggatgcgggtgatagtactcatccattgttcagctttgattatatcagtacctcccagaaatgtcagaggttgtagcttcacgaaccgctcaaccactgaagctctatgcggcgatacaaacccttagttacccaccattggcacaggagctagtggtaacattttctcaacaggagctgtcagtgctggttgcctcaaccaatgtactacttcttctaaacaaagtatgacacctcgcattccttgaaacatctgttgccaatcagcaggcagattaacattgccaacccctgcattatccctcggattcaatggaggcacaggcggtgccagtggattagtttggtctacaccaggctctagtagctcgccctgcagtctagatgattatggagggtccattttactaacagcccagtaatcaacaaccctggcgagtcaagcaccaatacca

SEQ ID NO: 361953 - DNA, 527 bp, Cannabis indica
gctgtctccgagaatgcggttagtgcgggcttagtatgggaagaggaaaaaactcagcatcctgtgtactatgtcagcaagcgcatgataggggcagagacgcgatacccggtgatcgaaaaactagttttttgcctcctaatggcctcgagaaagttgagacctcacttccaagctcacccactcaaagtattaaccaaccacccgctccggcaagtcctacaaaagccagaggcgtctggaaggcttctcaaatgggcaatggagctaagccaatttgatttatagtacattcctcgcacctccataaaaggtcaggcgctagcagacttcatcacacagtgccatgaagcagaggctaccgctagcatactcacactgcaagtcccggcatggaaagtatttgtggatggtgcctccaacgagaatgggtccggagcaggggttgcgatgatatcctcgaacggacttcgactccaggcagccctgcggttcgaattcacggcttccaacaatgaggccgaata

SEQ ID NO: 361954 - DNA, 1014 bp, Cannabis indica
atagtaaataatacatagtcataatatacttattgtttaacttagttaaaggtaaatgtatgtatttaaaatttttaaatatttatttaattacactatctatataaatcatgcatgaactagttagtaatatatatagttggaaaaagtaaatgtgcattagaaagcatatatgtatgtatttatattttatacacaacaaaatataaatcaataagaatcattgtacacaataaaattattctagcatgtttggtaagttatcctatctcttgttaagtgatatgagttcaatatttgatacctttatttgataattttataccatttattttatttttcctattttatatttttttcgtttattattttttttaagtagtttttttatctcatctttatcattctcaatagcggtgctcattcaatccattccatactattttgattatagtacatttgattcgtactaagtgcgaatttcatatatattttgaatttaatcaagttcgcacaataactcaaattcaatccaattcaatctgcaaaagtgtggattagatcagttattttaaattggttaaattttaatatttaattacttaatattttttttttcacataacttacaataaaataaaaacaaatttttgttattttatatcaccaacaacaaattaaaataaataaaataacaaataacaaacaataaacacaagagaaggaaaaaaactatatgtataaaaaaaatgtttagttttattttactttatgtacttgcatagcaaataaattgctactgtgtgcacttacataacaaataaattttacaacaataaactattacacttggatgatattaatgccttatcacacgtcttataattatctaaagttgtcatagactataaaatttggatgagattagcggcaatcaagattgttcaaatattttttagcgctaaatttttcatctatttattatgtattttttttatttaacaaaatttatta

SEQ ID NO: 361955 - DNA, 685 bp, Cannabis indica
gtatatttattaattgggaaactttgattagtttttattaatacataaaattaaatgacaatatattatttaatattaattatagttattaaataattagatttgacatttatgtggttgaatgacaaatttggcaattttggagaatgggaaactaggaatgataaaatagtaaagttgcaaaagtgagaggcttgtttccatggccggccactttgcttcccttttctcattttatttttcatttttaaatgccaaggaaatcaaccttaaccttatgtggtattctataaatagaaggtaaaggcttcaggtttcatacacacattactgcattattttctttcactcaaacactctgaagccgccactccctctctgtctttcttctctgtttttgaaatccccttgtgtgatagagtagggcccacacccatcaagtggtacctcaatcatagtatgtaagactatggaaaatcaacatcaaagaaggagagaaagagatccagattcagatcttgataatgctcttctacagaaaggaatcaagggctagagatctgaatggaaggagtcataatattccgctacacccaatgtaaggttttcttaaactcttatgtgtttattatcattgttttagaattcatattaggatgttaataaaacatacttggtagtaaat

SEQ ID NO: 361956 - DNA, 506 bp, Cannabis indica
actggtttttttaagtaactagttttcataactgtttttttttattgttgttcataatggagttttaagtttcaattttttttatttggttattttaggaaactggtttttatctgttaatttttattttggttgcttcaataattggtttctctccttccacagtttttttttgtttattcttttatggtttttcataaagtatccaatccgattacgatccaatctaatccaatccgcaaaatgcgaatatccacacttaattatatatatattttttaaaaaaactataaaatatataatattatttagagttatttgcggcataacctccttaagtggttaagtttttgcagctaacctccaattctaaaattttggttgtaaaacctcctaaactcgagttttgttagcacttagccccttccatccatttttagttgttaactgccatggtggaatgtccacgtgtacaaagtgtacacgtggcacaattttattggtcc

SEQ ID NO: 361957 - DNA, 743 bp, Cannabis indica
tcctccacaaaattaccataaccaattcaatcatctcctttgaaagggtattaataaacctatgaataaagtcaagaaaatccacacaatgaacaaaaggatcccccaacacaaacttatagaatttcctgcactgtaacaacatagtacaccccccgaaaagcatgatgagtagtttcatcttccaacccacacaaaggacataacccatcagataaaaaatcatgacgtgctagattaattttagtaggaatcaaattatgtgacgcttgccaagcaaagagtctaacctttgaatgaagattaagagactaaatctttttccaccaactagatgcgacaccagacggagaagcacgaggaacagccagattgcaaaggtcaagccaataatcactctaaatagaacgccaacctgatttctcaaagttccatatttttttatttggcacatcatgtgaggaccaagggatagaaaggatagactcagcttcatgaggcaagaaaatggattgaaataacacattatcccaaacacctgaatctttccgtaacaccgacaccttgctagatccatcaatttataaaagagcagacaaaacggaaggcaaaattgaaggaatccagttgtcagaataaatagcaatgtccttcccattcctcacacgccaaccagtcccatagtcaaaaaagttctatctcccataagatatttttctacacaaagagccactctttgattt

SEQ ID NO: 361958 - DNA, 503 bp, Cannabis indica
gtttgaatccaggacccagacctatacccgaaccgggatccaagtccaagtttgggttcgggattgagaccgggtgcgattctaggtccccagccccaattgtgtgtctcgagtctggttccatgttttggtctgggttcgggtcccgagtccaggtctgggtggggatccgggtcagggtcccggtttggttacggttatagttttgggtctaggtccaggttcggttacggttctaggtccaagtcctggttctggtccatttttgggtcaaggtcaacttccgatttcagttccgatttcgggtcacaaggtacggtttcgggtctaggtttgggtctatgtttgggttcaggtctgagttttggttcgggtgctggtttgggttcgggtcaaggctgtgtcccagatccatacactgactatgggttcgatccaagccctggctctagatctagatcacgatcttgggtcctggtctggttccattttgggtgccatgt

SEQ ID NO: 361959 - DNA, 594 bp, Cannabis indica
ttatttttataacttaattatcaataaataaaatataaccgcacgcgaagcgcgggatgtttactagtatatatataattaaaataatttttatatttaataaaatttaacacttaactagaggagatcataaatctcaacttctactagaaaaaaataataattaacaagcaattgtcttattttatttaccttttactcataaatttaattttatgttaatttacttttttaaaaaattcaatttctattttatttttaataaattaagcacttaatttatatcatatatattactagttgtctatgctttatttttatatattatatatattagttagtatgtatttttatttatagggctagcaatttatagtctttatttaatctaaggccaactccagtggacatgcaaaaacctaataatagtgttatattacacaaaaaaacaagtccaaccgcacggtatatgtaacctcaattttgggtttgtctacagtgtcccaccatatttaggtgggcaccgtagacaacgctaaatttcttttcttctttttttttttaattttaataattaaataatacttaaaaaaa

SEQ ID NO: 361960 - DNA, 1004 bp, Cannabis indica
cgagcattacctggactcgattttagcaaattctgacatatcactatcctcccgtcactcggttttagggatagagctcaaaaacttgctcggttgccaggggaagatcagaatattatctagttgacctccgatgataatcttgtgaggtacgagctttatcccaaggactttactgctaagtccgtggcagggaagaagaggaagtttggtgctggccggactgaacgatctcataaggagaatgagttgattcaactaaagcatgaagctaaggtgaagggtggtgccagggccaagcaatatgcttgggaacctttgaatcctgaagatgaagttgaggaagaacagtgactccacttaagaggaagaagaaactctcaacctcgcccaggcctgttgaacatgcaattcccataagggagcccatttcacctgctcagccatgtcctcttatgtttggaaaggggaaggttgtcatgtctgagataagagcgatgtcaagtgatgatggacttctgagttttgtgcgggtggtcaccttgcattttactttattttgttcttgagcttcttaattttcatgccttgtttttctgatgactgtcttctaaccatactgtttttgttctgtgcagacatgtctgaacagatgctcgacgctctgaggaagataatggacggacgctctagtgcctctccttcagccaagaagtctaagggtggtgaggggtcctcttcaaaggaaaagagaccttcaagggaggttattgatctttttgaggagtttggaccaccaacggctgggtctgaactggtcaggagtgatccagaacgggtgcaggctaacctaactccacctttgccagtgcttccagaggccaaaaagggcaaggacaatgctggcccattacatagaaccggcttgttcctgaggtcagtgagtaactggctggtgctgcaatgactcttctttggaagtgctggtgggcagagtcttgaag

SEQ ID NO: 361961 - DNA, 626 bp, Cannabis indica
tatgttgttttattctctgatcaccacagcactgacaacatgtttcgtgacagccaagtatatcccaagttcttctccgtccagaggttttgagagtgtgggaggctttgtgagttgcaattatagcttttgaaaagcttttccacattcctctatccaatcgaattgcttatttccttgcaggatgttgaagaatggaacacacttgtctgttattttgaaacaaatttgctgagtgcggcgatcgaacaagtcaaactttgcacttccttggttcttgttggcgacttcatatccagaagggcttgaatcttccctgtattggctttgattcctcgcgcattgacaatgaagcccataaactttctcgagttgactccaaaggagcactttaagggatttagtttcatgttgtacttcctgaggactttgaagcattcgtcaaggtcatctatgtgccctcgagccttcctggatttgacgagcatgtcatccacatacacttccatgttttgtcctatctggtctttaaacattttgtttaccaatctttggtatgtggctctaacattttttagaccaaattgcattacttcgtagcaatatagacccatatctgttcggaa

SEQ ID NO: 361962 - DNA, 224 bp, Cannabis indica
ttcactaaaatatcatttttaggtggctaagtgttttaaggataaaatacattgaaagggtgtaagggtaattttatccctattcaatgtaaatcacctatagatgatcattgattcttgggattataactgtaatatcccggaaaataaataatatttaaatagatatattttattaaatatgtaattattttggtaacgaagtaagattatgatcttgctta

SEQ ID NO: 361963 - DNA, 558 bp, Cannabis indica
atcggtgatgaaaatacttctgtttctttattgatatttaaaggataaagattacatttaaatggagttttatttagggcgtaaaacccaacattcaacccgtcgtgcatgtctcctattgagcatgtgtttccccttgaactgttgaaggggttcatgatctgtgtgaatcacaaattctttgggccataaatagtgttgccatgtttctaaagctcgcaccaaggcataaaactctttatcataggtggggtaattaagtgcaaccccacctagcttttcactaaagtatgcatggggtctcccttccttcataagaacagtgccaatacctacaccagaagcatcacattcaatttcaaatgtgttagaagaataaggtaaaccgagtactggggcatgagtagggaggttgtgtttaagcagttcaaatgcctcctcttgtgcttcgccccattcaaaagcaacattctttttgataacttctataagcggtgctgcgatggtgctgaaatccttctcaaacctcctataaaaactagcaaggccatgaaaact

SEQ ID NO: 361964 - DNA, 1151 bp, Cannabis indica
ttcaaggaactagatagggaccaagtttgccttgtcacttacattgctgcttgccattcgagctaacgcgtccgcagttgtattttcttctcttagaatttgtctgagaccgtagcttttgaattgtgcgagcaggtcgtgtattttgctcagatatgctatcatcttttctccctgagcctcgtattcgccggatacatgatttaccaccaactgtgaatcactacagatttcaatgtgttcggccttcatttcccaggctagttttagtcatgcgattagagcttcgtattcggttcgttgttagatgccttaaatctaaacttgaccgcagcgtgcaggtgtttccccccaggcgtgacgagggcaatccctgcgccggatagatgatctgtagccgacccatccacatgtagtttccaggtcagtttgtcttcattgttacttggctgaggtgccggctcggggtcgctttctggtatgctttccttttttcctgtgcattctactaaaaagtccgccaaggcctagcctttgattattgttcggggttggaagttgatttcatactgacccaattctatcgcccacttgagtaaccgtgcagaagcatctggcttttgcagtatttgtcgtagcggctggtcggtatatacccaaacaggatgagcttggaaataaggcctcaacttccttgttgctagaatgaggcagtaggcgagtttttctatcaatggatatcggcccttggcctcgatgagtctcttactaatgtaatagactgggtgttgtacgctgttctcttctctgatcagcacggcactcacggcatgttccgtgacagctaggtatattcccagctcctcaccgtccagaggtttagaaagtacgggaggttttgcaagttgtgcctttagatcttgaaaagctctttcacattcttctgtccactcgaactgcttgtttcctcgcaggatgttgaagaatggaacaaatttgtccgttgattttgacacgaatctgctgagtgcggcgattcgactagttaatctttgcacttctttggtttttgttggcgagttcatatccaggagggcttgaattttttctggattggcttcaattcctcgggcattgacaatgaagcctag

SEQ ID NO: 361965 - DNA, 763 bp, Cannabis indica
tttttttttgataaatcagaagttgtattgcaccaatcaatatttacaacctaaaggcaccccctcgggcccaagttgtttctatctatacacaatcaatctatacacattacaaatcattaaaccaaactctatccttatcttggatctttcttggtaagaacatgttacacctcatttttacattccattttatttcctcactaaaactggtgctgttctgagaagctccctgccaaattttcccatttctcagctttcacactgtataaacaagggctgcaattgcagcttggtacactaatttccaaaacttggagagcttggccctttgaacccatctcagtagattcgggaggctgttagaagtagcattccagcccaaccaacgcttaatttccatcaacctgctacaggaaaaacaacaatcaaaaaagagatgttggctggtttcctgctatgtttcacataggcagcagctgccatcaatttgcagaccaattttcagcaaccgatctttagtttttagcgtattgagcattgctagccaaagtattatacagtattttggagtattcaatctaccccaaacttccttgcaccaattcagcttggttggagtaggagagaacacacaatatcttgttgcaatagtatatttgtccctctgaaactcagtcacattgcacaaggatttcatttggtttttgagagttacaaccttcttccaataccaactagcatgtatggaagcattgtaact

SEQ ID NO: 361966 - DNA, 599 bp, Cannabis indica
atatatatatatatataaaagagcacatacaatataatatatcatatcaatataattatttatctttaagtaaaaaattaagatgacttcttctaacaccattactatcataagttttatgtgcattgcattgttgttggtctcaggtaagcttttaatcttttttaatttgttagtttattaaaattatatatatataatatattatatgtaattatttttaatttaataatcttataaatatgggatcttggtaggggtgtcatttttctcctatagttagagaattttttttgaaattgtttttattatattttgaaataatatattgtagttatagtagacacctatcagtttttaaaaaaatcatgaataattaacagtgtcaaaatacgggttcaaatagtcagttgtacgtattgtttcttagagcttatgataaaataaaacatacacgagcacaactctttgattaaacccttaattttaatactataaattattcaaaatttatatatatatatacatctataattattatgtatcattttatataaaaaaaattatacataatctttttacgtgctaataaataaaaa

SEQ ID NO: 361967 - DNA, 557 bp, Cannabis indica
actcctctagttcattcaattgtagtagccttttctctcctgcagctttcaattccatgttgagagtcttcatggcccaaaaagctttatgttctaactccaccggcagatgacaagcctttccaaacaccaaccgatatggagacatgccaatcggtgttttaaaagctgttctatatgcccacaatgcgtcatctaactttcttgaccaatctttccttgatctctgcactgttttctctagaatcatctttatctcccgattagaaatttcagcttggccattactctggggatggtatggtaaagcagttcgatgtcggacaccatatcttgaaaggagtgcttcaaactgtttgttgcagaagtgactcccttcatcgcttatgattgctcgaggagtaccaaaccgagtgaagatgttcttttgcaaaaagcggagaactgtttaccatcattctgtggtgtagctgcagcttcaacccatttagacacatagtccacagccaataagatgtattgattgctaaaagatgaaggaaaaggacccatgaagt

SEQ ID NO: 361968 - DNA, 644 bp, Cannabis indica
aaacttaaaaaaaactaaaaaaaaaaaaaaaaaaaaaaattggccggtttgggcgggttaacccgaccaaaccgcccaaaccgttggtcggtttatagaattttttttttaaattgggcgggttgcacttaaattttagcaacccgaactttagattgggttagaaaatatataggataaaccgcccaaaccgaccgatgtacagccctactaataatgatatagtttaagtatgttagtacagtgtaggattttagagtagttacggtgttactataacacgggtacaaaataggtactctagtgcatgtggtacaacactcagtaactcctgagagtacaatttgaccttaccaacacgagtacgaagtcgatactctagtgcatatggtacagtggttggccatatacctacacgagtacaaagtcggtgctctagtgcatatggtacagtgatcgtacttccgttaagaacattcataaccttttggtgagcttggttattgggctcaggacggcttaagcataaagttagtataccattgcttatatatatatgtgttgggttttatgccctaaataaaactcatttcaatataatcagatttattagttaataaagatcagaaataacattttatgtt

SEQ ID NO: 361969 - DNA, 1079 bp, Cannabis indica
ggaaatcttctaaggctttcttattgacaatcgtctggagggggcctctttccagcggttaggggaccaccattcccttttttgatttagggtttggtatggggcctaatttctggaattttaactctttttcagaaccaaaatgtctgcatccggttccaaatcttccaagaagggaggaaagcgtctggccaccttggaagatgttatggtgcgtcccgttgcccaggaggggtatagacctcgttccacgggatgggaagcggccgagcttcactctactttgacttgacctcaccaactggagaacatcgtggaggtggccggtataaaacccgcgacattcgggacgtaccaccggctgccccgtgatgcggagatgcccaaccacaattatggaggcttcggagcttggagccagacgcatttggtgaccggggctatgcttccccttcaagattattttattaatttccttgtatttatcggccttgcgccataccaacttattccacaagcttaccgcctgctttcaggcttattcattttttactccgcccggggatggggctctcccagtccggcggagattttgtatttttacgaacttgtttctgtccccaagaagggggacaaacttaaggatggtttttacggcttccgggcccacccttcgaatgagggcgtggtcccttataaccagcaaaaacacgtcaaggagtaccgccatcgctttttcttctcctccgagttccgagctgtggagcacccagagctccttacggagtgggttaggatccctccgtacaagcggaccgggcctactcagatctttcttcagcggaccaagaccttcgcgacttatgatagggcggatctcgacgtcgggggattggtgacgacggagaactgccggaaggccaagctgatcctggtgcaccagtcggtggaggactccaacctttctaaggtcatcttcccgaacgtgagggttccggccgcgcagaagacctttcgggatgagattattgccaccgcggaaaagaagtccaagattacctctaccggaaggcctagga

SEQ ID NO: 361970 - DNA, 904 bp, Cannabis indica
ctatcatgttcccaagttgtacgtgtgactcgaaccaaatggtaggctttaactaacaacttaaagaacacaaataacactcttgagatcaaacctaaccatgtcaagattaagatcttttgatctaagatcaaccagtgatcttgacttagaaagatacaaaggtaagattataatatccttactaagatcaatatcagccccagtctaatttatactctatacatactttaccgatactaacatactttgccaatgttatgaaaagaacataacacctatccaaggtgtaagtaagctttatcagtgtctatcacatcaatgtacattcagtgcactaatgaatcatgggacattatcttttgaagcatataatcacatttaccttccactgtgttgacatcactgtaattgtgaataattatatgttctgaacttaacagaaatcttacacattaaaccataaacatgaaaactacatgtaaaaataaatgacttttaatcttctattgataataaatcagattatattgaaatgagttttattcagggcataaaatcccaacaaactcccacttgcactaacataaaaccagtagtgcatttcaatcaatcccttgtcttgatatccagatcaagtgtagtgtatttgactaaacccaaattacaggaactgtaagtctgtggtaagtaactactttctccaccattactttcttcgtgttcataaaacattatgcaacatcattttctatatgcattactcacctagagatactgaattctttactgcttattaagtgcatctgaatatacagaagacatatctctaattctactcaaaatggaatagagataacacaattaagaactttcttaagtttgaataactttccagtgcttt

SEQ ID NO: 361971 - DNA, 1033 bp, Cannabis indica
tttacattggaagaagttcaacgagctagttttttagtatgcctgcggataaaagccctggtccagatggaatgagtgccttgttttatcaagaacactggatattgttggccctctagtttctaaagcagtgttagactgtatatcaggggtggcagatatgcaaagtattaatgattcgctaattacgcttattcctaaagttcaacaacctgaatcgattagtgaatttagaccgattagtttatgtaatgtattatataaaataatttccaaagtcctcataaataaactcaaaaatctgttaccactgttaattagtgagaaccaaagtgcttttgttccaggaagactcataacagataatgtccttattgcctatgagtgccttcataatttaaaagcaagaaaagccggaaggcgaagttacgtagcaatgaagttggatatgagtaaagcctatgacagagtagaatggaagtttattgagaaaatgatgttaaaaatgggttttaagatcgaatgggtgaatatagtcttgaaatgtgtttcatctgttcgttattcatttcaaatcaatgactctattcatggtgaagtggttccaacgagaggtttaagacaaggggttccactttctccctaacttttcttaatatgtgcggagggactctcctcgctaattaagcaggcagaatcaaagaaagaaatttttgggctgaaagttgcaagagaggctcccagtataagccatctattctttgccgatgatagtctactcttcttagatgcaaatgagggttctttgcatacaattcaacaaatttttgcattatattcgcgatgctcaggacaggtaatgtttttgatttaatacgttataagattctttgtaccaaagtaggtgataatttaatttgcagtaacctaagtgttgttaattgattcaggttataaattttaacaaatctattctgtatttttcatcaaatactcctgaggaaacaaggaaactctttgcagaagcattaaa

SEQ ID NO: 361972 - DNA, 777 bp, Cannabis indica
tatatattatattattataaataatataacagtatttaatcctccaagtttaaattttagtagtaaaacctttcgaatttttgaactgttaacaaatttaaagagtcatccaattattacaattaattgccaaaaggagttttttttttttatacatatataaatatggagaaaaaaatgtaaactttactttatatggcatagataaataatcaaaatttaaaatatgaaaaacttaacaaaagaccataaataaagttgaaaaactttctatcgccgaaaaagtcaccgtcgctgaaagagtcatcgtgtcatcaaaaaagttactgtcgtcagaaaagacattggcaaagtcgccgaaaaaatcatcggagttgtcatcgtctacgaaaaagtcatcgaaatttccatcgtcaccgaagttagatgtctcagacataaactaaaataaaaatggttctacaataaaatgagtaaaacaaataacacacattaagtaaggaaccagttataattaagaaaacaaagagaaaatcagttcctagaacactgaaacataaattaaaaacaaaactagttctacaaaaaagtgtgtaaaaaatgaataacacatatacctcagaaatcagttataagttaaaaaaaaaagtgagaatcaattttaaaaatactgaggcataaatctaaacaaaattggttccataataaaataagtaaaaaaaaataacacacaatgttaacgctgatttttgttaaccaaataaatagtcttttttg

SEQ ID NO: 361973 - DNA, 933 bp, Cannabis indica
tctaaaggaatttaatacaaactttacaacaattagtaatgaattaccaacagcaatcaagaatcttgattgctagtgcacaatcccttgtgcagcaactgagttcttcttcgacacttcttcaacctgaaatcccttcagatctgatgacgaagttgacattgaactcccttcagtttgaactcagcaacttcaggctctgatctttccgccatagatgaccatcttcaagctatacaatcagacctgtagaaacaacaacaagaacaacaagatacgactctaactcccacgatgaaaactaaattaaccaactgattcgatttaatggataatctgtttacagaatgaaactgactatttatacccaacaaaacagtccacctgacactaactaacacctaacgataacagacttaacagttcgcaagtgcagatataacagactgaacctccagacatgactagacattgtaataaaataatctgtcacaaaataacgacacttacaattaagataagaaagtatttgctccaacaaatactactttctaggaatgtgactaaatctgaaaataaaatagaaaagtagaggagatatgttttttattccaaagtgttctatcatcttattttatgtaagatggtcccactacctttgttgtcttgacccaaccgatgaggttaataccatttaaattcttagacaaaagtcgcggtaccttgtcgtagtgggagggtttcaaggaactcactgtgttatgattgtgaagacactcgtgacaaatatccattgttagtttaaacagataatggatcgtcagaataaagaactaagaagtaaagccaagataactatggttaaaaccattcatatggagtaaccaaaaagttttctattgcaatttacttactctagtgtaagcaacttac

SEQ ID NO: 361974 - DNA, 667 bp, Cannabis indica
aggtctatgccgataaggattgaggtagggagttgagaggtgacttaatagaaatgaatttagcaaattttgatattatagatgggatggatttcttatccaagtcagccagattgattgtaacaagatggtaatcttccaacaagagggtgaggaagtgattgtcattgtcggatcggtttagggatctcgaatcccagtgatttgagtactaatagccagggaattgtttcgggatggatgtttagggttttttgccgtggtattggataccacacggcctgagttaatttggccaaaagacatcaaggtggttcgagatttttagatgtttttcctaatgaacttctgggtttaccaccgcagagggaaattgatttgatcattgatttggcacctggagcataaccgaattctaaggccccttatagaatggctctagcagaactgaaagaattaaaacttcaacttcaggggttgctttaccaaggattttcacggcctagtgtatcaccctggggagcttctgtactgtttgttaagaagaaagatggatcattgcgtatgtgcattgactaccgggaattgaataaaatgacagtcaagtacaagtatcctttacctaggatcgatgatctcttcgatcagcttcaggggaagacggtct

SEQ ID NO: 361975 - DNA, 789 bp, Cannabis indica
gtggcaaataagatcaaaaagggacaaaaaactcttacagtagaggccgtgaaaataatcagaaatttgaatgagattgacttgtggactatgcagaactttaactgcaaaactgtaaaaaaccctgtgttcatacttttacttttatagcttttatttttctgtgtgaaattactactttgagactcaaatttggttagtgaaaatctgtgttaacagtttggtgctttcattgagagcctctgcgaaaaagctcagaataaccctcccttctttcaaagaaaaaccacctccttcatggctgaaaatccaaaaaatgttaacaaccaacatgaggaaactaatcatcattctgggaaagagcccatgggctccaggaggtccaccaacccgcagtccagacagaccacccgttccaggaggactcaacttgagggtggccccaatgcacgggtcacacatttccaaagaacccaacccgatgttggtccttgtacgcagacaacacgctcgaggagaactcagcgtgggagttttcagaacctcaggaagagggatgaagagctgaatctgttagaattattttaccaggatctaaatttactaacaagtatgtttttaacatcctaaacatgaaaacctaaaaaacaaaagaaaaaaaaaaaaaaaaaagtttcagaaaccttacagtgggtccagtggaattataatggctccttccactcagatctctaacccttgtatcaccaagatctgagcctgaaatctccttctcttgaaatctggatt

SEQ ID NO: 361976 - DNA, 748 bp, Cannabis indica
ggctgctgaagaaggagaaaacaaaagccacaagcagcgaagagggagaagaaccaatccctctagcgaacttctcttgacctgagggcttctcttgcaaggacatgggcgtccatattaaactgtcgaggtagaaactgcagggaagctccagggaagttagagaagagcaatcgaatctgagagacaagaccagaaagtgcagaattatcctgccaggcaccattcacttttgaaactaaattcagacaatccgagaagactatttgtggggaaaattgtgagtcaatgcaccacttgagactctgcaaaagagcttggccttcagcaaaaataggagacacagcaccaggcagctgatggtaatgagaagctaacacatcctggaaaccatgcttgaagatgaaaccagttctagttataccattctgttggtcgatggccgcatcaacaaaaagagaaggagtttccggtgatagggaaggagggtgttgatgttgagaagcacgagggatgtgtgcagcctctgaatgcagattatcatcttggtgcttacattgagcagcactgtagtcctgtagataattaacaacgatttcttccacattgttagtaacaccagatttgttaaagagaatggagtttcgagaattccaaatctgccaaacaaatgtaatgaaaattgggaaatcttgtttagaaatgttatgcaatgcctgaataagaaaatcctttatatcacttctat

SEQ ID NO: 361977 - DNA, 501 bp, Cannabis indica
  modified_base (29)..(29): a, c, t, g, unknown or other
gcatttaatgagttattctattataattnccattacacacattgatccatattcttcctactttgacacgtgtcttctattaaaatggtagccgaattttgggtataacaaatatttaaaaattattttaaaattaaaaaagttatttaaaaaaccatttaaatatataagaaatcgtggggtttatttacatatcacgtaatataaatgcagttaatatttgaatatctcacaactgtaattagctcgcttttactgggtcaaagtaaacgtgtattaaacacgttataaatcataatattctgggatgtctcgataggaactcagtaccaatgaccttgaaagcgaggtggagctttttccatatctttccgaggttgaaaatgtaaatctcgtcgcttctgctctgaagacataaagctccatctgtcaattgcagttctcggtgacgaggtaaacttcaacagccaatatcatttgaatgttagcttctatctgaga

SEQ ID NO: 361978 - DNA, 710 bp, Cannabis indica
gcttgaagccgatattgcctctttatctaaggaagttaccagccttcaagaggaaagagagggtctttggaccctttttcgcatgttagaggaagagaagaaagccaaggaggagaagcttgggacgaagttgagagcataagtcagaggccgagcaacataagtccgaagtggcaaggctcggagggaaggtgaatgccttagagacagctggtcttgagattttttatgacttttggaaggccaacccgaaggcaaattttgattatttgggcgattccaaagacttgtttctcgactactgtgctgctcaggcactctacggggaatccgaggtgaccacttccacctctcccattgatcaaagtgttgaagttcctcctactcagacaaatgatccttcagctccagctgacccagttgacccgtacaaatagcttgggactccagctgtttgaatgcttcctttttctttctcttttttttatctgttcggccatacgaccttttttaagacaaagtgaccgaccaagcggtctttaaacttggaatatattcatcattttttggacaactagctgaccaggcagcctttaatcctgggttcgaatgcttttgccatccttaatgaatttcattctctgttaatgatcatcgtgcaattgtgtttgttttgttttctaccaaatgctttgtacaggtataggtgc

SEQ ID NO: 361979 - DNA, 565 bp, Cannabis indica
ctaaaaggtccgtgactaaaggtattagtcacaaaattaaaatttgttgtgactaaatgtatttttagtcacaatacttgttatgactaaaactaaattagtaacaacttgtaactaaatactatgttttagtcaaaagtaacattttgttgtgactaaattaaagtcacatttagtcataaaaaaattatgttgtggctaaaaattatcactaaaagttacagtttttttatagtgataaatgatacataagtgaatgaaacttaggtatatatatatgacaaataacccataaatgaagagcaaaactattctatctagtcataattgaccggagaaaaaatataaaaaatttatttatccttttttttttatatatagatttaatgacactaatataatatttatctaattactaaaatttcattatagaattgttatggcttagtagctactttgtataatatataaatcccacaaaccactaatatatgagcaatatgtgagacaaatccacacatttttttttagatttattcacactaaaataatatttaatctatat

SEQ ID NO: 361980 - DNA, 696 bp, Cannabis indica
aaatttaaaagttagcaaaatatcttatttctattcaaaatatcatgattatagtaatcttattataaaatttaaataaggtcaaattatttaaaaaaaaaattaataaaaaaacatcggaccttaaatttaaaatataagataaaataatcaaatttaaaaaataagataaaaattaagcaaaaagattagatattacctgatttctagttcaaattacactaatatcttaaattaattttaaaaaatccaattaatttaaacctgataattagaattgaaataggaatagtaaatatctaattacaaaactacacaaaaaatcggaagttaattccatgacatagcatgaaaatcaaagaaaacaaaaaaaatttcaagtggtacggacagtatgcaatgcatactatccgcgcgcggattgggaaggtttggccgaggtcccacagtgcaggaggctgcatgcagcctctacgcgcgtgcatggggccattttagacgagccccccttgtcctaaccaaggatgctcggtcatgcaccctgtctgagcgcgtgcatccgagggaatcaccctcgtccgcgcgcgtagggtgggtgacaccatccttatattttccgatttttaaaaattcataactaattcaaataaaatcgaaattgagttcagtaaaaagtaaattgcttaattttttcca

SEQ ID NO: 361981 - DNA, 517 bp, Cannabis indica
ttgttaaattacaaaatataccccattttttaattttggatcttaatagtacaaatatataggacattgagcttaattttttataattataaccaacttaaagataattcctatcacgaataaatgtagaaaatgtaatcagttttgtcataatacttctagatcatattattattaaattttattttgacaaaaaatcagttcagagtactattttaaaaaataaaaggtttaatttgtcatttaacaaaataaaaagttcaatcaataatttttacaaaacataagaaccataatttaaaaaattagcaaaaataataattatgattttaatcaatgctaattatatgtattggtgcaggtgttgaacatgtgggaggagatatgtttgaaaagattccaaatggtgatgccattttcatgaaggttgaatttctaaattttttgttaattaattttagaggtttttttactaagcaatttttttcttgtatttttacggaaattcacatagcaa

SEQ ID NO: 361982 - DNA, 537 bp, Cannabis indica
tatataattttttaaatatatataaagatgtatagatttaattggatcggttacttttatatgtcaatcaacatccaattcgcgtacaagtacaaattttagattttccaattcaattcaatctgcgtacaagtgtggatatttgcaatttgcaaattagattggattaaattgaatattttttgaacacccctaagtccttatagattggttgcactgaatttttttccttatgttggtgttattaattaattcaagccatttaaaatataatgtttttatcatctaattcaattttgtaaaattatatttttcacatgaccaaaaggaatgctcttatataattttattactaatagtaataagaaattaattatatcatcatgctatgtattgcttaattcctctaattaataactaaaatgtatactacttattttttttttttggacttagtcatatatatgggccatatgacaacatattttcaaccttaaaactttgtcaaaaagaaggaataaataataataataataa

SEQ ID NO: 361983 - DNA, 1003 bp, Cannabis indica
attgaaaaagcactgtagcgtgccttagcattatggcgttacaagagtagaatggtaaatatgttcttattcggtgtagatcatctatagaggatctttgactatttggattagaacgatgaataattcttagcgtatctatatcttggtacagatagagcgttctgtataattaatagtgcaattctaaatctatagtagcgcaaggaggaattaataagttagagaatttacttggtaaattctagttctacttattggaagcttgattatataggcctatggtccccacactaattgagataatactgcttgtagactcggttaattggttttaattaatcaattataattctaaaatttgactacgtcttatttatgaattttcactaagcaagggcttaattctgaagaaaagaggtttgggggtttatatattaattaagagactttgtatggtctaattaataaataagataaatggtaaatttatttaataattatttataattattaaataaatagttttaacatatataggattgaaattgaaaaatatgccattattgaaagaaagataaattgttgaaataaagtcgcaaaattataactagtgaggcccacattaagtggctccccactagagtgattttgcccattattttattctttttaatccatataattaaatcctaaaccctagttgaaatactataaaagaaacatgatgctctcattctcatccaacctacttcaaccaaactaaacttagttttctaactttgtcagacaactagtagatgagagactcatttctatagtgattttgcacctcttgatggtgttcaccaattctagcctttagtgatagagtaccatgtccacacataacaagtcaagtactcaatcatagtgcggaatactgtggttaaccaaacccgaaggagagaaggaggttcaagctcagattttgttattactctgcgacagaaaggaacaaaag

SEQ ID NO: 361984 - DNA, 635 bp, Cannabis indica
tttaattgcaaaaattaagggttgtaacccaacccaacccaacccgatcaataatgggttggtttgggttgggttataattaaaacttgatatgaatgggttagaatttaataggccgatcttattgggttggcccactaaaatagcctcaacccggccaacccaacccatgcacaaccctaatctctttcatacactttgaattgtattcatatcttaagaaaagaatgtctttattttgtagagaagattgtgttcgtctcttactctgtttatatatattttgtattgtcttgagtctgtattcaagtctataaaagaagaagagcaacagtgctaccttcgggagaagtttctacaagcttttgtgagattgctttttaagtcttgcctcgggaggaagcaaacacccttcaaggagatcgaaaggatttcgagcacttgaaattttaacaagattcaattaaaatgtggaatacatcaaacataagagggagtttatttatgcataagtccattactttatatttttgagatctatctaatgaatcttctctgggcgtggccccgtgaactagtaacaatctgtaaggactgttgataccatgtacaaaaatcttgtgtgtttttacttt

SEQ ID NO: 361985 - DNA, 595 bp, Cannabis indica
gtatatataaattttggttcaacaattttcataaaaaagcttacagcacaattttggtttcaattgcaattaataaagttgatgatctttcttaaaaaaaaaaaaaaatcaaatatttttaaaaaataactaacaagaatagtataacttaaataaaaagtacatttattaatttatttaacttcttaaatttataaaaacttataacatatattaaaaaaattaaacataattttttacatagtattgattttttttttttattataaaagtcctaaaatatataacaattcaataaagatgatattaattataatcaaatattacattaagtttggttatgtgtgaaaaaaaattatttattatatggagataaaagagtaaattatattgggtcaaaatttcaataataaataatacctcagaacaaaaataaaaaaatatttattttaattttttatataaaaaaggtctcgttttaaatttcgccctagacctctcaacaccttaagacggccctggtaagcagttaaaaatcagcttattgaagaatttacagaaaagctaccgctggtacaacccaacttttagaaaa

SEQ ID NO: 361986 - DNA, 534 bp, Cannabis indica
aagtgcaagaagagtaaatactcaccaagaacattctatgtattaaatacactcataaatatacagactcgtggactaaggctcattaacgccccaaccacgtaaaaatccttctcttaatttcttacagctcttttaattcttattattttattggttgccgaaaacctcggtcaacattttggtgctttcattgagagctgaagaaagcttctgtaaacacacaatacattacaacaatggtggagactcgaagcactcgtcaacctcgccctctagaagatgctcaagacccgaatgaggaagacgtagcctcaagagcagctgagggttccgaggaagaagaaggaattcctgatgatgattacgagggaaacctcgatgagtacgcctacgatgacggtagctactcggaattggtgctcttaagacaaaaagctgtcgatcatgaagctgagatcgcagcccaaaaagcacaaaaccaaaagatgcaagaggtaatgctggccatgcaaaaagccatggaggcagctg

SEQ ID NO: 361987 - DNA, 486 bp, Cannabis indica
cgcaaggggtctcagaacctccttatcttctctggccatcttcaccgccacccgctcaacccttctctttttgtcttgtctctggccatctgctccacaagctaagcaaccccacgacgagcttctccgacatcaaaatcataaagtcaacacaatctatctctctaatctattttttttctttctttcctaaaggttcttgtctctctaaatgagatgctgattttttttattttattttgcaaaaagatgtgattttttttccctaaagggtttgatctctctacatgagatgctcattttttattttattttacataaagatctgattttttttttctgtagtgaatgttttgtatgcaattgtagaactaaattaatatattatattgttattcaaaattgttgaccgagatttcggcaactattaaaatatgattatagtagtgagctgtaagaaagcgagatgaggatttttacgtggtt

SEQ ID NO: 361988 - DNA, 658 bp, Cannabis indica
tgtgttgtctttttcaggtgtgttttgacaggtgggcgcggtatagtcaacagggtatttcgggccgaacccagttcggggctgaaatacaattctgggattaattattggcattttgataatatgtaaagaatctgaatttttatttgagaagatttatgttgtgttttaccattttgcccttgtataggtgcttatgtgtgttatggtcctaagggcattatggtaaattggtttatttgtgttaatggtagtaaattggattatttgtaattaagggattaattttctggttcatttgcctcaaacccgcccccctctctctatctctttctctcaaaatctatttcaagttagtgaatttttgtgaggaatttcttggtgtgaagcttgatagttgtgggtcttggtgcttggttttgggattgaatttgaggtaatatttcatagcctttatctgtaatttgtagctgaagtagagattgaacattatgctttttctatgctttgtttattcttgattgcatgagtgttaatggtgctagatgttggaattttgttgtatgaacttgctcatgtggggactttcacatctcttcttattggtgttttgctagggctattgttagagattaaattggatctttggccctaattt

SEQ ID NO: 361989 - DNA, 942 bp, Cannabis indica
ttcacatagcaaacatcctattaagtgacatttggttaaaagaaatgaaaacataactagaacaataatgacaatttaatactttaaaataaaatcaaataaagaaatagaataaagttatttcttttttattctgctccatttcatttcttctaatcaaacgctatctaataacttattagggtttggcactaattcaaacagtatttcatgatattgtatatgagagcggccagtctctatagtcatgaaacttaattagctaattattaattacagtgattactagctaattacacattgttggaccaataatttcgtttttttcctttcaaatattaaattaaaataaacgtgcatttttatccagatcattaattcatgatgatgatgatgagtagtaattgtgtcatagaattttttattggttggaaatcgaaccatcacgcaaacattcatgattctaccattgttagtctcaagtaataaaattccaatattatatataagagaaatattaaatggtaatagtggtgcttactgcctagtatttttttatatgttaatatcgttattggttcaactaagtatcagacctcatataatttaatataataatttttataaagtattactacatgtcgaaaaagtgttaggtactactagtaactaataacaatgctctatatatatagggacacgattttgtctcgtgatgtattttcacagaatgtattcggtggtacattagatgagtctcaaggtacattagatgggtctcagggtacgttattattttttaactctaattacccctagatcaaccccagccttcagattaaagaactctcccatttaacggctgttgtacatcacgaaatacattccgtaaaagtaaattacaggataaaatcgtgtccctatatataatatatatatata

SEQ ID NO: 361990 - DNA, 614 bp, Cannabis indica
aaccgtgaccggggatttggcggctgaccatgtatagtctgagaggtattcattgctcgatcttcgtgagttttgcccaaaggaatgacattcgcaggctgctgcccgacagtttgataggctttctgaatcagcacagtgggttgccgactgcgatcgtcaatgactgcttgctgagcccttaacgtttccatttctttgtccctccattcagaaaacatgcgcctctactcctcaaacgggaggttcaccgcagcacggagttcctcttgctcatgatgcacgatgttggtatgactgtgcatgagccaagagagcacggagatttcggatctcagtgtcatctccaatggttgtttgaacattggtagcgcacaaaacgattgtgttatgaatgccttggtcatctactgaactagtattcccagtctcttgcacaccgtgacttgcagttgtgggctgtctgggatttacggctggcagaacccttgtgttccatgggttctactgtaacgtccccgcttcaagcctccattgggcccttacacccacggactaatggctcttctacatgagtacgccactctagctgcttcctggattgatgactgacc

SEQ ID NO: 361991 - DNA, 953 bp, Cannabis indica
agaaagatggatcattttgcatgtgtattgattacagagaatgaaacaagttgacaataaaaaaaaagtaccctctgcctaggatcgatgatttgtttgaacaacttcaggagaagatattcttctctaagattgatctctgctcgggctatcgtcaattgagaatctgataggacattccaaagactgcttttcataataggtatggtcactataatttcttggttatgcgttttggaataaccaatgctctgatagctttcatggatctgatgaataggttactctaggattttcttgatatatgtgttattagtatttatcaatgatattcttgtgtactctcagtctgaaatggagcatgagcaacatctacaaatggtttttacagtgattacaagaacacaagcactatgccaaatttaaaaagtgtaaattttggctatcccaagtgtcattcttaggatacattgtcattaagaatgggatcatggttgatccaggaaagattgaatccgttaggaattggccaaggtcgaagatagtcactaaagccagaagttttatgggtttagctggatactatttatattttgttgagggattttctaagatctcaatgcccttaatagaattaactaaaaagaattagcagtttatatggacggaaaagtgtgaagtaagtttctaagaactgaagcagtgattgatcacaactcctgtattagcattattgttagatcaagaaaagtttgtggtttactgtgatgcatccaaatagggtctggggtgtgttataatgcaagctaatagggttattacctatgcttcttgttagttgaaggagtatgagcagcgatatcatgacatggagcttgctacagtggtttttgcattgaaaaatttggcgacacaatctttatggagaaaaagtgtgaaatttataccgatca

SEQ ID NO: 361992 - DNA, 1328 bp, Cannabis indica
ttaccgtagtaacttacatcagagctatttgatccaatctgatcttttagctcaacatgtgataaaacaaattgcagacataagaaactgtactttaaatggtggtcgtctaagctgagtactttgtttcttttatcagaacctttgagcgtagtccgcccataaggccattcacttaaaagcaaatgttcattcagtacttagtgtggtcatccgacctggtactttattggtagtattttcttaaatgttccccattccaatactctggtactagaatgagttgcattttttcatcatacttacctaatttgtatgcttcggagtcgagaacttcgaccacttgatatggtccttcccagttaggtcaaagtacacatgccgtactgtctttttgtgtttaggaatacccttcttaggaccatatctcccacaaagaatttctgagccttcacttgtttgttgaaatatcgagctacattttgttgatgggctatcaactataagtttgcagtggctcatttttcttcgatttcatcaagtgattctgctaggaatatgtgattagtaccttgattgtacgtcccttgattggacgtcaatcttctgtgggatggtggctcgagttcgacgggcagcatagcttcatatccgtacgccattgcgaatggtgtctgtccggttgccgttttctcggttgtacgatatgaccatagaacttcaggaagctcttctggccagtttcctttggcatcttcaagttttttcttcagtgtatccttaaaggtcttgttgactacttcaacttgaccatttgcttgaggatgcgccactgcggagaaacttttgatgataccgtggttcgcacagaaatcagtgaaggattggctgtcaaactgcttgccattgtctgaaactatcttgtacagtagtcctaaccggcagattatgttcttcacaataaagtctttgaaactatcttgtctgtgttaactcgttgggtggagctcgtggtatctttgaaaatctctggcatttgtcacacttcttaacataggcttttgaatcttcaatcatcgtaggtcagaagtaacgttgccttataattttcttggataagctttggccggcggcatgatttccacagaatccgccgtgaacttcagataggagtcttgcagcttcttcttgagtgacacatctgagcaatggcatcaagaatcctcttctgtacataattccctctaatatgatgtaccgtgcagctttccttctcattttctaagcttcatttcggttatctgggagtttcccaaagttgaggtagg

SEQ ID NO: 361993 - DNA, 597 bp, Cannabis indica
gaaaggtggcgttccaggaggaggctcaacaaagggaggcccttgcagaggcaaagttccgagaggaggccaagcaaagggaggctgaggcggaggtgaggcaccaggaggcgctgaaggtggaaggcgaggctgcagccagggccaaacgcgagcttcaggaagccagggaagctatggatgagatggctgccaaggtgaagtccttagaggagttgcaccaggcagacttgcagtcgacagccaacctgactatggaggtgaaggagctaagggatttcagagattaggcattgaaaaaggctaaaagagatgagctcctaacccccgtcgtctgcaagcaatgcgtcaagcgctttgatgatggcgtctatatggtctgacagtcgaatggccagaatatcaaacttgacttctatcccaagcctgaagaggctcttgctaagttttgggagaagaagaaaaggcttgatgctttacttgaagagcaccggagccctcgtcttcctcctcgaattgaataggccatggagtccaactaatttcatcattacaactacttttttttatttacagtctcttttctttcctttcaga

SEQ ID NO: 361994 - DNA, 584 bp, Cannabis indica
gagccatggtagttgatttactttcaattaatatggatttaaaacgaagtatgtgtgattcggaggtgattcatgttgatctatgtgtttattggtgattgattgatgtttgtaaaatttttacttaaaataattggattttcgttctggaattatttttttggatagtatggaaaaaattaagcaattcacttttttatagaacaaaattttaattttatttgaattggttatgaatttttaaaaatcagaaaatatcaggggtcgcatcaccccatgtgcgcgcgcggacacaagtgatcactcgggtgtcacgcgcattccgacaggacatgtccgaaggaacacgccctggctgcctgaaccgcccccctacgcgcgcgaaaaagctgcacgtagcattcgtgtgcgggcaaaactcgggctgtgcaccccatccctgtgggcgcgaatgggtatgcactacatacccatcctaagcccaaatgcatttttttttttcccattttttcattgcttttttcatggaattcatttccaaattttttgtgtagtttttgaatttttgatttttattttttcat

SEQ ID NO: 361995 - DNA, 1385 bp, Cannabis indica
gctcaactactttttcgacctattgcccagtgaacatgcatcactatttatagggctagtaagcttggagaggaaaagtttcccctctcgttacaatgtgtataaacagaaagatcgtgggatcaatgctgaatacaaggatcatgggatcgtgtgtatgccatatccacgtaaattgatctctaagttatagggattgtgctgatgactcacgatgcgaaagctgaattcgctaaatgttggtcgctctgcgcggattgctgaatactttgctctgggcatgccagcgagatatctgctcggactatgcttcccaaccagatgttccaagtggattccacgtgtcaccattcatgtgatgccacgtctgagtgcgaaaattgggataacatttgccccccaagtcagtacaggacttccgaagttgcgtgtagacttcatccgagctgcttctgcctttggatggggacacgtgtcgagtgcgaccgtccgagactcaatgtgaagattactgggcgtcccttcggttttcggctaataaatgctctgacaattaatatttcaaaatttaattttctctctccacggctgacggctgcacttgatcattttttatttcccatattcacttttaagaggggaaactgaggcgtctcaggttcctttgagatgattaccacttttcgtgacttgccgataaatatcaaacaccattggcacataaactcattttcatcacccttctttgctaagtaagcttcagagtgaaaagagagtttcttggcttcaaagttgccgaagagccttcatacaaactacttgttggattgacgttgcttgaaccctgacatctgactctagagtaagtttctgatttcctttatgctcatctttgcatgtttatatttcgaatgcaccttcgactttgctgtagaatatgtctaggaaatcctaggtccagaaacttctgcgattcttctttatcatgtcttcgtgcaattttacagtcttaatgcttgtttctgaactgcgtaacgtctatatttcatctttcttattctaagcttcatgaacttttttgccctaactcgagaaaattttttgacttcttgagttctgacttttcttcaaacattctcgttctttaatctgttgagtactcctggtcggcatatttgcttgtttatcgttcgataatctgacaaaacactcatcttgtgtgttgtcttttgtagaagaactcaagtgagtcttggaaaacggacatcggatctactaggactggcttcaacttctgcacgaggatcatcctcgtctttgttctagcccacctacctctagtgaaggacattctccaactcctatactcagccataaaatgatgg

SEQ ID NO: 361996 - DNA, 559 bp, Cannabis indica
gagttttttcatcaacaaatatcagccctcggcctcgatgagtctcttactaatgtataatagaatgggtgttgtacgctgttctcttctctgatcagcacgacactcacgacatgtttcgtgacaggtaggtatattcctagctcctcaccgtccagaggtttaaaaagtacgggaggttttgcaagttgtgcctttagctcttgaaaagctctttcacattcttctgtccactcgaactgtttatttcctcgcaggatgttgaagaatggaacacatttgtccgttgattttgacacgaatctgttgagtgcagcgattcgactagttaagcttagcacttctttggtttttgttggcgagttcatatccaggagggcttgaattttttctggattggcttcaattcctcgggcattgacgatgaagcttataaactttcatgagctaactccaaaggatcactttaagggatttagtttcatgttgtattttctgaggactttgaagcattcgtccaggtcgtctatgtcccccccaacctttctggatttgacga

SEQ ID NO: 361997 - DNA, 1019 bp, Cannabis indica
acaatttagaggttattcttatttataactggcccaaatcgggacttgatttttttataacaaattagaggttattcttgaatagagtattcttaaatagaggttctactgtattaatattattcagcaaaagaaattaataattattaattatatgagtaattaattaatttaatttcaaaaaaatatataatattattttgacttctgtgttgtattttgtccgagttttctgaataattaaatggtgatttaatccctttcataacaaaaaaaaagaattacctcatatactatttttttgaaatttttacatgaaaaatccattttacacaatttattacaaaaatacccctacacgcctacatcaacttttttacttaccatgtttgttttattacaaaaataccacttagtcatcatttcatgcacatacacgtgtgctatccccatcactcatcaatcaaatcccactctcttccctctcttttttcattttctttcaatttcattttcgatttttccttctgtttctaagttgatttgaagatcaagtaacctccattcataagcttaaccacccattattgatcacgttttttccctctcgttttttgttcatccacaaaatttcaactcccactaagcccacgatttctcaactgtttttccctctcagtttcatttttttcaaatttatttataagatggcaatcactcgttcatcatcatcgccttctccagttctcaaacaaaaatcagaaaatgggcaagaaaactttggccaacaaatccaagggtaaacgcccgatccttgaagactatgattctgattttgatgctccactgaccaagcgtgggaggccccattcttcgaagaaaacgaagctcaacgtggaggagcacacggttccagaaatttctgggaaaaaatcttgtgcctctgctgaagatcgaactcaggttggttttaagtttcattatcgtttcccccttttccaacatttacactttcccca

SEQ ID NO: 361998 - DNA, 607 bp, Cannabis indica
catggagtagatggctttcattttatccatgttggtattgcagttattgtttattctaaagtagttttggagttattctaaggtgtgataccgacgtttgagaggatgaggaaaggtgtgatgaaacaagttcttgaggatggaaatgtcgttcataactaaattgatttcaacaaacttggtggtttggagaagaagcagattggtcgacactgtgcttaagattgttggagaagataatgagaaatttttaaggagacttagagatagaactaacaggtccctatttagtatttacattttttaaaaaatttttgaaagaccaatatattttgtttatttcactttcaatttttaatttattattattcaaaaaaattattaatttatttttgtagagctggaattgatattctcaaaatcaaaattcggtatgagaatttgaatattgaaagagatgtgtatattggaagcaaagcacttcctactctgctttactttatcttaaacactctggaggtatataattatttcatttttgtattaattttatgaaaatagttcttttttgtttagatgttttttatttttattattatttttaatt

SEQ ID NO: 361999 - DNA, 637 bp, Cannabis indica
acatctcagccgactagtgcttgggttccccaaacatgggtaatctcatctactaattctcaatagtttcgtattacaatctccaattctctctaaaggattctaatagaaacttaataacaattagtaatgaattaccaacaacaatcaagaatcctgattgttagtgcacaatctcttgtgcagtaactgagttcttctttgacatttcttcaacctgaaatcccttcagatctgatgacaaagttgacactgaactcccttcagttagaactcagcaactctaggctttgatctttccgccattgatgaccatcttcaagctatgcaatcagacctgtagatacaacaacaagaatagaaagatacaacactaactccacgaagacaactgaattaacaaactatacgatttaatggataaactgtttacagactaagaccgactatatatatccacaaaacagtccacctggcactaaataacacttaacaacaaccgacttaacagaacgctagtgcagatataacagacaaaaactccagacacgactagacattgtacataactaaactgtcacaaaataatgacacttacattctcccccttgacaggttatgttcaatgactcaaaaa

SEQ ID NO: 362000 - DNA, 752 bp, Cannabis indica
ataaaacggcttagggcagcaacctttctggttaaactctggacatctttgtgtttcttgggggaaggcatgctcaggagagcctggattttctctggatttgcctccattccccgctgactgactatgaagcccagaaacctccccaacttaaccccaaaagtgcacttctttgggttaagtttcattccgtatctctggactacttcgaagcattcttctaagtcatccgcgtggctagcgcatgccttcgacttgacaagcatgtcgtccatgtatacctccatattttgccccagaaggcctttaaacattcggttcaccattctttggtaagttgcaccggcattctttagtccaaaaggcatgaccaggtagcagtatacccccttatcggttctgaagctagtgtactcctgatccgcgatgtgcatcttgatctggttgtaacctgtgtatgcgtccatgaaggacaatagcttgaatccggaggtggcatccaccatcttgtcgattcttggcaaggggaaacaatctttggggcaggctttattaagatcggtgaaatctatacaaacccgccatgttccgtttggctttggaaccagtaccggattggctagccattctgggtaatatacatcccggatcatgccactagttagcaatttgcccacctctttttctagggcttcggcctttactaagtcgagggggcgtcttttttgttgaactggtggcatgtctgggtt

SEQ ID NO: 362001 - DNA, 566 bp, Cannabis indica
atggctatttgatggtacccagaataacaatctaagaaacaataatacttttgccaagccaaccggtctaacatctgatcaataaagggcaaaggaaaatggtccttccttgttgccttgttgagcttcctgtagtcaatgcaaattctccaaccagtaaccatttttgtagggattaattcgtttttctcattctttatcactgtcatccctcctttctttggtactacttgcactgagctaacccacttgctatcttaaattgggtaagccactttagcatctaaccacttgaccacctcctttctgacaatctctttcatttgtggattgaatcttcattgtgcatcaatagtcggtttagcaccctcctccattaaaattcgatgcataactgttgagggactgattcccttaatgtaatccaatgtccacccaatggctttattgtgcgcgcggagtattcttagcaagttgttagtctccacatcagaaagtgaagctgacactatcacgggaagcttcttgtcttctcccaaaaactcataccgtagatgattaggaag

SEQ ID NO: 362002 - DNA, 817 bp, Cannabis indica
gagcggtggtttaagtactgttttatatcactcggtgcatgtagaaggagcttttcttcttgtcgtcctattttgagtatcaatggcaccttcttgaagacgaagtacgacggtataatgttagttgttgtggcatacgatgagaacaaccaattattgccggttgcttatggtatcgttgacagtgagaacaacgactcttggacgtatttcttatagaagttgagggtagcaattggcgtggttgagaacttagtgtttgtgtcagataggcatcaaagcattgatcatgctgttgaactcgtttttcccgaagcagtccactgtgcatgctatcaccacattgttatgaacgtgaacgccaagttcaagactgatgcttttcacaaccaaatatataatgttgcttactcatggtcgaagactgaatgtgatagagagttcgagaagcttagaaagatgaatccggccattgctgcatatgtggagagtatagggtttgagaagtgggctcacccttattgtttgggcgatagatacaacatcatgaccagcaacgctgctgaaagcttcaatagtgttacagaagagttcaggaaatatccaataactactttggttgaatttatcaggttcacactgcaatcgtggttcgctgatcgcctcgaaaatgctgacaaatgtacaacccctttggccacgctctttgaaaaaaacttggcaaaaattcatgaaaatgcaaggtacaggcgcgtccaacgaaatagagccaatttgtataacattggtaggggacctaacggtgaaagaggtggtg

SEQ ID NO: 362003 - DNA, 559 bp, Cannabis indica
ataaagtgatattataaatttaataataaccaacttttaatttaaataacaaatgaatcatagtacgtaatatgtcatttaaattagcataagatattaaaaatcagcataaaatattgtaaaatagcataaactgaaattttatattaccttgaactctttggttataaaccaaagataggatagaataatggtatttgtattttcacaaagtgataatttttttatttaattttttacacatgcacgaaataccttagacccgtttggggaggctgagtcagtaaggactcttaaatacgcttctctaaattattcaggactttttggtctgcatggatagtttggactttttggtctccttacatgttcttgtaagttggcaaacttactataagtttgtctacttatgagaactatgcggaggtgctgttgaaatttttactaataaaataattttaagagcgtagattgtactatatatgtatattacaaacctgaatgggataggttctttacccttttagtaatggagtgagaaggtagattaggacacttg

SEQ ID NO: 362004 - DNA, 601 bp, Cannabis indica
aaacattcatccttacacaaccctcatgcacactaaaaacccagaaaatgtagtccccactcaaacagaaaacgaagaatggtgaagattcaaaaaactaatcttttactttgataaatctgtttccacgaatcgcccttgatagtaatatggaatcaagaagaatccacgaataaagacgaaaatctgggcaatttacgaagatttttcgtcctgttttctctaagagtgaaagaacaaggatgttaaggaagttaaaggaaagtgagggaaaatggggatttttggttcgaatcagggggtttaaatacccaaatccctcattccttgggatcatgacaggtggcagttggaatgcctagagtcgcccaatccaacggccagagatggccacgcctacacagaaaccgaagagttttgtgacgtggcaccataaatgcaataaaaataatgattatagccgtcatttttcgaaaccctcgaagggacaaccacaggtcacctccttgtgacaacctttcacctgtctcccgaatgtagtttcccttgtcaccgcacctgtcacgtcgcgaaactaggggcatgtgttatagtgagattt

SEQ ID NO: 362005 - DNA, 1014 bp, Cannabis indica
aagaagaaaagaactctaatgatgaaatatgatgatgatcactttgaatctcttctctattgctcttcaatgtgttttctaatctcaaagttgcttgtttctatctttctagtcgtccctcaatacgatttacatccttctttatataggccaacaaagatagcgcctaatagaaaaatcccaaaataaccacgtgctaaaattatcttttttccagtcaggcgctatagcgcctaccccctgcgctatagcgcctagcaccaaatttttttgcttcaaccttgctcagtaaatcatgcataacttttgcatccagactccaaatgaggtgatttaacatgttttggaaagcagggaacgaattttatcatttttgggtcgcataagctcttcgataaaatgatgaaatcattgtcaagaatgggctcaaagatctcactccatcacaaaatgtcttttctgcacaaacctacacacttagagaaaacacatcaaatctatacaagaataaatactaatccatctaataattgactaagaatgagtatataaatgtgcactcatcacatccccaaacttaaactattgcttgtcctcaagcaataaaaaaaataaaactaaaattaaaaactaaaaagaaacaaaaactaacaaatcaattattgaatgacaaatagagaaacttaaaccaaaagtaatttatctcaaaatacaaactctctttccatcattcaatatgtacttcaaacaaaggactagaatttcaacccatttaaacttaacttccaatattgtatttttattaagaatgtatatatgtcaattctactaactctatgtacatgtaattcatgtgcataaagacttcccttaccacaaaatattcaagataaccataggcttgtataactaatttatctctactaatgtaaactaaagtcatgtagatccaaaggactttataggcatataacgttgggcttaggtaaatggtagataagaatgtcatttagg

SEQ ID NO: 362006 - DNA, 664 bp, Cannabis indica
tctctcttctcctcttgcagcaagaacaaggggaaagggctgttgatttttgagttttcagcaaagaattcaaggggtctttgaagctaaggtaagctctagtcatatccctctttatttcttgaaatccatggatgattgaatatgagatttctaggtttagtggctgttaggctttcatttgcttaaggttcgaattttagggtccttttgggttaatttcaactcctagtagctggttttaatgggtgttgttggttttaggcaactttgaactttgagttcaaagctttgagctttaatggaaacttgattttgaatggtttgttctgtgaaatactggctggattatattgtgtatgccctaattaggtactctggaaggtttcattgcatttggtggagaattgagcattgaatgaacagttttgggaaacctagtgcaaactggctagccggtttgcagggccataaaaaccggctagccggttttggcatggttccccgagcctttcattttctcaatttttgcctttgcgatgcctcggttgggtgttttcccattttcagagttggaattacccattgaaagtataacagaacctagggttttggttttgggtttccggggattagggttttaatcatgtaacttacccagttt

SEQ ID NO: 362007 - DNA, 666 bp, Cannabis indica
tttattgaaaaccttggaacttatttaggtttgtttgtttttaattatcacttgtcattccgacttgctaaatgcttaataatttcttaatgtgtatgattttgtattgaaccttatttgatttctatttattgatatttatagtttgcaatatgcatatgaataaccccattgtgtcactgttgactgacaacaagctctttggagctaactttgtcaaatggaagagaacattaatattgctctcataggtgaaaatgcccaatttgtgttaactgaagatgctcctgaacaaccacgtgagaatgcaaccaagacagttaaggaaaagtttgagcgttggcagaatgctaacaacaaagcctgatactttatgatgtctagcatggttgacaccttgaagacaaggtttgctaacgctctcacgagtccagatataatgaatcagttgactgaactatttgggatggcgtcagatcaagcttgttttgaggcgaccaagaattttataaatgcatggatgaagtctcatcagaacgtgcatgatcacctgctctagatggtaagttactaccaggaagctgagaatcatagagctattatagatcaagaaactcaagtgagtttgatcttaaacagttttactccagcttttctgcccttcac

SEQ ID NO: 362008 - DNA, 451 bp, Cannabis indica
cgccaaagagagccactccaccacttttcccttgcgcatcaacactcactgccccttcgaaaccaagagaaattcgaagcttctcaacagtatctttcttagccaacgtctcacaaagaaacaacacaatgggcttcttttggataacaatatcctttatgaattggatggcccatgggttcccaagcccatggcaattccatgttataatactcataatgataggtgggcttgggaaccaagacccacctttattaagttttttggcccaacatcaatatctccatcattttccatcataatacactcactctctgccacctcattacttccaccagaaagtccactttccatgcgcctcctcttggaatctaagataattttggaaatatcttctccctccacctcagcattaattttgtcaacattttgcatggatgagtcattcccc

SEQ ID NO: 362009 - DNA, 550 bp, Cannabis indica
atacttgtgagtagatctaagttcctggtaaaatatatttccaacaattactatatagtatacctgtgttgtcttttcaggtgtgttcttacaggttggcgcggtatagtaacaatcgggcatttcgggccgaaccgagctcgggcccgaaatgtaaattggattgcattatttggcattttatttgataatatgaaatctgaaatttatttggaaataattgagtatgagatgtctaaaatacccttgtgagggtgaatatgtgtgcattggccctaagggcattttggtcttttgacctttatttactttatttattaaagattgaatttttaggaaaacaaagaaaatttcctgggttgttttctctcaaacccgaacctctctctctctttaaccctttttgattttcaacttgaattgttgaagaattgattgaagttggttgttgattgaagctttggaagtgtggattcttgagcttggagtttaggtaacgtcttgctaagtttatgtaaaatttattggtgaattcttgctgaatttattg

SEQ ID NO: 362010 - DNA, 741 bp, Cannabis indica
tttatcgcttatcaaaaagaatcattgtctttggctaaaagcaaagtcaacattttggtgttttcattgagagaaggatcacaaatttctcttgtcgacattcaacacgatggtgcaaactcatagaggcctgtctgacccaaaaaattcacagacgctggatccgacattgcaggacccaagaagttcacgggtttcagtgctgtcaatcctggacagacgggaagcgtggtgaatggtgaaacagctcctgttactgaaattgcgcctagtgtgaacgagactgggaataatagttctgcacacagccagggcattcataacacgactgttccgcctggaaccaatgcccacacgaccatcggagacgcaaccgaattgcaaaatctccgtgctacgcttggactcatgcagagtcatagcaacactctgcatcatcatctggatgaactgcgtgctacagtgaatcttgcgttgacgaacaaaggcgtatgttcgctgaatggagagacaaagagatggaggcattaagggctcaccatgcagagattgaagatcgtagtcagcaagctaccgtgctgatacgaagagcctaccgaactgtaggttagcaaacgtcgaatacgacgccctaatcgttggacttaagctagcgaaggaaatgaaggccgaacacattaaaatttgcagtgattcacagctggtggtaaatcaagtatccggcgaatacgaggctcgggg

SEQ ID NO: 362011 - DNA, 648 bp, Cannabis indica
cttatgcgtgttacgattgatgtgatttaggagcctgtaattcgccgagcagatttttccactcaggttgaccggcacaccttaattcggaatcgaggtaggtaagattcgtataccagtatgcatatgtatttacatgtttagcatgcatgttagtgagcctgttagattacattagatatgtatgttggcttttgtactatccgacagtatcacatcggtacgactagagtatgactagcgtaccgagtataggctaatacaatatcacatcggtacggctggagtatgactagcgtacagaggataggctgatattatggtccatagtatcgtcgtacgaacgttcgagactcagtaccttgtgggacacgggtattacggttacggtcaggggtatgggtgtttgatcataacctggaatgtatgtatgttatatgatttatgcttttcttacttagtctgtcaactcacagtgctatgtttatgtgtaggtaagggcaaggctaaggccgaggaaccgtgaggacgagcagatgaagattgtacatgtcggggcggttaggcctagagcgtacgatcctcgggacatcagggcttttgttgttagtcgctgggcgacaaatattttgtaaatgaatagcaaac

SEQ ID NO: 362012 - DNA, 870 bp, Cannabis indica
attgagctttaaattatttttattacattgattttgtgtatttaattactcttttcttctaaggaaagattccttcttagctagtctctttttggtttacgaaacttcttgtaagagaaggaattctcttatggaaagttgtctaactttggaagacttgactttcattttttctaattgatgatttcaatttcgcttttattagaacaaatcaaataaactttatttgtcaagtttgaagtccaaattcgtgaccttaattcaatttggaaagtttcctttttagttttgatctgctgctacaaaacctgattttaatgctacaaatcaagaatttttttaagaaagttttgtactactgggaaattatttttgtggttgtctctagggttgctatgttctataaataggacctacagagcaaccaaacaaatttatctcttctagtctcatatttttatatatttctttgtgaaaagagtgtttcatttgtaaaaacctagagtgttcaactaggtctaggttttgattttcttattatgatctcatactattcttagaataggttgaagagaagctttgaacaagtgtgggtcttcgggaagactttttcaagtctcatttcgggaggaagtgacatatatcttcgagaaaatatatgtttaagccttacttcgggaggaagtgagcacacatcaatagctgaagggagtttactacttggtgtgtttcagagatcatattagtaaggtggattataaagggttgcggcaaatcactagagggagtctaaatttgtttaagtcaattatttttgtaatttttgatactttattgattgatttcattctctgggcgtggccccgtgga

SEQ ID NO: 362013 - DNA, 560 bp, Cannabis indica
tttataaaaatatggcatatcaaataccataaaaaatgtgataacttgaagaatacctgttttttgtgttagtcaatcaaaactaccagcaaactatatttatttaaattatacccacttttataaggagattgcctaatatacccccacattaacattaaagattgaaaattaagtctttctgttttgggttgaagaaagggtattataggaacattaactataaaagtgggtagaaaaaataaaatattaaaaagagggtaaaaattaaaatggttaacttaaagtgggtaccccacgcaattttctcataaaaaatcttaaatgtgaaaaaataccataaaagagtgacaaacggtttgataaatgccacttttatgtaaaaattaaaatggttaacttaaagtgggtaccccacgcaattttgtcacaaacctataaatgccatatttttctaactttttttatgaaatcccataattaatgtaattttcactttaaataatcaatttgataaatgaaaatctttcttgagaaataaaaaaaaaaattaacacaaa

SEQ ID NO: 362014 - DNA, 717 bp, Cannabis indica
agtggaaaacagtctttagggcacgccttgttgaggtctgtgaaatcaatatagaccccccatttcttattttccttgggcactaatacaggattcgcgacccaagccgggtagaagacttcaattatgaagttgttgttgcgcaacttttcaacttcttccttcagggctactgctcgttctttgtccaacaatcttcgtttttcttgaacttgccagaagtcgggatcgatattgagaacatgtgaaataataaaatgatcaattcaaaccatatccgcatgtgaccaggcaaaaatgtctaggtttgctctaagaaattttatcaatcctgattttacttcgagcaacaaaccttttccgatttttagttttctggtcgggatatctggatcgatcatgatctcttctagttcttctacaggtccaacatcttcatccccgccttaggaagttccctacttggaaatgttttttcccttctctgtgttctggctggaggatacttccttcttagccttggccactgcaaggttgtaacattcccgagcagactgctggtttcctcttagacaccctaccccattcttggttgggaacttcaggcacgagtgaaataatgacgtgaaaacctttaagtcatacaaggctggtcgaccaagcattacgttaaaagctgaaggaacatctaatatcaggaactgtgccataatagtc

SEQ ID NO: 362015 - DNA, 1534 bp, Cannabis indica
ggtgatgggccaaaaaacttgtcaaaggtgggtcttggttcccaagcccacccatcattatgagtctaattacttggaatttccatgggcttgggaacccatgggccatccaattcattaaggatattgttatccaaaagaagcccgttgtgttatttctttgtgaaacgttggccaagaaggaaatggttgagaagctttgggtttgtatcggttttgaaggtgcgtttagtgttgatgctcaagggaagagtggtggggtggctttactttggcgagaagctgaggagtttcaattagctaggttggagagtggagattggacggggttagtatggcgagcctaatcgtagcttgcgaaagcgtacttgggatcttctttggtcgttgaaaacggagagtgacttgccatggtgtattgtaggagacattaacaatgttacctctcaacatgataaaagtagaggtaatttatatcctagttggttgattaatggcttttgtgataccttggatgagtgtggtttatatgatttggagttgagtggttatccttacacgtgggaaaggggtcgaggaactgattcatgggtagaggctcggcttgatagagctctagttacacaaagttggcttgctaagtttcctttggctaaactccataacatggaagtgtccacttcggaccactgccccttatttttagtccctgttgccgagaatattcaagtgactacaagagtttttagatttgaatattcatggttaaaggagccaatgtgttttaaagttgttgaagacagttgggaattgtctacaggtctctccattacagaaaaaattcgtgattgtggcaatgttctgcttgaatggggaaaagaatatactggtaactttggcaagaggataaaggattgcaaggccgaaattaagatgtggaagaaagggcgagatgctaattctcttgagcgttataaagcggcggaggtgaatttgaataatctctatttgcaaagagagattttctggaagcagaggagtaagcagctttggctgagagagggcgatcgtaactccaagtatttccatcctaaggcaacatcaagaagaagatcgaatgtcattcaaaaactgaagaacgctgatggtgattgggtcggttgggaagatggtcttccaacagtggtggttaattattttcaacaattgtttcagcgctctgatggtgattattcttcggttattgactgtgtctcccaatcggttactggagaacaaaatgttttgttacttgaggaggtgactagagaggaaatcaagaaggcgttgttccaaatgcatcccgataaggctcctggtcccgatgatatgactcctggcttctatcaaaaatttggaatttggttggtgacgatgtagtgcgtttggttcaaacattttttgctactggtgagttcccatctattttgaacgaaactaatattgtccttattccaaagaagaaaagtcccgaacaaatgggtgatcttcggcc

SEQ ID NO: 362016 - DNA, 711 bp, Cannabis indica
tttgcaaaactttaatttttttctaattttgtcagcacagactttgttattgtcttaaacagagcacatataaggcctaaattcttgattattgggtctagatagaaatatgtagtatcagttatttctaaatgttcttttaataaattcaaaacagagtctgtacattgataaaactggaagaaaattacagttttacaaacattaggtacttatgcctctaaatataaatatgtttatgccgcttacaaacataaaactttgagtacttatgtcgctatttaccttaataaaagcttaaaaattgtaaagggtaaaaataatctatgacaactagtactattatatttaaaaaacaaccaataggtctcaccacctttttcaatttagttagaatttttttgtgttcaatgtattccaaaacattaaaatattgataaacaatgagcgggtaacattctacattggtactgagagggttggaatcggttacctacatatacatatatacatatctaatatacatttatatttatatttacatatacatatcttgatatattaaaagtgcctaacggcaattcttggtttaacggagaattttttttttgattctgttaacttttaatcattcactagattttttttttgtttccgttaacttttaactattacgttaagtttcacatatatatcaaaatatattaataa

SEQ ID NO: 362017 - DNA, 509 bp, Cannabis indica
aaattagggagaaaataaatcatattaaaaccataaagcaatgtcaaacaacatccatctaaccctaatcaagtgtttagctacacatgttcgtggaagcaaaatcacacaatattaattttaagaaagagaagaagataaggaataaaataatgctgaaaaccctctgcagaatgcctccagtattgacttctgtctctgaaattcgtactcttttttccctctaaattacttctcaaaaactattgaagtccacttcttttatagccaaaaaatgataaagaaaaattaaaaaaaaatgctgaaaagaaaacctattctgcttaggattagaaaatctattttgcttaggattagaaaacctattctgcttaggattagaagggccagtgagttttctgctgcgttgactgatagtactttgcccataactctctcgatattgcttggaatttgatgatccaagatgtttcggaaagataaaagagagatatagaacttttatgttt

SEQ ID NO: 362018 - DNA, 625 bp, Cannabis indica
ccaagaagtactcatcaacaaaatgcgcaattttgctgatggccgaatcccttgtgctgttcaaccacttgatgtctggttgagagaaatagaagtacccgacctggcttgcttaggggtggacttcaaatcaaagaaccaactaacttcatggggagaaggcatattccacttctaggaggcataaaggatgaagagggcagacagatacttaatgcccttgggagtgaactgggccggccagaggccgaagaagtctgcaaaattcttaaagtattggtacaaaggcatcaatgctccttactggtcatgagcgcctgacccagtgcacatccccctttcagggtttgtggcacgattattgtgggcaggaatgtagcagtccaattcgctcaggtagccacccttgtcaagagccggaaggcgcgcctcagtaaccctggaaggaggactcactcacctagcgcccaaggcaccttgccttctgtgaggagccgcaacagtaagctcctcactaacgtagtccatgccctcaaccaggacgtctctgtcaccatcgacttgctccccaccctcactgtatcccctgtaatttgggggttcaacctcctcctcttcctccacc

SEQ ID NO: 362019 - DNA, 1533 bp, Cannabis indica
gaagctcaaaagtaaagtaaaaagcaaggtgacagcctgcacaaagactcaaaagtctgtcatcacctgacatcgatcttatctcagacatgacagctttcccttttccggcaaaggggggagatggccgaacaggtgaaatgggctcccttatgcgaattgcatgttcaacaggccttggcatggctgggagtttcttcttcctcttcagtggggtcacctgctcgtcctcggcctcatctttaggattcgaaggttcctgagcatactgcttggccctggcatctcccttcaacttagcctcgcgcttaagttgaataagctcattctccttatgagctcgttcaggctcgccagcatcagacttcctcttcttccccgccacggacttaggagaaaagtcctcgcgatagagcccgtacttcaccagattctcatcggaggtctagtggataatattcctgtcttcccccggcaaccgggcaagttcttgagctctatccctaagggaaagagtgaggggaggataatgatatgtcggaatctgctgaaatcgagtccgggtaatgctcggatccttcaccatgaagtacttatcagcaaaacgccctattttgctgatggccttggcatccgtgccggtcaaccacttgaagcctgccttgtttggggtagacttcagataaggaaccaggcaacctcgtcgggagaaggagcaccccatccttgggaagcctagaggacgaagagggaagataaatacttaatccccttaggagtgatctgggccagacagagaccaaagaagtctgccacatccttaaagtacttgtgcaaaggcatcaacgccccttgctggccgtgggcccccgaccaggcacacatccccttgtcagggtttgtggcacgattatcgtgggcgggaatgtagcagtccagctcgcccaggtacccgccctggtcaagagttcgaaggcgtgcctccgtaatcttggacgcaggatttacccacttggcgcccaaggcaccctgcctcctatggagaaccgctgcagcaagctcctcactgacgtagtccacgccctcaacccagacgtctccgtcagcattgactggttgcccagtctcgttatactccccgtaatttgggggttcaacctcttcctctccctctgcctcggaaggactgcctggacgcgcatcgtctagctcctcaacttcctggacctcagcgtcccccttgcgatcctcctccatcgggacggccaaatcctgttcagcgctgggtacagtggcaagccgagccacttgaggatcagtggcatcgaccagacgcgtggttttctttgtacgagccatcatcctatggctgggtacaaggtcaaagtaatgtccttcgctagaaggaggactagaacgaagacgaggatgatcctcgtgcagaagttgaagcgaatcctggtcgatctgatgcccgagttcccaagactcacctgagttcatgtacaaaagaaaacacacaagatgagtgtt

SEQ ID NO: 362020 - DNA, 754 bp, Cannabis indica
ggaagagtggttatgatctctagagggccccatatcggagagactactcgaaaggaattaaagcgctacgcctgggccgtaaaacacaacgaggtttgggaagttactcagctcccagctcagaggcccgactcatggatcaaccaattacattcacagaagaagacgcaaagacggtgcgttttcctcaccatgaccccctggtcatagagactcctatcgccaacaagattgtggctagaatactgatcgacaatgggagttctgtgaatttattatttaaagaagccttcatgacaatcggcttcatggaccgggatctttcgccaagaggttcccaactcacgagattcaatggaacaacacttatcccaatgggaaaagtgaggttgccagtcaacttgtgtcgagacacaccccaaagcacttttaaataatgcacattcatggtggtagactgcccgactgcttacaatgcaatcctcggctgaccggccctagtggactttggcgcagttacatcaatccagcacttgtgtctaaaattccctactcaggaagctggagtagggaccgtgaggggtaaccaatgagatgtcatgcaatgttataatattgccgcccacctactaatattgatggtctgtgaagttattgagccgggaacagcggaagaagatgagttggatccccatgtgggatccgaaaaaatcgtagaacctatggaggacgtcgaggaagtatcagtatgtga

SEQ ID NO: 362021 - DNA, 653 bp, Cannabis indica
tccgaccaaacctagaccaagacccaagacgcgaacccacacccggagcctgatctcgacttagactgaaatccggacctgaaccgaaactcagacctggacttgaactctgacctgaactcaaaaccaaactcgaactcacaatcgcaaatggaactagaaccgaactaggactaggaacagctacaggacctaaatgacaacttgaactcagatcaaacacaagaaagagacctaaacccgaaccgaaactaggacttgaaccctaacctagaccgggacccaaacccacacaataaccggcacctggaccctgaatcaggatagggacctaggaaacaaaactaggagcgggacctagtaccccacccagactcgaacttcaacctaggacccagctcgtgacccggcaccagaaatggaactagactgggacccaagattaggatcaaaatctagacaaagggcatggacaaaacccgtagtcggtgtctggatttgggacccagccctgtactcgtacccgaacccggatcccaacccaaacctggactcgggatccaaacccgaacctaaactcagacccaaacattgaacgagactagggacacagaaccagggtcgcgatcttgactcgggattcgggtaacggg

SEQ ID NO: 362022 - DNA, 537 bp, Cannabis indica
catgaggtgtaaaaatctcttaacatttcatattaaaaataaaaaatatatattaaaatatagaatataatgaaagaaataggaaagtttatgaatggtatataaaaatttattgtaaaagaaataaaaatagaattttggtaatataatttaaatagtagagaagagatgctacctaaatgcatgacaatgtaaaaaatcttgatattctaatatatttttatttatcaattatatacaaattaaatatgataaaagtctaatataaaattaaatattatgagataatttcaatattaaaatattaggtatttattagtaaatattaaaattttaatattaattaggagagttttatttgcaccccaaaatgattttatttattaatgtttattttatatagaaactatatctttaatttatattattttctcttattttttttcttcttatattcttaatatatataaaataaataaatatattttaaatattaaggaaaaaaatttaaaataaaaattatataaattttattaa

SEQ ID NO: 362023 - DNA, 557 bp, Cannabis indica
tagggcacaaaactcaacaagagagtcatactataatttataaggtaaaagcctgtaatatgtgtggtattagctctcaaattaatacaactaaaaggggagtatgtcattacccgctaaacaagggggtcgaacctctataaatcattgtgttattctctttattttcttttattacttacacatggtaattgtcgatcataaataaggctccattgttagttgaccaaatctaaggtcagcattttggtgctttcatcgagagcattatttattaacatgatcaatcatcatggttgtaacaagaagaactacaacttctacttcctcgggtcttcctcaagaccccatgatggctgatcctaacgtgcgtgttcccaccaccaatagagtttccatgtgttgggttttgtgcccaaaaaaaaaccaattcaaaaaaaacaaaattaactaataaataaagatcagaaataacaattttatgttgcatggttcacatgatttatgtcatgattatatatataatgtatgaactctatttaagtccagaacatatg

SEQ ID NO: 362024 - DNA, 681 bp, Cannabis indica
cacgttaagtaaatgcgatttttatttaaatttcacacagctgtgactatcccgcttttacagtgtcaaagtgaatgtgtattaaatatacatggtaagccttatcgtattagaatgcctcgctgggaatagagttgagttaatcttgatggcgagctggagctcgtcatatgtgtttccaaggttgataatgcttttactttatttctgacaactgtagtttctggtgatgagatgatctttttcgtgtgcatgccttcctacagcgaggtggacgcttcactacttctcgctttgcttcactcattggttatacttagtttgtataacgtacattatacgctaagtgtctccattttcaatatatctcatccacgtaacgaggttagtgcctcgtcttgtacacctaaagttacatggtttctcatcgaggcacaagacaaccgtttgtatatttttatctcgcataagtgtgttgagtgagccgagttgtaaacatactctgttaattatgcttttaacgagttatgccatttcaagtgtaattatgattacgtgtctgagttcttattcttcccagcttgacacgtgtcttcctctaatgtgctagctgaatttttggtataacaatcgccccttaaaaagttcttttttaataaaaagtgctttttaatgattaca

SEQ ID NO: 362025 - DNA, 887 bp, Cannabis indica
aaatctactgagtgcagcaatccgaccagttaaactttgaacttccttggtttttgtaggcgatttcatatccagaagggcttgaattttctctggattagcttcaataccttgggcattaacgacaaagtccagaaacttacccaagctaactctaaaggagcaatttaagatattgagtttcatgttgtatttcctgaggactttgacgcattcgtccaggtcacctatattctcccaacctttcttgatttgacgagcatgtcatccacatatacttccatattttgtctgatctggtctttgaacattttatttaccaatgtttggtatgtagctccggcgttcttgagaccaaatggcatgaccttataatagtatagacccatatctgttcgaaaacttgtatgttcttggtccgttggatgcattttgattgtaccccgaatgattgtaccctgaataggcgtccatgaagcttaatatctcatgcctttctgttgcatccacaagttgacctattcttggaagtggaaaacagtctttggggcacgccttattgaggtcggtgaagttgatacatactcgccattttttgttcggcttgggcattagtacggggttagctacctaggctgggtagaaagcttcaattatgaaattgttgttgcgcagcttttctaccgcttcttttagtgctagggctcgttctttgttcaacattctccttttttgttgaacgagccgaaagtttggatcgatgttcagggcatgtaaaattatagacggatcgcttccgaccatgtccttatgcgaccatgcaaaaatatctaagtttgctcttagaaattttatcagtgctgattttacttcgagaaacaaacctt

SEQ ID NO: 362026 - DNA, 586 bp, Cannabis indica
atttagtctagtggtattcaatccaattcgctgtggttcgacctcacctgtgtaagattactacttgattacgtgcacttgcttattgtttataatttttgtaacagtttggcaccgttgccggggaattatttaaagattgatattgcataagattacattaaattctactttggtttattttttcttgctaattgctaacctgtttctatcattattgtctttgtctatttcaggaattgaaggtgtatgcgacgtcaaggacaaggtgtcatttttccggttgatactgaaattgataagacttgtaggagaaacagaagaaacaagaggcaagaaagagtttcagcaactgctgaaacagaagaaatcatggctgagaatgctaatggtggtaacaatggaggcaacaacgctaataatggaggtgtcgttgaagatcaagctaatggccgtagtctgagagaatacattcttccaactcttacaggggttcagtcttgtataagaccacccgccgttgatgctaatactatcgaaataaagcctgccatactccaaatggtgcagtcttcagtccagtttg

SEQ ID NO: 362027 - DNA, 793 bp, Cannabis indica
atgaggtttttgacattcaatgcctcagttatctttaagccggcgatcaaggcttcatactcagcctcgttatttgatgcgtcaatttggaacctcagagcatagtgaactttaaagccttatggcaatattagtattaccgctgcacccgaaccctgttcgttggatgcaccatccacgtataacttctaagtttctgcgtctcactatacaggtggaatttcttctagagttatacattctatcaagaagttagccaaagcttggcccttgatggatgttcgaggattggatattatgtcaaacttccccagtttaatcgaccattttatcaatcttccagaagcatctggttttgataaaacttgtctcaagggctgatcggtcaacacttttatggggtgcgcctggaagtatggctgtagttaacgagacgcatggactaggcacaatgcgagtttttctatagggggatatctggattctacccctagtaaccttttacatacatagtatataggttttggtgcttgtcctcttctcgcactatagctgcagtaatcgcatcttccgagatggctaaatagagaaacaacgtttctctagttatggtttcgccaaaacttgaggcatcgctagatgccttttcataatctcgtgcccagcagttgcatcaactaactggtcgatcctgggaagtggaaaataatctttttgggcacgccttattcagatcagagaaatcaatacaaattctccaatttttcgttaggcttcgggacgagaacagaaa

SEQ ID NO: 362028 - DNA, 601 bp, Cannabis indica
tgcattacatgaacatgtagtcaaaacattgtgcaacctcgaaaaaaaacttccgccatcttttttcaacatcatgatacatttaatggttcatctagtgaaagaaacaaggttgtgtgggccggtttggacgagatggatgtatccatttgaaagatatatgaaggtacttaaaatttatgtgcgtaaccactatcagccagaagcatctatggttgagtgctaaatttctgaagaggctgtggaattttgttcagagtacatggccggagtttaggcaataggaattagcaaaccaagaactgacccagatgaggttgattgaggtttaagggggaaagggacaatggtgacagtctccaagtttgaactagctagttagtcgtgatgaacaataatacagaggttcagccatatataacgtaagtagcttttcctttgataaacatttcttaagtcacaatgaataataacttgatttaccttacatgttttacagtaaccatatggagatgtttcaatcaatggttccaagaaatcataaaaataaataaaaaaaaaaggttgcagaacagcatcgtcaaactttcattgggtggtt

SEQ ID NO: 362029 - DNA, 502 bp, Cannabis indica
cggctcgacctgtattggactcggttagcagtgaaatcgttgaagttctcggttgcctccctattcaagatagcgaatggcgattactgtgcacgaccttgaagctgcgagagcacaagttaattccagagaacgccaaccttcatcgggagccagtatacaaggagccgtctgagaagcaataggagaagatagaaaaacgtctttctaaacagagctctcgaccaacatcaggtaacatatcgcatatgtggtatagatatataagtcattgtttatattttaacttatcttttcttgtctttgcagaaatgacttttgctgaagcaagctcctattctcaatcgcaagctgaagactggaatagcgacgacttctcctgttagttcctcagaaaaggaagagtgacatcaggattactccagctgctgatacgtccaagaagctggcgaggccctcacaagacaaggggaagaaagtcgtgattgatccagctgttcga

SEQ ID NO: 362030 - DNA, 567 bp, Cannabis indica
gtctcaccaccggagacccaaaattccgaaacccaaaccccccaagccccgaaacccaaaaccctgacctcctcctctccccaatctctcccgttgtgctgtgcccgccacggactcctcgtttctaactcgccgactcacgactcactccttatcgcgagtcgccgccgcaattaagttagaaatccagtcctggattgacagagagagcgccgagtgtctaagccgatgtctacgagaaccgtctcagcataacgaggacgagttagtgaagctcttgactcagctcgaggaccgagtctctcaagggttcaatcgcgagttacaagatttgatactgaaatcgaaactgttctcttctctgaaatcggttttgtgtaaccctaacatttctgtatccatgatgattcggggggttttgggtctctagtggtgggagggtttctgcagaaaaagaagaagaaagaagaaagaagaagaagaaggaaagaaaaaaaagaaaaaaaaatttaattttttaattttttagggtttaaattaaaaaaattaaaaaataatatttttttt

SEQ ID NO: 362031 - DNA, 525 bp, Cannabis indica
aatgatagacaatgtagggattaattggtaggtcttgtcctttggtaggataatgatggacatcccaaggattacttgtagaccttgtcaatgttgggcaggataatgataaaaaacctagggataactaggcaaaccatatccatgtttggaaaaataatgacagatagtccaaggatagccaggcaggtcctgttagaattattttaccaggatcatagatttactcacaagtatgttgtttaacatcctaaatatgaacttttaaaacgattataaataaacacatataaagtatgagaaaccttacattgggtgaagcgaaataatatgtctccttccactcagatctctaacccttgtatcctttctgtcggtgcttttcaaatgcagttcttgccaagactttggtgaatggatcagctacgttgtcctctgtgtccactttttccaccagtacatcccctcttgccacatattctttgatgatgtgatatttcctttctatatgcttgcttctcttgt

SEQ ID NO: 362032 - DNA, 580 bp, Cannabis indica
aaatattattaccgttaaaattaaacttaaatatttatttacaactaaaattacttatttctaattaaatggcatattaaaagaaagtactttatatttaagcatccaaattttgcacttattttggtcattatttcctttctttgcaccgttcatagtttttaatatgctcaactactggatctcacaatattgattcttttttgttaattaattattataaaaggaatataatatagagaataattataacaaaaataaaagcaataataattaatgccttacctcctagttaattagtctttagtttgattaggatttaatttattgtgttggcatgaagactaatcctgattaattaacgttttttcagttaaatttatatttggaaatcccctcatgtgtgggatattttgagatatgatgaattgtgctcagaaggcaccaaattattaagcggtccatcttcatattttaatatcattattagtataatttaatatctgtgacagttatcagtcccgtgatccgtaaggggaaataccgagtaagctgtgcaatcccacatcgcctggggaag

SEQ ID NO: 362033 - DNA, 593 bp, Cannabis indica
aagttaataaagtgaatgtttctatttgttgtgttcttttaatacttagcatgccagactctgtcacgttaataaacgaataattaaaaatatgagtagtttaggtttaattcctaaattatctttgaatgattttgaaaaacgtaacttttatagccaggctaagatcacaaaaacaccacacaaatatttaactagagaaagtgagcctctagtattaattcattcagatatttgtaaattagatggtgttttcattagaaataaaaaatgttactttatcacatttattgaaaatcgttctgattttacctatgtgtatttaatgaataataaaagtgaagctcttgatatgtttaagttatttgtggctaaaattgaggatcaacttagtaggaaggtcaagaagctaggtagtgataaaggtacactgaatatgatttcactgcttttgttgatttttataacccacatggaattatacatgataagattgcaccgtattcacctaaaatgaatggtaaagctaaagaaagaatagaactgaaaaaccgtgtttttgcaaaatgtcagttatatataagaaaatataa

SEQ ID NO: 362034 - DNA, 462 bp, Cannabis indica
  modified_base (438)..(438): a, c, t, g, unknown or other
tctcaccattttgatctgaaagagacgatgaacagtaacaacaagagagacaagaaaatagatttgggtaggtggtgagtataaatgacaaaaattggtttaaataaacatggaagcaagaagagaaaaggaaaccaattttaaaattttgaaaaataaccgccagcccatgaacaaaaaggaaaccgcccactctcttgcaactcctttccccctttttttttaaaaaaaaaaataaaaggaaactagaaataccaacattatttccaaaaatatcctatttaagacaacctttcaagattaaaaacacattaccatataaaagatcaatctttaaatggaaacatatcaaaataaatcaaggaagtatagatattgatacttaccaattatgcacaaaatttccttagcccatgaatcaagacaccacgccttccncttttttttttttttttttttatt

SEQ ID NO: 362035 - DNA, 569 bp, Cannabis indica
ctctctctctctctcggttttgcttggggctgctagggctgggttttttctttgcaattcaagtattttcagcaattctaagtgtaattcaagctaaggtacaagttctagtaaccctcttgatgtgttcttgaattttgaagaaaaataattgcatgcttggtgattttaatgttggtagctggtgtgcatgtttgttgttattttctgaagtttaaatatgtttatttaaggtgatctaagctagttttgttgttagttggtgggatttaaccatgtgtaaagctttagactcaaaactttgttttgagtggtaaaatgataaatcagttgttgtgcttattgtagttgattgttgttgttttcagaggcttaattatgcatatttgagtagattcaagcaggttttggtgcatgttagtggggtttaaccaagcttgagttttaaactcaaagcttggagctttaatggcaatttttgtatttgttcatgaagctttgtttcttgctttggatatgttcattggggtctaaatagcaggtctagaggttttggtttgatttggggt

SEQ ID NO: 362036 - DNA, 527 bp, Cannabis indica
gaccggaggtgagggtggagacggagtcgactcaggacttgggggatgtgcagaaccaccaatccccgactagtagaggacaatgtcgcgacatggattaggcagtgcagactcgactgtaggagccactataggatcaccagtcgatgccatggatggaacaaacataacaacacggggtactgcaatgggtgtggtattttccatgatagagaggaaaaaatttgaatgatgaagagcttagggtttctgagaagaaagtgaagaagtgagactgatcactttccgtaggccttaagtataggcaccctgacacaactgaccaggtaaaaaaaataatgatgatttttttaaaatttgatttttgccaaggaaaacgtacacgcccaaattgaatatttgctaccacataatacggcacactaaacgaaacaaaccaacgtcatcagacaatgagtgtagtatagaaaccagaaatgtgacaaatataccaacaatatttgcattcagcccacacttagacaaaa

SEQ ID NO: 362037 - DNA, 662 bp, Cannabis indica
aagcttggcccttgatggaagtttgaggatggtacgttatgtcgaactgccccagttcaatcgaccattttatcaatcttctaaaagcatctggttttgataaaacttgtctcaaaggttgatcggttgacacttttatggggtgagcctggaagtatggctgtagtttgcaagacggatggactaggcataacatgagtttttctagaggggggatacctggattctgcccctagtaaccttttacgtacatagtaaataggttgctggtgcttatcctcttctcgcactatagctgcactaattgcatcttccgagatggctaaataaagaggtaacgtctctctagttattggtttcgccaaaactagaggcgttgcgagatgtcctttttatgctctgaaaggcctcttcgcactcttttatccactcgaactttttgttgactcacaatatgttgaagaacagcacacacttatcagttgacttcgaaatgaatctgttaagtgccgccattcttcctgtcaaggcctatacttccttaggctttgtcgacgatggcatgtctagtaatgccttgatctttttaaggatttgcctcaatacccctcgcgttaactatgaatcccaaaaactttccgaggagactctgaaggaacatt

SEQ ID NO: 362038 - DNA, 525 bp, Cannabis indica
ggggctcctacccctcctgcatcaggttttagcaggggaggtactggttcggccatggatcataaaaggaaagcatccactgcaactggtggctcaggtcagaacaagaggttctgggggaaccagggtcgaggcagttgctagggtagttctaagacccaatacacttacccagaatgcccgagttgtaaaaggcaccatctgggggagtgtagaggataagggtgctttcagtgtggcatgccagggcattacaagaggggtgacctcaactcagaactgaagcaccgaaggctccagcgaaacccactccagcaagggtgttcgccataacttaggctgatgcagaagccaacccttcaatggaaacaggtcagctcttggtcaacaaatcttatttctctgtactgtttgactctggggccacacattcttaggtggcagctagaatctttagtaaattggatagaccacatgatagttatgaatcagggttgggaaccctattacctggcggagagttag

SEQ ID NO: 362039 - DNA, 911 bp, Cannabis indica
tattttaatttgttaattttattttttagcatattgatttgtgtataaatatatatagttagatcgtctgaatttgtattatttgtgagtatatatatatataaatttacacatttattattataatttttgtaccatgtatatatatttaatttttaaagagcagttcactgatgcttgatattcgatgcaagtaatatcgattcagatttctaatatagtatgacatctaagtgaaggtgttatatatatatattagagattatatatgacaagcaccgatatgaaattaagttgtcattattgaacatgctctttactataaagacctatttcatatcataaagattattaatactagattggcatgaatcctgagtaatcatgaactcatgttcatgttattagtttctttgatttactcgttaaagtttctcaaagaagatgattcttacaacttctgttttggaaatctaattatatggatggtgttaacctcagattggccaaccaatagcggagtcatatttattactgatgcttgccatatgttacattctgcgtgccttgatctcccacttggggatcacgtggctcatcatcatcgcgattcctttgtgttcgagatcgcgccctgaaaatttcatttagattatcacaaagatcatctctatgaacatggtatctccctcctcgtcatgttcaatagaacttgacctggtataaacactaggggagcgactattagtagaggaagaaggggattcaacttcatttacctcaacttgtagttgggtctgactttgagggtttcgtcattcagggtcttcttcttgcggtatctcttctctatcgcaaccagtgttaggcgcaactggcttccgtattccacatggaattgtgtacgctgg

SEQ ID NO: 362040 - DNA, 595 bp, Cannabis indica
attatggcggaacttgccatacttcgaaaagatatcgcccgagtctctcggaggcagaaaggcgacgactccgactcagactgtgaggaccgggagccatgcgccaagcacctcctggaagtagagctcgctaaaaactttaagatgcccgaaatggcagcttatatcgggaactctgatccgagtgatcacctgtcacgattcaaccgagtcatgacagtcataagagtcagcaataacgctaattgtttgtgcttcccgcttactttaagcgggtcggcggaagaatggttcaagaaattggaaccaggatccgtggactactggaataagttacaaaccaacttccagagacaatttgtcgccgcaaggaaagtcaacctggaggtcaatgccttgactaacatcaagcagctgcctacggagacactcaagaatttcataaagaggttccgggaggaagcctctaaaaccaagaaagtagatgacggataacatcttgctcttctctaagcaggtatccgcacagggactccattctggaacgaactacaacaagaaggagcttcaaaccttcaggacttctagaagagag

SEQ ID NO: 362041 - DNA, 417 bp, Cannabis indica
tatggggaccatgggcctatagcagtatggtccaaggttactgaggcgcgcctgcgggctctcaactagggtggctacctggatgaattggactgttacattctcgcccacaataaccgagccacaaaccctaaaaaggggatgtgcgcttggtcatgtgatcatgcccagcaaggggcattgttgcctttgcacccgtactttaagaatgtggcagacttattccgcctctctctgacccagttcactcccctgggcattaagtatctgtctgccctcttcttcctttatgcctcccagaagtgggatatgccttctccccacgaggttagctggttttttaatttgaagtccacccatatgcaaggcaggtcggggtacttctatttctctcaactagacttcaagtggttgacg

SEQ ID NO: 362042 - DNA, 563 bp, Cannabis indica
tatattgaaatgggttttattaagggcataaaacccaacagtcgtacccctctccagcgatctgctcggagtaatagtggtgttgcacttcgggttctaaagtagaagagcgttcactactcacttcccaatcttcaaagctcgaatcggaaagtccgtcacttgagaggacggactagcacggagacgagggtgatcctcgtacagaagttgaagcaggtcctggtcaattaggtgttcgcttccccaaaactcaccagggttcacctacaaaagacaacacacgagatgagtttttggccaggatatcgaacaataaatgggtaaatatgccgacaaggagtactcaacagattaaaagaatgaaaacatttaaaaataagtcaaaacctagaagtttgaaatttttgggtttagggctaaatttcacgaagctttgaataagcaaggtgaaagacagacaatgtgcaatcaaaggccaacgtcatgaaccgtgaagttttacagattattacaaagaaaatcgcgaagttttaaacttagattttctatctatcttctac

SEQ ID NO: 362043 - DNA, 507 bp, Cannabis indica
agttcctggtaaaataacttccaacatactattttttaataatattcaattttcaaacagaagttcaactggcgcctgcctattcgtcttcacttcaagtcagtggactggaactagactcgtcgaccgtcgtcaccgactcaccctcaccagtcgactcgagtcgtcgtcacccacacctagtcacagagtcacccacccttacattaaaccattaccatgcacggtaggcacacacgcttcttcttctccaaaaccagcgacggagatggttctcttctccggcggagtcgcatcccagcgcagttggctcaattcatttcagccttcgggcttagcccaataggacccgaactcgactacacccgacccacaatagcttgaccagatacccgacgcacccgaacacccaaataccaggttcggttgtgcatttccaagattcgaagcccgaaaacccgaacctaaaaccccaaaaacccaaaaatccgacccgtgtgcacccct

SEQ ID NO: 362044 - DNA, 585 bp, Cannabis indica
tatactatttaaatttccaagtaatatgcatattgtagtagcttgtcacatgagacatcaatttttaataagtaaaattaatatttgggttcaagtggacaagaaagaaatacaacttaaaaaacaagatcctcgttttatgtactgttaaaatgtggtttgagtctgaaccttgattcaattaatatgtaatatttcacgtgcatgaaagttaaaagaaaatacagagctggatattgctccaccggagctgtggcaggagggcgtgcgagagcgagaatactaacatttcaaaacttttttaatctaattatatatttatttatatttattactttgtataaattcctaagtagaaattacataaattataaacttttttgtagtgtttattccaaaatcaacctctgacggagcaagtttcgacgatcgcggaagagatcttcggtctgacgatgttggaggtcacagacctgatggaagtcttctgtgagaaattgggtgtaacgctctatcgcataggaacgtcatgtgtgtgattttataaactaatttaatactaacaaattaattaattattaaaaa

SEQ ID NO: 362045 - DNA, 506 bp, Cannabis indica
tatttgtcgactgaatatcgatatgatgtcgacaacatgccaatttagtggcacggctaacttatttgtcgatacaatgtcgacgtcatgtcgatagcatatcgataagacacgtgtctgacatggttgggaagggttgttgggaacgtaggtaaaatttattaacattaaatgtgtaaccgtaaaacatgaaacgcatgcactgtgtgtttgtcgattgaatgtcgattgtttgtcgatataggaatggatttattaccactgtacacgcgtcagtcatgcaaattcctttgggagaatatgtcgatatgatgtcaatggtgtgtcgatgttatatcgatggcgagcatgcttgtagttttcgatgttatgtcgatattatgtcgacatgttgtcgacaatgagtgacatattttgatctggctgttgtcgacattatgtcgattgatatcgatgggatgtcgatttttttttgggtgttttttcctttactcaccttgtttgtt

SEQ ID NO: 362046 - DNA, 492 bp, Cannabis indica
tgagtttgatcttaaacagttttacccagcttttctgcccttcacctcaaattatatcatgaataagttgacctttgactcccacgagttaatcaacaaccttcagacatttgagaatttgattggaggtccgtagaaaggaggaaacaaagctcctagttctggcactgctattggtacggccaaacctgaggcaaacattgcctctacttcgaaacctggcaaaaagaagaaatggatgaatagcaagaagcctcttaaagctgttaacacatctaataagcataaaaaggctgctgattcaaaggcaaagcaaaaaggaaaatgcttctattgcaacaaaaagtgccactgaaaaaccctagtgtcctaagttttttttgcaaagaaacaaggtatttctatcttttctatactctcatgtgttttagagaattatcatcctctttggttattaattttggatctactaactgttggaatatgttttac

SEQ ID NO: 362047 - DNA, 688 bp, Cannabis indica
aggtcaagcacgcttaaccgtggagttctttcgtgatgggctaccgaaaaataagatgcaccttgttgatataggtagtaccaatcaatctatttaagtcttcttcaactgtgtagtccaatacctacacagtctcagaatcatcacacttaaccttcctcaaacaattgtaacagtcagtagtctcgtgatccgtaagaggaaataccgggtaagctgtgcaatccctcacagcctgagggacccacttcgagtaagttttagcttaaattcgtaactcccttgaggacgaaatttggacttgatacctttagaattgcgattagggtatgagacatgacttgatagagcattaaaatagcttcaaaacgcaagttaaatcgcatcaatcaaatcaatattgagtgaattatgactgttttactaaatgttgctctaataccacggcccagattgacatcacctgacatatgatggcaacttggacgttgggccaagggaaaaacgtgttgaggatgtattttttaaggcttaagtgatattttaacatcgcttagctagttttgtgttttggtgaagccattcaccaattctcaaagatgttactatttcacggaatcaagagactcgaaactacctgattcacaacagtcactccgctggaaaaagtgaaaatatgaagttgtga

SEQ ID NO: 362048 - DNA, 922 bp, Cannabis indica
ataattctaagtatatactaactaattataatctgattaataaagcttggaataatttactaagtcactagaagacaaaagctaacaaatggcaaaagactattttatccttacacacaccaaaaagcatacatgccacctaggagtatattggtcatttctaaatcatcgaataatctcaacattcctaatatctaactaagtttccctgctattacaaaaatactaaaaagtgattgtattggctacgcgccgcattccatttttgtagggcacaaaacatggaaaaacgtaaaattcatatacgacataaataatacaccctgaattcaaacaaatctccataagaacataattcataattaatattctaatttcataattaaaccctagttatctgctaattaaaattaaagttaagcggcctttgcaattatccccccattaaaaggatttcgtcctcaaaatctaactgaacaactctagatattgagccctcatcttagaatctaactcccagatggcttcctccaccatactatttctccagagtaccttgaccaaagctatggtcttattccgaatgattttatcttttctgtctaagatctgaactggttattcttcgtacaataaatcttactgaagttcaagattttcgtgaggccctataaacctagggcataaattgccctttttcaaaatgtctgatccccttcattggagacacccgtaggaatacatgatctcctacctaaatctgtacatttctgcgtttcggatttgcgtagatcttttgcctactttgagaagcaagcattctggccttgatctttcttatggcttcattagtccgctgcactgattctggacctaggtatttcttttctcccatttcatcccaatgaataggagatctgca

SEQ ID NO: 362049 - DNA, 631 bp, Cannabis indica
ataggtgatattaaaaatgtgttatatttcgatatcgatattaatattatatatagaagaatatattagtagtcttaaacaaaataaacgaaaaagaaaagaaatctgtacactaattagtaccatgcaatatggcttatcacaattcacaaatctcaaaccctagcatatatagttaattaggtatcaaaatattgactaattaatcacaatatttattatattcaagtatagatcatttttgcttctaccagtagcacgtaggattatatgtttgtgttttccactttgaaaaaattatagcataaataaattttagagtaatgtttaatttttggcgataatataatacttaagttataattttggaatttctgtaggtacttgactattattaaatgttaagtaaattaatactacgtggtaattcttgattgatccaactcatgaattttttatttttatttaaaaattaatttaaatatactaataaaaaaatatcacgtaaatataatcaatcacttgacatttatggcacatttactatacagtattcaaaatcggaataaattcatgaagaagtgtaacggaataaatgaaaaataaccagaatcaatatttgtaatatgtt

SEQ ID NO: 362050 - DNA, 558 bp, Cannabis indica
cgtagtctccatgaaaaccgcaaaacttggtcattgtctctttttctcgacatcttttttcatgggcgtgggtttcttgtaccgggctagtgattgagtggccatgtaaacacttttcaatatcctcagtcaagatgggaaaatgtagtgtacttggcttgagttttcttgggggagcttgcttagtttttgccagtgcactttctgttcttcccattcccttgtctattgttgttgctggaacgtttaccgttttgagcttgaattacttgagtaatgggggagttggacggatgttccagtggaaggagctttaggcttgctaggtttttgctcaccttctgctcgctgaatagcctcttcaagtttgatgaagacttcagtacggtagagaaaatcgctcatcgagtctaccagaccgttcttctttatgtccttccaaagctcaccaaggacttgttggaaatattttcctaggctctagatttactacaaagtatgtttgattaacatcctaatatgaattctaaaacaatgaaataaacacataagagttta

SEQ ID NO: 362051 - DNA, 781 bp, Cannabis indica
tcttccccctgagtgtggtttgtcgtatttcccccactagggtttgtacgagccctctctctatgggttcaggaagaacgctagtgattactcacaggtgacctacgttccccaggttgagtcctagggtcttcctcatttccatgatgaatttcttattcattagcttctagttgcctcccattctcatttctatgagagggttctagctgatcattcggattttcagggggaatctcattttccccaagttgttcttcttgggcattttcctgtcttttggttcgtgagccacgaggtctgccccgtggtcttctcactccaagttcagattgattttgagtgttagtcccttgtgccgccctagctacaactgcatcacgctccaattcagcattctgccgttgtgcctctttcaggcggcgtctaaggtggcagttttccgtttcgtaagttctctctcccataggctgagtaccttcacgattgtgtccttcatctcttattccaggattccggccattcccatgctgagttctcatcgaacgtgtcgttcgtgtactgggaccaacgtcaggttgggtcctctatgaatgagtggtccgagtgctggggccactctcgcagaaaaaataaaaacaatcaagtaaaatgtttgagcacaaagaattttttatgtggttttgcagttaaaattctacatagtccacgagtcaatcttattagatttctgatggtttttcagggcctcttctcgtatgatttttttcgtccctttttt

SEQ ID NO: 362052 - DNA, 952 bp, Cannabis indica
tctccttgtccaaatattccaaatacctattcttgtattttttttctgcttaaaacacataaaaacaataacataagtctatttaacacttactaacacacagacttacatttattacaaagacacaacaaactaaatacaattacataatatagacattaattgctccacaattcacattaaaattcaagcttaaagatataaaaataactctaaatcttagagttatcagcccccgtatttggtactgggaccacaggctttggtctgggggtccttcgctaccgcggaaccccaatacgaagggccctcccggcagtcgcctaggccttggtataagccagctcctgttccctcctgaagaggtacttctggtacttatcttccgccgtggcgatgatgtcatcccgaaataccttctcggcggccgtagccctcacattcgggcagatgactttggaaagattgtagtgatccaccgactgatgtcccaggattagcttggccttccgacagttctccgtcgtgaccaactccccgacatcaagggctttcttgtcgtacgtggcgaaggtctcagcccgttgaagaaaaagttgagtaggttcggttcgcatgtaagaagggatcctaacccactccgtgagaagctccgggtgatccacggcctagaaaccggaggagaagaagaagcggtgacggtattccttcacgtgcttctgataattaaaagggacctgaccctcattcaaaggatgggcccagagaccgtaaaaaccgtccttaagtttgtctccctttttagggatagaaacgagttcataaaaatataaaatttttgccgaattgggagagccccagctccgggcagaataaagaataaatagcttgagagtaggcggtaagcttgagggataagttggtatggcgcaaggccgacaaatacaagaaa

SEQ ID NO: 362053 - DNA, 518 bp, Cannabis indica
gttatatttatgattaagattatgcttttcttactgagtatgttgactcacagttattgtttgcatgtgtaggtaagagcaaggctaaagttgagcagccgtgagagcgagcggatgaagattgtacatgtcgaggtagttagatctagagagtacgatctttgggacaactggttgtattttatatagtcgctaggcgacaacttttacatcaagtattttgaaacagctgtaaatattttaaactcgggatcctgattatataaaagtaatttatttttaatactgctagcaattaagcaaaattttaattactcacgatttttaataaattcattaattagaaatgaactgcacatttaatataaaatcacgataacacgctaaactagtagagtgttacattagacataatatatttcataattgaatccttgaagtggttctatataggtacctataaataatatacatatttaaaaaatatgtaattcgaagatatctctataagttatgtc

SEQ ID NO: 362054 - DNA, 1100 bp, Cannabis indica
gataactaatcagattgtaatgagttttatttagggcataaaacccaacaacattttggtggttcctggatgcaatgagtaaggggaagtatgagcttcttccagaatttccttcttaagttcattgatatcagggacacacacccgtgctttaaacaacaacatcccattgtcagaaattgagaagtccttagctttgcctgctaagacatcttctcgagtcttaaccaattcaggatcttctaattgggccattttgattctttccaacaaatctgactgaagtgtcagattaaataatttctcagtcaccaactcaatatttgccctagtcatctctgaggctaactgagaggaaatcatgaccatgttggatatctgatcgggtccctttcagcttaaggcaccagctacaacatttgcctttccaggatgatacaggatttcacagtcatagtctttcaccaactctagccaccttctttgtctcatgttcagatccttctgagtgaaaaagtacttgagactcttgtggtcagtgtaaatctcacaccttgttgaactttgcatagagtttgggggtggaggaattattgtgacagccagaactcacactttttgaactttgcatagagtttatgatctctaagtcgctgcagaaccattcgaagatgttgctcatgttcttcttctaaccgagagtacacaagaatgtcatcgataaatacaattacaaaattatcgaggaaatccttgaataccctattcatgagatccataaaagctgccggtgcatttgttaatccaaaagacataaccaggaattcataatgaccatacctggttcggaaagctgtcttcgggatatcctcttctcgaattctcaattgatgatatccagacctcaagtcaatcttagagaatactgtcttgccctgaagttggtcaaacaaatcgtcaattctgggcagaggatatttattcttaatggttaacttattcagctcccgataatcaatacacatccgaagagttccatctttcttcttcacaaatagcacaggggctccccaaggtgacacactaggccgagtgaaccc

SEQ ID NO: 362055 - DNA, 706 bp, Cannabis indica
aagaaagttggtgaggtttctataagagagtccaaccaacccaagacccaaacctgcgccagaagacttttacaccatcctctttctggtatcaaggaatttcttgaggctgggaaagaggtctcggttccaggaaatgggatctgatgatgaggagaatgaggtctgtgcagagatcaaggctctctatgtggagatggtctttcacgagctacatgtagccggtctttctccaagctatgtgtagacggtctttctctctcatccttggtttaggaagatgacttaatggtttgcccctagtagcatttttgtaaagacaagtttgtaacccaacttgggttttctttttatcttaaatgccttgtactattttcattcaaacttaatacaattgtgtttgcttgcatttttattcacatttgatcaaatgtacagtgcctttgggtttttccattgctcgtaatcttcctgttgaagtagttagtaatctaccaaactttttcgattttttggcagttgtcaattctgcctcgctatagcagtaataatctgccttaagcaaacttaagtatactttaatgattctatcactttgtatatttttaatttgcttgtatgaatatatagttatattatctatccatttcttaggttcaagtacttttatcaaggtatcgtgatgcctcgttttgtactttcctag

SEQ ID NO: 362056 - DNA, 745 bp, Cannabis indica
gtgaatggagaataccagcaagaggcgggagattggttaaatacttagccattgttcgcgaaataatgcagaagttcaaaagtatagtcgtgtctcgagtaccacgtgctcaaaatgcacatgcagacgcattggcccgtttggcctcaactagagaagccgaattgctcgatgtgattccggtagacatattggctcacccaactataaatcaagaagtgatcatggagatagataccattcaggagataacctagatgacacctatcctcgcatatctggaaaaagggctcttgcccgatgataaaatagaagcaagaaagttgcgacagcgagccgcccgttatgtaatatatgaccaaaggttgtatcgcaggagttttagtcaaccccttctcaaatgtatcagcggagaggattgtggttacatacttcgtgaagtacacgaggggatttgtggcaatcataccggaggtaactcccttgcgttaaaaatcatgcggcaagggtattactggccaacattgcgacaagatgctctcgcgtttgcaaagaagtgtgacaggtgtcagcgaatagccacttatacccaccagcctccgagtaacctccattctatcacaagtccatggccctttgcaatatggggaattgatctaatcggcgagttacccaaaggaaaaggtggagtcaaatatgcggtagtcgcagttgattacttcatgaagtgggctgaagccaaagc

SEQ ID NO: 362057 - DNA, 561 bp, Cannabis indica
aatattttttttgggcccctgggctaggtgggccctaggcacaggcctagctcgcctatgcccagggtcgggcctgcatgtagtatcagttgcttctaaatattttttcaagaaatttaaaaaggagtatatgctgacgaaactagaagaaaattacagtttaagtatagattattcaaaattaggggtgtgcataaatcgatcaaatccaatgacaaccgaccgatctttttataaccgaccgccaaacattggatatccaattgtgatcggattggatcagatattatttttgaatatccaattggatcagatcggatgaaggatgggtcgtctaaaaatccaatacatccaacatccaatcaaactaattagtattttcatttattttggatgaggaattagattttatattattatacgtaaaatatatacttatatataaaaaaatttactctttttgaattggatggatccaatccaatctaatacatactagacctaaaatattggatggatccgatccgatccaaaaaatactaggtttaaaatattgaataa

SEQ ID NO: 362058 - DNA, 542 bp, Cannabis indica
gtacctaactgcgccggcaaagcttatctgagaatcttggtcggtaaaagactttttaccggcgcatagagtaaatgcgccgataaaactctgttttaccgtcgagaaatcacaccggtgaaaaaaaaagtgccagtgttaaaaaatacacttattccctatgaacctgctttgataaacttttgccggcgcaatagtgcgccggcaaaactattggcaccaacctcacgattcacgccaatagttttggccactttttaccagcgcagtaatgcgccggcaaaagtattaatttttatttttaaaaaaaattaattaattataatattactaactttttcaaatttataatatcattttattatatttttaaaattactaactttttcaaatttatattatcactttattatattttaaattatatattacatttttcacttttattatttttttaataatttattattaaattaaaattactaactttttcaaatttataatatcactttattatattttaaattatatattacattttt

SEQ ID NO: 362059 - DNA, 418 bp, Cannabis indica
gatagtttggggaaaattaagcaattcactttttttacagaacttgatttcgatttaatttgaattagttatgattttttgaagttttgaaaaaaagataagggtggtgtcaccccatacgcgcacggatccgagtgatcactcggtcacgcgcgcatcagacacgaggttgtccgagttttctcggtctgaagcctcggtcttgtctgaaacctaggctccgtgcgcacgagcagcctctttggccaagttttctcagttgtgcatccaggcttgcgcgcgcggatggtgtgcaatgcaaccatccctaccaaatacatttttttcaattttcttcaatttttcatgttttttcatggaattaattccaaattttttgtgtaattttgtattttagatttttattttttatatttca

SEQ ID NO: 362060 - DNA, 575 bp, Cannabis indica
cttaaactctttactttacaagtttgattatttgctataatatattgcttgccatatcacttgcatttatttgattaagtgtttaattgcttaattttgtgttaaatgtttttttttatcgaaattagtttaaatttctaattcaccccctcttgaaaacatatcttgggctaacaagatttgaacgtctgaaatgcaaaaatgacgaaaggaattgttacattcaatttttataccctgttattgatcaacgttacatcgaaagaaatctaatctaatggatgggaacattgcaaatgagaatagtcatagcatttaatgctaatgatgtgccttaaagttctgaaccgctaaaaacccaaagcatgcaatttctcaaaaatgggttaatacgattatagcgttgaaatcagttaaaaagttctttttaattaaatattactttttagggggcaattgttatacccaaaattcagctatactccaaaaactgacacatgttctacagaaggaatatgaatcaactctaatggtataacaatgttatatcagtaaatgtagataaaaataacttg

SEQ ID NO: 362061 - DNA, 638 bp, Cannabis indica
tgggaggccaagtcaatagatgctcctaaggtgatacggtagaggaatgaagccacatcttaagacaccacagtcttgtttgagtttggaacccaattgctaagagcaaatcgcatgagagatgcatgaaaaaaagtaagactctcccccaatttcagttcaggccttgcaccagtgagttcagagagcatcaattggcgatccatagacataatggcatttgggacattctttggaaattgcaaggcttgagaaatgtcctttttcagagaatgaaaatcaatgtcctctaacatacacttttcgaaaaagtctagaattttcatcaagaaaatcatcagataggttagcatagaaatctttgacaatgtttgcaatgtacccgttgaaaccagtgagagtgttttcccattgatggaattgaatgaatttaacaattccatacaccctatgagcatgcaaatcataattcctttcactctcaaactttcgggttgcatacaaattccaatcacgctcattattacgatagtaaaaacgaggacaataggaaagagatgtaggaatgttactaggagaggattccttcattggctgcttgcctttggcagcagcagaagcctttgctgctaaagagg

SEQ ID NO: 362062 - DNA, 1000 bp, Cannabis indica
ctaccacttcgaacatgctctcgcttattagctttacctgcaaataggtcaagataatcaattgtcaaaactgtaaagaaaactaaaaagaaactaaaaggaaactataatgcaacttgtagttttaagtgattatacattttctgtcaatgagtccacaaagttgttgactagctttttctctactgtaggtgtcaaaactgttgtggttttctatgcttttttcttgtttctatatgtccattgttgtatcaaagctctcaatgactccattagtgttgtgattggtagttctctagctgctaagtttgctacgttaagagattcagcaatgttataagtcatagttgaatacctgttgtgttttctgtggtatcttgaccatttatggtatccaacttgttgttgttggaattattttaccaggatctagatttactaacaagtatgttattaacatcctaaaagtaaacttctaaaacgatatgaaataaacacatataaagtatcaggaaccttgcaatggttgcgccggaatataatgtctccttccactcagatctctaacccttgtatcctttctgtagcagggtatcaccaagatctgagtctgaatctccttctcttgaaactagattcttcacagccttacacactatgattgagaactacttgatgtgtgtgggcaattactctaatcattctagggtttgaattgaagagaggaagagagagatagggtttcggttttggtctagggaaggaggctcaaaattttactaaaggaatgagatgcatcatcttttccctttagccatcactacatatttatagaaaaccacttaaggttaggttagatttaattagcattaaaataattaaaaaataaagtggcaaaatcatcccaagtgcccggccatggattgtgggacccactttgtaattttaccattgttctcatttttcatatcattttctcaaaaatactatttttccaatt

SEQ ID NO: 362063 - DNA, 817 bp, Cannabis indica
aaattaacttatggtatctacacattatttccatgacaatttaatatccttttgatacccataacataattggtcacttaattttgtatcacactttataatagcatatacattatacatatgtgcccacacagaatttttaatccaacagatacaactacgcagatcaaatcgtcaagtgagtgaagacttggtgtcctaagttagatcaatgaatatggatgtcggaattagaacatccaatttaatgacacacatggccctgcagagtggtggattcaccaatttgccatgccaactgtgggatgtgtataataaagtggctggcgcacgtgtgtttgagcagtctcaaactgattcagatgcaacattagaatttttggacttcctaattgaaagggatccaaaaatggaggtggtatattaagttgatcaagataatcgcttagcaaacttgttttgggcatatggaatctcaatagatgattataatttatttggtgatgtccttgcatccgatacaacttacataaccaacaagtataataaaccactaaccactacactacaagaaaaataatttttatcagcggaattattaggggcggaacaaatccgctgctaataatatcaatattaccaacagatatatgattccaccactattaaaaagttttaatattaaattaataataatagtattagcagcggagaaatatttattactggcggtccaatctgccactaataataaaatattttaaaaaattattagcagcggatgtatttattattaggggcggatcccgcggctaat

SEQ ID NO: 362064 - DNA, 1271 bp, Cannabis indica
tctattacatcagtaaaagactgataaaggccgaaggtcgatacccattacgcaacaagaatgttaaggccttattttcaagctcatcctattcgggtgtacattgaccaaccattacgcaaaatattacaaaagccagatgcctctggacggctactcaagtgggcggtggagttgagccaatacgaaactactttccaaccccgaacagcagtcaaaggccaagccttagcagactttctggtagaatgcataggcaagaaagaaagcataccagaaagcaaccccgagtcggtacaaacaccttagccaagtaacaatgaaaataaaccgacctagaagctacatgtagatgggtcacctacagattagctatctagtgcaggaatttctattgtcacgccttgggggcaacacctgcacgctgcagtcaagtttggatttaaagcatctaataacgaagttgagtacgaaactctaatttccggactaaaactagcacgggagatgaaagccgaagagcctagcatcactggcacggaagaaatcaaaatgattgatacttccccaaactgtatgacaccaatagcagcctacctcgaatctgggaaactcccagataattggaatgaagctcgaaaaatgagaaggaaagttgcacgatatatcatagtagagggaaatatgtacagaaaaggattctcaatgccattgctcaaatgtgttagtcaagaagaagctgcacgactcctatctgaggtgcatgacagactatgttgaaatcatgccgccgggcaaagtttatctaagaaaattctaaggcaaggttacttctggccaacaatgattgaagattcaaaagcctatgttaagaaatgtgacaaatgctagagaatttcaaagatacctcgagctccacctaacgagttgactcagatacagagtccgtggccctttgccatttggggaattgacctgaccggacaattaccaaaagggaaaggaggagtgcagtatgcagtggtagtggttgattacttcactaagtggacagaagtcgaaccactcgcaaccattacatgaaagaaagttcaagactttattgtgaagaacataatctgccggttcggactgctgtaccaaatagttttagataatggcaaggagttcgacagccaatccttcactgacttttgtgcgaaccatggtatcatcaaaagtttctccgcagtggcacatcctctagcgaatggtcaagttgaagcactcaa

SEQ ID NO: 362065 - DNA, 578 bp, Cannabis indica
tcaaataaaaattgcaatgagtttagagattaggcaataacatttctacaactcaaaacatattaataataaaatttctttaaatcatcacgttctatacattaatatatgttgttattactataattaatgattattatttaaatttctttgccacatgcatttcgctctctcctgtcttccgaaacagggagggacactttctcttaattttttttctacgaaaatcaatttttaatcagactatattaatgaatgatttatatgtatatagtcaaattaatgtatatatatatatattggtattacccatggttaccaaataaatttaaatataaatattaaaccattaaattttaatctaataacgaataataaaaaaaaattaaatttttatactttttagtttaactatttcattaaaaaaaaaaaacataaaaaatctctttttacactatatcaaagatatgttcatataaaaaaatttaagtaaaaaactcaactcttacttatcctttaattttgctaaaaacttttttaatttttttaactcatggaacaatctcaacccatatgat

SEQ ID NO: 362066 - DNA, 1118 bp, Cannabis indica
tcatatagataggaattgtttggatttaatggaaaaaatagaggaagggtataatccaccaatgaattatgatgatcaaataaaacagcgggtttggaacatatgatcccatctattccgttagcaataaattggcatggggatataaataacacatctcttagtagaagattgttaggagcaacaagatcgcacgaagaagatgcaagtgtgagtttttctgaaaagcgggttaaagtgaatgatgatggtacgtgttttaattttttggtaatttatgatttcatttgaatacataaggtcttttattattggttttatgtttattttttaggaaaaggatttccaacaaaggactttatggaaaaaggagagcaaagtgaggataaaagagtaaggggagagaccaaaggagagaaggaagagttaaaagctaaagaatttctcttgtctgagggagatcaaggaaatgaggaaatggatttttactctggaattttccagtatggcaatgaaggaagcaaatgaagggacttaatattattttgcaagattttagtttattaaaataatttttaaggaataatgattagtcggtttcagttaattggattattgttttgaatgttttttggaagtttatttatcagttttgttgacaatggaaataagtatcttcttaagtttaagaaaagtgtttctagttttcatgttatgaaaatctttgctcaagaaatgtcttaaataaaagtttgtttttgcatgataattattattcagtggtgccttttttacataagatatatctttaatttattataatcgaatattacacttaaagcttattgagactatgcatgaaaattggttataaaataatggtataatttggtcttcgtgtggtatgactagagtaagaattagttgattaatagtctataaatagaatcttaaataaataaatattaagtaaatgaaatattagaaaaacgtgatgatgaaagcataatgatttaaatatttataggccataaaatattaattgaaacttacttctacacttatatttatggttaacgtgattggtggaacagacgtcattactattagtcagccaa

SEQ ID NO: 362067 - DNA, 940 bp, Cannabis indica
tttaaaatttattatatgtagtaatttaaattgctttgttaaaagaaattattttttataaaaataaataaataaaatttattattatatatcacttattttcatcaccgtatctcacccgttgtcatcactatattgcatcacttgtcattaccgtagttcacttgtagtcgtcactattgtattttccaaatctgtatcttaatcttatattgcatctcgaattttaaatagttttttaacatttttaagacattatagaaaattcattaggttgttatattattattaattaatatgttttaataaagttattattatttattaaatatcttaattaaaaaaagaaaaaaaatatataaaaatgtgatattttagttatgagaaatgctaaaaggcaaccctctttgctggtatcataccactattagtgtaattaagtagcatgccccatatataacttaaaaaaaattagagaatatcactaactaatcatcacctatgaaagctgttgggtactattggtgcccaatagtaatgctctttagttataattatgtgatacttgacattaaagttatcattttaataaaagacgtaaagtaggcttttgttaaaaattaattaatatttttaataaaaaatttaaacgtggtaaaaatcaattgaaatattattcaagtagggatattggcggctaaaccacttgaactttgcggtttgtaacacttaaccacaaaaatcaaatttttagcggttaaactccctaaaccctggttctgttttgctctgcatacctccgtccaaaaatcacagttaaatgccacggtggactgtctacgtgtacacaaggccggccttgaaacaaagtgggccatagggaaaaaaaaatttgggcccttatgttagaaaaaatgtggtattttcaaaatcggtaaaa

SEQ ID NO: 362068 - DNA, 753 bp, Cannabis indica
atgaacatgtatcagatgagaatgtctagattgaggtgcagcaaactgctcctccaacaccaactaacgttgtttaagatagaactgaggtaacagaagaagaagcaaatgaaggtcgccaaggattgagtagctatcaattagctagagatagagaaagaagacagagaaaagccttcacatatttggttatgctaaattcatgacatatgcacttatgattgcaaaagaggttgacaattctgaacccactagttttcatgaagctatgagaagtaaagatgttgcaacatagttgcaggtcattcaagaagagatgcagtctctcaaaaagaatagaaaatggataattgtaaagaaaccagagttctacaagctagtaggatgtaaatggcttttcaagtacaaggaaggttcagggaataaacctgttagattcaaggcaaggttagttttcgaggcgttccctcagaaggaaggcataaattataatgagcttttttctctagtggtcaaggaagcttcaatcaaagatatgatggcaaaggcagctagcatggacttggagattgaacagatggatgtaagaacaatttttttacatggggaattagaggaggaaatctatatgccacagcctgaggactttgacaatgggaacccatatgaggtatgcctactcaagagtctcgttatggcctcaagcaggcccccaagcaatggaatctcaggtttgacactcgtatgcagaat

SEQ ID NO: 362069 - DNA, 725 bp, Cannabis indica
tcgggtccagggtcccggttcgggttgggtccgagtctgattctgggtcaggattagggtccgagacccgggtctggggccgggtcgggtcccagatgtcggtccagtcccaggtctcgggttccgggtcccggtccaggttcgggtctcgggtcccggtttgggtccgagtttgggtccgggtcctggtccgagtctgagtccaagtcccggtctaggttcgggtccgagtccgtgtttggaccaggtctgggtcccaggtaccgggtccaggtccgggtccaagtctgggtcccaagtccgggtccgggtcccgatccaggtttggggccgagttgggtctaggtctgggtcccggtcctagtcccgagtcccggtctgggtctgggtcccggtccgagtccgggtctgggtccaagtccgagtctgggcctaggtccgagtcccgggtccttggttcgagtttgggtcccgaactaggtccgggtcagggttcgggtctaggtctgggtctgggtctaggtccgggtccaagtcccaaggaatttgagtctaggatcccagtcttgaattaagttatttttaaaataaatttaaatcgggtcggatcagattcaatccagaaaaaaaattaggcggggcagagcggatctgatccaagatccaataagtatccgaatgtttcggatcagaggtgataggggtgttcgctgtgcgggtggtgc

SEQ ID NO: 362070 - DNA, 554 bp, Cannabis indica
tttaaagcatcagacttatgtttcaaaagataaatccaagtaaatcgagagtggtcatccacaagagtaagaaagaatctaaaattggaatgagaaggtacatgataaggaccccaaatatcacaatgcacaagatcaaaaattttgtaagcaaatttaccactattttgaaatgggagtttcttttgcttagcctttggacaaatgtaacatggtgagtctttatgcaacaaagaagtattacatttgagattattttctaacaatttcaagtatttatcagatagatgtcccagcctagcatgccaagtttcagccgtgacattgaaaataggataaccagcagctttttggtccaggatgtatagaccatctgcacaattacctctgccaatcctcttcttgttggcaaggtcctgcaatatgaactcatcaatggtaaatttaaccttcacatgattatcatttatcaagcaacttacagatattatattatacttgaaatctggcacaaaaagaacattttgcaaggtaatctgatctgtgacagcaac

SEQ ID NO: 362071 - DNA, 638 bp, Cannabis indica
gtagcgtgccttagcattagggcgttacactaatggagtaggtagaatagttatagtcaagccaactcttacttaatcttctgatgtgggacttaggttgataatgttggaatatttttaccaggatctagatttactaccatgtatgctgtttaacatcctaatatgaatttctaaaacaatgtaaataaacacataaaagttatgagaaaccttacagtgggtgcaacggaattaaatgactcattctactcagatctccaacccttgtatcctttctgtagcagagtatcaccaagatctgagcccgaaactcattccttgtgtttggattcttcacattcttacacactatgattgaggaccaacttgatatgtgtgggaatgtactcaatcactaatggctgaatttattttgtgaagaaaggcttagtgtttcgaaaattcaagaggaagaagaagaaggaagatgtctcatcagaaagctaggtttttagctttggaggcattagttggatgcagagaccatagccttgcttttatactatcttcaatagggttagggttgaattattaggaatgaaataatgataaaaatagtgtaaaaaataaacttgatggccggccacttaatgagc

SEQ ID NO: 362072 - DNA, 869 bp, Cannabis indica
tgatgcaggaggggtaggagccccgccactcactggagtcctagccgactccgacatacatccaactgcgccctcagctcgcagtgccttctccaccatctcagcataggtggtcttgtcgtcggtggtgatcataaggtcatgtttgatcttcacatttaatccgtccagatacttttccttcttgctgaaatcggttggcactattcccgaggccaacctcgccaaccgatcaaactgggtggtatactcagtcacgctcatgttttcccgctgggtcaggtgtgcgaactcttttctcttggcacttctaacggcctcattataatacttcgcgttgaagagttcctggaacctttcccaggtcatggtggtgacatcatgaatctgagacaccatgtcccaccagactagagcgtcttcttggaactggaaggtggcacacaccaccctgtcatttccggtgacacccataaagttcagtatcctggtgatcaccgttagccactgttcggctttcatgacatctggacctcccagaaaaaccggaggtgcttgcttccggaacctttcatacaagggttccattctgtttgccgctaccactatctcggcctgagcaacaggggcgggtgccacaggaacttctggcacaggcactgcaggagccccctgctgcctcaatctctgaatctcctgatcttgctctggcttgcatttcagcaaacctagtctcccaattctgggcttcctgatcggtttgggcagcctgggcagcctgtggcgggttatcatcaccccgaccacgagctcttcccttaggacctctaccccggcccctaacatgcggggaaactgagctccctgac

SEQ ID NO: 362073 - DNA, 912 bp, Cannabis indica
ttgcatgtttaattgttgagatgttgttgctagtgtagttataggttgttttatgtgattttatatgtttaaattgattggatttgagtagattgatgcatgctagatggtttaaccaagtttggaactttttaactcaaaaactataatttctacggaaaattgaggaattggttgctgtgtttgttgtatgagtttgggaatgatttctgcagttttattatgcatgattatgtagtttaaactaggtttggttgcttttaggtgagttttagccaagcttgagttttgaactcaaagcttggagctcacatggtggtttttgattttatgcatgaagattggttttcttgctttggaaatgttccttagggtctaaatagcaggtctggaagttttggtgtgatttggggttgattggagtgagttataaattttttgatcatttcctactctgatccggaattccggttcagcaaccggtctaccggttgggttccaggaattcctagaaccggaattccggttgtaaaacgggtctaccggttgggaaaaatttgagaaccctagttcttcccatttttatgttgtttagggtattgtgagctttttatcgatagggaaacttctagtttctagtttaagtccccgagaagttatttagtgtatcacttatcagtgttgtgattgttattgtttaggagcctataaatccccgtgcagttcgttccactcaagttgaccggcacacctgaatttggaatcgaggtaaggctagagtatgactaatagctggagtatgaccagtgtaccgagtataggctgatactgtatcacatcggttaggctagagtatgactagcagctggagtatgaccagtgtaccgagtataggctgatactagggttggt

SEQ ID NO: 362074 - DNA, 769 bp, Cannabis indica
agggcacgtggtcggggagatgtcaacccgtcgcaggttgcccaggaatgggaaaataggtttgtagcaatgcaagctaaaattaacgaacaagaagaagaaatcagacgtttgaggcagcagggtgctcctacaatgcctactctagaaatacaagtggctcctgcccccattctgcaggcaaggccagttgctacggtaaatcgaatggaaccattgtatgaaaggttccgtaagtaggcacctccagtctttctaggaggtctcaatgtaatgaaagccgagcagtggatgactgttattacaagaattctaaactttctgggcgtcaccgataatgacagagtggcttgtgccacattccagttccaagaagatgctggtttagtgggacatggtgtccctgactcgtgatgttactactgctacttgggaagagttttaggagttctttaacgcaaagtacgacaacaaggcggtcagaagtgcaaaaagaaaagaatttacccaactgatccaaaaggagaatatgagtgttactgaatacacaacgtagtttgattgattggctaggttggcctcgagaattgtgcccaccaatttcagcaagaaagaaaagtacatggatggattaaacctaaaaataaaacatgaccttatgattaccattgacgacaacaccacctatgcttacatggtggggaaagcactccgagctgagagcgcagttgagtgcactcaggagtcccgagggactcaggttgttggt

SEQ ID NO: 362075 - DNA, 434 bp, Cannabis indica
agtgacatttcttgtagtgtctttacttattaatttagtttataagtttaataacgaaatagttaatattgccaattctggtgtaatttttctttgtttgatgaatttcttccctaaaaaatgaaaataaagtatgtttccaacttttacattaaacactgtatgaacctatcaatactaagcaaacaacagaaaacaatgaagacaaagtctctaaggcttgtaaaggttaagccaaagagaagaaccatttcattatttatagggagagagatacagaagattttgagagaccaactaaagaaagcagaataagaatgtaacagaattagttacaattaggtacaaacagtaaaaactgaacaaactaattaactgtagatgttagttggttgacatcccccctcaagcgaaatggtgtggtgcacacttga

SEQ ID NO: 362076 - DNA, 731 bp, Cannabis indica
catcttctcccgtactaggaaaatggaaagctgccatggcagagataagagacttgtcaggtgatgatggactctcgagtcttgctcggacaatcgtttcgcaggatattctgtcttgtttttaaactttttgactatcatgctttatgcttctgatgccctttttcctctaaccatgttgtttttgtttctcgcagacatgtctcagaagatgctcgatgctctgaagaagagagttagaggaaactcaagctcatctcctccggccaagaaatctaagggcagtgaggcgaacctccaaggaaaaggcaccggccggagaggttattgacctttcgaggatctaactggtgcgtatccttctactccaaaagttgctaagtccaaagattctcgaggaggaagcttagacagggctgagcaatcaaagggtggatccgagctggccaagagcagatctgagcagatgcgggctcctactcaacctttgcaagtgcttctagaggccaaaaaagtcaaagagatgctcgcccgttacatgaaccggttggttcctgaggtaagtgagctactggccggtgctgacaaggagtcttccctggagcttttgatgggaggactcttgagggaattcaccagggtaagtctttatggacagtttcctttaatccttctttacttggttcagactttaaagttttttctctgtgtaggctggtttgaagttggct

SEQ ID NO: 362077 - DNA, 628 bp, Cannabis indica
ctccgagggttggaatgttgttccagtgagtgaaggctcaagtgtttcatgagattgggccacatttttctgaggggacaaaaccttaaagattaaattttgaaacacaagattaaaagttggctttttacctcttcgaaatgagacaatttggttcaaaatgtgggaggccaagtcaatagatgctccagaggtgatacggtagaggaatgaggccacatcttgagacaccacagtcttgttggagtttgaaatccaattgctaagagcaaattgcatgagagatgcatgagcaaaggtgagatgagtaatacgaagactctcccccgatttcagttcagcccgtgcaccagtgagttcaatgagcatcaattggcgatccatagacattatggcatttgggacattctctggcagatgcaaggcttgatacatgtctttttcagaaattgaaaaccaatgtcctctaacatacacttttcgataaagtcgagaattctcatcaaggaaatcatcagataaattagcatagaaatctttgacaatattagcaatgtaccctttgaagccagagagagtgttctcccattgatgatattgaatgaatttaacaattccatacacccta

SEQ ID NO: 362078 - DNA, 682 bp, Cannabis indica
gaccaatgcgcgcctccagcatggcatcaagctttttcttcttctcccggaattttgcaatcatctccgcgggtttgggatagaagttaagcttgatattctggtcatttgtagaccaggccatgtagacgccaccgtcaaaacgcttgacgcaccggctgcaggaagtgagagaaaggagctcatctttcttagccttcttcaaggcttggtctttaaagtccttgagctccttcagctccacggccaagttggccctagactccaagtctgcctagtgaacttcctctaaggacttcaccttgacagccatttcatccaaggcttccctagcctcccgaagctcacgcttggctttagcagcagcctcgctcttcgccctcagctcctcctgatgcctggcctccagcctatccctccgaagggtctcctaccggattaccgcctccgcttgtgcctccctccgcctggcctcttcctcactggccttgaggagggcctcccggcgctcggcatcctcctggtaaagccgtctctcagcagtcaaatcctgaaggatcttcatgacttcgtccaagcccccaaagtcggacaggacgaagccatggttgattaagttcttggaaaggcagccgactcggaagcaagctggaaaatgacacaagtatgagtaaaagtcttt

SEQ ID NO: 362079 - DNA, 554 bp, Cannabis indica
gtaaggtttctaatactttatatatgtttatttcataatcgttttagaagttcatatttagggtgttaatcaacatacctgtgagtagatctaagtcctggtaaaataatttccaacaaggaattgcccgaatgacagatttgatgagagtttctttgccagcccgtgagaagagtttgtcatttcagacattaagtttagttgaaactttctgaatgaggtaatggaagatagaatttttaaccgtaccaacacagtgaggaactccaagatatttactaatgaaaccttcaccattgaggagcaaagaggttcgaaacctggattgggaattaggggaggtatttggggagaagagaatggaggatttgtccctattgacagattggcctgaagcttggaagtacaaaagcaaaatattatttatagcttctgaggattgagaggaaacaggcacaaataacatactgtcatccgcaaaaaggagatgggaaaacgagggagccctcgacaaaattttaatgccagagaacagggcaacatcctcatggaga

SEQ ID NO: 362080 - DNA, 1725 bp, Cannabis indica
ctaccaacccgtagtccagaaggaccacttgttttaggagggctcaacccgagggtggtcccagcgcacggaccgcacgttctcggagaactcgacccgacgttggtcctagtacgcggacaacacgctcgaggagaactcagcgtgggaatggtcagaaccccgggacgagggttgaagagctcaactttggaggtgcctaatctgtgggagaaagaacttatgaagcaaaaagccgctgcctgagacgtcgtctagaagaagctcatcgtcgaaatgttgagttagaacgtgaggtagcttcggccatggcgacacaggggataaatgctcaaaatcaacctgaacctggagtgagaagaccacggggtagacctcatggctcacgaaccaggagacagaaaaaggcccgggaagaacaacctggggaaaatgagacactctctaaaaatcaggacggataaccagataggagacaaccgaaaattgatgaacgagaaatccctcatgaaaatgaggaggatcttaggactcaactgggggaacggagatcacctgctagaaatcaccaacgttcttcccaaacccatagagcgaggacttgtacataccctgatgggggaaatatgagaaacggatctcatgaggaaggaacggagcgtgaagaagcaagtgtaactttgaggcgatccagaacccatagtcgatcaactcaaagaagagaaagtactcaacgagctaatgattgagaaagtatgggaaccaataaatctgcgagccactcaaagacaaggtctatgagtaggacgcgatttatgagtaagacaagatctgccagctattactcccaactggatctgcgagagcacttgaatcggaagaaacctgaacttcgccagtagctcggtccaaagcaagaggatacaatccaattgcagataaacgagctggaggacaagttcaggagatatcaagtgggggaaatatggaaaatttggatatgactttgacgaggagcttgagccgtatcacccagatattatgaataccccttttcctttgggattcaaaaacccgcatgtctcgtcttataatccgatcttgtatttgaataactttaacacaataatgcgagcgagtaatgtgacgaacaatttacactgtattttgttccccatctctcttgttggagcaacgagtagctagtttaacaagtttatttatcattcaataacttcctgggagcagctgtccagggatttcaaaaagtaattttaggctgctagggataggtgacccgaagtagcctcattaaccaatataaagcagcagccttgcgagacacttaaggcttacttaagtcgttttagcacggctgcagccagggttagcaatttggatgatagcacataacttacagcccttcaggcgggaatctctactgatccattgaccgtaggcggtgagttgtgggatgacttacaaggacgtttagtgagaagcatcactgggttcaacgaaagggctcaggtgttcgttcggaaagaagaagcccggaaagaaatgaatttgttgaaaacaagctcgagaggcaaacctagaaatatttcaacaggaacagtttccacaagaattgataactcgagggcttctggttcgaagagaaaggatggagttaaggaaccgtcaaaggataaaaagtaacaaaaaaagcatgacaaatat

SEQ ID NO: 362081 - DNA, 728 bp, Cannabis indica
gttaattgcggcaaaacccccaatacttttatttcactagcaattaacctcaaaaactcaaattttggcggtaaagcccccaaaactcgcaatctgttagcaattagcaattttcatccgttttcatctgttaactaccaaaatggcagtacacgtgtatcgtccatgtgtatacacaatacacgtggcacaattttattagtccctaaataaaataaaataaataatatttaaaatttaaaataaatcatttttaaacaaataaaaattaaaaggtctgttttcatccaaaggtctctaaagaaggggttcggattccaccctctttgtaaatctttaggccttgtctacttatgctttgcggatgatttcataattttttgtaagggtaatttcagttggtgaaagaggcattccttttatttagtgatgctacaagtcttattgccaataaggctaaatcaactgtatactttgggggtatctcaactacttgtaagcaaagactgacgaatattttacaaatggaggagggatctttcccattgaaataccttggagttaatctaagaccaaccgaatggcgagcagctgactgtggtattatcatcgacaaaatgcataaatacatgcacacctgggctagtaggaacctctctttcactgggagggctcaattggttcattcggttctccttggagtcagaaattactggatgagtttgttc

SEQ ID NO: 362082 - DNA, 878 bp, Cannabis indica
cttagacttcttggcgggaggggaggcgctagagcttccgctcatcctcttccttaaggcgtcgatcatctaccgagacaggtctgcacaggataaaaatagcgtggttagcaaaagctagcaaaaaatacaaagtatgaatgtcaagaagctgagaaagaagtaaagcgcagagtgactgcccgtccagaaagtcagaagtccatcatcacctgacatcgaccttatctcagccataacgaccttcccttttccagcataaggatgggatggccgaacaggtgaaatgggctcccttatgcgaatggcatgttcaacgggcctgggcgtggccgagagtttcttcttcctcctcaaaggagccacctgctcagcctcagcctcagccttggcctcatcttcaggattcatagactcctgagcatactgctttgcgagtacgtcccttcaacttagcttcacgcttaagttgaatgagctcatcctctttatgagctcgttcaggccgggtagcagcagatttccccttcttccccgtcacggacttagaataaaagtcctctgggtaaagcccgtactgcaccagatttgcatcggagctcaactggatgatatccttatcttccgccagcaaccgggaaagcttctgggccctatccctaacagtaagggtgaggggagaacggtgatatgtcggaatctgctgaaaccgagtccaggtgatgttcggatccttcaccatgaagtattcatcaacaaaacgccctattttgctgatggccttatggtccgtcccgctcaaccacttgaagcctggtgagagaagtagaaataccccgacctgccttgcttgggggtagacttcaggttgaagaacc

SEQ ID NO: 362083 - DNA, 859 bp, Cannabis indica
agagagagaatttgagagaaaaagatttttcttttaactttggtttttctcaactttcaaacttttgaataaaatgagagtaaatgcaaaaataaacctttatttcagccaaacaaatgccacataatcacataatttccaattacaaagtccactaaaggacaaaatatcattggggcaaaatgaccaatttgcccctccatactaaaataacataaagggcactaaaggggtattttgggaaattctaaattcccgaccaattccgacattcccaatgtctcaataaccgtcccacaatactagcatactaagttgtgattttactgagccaaacaccgcgttccatgttaccgggcactgaaaatgcaaaattatgaaattcactatatgacataaaatgcatttcaaattcaataataacagcataaataattatttaaatatctataaataattttccataattaaacataattaactgctaatttccaaattaaactaagtggtctttacactgcaggaggcacttttgttgaaaggggtgcttgttggcaggagtgtggaagtagtgcagagaccgtcagattcttgttagtcacgacagaggtcgagagttgataaccgagatggttcgaatgggatagacatgggatgcttcagttgctacattgtgtgtcgagagggacgcacatggagaccaaggcaggcagataccgcaatcgtcaaaggatggttgtacttggaggtgtttgcatgtgacttgtatttgatccatatggaaacgccgaggcagttgagtggattgtgttggcttgttaaagcgccagagggcgtaagtcacacaaaggcatcgaca

SEQ ID NO: 362084 - DNA, 822 bp, Cannabis indica
gtatctttaagtctttcaattccactggagccattcgataaggtgcctttgatactggattcgctcccgaaacaaactcaattacaaattcaatttcccgggtaggaggcaatcccggtaaatcttctggaaagacgtcaaggaactcgcataccaatcttgtattctcaggtccagatgtcacatcttgactggtatccactacagtaactatgaatcccagaaaacctctactcagcaggtccttagctttcaacagtgttattcttggtatgcgtgccccctgaactttacccacgaacaccgctaggttagcactatcgggctcaaacaccaccatcttccgcttgcagtcgatcgttgccccatacttagacagaaaatccattcccaggattatgtcaaaatcaaacagttgcaattctattagattggcggtcaattcacaacagtcaatccaaaaatacaaggaccgaatccacctagtggacactataatatctctcgaaggaagcagggtaccaaaccctggagcatatatatcacatggcttatggaaactttcaataactctactcgacacataaacaaagtataagaacagccattaatagtcaactgacctatcacaactgacgaactagcatcagcgttagcctgagtcatagtaaaaagtcgtcctgggttctgagtagtattcttcttagattcctctttcttggcctgaggacaatctctgataaagtggcccaccatgccacactggaaacatgtcttggcctaacattcaccctgatggtgcttcttgaatttaggacactc

SEQ ID NO: 362085 - DNA, 573 bp, Cannabis indica
ttttttttgatatattttttagggccccaaaatttaattcgtcttgggcccatatagttttagggtcggccctgggtatgacaccctaaaagctattttcttaagttatatgagactcgatacttaattacaccaataatagtataacactgaaaaaagtgttacacatcagtagtgtcttttagtaattcttatttacacaccatcatatataagaaaaattaatattataatgtataacattcattatgagtgcacagtaaaatcattctaacaaatctttattatttgatacagaagattggtacttattgttggagtaaaatttggatgggagttgtaattaatttgggtggaggctttatataaaacttgtaattaattaattggatggtatagttgagttataattattttgtgattaatacagttatagagtttcaaaaaaaaaattgggttggagtttaaaaaatagaattaataatggtgaatatttgaattaataaaacatatagtaaattgataattaaaaagaaaaccaacttgtcccattaaaaaaaatgttgattctcc

SEQ ID NO: 362086 - DNA, 633 bp, Cannabis indica
tataaaataacaaactaattagtttattttggcatattgaaacaaaatttcattatttgtttacataacagtcttttcgtatagcctatcatcgtatatactaataaatctattagtttattttggcatattgaaataaacttttatttttctttttgtatattggaacaacaattcatttcatttcatatagcctaccattatatatgtcaataaacatactaatttctgtttgttggaacaacatttttttttcaatacagagtaaactgcaatcaaacataatgatatacgccaataaacttattagtttatttttcgtatattggaacaataatttatgttttagtttcaaacacaacctatcatcatgtatgcctatgaaataacaaactaattagtgtattttttacatatcttacatagtaaacctagataacaatatatatttacccttaattcatactcatgaactctgagaaaataaaagcaaaaaaaaaaaaggagaagaataagaaaagaacaaaactagaaatagtaaaataaagaaatagatagaaatagacttatatttaccctcactaaacaactctactcactcctaattttaaaaaaaaaaaacttaaaaactac

SEQ ID NO: 362087 - DNA, 596 bp, Cannabis indica
aatcaagaaaggttaaggagtcactagctgaccaatttcctccatggatgctccaggaatataaaggcaccaacttcgtgggaagagttttcccaaagtggagttccccggttgcgagccgcacgaagggtattcgcgagccaaagtctccctctgttccaggagatgaagccctctactcccacgagaagcatggattgtcgagaagggccaaggcattctgagatacgctaaaccgagttatgcctttagcctgcggaagcctcacccatacgtgtcaagctatggacctggtgagcaagtttttttaggtacaacatcaaaggttgcctcctaggacactgttacgaaaattattaaatactacgtaagtgcacgcaatcaagtaataaactcatgcaattgaggtcgaaccacagggaattagattaattactactaaattatacttatgattctatttggaaaattaatactttttatgattcaaaaagaatgaaagtaattcaagaaacttaaataacacaagtgaaaattgatcaacatgagataatagggaggagaatcccgttgttcgtttacctaattgttaatgc

SEQ ID NO: 362088 - DNA, 712 bp, Cannabis indica
ttttaaaaaatcattaaatatatataaaaaaattctttttgtttctttttcttccgacttttcttcttcttcattcttttccaaatcatatcaccaccaccgaaaccaccttcaaactatcaccaccacccaccgccaccaccatcgcaaccaccatatcttatagaacaaacaaacaaatatacacaccacatttatcacgatatcacatctaaatctcacaaaatcaaacaaaaacccaaattaaattcaaaaacaaaaatatcagatcccaaaaaaatcaccacccctgaaatcacagaaacccgttactatcattactttttttttttcatatctgaatcagaacctttaaaatacaaaacaaataaaaacacaaaccagatctgaaattgtttacctccatggggtccgaaggtggctggatcagaaacgagcaactccgactccgactctgactccaacaagattaatgcctaagctcgcctgtaaatgctcggccggagttgggcggagagctcatgagagagagagaaagaacgagggagagagagtgcaaaagagattgaaacaacaagagagaaatagagtgatggctgagagagagagggggcggatcgagtgagatggctgagagagagagggggatcgagagagatggtgggttgctgcctacctgcaagagagagaaagagagagagggtatttgcaa

SEQ ID NO: 362089 - DNA, 534 bp, Cannabis indica
atgtgtgttaatatatatatttctcttgaattaataagtaaacacaaacactttatttgttgatttcgttgggcatgtcacttttgtgacaatttttatacttaaaatttatgatgaaaagttgaatcaccttttaatacatgttttcatttgtgttttttatcatttttttttaagttttagacaacagtctatgtgatctcctcattctcaagaaaatatatatttatatatatatacagtaaaaaactacgtgcgaggcacgtatactagattttatgctaggtattttcgactttatttgaaagtaatacaattaaaaattaaagaaaaaatattattagttattaggtgagtctaaagaaaaaatattattagtttaagaaagcttgataatttaaatatgttcttaagttaatccaaaaataaactaaaaattgatgttcaaatactttagaaaacataatttaaatgtgtgtaagataaaaaaaaaaaaattaaaaaattaatctctaaattgttgataattgaaga

SEQ ID NO: 362090 - DNA, 515 bp, Cannabis indica
ccttttactaacatagtaaactaattgttgttgctttcactcttctcgcactaatgctgcactaatcgcattctctgagatagccaagtataggagtaaagtctctccagttatttgttttgccaatactagatgtgttgatagatgtttctttatgtttgtgaaggcttcctcgcactcgtctgtccatttgaattttttgttgcctcgcaacacattgaagaatggtaggcacttgttagttgatttcaatatgaatctgtttagagcttccattcttccaattaaggcttggacttccttcggttttgttggtgatggaattcctaccacagccctaattttctctagatttgcctcaatgcccttcgcatccactacaactccctaaactttccttagaagactccaaaggaacacttcttggggttaagtttcatattgtacatcttcagtatctcaaagcactccgcaaggtcttttgtatgatcttcactttttaccgactttaccaa

SEQ ID NO: 362091 - DNA, 787 bp, Cannabis indica
aaaatatttcccactaagaaataaggttctaaacttatccatgtgatcaaactagccatccatcgcatttttcgttgttgctgagcaaaaattttaagaataacataattcacatataaatcaaataatgctcctagagtttaataaaatctccggaatttagaaattataactctaatattcatttctaaatattggggtccactaataattaaattcataaataattataaaattaaaagtaattagtgctaattgccttcactaatctaaattactaaagcggtcattacattggaagtcgctatcttcgatcacctaacgctgatgaagttgcaaggatactccacattggtgaacgacaaggttttccaggaatgttgggtagcttagattgtatgcacgggaagtggaaaaatttcccaatagctttgggaggacaatatgtgggtcgtagtggatcaccaactattattctcaaagctgtagctgactatgatctttggatatggcatgcatattttggtctaccgggatctaataatgatattaatgtgttggaggcatcccatctttttgctaatcttcctgaaggtatagctccacctgctaattatgtcattaaaggaaaatcgtacaatgtgggctactatctagctgatggtatatatccaaaatggtctactttggttcaaagtattcatgagccacggggtctaaaaaaaatatttgcaatgaaacaagaaggatgtagaaaagatgtcgaatgtgcttttggagtattgca

SEQ ID NO: 362092 - DNA, 707 bp, Cannabis indica
ttcttggaaataatttggtatcttggcacagtaacaaagaaaattctatttccttgtccacagctgaggctgagtacattgctgctggtagttgttgtactcaattgttatggttaaaacaaatgttgattgactatggatttgaattgggtgttttaactatctttcgtgataacactagtgccataaaatatttccaaaaatcatgttcagcattttagaacaaagcacattgatataagccatcactttatcaaggaacttgttgaagataaatctttgcaattagaatatgttgatacttaaaaacaataagctgacattttcactaaggccctagactggagtttgcattgtctaatctctcttgtttttgtttccgtacaatattattaaattattctttccttgcatctaatcttctttcattctaatttgacaagtcatgtttatgcttttagattataattagttaggatctcattcttatcatactttttgaggttgagttaaaagtttcatgttactttttatatgtgtctaggattacataatgttcttatacagagttgagcgtattttatttcagttacttatcaggccccttgttggaatagagctacccatactgaggtgtgaacgccatcttttgagtaagctgaaacattgtaattaacaattatgatgaggatgcactaccatagaaa

SEQ ID NO: 362093 - DNA, 483 bp, Cannabis indica
aatttagaaaaaattcctaggtggatgacctttaatggaattttaggatttgtatttttataccattttgcggtattggggactgcacttagtcttagcaactaagttgcctacgtatccttttataggaatcaagtcaaacgtagttccaatagtgttaaaatattttgtatcttcgataactttgtggagaattaactcactttgatattttgaggtaaatgacctcatttgggatttttaaggtgtatgacctcatttagaatttttatagaggttaatgacctcatttgaattttgctgaggtgaatgacctctttgagaattttagaagttgcgattgtacttaatcttggcaattaggttgcctacgtatcattttgaaaggaatcaaatcgaacgtagttcatagcattttttgtgatgctttgataattaagaggtgaatgacctcttttttgggatgccatttaatttgttatg

SEQ ID NO: 362094 - DNA, 639 bp, Cannabis indica
ctcttcttgagtataagtgtgaacttctaaattatggatgagggattcttggaacatcaatatttatctaacttattgaatcactcatgcatgtgtatatacataccaaagtgtaaaattttatgtaatatgaacatatatacatattaatcataatataaatttcatttccaataataatggtactccaataccatatatttattttattctcgttgtatgaccttaattttcatattaaatgatcataatatctataattcttgatgcatatgatgtacttcaggacttctcatctaatacttatgaacaaactatatacatttaatatttctcaatacacaagaaataaaagttttctcttcaattatttataatatagttaaaaaaatttcaagagtctatcacaacgtatagtttactaatttatattacatagacagttttacatgttcttcaactaataatttacttacatgtctttctttcatactaagacatgtattaaatttttctagaattttttagtgaggtatattttacattctcaatatattaggagctctaaataaataactttttgttgcaatatttatgtatttatgcgattcttataaatcctcataaaatatattccag

SEQ ID NO: 362095 - DNA, 629 bp, Cannabis indica
aggatctcacagtcgtaatttttaaccaattctaaccaacgcctcggtctcatattcaaatctttctgagtaaagaaatatttgagacttttatcatcagtataaatttcacatctctctccgtagagataatgccgccaaatcttcaaagcaaatactactacggcaagctctaagtcatgagtcgggtaccgctgctcatattctttcaactgacgagaagcatacgcaataacctgatcggcctgcatcaatacacacactagaccctgtctggatgcatcacaatacaccacaaatttctctttatcagaaggtagggctaacactagagctgtaattaatctctgcttcagctcttggaagcttgcgtcacacttatctatccacaggaaatgctgattctttttagcaagctcggttaagggtgttaaaattttagcgaacccttccacaaaccgacgataatatcaagccagacccaagaaccttctaacttctgtcactgttttcggtctgggccaatccctaacagattctatcttttccggatccactttgataccatctttgctaacaatgtgcccaaggaaggcaacctgagatagtcaaaattcgcacttcttgaa

SEQ ID NO: 362096 - DNA, 555 bp, Cannabis indica
gctcttcgtatcagcacagtggcttgccgactacgatctacgatcttcgatttctgcatggtgagcccttaatgcctccatatctttgtccctccactcggtgaacatacgcctctgttcgtcaaacgtgaggtatactgcggcacataattcctcctgatcgtgatgcagggtattgttgtgaccctgcatgagtccaagcgcagcacggaggttttacaattcggttgcgtctccgatggtcgtctgggcgttgatgcctggtggaacagtcatgttatgaatgtcctgactctgtgcggaacctttgtttccggtctcttgcacaccaggcacagttttagtaacaggagttgttccatcattcaccacgcttcccgtttgtccaggattgacagcgggtggaaccgtcgaactccatggatcctgcaacattggatccagcgtctgtgagtttgctgggtcggacaggcctctacgagtttgcaccatagtgtcgaaagagcgatttgtgattcttccctcaatgaaagcaccaaaatgttgacttcgctt

SEQ ID NO: 362097 - DNA, 624 bp, Cannabis indica
tggaaaaaagaaacgtcaaaaaatgacatcgtaagtggctgcatgcgcccccacgcgccgctgcggagagtgggcttcgcagctggacttcatcttcaaccttcagccgggttgagcagcgggtcaagagacccggttcgtctagattcgggtctggtcatttttctggcccaaaacatgacgaaaacacacgatttttggtggattttgttcgggacgaaatttcttatcaatatatggtattaattttgggtataaatggctaaaagagtagatttcatggaagaaaataatccgaaattgaagagcataaaaaacttgtttataataccaatctcgatcaaatcacaaaataaatcaattaagaacattgataaacaattgataataagatattaataatcaatttcatatcaaaaacaataaaatcaaaaaacacaaaatataatttcataaagaaatatataaaccctaaaagtttaatcttaaaattctcctaatttactcaataattttatgcaagtaatatatcaaaagaaaaagaatttaataaggaataaaatccctaaacttttaagattgaaaaacaaaaaattcaacataaaataataacgaaattaatat

SEQ ID NO: 362098 - DNA, 508 bp, Cannabis indica
agacttcggtcatgctcgccacttctcgctggttatacctttaagcgaggtttaagacttcgaacgagtccctcagtgacatctcagctttctgtggaaaatctgagtatacgtgtccctttagtgggggtctggtctcaagtttctaggtgagagaaatctcactataacaggtaacaatgtcaagaaaatgactgacatcaaggaatggcttgatactcaactcaaaatgaaggatttgggtgaagctacttctgttcttggtattcagatcattagaaactggaagaacagatcccatgctccctctcaaacaacttacattcataagatgttagagagattctcagtgacaaatactaaaggggcacagatgccttccagatttggtatctgtctatctaaggaatagtctcctactgattcctaagagatagaggacatgagaagggttctttatgcttcagcaatcaggagtctaatgtatgcaatgttatgcactagacct

SEQ ID NO: 362099 - DNA, 579 bp, Cannabis indica
tggcgagaaatgtgagatatacactaatcacaatagtctgaaatacttctttacccagagagatttgaatatgagatagagacgctggctggagttggtgaaggattatgactgtgaaatcctttatcaccatggtaaagccaacgtggttgctgatgccttgagcagaaagggtcagagtcagttaagtactgtgaagtaaatttccaacagctatcaaatgagatgacccgagctaagattgagttagttgtgaggcaattggctaatattaccctacaatacactctttttagagcgaataagagaaagtacaaatgcaagatccagagttggtaaaaagtcgagatagggtttcggctgggaaggctagtgatttctcattggatgtaacgggaatgttacgattcggagatcgtgtttgtgtgtctatggatgatggtattaaaagggagatcatggatgagtctcatacgtctctttactaagttcatccagggtcagcaaaggtgtaccaagacctgaaagccatgttctggtggccaggcatgaaaagtgacatcgctgagtatgttgcta

SEQ ID NO: 362100 - DNA, 564 bp, Cannabis indica
gcaacaaaataaagcttcaagctcagaaacaagacttgccatgtgagagcaaagcttgagcctataagctcaaaccttgaacaactctcaccacaagtccccaaatcaattaaaaacaacctaaatcagcataatacatcactagaaaacaaacccaatcacaaacaataaccacagtagttaaaacaccatttcaccattaaaacccaaagttttgagttcaaactccaaacttggataaaaccaactaacaaccacaaaacctgcttaaatctccatatctaaacacaatttaaactttagaaatcaacaataaacataaacagtagctacaacatcaaaaacaccaagcatgcaaacattacttccttaaactacaagaaactaaaaagaaggtgcaagagctataccttggcttggatttactacacaagtagctgagaaagattgaatttctgtagaaaaatccaaccctaacagcccaagaaaaccgaaagagagagagaccttgaaagagagagaattttccaaacttttctaattttcctatttttgaataaatga

SEQ ID NO: 362101 - DNA, 892 bp, Cannabis indica
tttttcaatagtgattttagaaaaaaaaattgtaacttgtgagaagttacatcctttgagaatttaaagtgataattatctcattttatgagataaaaaaaagtgaactatgagagttacacttttattggacttgcattgtcatagcaagaacaaatggtggatcaaaagtggatccaaaaataaagtgaatcaaagataacaaaatggggaaagtaattttaaaatcttaaataattaaagttgtgaacaaaattgatgagaattttgttaactttggtataattttaagctaatctcaatgaggagataaccttaaaattatgagtaaaaataatcacattattttatgagtagtaatgtgagtttgatattttagttttattgagaaaactaaaaatgtcaaatggtatttttaaggtgaccttaaagagtcatttcaagagaaaatacacaaaagtgatattttatgtatactttatgctagaaatgtgggggtgagccacaaatttaattaaaatgtgttgagacattattaattaatttatttgattttgaactcaaattctaaatcaaatttggctatgtgcatatgtgaaaattttaacatatttggtgtcaaattttagtgaaaataatttcaaaaaggaaattacatttaagagaaagataaagtggtcttttctattttaaaatcaagatattttcttgataatgaaatgtaaaagtgtgggggtgcatactccaatatgagaaagttaagacatacttggtgtctaaaactaaaatgtgtatttttaagacatgcttagtgtcttaaaataaagtgtaatttagatatgttttgttgacttcacttttagccaaccacaatgaatctattttataagcg

SEQ ID NO: 362102 - DNA, 499 bp, Cannabis indica
ctagaactggaggaaaaagaaaaaataataaagacactgaggggcgccatagacgttttcgcgtggtgtcaagaagacatgaccgacataagtccacatgtcataacccacatccgtaatgttaatccggacatgccaccggtccagcagaagtgacgccccctcgacttagtgaaggctgaagccttagaaaatgaggtggacaaactactaacgagtggcatgattcgggatgtgtactacccagaatggctagccattccggtactggtgccaaagcccaacggaacatggcgggcttgtatagactttaccgatctaaacaaagcctgcccaaaagattatttcccgttgccaaggatcgaccaaatggtggacgccacctctagattcaagctcctatcctttacggacgcgtacgcggttacaaccaaattaagatgcacataccagatcaagagtgcactagcttaggaccgataagggggtatactgctac

SEQ ID NO: 362103 - DNA, 665 bp, Cannabis indica
aagcccttaaaactttacctgtctaggttgaaaaaactggcccagagtacactacagagtttagtgcaatatgttggcgtcacttcaagtctttcctcccccatgagtgggatttaatcaatcatggggatctgggggaaattcttacaaggagcttgtttcacagtctttcggtaaatttccttacttttatttgctcacttctcttctttttttttcttcaaaatacttatgtatttttgttggttggtttccaaacatctttcatttctttttttgcccaacagcgaggcatggcgaagatcaagtacctggagggtgagatctagaacttgataggccagtgcgagatggtgactaaacaatggaataatgcccaacttgatattacttgccttaccaaagatgccgaaaagatgaagaagagccttgaggccaagcttgaagcaaccgagaaggaggcaaaggacaagaccgatgaatgtcagaaactcaaaggggaactcaatgcagctaaggtagcgcttgatgggaaagaggctaaaaccattgaacgatgcaactttgttggccttcgtaccatttattaggcttggatggaaaatgtgaagatgaatacgagtttcttggaagtcactgaggaggaaattcttgccttctgcgag

SEQ ID NO: 362104 - DNA, 882 bp, Cannabis indica
tagattttttagatattatttagccattctgttgggcttttggggcccaactcgcaactcacctaagaggtccacgtgtaagagtgtcctgcggaacctatagtgcaatacttggctagcaggattgtttgaccatgatgttgtcccctagcctggccggctagggggtggctggccaactcgtgatagtgagttggtctgtcacttgatccccgtttaagtgtcggggtctttgttggctcggatactgatttggccttccttttagtgagttgtactaccacatggcacaagtttcatccacataagcatgccacatcatggggacaaaaattggagtaacaaatataatttcctcatttagttaaatgtcacaaaaaattatctaatattttagtatcttgaattaaatcaatttaaatattacttttcaatttaattaaatatatagaaaaaatataaaatagtttacttagaaattaattatctagaatttatttcataaactaagtgttgattttctagctataatatgttttaatctatttattataattaatcattaatagaattatataatttaagttgatctaaaattaaataagaattaattttcaaactttaaattttgaaattctaacattttaaaaaaaatgttttttgaaagataaataaataattattaaaataaaataaaatatattctaaaaatattctattttaagttgttctaaaattaataaattttcaacttaaatataattttttatttaattaatatataaaataattatttaagtatcttgaatacaattcaacttaataaatgattttttatttaattaaatatcaaaaaatttgaattagtttactagaaaataa

SEQ ID NO: 362105 - DNA, 644 bp, Cannabis indica
gttgcagggttgcttttgagagtatctttatacattcggctctcatcaaaggttacatccctgcttgtgaagtacttttgatgattcccttcttcaatactccacaatctgtaaccttttactccatctggatagccaagaaaaatacattttcttgctcttggttctagtttatcttgcctaatgtgagcaaaggcaacaaaggcaacacaaccaaatactctcaagtgatcatagttgacattcttccctgtccaagcttctatgggggttttaaactgaattgcagatgagggacatctgtttattaagtagcaggctgtgttaacagcctctccccaaaaattctttggtaatccagcttgtattaacatgcatctcaccctctccaaaatggttctattcatcatctctgctaaaccattttgttgcgggtttttgggaactgttttgtgtcttcttatgccaactttcctacaaaaatctgaaaatacatctgaacataactccattccattgtcagttctcaaattctattataaatatttacttagaaaaataattctattatataataaaaataaaattatattatctaattccatattatgattgataattttatttatcaaaagataaaactc

SEQ ID NO: 362106 - DNA, 541 bp, Cannabis indica
tgagttgcaagctcggcttcatgatctgtccccttttgccttaagacctgtagttccgtatagctaccttcgtgtcgtacccttcgaagttttcttcgtagtcttcgtcgttcacctcatcttgctcatcagagcccacattcacacttgaggctacttcttcgccctctgggttttgagcatcctaaagaggacaggggtgacgtgttttgttacgagtttccaccattgttaatcttacttttcttctgactgttttctatctgacaacgcttccttcaagtctcaatgaaagctccaaaatgttgaccgaggttttcgataaccaattaaatagtagaatgagaagaactatagaaagtttaatgcaagtgatttttacgtggttggggcattaatgagccttagtccacgagtcctttttatttatgagagtgtttttacagagaatgttcttggtgaatctctctctctctctctcttctttactctctttgattccttaattaatcgatcgacccttttccattctctctatgga

SEQ ID NO: 362107 - DNA, 944 bp, Cannabis indica
attgtcgactgaatgtcgataggatgtcgatattttgtcgacataattgaattgtgttggatgtttgataatgtcgatatcatatcgacattcagtcgacaatttcagcacacaattccggtgcctttattgtgttggatgtttgataatgtcgatatcataatgtcgatattatgtcgaccatttgttaaattttttggcagtaatattggtttgttttttgttttttcagatggctcctagactcataattccagcacccgagcattttactggccgcgtgacatatagaggcaccggaatttttgcaaaaatcaaagctcggtttgaggagtacaacctaaataacacggcgaaggaaagccgtttcggcaacttttggaatgccgttccccttacattctcctcggtgttatttcaccagctgatgctgcacaaaatgaaggttgatgctcaggaggagttgaggatgcggttttacattggtcggaaggagctcagattcagagtgcttgagtttgcactcattacaggcctggacttctccaccgggccaacagaagaggagaaggctgcgcaggttgctcgctcaggctcagaccgattgatcaacaaatatttcaaccggtctggtagtgtgaagacagaagcactccaagataggttcacaaactgtcagaacccggaagacttgtacaagctcggcttgtgcttgtttgtggagtcagtgcttctggggcgcgaggctaacgcgctgattactcctgacatacttagatatgtcgaagacctcgagttcttcttccggattccttgggggaagcactcatttgccagactcatgcactcgcttcaaaaagatatgttgaaacagaaggccaactacgagaagaagctgagttcggatgttcagcacgagtgcaaatacacagcatatggcttcg

SEQ ID NO: 362108 - DNA, 913 bp, Cannabis indica
gctaaggcaccaaaagcttctccttctctcttccttcgtgcaagccaaaccagcatgcttgagggtttctcttcacccatttttcttcattttcaagctaaatcttatcccaaatcaacctagaggagttttgaggtaagttccttactccttggattgaaaactctaagttttgagttggttttgaggtagggttttgtatttctgtggctgtagggattagactaagattggggtgtgtttagggtaggtttttgagtatgttggaaatggctttaagtattttctatggctgcttgattgagttttgtttgttgaagctaaagttgagttttcttaactttaatgtgtgaatttgattcaatgattgaattgttgtgttttgaagcttggaatatgttgtattatggttattatactgttctgtgaagtttggaacaattggttaggtttggaggaagttttgggactttgaagagctgaaatttttgagtttctgctgtagtgaaccggaattctggatggtacagggctgcaccaaccagaattctagatggtcaatttttaagaatccctaattttcgtattttagccataacttttcactcaggtgtccgttttagacattctatacatcgtttcgaagcttatgaagagctctacagtatgagacatagattagagctaaaagatttattttattttagtgtgttttcaccataatatttgatagaaaaccctaggttattttatgcgggttttagacagtgttttggaatagacccttattgttttactttggtcgtgacataggactcgagattgtcaagcatcgttccactcaggtggatccacacactttagttctgaattgagataagaaaagtggtaagcaccgtatgtggctaaatgt

SEQ ID NO: 362109 - DNA, 456 bp, Cannabis indica
tcaaggaaaatttgctaagaaaaggcttggtctgtttcccctggtgctactgatgaacctactgctacatctgcctccacttctgcttctacaaaaatgactgaattcaacttgcgtttgggaagaatggagacaagtcaagccttacatcttagaaggatggacaacatcatgaaattcttccgatccaatgatgatgaataagtggtccatttttttatcttttgtctttttatttatgtgttttgaactattatgaccttgttcatatttttttattctctttggctccttgatagacaaaaagggggatagtatttagtattttttttttggattgtttgttacaactctgaactcttattttaggagaagttgttttatttatggtttgtgcacttttcagtttaaaaagtcgctttgtttgtggtttgtgcactgtttcgtttaaaagtt

SEQ ID NO: 362110 - DNA, 811 bp, Cannabis indica
cgaatcatgccactcgttaatagcttgtccacctctttctctaaggcttcgaccttcactgagtcgaggggacgccgtttctgctaaaccggcggcatgtccgggttgacattgaggacatgggtgatgacgtgggcaattatgccagtcatgtcttcttggcaccatgcgaaaacgccaatgacacccttcagtgtctttattatcttttctttttcctccggttctaggctctttcctagccggagtactttggtggagtcgaggtcgcacactgacacttcctcgacgtcctccattgattctacaattttttcggatcccacacgggaatcgaactcatcttcttctgccatctttggctcaatagtttctcggaccatcagcacgggtaggtgggcagcaacgttatagcactgcctagcctccccttgatttcccctcacagtccctatcccagcttcctgggttgggaatttcaggcacaagtgccgtattggcgtgactgcaccaaagtccaccaaggtcggtcggccgaggattgcgttataagctgttgggcaatccaccaccacaaacgtgtagtacttaaaggtgctctgggggtgtgtctgggcacaaggtgactggaagcctcacctttcccattgggataagtggttgttccattgaaccctgtgagttgggaaccacttggtgaaaaggtctcggtccgttaggcctattgcagtgtaaggcctctttgaacagcaaattcacggaactcccgtgtcgatcaagaccctggccacgatctattggcaatgggggt

SEQ ID NO: 362111 - DNA, 553 bp, Cannabis indica
tttaagtaaacatgactattttttttagtttaatttacagttttttttttttcaaaataattttatatttttattgaatttttaattattttctttatttattaagatatgaatttataaatataaataagtttgattttttattcttcaaaatatcttagtttatttaaataatttattagattgtcaataatttttgtttgattttttaagatacgtgtttataaataaaataaaatttaaaaatattttttaagaataatataatcttttttgagtaaaattaacattttttaattaatttaatatttttgtcaagtttttttaataattttaattattttttcaaaattaaaagaatattataattgccaaaaaatagaatatcataatttttaaaattattttttatataaaagggacaaaatttcatattaatcaaagtttagagagtaaaaatgctaatttttaacagtaaagatgacagaacctaacagaaagggcataattatgtaaattttatattttagggagaatttttaacaagccgtat

SEQ ID NO: 362112 - DNA, 484 bp, Cannabis indica
gcagagattgacaatcgtagccgacaagctactgtgctgaaacaaaagcttaccaaactgtcaggcaacaacccccaaatgtcatccccctgagtgaaacaaacgaagatccagcgatgaatacttcccagactataaagggtcagccgccaaatctccggtcacaggttccgcctgtgggccaagtagtaggtgggcataccttgtctagtaattcttcaggagaagtcgtacccgatggttccaaccaggccaacgatgtcgttccacctgtcaaccaagttaatcaaccactgagatagccaggcgtttctgtattcgaaaggttgggggcgactcatgatctcagaaatgatctgaatagaaggagaggagtagaagatcaacctggcacgacgatcgtacagcccggaacccgtgctcaaattcccgctcaaaaagatactggtgtgactcaaattggccaaaatgtcgaacaggttag

SEQ ID NO: 362113 - DNA, 629 bp, Cannabis indica
attcattccgtgggtgtaagggcccaatggaggcttgaagcgaggacgttacaaattatccatgaaattgttggatttgataacatcccacgaaaaataagtgcggttaatatttgaaaatcacacagttgtgattggtccgcttttactgggtcaatgtaaacgtgtattaaatacattgaaaatcgtatcgttctgggacatctttttgggaacatagcaacaataaccctggtagcgagctagagctttttctacatctttccaaggttaataatgtaagtcttgtcgcttctgcgcttgaagacataatgctccatttgacaactgtagttcttgacgacaaggtgaacttcaatgaccaacatcatttgaatgtctaattaataaatatattaaatgacaatattatttaataattaatttttagttattaaataataagaattgccaaattggaaaattggcatttttgagaaaatgggatggaaaaatgacaaaatggcaaaattgcaaagtgggacccaatccaatacccatggccggccacttagtgtagtttttaccatttatttttctattattttaatgctaattaaatctaacctaaacctaggtggttacctata

SEQ ID NO: 362114 - DNA, 536 bp, Cannabis indica
tcaaataagcttcaacattggcatcataccaccttcggccagttaaaagaacagattaaagactctcacaaacatgttgcagcacttcacaattcaagccgaagtgattctgaccatctacaagcagtccaaaattctgagcaaattcttgatgagttactagccaaagaggaggattattggcatcaacgatctcgcatttcatggttgcaatcaggagattcaaaaacaaaattcttccatcaacatgctagtaccaggaagaaaaataaccacatccgcaagctcactgatgctaatggtaatgttcaaacaggttctcaagctcttttgactattatttctgattattaccaagatcttttcacaagtcatggagtagatcaagaatcaatggacattatcatagataaaattccatctgttattgataatgcttcaaggatttcactatctagcccgttcacagctactgatgttcacaatgcactcaaaaccatgagtgatgacaagagtcctggtcttgatggtttatc

SEQ ID NO: 362115 - DNA, 603 bp, Cannabis indica
ctttttgatcaacttcaggggaagacggtcttttcaaagattgatctctgatcgagctatcatcacctgagaatatgagaggaggacattccaaagacggctttccgtactaggtatggacattatgaatttctggttatgtcgtttggactaaccaatgctcctacagaattcatggacttgatgaatagggtattcaagggttttctcaatatctacgtgattgtgtttatcgatgacatccttgtgtactctcaatcagcagaggagcatgagttacatctctgaatggttctgcaacggcttcgagaacacaagctttatgccaaattcaagaaatgtgaattctggttatctcaggtgtcctttctagggcatattgttagcaaggatgggatcaaggtggatccaggaaagatagaatccgtcagggattggccgagaccgaaaatagtgacagaagtcagaagcttcttgggtctagctggttattatcgtcggtttgtagaaaggttttctaaaatctcaacacccttaaccgagctcaccaaaaagaatcagcaatttatatggtcagacaaatgtgaggctagctttcaagag

SEQ ID NO: 362116 - DNA, 643 bp, Cannabis indica
acctatctgggtctgcaatattatgggccgaaagaagactgccattttaggttttcttaaggaaaaattacaaaagcgtactcaagggtgggaaggtcgtttactctcttgtgcaaggaaggaggtccttctcaaaacggttgcatacgctactcctagctatgcaatgagtgtctttctgcttcttctggaaacttgtaaggctctagaaggtattatggctaaattctggtggaaaacaggctcttcgtctacaaggagtattagttggatgagctgggggcgcatgtgtagacacaaacatgcgggtggactaggcttccgaagcctttatgattttaatttgtctctactgggaagtggcggctccttacaaatgaatcttttctgattggaaaggtgtttaaggctcgttactatccaaatggaacatttttggatgctagcttgggtaataatcccagctttgtttggtggagtgtgcatgaggcgcagtctattgttcgggtgggtgctcaaaggacggtggagatggttttacgatctcagttttacatgacccttggttaccttgccctgtagatccgtatgtgcattcggaccaccctgggttacaagacaaaacagttcacagtctctttcg

SEQ ID NO: 362117 - DNA, 500 bp, Cannabis indica
ccgaccgcagtacatgtattcgcagaacctacttcactacggatggatatttaagatattcaaactcctctaacatggttattaataattaattaaaagatagaaaaattatatatacctctagctcaacacttggaaaaaatcgtgttctcccttcaatttacatccttgatgcttaaccacaaaacctacaattaaatacaattaaaaagaatgttaataataacactggccataaatagataacatgattgtattttaactacaaggcaactaactactatactgataacatgatttcaatttggtgccttcaaatcattcaacacgagagaaatgaacttatttggaagataagttcaaaagtgttagtagagaagtaatcaaatgaaaacccataaaccaacacaaataacagagaagtgacatagcaagtgaagaactgaaatggtgagctattattgaatgaaaaggaaaaaaggagaccaagtctctacaag

SEQ ID NO: 362118 - DNA, 531 bp, Cannabis indica
gtatagtttagtagtacttaatctaattctctgtggttcgacctcacttgcgtgagatactacttgattgcgtatacttgcgtagtaatcataaaattcgtaacagccagctcctgttccctcctacaaaggtacttctggtaccagtcctccgccgaagtgattatgtccacccagagcgccctttccgcggtaggagttcgaacattcgggcagatgaccttggaaagattaaagtcatccaccgaatgattctcggaaatcagcttggccttccggcagttctccgttgtgaccaagtccccgacgttgagggctttcttatcgtaagtggagaaggtcttggcccgttggaggaacagctgagtaggcgcggtccgaaggaagggagcgatcctgacccactccgtgagaagctttgggcggtccatggcttggaagccggaggaaaagaagaagcggtggcggtactccttcacgtgcttctgataattataagggaccgggacctcatttaaaggatgggaccgg

SEQ ID NO: 362119 - DNA, 666 bp, Cannabis indica
aatgcaatgaaggcttattcttgtgttgctctccctttgttttttgatctccttggactctggaagaataggtcacatgctcctgatttaggttatgaccctacagctcctctaagaattgtggagattagtggtctcccgtctcagcagaaaaagtgagttgtttcttttaagtttattttatgttgttttttagttgttaaactgtgtttttcctttttctgtttttttagtgattgtggagcatttgtggctgcatttgccgagttcttcatccatggaaaagatgttcctgcagattttgacatcgaagtttatcgtactcgacttgctgcccttttcttctcatatggccaaagaaaaattgatgaaagcattgatagcgaggatgagaagcaaagcaagtcttctaaggcttctaaattgaaaaagtagggtcttttaatttagtgacaatttggtgttattggttgaatctattatcagacaatagttagtgattttatgtttctaggtattatatttggttttatactctggatctggttttaaacttttaggatatttgacattaatccttataatatgtttattctatatgtttgtatcagcagaagttgtatgtatttctaattgttcaagtttttatatacagtcgcacaacta

SEQ ID NO: 362120 - DNA, 505 bp, Cannabis indica
aaacaaagcctaggagcctgatcctatgatctaatgctctctctctctaattttttcccgatggcggtggacaggcacacacatgatgagcatcaccggagctcaaccctcagcattgtcgtggtcccgttcccattctagttttgtgcctctctcacttggtaagtttagaagagggggtctattatgggcccgtttggcacagtttttggaaaagctaaaagttactttttgaaaaatctataataaaaatgtgtttggcaaacaatcaaaaaataactttttgaagaatttttggagaagctacagctaaaagctgaagctgctccaacccaacttttagaaaaaagttgttttgattaaaagactaaaataattttttttgtactaaaaccatatttatgttggaaattattttaccaggatcttagatctactcacaagtatgttgattaacaccctaaatatgaacttctaaaacgattataaattaaacacatataaa

SEQ ID NO: 362121 - DNA, 987 bp, Cannabis indica
attgttgttgtgttcagaggtttaattatggtttattatgttgatttatgcttgaattactggttgttatgtcgtttgagcaagctttagagttttgaactcaagcttggctcattaatggaaagttttgattctgtgtatgggtggatgttttgttaccttgaatatgttctctagagtgtatagaccaggtctggaaagtttggtttgaattggggttgatttgtcgaattatggaatttttggtctttcctgcactgaaccagaattgcggtttagagaggcctgtaggaaccggaattccggttggcttccaggaatttttcccagaaccagaattccagttggggaaccggtctaccggttggggcaattttaggaaccctagtttttcccatttttgagttgtttagggtattgccatgttattcatcgatagggaaacttttagtttcaagtttaagtcccctggaagtgatttagcgtgtcgcttatcagtgttgtgattgatgtgatttaggagcctataattcgccgagcagattgttcccttcaagttgaccgacacacctgaattcggaatcgaggtaagattagtataacagtatgcatatgtatttacatgtttagcgtgcatgttagtaagcctgttagattacattagatatgtatgttggctttcgtgctatttgacagtatcacatcggtacgactagagtatgactagcgtaccgagtataggttgatattatggtcgatagcaccgtactatttgacagtatcacatcggtacgactagagtatgactagcgtaccgagtataggctgatacagtatcacatcggtacggctagagtatgactagtgtatagagtataggctgatattatggtcaatggtaccgtcgtacaaatgttctagactcagtaccgtgtgggacacggggattaggattatggtcaggggtatgggtgtctgatcataatc

SEQ ID NO: 362122 - DNA, 624 bp, Cannabis indica
actaagaatttctccattttcgactaaaaaaaaaaagatgagaaaaccagagaatgagagaaccacttatgaacctctctaatgtccaatatatatatacatacatatatatgtatgtgtgtatatgtagtcggcaatatatcacagcttctgtacacgttgagcccaggaaatttagatgcaagatttaaaatttgatacagttggcaatcaaagtagaattagaggcacaagcataatatcctatcagaaaaaaaaagtattatgcagaaatcaatacataaaactccaagaaaatggacttacctgatcatataaaggtttacgaacatatggtgattcactttcaaggtatttatatacaggttctcctagtgagttataacttataagccttagtttctttacttgatggactcaaaggaggtggatctctcaaactaagtccattcaacaaatcagtcagttttctcttttgtcctttagaatctttatgcccacttccaccatgttcggcactataatcatcatcatcttgttctagttttctcttttttcctttagactcctgtacatttccaccgtgttgggtacaatcatcatcatcatcatcaacttgttcca

SEQ ID NO: 362123 - DNA, 1121 bp, Cannabis indica
ggttcgggtccacttttgggtttgggacttggttcaggtccaggtgttggttcgggtcctcgtcagggttcgggtctagggctgggtcccaaatccaaaaactgactacgggttttttctaagcccatggtccaggttcggatcccaatctctggtcctagtgtggttccattttgggtgccgggtcacgagctgggtcctaggttcaagttcgggtctaggtcaggtactaggtctcggtcctagttctgttttccatgtccctattttgattttggtcaaggtcccagttattttgtgggtttgggtcccggtctaggttcgagttcgagtcctagtctcggttagggtttaggtctctatctgggttttgatctgtgattgggtttgggtttagatcctggtcctggtcctagtcctagttcggttcttgttcaatttgcaattcttagtttgagtttaagtttgaattcggatcggagttcgagtcctggtctgagttttggttcgggtctagatttcagtttaggtccaaatcaggctccggatgtgggttcacgtcctgggtctgggtctatgttggatctgagtcccaagttccaatccagatttgagtctggattcagttcttggtataagtccttagttcttatccatgtattggttcgagtttgggttcgggtccaggtttagctttgggtctgattcaaggtgtgggtttgagttcgggtccgagtctgtgaccaggtttttgtccaggtcttgaccccgatctgggtctaggctcgggtctaggtccaagttctggtcccgagtgcgggtccaagtttgggtctgggtcaggaactgggtcgagatctaggtccaacatttcgatcccagtctgggtcttggtccgagtgcaggtaattatctggatccctatctaggtccaagtttgtgtttgggatcaggtcccagatttaggtgcaggtccgggtctcaattccggtctgggtacacgatcgtgtctgggcccgagttccagtctcagtttgggtctgaggctagtctgtgttcggttctaggtctgggtacgggtcctggtcatagtcttagtcttgttctagggtcttggttcg

SEQ ID NO: 362124 - DNA, 739 bp, Cannabis indica
ggacctggatgggggacctggacaagggactcgggcttcgaaactagcaccgagacccaggacttgaccccgaaactggacctgggaccagaagtggaactacactaggacccaagactgggatcctgatctggacccagggcttggacctgacccgtagtctatgtttggatttgggatccatacccgaactcaaacccagacccggactcaaatccaaacccagacccaaacctagacccgtaccccgtgacttgaaactggaagtggaaccgaaagcgcactgggacatggaaaataagaccaggggactaggacccaaactcagacctggaccaggatgtggacccaaatcaaatctcggattatgactaaggaaacgaacaaaaactagacctgaacttggacccagacccaaacgcaggatttgaaccgagattggagactcagacttggacccaggtcccagacctagattgggaacccaaacccgaaattagaaccaaaattaggacccaggactgggatggggacccaacacccgaccccggtctccactactataaaaagtacaattctcgtcaatttttaagtgtcatttaaagaatttgcatcggtttaaaaaactgacgtatataccgtagtcccaaatagttttttattaacgtcgttttttaaatgacgcaaaaaacaattatcttcatttaaaaaccgacgcaaaatatacactcttcttttt

SEQ ID NO: 362125 - DNA, 695 bp, Cannabis indica
aggaatttttcaaaaattcataactcgatcaattctaacccaaatcatacaagatcttccagacctgttctatatgccccaaataaccattcaaaggcaacaaaaccacccagaactcacagaatcacaaaacaccattaaagaccaagctttgagttccaaaactcaaacttggttagaatccactaacatgcaatcaaactagatcaaacctacataattatgcataactaagcctctgaaaatgaaaacaatcaactacagcaagtaattacagattcaacatatattttcaaaattcatgctcttgaactaaaaactccaaaacttgaatccaagcaaccatcatgcatacactaactctaaactacttaaaatagcaagattaaaccttagaaaacaacaacaaatcacagcagcaagtatcacaacaattcacatgcaaccatcattttttacacattttcttcataaaatacaagagaaagagattagggactttaccaaagttgaagaatgcttagattgaaagggaaaggcttgaaaatcaaaagaaaaacccaggttcttgctgctccaaagaggccgaacaagagagagagattgagaggaaaaagcttccaattttctatttttttaaactttggaatttttgtaaaataaactaacaagtcacttaacatatatcaacctta

SEQ ID NO: 362126 - DNA, 1047 bp, Cannabis indica
acgagagatgcatctataggagtgttcaacccgatttgggagggtccatatgtcatcgaagcagtagttggagttggagtttataaattggctcgactcaacgactcgctaataaactactactggaacgtggaacatttacgaccttactactaataaataaatgatgtaactcacattactgatgtaaaattcaacttcaattatgaataaagagaatcatttatattaagtaattacaaagtgttattctttaaaaattacttaaggggcatttatgtatgattaactgcaattcatctagaaatacattatataatgcaaacccgccatttcaattttgtttttgaaattcaaaggttttcgactaaacctctttcatgaaagtggattcgaactgttataactccctgactaaacctttttgacgagagaggggtcgaatcgttataacatcttgatcaaacctttttgacgaagaatgaatcaaacaactataattttttatttaaaacctatttgacgggaaagaaaaatcaaaagttataactcgcgtataaaactgaataacaacagttctcgtgacctaagaaagtactaaacgaggcatcacaatgccttgataaaagtacttaaacctagaatatggatagataatataactattcatacgagcaaattaaaaatatacaaagtgatagaatcattaaagtatatttaagttttcttaaggcagattataactgctatagcgaggcagaattgacaactgctcgaaaatcaaaaaatttagtagattactaactacttaaacaggaagattacgagcaatcaaaaaatccaaaagtactgtacatttgatcaaaatatagttgtttatattgtgaataaatatgcaagcaaacacaattgtagtaagctcaaatgaaaatagtacaaagcattaagataaggaaaaaatccaatgttgggttacaaacttgtctttacaaaaataccactaggggcaaaccattaagtcatcttcctaaataaaagatgagagga

SEQ ID NO: 362127 - DNA, 511 bp, Cannabis indica
ttggccaagaacattattcaagtccccaataacacaccacgggagatcattttcttccttcaaaaccctcataagaatccaagtattgccccgcaacgaccaattaggttctccatataaccccgtaaggtgccagatatgagagctatcatgccttaccaccatatctatatgattttgtgaatacccgaccatctcagcatcctccttatccttccataatattgctcaaccacccgtcccctgagcatcaatcgaaaaaagaccctcatatccaagttgtgatgctagaagctccagccgagctttcaaacataacgtctcataaagaaaaataaacatgggcgatcttttgataaatcatatctttaaggaattgaatagcccctaggttcccaagcccacgacaattctaacttagagtactcataatgtctggcgagcccgctcggccgagcccgccaaagtgatgttttttgaaacagtagcaagagcatcccccatacacaca

SEQ ID NO: 362128 - DNA, 724 bp, Cannabis indica
ttgagtttggaaacgttttggttgggggtttgattgttgttggttttctgggtaaaaccggctaaccggttttacactgcttgtaaaaccggttacccggattttgcagcagggggtgaaaacaagttttttcagctagtcgtttcgtgttagtttcaggttttcaggcagtttattccctgctagtttgggatatttttgtattaagttacagtaggttaggtttggttttaaaacctttgtcccggttgtgatttagcggatcacttaattgttttggaatcgatgtgatttaggagcctataattcgctgagcagttgttccactcaggttgaccggcacacctgaattcagaattaaggtaagattagtataatatcatgcatatgttattacatgtttagcgtacatgtgttattgcctgttagattacattgatagcaataatagtatacatagagttgtactgattattgataaatgtatgttggctagaatactgatcgatgctgtcacatcaatatggctagagtatgactagcatattgagtataggctaagattatggtcgatagtattgtcttatgaacgttctagactcgataccgtgtgggacacggggattagggttatgatcgggtgtatgggcactaggttataactcgggttattagtatgttttatgttatgcttttcttactgagtctgtcgactcacagagct

SEQ ID NO: 362129 - DNA, 405 bp, Cannabis indica
aatctccatctagaccctaattaattgtttagctactcatgttcattgtagcaaattcgcacattaatcttagaaaagagaagaaaacagagaagaaaatgctaaaaaccctcaaaaaatgcctccagtattggcttcgatctttttctgctgcatcgactaatagtattttggccattactctctcgatattactcggaataggacgattcaagatgttctgaaaagataaagagagatctaaaacttttatgttttgactttctctgaaatctgatcagatcatagttgaattgaaacttgaagtttcagctttattattttttttttttgcacaattttctctattttgtagttcatctttttgaaagatcttttatcttttttccatcttattcttttgat

SEQ ID NO: 362130 - DNA, 863 bp, Cannabis indica
gtaatgggttttatttagggcataaaatcccaacagttacctactcaaattagatttatgccttgaacacatgatcgttaatcttaatatatatagcatggcatagcacttacatattaacaattactaaggtaataatcctaggccattaaactgctcactttagggtaataaccctaatttcggtttctaattactcgcaaatataactaagtgccaccgcacataactctacgtgctaactactgtcgtacctaatgtcccgcaaatgtagagattccaaatcctcgggtattcctgagcaagcgtcggtagtcctagtcacacattcccgtgatttcacaaataagtttaattcaaaaattcacttacaataatcacataattagtattacatttacagattaattaacatatagagctcgaaaggagctttccaaccatatgaagaacgtcaaaaacggagtcccaagttaaaagttatggccgaaacaaaatcgagaaaaataggcattcccactaccaaacctagtcgcgacgaccaataatcctgtcgcggagacttggtttagaacacccaaaaatcccatttttaatgcctaaaaatgaccaaacacaaatctaatttcacctaagtcatacacaaacaaaaaccatgctaaaccaatgtattttcaggcattaaaaccataaaatataagccaatacataacagcttgttccaaaaatcaatataaattctccatttcacaagcttgaacaaccaacttcaaagcttcaaagaattaatcccagaattcaaggccaaacccagaaattaaccaacatcaacaaccataaaatctcacacaaatagtctagat

SEQ ID NO: 362131 - DNA, 1001 bp, Cannabis indica
ggcataaaacccaacaatatcagtaagtcaaagacccttcactttgcaactattacaagaaagtggcaaacttggtacaaaactggtttccaccccaatggaaccaaataccaaactcaacaatgacactggaactctactcacaaatcctacacaatacagaagtctcatagggaagctcatctacctcactataacaagatctggcatttcttttgcagtgaacaaacttagccaatatcttcaagccccacgggaacctcatttactagcagccaaccgcatcatttcacttaaaaggcaccccaggtcaaggacttttttttttcatacaacatcaccttcacctctcagacttcaagcctttgcagatgcggattggggagcctgcctagatacaagaagatccatattaggatattgcattttcctaggaaattccctcatctcctggaaattgaaaaagcaacaaacagtgtctcgatcatccgctgaagctaaatacagagctattgccaacaccgcttatgagctaacctggctccactccatcatcaaagaactcggcatcaacatacaacttctatccactctgttttgtgacaacaaagctgcactccacatatcagagaatcctgtttatcacgagcgcaccaaacacgtcgaaatagactgtcatctcatccgtgaaaagattaacactggtacaatcaaaacaaatcatgttccatccaaatcaaatatagcagacatcatgacgaagcctctatttccagcccacttccatgatctcatttccaagatgaatgtcaaaaatttttacactccatcttgaagggggctctttataacgtcccgcttcaagcctccattgggcctttacacccatggaatgatggctcttatacacaagtatgtcactctgtctgcttcatagactgatgactcgccctacagaccaacacgagtgttttcagcgtgctttgtcctcactcacacgc

SEQ ID NO: 362132 - DNA, 725 bp, Cannabis indica
ggttttataatttattagtttctataggcatttattataagtatttgttattaattaactatttatttgggttttaattagaataaatagtattttagtaaaattttacgtaaaaaggtgttgtatgaattcatgttttacgttaaaaatgtttgtttgagtccatgcaatatgtttgtgtgaatcaaaataataaatgcttatgtatggtgtgtcatgcaagtgaaatggacctatgtgttacgtatttttacgtaagtttctgtatgagtttagagattcatacttgaatgtattttgagtgtattgttgtgttaatgaatagtctaggatcttgttctcaacaaggaaattcatcgacgtgctcgaggtggcaagtgtggtcttaacaactgaggtaagaagagtagacatctgtgcacagggtgtatgtttatgttagaaatattttaccaggatctagatttactaacaaatatgttttattaacatcctaatatgaattctaaaacaatgaaataaacacatataaagtttaggaaaccttacattggatgcagcggaatctaatgattccttccgttcagatctctagcccttgattcctttctgtagcagagcattatcaggatcttcacagtcttacagtcttacactctttctctccttcctaagcctgattctccttcatgtttgattggatttcttcacagtcttacacacta

SEQ ID NO: 362133 - DNA, 543 bp, Cannabis indica
gtaatgtgctgagcaataatattacttgatccttcatcttctatcttgacactaatgttactcaggtccaagattattcgattgaactcatcaagatgcttcctcagatcttttgtttcatccattctcatcgtgtacaacttcttctttaggtagagtttgttagccaatgatttcttcaaataaatcgatgccaacctttcccataatcccaatgcaatgtcctcatttgacacttccctgagaacttcatctcccagactcaatagaatggcactgtgtgccttattctgaatttctttgattttcttcttatcatctccaagagcagcaagctcttctcgatcaattgcctttgatattccttgatgtactaggaatgccttcattttaatcctccatagaccaaagtcatcatttgtcccattgaacttgtcaacttcaaaccgagtggaagtcattgcagattagttcttggttcttttcttgatgttcttgattcagttctttggtgatgcccctcgactgagctctgataccatt

SEQ ID NO: 362134 - DNA, 554 bp, Cannabis indica
atcatgcatcataaccaaccacaagtataaacgtatatatattttttaaaattacgtgactttttattggagtacaattaatataagaagagacaaaataacctagtatgttctacacacttccccttgatcttcactctataacacatatattggagtttataaattggctcgactcaacgactctctaataaagaactactggaacgtagaacatttgcgaccctattgccgataaataaataatgttactcgcattactgatgtaaaatttaacttcagttatgaataaagagaatcatttatattaagtaattacaaagttttattctttaaaattacttaagggacatttatgtatgattaaccagaattcatctggaaatacatggtataatgcaaccccgccattttaaaaaaaaaattgaaatataaaggttcttgagtaaacctctttagcgaaagaggagtcaaactgttataacttcctgaccaaacctttttgatgagagaggggtcgaattgttatagcatcttgttcaaacctttttgac

SEQ ID NO: 362135 - DNA, 685 bp, Cannabis indica
gtgagctaacccgccacaggctacccaagttgcccaagaatgggaaaaggtttgcagaaatgcaagcccaaatcaatgaaaaagaggaagcgatttggcagttaagacagtagggtgctcctgcagtccctgctccagaaataccagtagctcctgcccctgctgtgatggtcgaacctgttgctgcattgaaccggatggaactctgtatgaaaggttccataagcaggcacctccagttttcttgggaggtcccgatgtaatgaaagccgagcaatggctaactatgatcactaggatcttgaacattatgggcgtcattggtaatgatagagtggcctgcgccactttccaattttaagaagacaatctggtttggtctgacacggtgtccatgattcatgacgttaccacaattacctaggagaaattccaagagctatttaatgctaagtactatatcgaggcagttagaagtgccaaaggaaaataatttactcagctgactcagaaagagaacatgagtgttactgacaaaacgattcaggttgatcgcttggcaaggttggcctcgggaattgtgccaaccgatttcagtaagaaagagaagtaccttgatgggttaaatgcaaaaatcagacacgacctaatgattaccaccaatgacagcaccacctatgttgat

SEQ ID NO: 362136 - DNA, 975 bp, Cannabis indica
gaatgaaatcatggctaaaatggattggattcatccattggatccattggatagatccaatccaatccaataaaaaaccagttaaagcattcaatggatggaaccgatccaatccaatacattcattggatcggatcagatcggatgactcaattcaattggattggatcggatggcaaaatccaatatccaataaataattggattggatcggatgggtccaaatccattggatatgatccaatgaacacccctagtagaaatcaagaagcatgcacgtatgcttagtaaagttttaatttaaattaactttgaaaaaataataataataatttaaatatataattaaatatttaaaaaataaatatataattaaatattattataatatgtatagagttttaattgtatacaagcagtcctatcgtaagagtatacaccttatatcttaatgaccacatgatctaaaattaatggttaaaaaagcttccctaccgtagggagcttatgttaagtcctaccatagtcttgctttaattatataatgagtatattttctatttttaagaaattctaaaataattcaccgtactaaaaattaatcaatgtataattctatatatatgtgtgtgcgtaactcgctattttaaaatttatttttcaaaattgtaaattattaaaaaaaattaaatatttgttattactacattatacattgtcataaaaagaaatatatatatatataaatatttctgtatatgttgaaaataaaaagagttcctacaataaaggtaaaaataatatccttacctaaaaatctccatataatttatatatctatatatctatatctatttatatctatatatatatctataatgctattgttaggctagatgatgtggcggtctctacaagctttcttataattttcttgctttcttatttttttttaatttttttagacttttgtaa

SEQ ID NO: 362137 - DNA, 615 bp, Cannabis indica
atttcactggcttatttattaagcaccacggtatcagtgaagttgaggactgataaagatattatgttatttaaatagatcacatgttgaacataatctcttatcacactactagatttattgaacatgtcgatttaatactttggtatttatgattataatgtttttattgatttaaaaataatatgattgtcatagttcaatatcaaaggttaaattagaccgatatgttgaaatgctattaaagaattatcatttttaaagtggctacaaatattttctcaatgttcaacccatgagtcattttcaaacaaaactattttgatatataatatagtatgtattaaaattaatgtagcccaagtgtgagaatgttaaaaattttatttggacttacattaacttttattagttttaataaaatgtaggttgattggatagttttttattgtgttaggtcatattgttagtaatcaatagttaataagcttaacatatatgtgtgtaaaatctagttgaagcagaattgtgaatttttctagttagctgaagcatttgatgagtagacccagtcaaactaaggttatgtagctaagtcccctccctaactctata

SEQ ID NO: 362138 - DNA, 562 bp, Cannabis indica
cagcaacccccgaactgtcatccctgggtgaaacagatgaagatccagcgatgaatacttcttagactataaatggtcaatcgccaaatctccagtcataagttctgcctgtaggccaagcagtaggtgggcagactttgtctagtaattcatcgggagaagtcatacctggtaattccaaaaacgttaatggtttcggtcagcacattagccaaaccaaccaatcactgagacaaccaggcgcttccgtattcgataggttggggacgactcatgatctcaaaaataatctaaataggaggagaggagtagacgatcagcttgacacgccgatcgtgcagcccggaacccgtgctcaaattcccgcttagaaagatactgacgtaactcagatcgctcaaaatgccaaatatgttagtccagctctgcaggcacaactggacgagttaaagaatatgttccaaggcatggccggatagagaaacaatgatctcgagttggaccgagcacgtggaacccttctcgccgagatcaatctcctggcattgcccaacaagtttaa

SEQ ID NO: 362139 - DNA, 697 bp, Cannabis indica
taatatttttagtagattttgtgtttgcttagggtattatttgattgttagagtttataattttaactcacctccatttttgttattttttatatatgatttctctcccttatatgttgttttattattttttttttataatttttattgtatttttatctctttaattttatttgtttctattttttctctagttttagtaactgatactctttattatttttgctttgtatgcttaaatcaactctgtttgttgaacaagaaataaaaaattaaccaaaatggagaatgaagttaaaagtttggtcattaagtattaatatgaatttatatgttcgaaactgaaatttaaaattaatatcatttttaaagtttaattattagacattgtgtatttttcattacattattttggaaactttaaaaacgatacaaactttatatgttcgaaactagttttttaagttagtaatatttttagattataactttttgaattgtatttttttcattatattgttgatgaaaattggttttttttttctgctactattaaaacaataattagtttattttaatgttgaagaactgatttttgaagttggtaatgttttaagattataattttttgtattatgttattgatgaagctagttttttttttaatatttttcataaaataattagtttcttttga

SEQ ID NO: 362140 - DNA, 526 bp, Cannabis indica
acaaataattcatgaaaaataaaaaatcgaccaaaaatctaatatatcaattttgtaacagtttataatgcataaccaatcatagaaaataaacttatatttttttgaggaacctaagtatatttcataattaaattaagaagtaaaataaataattcatgaaaaatataaaattaggcgaaattaaaatctactaattttccaacagtttatatctcataaataattatataaaataaatttagatttttctgagtaatctaaatatttttcctaattaatttagtaaataaaccaaataattcataataaatcaaataattgcaagaaaattatgaaattttaccaaacaccctaaaataatctgtagaatcgaaatctacaaaaaaaatatgggaaaaccacctcagatatgcccagatcatttcgtcggagaatccctcttctccggcgacggcgagcctccaattccctatacagttgcttttcacgcattattttgattggcaaagcttcctacagtgct

SEQ ID NO: 362141 - DNA, 1203 bp, Cannabis indica
cactgtgtgttgtgtaaatggggaagagtcaattttccatgttttggctcaatgctcctttgttcattcatgttggctccgatcggcgttaggttttggtgtttctgcagcaaccaattttttgactagtttatggaggtgttggcagtaggaaataaggggttggttgaagaagatgacatggttggatgggcaatttggaaggctcagaatgatattctttggaatggtaaaagttgtagtgcggctgatgttgtttggctggctcgttctactcttcgacaatggacgtgtgcccagtctaaacggctggactcgggttccctggcttccaatcgcactgacacaagagaacactggtccaaaccggctgctggatagttaaaaattaatgtggatagggcggtttttgaagacacaaatgagattggtactggttttttagcgcgcggctttaatggtcgaataattgaggcgttttccactatttcttctgtcagttgccgaccagagattgcagagattctaagcgtcaaagaggcacttggataaagaggcataacaagtcgaatgtaattttagagacgaattgtattttagttgttcaagctattcttagttcggtattcatgccttctatttttggtttatttgttcaaggttgtcaatttattttatcttctttaagtaatgtttctattggtcatgttaaatggcctgctaacaaagccgcgcactgtatgacacgtggtgcttgttattggtcaagtcatcattttactgagagcgatactcccattgctcttcaggcctttatattagcggatgtttccgtctaataaaaattattttcattcaaaaaaaaattaattttaaatcaaattagtcactgtatacattctaattattaaataggataaatagcggcataagtacccaaagttttatgtttgtaaacggcataaacccaatgtttatttttagcggcataagtatccaatgtttgtaaaactgtaattttcttcccatttcgtcagtatagactctgttttaaatttattaaaagaacatttagaagtaagtgatactacatattactatctagacccaataatcaagaatttaggccttatatgtaccctgtttaagacaataacatagtctgtactgacaaaattagagaaaaattaaagttttacaaac

SEQ ID NO: 362142 - DNA, 717 bp, Cannabis indica
cttcttcatctttgaaaccctagcccccaaaatcagccccatcaaaccccagccgactccccattcccgctccacgcacagccaaccaagctctcaattctatctttgattccctcctcgaaaacttcctcttccccacttctccaactcgcaagaccgtcactactccaccaaaaccacctcccaacctcgatcaacaaaccgccactgcagttaacaaaatcttagtcgtgcattgctcaccgccttatctgatctctggtcctagatgcgcctccgaaactaaagccgcctctcacctgcgagaaccatcacgtacgggagccatcatccgagaatccgtggtccaagagtcggagctggagtggggtcgactaggtggtttgcttggtggtgggggattcacgtaatggcttcgggtgaatggaggttactgggtagtgcgattttttctgctgggttcagtttgggtgatgagggctttgggtcagcttgctggtggcaattttggtgaacggaggtgggacgttgtgatgggagatggtgaaggtgggtcgtttgcaggtgggggagtcgctggttagtgtggttcaagtgggggtttctgggttagtgaatggaggtgcgaaggtggagggaagagcggctggggttagaaggaggaagaagaagaaagaaagaaaagaaaaaatataaaaataaattttaaattttaaa

SEQ ID NO: 362143 - DNA, 520 bp, Cannabis indica
tttttggcctctggtaagcacgggcaaaggtggagtttgtgtctgcatccgctcaggattactcgtgaccagttcagacccaaccgttggtggtccagactccttggacttggcagacttgggagtagaggggtttgcagcagtcagctcctcagaaagatcaatcaatgacctctccagaaggtctcttttccgtaaaagaggacccctcaccgcccttggacttcttggccggaggagaggcgctagagcttccgcccattctcttcctcagagcatcgagcatctgctgagacatgtctgcacagaacaaaaatagtatggttagaaaacagccatcagaaacacaaggcatgaaaatcaagaagctcaagaacaaagtaaagtaaaatgcaaggtgaccgcccgcacaaagactcagaagtccatcatcacctgacattgatcttatctcacccatgacagctttcccttttccggcaaagggggagatggctgaacatgtgaaatgggctccctt

SEQ ID NO: 362144 - DNA, 568 bp, Cannabis indica
ttaacaaatttttaaatctgaccataataggaaatatttaaaattggaaatattccaaaaaagaaatatttaaaattggaaaaattccaaattgaaaatattttaaaattggaaatatttcaatttagaaatatttaaaaaaggaaaaatgaattttgggaaacaatcccatgaaaaattggatttttggggaaaaatcccaaaaaatcgcaattttgggttgctgcccaggattgggcgtgcaacaggctgcacgcagccttcatgcgcgcgcggaggagggatgcacaccgaggaacttcagcgcctgcagcatgcctgaccgagaaaactcggtcagctacagggtgcatctgggcaaaatgcagggtgacacgggcgtgtcacgcgcgcgcggatgggttggtgaccgaggcacctgatgcgtgcgattgagcacccatgcacacccaaaatcccgattttcccaaattcgtaactttttcaattttatcggaatcgagttctgtaaaaaacaaattacttaatttttacaaggaatccaaataaaatattttcaaaaatcgaa

SEQ ID NO: 362145 - DNA, 676 bp, Cannabis indica
accatgccacacagaaagcatgtcttccagttgcactctcccgggtgatgtttcttgcaatgaggacactcagggtaagagaaaccctggcgtccacctctgccttgggttccacgaaaccgcttgctttgccctgaaccactagatgctgaggtgactttccttttttgctcaatggtggaatcatcaccatccctaccatagacaggagtaggaagagtgggggttccacaagcactcggagtccctcggggttcctgaaggaatttcacagcaccctcggctcttaaagccttttcaaccatttcagcatacgaattcgattcagtgatagtgatcactagatcatgcctaatcttcacacttaaatcggctaaatacttgtctttattactaaagtaagttggcacgatccccacggcgagcttagccagacggttaaacttagtagtatatacattaaccgacatcccctcggtttgcaccaactcagtgaactctttctacttagcactgcggaaagcttcattgtaatatttagagttaaacaactccttgaattcttcctaggtcatcactgtgacgtcccgagtgagggttatcaactcccaccacacgagagcgtcctcttggaactgaaaaatggcgcaggtcacccgatcattaccaacaactc

SEQ ID NO: 362146 - DNA, 669 bp, Cannabis indica
tttgagaactccagttcaactttttgagatctgtctttcatggaactaaaaattgaagttagaacattagttttatgcaaattaaactggatttttggttgaattttagtttcgtagtagtttttctacatttttttttatgaatttaaaacaggctctgttttgattgtattctggtcgtcttctcaggtgaagtcgtcggaattaatggtggttatctttctggttgaattttcgttttcgttgcatgggattgttgcgcgatagttgcacagaaagcatggatcctgggttggtgtgtgtaagtgttgtgtaattttttttatttgggctgtatatttgtttatttggccaaatgaatgtattttttataatattgttatttctttttttattaaaattgaaaaaaaccctaaaaataaagtgcaacatttcttttaacaatagtaaaacattataaatttcttgagaatcttatcaaagttcactacaattacaatgcagtactatttgtttttttttttaaaaaaaaaattaaaattaaaacatctcaatcatgctgacgaggagggagtgtgttatctcgcaaataccttctaaaggaaaatttgattttctatacttaaaaattttcaaaatttcttttttgaaccaatacattttacacta

SEQ ID NO: 362147 - DNA, 829 bp, Cannabis indica
ggccaaaaggtccttacagaatgaccaatttttcctggtcatctggccgcagcgagggcatacatggccgcggccaaaaggtccttacaaaatgccaattttttgggcctatctcgccgcggcgagcccatttctagccgcggcgagatgggtaacacgggatttaaaggccaatttccataattcaaaaatcaaatcccctcattctcaaccctaacctccacaccgaaaatacttctcctccaccctattttttcatctaatcccactcaaaagcccttttctctcaaatctaaccttaaatcttcatcccaaatctttctaaatcatcattcccttcatcaaacactcttttcctctaaaaatccaatcctaaatccctaaacctcacccaaatttcaaaaatcactattcatcttcttcttcctcacaaaacttcaagactttcatcaatggaggttgaataaagatggattctcattgaggtaacaattttaaatctctctacacaagtttgattggattatttgtggattgttagagaattttagactttttgttggatttttgagatttttgctccatacattgttcaaaattattgttgtgagtgaaattgagtttgattgtgaaagggttaattcccgggaagtggatttttaaggggaagtgctgtcaaaatttttaaaaatcttgagagttagaaaattttaggtgagatgggtcctaaaagatcaagagtgagtgagcaagggggagcctcatcatccaacccacctaggggtcgctctaatctagatagagtaaggtttaccaatatggatgctca

SEQ ID NO: 362148 - DNA, 680 bp, Cannabis indica
atttttatgttataaagctattccggaaagtttgaacaggtttagaagagattttgctgggttttggagcaacaaaccagggttttctcatttctacagcagggaaaatcggttaaccgattccaaaggcatagtgaaaccggtcaaccgattttggcagcaggggaaaacctagttttaggcttggaaactggttttgttcggggtgtttcccagagcttagaataggatattttaatgatgcttaaattattcagaatcagtggagtgttagttatgtccggttacgaagttagggttattccaaagtttggaataagttgttaattgagctttgttgttgtgacataggacccgagatcatcaagctttgattccacttaaggtcagcatgtacgctaaatttctggactaaggtaagaaagtttaatgtaccgttaagtagctaaatatgaattggttataatcgttagtgcctcaataagatcaagattaacgatatgtatttgtagtgactcgatcttgatcaagattaataatatgtagttgttgcgacttgacggtaactgaggtaatgatgagaaatgattatttttgtttgtgaattgtttatgattaatggaagaacacgattgtcaccgttgttgtgaatgaattaagaaatgatcattaccgttatg

SEQ ID NO: 362149 - DNA, 624 bp, Cannabis indica
atctgcacttgtgctgattggatgttgattgatattaaaaataaccaatccaatctaattcatgcatatttatatatgggtgcactcttaataggtattactcatgaatgagtaatattagaaaaattaagtttttatgattaatttttccatttaattagaaattttttttcatttttacattatgcaagttggggttgttccatcagctgaaaaaagataataaaaataaaaattcaggcaaaaaaatgataaaaaaagttgagtttgacttaaatatttttttatataaacatatttttgatatagtgtaaaaaaatgtatttcttaatattttctttaattaagtagctaatttaagcatagaaatttaaatttctcttttattattcgctatcagacaaaaatttaatggtttaatatttttaaaattaatatttatagttaaaattgtttagtacccatcaatgagtgacaagtgttccatttatgtatattttaaaaaaagaattatatcaattaatattttaatgtaaaatataataatttaaaatctaataaatatgatacaaatacatttcaaaatacagtagatcaaatatatattctattactatttacaag

SEQ ID NO: 362150 - DNA, 871 bp, Cannabis indica
agatcctggtaaaataaattccaacagtagtctatgtctactatggcatactttacccctccctttccagttggtaaggacccaatgagatactttccccacaccgcaaagggccaggggctagtcattagagtaattttcgttgggcggggctctcggtatgtttgctaatctttggcacgaatcacactttaggacatagtctacacaatctttcttcattgttggccaaaaatatcattgtctttgtattttctttgagagagtcggacctccgatgtgatctccacagaacccttcatggacctcctgcatgattcatctagcttcagggtccgacacacaccttaagtacggcatgctgagccctctccggtaaaggatattatccatcattacatatcgatgtgcctgatactgtaatctcctggatacaaccctttcctggggcaactctcctttcgttatgtatttgatgatggaaaccatccaactcggtccttgctcatttgcagctaccgtttctttgattttaatgcttggttccgcgaggtgttctacgggtaccacccccagtttctctatttcgctattcaaggctaacttagctaaaaagtccgcgtgagtgttcttttttcgtgggattctttccactttgtattctgtgaactcatggagtagttttctgacaattgctacgtaagcgaccattttttctccatgcgtttggtattctgctaatacctgattgaccactaactgcgaatcgctaaagacttctacctaggggtgtacatcaaaccgctcaaaccgcccgcaccgtgaaaaaatgcagtttgaaattcttcacggtgcggttgcggtttgaatt

SEQ ID NO: 362151 - DNA, 547 bp, Cannabis indica
gctgcagtttgttgatcaatccagtgggggggacgggagatgagaatatatgaatgtgatgtgttgtttggtgtgtttgaagtagacattattaatatatatatataagtactgaaagaagaaggtaaaacctttcaaatttgaccctccctcaccacgtactcattattgtatcatgcatcaactttgtgtgagtgagcacttaaattgctataattgtggtgaaattaccaaaattaaaggacgttattggctcatcatcatcatcatcatcatcaatactagctagtttggaattggaacacctcatctccatctctaatgggttcatcacttaatttcatactcatgatatcatcttattctccttcaccttcatctgataacagtcgccggaaagtaaggaccatgcatggccgggttggtgaacctgatctagctagctactcgatctcccagtttgatatcatggaattaggcgccattaaattaattaattaattgtgatttaatcgatacaaataatatataggaaggacgtggtttt

SEQ ID NO: 362152 - DNA, 548 bp, Cannabis indica
aatgatgacttgcaagtgtccatctattggcggaggcatcagatcctggttgttctgacctttgttggccttgacatacttctataggtgcgggttgttcttcttgatcagaagttctatttcctgcttcaggttgtagcatttgttggtgtcgtggccataatctccatggaaccgacaaacttttatcatgtcccttttgctggtatctttcttcatgggcccgggcttcttgtacggaattagcgactaagttgctatatacacactttctatatcctcaattaggatagtgaatgcagtgtgtttggtacgatcacggggagtctgtctggttttttcggcgaactttcccttcttcttgttcccttgcttgtggttgttgcctgaacgcttgccacttgaggtactggaatattggggaagctgggcggtcgttccattagaagaagccttcgtttttttcggtcttttgctcaccttctgctcgctgaatggcttattcgagcttgatcaaacctttgttggaatttattttaccaggatct

SEQ ID NO: 362153 - DNA, 681 bp, Cannabis indica
acctgttctttgagccaaataagtatagagtattagtctatatagtgctacctcctaattaaaggagtatttcaggatattacctatttgttttggcagtacaactttttagcctaattttttttgtgaccttatacagtagagttatttaaaattatttaaaaaattttaaaaaattccaagtagtttgtaatactgaaaataaggttaaatattttgttacatgagcaactatttttttttttgatacgtgtggtaggtaattgtttaaaccttacttgtaacactataaattattcaaatttttttttttaaaattacatctaattttaaataactacaacatattgattataaaaaaaaaaaaaagactacaatttttctaaataccgaaatagataaaaatttaccaaaacaatccttttattttatttttatgtactacataaatttctgtaagtatattccctacattttattggtcattctcttgtagtatatattaatacttaaaaattaaaataaataaataaataaataaggagagaaaagaatcgtactaaattggtaatagtggaagacatgacccatatattttgtattttgtatttgtatgtgaacaccgactttatatatatgtatatatataaataaataatatataagatcaactacatacac

SEQ ID NO: 362154 - DNA, 583 bp, Cannabis indica
agaacacgaacaacatcttcgtatggttttgcaacgattcagagatcataaactctatgcaaagttcaaaaagtgtgagttttggctgtcacatgtatcttttctggggcatattgttggaaaagacaagattatggtagacccaggaaagattgaggcagtgaagaactgtcctagaccaaaaacagttactaaagttcgaagttttctcagtttagcgggttactatcgaagtttgtggaaggtttttccaagattgcaatgccattatctgagttaactagaaagaaccagcggtttatatggtcagataagtgtgagaaaagctttcaagagttgaaacaacaactgattacagctcctgttttggccttaccatctgatcaagagaagtttgtggtgttttgcaatgcgtcaaggctgggtttgggctgtgtgctaatgcaggcagataaagtcatagcttatgcttcacgaaaattgaaagattatgagcagcgctatccaactcatgacatggaacttgcagcagtggtgtttgccttgaaaatttggcgacgctacttatatggtgaacggtgtg

SEQ ID NO: 362155 - DNA, 694 bp, Cannabis indica
ataaatgctgtatgattttgaaaatcatttagctgtaattttcccgcttttattgggtcagaaatatcgtgttttaaacacgtctctaatagttgaatctggagatgtctcgacagaatctacactgaagttattccaatggcgagctggaaacatccttctttttgtggtcaacttgatatggtttacgtcgattgcgggtatatggaaatcttctgacttgccagggttatgagcctcgctcttgttagttggatggactatagggagcttcctcgcagcgagatggccatctcgcattcttgctcttcgatctgtttcgacttttacacttagtttacttattgcaagttagggtacgcgttacttttcaccggtgcctcgctatccttctttagcgatacatggtttctcgttatgcactaagtatcagttcgtacattgattcctcgcttaagactttacagtcagcgggttacaaaatatacactaacacttacgcaattaatgagttattccataaaagatatggcactgattcacattccctttaccttgacacgtgtcctccagccgaattttgggtataacaataattatcgttataatgtctagttctaagtagtttgcttttagttaagggttatttcaaaactcactacatgaattcttaatttcattattgaatgttaat

SEQ ID NO: 362156 - DNA, 947 bp, Cannabis indica
aaatgctgagttggaatgggaggaagccacggccagggcgacacaagagaataatgcaaaaaatcatcaacctgatcttggagtgaggataccacgaggtagacctcgcggttcacaaactaagaggcaggagatggctcatgagaatccttagaatgcttaggaagaaaaacctggagaaactgagggtccccttgagaatgaacaaccaaatgaccagcaagacccttctcacagaaatgagaacagaaggagactcgggaccagggaacaggaaatcccccgtgagaacgagtgaaatcctgggactcaacctgggacaggtgggtcaccaccgagacatcgccaacgtccttctcgaaccaacagggaaggggcacgtacaaaccccagcagggggcatgcaacaacccatacccaagggagaaggacgtgacatgacaaggcgagtgttagctcgggatgcacgagaacccacggtcgatcaacgcgagaaggggaaagaaatcatcgcaatactgatcaagagagtataggcacaagtaaaaatgaaagttactcaaggacgaggtccatgagtaggaccaagtccatgagtagcacgaggtccattaacaactataaccggcaacaaccggatcttcgtaatcacttgaactagaaaaacctgatcttcgccaacagctcggtcaaaagcaagaggatcctatccaattgcaaattgatgagttggaggaccaattcagaaggtatcaagtcggggaaccgggaaagaagtctggatatgactcagatgaggagctcgagcctttccattcagacataatgaatactgcattcccccagggattcaagaaccctcacgtcttgtcatatgatgggaccacagatccgatctcccatttaaataattttaatactatcatgcgagccagtaatgttacgaa

SEQ ID NO: 362157 - DNA, 777 bp, Cannabis indica
cctaatcttatacaacaaccatgttagcaatactataaaaaatagctacttttaatgataactttttagtcacaacataatttttttgtaactaaatgtgacttttaatcacaacaataagttacttatgactaaaacatagcatttagatacaagttgttgctaatttaattttagttacaacaagtattctgactaaaaatacatttagtcataacaaattataatttggcttatttgtaccacaggtccctaaactatacatgttttggcaagttggtcctcaaactttattttttggcaaattagtctccaaactatataagttttggcaagttatagtccccatactttatattttgataaattgatccccaaacttttatttctttagcaacattaagttctcactattagatattgatattttttattatttattttacttactttaatttatgttgttgtgttaaattcaaataattttatttttttaattttaatattttgagaaaaataattatattaatattttttatttattatattaaatattaatattttaatactttaatttaactatattcatatacattaataataagaagaaaaaaagatatatacatactagccgacacagctagagagaattttagctcatcacatttttatattttaatatttatagtatattttattgttgtatttatgaatatgtggtgtattataattttaataaaaaaattaacaattgaaaatacttaaaaactaatacac

SEQ ID NO: 362158 - DNA, 886 bp, Cannabis indica
attttagttagtaccatatgactcttgaaaaaaaaaatcaaagaaattttttttagtaaaccatataaaaatatgttttattatttttttacgtgattataaagattattttgtgaactgttatgttaatagggagaaacttttcttttatagaaaaataattagttgattttatctactaggaatattataaattattcacatagttaggttagttttttaagaattttaatttagaagaattagaactaaatattaagagacaatgttgcttagacgatcaagtcgtatcaatagaaacaatcaagaaggaggagcttcaacacctacaagaagtttaagaaggagacgatttacgaggctaggatagtcgtggtggaggacaaggataatgagttgcactattacggaagaggtgtccgcataagtacataacaattcataagctgagttgagaggacgcttatttttcgcgggtagttggtgcaagagaattccaagcttatggaatggctccaagctcacgatgaaaagttgcattgcaataagcagtaaagcacgaggaattcagttcaacagccaacacactgctttgagccatcatatgaaagaataaaaaaaagccatcgacatttgaaggaggctctaatccattagaggggaaggaacgacgaaagattgtagcacccatattgggatatacggaactcaataaaagacaactgatgaatgacttgatagtgctagaaatgaaggatgatgacgctgcacttgatatggattggctatccattcatctaatgttgaaagtatttggttgcttttgggaacaaaggccgaagaccagattacttttaagaagttaagctagccttatgaatttctt

SEQ ID NO: 362159 - DNA, 1740 bp, Cannabis indica
gcatatgtatatacatgtttagtgtgcatgtcagtaagcctgttagattacattagatatgtatgttggattttgtactatgtgacagtatcacatcggtacgactagagtatgactagcgtaccgagtataggctgatattatggtcgatagtactgtactacttgacagtatcacatcggtatggttagagtatgcctaacatactgagtataggctgatattatggtcaatagtatcatcgtacgaacgttctagactcaacaccatgtgggacacggggattagaattatgatcgggtgtatgggcgccaggttataactcgggtgatttgtatgttagatgttatgcttttcttactgagtctgtcgactcacagtggtattgttatgtgtaggtaagggcaaggctaaagttgaggagccgtgagacatcgaggcttttgttgtatagtcgctgagcaacaaacttttgattatatgtatagcaaacttttataaagtattttataaacgggatcccgaaaggttataaatgtaatactttaattttttaattaaacaaacaaattttaattattcacgatttttaataacctcgttgattagcaacgagctgcacagtacgtttaaaatcatgttaacacgcctatgctagttagggtgttacatgttcaaacttaccaacttaagaagatgtctgatgatgaatgttggaagttatttatagagcatgtgtttgataatgtaggctctaaagaggtaatgttgttcgagttgcaagaaatcggaagagaaattgtcaacaagtgtaaggggcttcctttagctgtaaagtcaatggctggtcttttacgatctatgtcaactcatgtcgagtggagacatatactgttgagtgatgtgtgggagttgcctaattctcacaacatcgaaattgttctagctttgtggttgagttaccgatttctgccttcttatctaaaaccatgcttttccaatctttcaatatttcccaaagactacaatttcggtgatattgatagagaaaaactgattttaatatggatggcagaaggaatctcaaatttatcttgttgctgctaataatctatttataatataaaaatcaaaggaggggagagagggaagatcatcatcaacaacaacttaaaacattctagtctcctcttatattctacattctacaacttaaaacaaatctatgataactagctgccaccaaaatcaatcctgccaacacattcaattttggcaactctatacaagtaatttaattcaattttgcaacatatcacaagtaaatctatagagatttgcaactcaatacaaataattcaaataatttcactactcacgagagtaaattaaaagagttttgtaacatgatttttcgattcaacacaacacatgtaattcaattcaattttacaatctcatttggtaactcaactcaagtaaataaatagagatttgcaacctcttagtccaggactagttgctacaacaaagattatacaatttttttctattaaaccctacaaatcatatttaactaactataatttccatttgcttacaattaatataaagctagtacttgtactgagtcataaagactcaaacttcaaaagctaacacaccaagattgattttttatcactatctctgcatcaaaaaaataaagaaaaaaacacatacctggtattaagtccaagc

SEQ ID NO: 362160 - DNA, 742 bp, Cannabis indica
aatctccgagtggccaaaacacaattacgcccttagcgagtacagccggaggcatgctgaggtcggaggccttagaagaagatccttcaagaggagcagcagaactactcgtccagggaggaagcccttccggaatccatgggacttgaacatggatccgttgacggactggttcaaccgcttcgttgggcccaccttggctctgtttgcctcggagatgactagccagttcgtctcccacctgactcaattttttgcccaagagatatgctgcttgcgcctccctgaattctatctaccaggtccaagacataagctctgccatggccgcggtgagtacttagtaatttattccacttcttgatattttgtccaaggcatcggatttcacacttgtattttttttttcaaattaccgctgaaaccggtcgcctttccaagactctaattgaccatggttacgtcatgtccgaattcgggggcattgatgaggccatgaggatccttcaggatttgtctaccgaaaggcgggcgatccaggagggggctgcacagagggaggccctcgtggaggcgaagcttcgggaggaggccaagcagagggaggccctcgcggaggcaaagctttgagaggaggctaggcagagggaggccgaggtggaagtgaggcaccaggaggcgctgaaggtggagggtgaggccgtgttaggctatttttagcctatgttttggatccaattta

SEQ ID NO: 362161 - DNA, 1024 bp, Cannabis indica
actcaagtttttctcaaacacttcttgtagtgagataaaataagatgaggtgcaataagtggtagatgcctctagtttctttagaagtaacttaccatttaagtatttagggactctaatttattcaaaaataatcactataatggaatgtcaaagtattgtgagaaaaatggttaagcgcatcaaaacttagagtactcgtaatttgtcttttgcaggcaggataactctcattaattctgtattgattgtcatttactcttattaggctcaaattttaactttctaaagaaagtgttgaaagaagtggaatagatttgcatatatcatttctttggaaatgaatagttgcaggccctgaacttgggcaagtggcttggactcaagtatgtagtttcaaatcatctggtggcttgagttttttgaaatttttgaattggaacgtgatagatgtgggtaaatatgtttgggcaataattgaaaaaaaaaaaaaaaacgagaaattttgcactaaaactttgtaatccaaattataatatcaatggaggttattatattctctattctctgcctaataaagttctgaaagcaatgaagcatagcagattgggtatgttaaaacatagatttagttttagttgacagcccatgagaaattttgcactaaaactttgttatccaaatttaattacagtattaaaaagaatgtagtgtttgctttatggtgatagagatgagtgtgtgcaatatttattttttaaatttgtgcatatagtgcaaactgtctcaacagaatgaaaacatagcttggatgaaatactcattctcatagacttaatggttttcttcaatgggttcataaaaccaaaagaaaaagtcgttttaagaagtaagttttcattgatttatcatttgtggagtgtaagaaatatttttgggtctcaaaaagtgtgtagattactcatatattgttagagagtcctacattgttaatgtgtagaaaataatagaatatataagatga

SEQ ID NO: 362162 - DNA, 531 bp, Cannabis indica
ttttaaggccttaattatgtataaaaaataatataaattgaatattttcattgttttaattataaaattatttaagttgaaagtatttgattttttttagttttgtgttaaatatttgatttggagcaagaaagtggtttgtataaaaattgagtccaattacacaagcacattaataataaattatggacttttgtattgtagaacacgtgatgagtaagtcatcaatcaatgatgcaatgaaagtggatacatatgtatcttttatttcaagaaaaagaagagcagttgtctcacaattcaattactcccattcccagcgggttcttctcctccatcacacactgacgcgcgcgtggcccatgaagccacctcttccagcattctcttgcgcacggaccccactacctgatgcatataacactactttgagctttttgtgccatttattccactaaatggtacacgaaaatactatatttgaggagcaaatttgcactataaaaaggaaccaaatacaatgtaaaaaag

SEQ ID NO: 362163 - DNA, 687 bp, Cannabis indica
cggtatatacgtcagttttataaaccgacgtaaattctttaagtgacacttaaaaaccgacgtgaattatactttttgtagtagtgatataatcacaattactttcaactgtgttgacatcactgtaattgtgaataactatatgttctagatttaacataaattgtatattaaaccataaatatgaataatacatgaaaacataaatgacttctaattttctatgaataataaataagattatactcaagtagattttatttaaggcataaaatccaaacactaagtagcttagcctaatcccttattaggtgtcaagtagcccaaggtctttgtcttcaaccatgtttcaatttctatttacatgtagacttaaagtgggatttgtaatgaagccttgatggagcaatgaaggagtaaaccccatttcctactcgatacgctgagtaggaataggaggagaatcatacacgacatgccgagtagtagcggtgttcatcaaaccgctcaaactgtctgcatcgcaagaaaatgtttgaaattcttcgcggtgcggtcggagtttgaatttttcctaaactgcccagtgcggtgcagtttgcggttttgaattattaatatgcggttcaaattgcaccacaccgcacattatgaaaataccaatttttatatttatttaggttcaat

SEQ ID NO: 362164 - DNA, 736 bp, Cannabis indica
taatgccaagatgactctgagggaatctttctttgatacaggagaaaagatcttcgtatagtcaattccttcttcttcttcagtaaatcttttagcaacaagtctcgctttgtatctctaaatgttgcctaatgagtcttttttagttttatagacccatttacatccaatggctctcgtcccattaggcaattttacaagttcctagactttgttgcacttcatagaattcatttcatcatccatggcattgtaccacaattttgattctctactgttcatagcttgtaaaaataattctagatcatttcaaattccaatatcagattctaataaatacacaacatagcctttgtaaatctttggtttgacatgtttaatagatcttcttaagacttcaccaacaggctcttggggagcagcagttggttcagcaggttgtcaacagttgccttgtgtgcgggtgacagatgagtctcaacagcatttgttttttagctgctatctgtcgcgagaggttactgatttggtgcataactggattggcagcagagtttggcctacagattttgaaggatggaggagttggctagcttggcagtcgacgagcaggaagcaaagagttcatgttgttctgtgatctatagtttatggatcaatagaaatagatgcatatacaattcttactcttatttggctagagcaattgtaaatgaagtgaagaaagttgtcttgt

SEQ ID NO: 362165 - DNA, 519 bp, Cannabis indica
aggattgaatgaaaaacacaatatgggtttttgtggttctctctgttttgattgtagagagacagagagattggtatagagagacagcgagaaacccttctctgttttatgctcaccaatagagaagagagaagaggctgttaaaagaagccacacgtaagaaaaaaaaaaatcaaatataaagaaaagctaaagagataattaatatataaatataaataaaaaatagaaaaattctactatctacgtgtcctaaaatggattcactcatacactcatttctatttttttagtctattttttgatagtagtgtgtacgtagttctttaagattttaagtaaaattttgagacttttagaaaaattaaacaacattgaaaatagggttcaaatagttagttgtatgcatactttattttatatacttgtgaaataaattatttgaacattcctttctatattgttaattattttaattttttaaaattttacaggattcttaaataattataacataca

SEQ ID NO: 362166 - DNA, 544 bp, Cannabis indica
caaaagtttaattcccatgatctagttcattggatttagattgacatgataatcagcgataaggtatagttacaccttagataagtgttatgtcatttccaggcaaagtttaccaatatcagatgtatggagtatacattagaagggattcatattgaacttggatagtatggatcttaggtgtatggatcttaatcctgatagggttaggttcaatcttagttgtattatttatgttcttaaatttgttcattaaagtcgaccaattagatcttctcgtgacatacagattaaggacatgctagtttaattgagtggcagcactgatcatagatatgaaatttatagcttctataagtatttagaagtgaaacgatgatttccttcgagcttggctaaatagagataaatgattgaggcctcacttcagtaattatattagtttactgaagtatcatttataggtagctaagggtttaaaggataaaatacattgaagggtaaaccgataaattgtccctattcagtgtaaatcatctataga

SEQ ID NO: 362167 - DNA, 1371 bp, Cannabis indica
aggtagcagtatacccccttatcggtcctgaagctagtgcactcttgatccgctacgtgcattttaatttggttgtaaccggcgtatgcgtccatgaaggacagtagcttgaatccggaggtggcgtccaccatctggtcgatccttggcaaagggaaacaatcctttgggcaggctttgtttagatcagtgaagtctatacaaacccgccaggtcccgttgggctttggcaccagtaccggattggctagccattccgggtagtagacatctcgaatcatgccactcgttagtagtttgtccacctccttttctaaggcttcagccttcactgagtcgaggggacgtcgcttctgctggaccggtggcatgtccgggttgacattgaggacatgggtgatgacgtggggacttatgccggtcatgtcttcttggcaccatgcaaaaatgtcaatggcgcccctcaatgtctttattattttttctttttccttcggttctaggctctttcctagccggaggactttggtggagtcgaggtcgcacaccgacacttcctcgacgtcctccattggttctacaattttttcggatcccacacggggatccaactcatcttcttccgccatttctggctcaataatttctcggaccaccaagacgggtaggtgggcagcaacgttatagcactgcctagcctccccttggtttcccctcacggtccctatcccggcctcttgggtggggaatttcaggcataagtgtcgtattgacgtgactgcgccaaaatctaccaaggccggtcggccgaggatcgcgttataagctgtttgacagtccaccaccacaaacgtgcaatacttgaaagtgctttgggctgtgtccgggcacaaggtgactgggagcctcacttttcccatagggataagtgttgttccattgaaccctgtgagttgggaaccacttggtgaaaggtctcggtccgttagacctattgcggtgaaggcctctttgaatagtagattcacggaactcccgttgtcgatcaagactctgggcacgatcttattggcaatgggagtctctatgaccaaaggtcatggtgaggaaaacgcactgttttagcgtcttcttccgtgaatgtaatgggctgatccattagccggggcctttgagctggaagttgagtaacctcacagacctcatcgtgtttcacgacccctgcgtaccgttttagctccttgcgggtagtccctccgatgtggggtcctcccgagatcatagccactctcccgctgggtcttggtggcagaccgagaatatgctgggcatctccggggggagacactggagccaatgctcctgctacac

SEQ ID NO: 362168 - DNA, 1117 bp, Cannabis indica
gagaaggcggccaagcaggtgaactggactccctaatgcaaattgcatgttcaatgggcctgggctgggccggaagtttcttcctccgcttgagcgaagtcacctgctcttcctcagcatcatcttcaggattcaagggctcctgagcatactgtttggcccttgcacctcccttcaacttagcctcacgcttcagttgaatcagctcattctccttatgagctccctcagcctgtccagcaccaaatttcctcttcctacccttcaatgacttaggaatgaaatccttcggatagagcccgtacttcacaaagttgtcctctgaggtcaactgaatgatattccggtctcccctgcagctgagcaagctgttgagctctatctctaagaccaagagtgaagggagggcggtgatatgtggggctctgctggaaccgagtataggtggtgcccatgccatcctactcatcaacaaaacccccaatttatctaatcgccttatccctggtgcccgtcaaccatttgaagtctggttgagagaaatagaagtaccctgacctgccttgcttaggggtggacttcaaatcaataaaccagagaaggcatatcccacttttgggaggcataaaggacaaagagggcagatagatatttaatgcccttgggagtaaattgggtcggacagaggcggaagaagtctgccacattcctaaaatacgggtgcaaaggcaacaatgccccttgttgggcatgagcacccgacaaagcgctcatttccctctgagggtttgtggctcgattattgtgggcgggaatgtaacagtccagttcacccaggtagccatcctggtcgagatcccacaagcgcaccaaagtaaccttggacggagggctcacccacctggcacccaaggtaccttgccttctatgaggaaccacagcaataagttcctcactggcgtaatccacaccctcaactaggacgtcgccatcagcatcgagtggctccccgacctcattgtatcccccatagtttggggctgcaacctcctcctcttcctctgcctcggagggactgctaggacggcatcgttctgttcctcaatctcttggacct

SEQ ID NO: 362169 - DNA, 522 bp, Cannabis indica
ttatttggcctcttttattttgatgcttggcactaccaagcgttccattggtactacccccagcccatcgatttcactgtctgaagctaacttagccagacagtccgcgtgagcgttcttttcccaggggattctctctactttatagtccgtcaactcgtggagcagctcccggactattgttacatatgcggccattcgctcgccgcgtgtttgatactctcccgatatctgatttacaaccagttgggagtcgctgtagacttctacccttttggcccctacggcctttgctaatctcagtcccgctatgaaggcttcatattcggcttcgttatttgaagctgagaagtcgaaccgtagggctgcctggagtcgaagtccggtcggagatatcatcgcaacccccgcttcggatccattttcattggaggctccgtccacgaacactctccacgtggggatcgatggtatcgctgcattcgcggttgcatcggcttcattacattcggtgatgaagtc

SEQ ID NO: 362170 - DNA, 511 bp, Cannabis indica
ttgattacttcaccaatatttattctgctgggattgttgattggaacccggttgtaaatggggttcattgcaaggttaccactgcccagaatcttgagttgttgaagccggtcactagtgaggaagttcggctggctctcttccaaatgcatcccgacaaggccccgggacccgacggaatgggacctggcttttttcaaaaacattggcatattgttggggaagatttgattaatgccacttgtgatttttttgcttcggccacttttccaaaccacttgaatgatacaaatcttgtgttggtccctaagaagaagtctccaagctctatgagtgatctccgtcctatagctttatgcaatgtctcttacaaggtgattgcaaaagttctagcaaaccgtatgaagcttcttattgatcacattatctcccccactcagagtgcgttcattccgggtcgtttgatctctgacaacatcatgattgcttttgaagtaatgcactatctcaa

SEQ ID NO: 362171 - DNA, 769 bp, Cannabis indica
aactccatatctaaacacatattctgtgttatagtatggagttctttatattttgcctgttcgataaaatcgttttagtaataataaatgaaaaagtaagtaactaattaataaaataccttaagcatacggatggagaaatctttctcccttgacttccaagcaatagaaagacaacttaacgcaatgagatcaatggttctttcattttcatggtcaacctaagaaataaaaaaatgttaaaagtaaaacaagtattctaatgtagctgctaagtgtaactcgttgtttggtttttgaatatagctcaacaaaacagaaactaattacatcaacattaactcaacacaatagacttaacatgacttgagaagcaacgagtaggtagctacatcatggtattatttagttaatgaagtaccttttctctacagacatagagattgaaaatatttgcagctaggtacggaatccaagcgtcaaatggttcagatttagaatactgcatttacaaatcaaataaataataattaatagtccaaaatctattagtcatcacaactatatatattcaaatcaatcaaacaatatacttaaaaggaggatatagatgaatagaacacaccccaagttagaacattattaatatatgacaattaattgacaccttctcttcaaacaagattaatttatttgacagaaaaggataataatttttgtggggtgactgattcgtgacacttgtgctgactgatgatgtgagtagtct

SEQ ID NO: 362172 - DNA, 498 bp, Cannabis indica
tagttttgtacccaattgttatggatgaaacaaatgatggcagattatgggtttgatttgaaaactttaaccatcttttgtgataatactagtgctataaactttaacgatggttgcaaggtggttgatgcgtggttgcgcggtcgttgcatcagacgaaggtttcaatcagacgatggttgcatggtggttgctagatggttggccgaaggttgcatcagacgaaggtttcaatcagacgaaagtttcagggttgttgctgggtggttggctaaaggttgcatcagacgaaggtttcaatcagacgaaatagctattagcaaaatgtttaggcaactgtaattcaactgtaatgcaactattgtgaaacattaaaaatcagatgagtgtgtctacgtacataactctatctacatgtcgcttaatgatttaatatgaataaatttaccattagaaatttagaaaacaacaaaaatacactaggataaatattttact

SEQ ID NO: 362173 - DNA, 744 bp, Cannabis indica
cttttggagataactaactctccgctaggtaatagggttccaaaccctgattcataactacgtgcgatctatccaatttactaaagattctagctgccacataagaatgtgtggccttaaagtcaaacagtacggagtaaaaagagttattgaccgagagctgacttgttaccactgaaggactggcttctgcatcagcctgagttatggcgaacacccttgctggagtgggttttgccggagtcttcggtgcttcggttctgagttgagggcaatccctcttgtaatgccctgcatgccacactgaaagcacacccccctacactcctgcagatgatgccttttacaactaggacactctggataagtgtatcgagtttcgatgccactttggtgattgcttcgaccctggttcccccggaacctcttgttctgacctgagcctccggttgtagtgggtgcttttcttttctgatccatggccaaaccactacctcccttgctgaaaacctgatgcaggaggggtaggagctccgccaaccacgggagtcccaacagactgggtcatgcatccaactatgccctcagcttgtagtgccttctacagcatttcagcataggtagttttttcgtcagtagtaatcattagatcatgtctaatctttgcatttaatccatccagatatttctcctttttactgaaatcggttggcacaattcccgaggccaacctcgccaagcgat

SEQ ID NO: 362174 - DNA, 1129 bp, Cannabis indica
ttaaaatatatatttaaaatgtataaaaataaaaaataaaacttattttttaaattaaaaaaaattacaaaattaaaatacacataaacttccaactcctccaaaacatgaggctgaggacagccatggattcgacgttctgggatttggacgtggctacgcctcgagtccttgaaggctccgctaaggctgtaccaggtgagccattccccatggatgctactcgagcaagtggagctattagaatacagcaagtctccttcttgggaaatgggtttcctcttggcattatcccttcttactttcctacttcatctgtaataagcccattccctactggtaagtaataagcccacacacacatacttgctacactattgtttctcttttgttttctctagctttgtttggtttctcaccatcaacacccctatttcaccacatctcatcctctttttcttcctttttctttctgtatccaaattgtaaaaaattaaaaaaccccaaatctctcatcactcagatctaccggagagtgaccacgggatcgaagtcagaagcatgcggggttgaaagggttatcaagtttcgtgctaggaatgaggatcgacaagctgaagaggaccaccatattggaatgcgaatcgacagggttagtaattcttagagttagtatgtcatttgtgggttcttctcctttagctctgaatgtgacctttgttaaaaaaatccctcaatgtttacaggtctgagcttgaatttgggcatttggatttgtggtctttgttctatttctgggtttgagtttttaattctgggtttgtttacaagtctgacctttgttcttcacctgggttttagtttcagttgttgcatttgtattttgtttgtaatatattttgatttaggatcctgtataaagtttctgttcttggaaagttctgggtttgttttagggtattaaataaattttgtattgttgatggataattgaagatttgggtttcttttattcttttttattttgtttgttcaaaatctaagtttgcttcagacttttgattttagttttgtttcaaaatctgaatttaatttatgttggaattcctttttaattcaaagagaaaag

SEQ ID NO: 362175 - DNA, 503 bp, Cannabis indica
aatataaaaatttaaataatgtacgcacgcttttattacaatctatataaatctaaaaatgagaattttaggaagggtggtgtggcattatataacaattataacagtaaattgttgaaattttattagactttttcatttttgaagattgaaaatcttcaaaaactaaataaaatttgtaataccacttccaatagttatccaaattagatatattatggttttatctcttattgagattaatatataagagattaatatgagatgagattcagatagtttatatatatgtatctataaataacaaaaaatcaaaatagaagatcaaaatggaaaatttaaacttatgaaaatcaagtttataagaaaaagtagaatggagagaaaaaaaaaatagtagaaagagagatatgtgatgaaaataaaaacaataaagattagtgataatctttcaaagtaagaaaaaaaattacctaatagttttggtgcaaaatatctatttg

SEQ ID NO: 362176 - DNA, 945 bp, Cannabis indica
ctcggtaagctagtcatactccaactgtatcgatgtgatattgtatcagcctatacttggtacgctagtcatactgtagctgtaccaatgtgatactgtcaaattgcacggtactatcgaccataatatcagcctatactcggtacgctagtcatactctagccgtaccgatgtgatactgtcggatagtacaaaagccaacatacatatctaatgttatctaatcggatcactcacatgcaagctaaacatgtaaatacttatgcatactgttatattaatcttacctcaattcggaattaaggtgtgccagtcaacctgagtggaacaatctcctcggcgaattacaggctcctatatcacatcaatcacaacactgataagcgatacgttaaatcacttctcggggacttaaacttgaaactaaaagtttccccatcgatgaataacatggaaataccctaaatatcacaaaaatgggaaaaactagggttcccaaaactgccccaaccgttagaccgattcctcaaccggaatttcttttctgggaaaaattcctggaagcgaactggaattccggttcctaaaggcctctttgaaccaaaattctggtttagtgcaggaatttttcaaaatttcatatctcatgcaaatcaaccccaaataaaaccaaactctctaaacctgctatatagaccacaaagaacatattccaagtgataaaacaatcatccattcacagaaaccaatttcaccattaaagcttcaagattgagttcaaaaactcaaaacttggctaacccttcaacaacctttaatttgagcataaatcaacataaaaacccatatctaaacctcagaacacaacaacaactaactacagcagctaaagcaacaacacttgaaagcatgcaaaaattcatttcttacaacttaaggaaataa

SEQ ID NO: 362177 - DNA, 684 bp, Cannabis indica
gtgattttattgagagagggtttagaaccctattgcctagtggggagttggttatctctaataggcgaattaggtctatgctagttatgatcaaagatagggagttgagtgctgacctagtagagctagaattaacataatttgatatcatacttagaatggatttcttgtccaagtattcgaccaatattaaatgtaagcataaaatggtaacttttcggccgatgggtgaagatccatttgtcaatgttggatctgttcagggttctcggatcctgattatttcagtgttaagggcttaagatttactacacagtggatgggtaggatttttagcggttgtgattgactctagcaaacctgaaacatttgggcctgaagtagttagggttgttaaagaatttctcgacgtatgtctcgaggagttcctaggattactgccacaacgagaaatagattttgtgattgacttggcacctagagttggacctgtttcaaaagcaccatatagaatggctccagcggaactcaaggagctaaaaatacagcttcagggaatgcttgatctagggtttatctgacccaatgtatcgccctggggagctccagttctgtttgtgaaaaagaaggatggttccctcagaatgtgtattgattatcaggaactaaacaagctgacaatta

SEQ ID NO: 362178 - DNA, 561 bp, Cannabis indica
tgaggcagctcagaaagaggccaaggacaagtccgagttgtgtcgaaaactctaggaagagcttagtgcagccaccgcaaagcttgagggggtcgagaccaacaccagaagtgatgcaacaccattgccaagcgctccatctatcgagcttggatggcaaatccagaaatagatttgagtttcctaggaaagggcatggaggaagtccttatctactgcaggccaagaaaggcagaggaggaggccgaggcagcaggagaagaagaagaagaaccatccaagtctcctactatgtaggcttggtttttaattatttttcttattttaggaaaatagccatatggccgagacaatggtttgccctttgtggctctttttttttgtaaagacaaatttgcatcgttggatggccaactttacttttattttatcttttattaatggcctcgtatttttgcattcaaacttaatatatttgtttacttgcgtttttgctcacaacttagacaattatactttgatcaaattttaaaatactttaagcatttccattgctcttat

SEQ ID NO: 362179 - DNA, 764 bp, Cannabis indica
aaaagtaaatttgtgaatgatgtttagccctattaataggtggaaagatgaaaaaagacaatcatttcaaatgccttacacgcatcggttcccccaaaaagcaaatattgggaaatcaaatataatcatgtgtaactgtcaaacgtggtgagagaaaactgggtttcaaggcattaattgagtcagaacattaattagccgaaaactaaagagacgcctggtcagtcacacattgaatcgcgaacagacgccccttacacgtgtcacccattcaaatgcaagggcaactcggatgaagtctacaccaacttcggaagtcccgtacaggcttggggggcaaatgttatcccaatttttgcactctgaggtggcatcacatgatggtgacacgtggaatcaactttatatacctgctcgcaagagatatgccgaacagagcatcacatatattcgctcggataaagccttcttaaccgactagtgagcaatctgaacaacacgccaacacttagcagtttcaactttcacatcataagtcatagaagaaatccctataattttgggatcagatcacagagatatggcaagctttccaattatatcaattgtaatcaggagggaaactcttccctcaaagcttatagtcctataaatagtgattcattctcactgggcaaagggtcgaaaaaacttatctaagaattcatattcagagttatcgttgtaagatctctaaggaaagggatcattatattcctcgttct

SEQ ID NO: 362180 - DNA, 505 bp, Cannabis indica
gatagcctgagcaaagatcgatcatggagaagacagttttccccttcagttgatcaaaaagatcatcaattcgaggtaaaggatacttgttcttgatggtgagcttgttcagctctccataatcaattcacattctgagagacccatctttcttcttcacaaacaataccagagcaccccaaggtgagcatcttggtctaatgaatcccagattcagtaactcttgtagttgtatctttaattcttttaattccgctcgagccattcgatatggtgcttttgatactgggtccgctcttggaaccaactcaataacaaattcaatctcccgggtaggtggcaatcccagtaaatcttcttgaaagacgtcaaggaactcgtacaccaatcttgtattatcaggtccagatgtcacatgttggctggtatccactatagtgactatgaatcccagaaaacctctgctcatcaagtccttagcttttaaaagtgttattcttggtat

SEQ ID NO: 362181 - DNA, 679 bp, Cannabis indica
cgcctatggtagttagggtgttacacacaggcttcagaaagtccgtgtcccagtttcctcggacaaggctagtctgaagccgcgtgaatgctgagtgaagctcctcgtgcgcgtgcacatgtgcaacctagtttcacatattttttgtccaaattcttaaaatcataactaaatcataaaatatccaaattgagttctgtaaaagcctaaattcattaattttttgtctactttcctgtaaaatattttcagaacaaaaaacaatatattttacaacataaattgtgatttccatacaatcatcaaatatgcacacaaaccattatgaaaccatccaaattaacacaaacatcattttagatcaatatttcgagaaagtatatcattaccttggctctgaggccagttgtcgaattataattttaccaggatctagatttactaccatgtaggttatttaacatcctaaatatgaatttctaaaacaatgtaatttaacacacatataaagtttaagaaaccttacattggttgtagcggaattaaatgactccttcctcttagatctctaacccttgtatcctttttgtagcaaagtatcacaaggatctgtgctcgattctccttcacttcaattggattcttcacagtcttacacactatgattgagtaccaactt

SEQ ID NO: 362182 - DNA, 615 bp, Cannabis indica
aattttgagaccatcactatctatttataggaatcaaactaggtttggatttgaattattttgcattaaaaaattgataaaataaatggtaaaatagacccaagttgccagccctggatgtgggccctaccactttgtaattttgccatttttcatcaaattccctaacttattaactcctcatttcactactatagaacttggaattgcactctcagttatacagaacgctctatatgttccacgatatagatacgctataaatatttaaccgtcgttctaatcccaataatcaaagatcctttgtagatgattttcgccgactagggacaaatataccgtttcaccactcaacgtattttatccttaaaacacttagctttctttaaatgatatttcagttaactaatataatcactgaaataagagctcttccatttatctctattaaaccaagctcaaaagaaatcatcatttcacttctatgtctagatagaagctatagcttccatatctatgtttagcgctcccactcaattgtattatcatgttcccgaaatgtacgtatcacctggacaaaaaggtaggcttaactaacaaattaaagaacacaaa

SEQ ID NO: 362183 - DNA, 551 bp, Cannabis indica
aataaattaccttatgcaattcttgattggtccagattattaaatttttattttttattttaaaaattaattttaaatataccaattaagaaaataacacgtagataatgagttaacacttggcagctaagtacctaagaaattctagaaatataacttaagtattattaccgtaaaaaattaaacttaagtatttatttatagctaaaaattaaacttaagtatatatgccacaaattactctaaaaaaatattcatataataaaaaatactcactttctatttttagtaaataaaactatactttaattttaagattaatttaaacaattttatatattttcctattaatttcatgatttttataagttaaaatatatttttattaatttttattgggtaaatatcattttgaatcctgtgttttgcaaatgttactaattagaccttttattttgttaaatgacaaaattgaccctatattttttaagctagtacaaataggaccctgaactgattttttgtcaaaataaaatttaataataattcga

SEQ ID NO: 362184 - DNA, 1066 bp, Cannabis indica
aatcttcttccttattcttaagcgaatacaactaacgaggattaggctattatcgaactgctcggggctgaacctctataaaatttctatgtcttcttattattattatttgttttacgtattcttattacgacatatcatttatcgcttatcaaaagactcattgtcgttggctaaaagcgaagtcaacaattatcaaataaaatcgctatttatattatttattaattagactacacaaagtctcttaattaacaaataaaccctaaaattgtatttcttcacaatcaagtcatatcttagtaagaattcataaataagacgtaatctaatttagaattataattgattaattaaaatcaattaactgagtcttacaagaagtttatctcaactagtatggggactatgggcctatataaccgagcttccaataataacttattaattcctccttgcgccattatagatttagaattgcactctagattatatagaatgctctatatgttccacgatatggatgcgctaagaatatccttttgttataatcctaataatcaatgatcctctatagatgatttacattgtctacagacaaatttaccgttacacccttcaatgtattttattcttaaaacacttagatacctataaatgatattttagtgaactaatataatcattgaaatgggcgctcaatcatttatctctattaagccaagctcgaaagaaatcatcgtttcacttctatgtccagatagaagttgtggattctgtatctatgattagcactccgactcaattgaactaccatgtccttaatctatattgaaaaacagtgtttttacaaatgtcaattatatataagaaaatataaaactgtatgtgtctgtagaaacagaaagtaattctgttactgcagaaaccagttctgcaatgacaaaacagtacatacagaatataaattatttgcagaaaaattaataacttgacacaagagatttatacgtggtatcagtgttctcgcgagcactactagtccacggggccacgcccagagaat

SEQ ID NO: 362185 - DNA, 639 bp, Cannabis indica
ttaattaaatatagaattattactaactagattctttctgaagcttattttaattattttattaaatattcctatttaaattgtaaattagttatttctaactaatttttttatcaacttagatttgaatatcttttgaatttcaaaattaagttgaggaattctaggaattagttattgaagattcttaagatattttttaagttagaattttttttaaattttggatcaacttaaaatggaatacctttcaaattaagttggtgacaacttaatttgatatttaattaaattttgtttgaaaaataatttaagttagaaattttgttatttttgaacaacttaagttagatatttttcaaaatatttattttattatattttaaaatttcgaaattttatatacttttatataatgattttcgaaaattaaatattgaaaattaaattaaagttgaaaattaatttttaattaagtttggatcaactttaaattaattaattttcattattaaaatatatggattaaaataaataattaattaaaaatatatatatatttttttttaaataatgagctttaatcaagagatatttgatctccattgttggtcttacaatagttaaatgttttcaata

SEQ ID NO: 362186 - DNA, 165 bp, Cannabis indica
tttatctaaggaaaagtttcaactattctagaaaaaataaaggccaagaaaagaattacttgaatcttagaccagacacttgctgttgagtgggagtaattagtaggtatcagattaatccaggacaaatcagatttctagactttccttagtgctagaaagtct

SEQ ID NO: 362187 - DNA, 887 bp, Cannabis indica
aattttaaagtaataataataatttactaacaattaaatttaattttgatttaaaatttattaaagatatctaatatttaattaaaatattaattgaaacaaaatatctccaaaatgatctcttttgtgtagattaatttaataaaaatattatgataattgtgtgtatgtgatttataaatttattaactaatccaaatgtgagttaatatttggttgaatttcatgcatgtttgtggtgataaatgtgtgacaattataaggtattttgtgtgaacaatgtgttagtccaaagattgcatattgtttgacataatttattgtcaatgtttgatcactacaacaagagtaccgcttacaattaatattactgtccaaagacttaatattaatgttgtgtttggtatcttgagataggattagccattatttgaatttattgttttatttagattctaatatgagcatgttatttatgtagttgtattgttcttttcaactgttgctagtgtatctgctaatcttaattcggtaccggtccttaatggtaataactttaaggacttgaaggacaacatttttattgttcttgactgcatggatcttgaccttgcattaaggatggatcgtcctgctcctcttacgaatactagtaccttcaagcaaaggaggatatatgagaagtgggaccgttcaaatcgcatgagtcttatgatcattaagcgcggcatacctgaggcttttaggggtacggtgtctgaggaggtcaccgatgccacaactttccttgctgaaattgagaagcgctttgcaaaacgcgataaggcagaaacaagtactcttttgaagaaacttatttccataaagtttaagggcaaggaaaatat

SEQ ID NO: 362188 - DNA, 661 bp, Cannabis indica
tccaagtgtcgaaacctgaaattgacgaaaacaaatgtaattttattccaaaaaataataataaagaagaaaattaactctaaaaataacataaataataggctaaacatatcctaacaaccagcatcgtttttgtactttttttgtaacaaatcaggtcatatggcacgcaagtgtcaaaacaagtctagttctgctccgcaggctaacctaattgaagagttttcttatacaactatgatttcaaagatcaacctcattggtggaacaaaagggtagtggataaacactggcgcttctcgccaagtctgctatgatcatgctatgtttaagacatacactgctatgaccgaggataagaaagtattgttaggaaactagcacactacaattattgatggtaccggtgatgtggaattaaattttacctctaagaaaactgtgaaactcataaagaagtcatgcatactccaaagatgagaaagaatatagtcttgggttatctcctcaacaaggagagttttacatgttggacaccacaacacgtgaaaacgtaattattttattattgtaaaagcaattacaccaagacttgaacaatcacaatacacaccaagtactcactcttttatttactagacactcacacttaaatgtttac

SEQ ID NO: 362189 - DNA, 826 bp, Cannabis indica
tttttccgttaactttaacaaaagttaagagagttaacagaggttgttagtttaattagttaaaattattttattcttttcaaataaataagattaatcatatcatgttatttttttttgttttaacgattttatcgaaagtcaagtagaaaggtacaagtttattgctaggctcaacgattggtattttgtgattttgtgatgaagcgattcttcaaagaaattcttggtgactatatatgatcaaataaaccctacaactttctcaaagcatttctttaaagtttccctcttttaggacatggaagcaaccactagcacattcgaaagatgaattaatttttgattgggttctggaatagagaggaaataaagccatggctatgtccattgctccaagttacgcgccatcaaatacttctgaatttttcaatttgaatgattttcgatatcgatacaccaatttacttcccctgtttttatttgttttggatacatgtatgattgaggaggagattccaaagtagcagggcttagagcaatcgacttttgcaatttccagtaggagattcttcagtgctgcctcccatgttcaatatttgtttcaaaccatgtaaggttattgttcattagtttttttgttgttcatacaattgatgtgctttttaatttgttatcatgtctacacccactaattttttgaccactcttgaagttacacacatatatgcatgttacatatctcctaaataatatattatctatattttaatgtgttattgttagagattttataataatggaagaaaatcaagatttattacaa

SEQ ID NO: 362190 - DNA, 604 bp, Cannabis indica
ctcctattttctctctttgattcctatgaacccagaatcctcgacccctttctcaatatgtttgtggggtatttatagtgtttttctgggggatccctagaactaaatcacttgtctttctgtgcagttttaataggggcacatattcctagcagatacaaaataggaaatacatgacctataccgtaggtatcttaggggttaggtggatataatcttttatcccctcttggttgatgtgattcctcacaaagtagctgtcactagccttactaatcacaacgtaatagctgaaaaagaggagttgcgccatcagtcatatcgtttatggtagttttaatacgtcttccccatgcaacattaaatgcaaggtgattgttcaatagagtccagcacctcccggagctgccttaatatggccctggcctccaggatcataaagatccttctcatatcttttccgggagtcatctttccagagacactcctctgttggctaaaacttggttgatttctttaagagctgatcctctcagctccacgtgtcgtctatatacaggtccacgtattttgggaaaaatcaggggcaacatttaccccccaa

SEQ ID NO: 362191 - DNA, 636 bp, Cannabis indica
tctgggttcgggtccgggtccaggtctgggtccaggttcgagtctggggtctaggtttgggtccgggttcggggttcgggtttatgtctaggtccatgttcgggttcgggtgtgtgtccagtccgagtctgtgttcgggtctgggttcgggtcctgggtccaggttcgggccccgggtccgggtccgcgtctcgggtttgggtctaggtctaggtccagggtttgggttcaagttcgggttcgggtctcgggtccgggttcggggttcgggaatgtgtccaggtccgagtctaggtctgagttcgggtccgagtcttggttccgagtctgggtccaggtttgggccctagattcgcgttcgagtccccagttggggtcccgatctagggtgtggtccaggtctgggtcccgggtttgggtttgagcttgggttcgggtcttgggtccgggttcgtttcagagattggtgttgacagtgaatgtaacgccccgatttcccgagacgtcacacttactagtccgtttaaaaccatttatagaaaaacaataaactaatttattgaaaataattaaagcatgagatctcattatttaaaacaaaaactcttgattcctttataaatttttaaacattaa

SEQ ID NO: 362192 - DNA, 536 bp, Cannabis indica
catgattatagttatcttattttaaatttaaataaggtcaaataatttaaaaatatttaatatctgaccttaaaataaaaaaaataagataaaataattaaatttaaaaataagatataaaatcaagcaaaaagatagatatttacttgttttcaaattcaaattacactaataactaaaattaaatttaaaaaattcaaattaatttatttctaatattaaatttgaaaattgaaaattaaaaatcaaaatacaaacctacacaaaaaatcggaagttaattccatgaaatagcatgaaaaaacgaggaaaaacgaaaaaattgtgagttgtacggacagtatgcattgcatactgtccgcacgcgcgcaccagggtgcttgaccgagagacgccggcgcaagaggctgcatgcaacctattccgcgcacggacgcctgggttttagacaaaatcttgtctgcgcgcgtgctgtccgagggatgcccttcatgcgcgcgcgtggctattgcaccaccctgatatttttcgaaact

SEQ ID NO: 362193 - DNA, 1214 bp, Cannabis indica
atttaaaccactagcatgtaaaattcatgcaaacatcaatcacttcaaatttcttatattgataactaatcagattgtaaagagttttatttagggcataaaacccaacagtctctcattgacatctcagcttttcttgggataattgaatacacgtgtcctccaaacaggagtctggtcttgagtttctaggtgagagaaatctcactataacacatgcccctagtttcgtgatgtgacagatgcggtcatgagggaaactatacgcgagagacatgtgaaaggttgtcacgaggaggtgacctttggttgtcccattgagggtttcgaaaaatgacgactgtaattattttgtcttatcctatttatggtgcaatgtcacgaaactcttcggttttcgtgtaggcgtgcccatcgctggccgttggataggacgaccttaggcattctagctgccacgtgtcataattccaatttatgagggatacgagtatttaaacttattgatacaaaataacctcctcattttccctctcattcttaacttccttttctctcttttacttatattcagagaaattcccatactctgtgcagattttttgcttcttcctcttgaatctcttcagtttcagaggtgatcgaaaccagccgcagggagaatcatcaaaactaaggttagtttcgaatccacttgattttttggtttcaatctaaaaacaaagctgcattttctgaatttttatgtttcaaaaaggttttgaaaatacatgttcatatatatagggctatattcttttgtgtagaactgggtaatcccacctttcttgcttgtttatttcttgaatacacgcgagtattcggatgaacacttcgaatactcgcatacctgcttgccttaggtttcacagagactatatcattcctagtcgttatttagaacctaaggttttatatcctctgtatattttgttgtggggacactggttaagtctttcaaatggtgggcgtgtcgcaatattctaatgctcatacgtgcgatcgtatgttccttgaggtactgcgatatgcccagccatttgcgacacacgccagtgttttctgtcccaatataagcgtattctttggctagtagattttctcgaaacggtgggtgtttcccagtagcttcagggtcatgatcgaaacgcatgctccttgggtcactgggatac

SEQ ID NO: 362194 - DNA, 658 bp, Cannabis indica
gcctctacgagtctacactatcgtacttgtggttagattttgaataaagagcaattcttgattctgctctcaatgaaagcacagaaatgttgacctcgctttagccaacgacaacgagcctaatttagtaagacataagtgatttatagcaatcgatatataacaaagcaatataaagacacaagaattttatagaggttcaaccccgagacgtttggtaatagcctaatcctcgttacttgtattgacttaagagcaaggagaaaggttcattttcttatagctcttacaacagtatctctgaatatgtattcttagataatatctttagggtatagtctcgactaaactgtttgcgaccttttgcccagtgaacatggatcactatttatagggctgtgaacttggagaggaagtgtttcccctctcgttacaatagatgtaagaagaaggattacacgatccctacagtatacattgatcgtgggatatatgcggaatacattgatcgtgggataaatgcagcatacactgatcgtgggatcttgggtatgccatatctctattatctgatccccaagttatggggatttcgttgatgactcacaatgcggaaagcttagctctgggcatgccagcgaggcatcctgctcgtact

SEQ ID NO: 362195 - DNA, 730 bp, Cannabis indica
ttaccataaatggaaaaattattttgtcaactaacttgccaaaaaaggactttacaactacgctaaaaatttaaaagcgccaaggctgcatcctaagagattggaatcacaacccgtttattgaaaatgaagccaaattcaatataaagatcctgttggaaatttaatatcgattgggcatctcatgtttgtaaataaattttctctaaaatttaataattaaaaacattgataaaaaagattatgtactcccaaaaactaaaaggtatgttctttttttactttcttccaatctgcttcataacttcaaagttctccatttcggacatcacatcacctgataaccattaccatcatccgtatgaagctaaaaccttcaaaaccaagaatattacatatagtgaaataagtccactaactttattagtagtgggatccaaatagtcgtataccaaccaacaaaatacctcacatttacaaaacaaaaaaaatatagatatgaataagaaaacaatataaatgtaaatgaaatcagaattcacaacctatcaaaactaaaacccaactcatggatggaagcgattacttttctaaacattaaataataaaaatgaaagaatgaagaagggatttacaaagggaaatttgattttctatacttaaaaaaccttaatattttattcttaaaccaatacatttcaaactaaaaaaatatgacacttttatctaa

SEQ ID NO: 362196 - DNA, 754 bp, Cannabis indica
acaatcacaacactattaagtgatacgctaaatgacttcccggggacttaaactagaaactaaaagtttccctatcgataaaaagcatggcaataccctaaataacataaaaacgagaaaaactagggttcctgaaaatcccccaaccggtagaccggttctgtaaccggaattccggttctgggaattcctgaaccccatccggaattccggttgcacatccggaattccggttcctcgcaggaaacactcaaaaattcataactcattcaaatcgaacccaattcatatcaaaccttccagacctgttctaaataccccaaagaacatttctaaagcaataacacagcccagaaaacacaaaattaaaaatcaccattaaagctccaagctttgagttcaaaactcaaacttggttaaacatcactaacatgcattcaaaccagctcaaatcttcctaaatatgcatataaaaacttctgaaaacataggaaatcaaccccaacaacacagcaacaaaactcacattttcactttgaaaaaccatagcttttgaacaaaaaaattctcaaactagaacaagggtaactagcatgcatatctacatatctaatctcacttaattcagcattttaatcacaaaaacaacaacaacaactaacagcagtaacaacaccaaaaactaacatgcaaatcatcattttcttccgaaaattctaagaaacttaaaagaaagctatagaaatcataccaa

SEQ ID NO: 362197 - DNA, 540 bp, Cannabis indica
ttcaaaaaaatgatagcactagctgttgcatcttcaggtattgcaacttctattttatctggcgatggaacagctcattctctatttaaaataccctttcacttagataattttagttcttgtgcagttagtaaacaattaggtttaagtaaattattacaactaacaaaacttattatttgggatgaggcactaatgtcaaacaaagaagctattgaaagacataaataattccactcttccttttggtggtaaagttatagtttttggaggtgatttccgtcaagtatttgttgttcctaaaggtacaagagaacaaatgattaatgcaagtttagtaaaatctgagttatggcccttatttactaaaattacattaacagacaatatgcgtgccaaacaagatcccttatttagcaattatttattaaatattggcaatggaaccgagccaactatagatggaaagatacagctactctcatcgatgattttaccttatgaggatgatgatacttcgctaaataacttaatagattt

SEQ ID NO: 362198 - DNA, 635 bp, Cannabis indica
aataagttgcaaaccagcttccagagacaatttttcgccgcaaggaaagttaatctggaggtcagcgccttgactaacatcaagcagctgcctacggagacattgaagaatttcataaagaggttcaaggaagaagccataaaaaccaagaaagttgatgacggacaacagctccctcttcttcaagtgggcatccgtacagggactccattctggaacgagttacagcaagaaggggcttccaacattcaagatttctaaaagagagtccagaaatatatgaacctggaagaggccaaaatagtggcctatgggggatattatcccactggaatagcaggatatgtgcccggagcacagctcccaagcactttgccaacagccactccaccgatcagcggcatacaattttccactactcccggatatagtcaaggccaggcgttggaccccgcatcttcccactatggaaatccctcggggattggtggacaagccccatcacactctgctccgaccgcaagtttagccggtccttctcaaggctctcggagcaaaaggtcctccaaaggcagcaactggacggaggataagcagcagaaaagggggtatactgtcgggttttatgccctaaa

SEQ ID NO: 362199 - DNA, 657 bp, Cannabis indica
ggatattatggaaaaaattaagcaattcatttttttacagaacttaattttgattttatttgaattagttatgaatttttgaatatcaaaaaaatcaggaggtggtgacacctcccttacgcgagcggatgccttgtttttctcgggtgcacgcgcctcagacatgctcatgtccgagatttctcagtctgataggcgtgattttgtttgaagaaggttgtgcgcgcgcagaaatgctgctggcagcattcgtgatagtgaaatcagccccaatccgactagtgcatgcccctagatggtatgcaatgcataccatccaagccaaatgcattcttttccaattttttttatttttttttcatgcttttttatggaattaatttcgattttttttgtgtagtattgtgtttagattttgatttttcatatttcaaatctaattatcaaaattaaattaattaatatttttttaaattaatttaagatattagtgaaatttgaagcttgaaaatagttaaaaatctatctttttgcttagtttgttatcttattcttttaaaaaaaatttgattattttatcttatttataaatttaagatcagatatttaatatttttaaattatttaattttttttaataaaatgaccttatttgaa

SEQ ID NO: 362200 - DNA, 540 bp, Cannabis indica
aggatcataggatattatcacaacaaccttttagacactaattgatgtgatgtgtgaatggttatttgttgtttcaagaaaaaaaaaagaatggtgatttgtcatttaattcaaaatgaaaataataattatcttttttctaatgaaatattgatctagagtctgactttccaatttttttttttctttttgtcattttgttttaatttttttaaagggtttggtctgatatagtcaaagggcgcaagtaaagatgtgatgcgattatctatattttacttaaggctaattaggattttgaactttgtacatgtataaaatcatgcctcttgaatttttaaggttcattaaatgtcccctgaactatagagattgttggatttaaggacttttttccaattttagtaaaaaagtctaacatgtatgaaaattcaggggcataatttaatacatgtcaaagttcgataggcatgatttggtagatatcaaagtatggggagcatgatttagtacataaacaatcattgaaatagtaaaatt

SEQ ID NO: 362201 - DNA, 691 bp, Cannabis indica
taacaatcacaacactaataagtgatacgctaaatcacttcacggggactaaaactagaagccaaaagtttccgtatcgataaaaagcatggcaataccccaaataacatcaaaacgagaaaatctagggttcctaaaaatttcccaaccggaattccggttctgggagttcctaaaccctcatccggaatttcggttcctcgcaggaaacatggaaaaattcataacttgctcaaatcaaatccaattcaaacaaaaccttccagacctgttctaaataccccatagaacatttctaaagcaacaaaacaacccaaaacacacagatacttaaaatgccattaaagctccaagctttgagttcaaaactcaaacttggtgaaatctaattaacatgcatccaaatcagttcaaacctacttaaacatgcatattataaccacagaaaacgtcagcaagcaacaacaataagtgcaacaacagattcttcattttctttgaaaaacataattttgagctaaaatttcatatcttgataaaaccaaataatcaccaacacattcatgcttgaatcaacaaaaaacatcataattaaacctctgaaatctgaagcaaccataaacaataaccacagccacaaatcattaagcatgcattactcaactttcttaaaaaccaagaaactaaaaga

SEQ ID NO: 362202 - DNA, 474 bp, Cannabis indica
attagaggtgtgcagtgtttccagccttctattgagactcctaatgcaaagaataggtacttaaaatgcccattgtcatgttggactaagtctgttactgttcctgcaaaattatgagagagtatggtcacattagagctactgattaagtttttataagattaagtttagtttaagaccaaggaagttatacctgggttgcattttttgatcatgtatagaatccctggtatttcattgtatgaatcatgtgggcagctgtaaagaccgcttagcttaatttggaaattagcagtaattatttatactgttattgtggaattctgagatgtatttttatgtcatgtagtaattctcataattttgcatttccgctgcctagtatcatggaactcggtatttggctcagtaaaatcacaacttagtatgttagtagtgtgggacggattagtagacattgggaatgtcggtaat

SEQ ID NO: 362203 - DNA, 946 bp, Cannabis indica
agtttagatccattgacagaaaatggatattataacttgtgaaagtcatactatactgtccaatatattttaggaaaccgaaattaaaaatttctatttagaatctaaaattaaaagccaaagacttaaatttaaactaaatatacaatgaatgattattctttcttggaccaccactactaatctaactttaagtttaggttgccttaagtaagcatatacaagtatgaaattttctgagatcggtgatttatatcatttcgaaatagagaatcaggaatatagttatttgcaccattcaatttcataagagaaattagactgacatcataagtagatgatttataaaccatttatctaatgatatactatttaagataattcgaaatgaaaagctaagaggaaaaactaaaggataatttcaaattaaataagaatccaacgatgttccgtttaggcgagagtcaaagttattcttattttataaatttctttattgttttatattgtaaatactagtctaagttgtcatctttggatgtacagctagatgtcacatttataaatatttatctatcgagaattaacgctattatgtttgtctaatggatgacagtcctttgagatttgtctcattaaaaataacaagctaagttagaccaacaatgaagattaaaaattatactacaattaataacagaaaataacagggttcaacataaagtcatacacattaaaaaattatgatacatttaacaagtaagaaagacacgtaaaaatacaaaacaaacacatcttaaataatttctaaattttccaacaaactgatacagtgtttcgttttgagtcaaaagtcaaagatatcattcattgaatagagtagtcaactcatctaaaatggaaatcattctaccaaccttttcttcgatcgaaaagggaatccgac

SEQ ID NO: 362204 - DNA, 941 bp, Cannabis indica
taaaaaaaattattattcgtcctgaatttatcttcggaactaatgaaaatgctcatctggttaaactatcaaaacattcaaatttaattaaaataatattgaaaatttaactaattctaaatgtaggatgctgaccctttacgtggcaacatctaataatttgttattttttttatttaaaaaaaaagtcacccaataatttctcataaaccaaaaattctgaactaatgtggagagaaacaattataacctgatcgagccaaaaaaaaaaaacaaattgaaaaattctttagcaatatgtatatataatatatgtaaatagtagtaaattcttatttagaataaaatccaactaaataacataagtatatttagaaaaccttatcgtagatgtacaacagcaaaaacttaatcgtatttttttttttggatttaatgcgtatttattttatttattttattatatataaataaaagtgactcatgaatttctcataaaccaagaattctgttatataggcacattttatatagaatagatataagtaaattaatatattatttaaaccttaaaatgagagaatatatttatatattaaataatatttttatcatatattacaataagccattttttcactttatatttaataattaaattgttaaattaaattttcctttttaaggagttatatttctgtaacacaccatgtttgtgcactgtattacatgcatatgtataacttaggattaggaagacatatgtgtcttctgatttctcaattttttaataaattaaatactaaacatatcaaaaataaattaatttttgatatggaagattatgaagttaaccgagtgctagaagtgtcaggtttctcaaggcaaaacactccatttaggtaccttggtgtccccatttgtgctaaaaaaatttcaaa

SEQ ID NO: 362205 - DNA, 564 bp, Cannabis indica
ttttttttttataaaagaaaaaaaaaataaacaaaattaggcccttttcttgcgtgggcactgggccctgtgcagtaggtctgcctgcacaccattagggccgggcctgaagtggaatcactttctctatccttttcaactgagcccaaagtagtaggattgtcgaaggaattattctcaataccttcagctttccttttgtccttatctgcattactggagaaggatctccatgcaagtgacaatgtccgttcataagcacgtaattcaacgtccagcttttctatttcggacgagttccaattgttaacaacgaattgtttaaactcaggtgataagctgttgagaacaaaatgaactctttgctctccagataaaacaattcctaggatagctgctttctggaatttcatgtttatcatgagcaagtgtgaagtgatactctgaccaggagtcatcttcacactttggagttcattcctaaaggcatattctagatgaggattagggtgtgtgttgtacatttttgacactacaaatatcaataaacagaaataaattatt

SEQ ID NO: 362206 - DNA, 911 bp, Cannabis indica
aaaaaagtaaacggactcagttaaaattaggactaacggacaaatataaaagcacgaccttaaagactattactactattttttgaggtttgaagatttatctgtatcaaactgaacttttttaaaaacttttgccgcaaattttccttaagagaataatgaatagaagacaataaagtctgaaaatataaaaagtggaaaaagctaaagggtactattgaaaggcatatttttattcttgagacagcagggtcctcctgcagtgcctgttccagagataccagtggcacctgcccctgttgtgcaggccgaaccagttgtgacaaagaaccggatggaacccttgtatgaaaggttccgcaagcaagcacctccagtttttctaggaggttcgaaagttatgaaagccgagcaatggctaacagtgattacaatgatcttgaatttcatgggcgtcacgggaaatgatagagtggtctgtgccactttttaattttaagaagatgctttagtttggtgggacatggtgtccatgatacatgacgttactactatgacatgggagaaattccaggagctttttaatgccaagtattataatgaggccgtcagaagtgccaagagaaaagagttcattcacttgacccagaaggaaaacataagtgttacagagtatacgacccagtttgatcgtttggcgaggttggcctcgggtatagtgccaagtaatttcagcaaaaaggaaaagtatctgaatggattgaatgcgaagattagacatgatctaatgattactacggatgacaaaaccacctatgctgaaatggtggaaaaggcactgcgagctgagggcgcagttggatgcatggtagagtctgctaggactccagtggttggcgaggctcctaccc

SEQ ID NO: 362207 - DNA, 718 bp, Cannabis indica
aattagattggaatcctaatcctctttgattatgccattcaaaattagagagaaaaaggaagaagagaaaagacttttgaccttttacttatcatttatctctttcctttaatattctctaatttttccttaattttaatagcattaggaattgttgttgcctttttattttgtattcctattcctagttgtataggaatttcaaaatatttttttaaaaaggagaaggaaaaagatataattatatattttacttattatttacctcttccttagaatgtgtcaaatttaaaagactctcattaggaaattgaaatcaactataaataagtgagctgagaaccaaattttcacactttccttcttatcccacacgctatagaatttcgagagaaatctcacgatttcatcttcatcaagccttcaagccttcctcactaagaactgtatcattactgtagtgctcattagagcttttcctactgtaagcggtagacaaatctgtccaagtggtgctacgctttgatcagagaatttttagactagttgagtgcaaggaaccaactctttaagctggagccccattttttcatatgttgttttgaatagaatatataaggaagctccattgtttaccatggtctgtgccaccattttgtttgaaatctgcacttcaacaaccaaagggtcgttgtgtggaaaaatgacatggctagag

SEQ ID NO: 362208 - DNA, 571 bp, Cannabis indica
caggtggtagataagtgagatggtcaaaggttgttgggtgttaaccttccaatgagacttggtgtcgatcactatgaaggtaatcatagtgatgttggccccagggcgattttgactgtgagtgtaaatttgattttatcacagggaggaatgttggctaacttgaaaccatacatgagttgcttgtatgtctagatctcttagggagtgacccattcttttcaaggtctgttttgattagaatatttggtgattctcaatcattaaccattacctttgtcaccattatgtttgaaatttcattgatactgtttgaacttgactgctcttgtcccccaacattaatctcttagtaactagggtgataaactttgaagtttgtatgttgaagctatctgctatcagcgagatagacccctgttgagatgtagtgggttattgcttgtgtgcttggtgatgaagcataagttcactttatgatcataaggaagatgaatcactgtgggagagtagtgcgaaaaaccctccaaatcttctgtattggggcaaaatcacaggttgttgaagaacc

SEQ ID NO: 362209 - DNA, 768 bp, Cannabis indica
agagcaagaggttgctcttgtgcgcaagcgcaagggcaagatggtagaagaggagccttctaaacgcccccggagggtggacactccggccccgagtcatgactccgggatcccctccgaggcggaggaatacgcagtgcctctcggcattgtgttgactccgattcctggagacgaggagaggcagaatcttcggatagccaagcacaactatgcccttgatgaatacacccgggggcatgccgaagtggaggccttgaagagggtcctacgggaggagcagcaaaatgtcctcaatgtggaggacttccggaatccgtgggacctgaatatggatccgcttacggactggtttaatcgcttcctggggcccaccttggctccttttgccgcggagatgaccagcgagtatgtctcccacatgactcaattcccgcccaaacggtacgctgcttgtgcatccttgaactccgtctaccaagttcaagacatcagcaacaccatggccgcggtaagcacttgattcatttcttccctcaatattttgtctaaggcattcgatctcactcttttctcctttttcaaatttctgcggagactagccgcctctcctggaccatcgtcaatcatggcttcgtcgtgtccgaattcggggggatagacgaggtcgtgaggattctgcaggacctgtctgctgagaggcgggcgatccaagaggaggctgagcgaaaggaggccctcggcaaagctcgaggaggaggccaaaca

SEQ ID NO: 362210 - DNA, 843 bp, Cannabis indica
gattttatacttgagttcccgagcacagaggtagcggttgtagagggtggaaatgacatcgccatgatagacaaagaggtatggacattgtatgtcgatggggcctcaaataatgaaggttctggcagtgggatattgttaatcagtcccaataatttcaaggtacacgctgctctacgtttcgaattctctgcatctaacaatgaagccgagtatgaggctttaatcgcaggtctgaaattggctctcgagatgaaagtcgaatacctacaagcatttagcgactctcaaatcgtggtatgtcaagtaagtggagaatacctagcgagaggcggaagattggttaaatacttagccatcgtccgtgaaatcatgcagaaattcaaacatgtagttgtatctcgagtaccgcgtactcaaaatgcccatgcagacgccctggcccgactggcctccactagagaagccgagttactcgacgtaattccggtagacgtattgtcacatccaaccatagatcgagaaacaatcatggagatcgatgacgctcaggaaattacctggatgagtcctatcatcgcatacctcgacaagggggtcttacctaatgataaaatagaagcaaggaaattgcgacaacgagcagcccgctatgtgatatatgaccagagcttgtatcgcagaagttttagtcaaccacttctcaagtgtatcagtggagaagactgcggttatatactgcgagaagtacatgagggaatttgtggcaatcacactggaggcaattcccttgccttaaagatcatgcggcaagggtattactggccaacattgcgacaagat

SEQ ID NO: 362211 - DNA, 703 bp, Cannabis indica
tcaaccaccataacattgtctactacatataaggtaaccaagtaaaacatacataatatcatatcgacgggatacatgtattatgtatgagttgaccttgaagacattttaatctaataaaaatcattaacaatcaaaccaaacatgcatgaggtacaacaaaattgagactatgcgcattcatctccttttgtacatgtcacttcaataaacaacacatatatacatatatatgtccacaataactagaagtgactacaatatcattatgcaagttcaaaacacaaatcataagcattccatacaagatactagcatgttcaatacataatagaaaaactcccactgaactcaacaagctaggctcataacaatcccattcgagcaacatgctccaaaaatacacatatgggtaagcctttcgttagtgggtctgctaacatgtcaatgctaggcgtgtattcaatggaaataagagactcagtaactttctctttaacaaaatagtagtttatgtcaatgtgtttagaacgggaagtacttctaacatttctagagaaagctactgctgcgaaattatcacaatacaattttaggggcctcgagatagagtccataacacccaatgctgaaatgaagttccgcagccatattgcctgacaagtagcctcataacacgccatatgctcgatctgcctccatt

SEQ ID NO: 362212 - DNA, 601 bp, Cannabis indica
gcaatgttatgcactagacctgacatatgctatgcagtaggaattgtgagcaggtatcagacaaacccaggacaggaacattgggctgcagttaagcatattctgaaatatttgaaaagtattaagcattatgtgttagtctacaagtgtggtgctttaaatcccgtaggctataccgactcatatttccaggcttgtcttgatgacaaaatgtctacatttgggatggttttcactcttgggggtggagcagttgtttggagaacagctaagcgatatatcagactctaccatggagtaggagtgtcaatgtgtcgggtcgaacataattcggctatgatccgacctgatccagattatgtaaggatctgccccgctccgccctgctagattagatactcgaatcagatcagaactgacccaacttatttggatcagatctgatccgacccgactattttttttaagaattttaatattaacttataattttatatcaatgggtgtgggtcctgagcccgggtttcagggtccgtgttccaggatccaagtccgtatttgggtccgggtccggcacctgggtctggcttcgagttcaggt

SEQ ID NO: 362213 - DNA, 805 bp, Cannabis indica
aggtccaggagatcaaggagcaggacgatgtccgtcctagcagtccctccgaggcggaggaagaggaggaggttgcacccccaaactacgggggatacaatgagaccggggagccagttgatgctgatggccacgtctttgttgagtgcgtggactacgccagtgaggaacttactgttgcggttcctcatagaaggtaaggtactttgggttccaggtgggtgagccctccatccaaggttactaaggtgcgcctgcgggatctcaaccaggatggctacctgggcgaattggactgttacattcccgcccacaataatcgagccacaaaccctgaaaggggaatgtgcgcctgttcgggggctcatgccagcaaggggcattgttgtaggaatgtggcagacttcttcctcctctgtccgacccaactgactccccaagaggtaagctggtttttctatttgaagtccacccttaagcaaggtagatcaaggtacttctatttctctcaaccagacttcaagtggttgacgggcactgaagataaggtcgttagcaagattgggcattttgttgacaagtatttcatggtggaaggcatgggcaccacccatactcagttccagtagatccccatacatcaccgccctcccttcactcttggccttagagattgagctcaaaggcttgctcaactgccgggggatgaccgaaatatcattcagttgacctccgcggacaattttgtgaagtacgggctctatctcaaggatttcattcctaagccagtgaaggagaggaagag

SEQ ID NO: 362214 - DNA, 556 bp, Cannabis indica
tgtaggtattatatttgattttatactatgtagctggtttaaaacttttaggatatttgacattcactccttataatatctttattgtataggtttgtatttcctaaagttgtttatttttttaattgttcaagtttttatatacggtcgaacaactatggagaaactattaaccaactgaatacaaacaatgtttttatatgtctaaattgtgctatgaatgtatttttattctttgtattccattactcctttttcctttattttagttatgttttatcaattcttgactgactgcctttaaaactgtaaagaagaagtcattccggtacttaatatttacaaagtgtcacaactgtaacaaaacgattttgcaactattaaaaaactgtttcaaatttcataaaaatgaaatcccatgtatttagaacatcacagatcaacctgtttgaatttgcacacagaattaaacaattcaaatatttcatatgtatctaattttattgtattaattgttgcatgtctttcgattgtgtccgtgttgaccacatttgct

SEQ ID NO: 362215 - DNA, 526 bp, Cannabis indica
ggagaaacttactttgaagaacaagttgaaatagcagaaaagaagaagaagaagtatggtggtgtttttagcagtaaaagaagaaggggttgtatggagagtgttgactggatttttagctaaccgacgcgcggagtcgtaataaatgagatttaaaccaaaatcacaataataaatgcagttaataacaccggaattcgcaataaatataaataaaagacatcggaatttaaagaggttcggccccagatgtcggtaatagcctactccccttgagttttattgatctgagttgcaaaagtcaagaacaagctcttgattgcaaagaatgagaagtgtttatttttctaagtgtttcaaattgcggatccccctcccaggtcttgggtgacccctaatataggggagggggtcggtgcttctcgcttcaggagatgcgaccgatgcggaactatctcaaccgtctccttgattttcggaggcagttggagtctgatttttaggataatatcccgctattttagtg

SEQ ID NO: 362216 - DNA, 708 bp, Cannabis indica
cactcaaataaggtattgtgatattatatccaagaacttaattggtatcaatttcattactacagtaacatattaattggaacaaatataagatcaagaatttgttctaataatttgctaattatgtttattatgttatacccacatttaatcaaaatatgtgtgccatagagatactgtggtgtattgagtatagtctagagttcaaaataaactacatatgttaatagcttaatctacccctacgtgatatagagatcatgtggagttatgaatataatccagagtttaatagatataaaagattattgaactgcatatattattcttaacttcttccatccctatcagatcaaaagatctttttattaacaaaatcttaataattgctgcaaaattaacaattattcataaacatagaattgaaattctaagtatttatgtggtattatctctttgcagagtttaatatatcatagaatttgtatcaataataaaatacaaacacacacaaatattataaacatttaaatataattagtattggcatacacaaaaaaagaaatatgaatctcaactcataaatgcaattcattaccaaaagagaaaactttattataatattctccaaaaaaaatgaatttcctgcaataatatgaaaaatatagaataaaatcccaaactaataattgaaatcaaattgttcat

SEQ ID NO: 362217 - DNA, 582 bp, Cannabis indica
attggagagagaaaactctctttagttggttgatagtgggccgaaccactttagtgagaagagtcattgactctttgttggattaatctcttcttgggctttggcttagtgggccgaaccttttgtgtttgggctgaaacaaagattgtaaaattgtatcagtttataaaattgacatgaacacataaaataataaaatttagaaaaataccaatttgcatataatattaattttgcttcttaaagtgtgttggttagaactataatttccaacagtggtatcagagccaagttatttccgcaaagagattcaaaataatacaatcaagaagcaaatttgaaagacattgaaaatcaagaacacaaggatggacatgaagaggaggaattagatattggagatttggaggacattctaaacctttatctaatttgattttttaacaaatacaatatgagtaattttaaagttgatgttgataagtttgatggatcaggtgactacagaatatggaggaggaaaataagatctctactggcacaacagaagctgttgagggtccttgaagaacccattgaatg

SEQ ID NO: 362218 - DNA, 902 bp, Cannabis indica
ttggggtttgggggtttacgatttgggattttgggttcgaggttcgagggttttgggtttaggatttgggggttcggggttaagttgttttacattaggtgtttgtgtttggggttttgagtttggggttttgggtttttaggtttgggatttaaggttttggggtttgggattaacggtttgagttttggtgtttagagtctttggattttggtgttttggggtttgaggtttagggtttgggcttttatgactagggtctagagtttaggatcttggaccaagtatttggggtatgaggttttaagtcttgggtttggtgtttgggttttagggtttcgagtttttgggttagggtttagggtttgggatttggggtatggtgtttttgtgtttggggttttcaggtttgctgtttttatgattagggtttgggatttagggtttgatgttttgggttttaaggttttacggtttagggttttgggatttggaatttagggtttcgagtttggggttttgcagttttggcatttggggttttagggttaggggaatcgttatgggaatgggctggggaatgggaataggaataggaataaaaattggaatgggaatgggcattgatcgaggaatgggaatggggattgagaataggaataggattgggaatgggccaaggaatgggaatgggaacgagaatggaaatgggaatgggtcgggaatgggaatgggaatcgcaatgggaatgggaatgggctggggaatggaaatggaaatgggaatgggaatgggaatagaatgggaatgggaacgagaatggaaatgggaatgggtcgggaatgggaatgggaatcggtaatgggaatgggaatgggctggggaatggaaatgggaatggg

SEQ ID NO: 362219 - DNA, 597 bp, Cannabis indica
aagtgggactattctacccaaacgttcgaacgagcaacggccagatacttgaacatcccctaccccttcattattctcaattcctgcctcagcagataatgtctcctttaacttcttccctttccctctaacaccaaccttcgaaggggaagcctcaacttcatatgaagcctacttctcaatctcttcctcactaagcagcttaaattgctccttaaaactaccaaggacgtgcaatattaagactctcgattattaagtaatgaacgctaaataaaagattaaaaataaaagatccatcatacactccaagtcactcacatctgcttttgatttatctacatatgcagtagcataagctttgaaattggcttggccgcatcgattaaataaaggaagggaattacaaatattgttttcaaaaccaaaaaatattagcgcgaaaataactgccacaaataacttactaatatttcgcccaagcttccttcgaatccttcttttatctcagctgcattctttttctctgcagcagcacctctcttccgtttatacaccattgtaaaaaccaattacacaagacaaaatatcttaaat

SEQ ID NO: 362220 - DNA, 577 bp, Cannabis indica
ggagtgttagagtattagctgtatattaggtgtaaaagaattagggtaacttgtatttagtagtttcctattttgttggtagtttcctatttcctagtctcctagctttgtatataaatatgtactattctatgaaataaacacataattcgattcactattttctacaatacaaagctcaggcttaagtaaatctcctaatttcacctagatttcattggaggctaaggtatatcatttatttttttagtgtgtagattcaaggttaagttttcatatatatgtatataaatatatataccattattatatactctaattactatgtatgaaatcttggtatttcataaaataattattgtttctcaaagatcacttcattgccatcaaaactaggactccacattcgagttaaaaaaaattaagtaacaaaatataagttttgtgtatgtaataacattcataggaagagtggcaatagtaaaagagaagttaactaaggtcttctgcctgactctttattgtttgttatttaatgtactgtataatatatatttaaataatatgtttataagat

SEQ ID NO: 362221 - DNA, 702 bp, Cannabis indica
tcaccagtcatggatcgaggacttgtattgtaagaccaaagaacttgtgagagctcgtccggccaggtccccttacgttcttcgagtttccctttgatggtgtgctttattattttattaacagcttcagtgtgtccgttgctttgtgggtaagcaactgcggagaatgctttcttaatacccagatcgtcacataattgtcgcatctctttacaatcgaactgctttccattgtctgagatgagtttgtaagggataccgaattgacaaattatggagttgtagacaaactcgcgcaacttagtcgctgtaatggttgcgagtgctttggcttcgacccattttgtaaaatagtctactgcgactactgcatatttgactccaccttttcctttgggtagctcgcctattaagtcgattccctatactgcgaaaggacatggacttgtgatagaatgtaggttactcggtggttgatgggtacaagtggctattcgctgacacttgtcgcatttcttcgcaaaagcgaaagcatcctgtcgcaaggttggccagtaatacccttgtcgcatgatttttaatgcaagagagttaccccctgtatgattgccacaaattcccccatgtacctctcgtaagcaatcttcaccgtcgatgcatttgagtagcggttgactaaaacttctgcgatataacctttta

SEQ ID NO: 362222 - DNA, 1207 bp, Cannabis indica
aggcaagttagattaaaaaaggggatgaaaaaatcttaagaggaaaaaggccttgaaaaactattagaaatctaataagattgactcgtggactatgtggaattttaactgcaaaaccacgtaaaaaatcctttgtgtctatactttttcctttactgtttttatttttctgtgtgatattatcactgttaggctcatatttggttaacaaaaatctgcattaacagtttggtgctttcattgagagccttcgtgaaaaagctcagaaaaaaccctccttttttaaagaaaaaaacatctccttcatggcagaaaacccataaaatgttagtacaccacacgaagaaactcatcaccgttctaggaaagagcccatgggctccagaaggtcttccaacccatagtctaaacggaccacccgctctaggaggacccaacatgagggtggccccagcacttggaccactcattctaagaggacccaacctgacgttggtcccagtacgcgaatgacacgctcgaggagaactcggcgtgggaatgactagaatcctggaataagggatgagagacccaaccgtggaggtactcagcctatgggagagagcacttatgaaacaaaaaactgccacctaagacgcctcctggaggaggcacagcggcggaatgctaaattagagcgtgatgcagccgcagctagggcggcaccagtactcaaaattaacctaaacctagagtgagaacaccacgaggcaaaactcgtggctcacgaactatgagacaggaaaatgtccaagaagaacaacctggggaaaatgattttccccttgaaaatctgaatgattggccagaaccctctcatagaaatgagaatgggaggcacccctatctgccacagttatgcaagactttctagttgtcgacctgccatcggcttacaatatattgttgggtcgcccaacattgattggactagggacagtcagttcgatcaagcacttatccctgaagttccaaacaccgggtggtgtgggggtggtgcgaggcggtcagctgttagcttgcgatttctatcgtatagaactacagcatagaaaagccggtcatcagttaatggcgatcttagcaaaagaaagcgaaaagaagaagaaggatcttaacccccgggttcaagatgaaagaaacttattaaaaccaattgaagaat

SEQ ID NO: 362223 - DNA, 1821 bp, Cannabis indica
ttgttattcctacttgctaagtgttattaatttctgaatgtgtgtgattttgtgttaaaccttacttgatttatacttattgatatttgtagtacccaatatgactatgaacaaccccatggtgtcactattgactgacaacaggctctctagagctaactttagcaaagggagagagaacattaatattgctttcattggtgaaaatgtcctgtttgtgttaactgaagaggctcctgagcagccaggtgagaatgcgaccaaggcagtcaaggaaaatttcgagcgttggcagaatgataacaacaaagctcgatactttatgctgtctagcatgtttgacaccttgaaaataaggtttgccaatactctcacggctgtagaaatcatgaactagttacctgaactgtttgggatggcgtcaattaaagctcattttgaggcgaccaagaatttcatcaatgcacggatgaaacctcatcagaacgtgcatgatcacctgctcgaaatgactagttacttccaagaggttgagaatcatggagctgttatagatcagacaactcaagtgagtttgatcttgaatagtttgactccagcttttctgccctttacatcaaattatgtcatgaacaagttggagcttgacttccacgagttaatcaacaaccttcagacatttgaaaatttaattggaggaccacagaaaggaggaactaaagctcctagttctggcactgctaatggtatggccaaggctgaggcaaacattgcctctacttcgaaacccagcaaaaagaagaattggaagaatagcaagaagcctcttaaagctgttaaaacagttaataaaaaaatggatgctaatccaaatgcaaaggaaaaaggaaagtgcttctattgcaacaaaaagggccactggaaaccccagtgtcctaattttttgcaaagaaacaaggtatttctatcattgctataaactcataagttttagagaattattatccccttgggttattaattctggatctaataaccatattaattttcttcttatttcagctccagctacttaaacttggattgctatcctagagagttgagtcggacggatggacataagggtggagattgtccaagtgaagatgaagctcaaaatctaattttatttttgatttaattgtttcaatttatgaacaattttgtttcaattattggtttgagattttattccctatttcatattattgcagacaattctttatgacaattttgagattattaataaagttttctctttaagaaattttcattattaattttatttatgaattgagcttcatgatttctttaacttatatgccaataccataatatatttatatgtttatcatgttttgtatgcgtttgtgctttattattgatacaaaatcgatggtatattcatctctgtaaagagataataccacataaacacttagaatttaaaattcaatgtttataaataattgttaattcttaaacattattaagattttgtttaataaaaagatcttttgatctgataggggtagaagaatttaagaagtaatatatccagttcaacgatcttttacatctattgaactctagattatattcataactccacaagatctctataagacttagatgtggaagaagctattgacatatgtagttcattttgaactctaaactatactcaatacacaatgatatctctatgacacacatattttgattagacatggatataatatagcaaattattagaacttattcttgatcttgtattttgtt

SEQ ID NO: 362224 - DNA, 552 bp, Cannabis indica
cttttaaataaataaaaaaaaactataccatcatttacaaacttattttattaaacttaaaaaattgttatcttttttaattattttattataaaaatacataaaatttatgtgttcattctactatttttaatatttgtcataaaatgaccattctttaatatattttaaaaataataaattatttatgtttctaacttcaaaattattactttgtttgtaatatacaattataaatattttatatccaactatatcacttaatcagcataaaaaaaaatcaaaatataaaaaattataaaagttagacaacaccgcgcgaagcgcgacttaattctctagtagatgaataaaacagagaatgttaaactaattaatttcttcttaatacatgatttcgaaaattactgtaatcatatgagtcatccgcttaaaatgctcggatgcccattcatttccttgagttgatatatgcgttctcactagactacacaaatacagtagaacctctatttaagaatactctattcaagaataacctctaatttgtta

SEQ ID NO: 362225 - DNA, 808 bp, Cannabis indica
accactaaatgcaacataaaatataaagttagtacaatgtaaaacatgttttaatactatagtacttttttatcgctatgtaccttattgttgccttcggaactaagtcgtgagtggctcgactcgcatgcatattcggaagcacgttgatctccttcgtagttaacaccaagatctggttattatgtggaaaatccccggttgcatggattagtgagggcaacagttcttcccaagtcttcaagatgggtgccatggcggtctaatgataaatgctggaatcacagtcgtacacgttaattttccacagctctatgtcaacttcaacagtcacccagtgcctatggtcgggaagatgcaaaatgaagtaaatgaactcattaccccccatctcgaaaagaattgggcctgtaattatggagaaaagctaaacaattaacaaaccataataaacttataatcatagttcaacatttaaaatcttactaaaacaatacctgatgaacacctctgcagtactccaggatataatcctcccaaacaaagtttctcctgggacccttgtgatttgtccatgcactgctgatcatgctggtaacaaatgtagagagaatgatacccttctgcagaaatgtcaatggatagtcgaagcgtcgcctcctcagcatatggactgctgcatctatatgctgcatataaaggttagagaaagaagttagacaacaaatatattaattgtagattagttgacttataaagtatagtaaaattataaattagtttacttacgtcatctgtaagccattcc

SEQ ID NO: 362226 - DNA, 499 bp, Cannabis indica
gcaatatattaattaacctacacgtggcagaccatgagccatcgatgaaacgaagacaatataattttttaagggaattttttaaaaataattttttttttatgtttaattataattttacagtataaaatttgtatttataaaatatgtttgtaaaattttaaaattataaaaatacatattactcaataaaaagtaaaaacaatagcgagaaattaaattcacgattattataaatcaactataaataaactataaaacaacaaaaaataatcaaaaaaacaatctcttagcaactataatacaactataaataaactataaaataatcaaaaaaacagtttattatttttctacgaaggtatttttgttaatataaatatttaaaatgtaaagataaaagaattttcgtgaactattttggtaattttttcacaattttagtcaattatgtagattttttaatattttttatcatgctgatttttttttttttttt

SEQ ID NO: 362227 - DNA, 480 bp, Cannabis indica
accaccaacgttcatttcaggttcttcataccctgttcctggattctgggtcctcttgattgtgtggtccgtgtacttgggctaccctcaggttgggtcctcctggaacgagtggtccgtgtacttgggccaccctcaagttgggtcttcctagaacgagtggtccgttttgatcgtgagttgggaggcctccgtgagcccattggctcttttccaggacgatgagtggtttcatcatgaggagtatgaacgttttatctgttcttagccaaggacaaagtttatatatatatatatcaggtagggtttctttttctgtagctttttttcacgtaaggctctcaatgaaaagcacaaaactgttaacacagattttcgttaaactatattaaaagcctaaaatcatgatggattttgcatagaaaaaataataggacagtaaaaagaaaaaaaagtaaaggaacacaaaaagactttttt

SEQ ID NO: 362228 - DNA, 654 bp, Cannabis indica
cctcacagtgataatttcacacaagaaaaatgaaagtagtaaagtaagaggtatgaacacaaaggtattttttacgtggttttgtatttaaaattttgcatagtccacaagtcaatcttattagatttctgaaagttttttaggacttgttttgtatgatttttccgtccctcttttgatcttacttgccactatttataattacataataggtagttaattacaaagttgattgtaatctttacaactttttcccccggaaatcttgtggtttgattacatatcacgtagtataaatgcggtcattatttgaaaatcacacagctgtaattttcctacttttcttggttaaaataattgtgtatttaaacacgtctttaattgtggtgttctgagatgcctcgataggagcttggttccagtgatcttgatagcaagctggagcccttttccctaactctctgaggtcgataatgtatgccttgttgcttctttatttgaaaacttaacgcttcattgtgacaatcgcaatttttatcaacacagagtttctcgagactcatttgaatgttagcttctgacttgtgaagattgtaagtctcactgagaagatgtccgaagttaactaggggaagttacaagaatgggccttcc

SEQ ID NO: 362229 - DNA, 655 bp, Cannabis indica
acctggacgcatgagtctatatttgtttatcgaggctgctgggtcactgggaccaactcgcattatagagagccgatctctatgttctcgcaggagggatactcacacatatcctggtacatgcgagttaaatccgttctttggtcctacacaatgcgagtcacacgaatgcgattagactatggtcatattcgcatcatctggcttattccagctcaggcgaggtttaaacccgaggagtctatcatggacatctcagcttttcttgaaaaactgaatacacgtgtcctccaaacaggagtctggtcttgagtttctaggtgagagaaatctcactataacaattacgctcgagtccgactatggcaaataaacctgagctattagactaaatggcggagggcagggtttagtaaaatcgtaccactactaaatgaccccctatctaccatatagacccaacagtcaagtatttaaccattatcttctcggtcaaaccatgtcacataaactataatctatctaattcaaataatgacaaactactatatatacattatttaaataacttaacaatcataactaaataatgtgaatcttataaacacactatttacacatatacttaaataacatgaatcttataaacatatta

SEQ ID NO: 362230 - DNA, 539 bp, Cannabis indica
ttacgaaattatatatgaatagagtaatgcgagcaaggcataaccaggttagactcggtaattataaccgagataaaccttactaaggccttattgtaaatagacgtgtgagcgtaacacgtaggtctatgccacatagacatatatagacgtgtgagagcaacacgtaggtctacgccacatagacatatataggcgtgtgagcgtaacacgcaggtctatagcaaatagacaaatagtgcagtggcaccattaattatgtgataaatatatatgtttagattaagagttatgcattcaaggcataattaggttggactcggtaacaagaaccgagatgaactgttctaaggccttattgtatttaggcgtgtgagtgcaacacctaggtctacaccatgtagatataaataggcatgtgagcgcaacatgcaggtctatgtcacacagacaaatttgaatggcattgttgtttatattatatgatgagcatattgttgatatgttttatactgtcttgctgggcttggctcacgggt

SEQ ID NO: 362231 - DNA, 711 bp, Cannabis indica
ttagaccaacaatgaagactcgaaaattatactacatgaattaaaaacagaaaaacaacaatagcaaatgacaggttcaatataaattcatacacatattcaaaaattattaaacatttagcaagtaataaagacatatgaaaatacaaaataaattttctctcaaataatttttaaggttttcaactagctgatatgcattgtctcgatatgcgagagtcaaagtatcatcagttgaatagagtagtcaactcatctaaaataaacacaatttgagcaaccatttattcgattaaaataagaatctaatattatcccggtaggcgagagtcaatgttattcttattttatgagctttcaccattattttatacttataaatttaattctaagcagtcaccgtagtgacgagtctaatagaaaaaaaaatttacaaagtactttatgtttcgagatctttacggtattaaatgttcaatgaaagaccatccataaacgggacgaagtctagcgtctcggtgtctcattgaaatactaaccatgtaagaccaacaatggagatcacatgttcttaaattaaagctcattattttaaagaattgtattttcatttgatatacatttcaatctatttattttaacattcatatatttatttaattaaaattactaatttagataaatctaaatataaattttaatttaatattt

SEQ ID NO: 362232 - DNA, 730 bp, Cannabis indica
gaagcccgattacccacatcaacgagtttcctttgcagatcaaagtttttgggtttgaagcttaaagattcaatggctggaggtatttcgatcctttattcatagtatatatatgtttgtttaattccgcattttatatgcacatacatatatttcagtttatacatataaatgtctaacaatgtatattctattcttatatataatttcttttctatatacaatgtaaaataagattaaacatttttttatgcatacaatttttttttcttttaatttgttatttattattttatttattttaatttattgttagagtcataaaataataataatttattttattttgttgctagttatgtgaaaaaaaaaaattttttttcacaaatattaaataatttaatattaaaaaaaaaccaatccaatttgcactttcgcggattgaatttgagctattgtgcgaattggattggatccaaaaaaataaaatatgcacttaatagtgcgaatcgaatgcactatgagcaaaatagtgcagattggattagatgaacacccctagtcacaacaagtattgtgactaaaaacacatttaattacaacaaattaatttttgtgagtactaatacatttagccacggaccttttaatcacaacataagaatagtgatttataattagtcacaattattttacttttagttacaagttttgttgtgattaaaagtaa

SEQ ID NO: 362233 - DNA, 964 bp, Cannabis indica
ttttatttttcttaaaagttgatcaagagtttacatatattataaataagttatattatatatcaaaaacagtaagaacgaacgaaccctcgttcctctactttcgacaaaactttatcccctatatttattttcttcaattttcaacccgaaacctagcgatctaacctccaatagtagcaggatagcgaattctcatagcggggaagcttaagggcctaggatcatcgatcgttctccaagcaggtcagccaacatacctgaaccagaacttgaggtaagaaaagtataatataccacatggcatgacaggttctgaaattatcgattgtctgattaggcaatgataacgtaatgatactaatggaaataatatataggctcacctgattaggtgatgcgatatacctagcgatgtatcgggcataggtacggacgtcactgacatatgaggaataccgagcgtaagtacgggctcacctgataaggtgatgaaatattcctggcgatgtatcgggcgtaggtacgggcatcagtgatatgaaatttcctggttatggcatagattgaaaccattgttgggtctcttcccgacgacgtatcaggcgtaggtacgggcgtcagtggcatatgataagtaccaagcataggtacaggatcgtctgattagatggtgtgatatattagtgccaagttgtggcacaggctcacctaattaggtggcgcaatgatattatatgtgatattgcattatgacacgggcttgcctgattaggcaatgcaaatatatgagcatatttgtttctatgcatttgactagttatattaccaactattgaatgttatagtttaatcattttgtgataatgaaatgtataattagctatttaatgtatccttctttattacttttcttgctgagtctatgtgactcatgggtgctctgtggtgcaggtaagggcaa

SEQ ID NO: 362234 - DNA, 593 bp, Cannabis indica
gcataagatatgaatttttcaatgggaaaggctgtagaggttgcatgacaaacatagtctgcaagatgtttgggttgtgtaactggtctgccaacccgtgtttggatgggaggttcgacatctaaggtcgaagatacaggttgtgtatcttgtgaattggtggcagaagacgggatattattttttgtaatggtctcggaagtgagacaaggtgtggtacagccgagttttagcacaacagagggtgttgttgctgttgttttattaccaggagtaggtaatgtgggttgtggtatatcagatgagggaatgtcatctgttgtagccacgggttgtgtgaaatttccaggcttagtgtgactgatatgtgtggtattgggagaggcatctggtgtgggaaatacaccagattgctgtactaatggttgagcccgatctaagggctgaggatgagatgttggaatggaaaaaaactggtttatggactgttgtgacagctggccagttaatggaaaaatgtcttcataaaaaacaacatctcgggattgaaaaatttgcttggtttcaatgtcaagtaatgtataggctttcat

SEQ ID NO: 362235 - DNA, 727 bp, Cannabis indica
aattcgaaatagttcattcatggttgctgccttttagttcaacaagtttcttctaattgctaattacaaacacaaagaaaagagaagagaaagaacaatattaagagaaggtaaaagaaaattcaaacgcaaaaggttggtcccctctcttctttcttctactgtgtacttgctgcaattactcctcttcaaaaaatatggcagctccctcatgttagagagaagatgatggttgtgtacttccctttctctcttcttttagttggtgggtttttagggtacaaattcacacccaaaatagaagcccaatctttttccactttggcccactaggtttagtccctttccttccacaacagctagctggtggattttgagtgacttgtccgaatttgctgaggtggataagtgaaacacgtgtttccacgtcacggccagaatgctgaattcgcttcagcattgcttcaacaatctgcctcaatttcagcttatgttccacttcttccttgcttcctttttcaacaacaaacaagcacaattaattggaaaatcacacctaacaatatcaatatttacaagacttaaaagttagcttactaaatagaaaataacactaaaactaactaaaattaagaaaacaaacacattttcactactcttctcagaatagttttagtttaaaagcataaaaaataactctataccgtaaagttatcaacgttcgagg

SEQ ID NO: 362236 - DNA, 767 bp, Cannabis indica
tatcgtgcctcttcgaggtgaacattatctttaatcaagtggcagctacttttacctcaatgcattcacacctaaacccaggtaaacattcatctcaggttttgtgcggctactattcatatctttttcgttttatacacagttttttactattttgcttcttttactgttattattttattttattacacaatctttcttttcttttttatttttactcattgttgacctcgcttttagccaacgacaatgagtctaataataagcgataaagaaatagtactcaagtataatataagcaaataggtaaagaacacaaggtttctaaagaggttcagccctgtgcagttcggtaatagcctagtccccttgatttatattaactcaagaacaaagaacacagtgtttcctctcttaaagctcttacaatgaaatctctgagtatgctctcttagatctttctaaagtaattctttcgacccctttatgagtgagaatggatcactatttatagggctacatgcttgagggaaggtttcccttttgcttataatatctataattggtaagaatatatattacatatttagaatatacagattgtgggatttggacagcttgccatatctctgtgatataatctcagatttatagggattgctcttgtgcttcacgatgcaaaatctggaattgctaagtgttgatttgttgctcggcttatccacaactcgattgaaaagcactgtccgtgcaggtgtatgctgtgc

SEQ ID NO: 362237 - DNA, 734 bp, Cannabis indica
attttggtggagagcgatttagatttagttatcaaagctctaaaaggagttcactctatttggaatattgataattatgttttgttatgtaatcaactctctaaaaagtttttatcttgtaatttttcgtttatttctcgtgattgtaattttgctactcataatgtagctaagtgggcgtttgcccagaacatctcagattttgtggagccatcctcgatacctgatactatcatttgtaatgaccgggtctaatgttcctatctataatacgctttattttcaaaaaaaaaatagacttgaataacacaaatatttttacaaaagcaaaataaaaaaataacataaaatatttaaaataacaaattaatttaatataatttaagaataaacacataagtttcaaaggaaccaaaagttatataaaataattggtaaataaaaatagtagtttattatattatatgataactcattagttttaaaaataaactttaaggttacctaaatgtattttaaataataagatagcatataatataacttaaaaatagctaattgattattataatgtttacaaataggttttagaggtaactaaattgtgatttaaaataaatttttttacgtaactaattaattttttatcagcatcataagtaaccaaaacgttacttatgaaaaccctagtaaaataataaaaaaaaataaaatttgggattaatttcatttca

SEQ ID NO: 362238 - DNA, 894 bp, Cannabis indica
ttaaaaacgtaaaaccacttcgatttccaatcacccatgttcgacaccattccctcaactccgttgatttcagaagtcgcccatttgctaaagcagtagaagctgttatggagacctacgctctttatgtcgtagaagtaactgaactcttctagtgatggagccctatggacgtactccatgtacatcgcatagaaagccaggacagtgcgataactgttaggggtcaactgaaagggcgatatgtcatatcgcctgagaatggctgcgacgaagggatgaaaggggaccgatacaccacatcgaaggatgggtattgagattaccacatcctctgtgggaatgatcgcagggttagtgaatggaaggtgcgctctctgagatggtttaggacgttgaaacgcgagacccagtaaattcaaccttacaaaggtggtaaagtctgatttggcaaccctcgagattaagtcctcgcacgcgaagggctcgttcagttcggagtcgtcgaccgaatctgtcccactcccttccgcctcctcctcttccccacctgactcgcgggctggagtcgtccattcctcgtccatctcctcgacctcgatgtcgggagcatgcctcgtatgaataagatagtcgcgcgccgacactgtggactcgctgtcccggatatcgatggttccaggttctgcgagttcctgcaccatcctctcgatgtctatagaagacatcagacctaattctatttgagcggcctccatttcggaaatgtccgtagggagaaaactgtccctctcctggtcactctcaccgtcaaatgcatggcctcccgagccgagctgctggctatccgataaatcgctcatctgaaagatagaagatcttttcagcgtgatg

SEQ ID NO: 362239 - DNA, 580 bp, Cannabis indica
agcaaaagcagtaaaaagcttaaaaacttacatcgttcccaagccaaaacttcggagtatgtagtacgaggaaccaaaacgaatggtatcgaccggtgaagcactctctcgggtaattgttccaaatctggccgagtacccaattgtgaaaagtcttgagcagcttccgatcaaccactctaagtgggtccgcattcacgagtgtcgaagtagccctagccttcttcttcatttcagtgtactctgcaaaccacctaggccgccttctcttcctccggttctccatgacttctagagctgtctctaacacctgcacctcagaatcctcagtatccccgatgctggtgatattcgtcttctcaggtgtacagaacatgtcatcatcatccggttggtaatcatttgggagaatgaagtcatcttctggtgtccgagcctcctgtttcggttgtgggtgtggctgtcgctatggctgtggctgtgaatctgctgccaaccttcaaggatcttacaggagcatcattatggtcttcaactgatccataatcgctgtttgtcctcttagcagagcggcctgccc

SEQ ID NO: 362240 - DNA, 727 bp, Cannabis indica
ccctatctgacctgatgtctgcatagggacttagggggcaaatgttattacaatttttgtccttatgagatggcatgcttacgtagatagaaccagtgccacgtggcagtataacttgctagaaggaaggccaagtcaacacttgagcaaacgaagacttcaacactcaaatggggattaagcaacagaccaactccctctcaggagctggctagccacgcctagccggctagccttgggagagcaccctggctggaaaccctagccggccaccctagcaatcacaggggcctagccggcaaaggagtgcactgtaaggctttgctggacaactctacacgtggacaacaaatatgggctgggaattgggccttaaaagcccaacaaaatggctgaataatattcagatcggagggcacattagtatttagtaattatctaacaacctatgaaatatctaaatttaaacttataatctagggtttaggcctcctaagtttgtagtagtctagaaacctaagttgcctctaagtcacttagcctcaaaatagctctaagtctgaaacccatattctctcaacctcaatctctctttggtacacgcctaatagggctctctttctctcttctcacttcatctgtcacacacctacctaaggttgcctaacaccctaggatgtccaccaccctaggttgtccaacaccctaggctgtccaacacttaaga

SEQ ID NO: 362241 - DNA, 560 bp, Cannabis indica
tttctttccatagtcaacttcaatatggcatcttaacttctttccatcaacaaatgatgctcaactacttaatgtacaatttatatttatttttagtaagggatgcacctaacaatgatgcctaattttggtgaatttttttttaccacatgtgacttaatgatatcaaattaggaaatatttagttaatttatttgcccctgctccaatatataaagctataaataggatagttcttaattcatagtaattcaaaaatattagaactaaagaaaaatgaagtactcaacattctcattttggtttgtttgcaagataatatttttctttctctcatttaatatccaaacttcaattgctaatcctcgagaaaacttccttaaatgcttctcgcaatatattcccaccaatgtaacaaatctaaaacttaccctcaaaacaaccaattgtatatgtctgtcctaaattcgacaatacacaatcttagattcacctctaacacaaccccaaaaccacttgttatcgtcactccttcacatgtctcccatatccaaggcact

SEQ ID NO: 362242 - DNA, 510 bp, Cannabis indica
ctaacctgaataactctggatattgaatccttatatcagactccaattcccaagtggcttcctccactttactatttctctagagcactttaaccaatgtgatggttttacttcaaaaggaccttttctttcttatccagaatttggactagttacttgtcacaaaataggtccggttttaattccaatgcctcataactcaagatatgtgatcaaatatgtatttcctcagcatggaaacgagaaatacattatgctcagctgacaacgatggagataagaaacctgcccaaccttttcaagtatttcaaaaggtccaataaatctaggacttaacttgcctttcttcccaaagcatctgattcctttcattggggacactcgtagaaaacatggtctccaggtttcatcttgatgtttagggtctacatagtttttctgcctgctttgcgaagcaagcattcgagctttaatcttatctattgcctcattagttttctggaccaactc

SEQ ID NO: 362243 - DNA, 736 bp, Cannabis indica
ggtctggtggatgcattttgatttgattgtagcccgaataagcatccatgaagcttgatatttcatgccctgctgtcgcatctatgagctgatcgatccttggaaatggaaaacagtctttggggcatgctttgttgaggtctgtgaaatcaatacagactcgccatttcttgttcgtcttgggcaccaatacaggatttgtgccccaagctgggtagaaagtaactcttggttattgttgttcctctgattttggtcagtcttgacatacttcagcaggtgtgggctgcttttccttatcaagaactcaatttcccacttcaggttgttgcattcgttagtgtcgtggccgtagtctccgtggaaacaacaaaacttgtcatgtctctcttgctgacatctttcttcatgggcccgggcttcttatatggggccagcaactgagtagccatgtaaacactttctatgtcttcagtcaagatgttaaaaacagtgtacttttcttgattctcctagggagcttgctcggatttaccgacgaactttcccttcttcccattcccttgcctgttattgttgttggagcgtttaccatttgagcttgaattatttaggtaatgggggagttgggcggacgttacagtggaaggagtctttgacttgccaggcttttgctcaccttctgctcgttgaatagcttctttgagcttgatgaagccttcgacacggtcaagaa

SEQ ID NO: 362244 - DNA, 791 bp, Cannabis indica
ccttcttcttcatttcagtgtactcagcgaaccacctaggccgccttctcttcctccggttctccatgacttctggagctgtctctaacacctgcacctcagaatcctgagtatccccgatgctggtgatattcgtcttctcaggtgtacagaacatgtcatcatcatccggtttgtaatcatttgggagaatgaagtcatcttccggtgactgagcctcctcttctggttgtggctgtggctgtggctgtgaatctgctgccggccttccaggatcttgcaggagcgtcattaggtcttcaactgatccataatcgctgtttgtcctcttagcagagcggcctgcccttccctcaaagcaatctgccccctctccacagtctccaaccttgccaaaatggcagggtatactggatcgcgagcctctgaggtgctgggaatagaagctgacgggggaacaggaggatcctgtgatgctgcaagtgggtcaacaccacactcatctggaactgaagctgcagatgggtcaacaccagacccatcaggaactgaagctggagatgggtcaacaccagacccatctggaactgcaggcggtgcacgtggtggagacggtggaggtggtgtagagtctttaaatattcgggctgcctccgctcgttcttccaatgtggaggcaagcttttcggcctggcttcgcaaagcatcctgtgttggttgcccatcctcacccaacacaagttcctccaagtcaacaaataacggaggctgacccccggttatgtaactca

SEQ ID NO: 362245 - DNA, 504 bp, Cannabis indica
ccagcctatccctccgaagggcctcttcccggatcatcgcctccgcatgtgcctccctccgcctggccttttcctcactggccttggcaagggcctcccggcgctcggcgtcctcctggtaaagccgcctttcagcagtcaaatcctgaaggatcttcatgacttcgtccatgcccccaaagtcggacaagacgaagccatggttaattaggttcttggaaaggcggccagcctcggcagcaagctggaaaaggatataagtatgagtaaaagtccttatgagaaaatgatgaggaaaaaagtaaactacaaaatacttaccacggtgagggagtggctgagatcctgaacttggaagatggagttcaaggatgcacaagcagcgaaccgcttgggtgcgcaccgggtaagctgagacgcaaactcgccggtcatctccgcggcaaagggagctagtgtgggcccgaggaaacgaccgaaccaatccgacagggggtccaagtt

SEQ ID NO: 362246 - DNA, 668 bp, Cannabis indica
cctcaaagaattatacagaaacaaaatcccttcattcaagtcaagacgaccaaacacccaatgactttccctccttagattgatgatgaataacacatgatcaggttcataccaaggcttagagcacagaattctcaaacctcgaatgtaatgcgcagttgggtgggcagcatgaatgtgcgacatcttagtcttcattgacttggttttgttaaactcgtggtacaaagcttggatggaatcatcaaagagacaattagttgtcgcaaaattcaatgtcacatcggaagaatatttaccttttttcctaaggtaatagaatatggtgttcatatgttgaaacaaaaatatgacagaagcacaaatcaaaaggttgaacaactgtctaaaaactttaatacagtatctatacctaaaaacattttaagagcaactgaaaaccaactatcataactacaatggaaaatggaaactttaccgagtcatttataaacatgtcgcatgtagccaaatgataaaaccaagttttatcctccacataatcaacacctagcctaaaacccggggtaaatttctttgcgccatcaacataacaattgtaatgcctaaaacaacaaagaaacaacaaaaaaataacattaaaaccagaataaaactgaaaaataaaa

SEQ ID NO: 362247 - DNA, 578 bp, Cannabis indica
aaaaaaaaaaaaatcctaattctaaggggattcatctatcttttcaagcactataaataggacctcttaggctacgaatttaataattctataactacaaattagagtgagagcaaggaagagacggagatcggctttgaagtgttcttcattctagttcttttcttctccttctacttttactaaatattatgattttggttataatgtctagttctgagtagttttcttttagttaaggattattttaaaactcgaaacatgaattcttaatttcattattgaatgttaatttctagtttccatcatatcaaatcacttcaattattttatgtcaatgttatgattattgttttaatcttgtttagagagcctctaaattaggttttactttaatctaatgtcaccttaggattactattcacctaatagtctaggattctaagtgtttgtgacaaattacaatttttattgtgatgatcgaagaatagaacctaggttaaatgaattatatgcttcattgatttgttgtctagattagtctatctccataaaactcaaagctttatctaagttaa

SEQ ID NO: 362248 - DNA, 591 bp, Cannabis indica
tccgtctagtttttcataattacaaagatatatgaatttagagaagtcaaattcataatttttcatttctcatttctagctcacccagaaatgaagagttttgagtctatcatttccgcaaaatagcaaaatctccaagaattggtgacaagctttgccagaacatataaatggactaagtggtgtcaaaatattatttaggcatcttaaaggacatcccttagacgtttttacacttacccagcctccaggttgacattagatgtcaacctcggcattgggatgtcaacttgggcgttggatgtcaacgtgggcgttgggacctaaactgtcttcaatcaaatagccataactcactcaatattaatccaattaatgtgattcaacttgttttttgaagctatttaaatgttatatcaagtcatgtctcacaacccaggcgtaattatgaagctatcattgtcaaatttcaccctcaacaaagttacgaaaataagctccaagttaccagtagcaggacccgccgggcaccaaaatttagctatgaccaccaaaagctaattttcaccattagatcatcataaccggtgg

SEQ ID NO: 362249 - DNA, 502 bp, Cannabis indica
ggtatgggatgaaaagagatgtggtagactacgtgtccaaatgcttaacctgtcagcaaatcaaagctgaacaccaaagtccgacagggttattgcaacctttggcccttcctgagtggaagtgggaggacattgcaatggatttcgtaactggtttgcctacaaccacagggttgtatgattcaatatgggtcatagtggacagattcacaaaatcagctcactttcttccagtgaaagttacttatgcagtgaatcagtacactgaatagtatgtaaaggagatagttcgtctttatggagctcctaaatccattgtttcagatagggatccaaagttcacatcaaaattttgggtgagtcttcagaaagctatgggtacaaagctaaagtttagcacaactttccacccttagacagatgggcaatcagaaagaacaattcagatactagaagatttactacgagcctatgtcgtggactttgatggttcatggagtaa

SEQ ID NO: 362250 - DNA, 524 bp, Cannabis indica
tcccaggccttttcttgtctcctatttcgtgacccacaaggtctacctcgtggtcttctcaatccaggttcaggtttattttgagcgttcatcccctgcgccaccctggccgacgctgcctaacgttctaactcagcatttcaacgctgcacctcttacagacggcgtctcaggcggcggctttccgtttcataagttctttctcccaaagattgggcacctgcatggttaagctcttcatccctcgcccctagactctgaccattcctacgctgagttctcctcgagcgggttgtccgcgtactaggaccaacgtcgggttaagttttctgaggacgtatggtttgagcactggggcctcaagttgagccctcctggaacaggtggtccttcttgactgcagatttgtaaatcttctggagcccatgggctcttttccagaacgatggttagtttcctcatgtggggtgttaatattctctggatttttaccatgaaggaaaaggtttttctttaaaagaagg

SEQ ID NO: 362251 - DNA, 540 bp, Cannabis indica
tttttggcttttacagaacctaatttggattttttatgaattagttatgattttttgaatttgaatgaatatctactttcgggttgcacacacgggcgcgcgaggcatatgagatgctcagacagcctctcgttcagacaaggagctgaccgagaattcttggacacagcccttgtctaaatggctgctcgtgcccatgtctctcggtcaattgaggctgcttgcagcctctgtctcggccaatccttccccttccgcgcgcgcaggggtatgtaatgcatacgcctgtgcctcaaacttattttcttcatatcttttgattcaattgaaacaaaagccaatttttggtagaattttgtgtagaatctgaacttttaattaaaaatctaattgtcagaataaaattaatttttattaatttttaattaattaaaattagttttagatatttgtaggctttgaattttgaatatttgatttctcacaaaaagagccttatggttatttttgaaatttcagattattttatttattttaatt

SEQ ID NO: 362252 - DNA, 470 bp, Cannabis indica
aatcatagtgtggaagattgtgaagaattctaacacctgaaggagatccaagttcagatcttgttattactctgcgcgcgacagattggaacaagggttagagatctaaatggaaggagccattacattcctctgccactaatgtaaggtttttttagaactttaaatgtgtttattttattgttttaggaaattcatgtttagggtgttatagtatagaatataatcaaacatacttgttagtaaatttagatcttggcagaacccaactattggcagctatactgttaatgttgatgcagggattcaaactaagacaaatacttcagcaatgggtgatttgtagcactaatagggcggtggtgtttgcttatactactgtttttgaaacaatgtagtgacccattaactattgaacttcatgcaattaagagggaataaaggctggtattcagcggtgctgtggaagg

SEQ ID NO: 362253 - DNA, 1066 bp, Cannabis indica
tcaccatctaggggtttcgaaaggaccggaggctgggataattgttgctttaaagctcgaaaggcattttctcattcctcagtccattcgaattttgtgttaccccttaggatgttgaagaaagggacacatttgtcggttgacttggagacgaatctactcaaggcggcgattcggcctgttaagctttggacgtctttaactttagttggggacttcatgtcgatcaatgcctttatcttttctgggttagcctcgatgcccctagagttcactatgaatccaaggaactttcccgagcttactccgaaagaacacttaagaggattgagcttcattcggtattgtcttaggatctcaaagcattcttttaagtcttcgatgtgcccttgggctttcttagacttgaccagcatgtcatcgacgtagacctccatgtttctgcctatttgctctttaaacatccggttgaccaacctctgataggtggctccagcgtttttcaagccaaacggcatcactttgtagcaatacaagccgacgtccgttcgaaagcttgtatgttcttggtcaggtgggtgcatgcttatctgattataccctgagtacgcatccatgaaagttagaatttcatggccggctgttgcgtctaccaattgatcgattctcggtaaaggaaaacaatcttttgggcatgccttgtttaagtctgtaaagtcaatgcacaccctccaggtgccatttggctttggaactagtacagggttcgatacccaaactgggtagtaggcctctttgatgaaattgttgttccatagtttttccacctcttccttcaatgccttggccctttctttgtcgagtagccttcttttttgttgaactggcttgaagttttcgacgtcgatgtttaaagcatgacttatcacggtggggcttattccctccatgtcttcgtgtgaccaagcgaagacatcttggttttcccttaagaactggatcaaagcggatcttatgtcctcaggaaggtttttcccgatcttgattaatttggatggttgtttgg

SEQ ID NO: 362254 - DNA, 543 bp, Cannabis indica
atcaacacggttgaatgaaagagtggctgaggagatcgagctagaggtcgggggcgaggaggtgctcgcggtcgaggtcgcggcgaggcaggggaaaccagcatgtccttgccgaggcggtgatccaggagaatgaaaatgcctatgtaaatggataacaaccaggtcaaggtgggggcaaccacgaagtccctgctggggtagttggtcaagaacaccaaaacgcccctgtagtggtgccaccacaacaagaagatttagtgcaagaagttgctcgtcttagggaggaacttaggaagtgagatgaagagtttcacaaccgccaggaacaacccaatcaaggacaacatcgatttttgcccgtgcaatacacgcctgtgccggagggtcgatgggaaccaatatataaaaggttccgcaagcaacccataaaatttttaagggggctcagatccaatggaagctgaggaatggttaagaacagtggaaggtattgttaagtgcatgcggctcggtaataaagatagtgtagcttgtgctgct

SEQ ID NO: 362255 - DNA, 724 bp, Cannabis indica
ggtgcgtctacatattcccagactttgttcttttgcatcaaatccatttctgaatccatgccggctgaccattatttctgttctggacttgccattgcctgtttatagattaatggattgtcatcaatactgtcaccaacgactctattgatttcaccatccaagccacaatgagatggttttgtggaaaccctcccactacgacgaggaatcgttatcttctgaacaggaacattagtggtaaatttctctattgttgcaacttgcaaatgttcaaccgagggagtgggattatcctctacttgagtagaagaggatggaacattagaaggagttatatttgaaagcatttcctccaatactactttactttgtggcttgaaattcttaatatagtcatcttcaaggaaagtggcgtttgtggaaacgaatactttatcatccttgcgactataaaatagtccacccctattgtccttagaatttccaacaaacatgcaaacctcagttcgcttttctagtttgccatctttttcttaagacatgagcagggcacccccagattttgtaatggcgttaactaggtatacgtccattcaataattctaaaggtgtcttagggtctgatttagatggaataacatttaaaatagcagttgccatctgaataacataaccccagtaggacgtaggtagagttgagtagctaagcatggacataacc

SEQ ID NO: 362256 - DNA, 687 bp, Cannabis indica
gcggcatgatttccaccaaacccgtcgtgcacttcagagaggagtcgtgcagcttcttcttgagtaacacatctgagcaatggcatcaagaatcctcttctgtacataattccctctactatgatataccgtgcaactttccttctcattttttgagcttcattgtgattatctggcagtttcccagagttgaggtaggatgctattggtgtcatccagtttggggaagtatcgatcatttcgatatcttccgtgccagtgatgctaggctcttcgagaaactgaataggaattaagttcgccttatcacttacattgctgctggccaatcgagctaacgcatctgcagttgtattttcttcccttggaatttgtctgaggccgtagcttttgaattgtgcgagcagatcatgtattgggatcagatatgctatcatcttttctcatcgagcttcgtattctccagatacatgattcaccacaagctgtgaaccactgcagatttcaatgtgttcggctttcatctctcgggctagctttagcccaacaattagagcttcatactcggcttcgttgttagatgctttgaatccaaacttgactgcagcgtgcaggtgttgcccccaaggtgtgacaagggcaattcctgcaccaaataattgatctgtagctgacccatccacatgt

SEQ ID NO: 362257 - DNA, 906 bp, Cannabis indica
cgacaaactgtctccgaaagctagtttgcaacttattccagcaatccacggatcctggttccagtttcttgaaccactcttccgcggacccgcttagagtaagcggaaagcacaaacatctggcgtcgttgctgactctcatgactgtcatgactcggttgaaccgtgacaggtgatcgctagggtccgagttcccggtataacctgtcatttcaggcatcttaaaatttttggggagctctgcttctaggatgtgcttggtacatggctcccggtcttcacggtcagagtcggagtcatcgcctttttgtcttcaggagactcgggtaatgtcctttcggagtatggccagctccgccatgattccttcgtttaacgttcccgtagagattgtgggcccgtgtttcttttggtccaggtgttcccgaaggtcaccgtgtttcccgttaatctgatatctcagatcgatgggaggacatttctggccccttcttcctctccctccgagttcttggtgcacggaaatgctctttcggtcctctcgatcctaagggccacgactccctttttggagtttgcccctctgtggacctttccctttcgggaaatctgagcggacctttcgcggatcctgcaccctcttctttttcccaggagtggaagtagggtttttctgctggttcccttcggagggataccttatagggctaggttccctagacttctgcttttgggtacttggcgaggattctcctggtctctctccaagtccagcagggatggctttatgatgcacatggattcctgctgcctccatggctttttgcatggccagcatcacctcttgcatcttttggttttgtcttttggggctgtcgatttcagcttcgtgatcggcagcctttt

SEQ ID NO: 362258 - DNA, 613 bp, Cannabis indica
tcaagcttggctttaatggcaagttttgattctgagttggttgttgtgttctattgccttgaaaatgttttttgggatgtttagaacaggtttggagagtttggtttgaattggggttgaattgctggagttgtgaaatttttagtgtttcctgcactgaaccggaattccatttcagagaggcctgtaggaaccaaaattccggttggcttccaagaattttacccagaaccgaaattccggttgaggaaccggtctaccggttgtggcaattttgggaaccctacttcttcccatttttttgttgatcagggtattgccatgtttgtatcgatggggaaacttttagtttctagtttaagtctccgggaagtgatttagcgtgtcacttatcagtgttgcggttattatgatttaggagcctgtaattcaccgagcacattgttccactcaggttgaccggcacacctgaattcagaatcgaggtaagattagtataacagcatgcatatgtatatactattgggtcttatgccctaaataaaactcatttcaatataatcagatttacttatgaatatagatctgaaataacatttaatgttgcatggtt

SEQ ID NO: 362259 - DNA, 510 bp, Cannabis indica
tgttactaaataaatgtataaatattatatttactctattatgttataacatgacctttaaaaattattttattgttattatattagtattttgactttttttaatgtaattttatttagttataattttttaattagtatataatttactttattttaagtatattcttaaataaagtttgactgtatatataactttttcaaatactgttaatcaaaaaattcttcatcttcctcattaattatagtttaccagtagtctatactttatgtaaagtactttatattgattgcttgagatggaaacattccaatattttaatttctaatatatatatataattaatatatagggccagaatttagtactcttcagaacggatacgagaattatatttacataacttttatatatgggatacttattaatgggtgttacttattgatgagtactaaataaatttaactataaatattaattttaaaaatattaagtcattagattttgat

SEQ ID NO: 362260 - DNA, 811 bp, Cannabis indica
aacccctgacttttaactcaataaaattcaagcatgacatttacaattcagataatcatacagagctcggaacgagctttccaacgatataaagaactcccaaatcagagttcggaatcaaaagttatgcattttcaaagtttcaacacaaactgcccaaagatcacgagggcgggccgcggtatgctcaaaccatgccgcgacacctgggaccaattcccaggtccactcaaaggagcgggccgcggcatgctccagagcatgccgcgacatctgggtgcagaacccagaaaaaccagcagcaagccttcgaattttcagcccaaaactcaattttttcactcaaattctcaaccaatttcacaagttaacatataggattgctagcaattaaaagatgcttaaataacctacttcatgcatccaaatcctcataaaaaaaccaaaatttcagattgagaaacacaacaatatcatgctcaaactaagcaaatcccaagctcaagaacaagagcttcatcttcaaccatttaaacaattttccagccaacaaaatatcacaatatcacatgattcaatactagaaaacaccctaagatcaaaatccatgctcaagaactcaaatccaaagattaacacactcaattcatcaagatcacaacaacacttaagaacatgcaatcacaagagcaaaatacaattcaaatcatgcttttaccacaataaattcagcaagataccaccattaaattctacaaaaacacaacaagaagttacctaaactccaagctcaagacccacaactccaaaa

SEQ ID NO: 362261 - DNA, 510 bp, Cannabis indica
ggccaaaacaaaatgaaaaacatattttctcactgccaaacccagtcgcgacggccaaaaatcccgtcgcgacgactgggttcagaacacccaaaaactctatttttaaggcctaaccatgaaaacttttcctagatttcgaaccccaccaaaacacaggataaaaatacaaaattcatgcattaatccacaaccaaaatcagattttacaatatacaatatacaactagaattcacactttttgaacttagcataaagcttgggatcccgcaacctttgcaaaaccgctctcagatgtaactcatgctcttcgtcggtctcagagtacaccaagatgtcgtcaataaacactatcacgaacctatccaggtaatctttaaacacccgattcatcaaatccatgaatgccgtcggggcattagtgagtccaaaagacatcacaagaaattcatagtgtccataccgagtacggaacccagttttcaggatatcttcctctcgaattctca

SEQ ID NO: 362262 - DNA, 903 bp, Cannabis indica
ccaacactcatcttgtgtgttgtcttttgtagatgaacccaggtgagtcttgggaattcgggcatcagatcgaccaggatttgcttcaacttctccacgaagttcatccttgtcttcgtgctagtcctccttctaacgaaggaaattcttctgacctcgtacccagccataggatgatggctcgtacaaagaaaaccacgcgtctgaccgacgcttctgatcctcaagtggctcggctcgccactctgcccgacgccgaacaagattcacccgtcccaatagaggaggaccgtgagggggacgctgaggtccaggaggttaaggagctggccgaggtgcgcttgggcagtcctcccgctgcggagggagaggaagtggttggaccccttgactttggggagtacaatgaggcagggcagccagtcgatgctgacggagacgtcctggttgagggcatggactacgtgagtgaggagcttgttgaggcagttcctcataggaggcagggtgccatgggcgccaggtgggtaagtcctccatccaagatttcggaagcacgtctccacactctcgaccaggacgggtacctgggcgaactggactgctatattcccgcccacgacaatcgcgccacaaatcctgataagggaatgtgcgcctggtcgggggctcacggccagcaaggggcgttgatgcccttgcataagtacttcagggatgtggcggacttctttggcctctgcccgacccagattactccaaagggcatcaagtatttgtccgctctcttcatcctctacgcttcccaaggatgggatgctccttccccccacgaggtcgcctggttcttcgacctgaagtctacccccaagcaaggcaggtcggggtatttttacttctctc

SEQ ID NO: 362263 - DNA, 676 bp, Cannabis indica
aataacgaggattaggctattaccgaactgctcgaggctgaacctctataaaattaatgtgtctttatattgctttattatatttcaatcgttataaactacttgtcacttacgaaattagagttgctgtctttggctaaaagtgaggtcaacatttggtgcttttattgagagatgaatcaagaattgctcttcattctaaatctaaccacaagtacgatggtggtacagactcgtaggggcttggttgatccagcaaatctacaagcggtggatcctgcattgcagaacccaggaaacacaagggtttcgccagctgttaatccggagcaatcgtcgaacgcaggtcatggtgtgatgaccactatggatgaaattgcgcctggtgtgcaagagactgggaataccagttcagcacccaaccaggcattcataaaacagtcgttccgcttgctaccaacgctcgaacgaccattggagatgatactgagatctaaaacctccgcgctgctcttggactcatgcaagatcatattaacaccctacatcatgatcaggaggaactccgcgctgcgataaatcttgcgttcaaagaacaaagacgcatgtttgccgaatggagggacaaagagatggaagcgttaagggctcatcatgcagagattgacaatcgtag

SEQ ID NO: 362264 - DNA, 1004 bp, Cannabis indica
taaaattttgttttcgaaaaataaaaagtgttctataatcacttttatttttcaattttaaaaacaaacaacgaaagtgtgttatgtgaatttcattttattttcatttgttgattttatttaagtcgggttcgaggtcgggaccgagggcgagtccaagtatggggttggtccgcgttcagtttccaaagtctaagttggagtcgaagttcaaaatattaattagaaaaaaacattctttaaataaaatttgaaagtaattttttttaaaaaaaaaaaaatagattcttaattaaaaaattgaaaaataaaacagtttttagaatataatttggaaaatattttattttctaatttaaaataaaaaactgattgaaaaagtattatcaaacacactctaaaattatgattcaaacaatttatattgcatgtgtatattagcccatctcaagccaattagggatctttaggtcaaaaaaatctaattaaggtttttttcatatgaaaaaaattatatatatatatatattttgtatatatagcagtaaaacactaaaatatagtattttgaaagtataattgagtttttttttttaattaaatatcaaaacaagaatctaaaaaaaataaattacatataattatattttttaataaataataataaaaatacaaaataaatatatttaaaaaaaaaattcaatatgaggccttttattaaagatttttttggatgtaggtgagggtcttggacgtgcctcacccttaaacaggccttggtgtatataattatcaaaacaaactcgtggaataagaatccaattagtctagagcatgtttggcatcataattaaaaaattaatttttgtttttaaaaacagaaaattatttttaaaaacaatttggcttgtttgaccttgttttttaaaaacaatttttagaaaaaaaagtttacaaaaaacaagaattttaaaaacaacaaatgttgttttctgttttagaaa

SEQ ID NO: 362265 - DNA, 448 bp, Cannabis indica
tatggttgaagcttcctccactccttcaatatggacatgtggaggtcaagggataaaaatcatgaatttgtatagcatatccacgtgttaatcacactgtggtcgaatggcacgaccatcgaggagtcggtttctagaaatgactatattatgacggttgttgactttttgacacaaaataaaaaaataggcatcttcatcattgatgtatgtctcgatcttggggagcattaattgtaaagatgtgagtggatcatgaaactccctagccattggatgaaacttatgtttctagagatcagatcgtggaccatcggtcttctttcacgtggattgctctttttaggtgttgacctcaaaattgatgcgatagtagggtcgtatacatctgatgtttttcacgtgttacacacaagaataataagtaaataagacaaggatttttata

SEQ ID NO: 362266 - DNA, 479 bp, Cannabis indica
taaataaaatcttaaaaactgtatttaaaattttgtaaaatcatatttttgtaattcttttgttatttttgtatatttttgaaataatctctttctattcggtactttaaagtacctaacatcatgccgatatactattttataattggttagtaatttttttatgttatttattaaataaaaatttataagatcccatgcaccaataatttatgatatctcttgtaatatttaccatcatcttagcattttctttaagaaaatgaacccatcatttagaataatatatccaaaatttccttaacaaaacattgtcatttttaaaaggctaattaggatttttgtcccttggactttgacatgtactaaatcatgccccatgaacttttaaggtcgttaaaaatgcccctcgaactattgagattgttggttttaggtattttttcctaatttagtcaaaaagtactaacatgatgaaa

SEQ ID NO: 362267 - DNA, 522 bp, Cannabis indica
aatttaatttaacatttataaaattaaacttagatggttaagaaaataaaatgaattatttccatcttagtattaattttccaacaaatattaagaaaattacttaatttaagttgtattaatttaaattaatttgcaactcaaattaaaattttctacaaatatatatatattgtatttccaaaaattaaagtataaaaatatacaattttcaaaatacattaaaataaatcaaactttactagaaaaaatacttcaagcaagggttgaggaaccggtctaccggttgggggcgaatcagggaaccctagtttttcccatttttgcgttatttagggtattgccatgtggtttatcgatagggaaacttttattttcaagtttaagttcccgagaagtgatttagggtaccacttatcagtgttgtgattattatgatttaggagcttgtaattcgccgagcagattgttccactcaggttgaccggcacacctgaatttggaatcgaggtaagattagta

SEQ ID NO: 362268 - DNA, 1037 bp, Cannabis indica
aaattacaatgattacccccaaacaacagtctcagtgaaatttttctgtcggtggtacatacattttgtattatagtatatatattttctatggtataccattcaaaaaataaaataaaaattggattgtatattaattttgttgtattatgcatacatatatttttaatcaaagaataccaatctttagttttttctttctttctttatttcattcgtcatattaagatgtgtatttattcataaaaaccactattttttaagttttttctttatttttcttgtagcacataaaaaggatatatttgtaaattaaatggatatcccatagtgtaaaatttatataccacgagcttaaattttttataagtttcttttttgtttatcttttatttgtttttttaatgagataatgtaatgcataatatatataatgtagtgcaaattatatatacgtcaaacttaaactaatattcaattttttttctttctttccttcacgatatatcatatcacatacaaatgatatacctaagacaaatatgaatataccacaaacttaaactaatatactatttgttgacctcgcttttagccaacaacaacgagtctattatataagcgataacgatttataatgacaaatatatgataaagcaataaaaagacacaggaattttgtagaggttcagccccgagtagttcggtaatagcctaatcctcgttacttgtattgacttaagatcaaggagaaagattccttttcttatagctcttacaacaatatctctgaatatgtaattcttagataatatatttagagtatagtcttagctcaactgctttttgactgacctctcgcccagtgaatatacatcactatttgtagggctagtaagcttggggacgaagagtttctcctctcgttacaatacgtataaatagaaagatcatgggatcaatgctgaatgcaagtatcgtgggattgaggctgaatacactaatagcggaatcgtgtgtatgccaaatccacgtaa

SEQ ID NO: 362269 - DNA, 680 bp, Cannabis indica
agagtgatccaatagagaatgtcagtggcatcgctgtccaaagtggtatacaacttgaatcaccacaccaagaagttaatgatttgattccaagtcatgaagtcagaaattcatcccttgaagagtcatctccaccaaaggttgaatctcctactttagttggtccaccatcactgaaaaagtcatacaaaccaattgtaccaacttatgtccctcctccaccttttccaagtagattgaaaaaatcaaagaaagaggagcccattaaggagatccttgagactcttcctaatattgaggtaaaaattccatgtcttgaggaaatcaaagaagagactcattgtgctaacattcttaaggagttgtgtccaaatgagaaaaagttgaatggaggtgagaaagtaagtgtgggggagaatgagaatgttgttgttcatcaaagaaagttgttgcctgagacaagtacaattccatgcacaattagtaaaaccaggtttgatcattgcatgatagatttaggagaaattattaataataagtcttattttaattttgcttatttaaatcttggtccatcaagaaaactcagtttttattcaattgactgatcaaactaatgcttatcctttagggatagttaaagatatttttgtgcaggcttatggacttgtcattccagg

SEQ ID NO: 362270 - DNA, 589 bp, Cannabis indica
tatcctttaggatagttaaagatatttttgtgcaaacttatggacttgtcattccaggtgattcttacataattgagatggaagatgagggtgatcctaatcttacatcaactctatttcggagaacattcttactcactgcaaataagaagtggaatacaaaagcatggatacttagaatggaatttgatggtgaaacactcaaattcaatgtgttagattccattcataaatacataaagaatgtgatttttattttttaggctattttaaagactattcatgcattttgagtcttttggagggattttagcatattttggtggaaagtagtggaagtcggcgagctcgattgtacaaggcggaatttaattgcgaattcagacgaacatagaagcataattggacttggatctcaacatgaaagttttagatctcgttcttagctttccagaacatcttgaattgtccaattctgagtaatatcgagagagggatggctaaattactatcagtcgttgcagcagaaaatttctgaaaaaaagatagccaaaaaaaaggataaattttaagaagagttgcgattttt

SEQ ID NO: 362271 - DNA, 776 bp, Cannabis indica
aaggcaaaatgacaaaacattctttccctggtgatgtccatatttatcttataaatatgattaatttatttattaatattcttaaattgattctttaaattattgattagtgtgattttaatttgttaggttattttaaatactattcatccatttagagtcttttggagggattttaacatattttggtggaaaataatggaagtcggcgagctcgattgtacaaggcggaacttaattgcaaattcggacgaacttaaaggcagaattggacttggagctcaacatgaaagttttagatctcgttcttagctttccagaacatcttgaatcgtccaattccgagtaatattgagagagttatggccaaaatactatcagtcgtcgcagcaggaaatttctaaaaaaaagatagcgaaaataaagataaattttcaagaagagttgcgatttttatcttttgtttaaaagatgagttatctttatccgagatatttcctaatactattataaatagaatcctaattctaagaggatttatctatccactataaatagaatcctaattctaataggattcaactaactttcccattactataaataagacctcttagactacaaatggaggagaatccaaaaactacaaattaaatattatgatttttattaatgtctagttctgagtagttttcttttagttaagggttatttcaaaacccgaaacatgaattcttaattttattattgaatgttaatttttagtttccattata

SEQ ID NO: 362272 - DNA, 624 bp, Cannabis indica
agccagtttagatcctaaaaagaaaggataaggtcctgcgaaacaagaccatagctttggtcaaagtactctggagaaacagcaagaaggaaaccacctaggagttagagtccgacatgagagctcaatatctagagttattcaggttagattttggggacaaaatccttttaaggggggggataattgtaaggaccgcataactttaatttagaaattagcatataattagggtttaattatgaaacttagatattagttatgaattattagtttacgataatttatttgaattcagaatgtgttttatatgtcatatatgaaatattatatttttacatgttttgtgccccgcaacgttggaacttggtgttttattagaatcacattttagtatttttagtatagcagagcaatatagttagacattgggaatgttgggaatagtcaaaattctagaagtgaccaaaatatcccttggtgattaaatggctagttagttatgggaagggtgaaatggtcattttgcccaattaactttttgtcttttagtgagttttgaagtgggttttattctgatttttttaagttgattatatttgataaaaccaaatttttatccca

SEQ ID NO: 362273 - DNA, 1316 bp, Cannabis indica
gtatctccggactacgttacgaaacgttctcgtctaagtcgtccgcgtggctattgcacgctttagacttgactaacatgtcgtctacgtacacctccatatgtcgctccaacaggcctttgaacatccggttgaccattctttgataggttgcaccagcgttctttaatccgaaaggcatgactaggtagtagtatacccccttatcggtcctgaagctagtgcactcttgatctgccgtgtgcatctttatttggttgtaaccggcgtacgcgtccatgaaggacagtagcttgaatccggaggtggcgtctaccatctggtcgatcctgggcagagggaaacaatcctttggacaagccttgtttagatcagtgaagtctatacaaactcgccaggttccgttaggcttcgacaccaggaccggattggctagccatttcgggtagtaaacgtctcggatcatgtcgtttgttaagagcttatccacctccttctctaaggcttcgaccttcactgagtcgaggggacgtcgcttttgttggaccggcggcatgtccgggttgacgttgaggacatgggtgatgacgtggggacttatgccagtcatgtcctcctggcaccacgcaaaaacgccaatggcacccttcagtgtctttattattttttccttctcctccgagtctaggctctttcctagccggagtactttggtggagtcgaggtcacacactgatatctcctcgacgtcctccattggttctacgatttttttggaccccatgcggggatccaactcgtcttcttcaaccttttctagctcaatagtttccagaaccatcaacacgggtaggtgggtggcaacgttgtagcattgccttgcctccctttgatttcctctcaccgtccctatcccagcttcctgggttgggaactttaggcacaagtgccctattgatgtgactgcgccaaaatctaccaaggtcggtcggccgaggattgcgttgtatgctgtcgggcagtccaccaccacaaaagtatagtacttgaaagtgctctggggtgtgtctgggcacaaggtgaccggaagtctcaccttccccattgggattagtgttgttccgttaaaccccgtgagttgagaaccactcggtgagaggtctcgctcgtcaggcctattgcagtaaaggcttctttgaaaagaaaattcacggaactcccgttgtcgatcaggactctggccaccactttattggcaataggggtctctatgaccaacgagtcatggtggggaaaacgcaccgtcttagcatctt

SEQ ID NO: 362274 - DNA, 371 bp, Cannabis indica
aaaaaaaaaaaacttgtgaaagttgaactgtattgtattctggaaacagaaatataaaatttctatttggagtctaaaatttaaattcaaagacttaaatttataccaaatatacaatgagttttattctagcttggaccaccactactaagctgactcaaagtttaattttcctaaagtaaacacatacaagtaggagattactaagatcgaggatttatattatttcatgatagaatgtaatgtcgggaatataattatatgtgccattcaatttcttaatagaaaacagaatgaaatcataagcaaataatttataaatcattcatccaatgatatataatttaagctaattcgaaatgaataagcta

SEQ ID NO: 362275 - DNA, 536 bp, Cannabis indica
cgttgtgtcgagagggtcgttgttcgttcgtgagttcgttgggtcgtcgctcgttccgaggggtgggttcgttgggtcgtccgtcgtttggggggtaggttcgttgggtcgtcggaggggtgggttcgttgggtagtcggagtcgtcggaggttggcatcgatggtctggttcgaatggaggggtaggtgggttcggggttttgggttcgaatggaaagggaaggaagagagagagaacgttgatagagaggaggagggaaactgaaaagctaggggtatttttggaacccaattgaaaaatgagcatatttacacaatgtgtaatttttttgtttaaaataacaccatgtgttattttttagcatgaaagatcaaatttcccatttcatttaactttactattttaaatcaattatgtttctcggattttgatatctatcaaatcaactatgctctagattttaacctatcaaatcatatttctctaattttgatatgtactaaattatacccctaaactttcatctatattaga

SEQ ID NO: 362276 - DNA, 823 bp, Cannabis indica
ttggtgttaatattcttcatttttccttttggtgatgttttatgttattcgcttgatatagatttaacattcatccatatactatatcccctagtctaagtcttagtgagtgtcactgaaacttagactttggagaggcttgactgagtaggtcgagtttggcttgaccgtaacattgttgaataaatgttacatttagttacgattgaacgtaactctgaagacttgatttatgatttgaaaagtaagactaaacatagctcttgctatttgatctgtggttgagcatgactcttgtccttgagtttataaatgaatagatgggttgggcgtagcccttatcacttagtttataagtgaatatttgggttgagtgtagttcctatcacttactttataagtgaatagttgggttgagcatagctcatatcacttatttcataagtgagtagttgggttgagcgtaactcctatttcttaatttgtaagtgaatagttgggttgagcgtagctcatatcacttactttataagataatatttaggttgagtgtagctcctatcacttattttataagtgaattgttgggttgagcgtagctcatatcacttactttataagtgaacattttggttgagtgtatctcctatcacttattttataagtgaatagttgggttgagcgtagctcttattacttactttgtagggttgagcgtagctcctattacttactttgtagggttgagcgtagctcctattacttactttgtaagtgaatagttgggttgagcgtagcttatatcacttactttataagtgaa

SEQ ID NO: 362277 - DNA, 637 bp, Cannabis indica
tcctgggtctttgtctaggttggggccgagtcccaagttccaatcccgatttgtgtctggattcagttctgggtctaagtcctttgttctaatcttggtctgggttcgagtttgggtctgggtccaggtctcactttgggtctgattctagttgtgggtgtttgagttcgggtccgagtctgtctctgggtttgtgtccagttctggactcctatgtggatctaggtttgggtccaggtctaagttagggtcccgagtgcgggtccaagtttgggtctgggtcaggatctcggtccagatctaggtctagcatttcgatcccagtcttggtcttggtccgagtccaagtttgtatccagatccctatcttggtccaagtctgtgtttgggatcgagtcccagatttaggtccaggttcgggcctaaaatccggtgtgggtacacgaccgtgtttgggcccgagttccaatgtcaattctaggtctgggtacgggtcttggtcacggtcctagtcttgttctaggttcatggtttggctattcttgttctagttctaatttcaggtcccaagtctaggtctgagttcgagtttggttcttcgtcatggttttggtcctagtctgagtcccagatctag

SEQ ID NO: 362278 - DNA, 584 bp, Cannabis indica
acattctggctccataagtactatgttgcatgtctgatagatttctgatactggtcttgttcgccatactggtgagtctggcaagaactcaatagcttgaactggttcttgtgtggttggttgagtaagaactttattttgatcagttttttgtcttggtggtagaggaatatcaactatctttctttcaacttcttatgtctcccaattgtattcagcatcttcgtcaaattttacgtctcagctgattattagcttgtttgtttctaagctataaactcgataaccttttgattgagtactatagcctaagaagattcttttctcagtcttttcatcaagctttcctcttatctcttttggaatgtgactgtagcatatgcaattgaagactttgagatgatttgttgatggctcacgtccgctccaagcttcgatcggcgtcttactctgcacggctttggttggacatcagttcagcaagtagactgcagtgcttactgcctctacccaaaatcattatgggagacctttctctagtagcatggctcctactgcctccataacagtcttgtttttccttt

SEQ ID NO: 362279 - DNA, 1664 bp, Cannabis indica
gtgtataatctgggtcctcaagaaggacctcttcaacaaagctcatactctcaatgtaatgtttcagtctctggccattgactcgaaaagtcctcccatcagttgggtcctcgacctcaacagaaccattggggaatacttgtttcaccacaaatggaccagtccaccttgatctcaacttaccagggtggagatatgcaaacgagaatcgtacaaatgtactttctgattcggctcaaaatgttttcttaggatctgtttatcgtgagcaactttaagctttgctttgtagatcctggaattatagtaagcatcaattctgaactcctcaatttcagacaattggagttttcgatacatacctgtcgcacttagatcgaagttcaaggccttaatagcctaataagctttgtgatcaagttcgacaggtaaatgacatgcttttccatagacaagccgatagggagacatcccaagaggggatttttaagctgtgcagtatgcccaaagtgcgtcttgaagacgtgttgaccaatcttttcggtcgggatttactgtcttttcaagaatgtttttgatttccctattagctagctcagcttgaccattggtttgtggatgataggcagttgcaactttgtgaagtacaccgtactttcgcaagagagcctcaaaagattggttgcaaaaatgagtgccttgaccactaatgatagcacgaggggtaccaaaccttgataacacattttcttttaaaaatttcacaactgtagcgttatcattatttcgacatggtaccacctcgacccattttgaaacataatccacaacaataaggatgtaaaggtaaccaaaagaaggcgaaaaatggtcccataaagtctattccccaacaattaaatatttctatgacaaggattgggttcaaaggcatcatgtgccgtcgggacaaggagcctaacctttggccccttacacaagaacgacaaaaatcattggtgtctttgaacaaagtgggccagtaaagaccgcattgtaagatttttgtagcggttttcttcacagaaaagtgaccaccacaagcatcattgtggcaaaaatttagcacactagacacctcattaccgggaatgcattttcgcataatctggtcgagacaatacttaaataagtatggatcatcccaaaagaagtttcgtacctcgaccaaaaatttgcgtttgtcttgtgaactccactcagaagggagttcacctgttactaagtagttaacaatgtgcgcataccacagtaacttagtaacaggaaacaattgttatgtcaaattggcggaatcattgaattcaagtcgggacaagtgatctgcgactacatttttattaccattcttgtctttgattgttatgtaaaattcttgcaagaggaggatccaccgaattaagcacgctatagcatccttttggaaaggagatactttagggcagaatgatcagtgaagatcataataggtgatccaatcaagtatgcgcgaaaaattttcaaaaacaaaaacaatagcaagcaactctttttcagtagtggaatagttcatttgagaactatttagagttctacttgcatagtagacacaaaaggtttcccctccttcgtgtccagaacagctc

SEQ ID NO: 362280 - DNA, 552 bp, Cannabis indica
tgaggatctttagcccgtggaaggtaaagtgatcgagccttctatgccataaccatgactcatctgtttgtgcttgcattgccacactacttgcgtatctccattgtataggaaagcctttattttctttcatttttacttttgcaatttgaaaagatttatcttgcttatcatagatagtgcaagaatttccttcaaaatgcaaagagtaccattttttaatcatttgacctacgctaagtaggttttgatcaatgttgggtaccaagagtacatcattggtgtatctcttgccttttttagtgtcaatggcaatggtgcctttgtcgacttcttccatgaagtcaccattaccgattttaactttagtcctggatctatcaagactacaaaagatgccttcatttttcgtcatgtggttactgtaaccactgtcaagataccaagtatcttttccttcttctgttgcagcttggctgacatagaagagagtactttcatcatttttctctttggaaaaattagcttattgggatttctttaaacgacaag

SEQ ID NO: 362281 - DNA, 502 bp, Cannabis indica
atcagaaggtagggccaacactggagctgtgactaacctctgtttcagctcctgaaaacttgcttcacacttatccgtccacacaaaacactgattctttttagtaagctcagtcaagggtgttgaaattttagagaacccttccaagaactgacgataataaccagccagacctaagaaacttctaatttctgtagctatttccagtctcggccaatccctgacggattctatctttcccggatctactttgattccatctttgctcacaatgtgtctaagaaaggacacctgagataggcaaaactcgcacttcttaaatttggcgtacaccttatgttcttgaagtgtgacagtcagtagtcccgtgatccgtaaggggaaataccgggtaagctgtgcaatcccacactacctggggaaggtcaagtgggataattctaagactgtgtaggtatgggactacatagttgaagagagcttaaatggattgattggtact

SEQ ID NO: 362282 - DNA, 519 bp, Cannabis indica
gggttaattgttaatttatataacagaatgttcaagtgttgccgtaaattcaaggtttgaattgttgccccattttttcttctttttcgtaatccaattttttgggtttggattttcttgatctgatctagaacttttatatgagggaaccaaattgtaatagcagacgtaaggagttctgtttgatatcgtccagcctccaccattttctctctccccgattatgcttccacagttttagggtttggttttgatttttttttttttgaacagtttaatcgttttgtgaacaatgaatgtttttaaggtaatattgattaatgtttattattacctaatatcagattattatttaatgtttattatattatataaatttattcaatcaattttatgtaatcagattagttttaaatcaaattaattttttttattttaatagttaatagtaggtagcaattttataatatgatgtggcattattttaaatgatgtggcatgccacttgttgtctagtgt

SEQ ID NO: 362283 - DNA, 883 bp, Cannabis indica
tcaccttcttcattgagtctaccatactcaggcgacactagacctcaaaataccatttaatacacacattttcccacaaattattggtttattgttcccaagaactttacaacctttaatttagatcagattcatgaatttcaagtctcccatgagccttatattcataaatctcgattaaaatttacctagaaatcctttgctgtacttttatccacacactcttgagaatattactctggtgtgtcgaatccaatcaataaaactacaagtagatgtagccccattaccatcacgacatggggggtgaactattataaattcctagtgtccattgaatttattgcagtttttattagtcagattaattcaccgtggtcctctttaattttacgatcttctcagatcagttgacgaaaaaccgcatcaacagaattaaaaatgagatgaaattatcacttttatttctaaaggatgtagcttctcaaaagacacactttatttttttttcaaaatcactattagaaaataaattctaaattctatttattcacgatataaataataataatatgtggtaaaatatattattatgtgaataatatatattaagtgttttataaataaatcgtgtaacatatgatttatttaacctaaaattgtaacttacactttgtaacatgagaggagttacaagatcaattacttttataatttcttttggttgatcatatttttgtgtaataaaagagatgttacacaaaattgatgataggattcaaaagttatgaaatatagttgttacaaattatattaatactcatttatatgagagaaatgagatgatgtgtttgaattctaagtgtgatcacctaaacactat

SEQ ID NO: 362284 - DNA, 721 bp, Cannabis indica
taacaaaagcacaacaggatcatatccaactccaaaccattcacaggaagaattgatgactgaaaatcacatcaacccatttgactatctgttggagcactcagaccaacaaaatcaactcataagtgaagatacatttagtttcacagatgggtcgaatttggcgattggtcaagaattcaagaataaagatgaggtgaagtttacgttgaaagatattacgatgaaggcttgctttgagatgaaaattgcaaaatctaccaagtcattatatgtgacaaaatgcattgacaagtcatgcaaatgggcagtgcgtgtagcaaaagttagcaactcagagtgtttctcaatacgaacttattgtacacgcacacttgctcccttatcagccgaaagagaaagcatcgtcaagcaagtacagaagtagttgctaatgtcgtgaggtcaagttttgacggtcagaaagagacattgaaacctaaagcaataatgacaattatgcaaaacaagcacatgccgataacatattagaaagcttggaaagggaaaaagattacaaataacattcttagaggttcacttgaattaagttttccaaatcttccagcttacttgtacatggttcgaaagatgaacccaggcacgatcacatttagaggtggatgaagactctaaattcaaatatatttttattagcatatgcgacatgcattaaaggatt

SEQ ID NO: 362285 - DNA, 474 bp, Cannabis indica
gtagtacaaaaatatattgagaagctgatattattttacatattccaattaggtcaatgttttgttatttttttgttactttgtagttatctttttattattttatagttgttttcatattgcttgttaagttgttctaaaattgtttttgaattacttttttattttattgaaacataatatttttataatttgaaactctaacttagtattgtataaactttatagtaataatgtaaaaatctcgtgtccttatatttttgtaaagtttcttccattttacagtaattttataaaagtttcctttataatacgtattaaaatgaagttttctattttatttgaaaaattatagcaaattgccccaaatggactatgttagtatgtgtcctcatttcaaaaaattgtagcaaatgactctaaattattagactatgttagtaaatgtcctcatttcaaaacttgtagagaaat

SEQ ID NO: 362286 - DNA, 655 bp, Cannabis indica
ggaggggaccctagccctctatctaggttatctttgggagttctggaatggaagtttgaacttcaataacttgaatccaactcactatattttagtattttgtaccatgaagacatgaagcaacttaatccaaggctcgggagctaaaattacacgaacctataacccagaagccaacatgggcacctagggtttcacctggagctgaggttgacatatccaactagggtttcagtttccaggactgtcttagtgcaaaagggtcaaaattgcattaggacatcaactagacatatcacagacatatttgagaaatcaaaatcaaaatcaaagcaagttcatttttgagcactcggggccccgaggccccgagcacccagcacccaggttgataatctatcaatttaggcgccttccaagtatcagattggatattcaacttttgcatcttctttttcttcatcgacaatgaagaaataggtcctttcaaagaagaaacaacacttcctgggtacaaaaatacggcccatcgcccagtttcacacctggggctgaccctgcgcctagcacctaggctgacacctggggctggccaacataggccattttaaatgtagtttttttgataattatttcgagcatcttctctgttttt

SEQ ID NO: 362287 - DNA, 511 bp, Cannabis indica
gttatgatgcatgtttgttgctttgattctagcttggaaagttttactcaaaacttttgttttcaaagaaaaatggtgaatcttattgctgtggttgttgttgctatgaaaatgtattttttggtcttatattatgttgaaatatgttgagatatgcacgatttagtggctgttttggaggattagtcaagttttgagtttttgaactcaatcttgaacctccaatggtgaaatgagtttctgtggttaaagcttggttcttttgctttggatttgttcttaggggtatttagaacaggtctggaagttttggtgtggtttggatttgatttgagcaagctatgaatttttttgaatgtatcctgcgaggaaccagaatttcggttatgcaaccagaatttcgtatgagggttcaggaattcccagaaccgaaattctggttgcagaaccggtctactggttgggggattttcaggaactttagtttttctcgtttttatgttatttgggg

SEQ ID NO: 362288 - DNA, 566 bp, Cannabis indica
acgtgccaacgcttctatcatgccccattcgatactgtccaaacagtatctctcatcgcccaaggactccatatgtccatggaccaatcctcaaggcaccatgcctccacgcatgttggcacgccctcgagacaagccacataactagtagcatacgttagacctctatctctttccaatatggtgtatccgtcaaatgcgcgtatgcaaactagcccatgaatgactacgcatgtcatctcgtgttgagactcatggccaaagcataccacaacgtctcttggaggtttaggccacgtttcgtgcaagtggcataccggcaagccaatggaaacgtacccgctaatctctggcagcatttttagatgcactactgggtcggcccgatagtttccataagtattccaactcatggagacatatgagtcccctcgtggttctcatatgcccaccctactagtcccactgactagtagtagctcacttagcaccaaggtgtcaagagatggtggagagctgacaccaggtactccccccttaaaaagcattctaagtttttagccttc

SEQ ID NO: 362289 - DNA, 605 bp, Cannabis indica
ataatcaactcactttctaaagttttcaatctaatccaatttgtctttgtgtaggttggctccaaaactatcttagtagacattcaccagctttgctgttaccaaacattccccattgaaaatagagctaccaattgtaacatcctttcttcagcaaaaaaaaaaaaaaagaagtgtaacatcctttcattattttttttcttaccttttataattgatcaatgtaagaaggtttagggttaggattataatgtatgatacttttgataagagtcctttgccacattatatttaaataggtgggtgtttctatgtacacccctcttttttcttctttcattgatttaataatttgtaaaaatatatttgttgcaataataaaacttggttttatataagttgttttgcttggagtgactcatatcctgactttgtatatttttggtctagacaattattttgttgactggaaattcctctgcgtcgacgattgtcatagtgtgattcaaatcactctctcaaatttttttttttgtagatgaaaaaaaaattaaattattaatgagtggaaccatcacatcttccctcatcgtcatagctaaaaa

SEQ ID NO: 362290 - DNA, 517 bp, Cannabis indica
taggttgggtccgagtcccaagttccactcctgatctgagtctggattcagttccgtgtctaagttcattgttctgatacttgtctgggttcgagtttgggtccaggtccgggtctagctttgggtctgattctaggtgtggtttgagttcgggtcggagtttgtgtttgggtttgtatccaggtctggaccccgatctgagtctaggttcggttccaagtccagagtgcgggtccaagttttggtttgggtcaggacctcggtccttatctaggtccagcatttcgatcccattgtgtgtcttggttcaagtcgagcatcgtatctggatccctatctaggtccaagtctttatttgggatcaggtcccagatttaggtccaggtctaggtcatagttcctgtctggttacacgaccgtgtccgggcccaagttccagtctcagtttgggtctgaggctaggtccggatcccggtaacgatcctagtcttgttctagggtcctggttcggcgattc

SEQ ID NO: 362291 - DNA, 673 bp, Cannabis indica
tatctaacaataataccccgatataactctaaattaaataaaataagactctctaaaggcccaacgccgctttccacagcttccgaacacaatcacagaaattgagaaacttacataaatagcataataaatatatacgaactcaaataaattcccataattgtattattatcaataataataaaatctcatacataaaccctaattatttaataattcaaggtattaatcatatgcggtctttacaaaaatagttattaataaatattattaagggctagaaaataaagatacaataagaatttgaaatcagtatttttacgtgattcaggtataaatcttagtccacgaatctctttgtattgagctttgagctttgtgtaacaatattggagagttgacaaatttgaagagttttgttatatgtacacaattaaagctttaaaatatataattttgagctttattcacaatccctaattagcttcttcctagtcgctagcaattcaagcaaaaaaataaataaataaataatgtcaacatgatattttttagataaaaaattctaaattatgcatgtattcaaacaaaatattgtttacaagtcaataagagcgctatacaaatcactttgaataaatctagagttgtgagtgtgtgtaccaaaattgaa

SEQ ID NO: 362292 - DNA, 569 bp, Cannabis indica
ggcagagccataatgacctgccaagtcttgcaggccttgtcctgccaggtcctgcaggccttgtcctaccagatcctacaggcattgtcctgtcagatcctgtagcccttatcctgtcagatcctgcagcccttgtcctgcgagatcttgtagcccttgtcttgctaggtcctacaggccttattctaccacaccttgggtggccaaatctcccttgtaggtctatgggcagccatgattatctagcaggatcctatagtgaccagactgatacaaacattccagtggatccaagtggtaggcccatgcctccatgagtagatccaccattggcgcctccagctgaaggaagaatccttgggggcaccccaaaacaacaatcaggtttcacccccagtaccatgcaagagagacgagactaggaattgacaggcctcacctgggcttgggagaagaccttgagttggccagactcagggaagctgtagaacgtgcaagcctaatagaagaaccacacactgctgactgcgatattcgctcagcagagatgcaaattccttgaagaacca

SEQ ID NO: 362293 - DNA, 893 bp, Cannabis indica
cgagcatccgaatgtactcaaaagtgagattgtaggcccacaggtccaccacatgaagctaataggaccaatcgtaattctgctcgaagcaattcaaataatgtgggaaaccaatctcctccatgggattctcttcacaagtcttatgactctagaccaccatgtgaccctgcaaagggaaagggacctacagtcagacttaggggaacaccccaaaagctctaccacaaaagtgaagagtatgagatttggagggtgaagatcaacgaactactccacactgagaaatacttttatgatgaacgaggtgcttggtgtaggtacttcgcccgaggtcttgacgaccaaaagtacaaatacatcccatgggtgcatagagacttgttaaacttgagcaatcagtccaactccctccacacatgtcactctgaggaagactattttggaaggaatagtcagtatagtactacgagtagcttcttacgaagcaaacactcaagagataactctatcgtcatacatgataaatccttacagttgttagcaaggccacacgactaggaaacaaccacaagacctaggtcaatcaatccctttaatcgacatggaagacaaaagagcaggtgtaaaaacatcaataagaagcgactagctgatacacacatcagcacagtgtgtagggcccaatttgacaccattgccgctctaattaagggtatcactaatccataagcatcagagtacagatgagatcaagagcggtgttatcctctatcggatcgaatcaaggctttagaaatcccttcaaagttcaaaaatccagtgtggcatatgttggaaatattttaccaggatcttagatttactaacaagtatgttatttaacaccctaa

SEQ ID NO: 362294 - DNA, 919 bp, Cannabis indica
aagaacccggagagaaaggaggaaggggtacggagataccccctcgttgatttgagacatcagatcaacgggtatcatggtgatatacgggatcacttagacaaaagaaacacgcaccagcagtctccgtcggaacgctcaacgaaggaatcctggctgagttagccatattgcgcaaagatattgcccgagtctcccggagaaaaaaaggggatgacttggattctgattgtgaggaccgggagccgtgcgccagacacattttggaggcggaactccctaaaaattttaagatgcccgaaatggcagcttacaccggggatacggaccccagcgatcatttgtctcggttcaaccgagtaatgacggtcatgagagtcaataatgacgccaagtgcctatgctttccactaacgataagtgggtccgcggaggaatggttcaaaaagttggaaccaagatccgtggactgctggaacaagttgcaagttagtttccggagacagtttgtcgccgcgagaaagattaatctcgaagtcaatgctctgactaacattaagcaactacccatagagacactgaaaaatttcataaagaggttcaaggaagaagcctcgaagactaagaaagtttatgacggacaacagcttgcactccttcaagctgggatccgtacaggaactccattctggaatgagttacagcaggaaggagctgcaaaccttcaagatttccagaagagagtttagaagtacatcaacttagaagaagcccaaatagtggcttacggaggatactatctgaccggtgtggcagggtacgtgcctggaacccaactcctgggaaccctacctccggttactccacaaatgagcggtatataattctccgctactccaggatataatcagagccaggc

SEQ ID NO: 362295 - DNA, 617 bp, Cannabis indica
gtcctcaattatagcgtgtaagaccgtgaagaatccaaataactgaaggagtttcgggctcagatcttggtgatactttgtgacagaaaggatacaagggtgagagatctgagtggaaggagtaatttaattccgcagcaactaatgtaaggtttctcatactttttatgtgtttattttatatcattttagaagttcatgcttaggatgttaaaaatatacttgttagtaaatctagatcctggaaaaagatattcctacaactggtctcaaagccatggtaattgattactttcaagaaatatggatttaaaacgatgtatgtgtgatttggatgtgattcatgttgatctatgtgtttattgatgatcgattgatgttaaaaaattttatacgtaaaataattggaattttattttattggatagtatggaaaaaattaagcaattcattcgtttacataacttaatttcgattttatttgaattagttatgaatttttgaaaatcaaaaaatgaagaggttgtgtcaccccacgtgcacgtgcagacacgagtgatcacaccgtgttcacgcgcaataggacagggattgtaacaccctaactaccataggcg

SEQ ID NO: 362296 - DNA, 609 bp, Cannabis indica
tttgagattatgtaggtgtgactacctatattagcaagaagtatcttgttttggtagctcaccatgagggaactccatgattgagtgtccttgacttggggtgatttcattcaggaaatttccccatgaagcgtgcgagtcagagcaaagcacgttgcaaatacttggattggtttgtaggggccagtcgtcagtccgcgaaccagctagagtgatgcactcatgtataagagtcatcattctatgggagtaagggcccaatggaggcttgaagtggggatgttaccggggtaacgtataaaagaacgtcatgaagagtagtggtaccactaaagtaaaaaagattacttgaattacttaaggtgatacggtaatgatggagagtactttataattaactggatagtcaatatggtatataaggagaccattaacattctgggaaaatagtactttattttgcaattatggaagggcatactcaccctgaatggggaaaaagcttacgaatttagatgcaatttaatagacacgtaattgagtgattggtggatgtttagatcacaaagtaggttttttattaaacaatgagctatataattgagtgta

SEQ ID NO: 362297 - DNA, 838 bp, Cannabis indica
taataattataattaattactaaataaaattttaatttctataatttattaattagaccatacaaagtctcttaattaacaaattgaccacaaaacctctttttttttcaaatttaagcccttgcttagtgaaaattcttaaataagacatagtctaattttagatttataattgattaattaaaataaattaactgagtctgcaaccagtattatctcaactagtgaggggaccatgggcctatataatcgatcttcatatccagatcaagtgtagtatgtagtattctctccgtaataggatctaacaagttatattcaataccacctttcctccaccattacatttccttaatcacaaaatcattgatattgtcatatttctccctatatgtttactcctctagggatactagattttttactttttggaaactacttctgtgatagtcaggaagtaacactagtagttaattaaattgttggtacaatgccaaaactgtatagaactttccttagactgaataagtatcttttctgcaactttagcattcagtctctctggtagagttagagattttagattggttcttacacttctccaaaatcactactctacacccagagtaatcaccatctcatcagtagactttctagcgctaagacaagtctaaaaatttgatttggtgtagtctaagagtattatataccactcttatcaactaacatatagttcctcttcttgatcttaagatttactttattgtcttcaaatgttcctttcctagattaatatgatacctatgttgggttttgtgccctaaataaaacccattac

SEQ ID NO: 362298 - DNA, 497 bp, Cannabis indica
gacccgaacccgtaccctgtgacccacaataggaaccgaaagcgaaagttgaccgggactggaattaggacttggacttggactcataactaaaatttgacctagatccagaaccgtaaccggaccaggaccaggactctaaattagacctagacccaaattgggaggcagacacagatcccaacaaaaacctggactcaggttccaaacaagaagtcagacccaaacatggaacaagactagcgtcacagaaccagggtcaggagctagaacagcagcccagtctcgatcccaaactcaaattcggaaatgggacctggtacctgaaccaaaaccagatcgagacccgtgacagtgatccagatcttgactcgagattcgagtaacagggcctggaacagaccagtagtcggtgtttagttctgcgactcagacaaggaccagaacccagacgaagaaccaaacctgaatcaagacctagacctgggacccaaaat

SEQ ID NO: 362299 - DNA, 715 bp, Cannabis indica
acttcggacttcgctgtctccgcgggctgcgtctccttgggcttcggcccctggagttcttccctcggggactgcgagatcgtgaacgcggtataggtgaccggcgtttgtcctttcccttctctaactccgctagagaattctcgattctcttgtggggttcggccatggcgaagaattcaactaaggattcgggccttcgagcttgtaactccttccaaaagtcggtcctcggcaagatacctgttatcagcatgcaaacaagcgaagactcgggagccttctcgacttttgttacttctgcattaaagcgtttaaaatagtcttgtaaagactcaccaggttcttgtttgatgttggccaaagtcgtataaggtggcctatacgtcattgtggcctggaaatgtgtgaggaataagtcgacgaaggtttcccacgtcgatatcgacgcctcaggtaattgggtaaaccaatcatgggcattttcctcgagtgttgccgcaagaatgcggcactttgcgagctgtggtacctgatccacttccattatagtattaaatttttcaagataatctatcgggttagaagtacctttatatttgagggattcggatagacgaaacccctttggaagttgagcctgtcgcacttctgtagtgaagggcgaggtaccatgcaacttgtatatgggcttccgttgctgctcgagcatttt

SEQ ID NO: 362300 - DNA, 568 bp, Cannabis indica
gaggaacttgatttctgtatctaatttggataaactatgttatagtcttcttttggaactggaaatctgattttgtatcatgactctattttctctgaattcactgcctgtgttgattgtataaaaggaaagttaactactaaggttagaaagagtaagtcagataagtgcacagatgtattggagcttattcacactgacgtttgtgggtcctttatttcacctgctatggacgactatagatattttattaccttcattgatgacttttcccgatatggtcatattgagctcattagtgagaagtctgaatctttagattcctttaagattttcaagacaaatgttaagctccaaaagggaaagaagattaaagctgtcgattctaatagaggtggagagtatattatgggcgttatgatgaaattggaaggaatcccgggccatttgctagatacttgcaggaatgtggcattgatgcaagatatacaatgccaggtacaccccagcagaatggaattactgaaagaaggaatcgtacacttcttgatatggtacgttgtatgtt

SEQ ID NO: 362301 - DNA, 725 bp, Cannabis indica
atcttaaaaatcaatttagaaaatttagatatcattttttgtgaaataacttgtcgcacaagttagtgagccaaacttttgaacttataaatcctagtgtactatgcaaatcactttaacaagactaaagcaaatttataccatttgattgtttgtagtcttgatgtagatgagcttcctagcttgatttgcatgttttgatccaaagttgacttttcccgagagttgactttgactttgactttgactttgacttcgagttgacttttgactttagacttttgaagacctcttttgaatagggtcttgagttgttgatcccttgatgaatcttttgctcttatgaagtatgaagtagttgatatacttgttgaatctacttctttgattatgtttgactttaccgagcaaatattaatactttgtaaacttgcttgcaaaatgatcaagaaaagattagtaacaaataataatcaaatatttgtttatcatcaaaataaatgagtgattttgacttttggtcaacactgtcttcaaacatttgatcttcaagaaacaccacatcgctgcttctaataatcttcttgttcactggatcccatcatctgtacccaaactcttcatgaccgtaccccaagaaaatacatggttttgccttatcattaagcttggatctctcatctttaggaatatgaataaatgctctgcacataaagactctcaaa

SEQ ID NO: 362302 - DNA, 700 bp, Cannabis indica
aaaaaataaaaagagaaatctaaagtgagggcagctttgtaatttccactgcctccatctagttttagaataaagaatttttattgcactccataaaatgataagtaaatcttaatatttaaaaaagttaaacttaattaaaataatttttaaaaattactctgaatattttttaaattttatttttcacattattttgtactaattttaattttaattttataatttttttacatcatatataattttttttatttttccaattaaattttcacaattttttatttttatttttttattataatagttaaaatataaattgattttgtgtgatagtaatattttttaagaatataaactagaaaaaaaaattataaagaaaaaactaatataattaaaaatatatattatacaaaataaaaattattaaaataggatgtatttataaattttttgagtgcaaataaaactcatttcttgccattaaaggtaaattttctctcaatgtgtcttagaatagaacaaaaaatcaaaatattttgatcaacccactcaaatatatatagaaaaaattattaaaaatacaatacttaattataaattcattatattaattatatgatgaatttataattaacatagatttttttaagaaatataactttggtcggcgcgtttcgatgtaaagcgtctttaaaag

SEQ ID NO: 362303 - DNA, 511 bp, Cannabis indica
ttttttttattgaaaaacctcaatttattaaatcaaaaccaaaaatttggtgaacccatcgagactcacttcctaaaaatgaagtaaactattactagaatgccatagacttattatttaacaagataatgagctctttcattaaaaacacttgaaatccaactaacagcaaaattagtatctactaaaacattatttaacttattataacagaaagtaaggttccaactcgaacaggagtaggaatgtcaatggggcgggtcggatctgatccgactctgatccgacctgatccagatcatatacggatctgccccgccccgccccgctggatcagatactcggatcggatctgatccgacccgccttatacggatcggatctgatccaacccaacttttttttcaaaataaaaaaaatatattttatatctaaatttatattttttttcccaaaatcctaatttgtttaagtaactaataatgctattattttttttctttattattat

SEQ ID NO: 362304 - DNA, 678 bp, Cannabis indica
caactattttgttgttttcaaaatttcttgtttttttgaattttatttctgaaaactgtttttgaaaaacaaggccaaacaagtcaaattgtttttaaaaacaatttttttactttttaaaaacaaaaaacagttttttaattatgataccaaacatacacttaaattttattggatgtaagcaattataatccctgatctctcacttacctaagaactgtcacaatgtatagctaagtttttctttgaaatccttattactttgatccaacaattcattaaggaccacttcggttttttcctaattacaaatagaaatcatttcatcattattcattataaagtgtgcctatataactaaaattcttggtttttgagaaatttatgggtgacttttaatttttatttaataaaataataaaatattatttatatataataaaataataataaaacaaatcccattaatatttgaactgatatttgggtgacttttaatttttatttaataaaataataaaatattatttatatataataaaataataataaaacaaattccattaatattggaactgatatttgatgctaaatattcgagaatcacaacacatttaaaaaaaaaaacaacccgtgatttgatactctgagactctcaattaaaaaaagaaaaaaaag

SEQ ID NO: 362305 - DNA, 973 bp, Cannabis indica
cactacccccaaaagttagggttttctcaggaccccacaaatccgaatgaacataatctaagataccttgtgatttgtgtgtgccagtttgaaatttaagtctatgatgctttcctagtacacaaaattcacaaaaatctaccttggttaccttatccttaccaagtagcttttgttcactcatgagttgtagccctctttcactaatgtgtccaaccttctatgccataagacagccttagtgtcttctgtaacatgctctttggtgttgtggcagcaagctacggggcttccttgcaagtagcatagaccaccatttttgtgtcctttgatgatagtcatagaccccttggccaatttgattgtacctacctcaattttgctaacaacaccaagatcatcaagtacactaatagaaattaagtttctagataaatcaggaacatatataacattagttaaagttctaataatgccatcaaacattttaaagttaatagaacctgaaccttcaattatgcatgtttggtcattcccaatatttactttgccccctctagattccctgtaatcaaataaataagacttattgttagtcatgtgaaatgtacaacccgaatctataatccaatcatctttaaaagatgatgcagccacatagacatctccactatcataaccatcacttaggtttgcattttgatagtcattcttagtcttattttgcttgtttgattcctctagatgatctggattttgtttcccattgcttctcttgtaaaagtagcattctctcttgaaatgccctaactttccacagtggtagtacccattaggatctttagaaccctttgaatttgacctcgctttgtgatgatgatttttgcccttatgtgaacccctactagtgcttgaacatctactagtgcttctacccctattttgccatggtttcttttgtccaggccttccc

SEQ ID NO: 362306 - DNA, 546 bp, Cannabis indica
tgccatgtcatatgtgcaaactttgggataataaagttggcattttctctgttctcatcaacaattaagatttgagtgctttcgggaaacaaacaaagtcatccgggggtcagaactaggaccttgtgcccaggttgacctggtgctgggcccagcgcgtatgttgatactttatcaacctgggccattttcaaggagtttctctgagaagtctgttgtggtatttttgcacacgcaagtgtacgtatcgttaacaagtaataaactcacaaagagtgaggttgattccacagggattgaagttaagtactttaaaattaaatttttacttctatttggttgaataaaaattaagaaagaaaattaaaataagaaaactagtaagaagcaaataaataaaggaaattaacagttaatataaactagggcttcgatttcaattattactattgactatgacctaatatgattatcttcctatgatcaatttctatgcaataacaagtttactaaggtaatgtatagtcttctcagatatataaatct

SEQ ID NO: 362307 - DNA, 905 bp, Cannabis indica
gcctgtacggctgggctgacttcttggcattctggtcgggttgggatacgtcaagcgtctttctgagcggggatttgagtatgggctccagactgcacattcgttgtagtattctgctcgtctgctcctcttcttctgtttaggctgtcccttaggtcgcggggtgttcccaacctttcaaacacagaagaccctagctgccttagcgattggttcgcttggttggcaggtggaatggctccattgtttagagtggatccatcgagcataactccttctgatgaattctcggacaaggtctgtccgcctacctcttggcccacgagtggaactcgtgactggggattggacggctgaccgttgtttgtctgggaggcattcaccgttgggttatcctcggcttctcgaaggggaatgacgctcggcgcctgctggcctacaatttgataggctctccgtatcagcacagtagcttgccgactatgatcttcgatttctgcatggtgagcctttaatacttccatctctttatctctccactcggcgaacatacgcctcagttcgtcaaacgcgaggtttactgcggcacgttactcctgccgactatgaacatacgcctcagtattgttgtggccctgcatgagtccaagcgcagcatggagattttgcaattcggttgcatctccgatggttgtctgggcgctgatgcctggtggaacagtcatgttatgaacattctggctgtgtgcggaaccgttatttccggtctcttgcacaccaggcgcagtttcagtaacaggagttgttccatcattcaccacacttcccgtctgtccaggattgacagcgggtggaaccgtcgaactccctgggtcctgcacatcggatccagcgtctatgagttt

SEQ ID NO: 362308 - DNA, 1008 bp, Cannabis indica
tggtttcccctcacggtccctgtcccagcctgcctcttgggtggggaatttcaggcacaagtgccgtattgacgtgactgcacaaaagtccaccaaggctggtcagccgaggattgcattataagctgttgggcagtccaccaccacaaatgtgcagtacttgaaagtgctctggggtgtgtccggggacaaggtgactgggagcctcactcttcccatagggataagtgttgttccattaaaccctgtgagttgggaaccacttggtgaaagatctcggtctgttaggcctattgcagtgaaggcctctttgaataatagattcacggaactcccgttgtcgatcaagactctggccacgatcttattggcaatgggagtctctatgaccaaagggtcatggtgaggaaaacgcactgttttagtgtcttcttccgtgaatgtaatgggctgatccattagtcggggcctttgagttgggagttgagtaacctcccagacctcatcgtgtttcacggcccctgcgtactgtttgagctacttgcgggtagttcctctgatgtggggtcctctcgagatcatagccactctcccgttgggtcttggtggcaggccaggaatatgctgggcatatccggggggagcaactggagccaatgctcctgctacaccccctgccgctccttgaggtaaagctccagctgcctgacccgggttgagatggggcaaccggttcttgatccactcgtagaagttttcgatctcgtctttgagatttttgcattcattggtgttgtgcccaatgtcattgtggtactcacatctcttattgggatctctccgggagctatccttgtacagaggaggcagtctccggtagtgcgtattttgcctagtagcaaaatatacacgttcttgggagtccgttagctctgtgtattgggtatattggggagtatacccccttttctatcgcatatcctccgtccggttgctgcctttagagga

SEQ ID NO: 362309 - DNA, 749 bp, Cannabis indica
aaaaaaaaaaaaaattgatagtatcgggccaccatcagactccccatcggactactatcagtatagatgggaatagggagtatggatagtgaagttagaagagaggagaagagagaagggtattagtgggtctagaaaataaaatgtgcttttattttttttttaaatttagtaagcttgtgttcaaaaatataatgtacctcaaatgtatgcatataaattcaaaattttcttttataattgtttgttaggtagttctaaggttattttttaatatttttgaattattttttttttattttactcaaatacagtattttagtaatttgaaactttacacacagtatttttataaagggtatagtaaaaatatatataaaaaattgagataaaatgtaaaaaaaaactttgtgtactaatatttttgtaaactttctctcattttaaagtattttggaagtttcattattattattattattattatgggagtgttatttgcaccccataaaatgatatatatactatattattaaaaaaaatataaacttaaataatttttaaaatttatttttaatatttttttaaaattttttcttcacattattttatgttaatttcaatactcattttgagtttattttcataaattttttttaactcatgtatatatatatcttttatttttttctatgaaaattttatacaatattttattttaatttttttgtcataatatttaaaatgta

SEQ ID NO: 362310 - DNA, 935 bp, Cannabis indica
gtatttttttttattcatttccttttacttttttgatattttaattgttattattttttatttatttgttatttttatttgatttaatttattttatctttttatttttttatttgttatttgttattttttatttaatttattttttttaattttttattttttatatagaactaagagaatcacatagtgcaaatttttttctatacctttggtcatttttgacaattctagacaccatgtgtcagttataggggttttataccttagtcttttttaattagatcatcgataacaatgatctttttttctattcttttgttttcttttttattttttatgaatgatttttttattattttttaaaataatcttttgtgctatgtttttttttgctagtaaaatattttttttttatattagtgatgtttttaaattttatgaatgatgttccttttttcttttcaatatcatgaaaaatagatacattagcattttccttattaaatacatatatttattcattttaattaaaattttaatttttatttaattatacataacttcgtaaaattttttagctcttttttatttttctcttatttatactgtcgatatatagttaattgttattagtattcttttatatatataaatagtcgcttcccatattatatattaaatcaaaatttatgagactcaatattgaaatgcaccaataacggtttgacacatcttttggtgcttgacacctcccttagcattttacttattatacatgtctttgttcactttaattagaattttaactttttatttaattatatataattttgtaagtgttcttttttattttaggctatttttagttttaacaaaaaaaaaagtaataatattacaaaaatacttccaactagccaaataaacaaatatac

SEQ ID NO: 362311 - DNA, 656 bp, Cannabis indica
ccacaggtccaacattgctgcttgggtccccaagtcgaggatccacatcttcatcctcgccttgggaagtttcctacttgggaatgttttttcccttgtctgggctctggctggaggatatttccttcttagccttggccactgcaaggttgtaacattcccgagcagattgctggttccctctaagacaccctaccccattctttgttgggaacttcaggcacgagtgaaatattgatgtgacagcttttaagtcatacagggctggtcggccaagcattacgttaaaggctgaaggaacatccaatattaggaactgtgccatgatagttatgctcgtcggagcttgtccaacagtgaggggtagccggatttgtcctagaggtgcaactccttgaccgaagaaaccatagacaggctggaggcatggagttagatccttgagttggagtcccatattttcgtaagcagtcttgaacaagatatttgaagaagctccattgtcgatcatggttctggccaccattttattggctatctggacttccacgaccaacgggtggttgtgcagaaatctaattttgacagcgtcttcatcgttgaaagttatggttggctctcctgctcgtggaactttgggcttcctttcttccacg

SEQ ID NO: 362312 - DNA, 418 bp, Cannabis indica
ggtaaaataatttctaacagttcaggtgagtggtatctgttgcctatgcgaactgcaatctgaaacatgccagcatcttttttttagtgtaaaactgtagggtctatgtcagctggaggtgaagaagtggctgaatgttcatgctcaaacatgtgatctgcaacaactaaacaggtggatcaggaagagtttcgaaatttcgaaagcaagtgatggcttctgcaattgcagccttggtatacaacctgtggaaggctagaaatgccttgatttggaaaaaaaaaaagcaatggttgatcctggcagaataattgaagtaaaatggacactcaagacctcaattattatgttcatgcctaggaaagttaagagcattgatagagattggtttcttgctttgtaatgaaaatatagatgt

SEQ ID NO: 362313 - DNA, 720 bp, Cannabis indica
gtaatcacaacactgataagcgacacgctaaatcacttaccggggacttaaacttgaaactaaaagttttcctatcaatgaataacaaggaaataccctaaataacacaaaaatgggaaaaactagggttccccaaaattgccccaataggtagaccggttccccaaccggaattctggttctgggaaaaaatcctggaagccaaccgaaattccggttcctacatgccttttgaaccggaattccggttcagtgcaggaaacactaaaaaaattcacaactcacacaaatcaatccaaactttccagacctgttctatacaccctagagaacataatcaaggcaacaaaacatccacccatacacagaatcaaattctaccattaaagctccaagtttgagttctaaaactcaaaacttggctaaaccttcatacaggctctaattcaagcatagatcaacataataaaccttaactaaacttctaaaaacaaaatcaagcaactacagcaactacagcaactacagaaagcaaaacctcaaagcatgcaaaaatttctttttcttccaactcaagaaatcaacaaaaagctacaagaaacttaccaagaacttgagatcacaaaatccttgcttaaaccagtttgaaatgcagaacaaacaaaccaaaacctagctgcctctaggtgggttcaaaagagagagggggagagagagaga

SEQ ID NO: 362314 - DNA, 342 bp, Cannabis indica
tatttttacaattaattaatagcttaataacttaagggttctgggttcaaacccacgacctctctctttttcccattcttcccccaccattaagctagccttagtggctttaaaatagacaaaattaacatatgataagactaactttaaaaatgtatttttgatttttttttagttatgtcattataatatctattatttaatatattaggttaatattacgaatagagttatatttttagtttttatttgggttatgtatatttttagttgtataattagttttttttttcttatagtattgaatcaaacaaaatataattttttattaaaaaatattga

SEQ ID NO: 362315 - DNA, 662 bp, Cannabis indica
ttatggttaaatttatttagtaatcagtaacactatgagaaatgatctaatgattaaaactaaatgtaaccatttagttacatatttgatgtaaccattgaaactccctccatatggttggtaggaaacctgtattttttgtagtgatttgttaattaattaccatggctaataataataattacataagacatcagtaaaaattttacatttttatgtttaatatttttttatatttttactatattctataaaaaaatataaaaaaaaatcaagaaaatcacataaaagtaacaagaaaataacatagaaaataatatacaaacaaaaaattaacaataaaataacaaaaatacaacataaaaatacactaaaaaaactatagtttatgtaaataaaatttaaaaaaccgtaaaaatattaaaaactccgtacaaaccgtatttttattaattttttttttatttattttttgttgttttttttttttttaaatttatccatgataataataatatataaaaagaccaaacttaagagaaatgctatatgtagggcaccaaaggtgcttagaggtaccaacaccgtgatgatgcctaatagcaatactccaaatttaattaaaaacttacacatatcggtgttagacattataatgccta

SEQ ID NO: 362316 - DNA, 555 bp, Cannabis indica
tccagacaccgactacgggttttgtccaagccctgggtctagatttggatcccaatctcgggtcccattcatgttccatttcttgtgccgggtcacgagctgggtcctaggttcaagttcgggtttgggttgtgtaccaggtgccagtcgtagttctgtttcccaagtccctatcttgattctgggtctaggtcccggttattgtatggggttgggtctaagtttaggttcgggttcgagtcctagtctcggtttgggtttaggtctctgtttgggttttgatctgggttcgagtttcggtttaggtcctggtccttgtcctagtcctagtttggttcaagttccacttgcaattcggagttcgagtttgggtttgacttcgggtcggagttcgagtcctggtatgtgtttgggttcgggtttgaatatctgtctatgtccagatcaggctccaggtgtgggttcgcttcctcaatcttggtctaggttgggtgcgagtcccaagttccaatcccgatctaagtttggattcagttatgggtctaagtccttggt

SEQ ID NO: 362317 - DNA, 756 bp, Cannabis indica
actttccgtgtcagacacatcttctatggcagtccaaatcgacatatgatgtctgacacaaagtcaggactttcttggagttatgtcgccaggggttcagcttctgtccacttggtgaagtagtcaactgcgactacaacatattgcacagttttctttccctttgggaattgaccaaggaggtcgattccccatatcaaagggccaaggagattgcatcagtgtgagcttgtttggtggagctctcgggatctttgagaatctttagcacttgtcacattttttgacatagtccatcgaatcgtcgatcatggttggccaaaagtaccatgtgagagtacctttttagataggctttgccccatggcatgattgttgtagaagccttcatgcatttctaccaataaccactcgacttctgtcttagtgacacaccttaggagcagcattgagaagactcatctatacactactccatctaggattatgtactcagcagcttttctcctcatctttcttgtctcatttttgttctcaggcaaggctccagtttggaggtatgctgctatgggtttcatctaggttggactttcatccaacatgtcaacctcttctggaatggtaatgcttttttcttttaagaactgtatgggcaccaaaatttgccttgtcagttatggtgctgctttccaaacgagggagtggatcggctattgcattcttttctctagagatttgccttattgtataaccttt

SEQ ID NO: 362318 - DNA, 589 bp, Cannabis indica
tgaaaccgtatttttgttgtttttttgttgtttttgtgcatttgtgaaattatccctagttttatcacatgtcacttattagtcttaaaatttagtaggtcataagaaaaaaaatatttttactaccttatttagaaaatttatagtaattttcaaaattagtgaaaaaatgtgtatttttaaaaaagataaaaaaaaaattgagcctttaggctaggtggaccctaggcataaatctaacccgcttatggacggacctgggttggacctgcgcttttaaaaactacttttaggctttggattttgaacttttaaagatgcaaaagcattttgttgatggtttggatgggtaacaagtaaattttagcttagacaaaaagattctttacttagttcttttattctactttttagcaccaaattcatacttagaccaatttgtttggaatttaaagaatttgctttatgtaaaggttagacaaagaaagtaaaatagacatttagataaaaaagggggttagggcaaaggggaacaactttcacatggatcttgacatttaacagaatattctctattttttttttgttt

SEQ ID NO: 362319 - DNA, 666 bp, Cannabis indica
gttcatctacaaaagacaatgcacaagatgagtgtttggtcagaatatcaaacgataaacaagcaaatatgccgactaggagtagtgaacagattaaagaacgattatgtttgaagagaagtcaaaactcaagaagtcaaaaattttctcgagttagggcaaaaaagttcatgaagcttagaataagcaagatgaaagatagacgttacgcaattcagaaacaagtgttatgattgtaaaatcgcacgaagacatgataaagaagaatcgcagagatttctgggcctagggtttcctaaacatttttctacagcaaagtagaggatgcatttgacatataaacatgcaaagataagcataaaggaaaccagagacttacttgagggtcagatatctggttgcgagcaacgtcaatccaacaagcagtttgcatgaaggcgctttggcaactttgagtcaagaatctctcttttcgctttgaagcttacttagcaaagaaaggtgatgaaaatgagtttatgtgccaatgctgtttagtatttataggcaagtcacgaaaagaggtaatcgtctcaaataaaccttagacacctcagtttccctccttaaaagcgaatatgggaaatcaaaaataatcaagtgcagccgtcagccgtggagagagaa

SEQ ID NO: 362320 - DNA, 605 bp, Cannabis indica
caaaaagaccaagacggatattcttaggttcattgccaaattcagaccacctatcatcaattgatttcccagcgggtgagttagctggttgtctcatcttaccatctaattatctattgttggcatgctaaatcaaatttttagcatgattaacattttgaaagaactgaaccaactgaggtattggggttaagtacgataataccttagtagggacacaaacctttacctcgtcgaaattatttttcttttgccacctagactcatcacacgtgggacacgatattacatccataaatatcttacggtataggaggcaatcattaggacatgcatgcattttttttatattgcatgtctaaggaagaaagtgtcttctttgcctcgtaaaaagataaaggcaccacattaccttcagttaataactctaatagaaaagctagtaaatccgtaaaactcttatcactctacctgtgtttggcttctatattgtataacctaataagtgtcaataatatagtaaacctattgcaattcgggtaaataggcttctcaacatcctctacaaaactttgaattttaatggatcgatatttaattcaaat

SEQ ID NO: 362321 - DNA, 776 bp, Cannabis indica
tgccctagaacagtccagaaaaaatatgcagattaagtttttaatttttcaaacaattttgtaaatcataaaaaataggaatatgtctaatgttatacaacgcatataaaaatcaagtccaataatcaagttgagtccctacctctcccgagtcgttaaactttatccaaaagacaatcttaagctctcaagtcccgagctccaattgttttagtccaatcttacatattactctcacctataccatcacatggttaaataattatcatcatcgcattctacattcaaaaccaagtccaaagacatataatatgactatatttaaaattttgggttccgaagcctcacctaagggtgcacattaacaaatcggtggcggtaaaaatcggtgtatcggaaacgtcactgaaaattggcgtagtgtatatcaaaacgaccatctcgacgagtagatcacacccatgccaaccgtttgtcaaaacggtacacgaagtcaccgaaaaatcgccggaaaggggcgaagctacaaaatgtcaccggaaaaagtagcgaaccgggaaaaatggtttagtgtaggtttttttcctcgacgagctaagtttagtggtgaaaacctctcgtcaaacggatgccggaggtgactaaaaaattcgttcaatgtttgaaaccccaaactttgacttgcgatcttgagctaactgtggccaaaggagcggcagcgcttggggctgaggtcgctggcacctagagtttcgttctgtccggcgcgtggggtc

SEQ ID NO: 362322 - DNA, 620 bp, Cannabis indica
gagtgtgtcacgcatcttcagctagcgatatacctcaaaaaacggctgggaggaatctcagtgactcaaggggcatgcgttctcaagcacgaccctgaagttactgagatactcccaccgtttcgagaagatcttccagccaaagagtatgcttatactgtaacattggcgcatgccacaaatggctgggggtttcacagtacttcaagaaacatataatcgcatatatgaacattagaatactgtgacacacccaccatttgagagacataaccaatactctcgcattagaatacacatcgtttatagtcctaaggtttaaaacagcgactaggaatagtaaagtctctgtgaaacctaggacaaacagacatgcgagtattcgaagtgttcatccaaatacccgcgtgtattcaaaagataaagatgcggttattcaaacattcttcctaaagttcacgattatgcaaattttaggtcattttctctaagattacccagttccataccaaaaaccatagtcatatgtgtatttcctacaagcatgcattcctaaaaaacccccccaaaataccaaaacccagaaaaaaaaaaacgcattttttctccaaacagaaaac

SEQ ID NO: 362323 - DNA, 631 bp, Cannabis indica
tcacacttgattgctcattgaatgacatctccgttggggtgaggtgagaacaatgcctaagccacatcctctactgttgcttgagccatctactgaaaacctccacttaaagtcagattgctctttcaagcacaacaattctttttcctcttatacctgcatgtcactagaaaagtcagcaataaagtcagctaatacctgagatttgatcactgtccttggttggaatgtgatgtcatattcactgagttatactgcccacatggtgagacttcctgaaagctttggcttgtgtaggatgctacgaagtagatattgtgtaacacaataatagggtggcattgaaaatatggtctgagtttgtgttctgttgtgataagtgctagtcccagtttctcaagttggttgtatcttgtttcagagactcctagatatatgtagagtgcttctacatccttaagctttgctaagagcggaggtgaggcaagatattccttaagttgtctaagtgcatcttcacattcctttgtacactccaagtcctttgtttttctcagtgttgagaagaactgtaatgtccccgcttcaagcctccattggacccttacacccacggaatgaatggctctta

SEQ ID NO: 362324 - DNA, 610 bp, Cannabis indica
atgcatgccaaacatgctctaagctactcaaactttatttttttatattttataaatcctagaagagtttgaatatatcctagatattcatccatagtgaagtaagttctgagattgcatgactgcggtcgaatgggtggtaatatttgtactattaattatagttttgtttgtttgtattattctggatgttttaatagtttaattgcatgtttaaaattttcaggaacgtccgaattatagatattatgctgctgaaatttctactgaaatttcagtaggattatccagagtttcatgacggttgttaatccttgcaagtttactcttctttatttagtttgtattttaattatatatacttttaatataatgattaatgtttttttatcttttattttacagttcaagttagacgctccctattgtaacgaggagatcaatgctgtacgggatgagtgggccgaatttgtgaagcctttgattatagattaagtacttaaggttactacacttttgttataatacatgagtaacaagttttatgattattgttattgtggaggcttgaactcccaacaagaatcaacacaacaccaaaataaacata

SEQ ID NO: 362325 - DNA, 650 bp, Cannabis indica
ggttaatatttattagcttgatccataatatatatgtatatattttgtgttttattagatatgtgtttatatatatgtattgtgtatatgtattgtgtaggttatttatgtaaattttgtaattgtattgtataaatgctaagtaatatatatatgtatatatatttattgggaatgagaatgagatatgagagatttaattagttaaataataatgtttttaaaattgtgttagtgtgagatataatatattatatatgtatgtatatatgtaattttttcaaaaacttagtaatatatataattttgtaattagtaatttgttttttttttaataacttgtaattaattaaataattaaaattctcattttgttgtatttctattatattgtaggttgtgagctaattttgtaaggttcaaaataaaatttagttgttgtatcggattttaagtttagctataggtatatacatctactaacatttggttattataattaattatcaatgcatatttagtggagtttgtaatatcttaaatattcgttcaataaggaaagaacgtccgggggaatactgtacagcggtcggataggtgtaataatatgcatgttagctgagtttgaatatcttaaatattcaaccata

SEQ ID NO: 362326 - DNA, 720 bp, Cannabis indica
ttcctggtttctgcatttttttttcgcctgtccgatggggtccaatgcccacccgatggtggtctaatacatagtgattgtaggatgacaaggatgaaagcccgatttggcccgataagggcccgatgggtatccgatgggggtccgaaaatggaagtgggacatttttttatgggatccgattgggcccaatggttggttcgattttgggtccaacatggattttgggacattaattggaaaactaaatttactaacataagtaaagtttggtaggtttagccaacaaaatttaaatttggatacttaagtacaagtaaaataacaattagaagaatttacgcgcaaaaaactctttaaaaaaaatgtgtccttactatatatgtttgtgctagtgtgactttccaaattatgagtagttatatataatatattaaaatcatttatttgttttatgtgatggataatataattagttgggtagggtaggtgggcttcattatgtgttagagattttattacaatagaagaaaatcaagatattacaactctattgtaatacaataaaaggaccaacaaagagattaaataaatgttataacaacataatatacaatatatatacactatatatattatatataagaaatgtagaagaagatgattacaacacatgtaatataatatatgtatatatataacaagagaataatacatata

SEQ ID NO: 362327 - DNA, 534 bp, Cannabis indica
aattataattaattaattctaaaaaaggaatgtttacctattagtaacttgctattataggtcaaaggaaaatgtaaccatgatggttacaataaaaatgtaacaattgaatagtcacccatgtaatattatatgtttgcataaaaaataaaaagtgatacatttaatgagttacagttcctactaatgattataaaacacttttttgttttattattattattattattattattattgactttattatacttttttttaaaaaaaaaaaaatacttttttcatcgggttagtcgggttaacccgaccacccgtcgatcagaattttttttcctttatttagaagggttgtacttataattttgtaagccgacctttacaataggttaaaagtatgtagtataaaccgatcaaaccaactaacgtacaatcctaggtctgataattaatattctgtattaatgaggtcgatgttggaatggtggctcaggatagtgttggctaattggtggaagctgcctcattgtgtagacc

SEQ ID NO: 362328 - DNA, 486 bp, Cannabis indica
aaactctcccactacgacaatttccagcggttaggggacccccattccctcttttcacattagggtttggtttgggggctaactgctggattttctttttcaccttcaggaaatgtctacctctatgtctggagccaaatcttcccgaaaggggtcgattacgttggccaccctggaagaagtgatgatgggccctgtcgtccaggagaaatacacgtgtcgatccaacggttgggaggcgaatgagcttcgctcaaccttgacctgcgctcatcagttggagaagatcgtgactgtggctggtatcaagccatccgcttctggattttttcaccgcttggctcgagatgaagagacgcccaatcacaactatggtggtttcggagcttaaagccagatccaccttatgtctggagccatgcttccacttcaagattacttcataaattttttattttttgttggcctcgcgccttaccaacttat

SEQ ID NO: 362329 - DNA, 558 bp, Cannabis indica
tgggattatttatcccaccctgctggatgtgataaataatccagacagatgaggttaactggattagttatccagacttctaacatgcccaaacactggattggacagattagcctgtctaatccaatccagtcctgcgtaccaaacgggccctagtagtatacctatctcttacccgctccaataagtataataattacttaatttatttatatataatttttacttatataattgtaaaatttttacatcaaaaatacaaaatgttaattttattactaaaacaccactacacgagtaaatgaacatttatatactttagctttagtttattacatttttaccacatgcacacacaatacatgcaattgacatgtcagtgattgatgtattacatcaatttttctatacatcatttccttcattttttttctcttctttttcctattatttttcatttctttttcagttttttttttttaaaaaaaaaatctatgtaactcgttcttcatcaactcttcccctgttcaaaagaaaagttctaaaatgggttgaaat

SEQ ID NO: 362330 - DNA, 1142 bp, Cannabis indica
atatataaatcggtttaattcggtttattcgggttaagttggcggtttagaataatttgtaaaccacccaatatattcattgggcggttttggattttcattatattatttcgggttgtattttttattcggtttattcggtttggtttgggcagtttattcgggttgggcagtttgtaaattttgttgaacactcctataataaagataagagagatatgtcaatgtgggctatttgggaaaatcgcaacaggaagtggaataaactcctgatcatgaatggggttcagccgttaacatggattttctcagcttatccggcttctaatctcattggggatactgttgtgatacctgatgcagtccccaccccgatcatgaagcagtggcagacacctgaaattggcagcatttgtgttaattgtgatgctgctatgaacaagaattcaactggtgtgggcattggtttcatttggcggacctgggaagggaaaattctttcagctggcatgatatatctatccagtatttgtacagtggagatggctgaggcgtgggccattctggaagcaatcaagaggccgccggctgctgcaactgatcctattgaaattcagtcggattgcaaatcggtggtggaagagatcaagaaccaaggacattatttcagtgctgtcagcactatattgcaccagatcaaagttcagatggaggcttttcattgtgtcaatattattcatgtaaaaagaaccaataatatgttagctaggaaatgtctagctaatagaaccactcaattctttgatcactcttttcccggttggttagccaatttttgtaaggctgactgtctaattttggtgtagtcctggttttttttcttaataaaatttcctttcaaaaaaaaaaaagataagagagatatgtcaatgtgtatgggtgttcgtagtggacagtgtgggttttagccattttttcaatggatattggtgggtaaatcacttgaactctacggtttgtaacacttaaccacaaaaaccgaatttttgttattgatccaactaagtatcgagttctatataatttaatatgatagcttttaagcagtatcgctagccaatcgcaacatgacatatcgagaa

SEQ ID NO: 362331 - DNA, 918 bp, Cannabis indica
aaatcaacagacaagtgtgttctattcttcaacgtcctgcgaggaaacaagcaatttgagtggacggagaaatgtgaaaaagcttttcaatagctaaaaatgcaactctgaaaaacctcctgtactttcgaaacctctggacggagtgaacttgggatatacttggttgtcacggagcatgctgtgagtgctgtactgattagagaggaaaataacatacaacatcttgtctattacattagtaaaagactcattgaggccgaaggccgatacccattgatagagaaactcacttactgcttgattctagcaacaaggaagttaaggccctattttcaagctcatccagttctggtgtacactgaccaaccgttatgccaaatattacaaaagccgaatgccttcagacggttactcaagtgggcagtagaactaggtcagtatgaaattactttccaaccccgaatagcaatcaaaggccaagccttagcagactttatagtagaatgcacaggcaaggaagaaagcatatcagaaagcaaccctaagccagtacaaatacctcagccaagtaacagtaaagacaagccgacttggaaactacatgtggacgggtcggctacagatcaactatccggtgcaggaattgcccttgtcacacctgggggcaacagctgcacactgctgtcaagtttggatttaaagcatccaataacgaggctgaatatgaagctttgatcgctggtctaaaactagcccgagagatgaaggccgaacatattaaaatctgcagtgattcacagctagtagtaaatcacgtatctggagaatacgaggctcgaggagaaaagatgatagcatatttgagcaaaatacacggtctgctcgcatagttcaaaagctacgctctcagacaaa

SEQ ID NO: 362332 - DNA, 661 bp, Cannabis indica
aatagtatttaactatttagtttcattggataaatctatattaatagttaaatataatattattactaaataatattaaagagagaaatatattattttagagaaaataatatttattttaattcttgtgaaataagagattaatgagaatcaatcaattattatttattggtagaataaatactaaatcttatttgtcacaaaattgaaaaattaattttgaaccttaaaatatggctcacacgtgtaggcctattttacacgtgtagggtgacatataaaggcccatgattaatttagtttaattattttattggttaaaataatttaatttaaattaagttaattatcttttaattattaattaaatatattatttgataattgtttaactaaaaggataattattaaaataaatgatctattgatatttggatgtttagttattagatatttatatttgattttgaattctgaattcaaaacaaattagatatttatcttttattttaaataaatgattaaaaggctttatttatagcactgtatatagggatatatagtatcataaataacaacgatagaaaataaagacagataacaaactgaaagtagagagaacaaataattagtttttctcaaccctattctctctctctct

SEQ ID NO: 362333 - DNA, 607 bp, Cannabis indica
atcgttttagaagttcatattttgggtgttaatcaacatacttgtgagtagatctaagatcctggtaaaataatttccaacagccagtgcatccagaggccaagagaggcaacgagatgctcactcactacatgaaccggttggttcttgaggtgagtgatcagctggccggcgctgacaccgaatcttccttggagctgctgatgtgaggagtcttgagggagtttaccagggtgactctttcttgacagtttcttttaattcttctttacttggcgtagactttaatgttttttctctatgtaggttggtctgaagttggcttacacctattctcgagctaaatctgctgcctccaagaacgctgccatgtccaacaccatgagggcagaggtggactggccaggaaggatgctgatgacgccaaggtggaactcaaagctgtccgaatggagctgggtgaagtcaacaagaagcttttactgctgagaggaaaacagtcgagttgactaaagacctcgaggcttctggtcaacttgaagctaccatcggcaccttgtcagtagaagtgaatagccttcaagaggaaaggggagttcttcggact

SEQ ID NO: 362334 - DNA, 558 bp, Cannabis indica
tgctgcattgggtgcagttggcttgcgagcctcgtccaggtgggacgcaccaaattttatcttgcgatcagagtgtcttgctcaattaccattaggaggatggtgcgccatggagttggcatttgaagtttctagagggacttggcttcagtggaagcgtgttctgtaggtatcattgggtacggttggtttgcgaacctcaccccaagaagtgcaccatactttgtccttgtcgaaaggagtatgcatgggacaattggcgggtgagctgctatcagaggatgtgttagcttcagggtaattgttgcaagggctacttggttgactggagggacattgtgagggacttggaggagttcatgttgggggaagtattctagtgcagaggcactactccatgggtgattttgaatagcgacagtagagcaggttctttgatcaagtccaaggtgggcgagagagatcgtaaccaagaggatggttctatggagatagagggataagttcagacttaggatttggatgaagcttggagtaagcttaggagtcgagatcagg

SEQ ID NO: 362335 - DNA, 745 bp, Cannabis indica
agaggaagaatataaaccaagcattagtatgtatgaatatatatatatttatcaaattgtatatgtataaatataatatatgtgctctttttagtggaaaatatatatatattcttactcatcatttattaggtagatttcttgtatacgtgttgcttcatgtggtgtttgtatggttctcgctggttggatatttgccgccactgctatgatgtctgaattgtaaataaaaaataaatttgatcaatattttggcaaaatggacattagatttaaattcagcttttaataaaatcttaccaactcgagcagaagaatccatgtattgctgcaaggaggtaaaagcgataaatgagaaagctggtggagaaggaattacatccttatcttcttgttctttgacttcctcaaccactgtgctcctattaagtatccactcatatttgttcttcaaataattatatcttggatccattttcttgacgtgagcattttgatatataatagctttttgtgcattataagagtgtttttgtatcgttctataacatcatcaaataatgcagcttgtatgtgtgtttcctataaataaaagcaactttatgattttgtaaatataaaacgataaggagagaataaaaaaaataatgtgacggagagagagataaaagccaaaaataaattagaataaagtacctgagcatcaataaggagtcatgtgttgaaatctagatttgtctgcgtg

SEQ ID NO: 362336 - DNA, 708 bp, Cannabis indica
tttattttctatttatttttttttctttcgtcctacttgtaaagggtcggcatcatcctcctccatcttggggaagttggtgggaaccacttcattacttcacaaaatatataccaaatatatatattttttaattttttaaaaataaataaatatagacagagaggagagagtgagagtgggagtggaagtgggagtagtgagtggggtggtaattaattaagttctcgaattggctttcttcgctagcaatgctgcgtctcgccgcatttagtgtggaccccacggaaccttcttcagcttcaaatcaacaaaaataaaaaggtgggtcccacaaccacctcagcatccaccaacttgctcttctttcttggtctttgttcttctcaccccttcatacttcctttctctataccactcccttggtccattttgtcaacctatgactatgacccatcttatatcgaatatcaaaagattgcttttcaatgtcaattgaaagaaatacaatatttgcatatctttcataataaatgtatacggggtttattattatattagtagttgtaaatttaggctaaaaataaatattactggcaaattacaatcggtaaattagagaaatctaaacagtttatacatttttcctcaatttttaaaagtttaatataatttatagtgtcaaaaataataaaattttaacgaaaa

SEQ ID NO: 362337 - DNA, 547 bp, Cannabis indica
gggtccgggtctgggtccaggtacgcgtcggggtttgggtccgggtctggggttcgggatcgggtcccggtttggatccgggtctgggtttggttaccaggtccgggttcggctccgagtccgggtcccgggtcggggtctaggtcccgggtcggggtcagggtccgggtgggggtcggggtccgggtcggggtccgggtccgggtccgggtctgggtctgggtcctgggtcggggtccgggtccctttctaaatattataatacaagctaatacggaccatttgttatgtattaaataatacagcatacattgtattaaaaattttggttgtaataattaatacaatacattgttttatccaaacatagtgttatttatgttagagatattattgcaatggaagataaatcaagatatatacaactcaattgtaaaaataatacaaggacaataaaagagattgattaaatatatgttacacaatacacatatatacactatacatattacatatatatatgaaaggtagaagagaagattacaac

SEQ ID NO: 362338 - DNA, 1218 bp, Cannabis indica
atcctacacatccattgtgcagtaaatctctagccctagacactgaaataatctggatcttagacccctaaactgatccgacataaacgaatggatcctcaccctctggttggaaagttaccatttttcgcttgcaatctatgctggccgaatgcttggacagaaaatccatcccaagtataatgtcaaactctgttaattccaactctataaggtcagcactcaattccctatcttcgatcctaagtggcatagacctaatgtgcctattggagataaccaactccccactaggcattagggttccaaaacctctttcaataaaatcacagagcctaccgaaaagatccatcactcgtgttaccacatatgagtgtgtagctctcgaatcaaataacacaatataaaaggagttgttcgcaggaagttgacctatcaccacagaaggactggctgcagcatcagcttgagtgatggcaaacacccgagtaggtgcgggctttgcctctaacttttactcttctttctttgtctgaaggcaatctttcttgaaatgccccaccatgctgcactaaaagcatgtcttcctgttgcactctctgggatgatgtttcttacaacgtgggcactcagggtaagaataactctagtgtatacctctgccttggttcccacggaatcgcttactctgtcctgagccaccagatgtcgggttagcctttctcttctgatcagtggtggaatcaccaccatccctaccataaataggagtaggaagagtgggggtcccaccgacactcggagtcactgggggctcctgaagaaactttattgcaccctcggctcgcagagccttttcaaccatcttcgcatatgatgctgcctcatttgtagtaatcaccacgtcatgcctaatttttaaattcatacctgccaaatatttctctttcttcttgaagtctgtaggcacgctagcttggccagacggtcaaactttgttgtgtacttagttaccgacatacccttagtctgcaccaactcagtgaattttttttcgcttagcactgtgaactgcctcattgtaatacttggcgttgaacaaatctcagaactcttcccaggtcataacactgatgtctcgggtgagggacaccaattcccaccacacgagggcgtcttcctggaactaaaatgtggcgcaggtcacccgatcatttc

SEQ ID NO: 362339 - DNA, 1580 bp, Cannabis indica
acttgaagcaggaaattgaattttataataaggaaaaataatccacacatgcagaagtatgtgaagaccaatcaaggtcaaagagacaacaataaccaagatttgctgcctccaccggtagatgggcatctgcaagttaatgttggaggcccacacattgctggagattcaggcaaagcttgggagaggtatacccgaatagtgcagcacgagcaagaagaggttatcctggccgtggaagaaaggaggcccaaagttccacgggaaggagagccgaccataaccttcaacgatgaagacgctatcaaaattagattttcgcacaacgacccgctggtcgtggaattccagatggccaacaaaatggtggccagaaccatgatcgataatggagcctcttccaacatcttgttcaaaactgcttatgaaaagatgggactacaactcaaggatctaaccccatgcctccagcctgtttatggtttctccagtccaggagtcgcacctctaggaaaaattcgtctacccctcactattggacaagctccgacgagcatgactgtaatggcatagttcctaatgttagatgttccttcagcttttaacataatgctaggtcaaccagccttgtatgacttaaaggctgtcacatcaatatttcactcatgcctgaagttcccaacaaagaatggggtagggtgtctaagaggaaaccagcagtccgctcgagaatgttacaaccttgcagtgaccaaggctaagaaggaagtatcctccaaccagagcacagacaaggggaaaaaacatttccatgtagggaacttcccaaggcggggatgaagatgtgaatcctcgacttagggacccaagcagcaatgttggacctgtagaagaattagaagagatcgagatcgatcgagatatcccgaccagaaaactaaaaattggaaaaggttttttgctcgaagtaaaatcagaattgataaaatttctgagagcaaacctagacgtttttgcctgctcacatgcgaatatggttggaattaatccttctattatttcacatgttctgaatatcgatcccaacgtccggccagttcaacaaaaacaaaggttgttggacaaagaacgagcagtagccctgaaggaagaagttgaaaaactacgcaacaacaacttcataattgaagctttctacccggcttgggtcgcgaatcccatattagtgcccaagctgaacatgaaatggtgagtctgtattgatttcacagacctcaacaaagcatgccccaaagactattttccacttccaagaatcgatcagctagtagatgcaacagtaggacacgaaatattaagcttcatggacacttactcaggctacaatcaaatcaaaaaccatccaccagactaagaacatacaagttttcgaacagatatgggtctatattgctacaaagtaatgttgtttggtctaaaaaatgctggagctacgtatcaaagattggtaaacaaaatgtttaaagaccagatcaagcaaaatatggaagtgtacgtggatgatatgctcgtcaaatcca

SEQ ID NO: 362340 - DNA, 564 bp, Cannabis indica
gagagttggtggcagaaggctgaaggagccggttgggagggtactaagtttatgagtaaattgaaggaagtcagaggaaacattaaggcatggagtaaaaagacgtatggcaacaagcacgtgatcaaaactgcattggaaagaagattgatgattctggatagtttggaagcctccgatgagtggaatcaatcattaatggaggagagaagggcaatcaaaaaagaatggcagcaattggtctttgaagaagaaagaggtgtttggatgaagtcaaaatgtaaatgggcgaaggaaggcgatgcaaattcaagattcttccacaatttgttgaatgcaaggaaatctaggaacacaatctccagaattgaaagagaagatggatcatttattgaggagaaggaagaaatagtcaaggagataattcttttttctcaagtttgtatacttctgaaagaaggcgggtaatagcattgaaggaatagactggcatgcaataccagatgactctgctaggcacttagagagaccgtttgctgagagtgaagtcagagaggcagtttt

SEQ ID NO: 362341 - DNA, 833 bp, Cannabis indica
tctctctctctctctctctctctctctctctctctctctctctctctctctctctctcatacatgtccactataacatccctcaacacttgagattgccatatttgattcctactctgtaaccttaagagagctatatcaaatccaacctatagtaatctaaatagtgttctctctcagtatcaatacaactaaaaggggagtaggtcattacctactaactaagggggccagacctctataaaaatctttgtgttcttttacattctagttctaaatgtgcaacacgtggcaagcatcagtctgccaatttcttaggtcaacagtttggtgcttttattgagagtaagtcgatatcatatctgatcaaacactatggttaacacgagaagaacttcggttgcaccatctgcatcattgagtcttccttaagaccccttagactatagatcttgatgcccatgtttcaggcgtggctggaattcccatgaacactgtagatgtggtcaatcctgccgcttaggcaagcacctcgaatctagccattatagttggtcagagtgacacaaacatcttggtggatctaaactataggcccttgcctctgagggggaccctccattagtgcctcccactgaaggaaggacccttagggaacaacccccagaaacaacaactagatctcatctccgttactatgttggagagacatgaccaggaattggcaagccctatctggacttgggagaagatcttgagttagccagacttagagaggttgtttgccaagctggcctaactgaaaaaccatgcactgctgattgcgatgtattc

SEQ ID NO: 362342 - DNA, 570 bp, Cannabis indica
ttgggtttgggactgggttcaggtccggttgtgggttcgggtccttatcagggttcgggtccagggctgggtcccgaatccagacaccgactacgagttttgtcaaacccctgggtctagatccggatcccgatcttgcgtccccatctcgggtcctagtctggttccatttcttgtgccgggtcacgagctgggtcttaggttgaagtttgggtctgggtccagtactagttccctgtcctagttctgtttcccaggtccctatcctaattttgggtccaggtctaggttcgggttcaagtcctagtctcggttcgggtttaggtctctttttgggttttgatctgggttcgagtttgggtttaggtcatggtcctggtcctagtcctagttcagttttagttcaatttgtgattctgagttcgagtttgggttcgagttcgggtcagagttcaagtcattgtctgagtttgagttcaggtccagatttcagtaaaggtccaaatcacgctctaggtgtgggttcgggtctttggtcttggtctaggttgggtccgagtcccaagttcc

SEQ ID NO: 362343 - DNA, 519 bp, Cannabis indica
tctaagatccggtaaaaaaataattcccaacagaatgttctacggcaaagtcgaaggtgtattcaaaaggtaaacatgcaaaaataagtataaaggaaatcgagaacttactcaagagtcagatgtctggattcaagcaatgtcagaccaatgagtttatgcgctaatgctctttggtatttataagcaagtcaagaaaagaggtaattatttcaaaaagacctcatacgctcgtttccctctaaaaagcaaatatgtaaaataataaataatcaagtgcagccgtcaaccgtggtgagagaaatcagatttcaaaatattaattgtcagagcattaattagccgaaaaccagagggacgcccggtcagcctcacatcgagtctcggacagacgcgctcgacacgtgtctccatccaaaggcagaagtagctcggatgaagtctacacgcaacttcgaaagtcccgtacagacttggggggcaaatgttatcccaatttttgcactctgacgtggcatc

SEQ ID NO: 362344 - DNA, 910 bp, Cannabis indica
catcgtgactccaacttcggacccattgtcgttggaggcgccatccacaaaaaccttaccacgctgggactggtggtgtgggtatgtttgcggtagcttcaacttcatggcactctgggatgaagtttgctagtgcctgccctttgatggaagtgtgtgggatgtagtgtagatcgaattggcttagctccattgcccatttgagaagtcttccagacgcctctggcttttgtaggacttgccagagcgggtggttttttaatactttgattgggtgagcttggaagtaaggtctcaactttctcgaggccattaggaggcagaaaactagtttttcgatcatcgggtatcgcgtctctgctccgatcatgcacttgctgacatagtacacgggatgctgagttttttcctcttcccgtactagggccgcgctaactgcattctcggagacagacaagtataggaacaagtcctctcctagaacgggtttcgataggattggtggtttagccatgtgctctgttagttttttgaatgcctcctcgcactcgttggaccattcgaatttctgacatttcttcaagatgttgaagaagggaatgcatttgtctgtggatcgggagataaaacagctcagggcagcaacctttccagttaagctctgaacatctttgtgtttcttgggggaaggcatgctcaggagagcttggattttctctggatttgcctcaattccccgctgactaacaatgaagcccagaaactttcccgacttaaccccgaaagtgcacttcttcgggttaagtttcattctgtatctccggaccacttcaaaccattcatctaggtcatccgcgtggctagcgtatctctttgaatttacaagcatgtcgtccacgtatacctccat

SEQ ID NO: 362345 - DNA, 628 bp, Cannabis indica
taatttctaaattaaactaagcggtctttacatttaccatgtcttcatgtgggcttacagccatagagcttgtctttgaaccacattgtgtctgtcttccatcttgcttattctaagcttcatgaacttttttgccctaactcaagaaaactttctgacttcttgagttttgacttttctttagacaaagtcgttctttaatctgttgagtacttctggtcggcatatttgcttgtttctcatttgatactccgtccaatactcatcttgtgtgttgtcttttgtagatgaacccaggtgagtcatgggaactcgggcatcagatcgaccaggatttgcttcaacttctgcacgaggttcatcctcgtcttcgtgctagtcctccttctagcaaaggaaactcttctaaccttgtacccagccataggatgatggctcgtacaaagaaaaccacgcgtctggtcgatgcttctgatcctcaagtggctcggcttggcactctaccctacgccgaacaggatttggccgtcccgatggaggaggatcgtgaggggggatgctgaggtccaggaggttggggagctagacgaggtgcgttcgggcagtccttctgaggcggagggagagg

SEQ ID NO: 362346 - DNA, 561 bp, Cannabis indica
atagggattgaccctaatattattttccattatttaaatttcgatctaaactaccgagcaaaatggtagaagaggagacccttgaattctgagaggcaaggggctatcaaacaggaagtggataagttattggccaatgactttatacgtgaggtgttctatccctcgtggatagccaatcctgttcttgtcctaaaacctaacggaacttagagaatttgtattgacttctctgatctgaataaggtgtgcccaaaggattgttttcaactacccaggattgacgagttggtggatgcaactgctgggcacgagcttatgtcatacatggatgcatattctggatacaaccagataaaaatgtatgtactggatcaggaacatacgagctttgtaaccaacataggactttcttgctacaaggtcatgctgtttgggctgcagaatgctggggcaacatatcaacaattggtgaatgacatgttcgcaaatcagatcgaacaaaacatggaggtttatgtcgatggtatgttagtaaaatcagtgaaaagtgggagtcat

SEQ ID NO: 362347 - DNA, 787 bp, Cannabis indica
aaaagtcttaggatcatcctcaataagaattattaaaggaattttccttattacttcttctctagtcccttctaccacgtagaaagaaattagttgagaatttattttatccttatttagacttttctcttttctcaccctttgacctctcctaggttcaatgggttgttctacaactttagcagtgttctcctcttgagatcctcttttagaagtagaagctagagaattattttcatataaaatattctcacatagaggtatgaaactttgagaattgttctcatacaacttattctcaaaaaattctacttttctagattcaattacaacattagattttacatctaatagcctatatatatgccttactattggcataaccaacaaatgcacattttatggcccttgaacccaacttggttttatttagttcgatcttcttacattaagcaagacaaccccacattttgaagtaaccaatattagaagtaaccaatatttgatttatggcaaaattaattttggccgctcaattaatttattttaattattttatttaataagataaattaaaataaatgataattatttttccattatttaaattaaaagataatataaaataaaatgatataattgaattatgttattcaaatatatgatattcattttgaattttaattaaaataatattatcttttattttataggattaaaagattttaattattatatatataatgatttacataatagtgaaagtatgtaacactgagagatacaa

SEQ ID NO: 362348 - DNA, 509 bp, Cannabis indica
aaaaaggcgacaaaaccatcggtctactaggccaaccatcgggaaaattcgactacatagtcaaatactctgcaccaaagagctacaatcagcctatgccagaacctaccggatgggattcagatgatgcttcacaagattcacagcctgagatagttttgccttgttacaaacgacaagcaaaatggatgaagaagcatggagaaaaatttccaacaccagctgttcaacaatcagttcaatcacttcctgacgcaaacatgatcacctctagcccatccattgattatgatgcacattttcctcctctcaagaggtttgaaaaaactgaagatcagggcaccacttcccaccatccaaaaatacaaaatcctacaactaggaatgctgatggaactttacaaaaggtctcagcagccgaagaagtattaaattggcaaacagaaaatatgatcgcccaaaaccacgtcttaaaacgggtagaaaaacacatcacccgcacagagaca

SEQ ID NO: 362349 - DNA, 794 bp, Cannabis indica
ttcgtattcggcctcattattagaagctgagaattcgaaccatagggctgcctaaagtcgaagtccgttcggggatatcatcgtgacccctgctccggacccattctcgttggaggcgccatccacaaataccttccatgctgggactggtggtgtgggtatgttagcgttagcttctgcttcgtggcactccgtgatgaaatctgctagagcctgcccttttatggaagtgcgtgggatgtagtgtaggttaaattggcttagctccattgcccatttgagaagtcttccggacgcctctggcttttgtaggacttgccggagcgggtggttggttaatactttgattgggtgagcttggaggaaaggtctcagctttctcgaggccattaggaagcaaaaaattagtttctcgatcaccaggtaacgcgtctccgctcctatcatgcgcttgctgacgtagtacacgggatgctgagttttttcctcttcccatactaaggccgcgctaaccgtattctcggagacagccaagtataggaacaagtcctctccgagaatgggtttcgataggattggtggtttagccatgtactcttttagttttttgaatgcctcctagcacttgtcggaccattcgaatttttgacatttcttcaagatgttgaagaagggaatgcattcgtctgtggatcgggagataaaatggttcagggcggcaaccttttcggttaagctctgaacatatttgtgtttcttgggggaaggcatgctcaggagagcttggattttct

SEQ ID NO: 362350 - DNA, 651 bp, Cannabis indica
ccacccccctcccgtcgatctccctctcctctctgtcacatacgtcagaccatcaccacctcccgtcgatgtctctctcatctccggctcatacgtcggatcaccaccacctcccgtctgtctccctctctctctttctctctctccgagctcaatataaatatatttatttatttctgtatatacttttttatttattatttatatttattttgtgattgtttaaaattaatgtgttttaacgttagttgttattgcaatataattaattagttattttattttaatttagataacactactacaaaaatctcctttagaggcagtttttaagctctttcagcatcggttttggcgaaattcgctaccgacgctgatcagagtgacgctaaaggatttttaaaagctgacgctatatatacccctatggcgtcagttattatctaggaaccgacgccataggggtatatatggcattggttcctatctaataaccgacgccataggtggtgtaggaactgacgctaaaaatgagcatttttcagttttttaattttagataatttattttaattatatatttattaatttatacattattttatataatttaaattacatatttattttttaaaaggtaaattaaatatt

SEQ ID NO: 362351 - DNA, 570 bp, Cannabis indica
gagcacccgtgagccaagcccagcaagacagtataaaacatatcaataatatgctcatcatataatataaacaacaacgccattcaaatctgtttgtgtgacacagacttgcatgttgcgctcacatggctatttatgtttacgcggcgtaaacttacgtgttcctctcacacgtctatttacagtaaggccttagaatggttcttattggttctgattacatagtccaacctaattatgccttgatcgcataatccttaaatctcaatataatcatacacttagcatgggatatcatttattcaacttatatcactagggtaataaccctaagctattaaccgctcatattagggtaataaccctaatctcggttacaattactcacatatatcaatctcaatataagcgccaccacacatattctacgtgctaactactgtcttacctgttgtcccgcaaaggcagagattccaaataaccgggtgctcccgacaaagtgccagtaatcctagtcacacaatataggattttcacaaatagtgttaacccctgatttcacattcataa

SEQ ID NO: 362352 - DNA, 1013 bp, Cannabis indica
tgctgctagttctcgtacaaaaaacaatttcattcatcagctgaagaatgaggagggcgattgggtcaaatgggagactggtttacctcaggtaatggttaattattttactgatatttttcattccttggggacacatggtaatgatatcctggataagattcagcctttgataagggatgatgataatgttactttgcttcaaccgcttttggaagaagaagttcattcggtggtgtttcaaatgcatccagataagtctccaggtcctgatgggatgacatttgccttctatcagaagtgctggcatattgttggtcaagatgtcgttcgccttgttcagaatttttttcgggataaggtgatgcctaaagatcttaatgctactaatcttgtgcttattccaaagaagaaaatgcctgtagtcatgggagattgagacctattgctctgtgtaatgtgctttacaaagtaatttctaaagttttggctaaccggctcaaaggtctattgtgcaaggttatttcagagttttagagtgcgtttattcctggtcgcctcattacggataatgttcttgtctcttttgaaatcctccactatttgagacataaacaacaaggaaagcaaggttgtaaagcccgcttagttaatttggaaattatcagttaattatgattaattatgaaattatttatagctatttaaataatttattacagttatttatggaattcagaaatgcatatttatgttatttagtagttttcgtattttgcatttccggtgcccggtattttggaactcggcgtttggctcagtagaaatcacaacttagtatgttattagtttgggacgggttgttagacattgggaatgtcgggaatggccgggaatttagaatttcccaaaaatacccctttagtgatttttatgtgattttagtatggaggggcaaaatggtctttttgccccaatgactttttgtcttttagtgacttgtttatttgaaa

SEQ ID NO: 362353 - DNA, 553 bp, Cannabis indica
ataaaacttgtgaaaggtcttctagccatacccccttacattttcctttgatggtatgtttgattatcttgttgactgcttctatttgctcgttactctgcgggtaggcgactgctgagaatgcctttttaattcctaagtcatcgcacaactgtcgcatttccttacaatcaaatttctttccgttgtccgaaatgagcttgtaagggatgccaaatcgacagattatggaggtatagacaaactcgtgcagtttagctgctgtgatggtcgctagtgcctttccttcggcccatttggtaaagtagtcgaccgtgactatagcatatttgactctgcttttcccttcagcgattctcctatcaggttgatgccccagaccgcaaagggccaagggctcgtgatagaatgcaagtcactcggaggtttgttaacatacgtggctattcggtgacacttgttgcatttctttgcgaagttgaaggcatctttccgcagtgtgggccagtaatacccttgccgcatgatttttaaggcaagagaattaccacca

SEQ ID NO: 362354 - DNA, 563 bp, Cannabis indica
aggaagcccaggcagaggcaaagttccgagaggaggcccaacagagggaggctgagctggcggcgaaccatcgggaggcgctgaaggcggagggtgaggccgtcgccaaggctaggcgtgagcttcgggaggataaggaggccatggatgaaatggctgccaaggtgaagtccctagaggagttgcaccaggcggacttgcagtccaaagccaacctggccgtggagttgaaggagctgaaggactttagagaccaggccttgaagaaggctaaaagagatgagctcctgacccccgtctcctgcaagcactgcgtcaagcgcttcgacgatggcgtctatatggcctggcagtcaaacggccaaagcatcaaactcgacttctatcccaagcctgaggaggctcttgccgaatttcgggagaagaagaagaaacttgatgccatgctcgaggcgcgtcggggccctcgccttcctcctcgtattgattaggccgcggagtccagcccatttcaccaagattatcttttttttttctttatttacagctatttttcttttctt

SEQ ID NO: 362355 - DNA, 503 bp, Cannabis indica
aatttgaaggaagtattttaccactagatataattcccctttgtaaagaagatatgtaatagcccatattcatgctcctttgaccttgccatttctccaaatacattgtatcaaaagctttgtcaaattagaatccgtttgtgcatcacagggcaaaccatctaatgccgaagagtctagcgaaactaaatcaaccaatggagcaacagatgtggtgggcactcctcagaagaatacaagtgaacaagagaagaaaacaagtgagcaagggcagtaatgctgtcttgttgaaagacagattgtacttgatctggtttaacacttgcccactttttgtattgtaaatgtgcatacaactggcttaggagccgatgatatgtatcaatttaaattcaaaagtcaccttgtttctcccaggatttaaaaactgaaattcattgtacattcaatcatttttcttatgttttttaatagataataaaggtgcagagaatttggttaag

SEQ ID NO: 362356 - DNA, 543 bp, Cannabis indica
aatattatttatttatttatttttttgaataagtgttttttattaaaatgagcaatcgctttccaagatagacataagattcaaaggaacactgttaatggaaaacacacgttcagctaaagaaacagagtgccgggcaacatagtgcgcagcacggttcgcagaacgcttaacaaacaaaattgaaacattgaacaaatttttaagaatatttttgcaatcatcaaccaccaattcaaatgcagaggctaaagtttcttcactccgaatagcctcaacacaaacaagactatccgtctctataatagcccgtgtggaagcatggtctttgagccaacttatagcctccctaatacaaatgatttcagccaattccggggacactgaaccatctttaacccctgcaaaggcagagatcaaaccaccatccgagttcctcaccacacacccggagccatgtttgaagagagaggcaaaaatggcagcatctacattgagtttgatacctgaagacggttttatccactgctccgcaccatctcc

SEQ ID NO: 362357 - DNA, 432 bp, Cannabis indica
ttcagggagaatttttaacgaccttaaaagttcagggggcataatttagtacatgtcaaagttggggagaaaaaaatcctaattagccatatatatatagaaagatagagactatagatatatagattataaattaacaattatatgagtttaaaaaatgataactaattgggtaagaataattttataaatcacccaagtaaaaatatactaattttgagactgtttatccaaattttgatgatagtgacgtggtaagagtaacgacacgtggcgctaaaatatcaggactggattaatggagaatatataaagtcatgatcattagaatagatcgttagtcatgacgggcggtcatgaccgttggaatgaaagtctgacggtcacctttacccctagcttgagcaaggttgttttgtttgtggtttgtga

SEQ ID NO: 362358 - DNA, 643 bp, Cannabis indica
ggtaaatatgtgaaacttaacttagtattactaaagaataccaattatttggcaatatcctacaactagtgattacacaataattgacatgtaatgagttgtatttaatttttgagcaacttgccgaaattcccttatgttttaatttttatacatttaacctttttatttttttgtggtaaaatctccttatgttttaatttttatacacttaacatccttatctttttttattttgtggcaaaactctcttatgttttaacttttatacacttacccccttattttttttttgtggcgaaaccctcttatgttttaatttttatacacttaacccccttattttttttttggcaaaaactccttatgtttatttttctttgcaaatttgacacgccattaaatattaccattaaatatcaactggatgaccactgtatacacatgtgtatatgtaacggtaaaacatcgaagttgatacagtagtaatccagttagtatttaacggtaatatctaactaaaactttaaatttacaaaaaaaaaaataaataaataaacttaaggggatttcgcccctaaaataaaagataaagaggttaagcgtataaaaattaaaatataaaggagtttcaccgcaaatt

SEQ ID NO: 362359 - DNA, 682 bp, Cannabis indica
taaactagattattttttttttttttttttgaaaaaaaagcgtacttaatatataagggaaaattagacctctaggtcattacaaaataggtttgaaaaaatggctgaaagcggaataaaaccaaacctctggtgagcaaatgcccactttgccacattatgggctacaaagttacaagatctaccaatattagaaaatttacaactaataaacgagcgagaagcactattacaaaataagacatagttttcaattgccttgtgagaatcaatcccgttcagagcattgataactactctagagtcactctccacaataataaacttggacccgagatcctttgcaactgaaagcaccaaacaacaagccgcaacctctccacacagagcatcagaaaaattaaggcgatccgtctgaacccaaaccaccttaccaagatggttcctggccacaagttccaaacacatactatcaagccccactcgaacatcacaattcagcttgatctgatcctgtgggggtggattccaaccctcctttgagtacggagtagggtaagggaaaaacaaagtatgtaaatctgcataagcagagcaaatagagtcaatacaatcctttatttattgagtctcatcaaccaaataatcccttatttattaattccatgattaatccactata

SEQ ID NO: 362360 - DNA, 1172 bp, Cannabis indica
cactatgagcaaagtcagcaggtacaaggtattcaaattgctcgaagggctccaattgtatctcacatgttcttcgcagatgatagctacattttctgcagagccaatgagagagaagcttccaatgtcctatcccttctgaatgtgtttgagcaagcttctggccagaagataaatcaggacaagtcatctatcttttttagtagaaatactgatgtccaaactagagatgccatctgtggtgatatgggaatccatgaggctgatgaaaatggtacttacctaggtcttccaaacataataggcaaaaagaagtcagttattctgggatttttgaaggaaaaggtgcagaagaggattcaatcttgggatgggaaactattgtcaaaggtcggcaaagagatcttgctaaaaactattgcccaagctcttcctaactacgctatgagcgtctttttgttaccaattgaaacaagcagagaaatagagcgtgctatgtgcaaatactggtggagttcttcatctaataaggataacaatatccattggatgagttgggatcgtatgtgcaaaccaaagatgaaaggaggtttgggtttctgcaatctttatgattttaatgtgtctcttttgggcaaacaaggatggcggctgttgatacaacctcaatctctagttagccgattgttcaaggctaaatacttcccaaacagctcctttctttcagctgaaatcggtgggagccccagctttgtgtggagaagcttgatggaagcacaacagctggttaaacaaggtgctgcaattcgtgtaggctctggtgcaacagtgagcatcctcaacgatccttggcttcctgatactgctgatccatatgtgcatacggttagtgattctcttattgataaaaatgtctcccagctgatgtctatagagaaaaatcagtgggatatggatattctatatgacattttcaatgagagggacatttatctaattctcagcatccccattcaagctactgaaccggacatctggtattggaagcatgagaattttggccattataccgtgaagagtgcctatgcaattattcaagaaaacaaacagcagcctgcactagttgatacctctggtttttggagaaaatgttggaatttaaaaattccacc

SEQ ID NO: 362361 - DNA, 511 bp, Cannabis indica
aaaaaaaaatctttaaacaaatataacatatactcccaatataaaatttcatatataaattcacagccttcaaaaaaatttctatataaaatatatatatatattatttataatgtgaagaataagatcaaaaagaattatattgatagatggatctcatcatgtaatttatatatgtacattatatacattgacgaaggaggaagaagattcaataggtatttttgaaaaaaaaacttttgaatttccttttttgtttaatttcccttactaagctaaaaatgtaaaatttaagtctaaaatacctattatagaaaaaatcccttctataaatatagaaaaaataaagctagtttatataaatatagaaaggaaacttaataggaaaaaatatggtatttgaaataaaaacttaacatgtataggattgaattagcataaaagatattaaaatttccttcatatttttttttaaaaaaataaaacaaatgaaactacagtgatcgccaga

SEQ ID NO: 362362 - DNA, 636 bp, Cannabis indica
catttacacaaacaatatctgttatgttgtcattcatacaatttctaaatggcaataactaaaataatgaactcaaaatttgaaagcaaccaaatggcaacttctacgtacactgtttgatttatcgcactccggtttcatgcatttgaaattcctccgctcgacctcaaccttcccaaaatgggctaacacgtcactgaaatacaaaacaaataatcaataacgaaacaaatgtactgatatcaactacgtatgcaataatcatcaaacatgagattacctcggatcattggtgctagagaaaatgtaacggaagaactcgtactgttgatttgaataacccttgttcacagtgaacggcccaatcacctttcctccagaatctttgaatctttggaaggtagcagcatcaaaatcatccttcacggtctgctcaacttcctcttttacaatagctgggagttcttctccccagaagttcatatcttcaaacgactcatcagaaacaaccttctaaattggaacaacgacattgtcttctgatagattaagtgaagggacactcagtacatctttaacatcctcttccgacttatccttcgtcccttcaccatccttttgctccacacccacatc

SEQ ID NO: 362363 - DNA, 690 bp, Cannabis indica
agttggcgtgaggaagagaattgtgcatggaattccaaagagaaggttttccatgaactaaactttcctggagccaacttgaaataccattgttgtgcggcctctgacagagttgcggggaagattctgcaacatacgtctcctcgtaccccttgtaaatccatttgcatctcgaaatacttgagatgggagagaggatcttctctcccagtgtacatcttccacgttggcatcttgaacttgtgaggtagtggcaagaggttgatttctggtgagaagggagttccgcgtgcacggtctaactcaagatcgttgttacgctgtccggccatgccgtgaaacatattctttagttcgtcaagctgagcctgtacggctgggctgacttgattggcattctggtcgggttgggccacgtcagcgtctttctgagcggggatttgagtatgggctccggacttcatgttcgttgtagttttctgctcgtctgttccccttcttctgtttaggtcgtcccttaggtcaccgtttgttcacaaccttttgaacacaaaagaacctggctaccttagcgattggtttgcttggttgtcaggtggaatggctccattattttgtgtggatccgtcgagcatgactcctcctgatgaatttccagacaagctctgtccgcctacctcttggcccacg

SEQ ID NO: 362364 - DNA, 704 bp, Cannabis indica
ttgtgcagtaataggacctaactccttacccccatgggaaatcatgtaagaaacggtacccacacaagacataactaaattgatccatcttccatcaaagcccatcctctcgagcatggcccgaagatatccccattcaagagggtcgtaagccttacttatgtctagcttgagcgcaataataccatcacggccccttcttttccttttgaaatgatgcattatctcataggagatcataatattatcggatattatacgaccttgaagaaacgcacttttgagtatccgatataatggaaggcataaccactttaagcttattagcaatgacttttgaaacaatcttataaagagtattacaaagcgcaataggtcttaagtcacccatatccatagattgtttcttcttaagtattaaaaccaaattagttttatttaaacccacaggaagatttccagagctaaaaaaattacgtaccatgtgtatgacatctcgattaaccagcgaccaatatttttggaaaaatactagtatcattctgtcaggccccggagccttgtcgggatgcatttggaacaatgcttttcaaacttcatcatgggagaacggctgaatgaagcaactccatattctactctgcagtaacacgagcttgcacactacttgtaacttctctccagttcgcattagatgaagcaaa

SEQ ID NO: 362365 - DNA, 510 bp, Cannabis indica
gtgtccataaaagttaataccacatataattttacataaaaatattgcataaaatacaattcaatataatacaatacaatacaatctaatacggcgttccaaacgagtccttagaattctattccccaatttttttcatactcttgttgtatattattgtagttattgtgaaataatttatctacgaaaataatgttgaaaattctatctttttagcaacataaattatttaaaatttctaaaaataaatatgatacctactataaatataatatatttattgacatatatataaatttatattagtcaatagtctcgtaatccgtaaaaaaaaaattaaataagttgttgaatctcacaattctgagactatatagatatgagactacacagttaaagatgactttaatagattgattcatattaccaatatcaacaaagtgtatcttgttttttagtagttcatcacgaaaaaattctacagttaagtgtacttgacctgaggtaatt

SEQ ID NO: 362366 - DNA, 645 bp, Cannabis indica
tataattatctcgactgattacaaatgtacaaaattatggtaacctaataataatgctatagataattaaatatagtaatagtatttgatgcattactagttaacaccttgaggtgtagcgccttataattgattacttaagtaaattttagctatttttttattacgaaaagacggagatctacttctatttttttttttttccattgggtttattatttatttatttttataggcatttaaatggcatatgcaaggaaactaatttaactagctatctatgatattaatatctttattttattacatgataactagttgtgttaagtgcattgtttgatggttgatttgggctttagtgagacaatatttgaaaacttgacttgactttatttgaggtgattatacctaatagttgaggtatggatgagaatcataataatatatatcataacagaggagaaggcagctttcctcatgtgattcatttaggaattagtctgcctgatgggatggttcattgagtaatattatctcatcttggcaagtgatggtggtttgattgacagattgtgctcatcaatgggtgaagtacataaaaattctattcacacatgtccagtaattatctaaataggtaaagat

SEQ ID NO: 362367 - DNA, 473 bp, Cannabis indica
gttgtaaacattcaagttcatctcttttataacaccaagcgcatgacacacagtaactcgtcaagttggaatcggttgcaactgcatgttttctccttgaggttgatgacccatgatctggttagttctacgacttcgaacatggtctcgtttattggctttacctgagaattaagtaaatttataaaattgttattatgtataaaaaacagaaaacaaactattaagaaaccataatgcaacttaaaaatttaatagatttttacattttctgtcaatgagtccacaaagttgttgactaatttcttctctgctgtaggtgttaaaaatgttgttgttttctgtgcctttttcctgtttgtgtatgtccattgttgtatcaaagctctcaatgactccatcagtgttgtgattggtagctctctagctgctaagtttgctgcatttagagattcagcaatgtttgaagtcat

SEQ ID NO: 362368 - DNA, 515 bp, Cannabis indica
gccacttcttttacattgtttacattgatttattatagttgggggtaattttaagatgtaatcttttgtaccactagttttatatattgttgctgagttattagatgaaatctttttttttttctatattatttggttggagaaattttgtggaagcaatcatttatttccttagtggtataattatcaataatagacccttgcctaatgatttattttactgcagtgcaatacgatatgggatattttatagcactacaaaagaaattatcatttctcaattaccatgtttatttttcattaatttggttgatataagtcaatagattatcatttttttttcttcataataagtcttccataagtttaggattaaacaatgagcttatatggaattgttctctaccttccattttagtctgaaccttctgtacttttgttcttttgctgtaaagtttaggttttcaaaaaaaaaaaattaaaaaaagagtttgccataagtttatgtgtactta

SEQ ID NO: 362369 - DNA, 792 bp, Cannabis indica
gtaaccagagtagccatctaggatatagtagtactcttgtccagccagccagcctaacatctggtcaatgaatggcaaaggagaatggtctttcctagttgccttattaagcttcatgtagtcaacgcagattcgccaaccagtgactattcttgtagggatcaattcattttttttttcattttttatcactgtcatccctcctttctttggtactacttgcactgggctaacccacttactgtctaaaattgggtaagccaccccaacatctaaccacttgaccacttcctttatgacaatctctttcattgctagattaagtcttcgttgtgaatcaatagtcggtttagcgccctcctccattagaatttaatgcataactgttgagggactaattccattaatatcagccaatgtccacccaatggctttattgtgggcgcggagtactcttagcagcttgtcaatctccacatcagaaagtgaagctgacattatgactggaagcttcttgtcttctcccaaaaactcataccgtagatgatcaggaagcaccttcagttctagttctggtggtttttctgtagatggcacaggcttctttagaacaacccccaactcttcatagtactttctattcaatggcccataggagtcaagccatttggcatatcccattgcctccattccatcttgctcatccaactcgtctttcgttaagctcatttctaaaggatcttccatcaactttttcttctccactatagtgtctatcagatcaacaaagaa

SEQ ID NO: 362370 - DNA, 441 bp, Cannabis indica
aatttaaatttgcttatttaattagaaacttaaagtatgacatatataaaattccaggatcccgtttacaaaatactttttaaaattttgctaaacatctaaacaaaagtttgttgcccagtgactatacagcataagcctcgatgtcccaaagatcatacgctccaggcctaaccgcccagacatgtacaatcttcacctgctcgctctcacggctcttcagctttagccttgcccttacctacacatgaaaatagcactgtgagtcgacagactcagtaagaaaagcataacataacatacaaataactcgggttacaacctggcgcccatacacccgatcataaccctaattctcgtgtcccacacagtactgagtctagaacgttcataagacactactatcaatcataatgtcagcctatactcaatatgctagtc

SEQ ID NO: 362371 - DNA, 544 bp, Cannabis indica
actaaatagtgtcactaaaagtcaaaattgtagtagtgaatgaatcctcctactagtggtaatgtcagtatgcggaccgacggtggtaaccctgatagcaaatggaaggctgatgcttccggaacattagggggtaactgaaagtttcgaggaaatacaggtggttgtcagggctgtggatcttcattctaatcttatcctgagtgtctaaaatgcaagaaacatcatcagggtgaatgtcgggccaagacttgtttccaatgttgcatggtgggccacttcatcagagattgttctcaggccaagaaggaggagcctaagaagaatactactcagaacccgggacaactttttaccatgactcaggcggacgcagatgctagtccgtcagtggtgacaggtcagttatctgtaaatggttgttcttattctgcattgtttgactcaagagctactcattcctacgtgtcgagtagagtaattgaaaatttccataaaccatgtgatatatatgattcggggtttggtaccctgctaccttcgg

SEQ ID NO: 362372 - DNA, 1044 bp, Cannabis indica
aagatctgaaaagagttaggttaattttataatctgtcattcacattgagaaagagagtagtaattagcattaacaattgggtaattaaatcaacatgattctgttccctaatttctcatccttgattgaacaactttactgctttctttaattttcttgtttatcttaatttcaaactttattaaaattattttatctgccaaatagaatcataaatctagtttagtggtattcagttcaattccctgtggttcgacctcacctgtgtgagttttctacttgattacgtgcacttgcgtactgttcttaattttcataacaagtttttggcgccgttgccggggaattatttaaaaattgatattacaaaaattagattaaattccactttggttaattctttctgcttattgctaatctgtttcttttagattgtcttatttcatttcaagcattaggggtgcatgcgacgtcaaggacaaagtgtaatactaccggttgatcttgagatcgagaagacttgtgggagaaacagaaggaaaagaggcaagagagagtttcagcaactgctaaaacaccagtaatcctggctgaaaacgctaatgctgctaataatggaggcaacaacggtaataatggaggtgccgttgaagatcaagcaaatggccgcaggttgagagattatattctcccaattcttacgggggtccagtcatgcatcagaccaccagcagtggatgctaataacttcgaaataaaatctgccatacttcaaatggtgcagtcttcaatccagtttggtggactgccctctgaagaccccaatctgcacttgtcaaattttatggagttacgtcagactttcaaagtcaatggagttagtgatgatgccatcagtttgagactattcccattctcgttgagggagcgagccaaaagttggttgatctccttgccaccgaactctattgcaacatggaccgatttggcaacaaagttcttgtccaaattctttcctccagcaaagtctgctaagctgcgag

SEQ ID NO: 362373 - DNA, 625 bp, Cannabis indica
tatttatgcataagtcaattactttgtatgtttaagatatatctaataaattttatctctgagcgtggccccgtggattagtaacaatctggaaggattattgaaaccacgtacaaaaaccttatgtgtttttacttttctacactatttgtttttctagtttattatggaattataggattaacttctgtagctacaaaaaaaactatttctgtactagttttattattctgcatttaattaagaatttaattaaataataaacttgtaatattaaatacaaaatatcaattagtatcagagcaagtcgccaaactcttagtgagatcttgagattattttattctgtataatttgttttgtgtgagatgtcattgttcgtagaaggaacctccattactcgaccacctctgttgaatgatccaaattatccatattagaaggtcagaatgagagcattcattaagtcacaagatgagaaggcttagagagctatacttataggttggtcacgacttactgaaaatgacgatgaaggtatactaaggtaaaacatgaacttaattagactactgaagataaaaaattatctagttataacaataaggctttacatgctattttt

SEQ ID NO: 362374 - DNA, 753 bp, Cannabis indica
tttgtgtttatggaaacactggtgttgtataagacattgtaagccgaatgttttagagagcatatgccgatgggagatagcagattgcgatgacttcaagtcttaagggtaagactttgtgttatcaagtttgtcgaaatttggcgagttatcagaggatgtagggttgattttgggagatggacttgtgacacagtttagagagccaacacgagcaagagccagagggaaaatttgtggttttgggtgattgttagatcattaaccacgtgaaagaagctcagaggaacaggtatctagtgggtcagagaggccttttgcatgaagtcctgggtgtgtggtagggccggagggccaatattttgaatacttcgctaagagattttgtgcaagagtgcccttagtgctgcattgggtgcagttggcttgcgagcctcgtccaggtgggacgcatcaaattttaccctgcaataagagtgttttgctcgatttccaataggaggatggtgcgccatggaattggcgtatgaagttttcaaagggacttgtttagagagacttagcttcagtggaagtgtgttctgtaggtgtcgttgggtacggttgcttggcaaacctcaccccgaagagtgcaccatacttagtccttgtcaaaaggtgtatgcattggacaattggtgagtgagctactatcaaaggaggtgttagcttcagggtcagtgttgcaagggctacttagttgactggagggac

SEQ ID NO: 362375 - DNA, 671 bp, Cannabis indica
ttgcactctttgacaatatagaattatatttacagaattcttacttgtagttcattgatataatcaatataagtagtttgccctccaattattattagttcataattagagtttgtcaaaattactattttaccattctaattatctctagattccttaagtaccattaatttaatgtgaacagttaatttataacttattatagatttggatccaactattagcactcccagaattaatactatatgggaactaatattcgatccgttaggtaagattagattctaattatttataatatgttctcagccactcatgttatcaagctcccaaaatagaagttgtaagaatcatcttctatgagaaactttaacgagtgagtcaagatactcaattaacggaaataagagttcatgtatactcatgatttagactgatctactaatgatcatttttgtgatatgaataactctttcatggtaaacgagatgttaatgaaagatgttattacatattgttccagctatgtataatcaaattatacacaacacctttactacacacacacacacgcacacgcacacgcacacgcacacgcacacgcacacgcacacgcacacgcacacgcacacgcacacgcacacgcacacgcgcacacacacacacacaca

SEQ ID NO: 362376 - DNA, 497 bp, Cannabis indica
acatggtttttgataatgtttacacccctttatttattttgagcagcaaaatccatggatgaccttctggacgcccttgctctaatacacagtcctgagaccaacctacccaagcaacgcaacgtgaggtggtcttgattgatgaggaagaagaagtcgtccctcctcttgattggaagcgcaaaaatgtatagaactttccatagactgaataagtatctttcctgcaactttaacattcagtctcactagtagacttagagacttcgtataggtttttacacttctccaaaatcactactccgcccccagagtaatcaccatctcatcagcagactttctagcactaaagcaagtctagaaatctaatttggtgtagtctaagagtattaaatactacccttattgactaacatatagttcctttttttgatattaagattcacttgattgtgttccaatgttcctttcctggattaatctgatacctacttatt

SEQ ID NO: 362377 - DNA, 728 bp, Cannabis indica
ctagttccatttgcgattctgagttcgagcttgggtttgagttccggttggagttcgtgtcctggtctgagtttgggttcaggttcggatttcagtctaggtccagatcaggctccgggtgtgggttcgcgtcctgggtctttgtctaggtagggtcttagtcccaaattccaatcccaatctcagtctggataccgttctaggtcgaagtccttggccttgatccttgtctgggttcgactttgggtccgggtccaggtctagctttggtctaattttaggtgtggtttgagttcgggtccgagtttgtgtccctgttagtgtattggtctggaccccgatcaagattttggttcgggtccaggtccaagtttgggtctgggtcaggatctcggtccagatctagctcaaccatttcgatcccagtcggtgtcttggtctgactttaggttcgtatccggaccccaacctaggtccaagtctgtgtttgggatcgaatcccagatttaggtccaggtccgtgtctctgttcttgtttgggtacacgaccatgtccgggcctgagttcatgtctcagtttgggtttgaggctaggtgtgtgttcgattctaggtttgggtcctggtcctgatcacggtcctagacttgttctaggctcctggtttggcgtttcttgttcaggttctaattttgggtcccaagtctaggtctgggttcgggtttggttc

SEQ ID NO: 362378 - DNA, 883 bp, Cannabis indica
ctctgctacagaaaggataccagggttagagatctgagtagaaggagacattatattccgttgcaaccactgtaaggtatcttatactttatatgtgtttatttcatatcgttttagaagttcatatttaggatgttaaataacatacttgttagtaaacctaagatcttggtaaaataattccaacaactggccttagagccatggtaattgatttacttttaagaaatttggacttaaaacaatttgtgtgtgatttagatggtttcatgttgatctgtgtgttatttgatgattaattgatgcttgtgagattttatgaaaaaataattgaatattcgtttctggaattaattttgttggatatttggaaaaagttaaacaattcactcttttacagaacttgatttcgattttatttgaattagttatgattttttgaagttttaaaaaaaaaggggtggtgtcaccccacgtgtgcacgcggatgcttgagatttctcgggtgcagtcgcatcagacacgcacatgtctgagaaatctcggtctgaacgtgctgatcttgtctgaaggctaggatgcgcgcgcggatggtatgcactgcataccatccgtatagtgagtgggtgagtgcccacacacatcaagtggtatctcaatcatagtatgtatggctgtgaagaatccagattcaagagaaggaaatttgggctcagatcttggtgatactctgttacagaaaagatacaagggttagagatgtgagtggaaggagacattatgtaaagaccgcttagcttaaatttggaaattagtggataattagggtttaattattaaaattagttattaattctaaattattaatttattatgatttatt

SEQ ID NO: 362379 - DNA, 665 bp, Cannabis indica
acttccattctggaagtgttaatggctgaagtaaccctgccggtcgttgatgctcggctttgatttgctgacaggttaagcacttagtgacatagtccaccacatccctcttcatcccataccaccaaaaatagggtttcaagtcttgatacattttggtggttcctggatgcaatgagtaaggagtagtatgagcttcttccagaatttctttcttaagctcattgatatcagggacacacactcgtgctttaaacaacaacattccactgtcagaagttgaaaagtccttagctttgcccgctaagacatcttctcgaatcttaaccaattcaggatcttctaattgggccattctgattctttccaacaaatccgactgaagtgtcagattaaataatttctcagttaccaactcaatgttcgccctagtcatttctaaggctaattgaggagaaatcatgatcatattaagtatctgtctggtccctttcggcttaaggcatctgccacaacatttgcctttccagggtgatacaggatttcacagtcatagtctttcaccaactctaaccaccttctctgtctcatgttcagatccttctgagtgaaaaagtacttgagactcttgtggtcagtataaatctcacacctttcaccatata

SEQ ID NO: 362380 - DNA, 580 bp, Cannabis indica
acccgccccattgacattcctagatagagacttttaatatataatgatatatatatagtaattaatatttcttcatgtgtttatattcacgtgtaaaagtaataatcctaaaaacgtgatcatcattaccatggaacatattgtcaaattttcatcaccgtgactgtaagaatgaagtttatatcatatatcccaaacataattagcttatgaattatgatgaatttacaattaaccttctaaatcaagttttattttatttgagaaataacatgatgaaaagctacaatcattatacatgcacatgatgaatgaagaaacatccatcctcaatgatgaaattattgaagatcaaatcacagtcaaagatgtgaatggtcatgagaaaactgaacaaccaattgagaggctatttgagaaaagcaaaaaagaggtgtcattggtggcaaaagaatcacttgtagttgttgatttgaagttgtcaacaccacgatattatgaaccaccaatgaatcttatactctgctaatacaacggttctccatgttgtattctctacgagttatcaacggtttctccc

SEQ ID NO: 362381 - DNA, 775 bp, Cannabis indica
cttcaacttgaccatttgcttgtggatgtgccactgcggagaagcttttgatgatgccatggttcgcgcagaaatcagtgaaagattgactgtcgaactgcttgccgttgtctgaaactattttgtacggtagtccgaaccggcatatgatgttcttcactataaagtcttgaaccttctttcatgtgatagttgcgagtggttcggcttcagtccactttgtaaagtagtcgactgctaccaccgcgtactgcactccgcctttacctttaggcaattgcccgattaggtcaattccccagatggcaaagggccacggactttgcatttgtgtcagctcgttgggcggagcccttggtatctttgaaaatctctggcatttgtcgcacttcttgacgtaagttttcgaatcttcgatcatcatcggccagaagtagccttgccttagaattttctttgataagctttgtccggctgcatgatttttgcagaatccgtcgtgaacttcatatagaagccgtgcagcttcatttggtgtgacgcaccttagcaatggcattgagaatcctcttctgtacatgatcccgtctacgatgatgtaccgtgctgcctttcttctcatttttcgagcttcatttcgattatctgggagttccccagagttgagataggctgctattggcgtcatccagttcggagatgtgtcgatcatttcgatttcttccgtgccggtgatgctaggctcttcaagaaactggatcgggaccaggttcgc

SEQ ID NO: 362382 - DNA, 521 bp, Cannabis indica
tccttttatagtgtttcaactagggcttacggctgaattatatggattaaaaaggattaaatgttgggaaaaaataaatttaagggccagccataaaggaccaatctctagttacaattttgccacttttttcaaccacttattcttctttcaataataccatattttctaattcaatcctataaataccaaaactatttatttaataattatcattaatcatcatagaaaattatcatttatatattttattaattagaccatacaaagtctcttaattaataaattaaccataaaacttcttttctttacaattaagcccttacttagtgaaaattcataaataagacatagtctaactttagaattataattgattaatcaaaattaattgactgagtttgcaagcattattatctcaactagtgaggggaccatgggcctatataaccgagctttcaataagtcgatctagaatttactttaaattctctaacttattaattccgccttgcgccact

SEQ ID NO: 362383 - DNA, 531 bp, Cannabis indica
attgattaaaaaattattttagatactaaaacagataaaaatgtatcagtgtatctcttttaatggggtgcattatagaatttccctatattttattataaataatatttttgaaaatataactttggaaaattctataacacaccccctttaaaaggttatatcgatacaataaataatgcaataaactgaagaaaaaaaaatagtcaaaacaaatagagatacatcagtgcatctcttttaaaggtgtaatttttttaaattttataataaaatcataacctaataaataaaccattatactaattataattaaagaaatgttaggtgtggtaatttgtgttcgcaggtcgtattcgtgtcgtgtcgagaccaatgtataacaagtatatgctcgaccggaacataactcgtttaataatcgtgtcagaaaatgaaactcaaacacgacccgtttataaacgttcgacacgacctatttaactcgtttataagcatatttgtttaaacatgtcaaccaataacacgttt

SEQ ID NO: 362384 - DNA, 838 bp, Cannabis indica
atacttgcgtagtgtttataaatatagcaacaaaattctcgaaccaccttgatgtctattggtcgaacagagtcaggcctagtggtatccaataccacggccagaaaccctagacatccctcttgtaacaattccttggttgttattaccgaaattactggaatctgagatccctgaatcgatccgacaaaaacaaacggttcttcgccttcgggttggaagattaccatcttcctcttacaatcaatactggctgagtacttggacaagaaatccattctcagtataatatcaaaatccactaaactcatttctattaaatcagcactcaactccctatcctcaattctgatcgggatagacctaatccaccttttgcagatgactagttctccgccaagctgtagggttccaaaccctgattcataactatcgcgtggtttatccaatttattgaaaattttttctgccacataagaatgagtggccccaaaatcaaacaacacagagaaataagagttgttgacccagagctgacctgttaccactaaagggttggcttctgcatcagcctgagttatcgcgaacacccttgctggagcgggtttcgctgcagtcttccgtgtctcagtcttgagttggggacaatcccttttgtaatgccctgacataccaaactgaaagcacctctgccctttacactccctcagatgatgctttttacaactagggcactcttggtaagtgtatcaggtttcggtgccactctggcgattgcctcgaccctggttccctcggaacctcttgttctgacctaagccactggatgcagtaggtg

SEQ ID NO: 362385 - DNA, 724 bp, Cannabis indica
ttggggtcatccagtttggggatgtatcaatcattttgatttcttccgtgccagtgatgctaggctctttgaggagctggataggaaccaagttcgccttgtcacttggaatttgtctgagaccgtagcttttgaattgtttgagcagatcatatattttgctagaataagctatcatattttctccccgagcctcgtattctccagatacatgatttaccaccagctgtgaatcactgcagattttgatgtgtccggccttcatctcctgggctagccttagcccaacgattagagcttcgtacttggcttcgttgttagatgctttgaatccgaacttgactgcagcgttcaggtgttgccccctaggcgtgacaagggcaattcctgcaccagatagttgatctgtagctgatccatctacatgtagtttccaggttagtttgtcctcattgtgacttggctaagatatttttaccggctcggggttgctttctggtatgctttttttttttcctgtgcattctaccacaaagtctgccgaggcttggcctttaattgctgttcggggttgtaaagtgatttcgtacttgcccaactctaccgcctacttgagtagccgtccagaagcatatggttttggcagtatttggcttagtggttggttggtatatacccgaataggatgagcttgaaaatatggcctcaacttccttgttcctag

SEQ ID NO: 362386 - DNA, 596 bp, Cannabis indica
gtgcgggattctatctgtgctatgttagaaatttataaggcagatgaaaatggctattacctgggccttccttattcggttgggaggaataagaatgttatccttggctttcttaaggataagcttcggaagagaattcaaggttgggaagggcgtattttatctcgtgttgaaaaggacgtattgctaaaatctattgctcaagcattgccgaattatgctatgaatgtatttctcttgcctttagacacttgtaaagagttagagcggcttatggctaagttttggtggcattcagattcgagcagtggtaaaggtagtaattggatgagttgggagcggttgtgtcgtcataaaaatgtaggaggactgggttttcgaagcttgagagactttaatttggctcttctagggaaacaatattggcaatttttggttaatgatgactctttggttggtaggctctataaggcaaaatattatgctcatggcaacttcttttctgctgaattgggagataatcctagtttcatctagcgaagtattcttgaagctaaagatctagtacattcctgtgcttaaagaacaatcgctaa

SEQ ID NO: 362387 - DNA, 660 bp, Cannabis indica
acatctttctccataaagataatgccgccaaatcttcaaagcgaacactatcgcggccaattctagatcatgactcgggtatcgctcttcataatctttcaactgatgggaggcataagcgataacccggttagcttgcatcagcacacaccccagaccctgtctggatgcatcacaatagacctcgaacttttccttgtcagaaggtaaagctagcactggagttgtaatcaacctctgtttcagttcctgaaaactaacctcacatttgtctgaccatataaaacgctgattctttttagtaagttcggttaagggtgctgagattttagaaaacccttctacaaactcacgataatacccggctagacccaagaagcttctgatttctgttactgttttcgatctaggccaatccctgatggattctatccttcccggatccaccttgatcccatccttggtaacaatgtgtccaagaaaggacacctgtgataaccaaaattcacacttcttgaatttggcataaagcttgtgttctcaaagccattatagaaccattcagagatgaagctcatgctcctcttctgactaagagtacacaaggatgtcgtcgataaacacaatcacacagatatcgaggaaatccttgaacactct

SEQ ID NO: 362388 - DNA, 535 bp, Cannabis indica
ggtattccttctttagcttggtactgtatttgtagtgttgtgctggtgttttcgcaccccaatgaagtaagcagtatttgcagtagctcttcgtacttgcattttgttggtatgaattctccactagccacatagttcacataattgtgatcttcattccattgtccattgctcttgatgagtactggtagacgttccattacctgtcattgttccatatattacatttatgtgtctggtttcatattaaaacaacagtaaaacaatagtacaataatagtaaaacaaccaaacaaaattacaaaaattatttattattagttttttttatgctatttttctgatacatataattagaaatgtttctgtattaataacgacaaaacaacattataacagccctaattttttgaatgaacaattgtagtagtttctcaagtatatttaccaatcattttgtgttagaaacggaaaattaacaatagaacaaccctcatttatcaattcgcatcataaattaaacaacatcacatta

SEQ ID NO: 362389 - DNA, 634 bp, Cannabis indica
ggctgacgctgatgctagtctgtcagtggtgataggttagttgtacataaacggttgttcttattctgtattatttgattcgggagatactcattcttatgtatcgagtagagtaattgaaagttttcataaaccatgtgatgtgtatgcttcagggtttggtaccttgttaccctcgggagacctaatagtatctactcgatggattaggtctttatatttttggattgacggttatgagttaactgccaacctaattgagctacaattgtttgatttcgatatgatcctgggaattgatttcttgtctaaatatggggcaacaattgactgtaagcgacagatggtggtgtttgaacctgacagtgacaatctagcagtgtttgtggttaaagtacaaggatcgcgtagacctagaataacactcctaaaagctaaagatctgatgcgcaaaggttgtctaggattcctattaactacagtggatactagccaacctatgtcatctaaacctgaaaatacgagattggtgtgcgaatttctagatgtatttctagaggatttacctggattaccaccttcccgagaaattgagtttgtaatagagttatttctgggagcggaaccagcatca

SEQ ID NO: 362390 - DNA, 1045 bp, Cannabis indica
tcatcagcacaatccctataactcagggatcaatttacgtggatatggcatacacacgatcccactatcactgtattcagcctcaatcccacgatccttgcattcagcattgatcccacgatttttctgtttatacgcattgtaacgagagggaaaactcttcctccccaagcttactagccctataaatagtgatgcatatttattgggcaagagatcggtcgaaaagcagttgagctaagactataccctaaatataatgtctaagaattatatgttcacagatattgtggtaagagctataagaaaaggaatctttctccttgattttaagtcaatacaagtaacgaggattaggctattagcgaactgctcggggctgaacctttattaaattcttgtgtctttatattgctttatcatatatttgttattataaatcacttatcgcttataaaatagactcgttgttgttggctaaaagcgaggtcaatattttggtgctttcattgagagaaggatcacgaatcgctctttattcaacatccaatcacaaatacgatggtgcaaactcgtagaggcctgactgatccagcaaattcacagacgatggatcttgcatcgcagaacccagaaaacacaacggttctgccagctgttaatcttggacaaccggcgaacgtggggaatggtgtgacagttcctatagatgaaattgcgcctggtgtgcaagagactgggaatagcagttccgcacccaaccaggacattcataacataactgtttcgcttggaactaatgcctagatgaccatcggagatgccactgaattacaaaatctctgtgacgctctcggactcatgcatggtcataacaataccctacatcatgatcaagacgaactgcgtgctgcagtaaatctcgcgttcgatgaacaaaggcacatgttcaccgaatggaggcattaagggctcaccatgcagagatcaaagatcgtagtcggcaagctaccgtgctgatacggagagcctaccaaactgtagg

SEQ ID NO: 362391 - DNA, 553 bp, Cannabis indica
aaattgaatcgagtcggatcagatccgatcctaaaaaaaattaggcggggcagaacggatctgatccaagatccaataagtgtctgaatgtttcggatcagaggtgatctgtcggatcggagctccaacctgctccaacttaatggatctttttgacatgcatatttaattattagatcagacaagcatgtttggccatactagctacttgtttattacgttctttactactctcatcctcggtccagtgttgtaaattcgtgcatggctcgtccacgtaataccatgttttttatatatatatatataagtcgtatcgtgtcgtgctataaaaaatatgagtcgtgctatgtcgtgctaacattttgaaaggataagcccagcatggctcgtaggctgaatatttttgtatcgtgctcagattcgtaccgtactttactcttgcaagtctgtttttcttaaacgggtcaattcattttcatatttggactcaataatgtattttttcataattttaaacacatttatatattttttcaacaatattttatgg

SEQ ID NO: 362392 - DNA, 692 bp, Cannabis indica
taatataataattagcaaattatcagaatatattcttagatcttaatttatgttacctaatctatatatactgttgtaatagaaattgattaccaataaagttcttttacattgtatcacattaccttatttgagtggagaatttgaaaattcttaacccatctttacttggttgacatttgtgataggaactttagaacactactgagaaagtaaatctaaccattcatatggatagaaataacttatcagaattatgagaataagatagtagaattcttgcatagtctattcgaatgacttgggcaaaaattcctaatcctcataaatttttatggtatctctaatgattactcaatctctagcaagtattttacactcaatactaaattgctatgttgatgacttagtctaaaaggaacttacagtttcagactaaaacaatatgtcacaacaagagatccctcaaaacaatagtaagaggttaaatgtacttctatgtatgaatttaaccagactcctactgttgagtgggagccatctgagatataatcaaacaaggaacattaagggacagtcaagaaagatttatgaaagtgacctatatgttagataatagggatgtatatactacaagtcctaatatctacaccaactcaaaagaatctgagatggtggttactctgggggtg

SEQ ID NO: 362393 - DNA, 945 bp, Cannabis indica
ataaataagataaaacaaaataactacagccgtaattttttgaaacccttgatgggacaaccaaaggtcaccttctcgtgacaacctttaatctgtctctcgcatatagtttccctcatgaccgcacctgtcaagtcgtgaaactaggggcatgtgttatggtgagatttctctcaactagaaactcgagaccagactcctgtgtggaggacacgtgtactcaattttcccaagaaaagctgagatgtcaatgagagactcctcgagtttaaacctcgcctgagctagactcagcgagatgatgcgaatatgaccaagtctagtcgtattcgtatggcccgcattatgtaggaccaaggaacggacttaactcgcatgtaccgggatatgtgcgagtatcctctcgatcctcctgtcaaagcatagagatcaactctctatgatgcgagctggtctcgatgacccaacaacctcaataaaccaatatagactcgcgtgtctaggttctatcagctcgttatacgatgtccgtaagtgcgactatacaagaacgcagacagcctagacttaactaaatgttaggtatatcctaagcccgcgagcttacaccagaatatgaacagcaaactcgaacattagaagtcgcatacgttgttgtatttagtgaatagaaactgttactcatttattgatgtttacgttttagttgaattactgtgaatcaatgtataaacggattgataatgaatgcaatccttgtgtaactaactggagacttgctttgtatataaaggagtgatccaccatgaaatgagacctacaaaactcttgcaacagtggactaagcagaccgtgatctaactgaaccactatactcctttgtcttcttgatatttccagtttttactaagtatttacgttaccagttcgagtactcgccgtttt

SEQ ID NO: 362394 - DNA, 545 bp, Cannabis indica
cttgggccaccaagtgcagatggcgcttttcttttttgataagtggtcgagtcactaccacccctaccataactagaggtaagaggagtagtggctccaccgataacctgtgtcccacgggactcctgaatgcactcaactacgccctcagctcgtagtgcttttcccaccatatcaacataggtggtgttatcatctgttgtgatcatcatgtcatgtttgatcttaggattcaatccgtccagatacttttctttcttactgtagtcggttggcacaattactaagaccagcctagccaacctatcaaactgagttgtatattcggtaacagatatattttctttctgagtcagctaagtaaattcttttctctttgtgctacgaactgcctcattatagtactttgcattgaacaatttctggaactcttcccaagtaatggtagtaacatcccaagaaagagccaccatatcccagcaaaccaaggcatcctcctggaatcggaaagtggcataagccactctgtcgttgccggtgacacc

SEQ ID NO: 362395 - DNA, 544 bp, Cannabis indica
tactccatgttatgtccttgaccgaatgagattgagtttgtgagttacataaccgggggtcagcctccgttatttgttgacttggaggaacttgtgttgggtgaggatgggcaaccaacacaggatgctttgcgaagccaggccgaaaagcttgcctccacattggaagaacgagcggaggcagcccgaatatttaaagactctacaccacctccaccgtctccaccacgtgcaccgcctgcagttccagatgggtctggtgttgacccatctccagcttcagttcctgatgggtctggtgttgacccatctgcagcttcagttccagatgagtgtggtgttgacccacctgcagcatcacaggatcctcctgttcccccgtcagcttctattcccagcacctcagaggctcgcgatccagtataccctgccattttggcaaggttggagactgtggagagggggcagattgctttgagggaagggcaggccgctctgctaagaggacaaacaacgattatggatcagttgaagaccataatga

SEQ ID NO: 362396 - DNA, 688 bp, Cannabis indica
atcttacagactaaatatatataataatattattttttttttataataaatcaaaatattaatagtatttaaatttatttatttattcaaaaatgctattcaaattaatataatagaaaggaataattcaatctcattttttttaagtatcaacattactctatttaagagtagttatattactaaaggaataactttgtaaggttaaatcttcaaatcaaacaagataatgttttacattaccattttcttgttagcattaacccattccaaatagtccatatgtttactgataagcaatgagaatcaacggaaagggaatcattcccttacatttgtttgtttatggcgcatttactaaactgtaattggaatcagaataattaataggagaaatgtatcggtttaagatagaaaataatcgaaaacaatattttattatgctgtttactaaactgtccggaaaaaaaattagaatcatattattttgtttacataactataggtcgtgtaaaatatttggatttcttaattaaaagctaattttagttgtaataatttaaattagttaaaattttaatgaaagtaataaaaattcctttgaaatttaaatggtaacaaagaagagttagtaattttttttaggctaattagcaatttttttcttgaactttaacatataccaaat

SEQ ID NO: 362397 - DNA, 1052 bp, Cannabis indica
cccatgatccctcaaagtcaagcacacatgcccgtagcatgtcttctaatatctgtatagtcctctcagattgcccatccgtctgaggatgaaatgccgtgttgaactttaactgagtagccatagctcaatggagactttcccagaatctcgatgtaaacttcagatttccattcgaaataatggactttgggacaccatgatcacgtacaatttctctaacatataactcagcatactggtcaatggataaattcttccgagcatgtaaaaagtgcgctgactttgttaacctgtccactatgacccacattgagtcaaactgtctcgtggttctaggtaaacccaccacgaagtctatagcaatgtcttcccacttccagtctggtatgttcagtggctgcagcaaacctacaggcctctgatgctcaacctttacttgctgacagataagacgctttgcaacatactcaggatgtcattctttgtgccttaccaccagaacatggctttctggtcttgatacatcttcgttgaccctggaggaactgaataaggagtcgtatgagactcatccatgatctctcttttaatactctcatccataggcacacaaacacgatttccaaatcgcaatattcccgaatcgtaatattcctgtttcatctatcgacaaatcactagccttcccagccgaaaccctagctcgagttttctctaattcaggatcttgcatttgtacttctttgattcgctctaaaagagtggattgcaaagtaatattagccaattgccccacaactaactcaatcttagctcgggtcatctcatttgctagctgctgatagatttgtttcacagtgttcaactgactttgaccctttctgctcaaggcatcagcaaccacgttggctttaccagggtgataaaggatttcacaatcgtaatccttcaccaactccagccagcgtctttgtctcatattcaaatatctctgggtaaagaagtattttagactcttatgatcagtgtatatctcacatttctcgcca

SEQ ID NO: 362398 - DNA, 556 bp, Cannabis indica
attctaaaattagactatatcttatttaaaaaattttactaaacaaggacttaattgtgaagaaaagaggttttggggtcagtttgttaattaagagactttgtatgatctaaataataaattacataatgacaattttatttgataattaattataattattaaataaatagttttggcatttacaaattgaattggaaaatatggtattattgaaagaaaaataagtggttgaaataaagtggcaaaaatctacctagaaatcggtccattatttttgtaaggccataagtggattttttcctaatattttattattttttaatccatataattcagccctacgccctagttgaacactataaaagaaacataatactctaatctcatcctcttgacaatttgtcaacttgactattcaaccaacctagatgagagagttccttccttagtgatttcacctccttcatgaaacttcacattcgaaccttgagtgaaagagtgacgtgcccacacatagcaagtcaagtactcaatcatagtgagtaagacggtg

SEQ ID NO: 362399 - DNA, 1192 bp, Cannabis indica
gtccaacattggtgcttgggtcccctagtcgatgatcaacatcttcatccccgccttgggaagttccctacttgggaatgttttttcccttgtctgtgctctggctggaggatacttcctacttagccttggccactacaaggttgtaacattcccgagcagactactggtttcctcttaaacaccctaccgcattctttgttggaaactttaggcacgagtgaaatattgatgtgacatcctttaagtcatacatggcagaccggcctagcattacgttagaagctgaaggaatatctaatatcaggaactatgccattacaatcatcctcatcgaagcttgtcaaacagtgaggggtaaacgaatttgtcctagaggtgcgacttcttgatcggagaaaccattatcgatcatggttctggccaccattttattggctatgtggacttccacgacgagcgggtcgttgggtggaaatttaattttgacagcgtcttcatcgttgaaggttatggtcggctctcccgctcgtggaactttgggcttcctttcttccacggccaggataacctcttcttgctcgtgctgcactgttcgggcatacctctcccaagctttgcccgaatctccagcaatgtgcgggcctccaacgatgacttgcagatgtccatctaccggtggacgcaacaaatctagcttactgtcgtctctttgaccctgattggtcttaacatacttttgcagatggggattgtttttccttattcggaattcaatttcccacttcaagttgtaacattccttggtgtcatggtcgtagtatccatggaaccgacaaaactttgtcatgtcactctatatgtcatctttcttcatgggcccagggttcttatatggggccagttactgagttgcacactttctatatcttcaaacagaatagtgaatggagtgtatttggcatggttctcctcgggagcttgtttgaatttgccagtgaactttcctttcttcccattcccttgcttttggttatggctagaacacttacaacttgagctcgaattacttgggtagttgggaagttgggcggatgttccagtaaagaaggagcctttaacttgccaggcttttgctcaccttccactcgttgaatggcttcttcgagcttgatgaagccttcggcacggt

SEQ ID NO: 362400 - DNA, 1233 bp, Cannabis indica
ttagattgatgcctccattaactactcatgttctatattccactagggaatatcaacaatttaactcatattgtcatctttctaatttgtctatcctattaaatgggttaccactaaataacatacatgcacagtccattcagatttcttgatgtctctaactaaatgtacaatgtttaatatcaataaaaattataatattgcccataaattctaacttgagtcggccgaaggaccgatattcgggtccccttgaatcataactggcacttgggcaggatccgtacacttttcttctttaacatcaatctttcttaactgtgggcaggttcttttcagatgacccactaccccacaataaaacaaaattggctcgacattggttcaaatggcacctttttacatcgtgaacactcaggataaggtcaccatttcttattctcaccttgattgctatctcgaccaccctggaacctttttgtcatgtcccataattggtggttcatttagcttttgcttcttgatctacaagtaagttggcttcatatattccactacgtttagtggtacaacaggaagtgtcggtaatataataatagactcaagatgagcctatttttctttcagatctcagatatttttctccttgtcgtctaatcatatcctgtataacagaatttacatgttcccagcattatggcaataaataattctcttccatattgtttgccctgagcccaaatagctcgctaatcagactatttgattgcccttactgtataacttatcacatatttagtccacgtcttctaactatttaaaactcagacggatattaatatcaatatgcatataccatacacatattcttatcaaaattatcagtatgttacttttcccaacatactttataattgcctaggcaggtaatccaatagcaaataatataaatacttactatataccatgagtcgacctgtcctcgcagcaaatgtacatattcgaccagtcttcaggacctttaaaaccatggctgctctgtaccaagttgtaacgccctaatctatagggacgccacgtgtgtgattttataaactagtttaatactaatagaataattaattattaaaaaccgtgataatattaaaaacttgactaaaataaaacactaaaaatggacattataacggcataaaaagtgtgttccgggatccctgttgtaaaaagttttac

SEQ ID NO: 362401 - DNA, 818 bp, Cannabis indica
tggtctaacttaccttggttttttaatgggacaaatcccaaagaattgtcatccattagacaaatataatagtgttatatctcgacaaataagtatttgtaaatgcaacatctagttgtacatccaaagatgacaacttcgactagtatttacaatatgaaacaatgaagaagtttttaaaataagaataactttgactctcgctaaacgggacatcgttggattcttattctaatcaaaattgtcctttatttttctgttagcttattcacttcgaatttgctttaatagtatatcattagatgaatggtttataaatcatttgcttatgatgtcattctaatttctcttatgaaattaaatggcacagatgactaaattcttgatattctatctcgaaatgatatatatcctcgatcttggaaatctcctacttgtatgtgtttactttaggcaatctaaacatagagttagattagtagtggtggtccaagagagaatatcactcactgtatatttggtataaatttaagtctttgactttaaattttagattcgaaagtaaaatttttaatttcagtttcgtagaatacattggacaatacagtatgaatttcacaagttattaatatccattttctatcaatggatccaaactgtatgtttatgtatggaatacgagtttaatattctgtgaccaggatccacttggactattctaagaactctttattgtaactagacctaagtcatcaaaagacctcaacgataatatatctattgcatcttgttcctagtggttttgacaagatcattct

SEQ ID NO: 362402 - DNA, 505 bp, Cannabis indica
ctccagcagaactcaaggagcttaagttgcaacttcaggggatgcttgatattgggttcacccgacctagtgtatcgccttggggagcgtcggttctgtttgtgataaagaaagatgattcccttagaatctgtattaattaccgggaactaaacaagttgacgatcaaggataagtatccgttacccaggattgacgatttgtttgatcaacttcaaggaaagacagtatttttgaagatcgatttacgatctggttatcatcaactcagaattcgggaagaggatatactaaagactgcgttccgaaccagatatgggcactacgagtttctggtaatgtcattcggattgactaatgctcctgcggcctttacaaatcttatgaacaggggtgttcaaggattttctcgataactgcgttatagtgtttatcgatgacatccttgtatactctcaattagaggaggagcacgagtatcatcttcaaatggtattgcagcgac

SEQ ID NO: 362403 - DNA, 628 bp, Cannabis indica
tatatattttttttccttaaaaaaataaaatatagttagtacgtaggtaaccactttgtattttgttgaatagttaacatgaattatttgccgaaagtcaagctttcttatgttctaataaaaataataaaataaaaaaagaacttattttgagttaaataagaataaaggtagcttctataataataataataataataataataataataataataagagttttggagtttttagcggttaaacttttttaattatggttttacttgcacttaatcttttaagttcaaattttagagataaagcttccttaattattgagctgttaacaaatggataactgctactatagactgtttatgtgtattctcttgtacacgtaatacgtttatattggtacacctaatattattatttcaaaatttattttaaattataaaataaaagagtttttaacggctaaaccctcccaattattgtttcacttgcattcaaccctccaaactcaaattttgcggtaaaactttctaaattactgaattgttagcaaatttaaggtgtcatctggtaaactactactactactaccataaacctgtttatgtgtacactcttgtacacgtgatac

SEQ ID NO: 362404 - DNA, 567 bp, Cannabis indica
catgattacaaaaactaagcatcattgcttaactatttttggattgtcttattgctggttcaatctgttgtgaaggataatgtgaggaagtggaatcactttctctattcttttcaactgagcttgaagtagtaggattgtcagaggaattattctcaatatcttcagcttttcttttgcccttatctgcatcactggagaaggatctccatgtaagtgacaatgtccgttcataagcacggaatttagcgtccagcttgtttatatctgatgagttccaattcttaaaaccaattggttaaactcatgtgataagctgttgagaataaaatgaactctctgctcttctgataaaaaaaaaattcccagcttaactgctttctgggatttcatgttcaccgtgagcaagtgtgaagtgatactctaaccacgagtcatcttcacactttgaagttcattcctaaaggcttattcaagatgaggattgaggcgtcggttgtacattttgacactacaaatatcaataaacagaaataaattattggttaaataaattcatacacaagt

SEQ ID NO: 362405 - DNA, 680 bp, Cannabis indica
ttgattgctgatcttggtttgtacctgatgtcgaactggctcagctctactgaccatttgagtaatcatcttgaggcttctggtttggccaaaacttgtcgtaagggataatttgttaaaacctcaatgttgtgtgcttgaaagtaaggtcgtaactttcttgaagcgatcaccaatgcaaatgctagtcgttccgtttatggataacaagtttcaacgtctaagagatgcttgctcacatagtataccagatgttgtctaccttggtcttcgcggattaataccgaactaatcgcgtattcggacaccgcaaggtagattgataagacttctccaggcatcggcttggaaagtatcgggggttgccccaagtttattttgagggcttaaaaagcttattcacacttttcagtccattaaaactttttatttccttttataatctgaaaaaactctttacatttatcagaggaacgtgatatgaagcgatttgatgcaacgactttacctgtaaggctttggacttctttcagtttggttggagatcgcatctccaccaaggcttttatttttgcgggattagcttcgattcctcgttgatttaccataaagccgaggaattttcctgaccccactccaaagacacatttgagggggttgagttgcattttatattgtcg

SEQ ID NO: 362406 - DNA, 694 bp, Cannabis indica
ctgttattatataaaaactctatcagtgcaggtacttgctccaggagcctttgaaatccattacacaggctcataacatgtcttccagtatcggaattgtccttttcgactgtccatcagtttgaggatggaaacttgtactgaatttcagtttggtacccatagcccattgaagactctgccaaaattttgaggtaaacttcggatctctatccgatataatggactttggagcgccatgtaacctcactatgtttttcatgtataaatatgcatactagtccactgtaaaggttgtttttactggtagaaaatgtgcagacttcgtaaattgatctaccacaacccaaattgaatcgtacattcccgtggttctaggtaatccaactacaaaatccatagtgacatcctcccatttcgactcaaaaagtgttagtggttgcaataattctacgattctctgatgctcagccttaatctgttgacaagttaagcactgggatacaaattccaccacatctttcttcatcccacaccagaagtaatagggtctgagatcttggtacatcttggtagtgctaggattatgtgaatatggggtggtatgagcttcctcgagaatctcatttctaagttccgcattacttggaacacaaaccctggcttatacaacagcatctcgctatttgacacc

SEQ ID NO: 362407 - DNA, 860 bp, Cannabis indica
tagtagtatactaatataatgtctttttattttttataactcacatccctaagtaattacctataaataataaatactatttaatcattcataaatatgattaatatagtgacttttaattttatacctcacacttaaatagttatctacaaatagcaattacaataacttatgtgttttaatttatatatatatttttaaaaaaaatatcatattttttatattcatcattctctatatacattatagattaatattacttttaaagaaaaaaaataataataaaataactttttatactttaatattttacttgatataaatttgttgtctcatttactcgaaagtgttagtctaaaatcttttaaagacaattgtggaaacaaaatagtgagtttatagattaatatctatttgtaaatacgtattatggattaaatgttttaattttaaatagaaaatttacatggtatactaacttttgccattgtttttacaaaaatactgttaggcgatatttttttttactttttactgtttttttataagtttcatactgcagtatattgtgttaagttttcactggtgttctactggtgttttttaggtgttttactgttgttttgagttgttctactttgtgttttaccggtatattataaaaacacaatatttttgaaaagatttcttgtgacagtattttgtaaaaattaaccaaaattccagcatttttgtaaatttccctttaaataagattacttttatgtatgttatgtatgcacacacacacatatatatatatagtagtgtaatattagatagtttctctatttttcttctttcctaatatttgtataatt

SEQ ID NO: 362408 - DNA, 562 bp, Cannabis indica
tagttatgcttggctatccggacctcctgcctcgcctcatctctcggaaccggagtcagcactatgttgggaggcactgtatattcctctgcctcggaagggatcccagaatcagggccaggggccggagtgtccactctccgctgccgtttaggcacctccttggctaccatttcgccgttgcgcttgcggatcagagcaacctcttgctcttcttcaccttcttcaacttcctcgggaagagcccattgctcttcttgtccttctttagcttcctcaggaagcacctcctcctcatccactatgtcaatagtgtctgaaggggcattggaagaagctttcattggagtggccacttgggaagaagttagaggaaggggagcgtcaggagtgtgagctccggcaagggcggccaagattgcatccatggagttagctgctacaacaaaagaaaagaggcaggtgtcagaatctgtgaaagcagtaaacactcaaaaaagcaaatcaagctagtcctaccctgactctctaattcggcccaagcaaagtccgaatctaatgc

SEQ ID NO: 362409 - DNA, 540 bp, Cannabis indica
aaaaaaaaaaaaaaattaacacaattagtccaagtggtgttgacgtataaaaattaataatgtatattattataaaagagcattgcaccatttataggtggtaccttgcgtatgattaatgatatttcataaaaattattttattaaattagataaaatttgatatttaattataccaatatcgatataacacgttcgatgatgctagacaccataaatacttttttatatttctcattataaaaataattaatgaattatttacgaattgaacttcatctatattatgaatttttttatattctttacaaatttttatttaattgtttttatgtatatttttttaaagaaataacgttattttcatgttgtattaaataatataatataacatcaaagcaaaaataattgttcttattttcatacaataaaaaaaatataaattcgtatttttgttaattttttttttacatttataaaagtatccagttgtttttttttagttttttttttgaatactaataattgtgtttttttttt

SEQ ID NO: 362410 - DNA, 438 bp, Cannabis indica
gcaaaatatgaaaaactactgataacataatcatgcatttctgaattccataaataacagtaataaattatttaaatagctataaataatttccataattaatcataaacaattgctaatttccaaattaactaagcgggctttacattcaacctcaagttttcaaggacattcaacaatggaggtagagtaaaagcttctttgggtttgtaagtagcacttcctaccatattaagggatttgatttactatttataaattttgggtggtaatagtgcatattgtgatagaattgttgttgatatttggtttgttggaattgtattgtggtattgttgttgatattgggtttgttggtgtggattgtaaatttttgggatataaaaaattaaggggaggtgctgcccaatttttcttagaattattttgaaaaaaaaa

SEQ ID NO: 362411 - DNA, 504 bp, Cannabis indica
tgttttcgaccctttgcctagtgaacatgcatcactagttatagggctagtaagcttggagaggaagggttttccctctcgttacaatgtgtataaacagaaagatcgtgggatcaatgctgactacaaagatcatgggattgaggctaaatacgctgatagtgggatcgtgtgtatgccatatccatgtagtcctatacctgagttatagggactgtgttgatgactcacgatgcgaaagctaaattttctaagtgttggttgctctgtgcggattgctaagaactttgctctgggcacgctagcgaaccatcctgctcagattatgcttcctgagtagatgctccaagtggattccacgtgtcaccattcatgtgatggcacgtcaaagtgaaaaaattgggataacatttgccccccaagtctgtacgggactttcgaagttgcgtgtagacttcatccgagctgcttctgccgttggatggggacacgtgtcaagcacga

SEQ ID NO: 362412 - DNA, 551 bp, Cannabis indica
agagagagagaaactcaccaagaacattctttatataagaactctcattaataacaaagacttgtggactacgattcattaatgcccgaaccacgtaaaaatcatctgcattaattatcccaaaagctctcattattatctcatttaattgtttgttgaaaacctcggtcaatattttggtgcttttattaagagttgtgggaagtattgttggggaaacatcaatcaaagaatcagagctgcaatggtggaaactcgaaacaacacacgccaaccttgtccccctaggatcctcaaaacccataaggtgaagaggctgcttcacgggtaaacgtgggctctgaggaatgaaatgagacgaatgacgaggaatatgaagaaaacttcgaaggatacgatgcttacgacaaaggcaactacactgagttgctggtcctaaggcaaaaagtagccgatcatgatgtcgaactagccgcccaaaaagaacagaataagaggatgcaagagataatggtcgccatgcaaaaagctatggaaacggctggaataca

SEQ ID NO: 362413 - DNA, 586 bp, Cannabis indica
aagtagaaagacttgttatggcgtgctgctactaactgtctgcctacgaaatccagacttcgttctagacatgtgcctgttgataccatctgccctgtgtgcaaagtaactgatgaaaccatctaccattgcttggtggattgctcttttgccaaagcgtgttggcaacagttggctgctggtgttaatttgacggcagttggttcttttgccaactggtttgctacggttctacagcaggcggatggggagaaaaggaggttgatcgcaatgacatgttgggcaatttggaaacatcgaaatgagctagtatggtctgataagtcccctactgttgcgagtgttgctcacttagctcaagctttactcgcagattggactcgggctcaagattcaacatttaatcctacggctgcattccttactgatgtcgatggtgctgaaacttgggccaaaccagctgaaaacaccttgaagattaatgtagatgctgccattttttcaggaactgcaacttatagctttgcaagggtgattagggatgaaactggcgcattggtggaagcttttacctgttgtcggtcag

SEQ ID NO: 362414 - DNA, 965 bp, Cannabis indica
aataaagagctataaatgtagtgtattactattttttttaaaaatattttaactaaaaatttaactccaaatggaaatataaaaatgtgtgacaaatttgggtcaagctaaaaattgtgctaaatttaacacaaaagatagcatgggtcaaattttagccgacaataaatatcacattttttaattacttctttgtccctcattaaactattcattaatgaaaaaagtttttatatttataagatattgaaataatataaataaaattaattatattatatattttcaataaatactattagtagtattaatttttatagctaatttatagtgtgtcttgtatattagagtacaaatacaaaaatttagctaaatttaatcaaaaatatacactattcattggagatggtgtaaactactatttttttttaaaaaaataaatttcccttaattcctaaactctacaacttaattcttttatttactttaacaaatagaccaataatttataagaagttttagggtgaaacaacccattaaaaaagaaaaatttacataaaataaataaaaatttaatgttgaaaaactaaaggtgtgtataatatttttttaatcaattttatattttttttaatttttaattgatttaaaaaatatacttttaaaatttttttaaacattttgttttttaattaatattttcgacttcgacctcaacttagattttaagacacaaactccgactcacagtctcgaactcggactatgactctgacccagggacggccctgaacataggcgggctagacctacgcctagagcctactcattttaagggtccaaataaaaaaattaccttttaaaaaatatacatatttttttaataatttttaaaaatactatttatcaagcccaatttttttttttttttttaacctatagcctatttcaactcaggatcggcc

SEQ ID NO: 362415 - DNA, 896 bp, Cannabis indica
taagagtaaccctggcgtccacctctgcctggttccacggaccgcttactttgccccgagccaccagagctggaacaacttttcttttctgctcagtggtggagtcaccaccatccctaccataaacaggagtaggaacagtgggggttccaccaacactcggagtcacccggggctcctgaaggaatttcactgcaccctcggctctcaaagccttttcaaccatctctgcatatgtggttgcctcagtagtagtaataaccagatcatgtctaatctttgcactcaaacccgccaaatatttttctttcttgctgaaatcagttggcacaattcccgctgcaagcttggccagacggttaaactttgccgtatactcagtaaccgacattccctcagtttgagtcaactcagtgaactccttctgctttgcactacggactacttcgttgtaatatttggagttaaacaactccttaaattcttcccaggtcatcactgtgacgtctcgagtgagagttatcaactcccaccacacgagagcgtcttcctaaaactggaaagtggcgcaggtcacctagtcattaccaaccactcccataaagtggagaatacgcgcaatcaccgaaagccactgctcggccttcatcacatcaggacctcccagaaacactggaggtgcctgcttccggaacctttcgtacaacgactccatacggttgccaacaacaggttgttctgctagcaccgcaagaagtgccacagcttgaaccacttgaggaggcacgacaggaggaccctactgtatcaatctttgaatctcttcatcttgttggcagattctatcttgcatttcctcaaatctttgctcctagtcaggaggagcttgaggtgga

SEQ ID NO: 362416 - DNA, 572 bp, Cannabis indica
ttttgttttttgtttttaaataatgatacatattggttaaactttaaagtagctagatatttattatgtgatttattgctatatatttaaattgcatataattatttttattgattaattaattaaataataattataaattgaataaaaattaaaaaataagaaaattatgagaaaaaagagaaaaaagatttgaagtgattttagagagtatgtcatcattttatatctcttatatcaatctttgaccacttttttttagaccggtcactcacttaatataactcatttatttagtaaatttagacttttaggaactaacttatatgtatgtggagcaatatattcatacattgagtaataatttatatccagagtaaatattatatattcacgtgctaatattttatagttaagttagacatcgtcttattatatactatcactacaataaaatttatcaatagctgcaatattattagtgatgggcaaaattcgcctctagtagtggtagcattagcggtggaactagaattcgccgctaattctacttatttatttttttaaaaaaa

SEQ ID NO: 362417 - DNA, 540 bp, Cannabis indica
aaaacgattttgggctgaagctgtcaatactgcctgctacgtgtgcaatagagttcatcttcgcactggtacctctcaaactgcctatgagctatggaaaggaagacctcctaacgtgagccacatgcacattttcggatatacgtgttatgtcctgaacgatcgggatcacttgaccaagtttgatcccaggagtgatgaaggaacatttctggggtactccaccaacagtcgggcttacagagtatttaacaagcggactctctctgtagtagaatcaatgaatgtgaaatttgatgatttagaaggacatgaagaaatgtggatcgaagatgactctcctgttctctcaggctctagaccagtcctcactagacagcctcacatgtaccctgacactcctacagagtctctaaatacagcatcaggcgtattaggtgacaatcaagcagtgccagtggtccaggaagaggaaatgaaggttatagtgccctgaccaaagaaccccaacaagtcaaagtacataaaaacggaacccca

SEQ ID NO: 362418 - DNA, 530 bp, Cannabis indica
tctctcttcgatttcatcaaatgattccggccagcagtacgtgtatttgtatcgttggttgtacatcaatcttctggtgggatggtggctcgagttctacaggtagcatagctttcatatctgtatgccattagttaatggtgtctgtccagttgccgttttctcagttgtccaatatgaccatagaacttcagaaagtttattctggccaatttcctttggcatcttcgagttttttccttagtgtatccttcaagatcttgttgactgcttcaacttgaccattcgcttgaggatgtgtcactgcggagaaacttttgatgataccatggttcgtacaaaagtcaatgaagcattggctatcgaactacttgccattatccgaaactatcttgtacagcagtccaaaccgacagattatgttcttcacaataaagtcttgaactttctttgatgtaatggttgtgagtggttcgacttcacaccacttagtgaagtaatcaaactgctaccactgcatattgcactcc

SEQ ID NO: 362419 - DNA, 797 bp, Cannabis indica
tgagtactcctggtcggcatattggcctgtttatcgtttgatattccgaccaaacactcatcttgtgtgttgtcttttgtagatgaactcaggtgagtcttgggagaaggaacatcggatcgaccaggacctgcttcaacttttacacaaggatcatcctcgtctttgtttttgcccaccttcctctagtgaaggacattctccaaaccctgtacccagccatagaatgatggctcatacgaagaaaacaacaagtttggatgacgcatctgaccctctagtggctcggtacgccactttgctaagtgccgaacaagatcttgccgtccagatggagggggaccatgaagggcacgctgaggttcagcagatcgaggagcaggacgatgtacgtcctggcagttcctgtgaggcaaaggaagaggcagaggttgaaccgccaaactacggggagtacaacgaggctggggagccaatcgatcgtgacggagacatcctggttgagggcgtggattacgtcagtgaggaacttgctactgcaattcctcatagaaggcaaggtgccttgggcgccaggtgggtaagcactccgtccagggttattgaggcgccccttcgtactcttaaccaggacagatacctgggcgaacaggattgctacattcccgcccacaacaatcgtgccacgaaccctgaaaaggggatgtgcgcctggtggggtggcccactggttagcaaggggcattgatgcctttgcatcatacttcaagaatgtggtggactgtgggttttatgcc

SEQ ID NO: 362420 - DNA, 506 bp, Cannabis indica
atggttgaatttgaaaatttgcgtttttgagaaaatgagctacataaatgataaaacagcaaaattgcaaaagtgaggcccatatccacaagccatggtcggccacttacatagggtttatcatttaatattttcattattttaatgccatataattcaaccctaaccctatgtggtattctataaatagaaagtgatggcttcaggaaagttacaatgcattttattcctttcagagaaaatcctgagctatctttctaaacctagccgccacctctccttcttccttcttctttgattatttcgaaaccccttagtgatagagtagtgcccacacacaacacgtggtacctcaatcatagtgtggaagatcgcgaagaaaccatattcaactaataaggacattcgggctcagattaacaatgtgatgattggcttgtctctaccatctaagattgctgaattgaaactctcacacaaattattcaacaacatgtcacactgaa

SEQ ID NO: 362421 - DNA, 666 bp, Cannabis indica
ttttgaaagtcatactgtgatttttccgcttttactgggtcagaaatatcgtgtattaaacacgtctttaattgttgattctggagatgtctcgatagaaacttgattgtagtgatcccaatggcgagctagaaccattcttctatccgagatcgacaacatacaacaatcacagatataaggaaatctactgacttgctagggttgtgagtctcgctttcgttagttggatgaaactataggaagttttctcgtagtgagatgatcgtctcgtattattgtactccgagctggttcaaattttatacttagtctgcttatttgtgagccgaggtatgtgttattcttctctagtgcctcgctattcttttttagccacatatggattctggttaatactctaattaccagtttgtacattgattcctcgcctaagactttacagtcagcgggttgcaaatatactctagtacttacacaattaatgatttattccataaaaagatatggcaccgattcactttctctttatcttgacacgtgttctccagcctaatttcgagtataataattgccccttaaaaagttcttttttttgtaaaaagagctttttaataattacggagggcattttcgtcaaaatcctttcttggaaaggacgcctcc

SEQ ID NO: 362422 - DNA, 989 bp, Cannabis indica
atttccatttctttcagaactccggcaaatagaatgttggctgagctcccagtgtcgacgagcatgcatttcattcgaacatgggctacgtccagagtgatgacaagaacgtcatcgtgggggtgttctaattcagaggcttccccttgattgaatgataagagcatgtcagggccctcgctgtcaattaccgtcatagcccttaccaattggacctgtcgggcgtgtgccatcgaaactcgtactgaattcccgctcaggtctgaccctaccgagattacatttacggttttcttaatgtacggtggaggagactgatcctggcttttgtcacttccccgttggatgtgaagtgtggcgttcgaaacgaggcagtcctggaagaatccttctttcaccagacggttgacctctatcttcaactgcctgcactcgtagttctgcacacttatcacaaaattggcctggaatctcaggatgagatcctggtatgaatttactgtgccggatggtaggttgtggaaccaacgtagagcgggtcctctcaatccttgcatgaaggtctttcacttgattgcctccaagtcctctagcgggacggagacggttaacatttttggctcagactgacatacgtattctgaggggtctcctgtcccgttatactctggtaatttaggggccacataacgctgaggggcctccacgcgcaggatgtgattcccaaagggtgaaagggttgacccctccattcgagcccacttgctgtgtactcccatctggcttttttgctcccaatgttattaatttgttcaacatcatttcctgtagcctctccgtctctttactcgccgttgacggatttccagcaaccgttggatccatggttcgctttcggggtgttgtgcggaaagcctctgcttcagttatctcttctacctcgtctctagtccttctgggctgatctcgatggtaaattggggcctctt

SEQ ID NO: 362423 - DNA, 628 bp, Cannabis indica
gtccacatcaccaggaaaagtttatgggttaacaaagtcattgtcataatacaaatttgttgttgagagttgttacattgagcattgtattgatgattatatacaacagtttattgaaaaatcgtgtttttcccaaagccaataaatttttacacaacaacaataaaaaaaaaacacaactataacagtctgcagcagcagaatgtaattctatcactgcagaacacagttttgcataaacaaaccagaaccagaaattagaaaccagcagaaaataaaattacttgacacaagagaattgtacgtggtatcggtgtcctttcgaacactcctagtcctcggggccacgcttagagaaagaaatcaattagtaaagtctcaaataattacaaagataattgacttaaataaaagactccctctaaatctttgtcgcaatccttcgtaatacacttcacgaatctaatttcagaaccaccatcaaacatcaaactcccttcgtctttgatgtgggaatgcttactattacgaattttatgtttactacgcaagtatacgcaatcaagtagtatctcacggaagtgaggtcgaaccacagggaattggattaagtactactaaactatac

SEQ ID NO: 362424 - DNA, 518 bp, Cannabis indica
ttattctagaaggagtaaaaacctatctataataatttaagctccatcagtgaagatacataactaggttgcttccataggcactgaaagttattcaactgaagaaagttcttactgtgatatctctattctattttggatagaattagagatatgtcttctgtatattcagatgcactttataagaagtaaagaattcagtatccctagatgagtaatacatatagtaaatgatgttgcataatattttatgaacacaaaggaagtaatagtggagaaagcagttgcttaccacagacttacagttccagtaatttgggtttagtcaaatacactacacttgatctagatatcaagacaattgattgattgaaatgcactacttgttttatgttagtgcaagtgggagtttgttgggattttatgttctaataaaacccatttcaatctaatctgatttgttatcaataaaagattagaagttatttatgtttacatagagttttcatgtttatggt

SEQ ID NO: 362425 - DNA, 535 bp, Cannabis indica
atcaaagtgggggaatgttatattttgatataatattttgattaattaaataaatgttacaagtgtgttacaagtttgtcacacattttaatctaatagaggattgttatattattttataatataataagtatagattaaaatgtgataaatatattattatgtgaataatatatattaagtgtatagtaaataaatgtgtaacctataaatttaacctacacttttgtaacctacatgttctaacttggacaagagttacaatttgttatcacttgtaactcatgtgttgattacatatcattagtgtaataaaaaggttgttatacaatttgatgataagattcaaattgtttgaaatatagttgttacaaattatattaaaactcatttgtatgagagaaataaagtattgtgtattttgaattctaagtgtgatcacctaaacattataaaaggagatattttgtgctcatttgagagagatcaagtttttttatcaagaaagcactttgctagaaaaccctaaaaggct

SEQ ID NO: 362426 - DNA, 704 bp, Cannabis indica
aagaaagaatgggtccttgaaaaaaaatacgtagaataaaagtaactcgaacaccagaaagaggaatctaacgtattacatagaagcttaagacgaaaattcccagaaaattcaaacatcaaacccagaaaaagcagatgaacagtaaagcatgcaatgagcacaaataataaagtacgagatgcgaagaacttacataaagcttgagaactaggcgttgttgttgatcgacggtaagaagttgactgacaatggcgaaagtcagtaagaaatctgtggtgtttgagggttttctggttcgagggtttctttctctctggaaaacttgaagaaatttggtgaaagtctgaaagtaaccaaatgaagtgagaatggtggcttttatagggcaaagtgcatgtggaacaggcgcgatcatctaccaatcgtgcggctgggaaggcacacgattcgaattcccaggatccagcggttgaactggtttgtcatcgaggcagtggaaacgcttgagtgtccgtctgacacccattaatgcgccgtatcaattaatggaaaagaaacgaatcgacgcctgtaaaaagtgaatcgctgcagtaatggtgatcattaaatacaccttcacgcacccgaagcacgtgccaggaaaccgaggagccaaccggaggtatttgaccaagccttgttcatttcacaattaaacaagg

SEQ ID NO: 362427 - DNA, 744 bp, Cannabis indica
aaatagtttttatattttttaaataacaatattatgtgtactaatataaatgtgtcacgtgtataagagatacacataagcagtctatattgacaactaactgttattaaatggatggcaccttaaatttgtaaacaattaagtagtttggagggttttatcatcaaaatctgagcttagaaggttaagtacgaatagagtgatagttgagagagtttagccgcaaaaaactcaatttttttacccataccctaccatattttattatttatttatttacgagtaggatgcgagtattaccttaacgggtatccacgccttgataagttttaagaaacattttaaaaaatcaataaattatattcaataacataaaaatttatttatatattatcttaaactagatgagagttacgtggtgagccacgtaaatattaattttatataagttctagtggtttttgtttaagaattcagtaactaagcaacgacaacaacaatggtagatggatctatttaagtttttcatatttgtaaagattataaatctaaacttttaattttcttgatttgagattttgaattgttctgatttatttgtttatgaatttattgaaatacttgaatatttatttgttctgattttgaattgttctgatttattcatacttgaatatttatattgatgattgttaatgaaattagtctgtagctttatgtttatagaaaaaaaaaggtattttt

SEQ ID NO: 362428 - DNA, 857 bp, Cannabis indica
ttaaataaatccaaacataattacaaacttaaataaatccacagataactaaaattaactcaatttaattattattgtcttcatcaagcacattatctaaaaaatttgagccggtagtgttcaagttaagatgagttgtttgtgcattgtcctgagcttgcgatactagcggtgaagggtaatatgattgctgggaagataaaatctccacaaattgtcgagtctgtggttgttgtggtaaattcagagatttttgttgttgcgaaacatttggagattgttgttgtggcgataaattcgatgattgttgctgaaactgaccaggaaaaatatatggattttgtgcaccgaaaaattgacccggagaaagttgctgcattggacccctataaaacatcggctgctgagatgaactctcagattgaccaaacatcggctgttgggactatgatcctccaaaaataatcaatgtggaaaaattgaggagactgggaggagcgtccaaacatgtttggaagaagaggagattgggaggaacttccctgcaaattaggagattgttgagtctgttgaaaaggttgttgttgcggcattggacatgttgcactaccctgaggttgggttggtaaatattgttggaggaaactctcaaatcgcgggtcatacagatcagaagtgttgtgtcccagtggaaagcattcatgcaatctctaaaacatctcagccataataccaacatcttgagaaagagtagaccctacttgagattgagtttgaatttggcttgaagagctagatgttgattttttccccctctttgctatgttgtaaccggctcctcgaatatagtcactcct

SEQ ID NO: 362429 - DNA, 778 bp, Cannabis indica
gattcgtttggtatggcatattacaccgtattatattgtatagtattatattaaattgtattttatgtaatatttttatgtaaaactatatatgatattaatttttatgaacacctaaatatataatattttaatataaattaaagtttaacatagtattatataaaaatataatatataatccaatttaatataatacaatacaatacaatataatacgatctattacgacgttccaaacgagcccataaagtctaaatcatacaattaaaattaaagaacattcatataaattatcctcatgttttcttaacttcttattattaacattattattgatatatataaaatatatatatgtatattataaaaaaaatttagagagaatttaatataataatttaattaatatatatgttatgatgttaaaagtttgataatctatttttttttatttagttgttgaaactttattagactaatttttaatttttattttaatgtttgataatgatgttagtgtaaactaccgaaactatatcgcaccgtatttttgcgagaggtttttatggttttaaggtcttggagcgcagttacaatttgaaaaattacgaaaattgcatatgcggcttggtttgaaaaaatagcctaaacctgcacctagggccgaccctgagttgaaatgggctataggctaatttttttttttggcctttactataaagataaagtgaaaattacatgaaatatgggatttcataacaaagttagaaaaata

SEQ ID NO: 362430 - DNA, 528 bp, Cannabis indica
gtacaaatgttttttgagtttcgatcttttgccaaatgtataagaaggatcaaaagagtcagcttgcctttgaggcttccatgtatcaaatggttcgctctatcaagtcgactcttttgcaccattttcctggggattctctgcctgacatttctcttgctgagtttcatcgagattcgtttggagcatcctctaatacgtctggaggtaacgcacatgtgcagggggagccttcagcatttgcccctatcaccaattcagcccaacctaatctgcatcctccagctgactagcctccagtaatcactgcaacacccttggtgtcgactgggccaccttcccaaggggagtctggcacagaacaggatcaagcagctcatattcaatgaagggggagatatttgtattctttttgttttatggttgctctgtttatattcctaaaagacatttatgtttggtgcattaattctgtgactgctatctcttttgtggtcattagtctttttttttgagtctattgaacat

SEQ ID NO: 362431 - DNA, 828 bp, Cannabis indica
gggcgttattgtaatttggcctatttgtaccatttgtaaaagtggaattatttgcaaaagagaaaacattttatggatttgctctacccaaatcgatcccccctctctctctctctaaacctatctctaaaatttgttatttttgcttgggaattacttggattcaagcttgcttcgtgggaatcttggagcttgagttcttgaggattttaaggtagatttcttactgctttaatttgtaatttgttgctaaaatggagattaattgttcatcttcctggtgtcccaaagtccattatttcggatagagatccgaagtttacatcaagattctgggaaagtctacattgaactatgggtactcagttgaagttcagcacagtatttcatcctcagacggatggacagtctgagaggactattcagatcttagaagacatgcttcgggcatgtgtgcttgattttgaaggatcatgggaagtaccttccccaaatcgagttctcgtacaatttaagctatcaggcaacaatcgggatgccccttatgaacttttatatggaagaaagtgtagatcacctattcactgggatgaagtgggtgaaagaaagttcttaggtgtcgaggttgttcagagaacaagtgaggcaagctgataaaattagagtgtgaatgcttgcagctcagagcagacaaaagagttatgcagattcgaagcaatgagatattgattttcaggttggggacatggtatttctctgaatatctttgatgaaaggcattaaatgctttggtaggaaagggaagcttagcccgaggttcattggacc

SEQ ID NO: 362432 - DNA, 580 bp, Cannabis indica
ttataatcccaataatcaatgatgctctatagatgatctacattgcataggcgtaaaattactattacaccctttcaatgtattttatccttaaaacacttggcaacctataaatgatattatagtgaactattataatcactcaaatgagtgctctatcatttatctctatttagcaagctcgaatgaaatcatcgtttcacttctatgtctggatagaagctatagattccatatgtataattagcgtgttggaaattattttaccgggatctagatttactaacagttatgtttgataacaccgtaatatgaattctaaaacaatgaaaataaatacatataaagtttaaaaaaccttacagtgggtgcagcggaatattatgactccttccattcagatctctagcccttgattcctttctgtagcagagcataatcaagatctgaatctggaccttcttttctccttctttgatgcagattttccatagtcttacataatatgattgagataccacttgatgtgtgtgggcactactaatcactcaaaggaattcaaaaatttagagagaagaaa

SEQ ID NO: 362433 - DNA, 715 bp, Cannabis indica
catttggtgaagtagtctactgagatgatagaaaattgtacccctccttttccctttgggagttgaccaattaggtctatcccccacattattaagggccaagaagactgtatcatcgtgagctcattgggtggagctcttggtattttcaaaaatctctggcacttgtcatattttctgacatagtccatcgagtcttcgatcatcgttggccaaaagtacccatgtcagagtatctttatggataggctttgccccttggcatggttactgcaaaggccttcatgcacttctatcatcagtcattcagctttgaatttggtgccgcacctcaggagaggcatagagaaactctatgtatacattatcccgtctgggatcatgtacctagcagcttttcttcttagttttcttgcttcattgttgtcttctagcaaggctcctatttggagataagtttcgataggtgtcatccatgttggagtgtcatccaacctgtcaacttcttctgggacaacaatgttaggttcctctaggaactgtatgggcaccaagtttcctttgttagcaatggtgttgcttgccaaacaagcaagtgcatctactgtggcattcgtttctctggggatctacttgatcgtgtagcctttgagctgacttaacaagtctttgatttttctcaagtaggccaccattctttcacctcaagttgtgt

SEQ ID NO: 362434 - DNA, 851 bp, Cannabis indica
gtcttaagaagagtcttcacagccactcaagaacccggagtgggggtacttgggccaaattgggaagggccatatgaaattgaggatgagatcggttccgggacctataagctaaaaaggttggacggaaccattatgccaagagcctggaacgccgatcatctccggaagtattaccaatagtccaaaaatgtaaacttaggctttgttaagagaatttgtactgtaaagtgtatgcaacctctaaattttgaataaagttgagtgccttaaaaacaatgttttcatgccactcaggggggtactaaggcataccacacggacaaatgtaaaataggccaaaagtaaaacaaaatcaagcagaatatatgtcaaagtgaaaatatatatttaagtatcctgacccaaaagtaggtccaaaaatatatatatatatattaagggcctgggaacgggccataataactgtctccccttagaagataataatttaaattgtctgaaaggaaagaaaagagattgtaaatgtaaaagaaagaaataaatatggttgtaatggtgaaattggttggactgcttggcctattcaatacgaggaggaagacaagggccccagcattctttgagcaaagcatcaagccttttcttcttctcccggaacatagcgagggctttctcaggtttgggataaaagtcaagcttgatgctctggccattcgtctgccaggccatatagacgccatcatcaaagcgcttgacgcaatgcttgcagacaactggggtgaggagctcatctcttttggcctttttcaaggcctgatctttaaagtctcttagctccttcacctcca

SEQ ID NO: 362435 - DNA, 498 bp, Cannabis indica
atatttagtgtatatgataataataatagtgatgatgatggaaaagatgtgttcacattttttgagaataaagagtttcggaattattttttcattagtggtttctatctcattttatgagatgagaactatgagagttattcttttttgggcttatcttgccaaagagtaaatagatctaagtggatctaaacttgtgaaatgagtcataattagaagagcaattttagactcaaattaaagtgaatcatggtggattccaaaattgtgaaaacaaaattaaaaaagcaattttgaatcttaaataattaaagtggtgaacaaaattgatgagaatttcgttagctttggtgtaatatttgtgttaatcttaatgaggagataatcttaaaattatgggaacaaataatcacattactttttaagtggtgatgtgagtttgatattttagttttgtttgagaaaactaataatatcaaatggtatttttcaaagtga

SEQ ID NO: 362436 - DNA, 754 bp, Cannabis indica
tgggtttttcgaacctagtggccacggccataaaacctatagcagagagccatccctttttccaattttgttttggccataacttttgactcggaactccgttttgaacgttctttatatcgttggaaagctcgttccgagctctatatgatcacccgtattttgaatgccaactttatgttatgtgaaagtgaaattagggattaaccctatttgtgaaatcccagattgtgtgactaggattaccggcacctgatcaggagaactcaggggtttgggatctcggttactgcggaacaacatgtaagacagtagtttgcacgtacagtatgcgcggtggcgcttatgttgaatatgatatatgtgagtaattgtaaccgggattagggttattaccctaatatgagcggttaatagtttagggttattaccctagtgaaatgtattgtgtaaatgctatgccatgctatgtataatgagattatggattatgcgttcaaggcataattaagctagactcggtaaactagtaccttgagtttaattttaatgcggtcttgggttattaccctagaatattatgaaagtaagaaagcgttaatatatggtaatgttattaatccaatgaaaatatgagttagggttattaccctaagattttatatgatgtgataaatattgaatacatgcgggtatgttaagcgttatgtgtataaaacataactgggttagacctggtatatatcaccaggat

SEQ ID NO: 362437 - DNA, 829 bp, Cannabis indica
tggcctcaactagagaagccgagctgcttgatgtgatccatgttgatgtgttaacacacccgactgtgagtcgagaagaagtgatggaaatagatgttgccagagaagtcacttggattactccaataatctcttacttggaaaagggaatcttgcccgatggcaagatagaaacaagaaaactgggacagcgggctgcctgatatgtcatctatgacggaagattatatcgcagaagcttcagtcaaccgctacttaaatgcattgacggagaggaatgcgactatgtactccgcgaggtacatgggggtatctgcgggaatcatactggtggtaattctcttgccttagagatcatgcgacaagggtattactggcctaccctgcggcaagacgcttttaacttcgcaaagaaatgcgacaagtgtcagcgaatagccacgtatgtccatcgacttgataggtgaattaccaaaaggaaaaggcaaagtcaagtacgctgtagtagcggtcgactattttacaaaatgggccgaggccaaagcactagcaaccatcactgcacttaaactgtgcgagtttgtctataactccataatctgtcgatttggcatcccttacaagctcatttcatagaacggaaagaaatttgattgtaaggagatgcgacagttatgcgatgaattagggattaaaaaggcgttctcagcagtcgcctatccgtagagtaacaggcaaactgaagcagtcaacaagataataaagcacaccatcaaaggaaaatgcgtaagggggtatggccagatgagctttcacaagttttatggtc

SEQ ID NO: 362438 - DNA, 855 bp, Cannabis indica
ttctaatatagtaaagttgtttgttattattaattattaaataccaaaaatgtttttatataaatagtcaaatcattcactatgctcagtctccaagtacttcatgggattaattttttgtcttaattaatttttgcaattttatatattaactaataagtttattaatttgttttgttcttcacttcatcatcataaataaatataataaattcatatagaaataaattcaaaaattaaaaaaaaaaaaattaagagaaagtgagtccccactttcatatatatacgtagcaataataatgcatggctgtgtacagctatatatataatgtatatatatatatagatatatagatatagagatatagatatatatgtagttgacacatacaaaaagagcaccgacatagtgacaccatttcttgatctgatttttaaaatggaatctcttctatactctcatctcgtgtactaaaaacaaattaatatttaattaattatctcttatattaatcattactaataataatacatatatagagttattaatattattacaattctataattactaatattaccaaacacaataatttctcataatttactattaattattagttattttacgtaattttactattatttataggtagagatatacaatatacaatgtaatatatatttaatatttattgtaaaaaaagttacatattattttatcttttaacagcataaaaaaaaattcttaaccaaagaataatgtcgttgaaaatgaaaaaaaatggcaactgatatatatatatatgataagattttattttgtatatatatatatatatatatatatcaaga

SEQ ID NO: 362439 - DNA, 839 bp, Cannabis indica
tataaactgagatgcaatttaatggacatgtattcaagtggttggtgaatgttggatcacaaagtaggttgtttattaaacaacaaactatataattgaatgtaatataagttttagagtggttaaccaagtatgaagatagtgatgaattcaaagaagcaatggtagcgtatgaaccaggaagtgaaatcttagtggtaatgatggaaaaagaacatgagagtctcagatattgatgaatcagcaccatcaacgggagaatcactataagttggtgtggttgttcgtaccaagtggttgtcaataaaacaacgaatatacttgaggtatgtatatttttggatgtgtttgaatagattatcaagatttctaccaaacacagaaaagaaactttgagatcaagaaataatctctgattaattgtttatcagttgagaatgtaggaaatgggtatttccaagtaaattatgggtaccgatgtatgagcgatgttgcctctaccgtatagactggatcaattcactttataatggtggttaaccataaatgattgaaattttaaaagttgtgtcagttcaagggaaattgatacgagttaaaataagtggagatgagcaagatttaagttgacgataagatggaaatttctcaagtttaagtgtataaaattgatgaggaattgtaagatgttaatgaaggaagtgatggaaattagatttaattaacgaaggaatgaatggaggaaatacaattagtgtgacagtcagtagtcccggtatctgtaaggggcgggtaagttgtacaatcccacaccacctggggaaggtcaagtgggatga

SEQ ID NO: 362440 - DNA, 513 bp, Cannabis indica
tcgttctcaaattattattattaatatttttatggtttatctcaaaaaaaattattattaatatttttgtagaggggattactataaacagtgacaaaccacaatttttatttgtgggagcttaattatcattaaaaaatatttatactgactctttctagatttatttaattttgtggaggtttttttattattttggtttataattatcaaataaaaaaattacatataatttttgaaaagacaatatttttgttagtagagctataactcccacattcatagcagtaaagatatgagatatgtattttatttgtaattttgtaccctagaatgttttaaaacactcattttattttttaattgatttttttattacgttttaattaagaaaaaagtttcaatccatttatggcatgtttactaataagtaatgggaatcaatggtaaggtaatcattcccttacatttgtttacttatattattaaaattaagaaagggagaacttgatt

SEQ ID NO: 362441 - DNA, 482 bp, Cannabis indica
ttgctggagccttcggtgcctcagttttgagttgagggcaatccctcttgtaatgccctggcatcccacattgaaagcacccttgacctctacaatcccccagatggttccttttacaacaggggcactctgggtaagtgtatcgggtctcaaaactaccctagtgactgcctcgaccttagttcccccggaacctcttgttctgacctgagccaccggttgcagtggatgctttccatttctgatccatggccaaaccactacctcccttgttaaagcctgatgcaggaggggtaggagccccgccaatcactggagtccaagcagactccgtcatgcatccaactgcgccctcagctcgcagtgccttttccaccatttcagcataggtggttttgtcatcagcagtaatcattagatcatgtctaatcttcacattcaatccatctagatactttcctttttgcagaaatcagttggca

SEQ ID NO: 362442 - DNA, 537 bp, Cannabis indica
atagacctaatccaccttttggagatgactaattccccgccagacaatagggttcaaaaccctttgtcataactatcatctggtctagccaatttactaaaaattcctgctgccacataagaatgagtgaccctagtcaaataacacagagaagtaagagttgttgaccgaaagctgacctgttacaattgaggggctagcctcttcatcagcctcagttagagaaaacaccctagctagagcaggtttttattcagtcttttgttcttctttctgaagttgttagttgctgctaggaagcatggtttggagtttttcggacgaagaggagtagacattaaggaaagtgagatgcctaataggcagaccacttgcttagacaaggttgttatcagttcttaacctccatcattaaaaaaaatcactgcttccactactactaaaagggcttttggctttggtttttaaatgacatataaagaatttgcttcggtttgtgtaactgatgctatagtcgtagacgcaaatagtgatatt

SEQ ID NO: 362443 - DNA, 537 bp, Cannabis indica
tctacgatgctttttaggtcttcttggtggttttttcacaactagtggtagtaactcttcatcgttaaattgaggccacatcgattcattaggaattagatgaataacttgctcaaatgtttccttcacatttatgtagtgaagtatagagagcaataattggctatgtagctatgtaagcaatcacatggatacatggtattcttctcacttgccactagccacaagcaaaagaattcattcagccgaacattagacattttttttttcataatccacttgaaattcttcgtcaccaactcttgtcaccaatgcaaaacgtgttttttttttattattatttcctgaaccttaagatggacttttggagtgagcttatgctcccatttgtcagctgtgaattttctttcatacatcatggctatttattgtattcttataccttccaacaactcaattggggccttgtatcgattatcttctatccaatcgttgaatgactcaacaaaattatttgtgagatgttctaccttcaca

SEQ ID NO: 362444 - DNA, 947 bp, Cannabis indica
tgaaatctgttggcacaattcccgaggccaacctcgccaaccgatcaaacttcgtcgtagactctgtcacactcatgttttctttctgggtcaggtgagtgaactcttttctcttggcacttctaacggcctcattgtagtactttgcattgaaaagttcctggaacttttcccaggtcatcgtggtgacatcgtgaatcatggacaccatgtcccaccatacttatgcgtcctctttaaactgaaatatggcacacaccactctgtcattcccggtgacgcccatgaaattcaatatcttcgtaatcactgttagccactgctcggttttcatgacgtccagacctcccagaaaaatcagaggtgcctgcttgcggaacctttcatacagaggttccattctatttaccgctaccactggttcggcctggacaacaggggcaggtgccactggaacttctggtacaggcactgcaggagcaccctgctgtcttaactgctggatctcattatcttgttcttcaattctggcttgcatttttgcaaacctattttcccaattctgggcttcctgagtggcttgggcagcctgggcaacctatggcgggttaacataaccccaaccacgagccctgcccctgggacctctacttcagccccaagcatttgggggaaactgagctccctgaccttgatttgacccgaccgagttgccctgactcctggtatttcgcctggcgtccatctagtctgaacagcctgcgaaaccaagagttggcatatcaggtcatgatcaacgagagcttactaatgccgcttaatttgaaaattaaaaacatgcacctattctactatcaggctactaacatgcttcctaacaggcttttcttaattcataataattaaaataagctactaaagcaataaaagcttactgaaccgtagaa

SEQ ID NO: 362445 - DNA, 525 bp, Cannabis indica
ctcgtcttttactggacttttgcatcccgagacctcaattattccaaagaacctaaaaacatagaaaacaagcgtaattccgtcctaacacagtgaaaacgcacataaaatcgatccaaaatataggctaaaaatagcctaacaatatctcgaatagaatgccaaaatctgttggaaaagatgacaagtagaatacgaatgtggagtacaaggaacctatcttatatgggtagagtaaccttgatcaattcagttttgctagctatacatacatactgggcacatatttttattctaccaaagaaggtcttgaaagacatagaagcaacttgtcgatcctttctttggaaaggcactcaagaaggggctgacctggtttagtggcctgggattctgtatgcagacctaaagcagcaggaagcttaggctttcgaaatgttcaccactggaatataacagctttggggagatatgtttgggacatagctagtaaaaaagactgtctctttgttaaatggatacaca

SEQ ID NO: 362446 - DNA, 614 bp, Cannabis indica
tctcgctgaatcttgaactgtttcaacctagtgacaagttgaaacatgggagaaccaattatcttttttccccagcaatcaattagatagcctttatattttgaatgtgatctctattttctgctttgatgctgtaaaactttacaattggttgtaatgttaattttttacaaccatcgaataggggtttatctacatcacttagaaattattaaattttttaggatcattaagaaatttctctcgtgcattgtcaagcaagtccaatgaatgattatcaaaattattacccttaatatcaactacccccgcttcgctaatggatatggatcatcaattaaatgtttgccatgctaataccaagtagaataacttctattgaaacctcttaaaacacatgatccttaatcatcgtaatatttccttttgatctattacaacaatctacacatggataatgaatagtttgggatttctagaattctttagggcaaactctttatatgcatcgaatcctgcttgaaatcggagtgtgtctctctcctcacgcatcaataatttatccataacaaaaatcctaacaaaaaaaatacagtatttagtaactaattata

SEQ ID NO: 362447 - DNA, 618 bp, Cannabis indica
aggtgtgttctgacaggttggcgcagtatgtcacaaccgagtattcgggccgaacgggttcgggcccgaaatgtaattggcattttaattattagtgtgaataatctaaaattgattagagtttaaatgagcatgaaattgcttaaatgcccttgtgtgtatgcaagctttattaaccctaggggcaaaatggtctttttggacctttgatttatgtttaataaaatgaattttaagggaaatgaattagaaatttctggtgtttatccctctctcacgcaacccctctccctctctcaagctcgactcatggtgcagtaagtattgagagtaaatactttactgtttgtgtgatcatctgtttaccgctttctattttaggcagtatgcaagcatctagagtatttatgtgttatgtgatgccatgctttaaatgttatatgattgcgtttatttagatggggtaaatagttgagttagggtttaaggcaataagtgcgtaagtgtggtattggtgctcaactcgctggggttattgattacatgggtactagtaatggaccctccacaatcatctagaccacagggcgagcaagtagagcctggggctgcccaaac

SEQ ID NO: 362448 - DNA, 862 bp, Cannabis indica
gagcggcttgtggcgacccggatcaattgcttcaactagttctttctcttctctttaatttttctatgctattttctgtttcaattttaattatggatttgattatggatgttatgaactaaactcctatttagggagatgatgattgttgattgactttatctttagttaatgataattgctatttctcctttcttgattgtgaaatttatccatatttgtgttaattccatgtttaagcttgatcaccttttacatgttctatgatctcaattcaaaatctgaaaagtgagaattgagaatgctaaaattggataaactaggttttgatgtgaaacgaaagtatttacatagcctttgtgacaattagattattgcgtaatgctgattatatgttagtctaattcagagatgattagataacatgtaatttagggcctaaaagatctgaaaagagttaggttaattttataatctgtcattcacattgagaaagagagtagtaattagcattaacaattgggtaattaaatcaacatgattcttttccctaatttctcatccttaattaaacaactttactgctttctttaattttcttgattatctttatttcaaactttattaaaattatttttatctgccaaatagaatcataaatctagtttagtggtattcagttcaattccctgtggttcgacctcacctgtgtgagtttactacttgattacgtacacttgcgtattgttttataattttcgtaacagcaggctaagtcccattaatggacgcctagcgaaacgtcagaaggtaagttgaaatggttgagaccagaggtggtcggggtggtagaaatccccaa

SEQ ID NO: 362449 - DNA, 830 bp, Cannabis indica
gtagcgtgccttagcattagggcgttacaactgacatgcctgaagatattcttgcaatacaagtgatagcacctcctgaagacaagactataggaagaccaagaaccaatcgcatagcttccaaaggtgaatttcttaagaaacaatataattgtggagcatgtggacagtcaggacataatttgcaaacatgtccacaagtaccatcagatggtagaagcacaactcatgtgtgatttattattatttagttctctaaattatatatttaatgtttcttgtgtttgatatatgcaaatttttatttatatctatttgtaaaatttatgctaattaaagtacttattatggatcttgtgcgactctgtgcgactatgtacgaccaattatatttcaaagtatatcctaatatgtgtttatgcgaccctgtgtgattatgtgcgaccatagcatatttgaaactgtattctaatattggtctatgcgaccatttgcgaccatagtatatttaaaactttattctgatattggtctatgcgaccatagtatatttcaaaaatatatcctaatattggtctatgcgaccctgtgcaaccatgtgcgactatgtgcgaccatagtatatttcaaaatatatcataatattggtctatgtgaccctgtgcgactatgtacgaccatattatatttcaaaatatatcctaatattggtctatgtaactatgtgcgaccatagtatatttcaatataatcatttaatacatgatatatatgacaataaattatttaactatattttctaagttatttcattaagtatgtatgtgtat

SEQ ID NO: 362450 - DNA, 997 bp, Cannabis indica
ctattctatttctaaaaaaaattagaaaacaacatattacaaatattgattctgattttgaatattgtatactaaacgtgccattagggtttacgggaatgggaatgggccaaggtatgggaatgggaatgggaataagaatgagaatgggccgggaaatgggaatgggaatgagccagggaatggaaatcggtcagggaatgggaatgggctacgaattaggaatgcgaatgcgaatgggaatgggaatagcaatgtgaatgaaaatgggaatgggaatgggaatgggaatggggtagggaacgagaatgggccaatgaatgggaatgggaatgggaattagggtttaaggtttggggttttagggttttcgcatttaggattttgtggttttgtggtttggggaatgggaatggaatagggaatgagaaagggaatgggaatgggcatgggtcagggaatgggaatggcaatggcaatgggagtaggaatgggaatgggaatgggaatgagaataggccaggaaatgggaatgggaaggggaatgtgagtcggagtgggaatgggaacatgaatgggaatgggaatgcaattgtgaatgggaattggaatgggaatgggtcggggaatgggaaagggaatgggaatgggaatcgaaatgcgaaggggaatgggaatggggatgagaatgagaatgggccagggaatgggaatgggtatgggaatgggaatggggatggggatggtaatcggaatgggaatgggaatgggaatggaaataggaatgggaatggggtgggaatgggaatgggaatggggtgggaatgggaatgggaataggaatgagaatggaaataggaatgggaatgggaatagaaatggcaatggcccggggaatgggaatgggaataggaatgtgaatgcgaatgggaatgggaatgtatcggagaatgggaatgggaatgggaatgggaatgagaatggggatgagaatggg

SEQ ID NO: 362451 - DNA, 656 bp, Cannabis indica
catgaaccagtttagagcattcaggcttgtgatttgatcaatcatgttttaagtccaattcctcaaggccatctacctggtgaatgtttcatagcttccaaacaaatagcaagatttggtgggctctgttttaaactgtttggggagttctctgaaaagataaacctgttttaggaatgagtgaacaatttaaaatcatatcattttgttggccactggaaatcatatctcagttaatttattttaatgcagcaaatggcaaatctcatcaagtatacaaaattatgggattttgaaatactttttaagtttcatgtagagctaaggtttagaagggaaagggttagagagtaggaagaatgtgagttttgtcaatacaaatgacgactcaaaagtacaagtctctaaaggccaatcctgtattgccaagttaaatagtagcccaagagtaatcctaaatcaacaagaaagtcgtttggaaccaaaaacagaacacgagaattaccaatgagagcattgtatcaaatgggagaaatcatcatcggcatactaaacctagaaaaagatagatttaaacatattgaatcctagaaatcctacagggtgattatatatgcacaacttagagacaagaagtatgtactggggtggaggta

SEQ ID NO: 362452 - DNA, 646 bp, Cannabis indica
ctcatcatcaactctcgaccactgtcgttactaacaagaatttgacggcccctgcactacttccacacccatgctaacaagcttccttttcaaaaaaagcgcctcctgcagcttacgatgtccctcaagcaaacacgacctagtgtacgaagcatacagtatggactacctaataaaaccttgtctgccaacgagtttcaaacattttgttgcgcatctcaacaattgcacgtggtagttgtctttctagcatcctttcacacgcctacacccccgttcacctcccactgagataaacttggctctgataccaactgtcatgggctcaccttttcaggcaacgaaacacttgtgcagcaccttgacttctctaagccaaggttagccttctaaccatccgagtaataatgggctcatttttcacatgacagtgtgcctcgtgcacactttcgtctctcgaaacaactcctgtcgagtcatgcacgcaagcatccatgagtgcatccatgcatcagggctctctaaccaagatactcgcactgtccataggttcccattatggtaagacaaatcccaacaaccgacgatcacccagtcacttgtgaccaaaggtgcatgtgtggcaagatgccaacaccaagctgac

SEQ ID NO: 362453 - DNA, 646 bp, Cannabis indica
attcaacataaagaaattaaaaggaagagagaaagaaactgttaaaggaatgactctggatcttcactttgctacgctagctgctctccactgcgttttaggtctcaaaattgcctcccccaattttcaatcgcagttttgtttttatttctcgtttttagggttcaaaagacaaaattgccctcgctgtatgggatctcgccgcggccataactctcctcgccgcggcgagtgatgacgtggccacggcggcgaaaactctcaccgcgactactgaagcccccaaaaatggtctctctgccattcgacttatggtcgcggccatggtcaggctcgccgcggccaaaagtgcaccgagcctcaatttggcgtttttcttggctccacttttctttgattgcacttttatatcccgtggcctccataactctgagaaacctgaaaacatagaaaataagcgtaattctgtcctaaaacatcgaaaagcgaacataaaagtgatccaaaatataggctagaaatagcctaacagtcaacaagtgaaaaaagagaagaatttacttgacccaaataagaagcaatttaagaagggaaaaaggaataattctacaacagcaaagttgtccaaacaacttgatgagatttg

SEQ ID NO: 362454 - DNA, 811 bp, Cannabis indica
cacaaatcaaaaataggtaggggataactggacctccctgcctaatacctccacttaggaacgatagaaccaaaactttaccaccatgaagtgaatcttgtaagtaactgaagacacacagtacataatcaacgcaacaatttgactagagaaccccatcttaagcatcatcagtttaagaaaatcccattccaccctatcatacgctttactcatatccaatttcagagccatattacctgttttgcccattctctttcttttaagataatgcattatctcaaaggaaatcatgatattatcataaattaatcttccctgtataaaagcactctgagtttcaaaaataacataaggtaaaacaagcttcagtctgttggcaagaaccttagatatgactttgtacacaacattacaaagcgagataggtcgaagatccatcatagtttcggttttttcttctttggaataagaacaatattagtttcattaagcaaaggagaaaagtaacctgaatcaaaaaacattcagacttgcgagataacatcatcagccaccacattccagcatttttgaataaaacccggagtcatactgtctgatcaggtgatttgtcaggatgcatttggaaaagtgctctgcgaacttcatcatccgtaattggttccaacaacaaagaattctgctcagccgtgacaacactttgtatagcatcagtaacctcccgtggttccaacgaagaagaagaaaataacttgctgaaatgatcaaccataaggccttccaagttgttctcccgatcaatccacac

SEQ ID NO: 362455 - DNA, 651 bp, Cannabis indica
gtaccataactgtacaagtgttgtcatcattcttaatattttaagcatgcatatacacataacatatacatacactcaaatatcaatatcacacactctatacagttcttaccttctttccagattcaagtgtgctggctgaccttaacggaaagtctcgtgctagatggatgccctaatcacatagtaaaaccaggtaaatcacatgatcaaaaccctaatcctgggaaacctgaacctacaattctaggttctgctatattctctagggattacactaacttagggaatagggaaacacctaactacggcactgaaatggacgagaattgagaaaatggagcattcggggaccctgccgaaatcggctagccagttttagaagtactggtaaaacgggctagctggtttacaacagttcaccccaaactttccatttctttctcaatcctccaccaaatgcaaccatactttccagatttcctaacaatgcatacacaacataatccaaccagtatttcacagaaaaacatactaaatcaatttatgcaataggagatcaatgctttgaactcaaagctcaaacttgcacaaaacctaattcaaacagacacaccagctgctaggaactaaattcaactcaaatgaacc

SEQ ID NO: 362456 - DNA, 541 bp, Cannabis indica
tggtaaaataattccaacagaggcaacctcgaactagggtacatgatatccctcatggcaacgagggagatcttgggactcaacctagggcaggtgggttgctcccgagacatcgtcaacgtccttctcgcactgatagggaaggggcacatacaaattccaatagggggcatgtatcaatccattctcagaagagaaggcgacgaggccagttctagttcttaacgtacaaggactcgtagtcgatcaacgtgaggaggagatagaacccgttgcagtactgatcgagaaagtatgggcacaagtagaacagagagttactcaaggatgaggtccgtgagtaactatgatccacaatagccagatcttcgtaatcaattgaaccaaaaaaaacctcaccttcatcaacaactcaatcaaaagcaaaggatcatatccaattgcgaatcaacaagttggaggacaagttcaggaggtaccaagatggggaatttggaaaactgcctggctacgactcggacgaggagcccaagcctttcca

SEQ ID NO: 362457 - DNA, 529 bp, Cannabis indica
tttttttttttacattatttttgtgtcaatttcaatatgtaaaagaaaattatatattttttaaagaacaaatgctattttgaatcttttattttataaaaattatcaatcagactctattttttaaatgacaaatctgacaatatactttctaaaatggtatagaataatactctaagttcaattttgtcaattattttttaatttaaccaacttgaaataagtttttagtacaaatagatgaaaatatatatataatagtctattcataactcttctataagttaaattattcatgtttgcaattgtcacattataaattgaatttttgagttttgattcaattatttcttgtaatgatgatcaataatgtgttgccactatggaataaggactttatgttcttagaccagatgaaccatttgcgcttaataacgaactgtttaagatagctaaacctagaaactataaaaagcaaaagatcgataataaagacgaaatatatctatgacatttacgtcttggtcat

SEQ ID NO: 362458 - DNA, 537 bp, Cannabis indica
ttttttttgaagtctttgttgatcaaacctttctgacgagaaaggaggatcaaactgttacgaacaacattttaactaaaaacctgtctgacgagaaagaaaaatcaaaagttataaatgagatgtaactcataactcacgtgtataatactaacggctcgcactgtataggaaagtattaaacgagacatcaaggtgtcttgataaaagtacttaaacctagtgtatgaatagacggtctaactattcataaaagcaatcaaaaagtttacaaagtgataaatcattaaaagtatatttaagtttgcgtaaaacagattataactattattgcgaggcagaattaataactgctcgcagatcaaaagcatgataggtaataaactgctcgcgcacatagtagataattaactacttagatattgttagaggaaaatacgagaaatggaatggcctaaagtattttgtatttgatcaaattataattgtttgaattgtgaataaaaacgcaagcaaacaagtacatattaaagttca

SEQ ID NO: 362459 - DNA, 755 bp, Cannabis indica
agagcgagattcagaacttgatatgtcagcgcgaggctgtgaccaaggaatggaatgatgccaagtcggagaacacttgcctaatcaaagaagccgtggaggtgaagaggacccacaaggccgagcttgaagctgctaagaaggaggcaaaagataaggccgaggcatgctagaaactctaagagaaataccagaaactccaagaggaacttaatgcagccaaagtaacactcgatggaaaagaagctgaaaccattgagcgatgcaatgctgttggaatacgttccatctacgaagcctgaatggcgaatttagggatggatacgagtttcctgagaaagtctgagggggaagtccttgcatactgcgagaaggctaagaaggaagacgaggaagccaaggcagaagaagaagaagaactgtccaagtctcctaccatgtaggcttggtttttatttatttatttatttatttttttatttttttatctagtcaaatggccttaaggacgagacaatggtttgccccttgtggcacttttgtaaagacaaatttgcaaggttggatggccaactttgcttttattttatcttttattgaatgctttgtacttttgaacttaatatatttgtttgtttgcgttttcattcacaacttaaacaattatattttgatcagatttaaagtactttaagcctttccattgctcataattttctttgatattatttaagtagttagtaatctactatgtg

SEQ ID NO: 362460 - DNA, 850 bp, Cannabis indica
gagttcatcagatacctgaaccccgcagtcgcccagttcttgtggcgaatgtccctggtaaccctaagggagtgcaagtaccccgaagtgatatcgaaccccgttttcggcgcaaggactgtccctatgaccaccaaagaaaatttaatcagaaataggctgtctgcctcaacgcactccaacaaagatttctccaacattgtcaaggacacggtgtactcgacaacgttcaatatctcctccagatatcgagtgtcactatcaccctcggtgactacaggatcccctccgtcgtccacccccataacatctccgaacatcgcggcagataagtgaattttcctcccatacaaatccagtatgctagtggttgggtcaacatgtttgattaaccaactcactagtcgggtgtcaacgtatggtgcatcctctctgatgaatgatccaaatccagcattttggatcacatctttctgctccaggttcaggttcttgcaaatcctcattaaacggttgaaggagcatcgaccgtacacagatgcttcttcactttcaggagcaccctcttcctcatccacctccactttcttccccttggcatcagctgcctttggtttcctcccccttgtttgcaccgccttcttagcgggattagggttagggtcatagcttctccactcagacttctcctcgtcggtgaaacctttatattgcactttcaatttgtcggtagcctgtaatatgaggcaaacttacatcaactacagagtacatggaaagaatcttaaagtatgtcaaacattacgatgaattacagacaattgacataaaaaaattgagtaacagtcga

SEQ ID NO: 362461 - DNA, 785 bp, Cannabis indica
actatctttcaatattctgtaccatgaagacatggagaaacctaatccaatcctcgagagatgaaattacatgaacctacaacctagaagccaacctcagcacctagggtttcacctagcgcccaagttgacattcaccctaggatttcaatttccagggccgtcttagtgcatattggtgaaaatgaaaattgggacatcaactagacataccacagatatatttgaggcatcagaatcaaaatcaaaataagttgatttttgagcacccgatgcccccaaggtcccaagcaccaggcgaataggttgataatttattaatcttggctccttcaaagtgttcaatcaaatactctactttttcatttaatctatcttcatcaaaaaaggggaaaagggtccttttaaaggaaaaataatgattcttgggcacaaaatataaggcccaacgcataggttgaaaatttcaaaacctaggccacaaaaaatagagtttttcaggaatactttttggaaatctcttcatctacaaaaaatattaaggttcaactatttttgggcaccaaatagaatttttgaaggggaaaaactgggacccaacgctgaggttgacacatgaggctaggcctagcgcccaggttgacacttaggttgggcccaacgcctaggttgacattttgtcaacctggttatttccaattcaatttagcaaaaacttttccgagaatttttactgtcataaaaaataacgaagattgaatgaaactcagagagaaaatcacaaa

SEQ ID NO: 362462 - DNA, 798 bp, Cannabis indica
taacgccctagctcttagtcatgtcacgacaactgattatgaaatcctaataccctgaacttggattactagaaaggtaaccacaggaaaatttaaactttatttacaatagtatgaaaactaaacttgcaataaattttacctttacaaataaacaaaaaatacattttttgggatcccgtaaatattttcacaaaatattacaagttcatttcataagccgtcctaagcggcaaaaaaggacacaacaagtatactatataatatctgattgtgactataccgcgatgacttgtcagaatacacctgaaaaaaggacacaacaagtatactatataataatatagtccataagcacgtcacaacactaaaattacaattttacccttctcgggtcaaaatggcaaaaatgcccccggctcaccaacggggtcttaacatgtcatttctcaatttaattcacatataaatacacaattaactagttagggtttgctaatccattttcttaatcttaggatattacaattatcccctccttatagaaattttgtcctgaaatttacctgaccaactctagatatttctgctgcatatccatctcaagttcccagattgcctcttcgactttttcttctatcaagtacttgcactggtttttccacatatgatagatctggctgaagttgcaatgctttatgggtctgggatatatttttaaagcatcaaaacgtgaaacacatcatgtacagctgccagcgctaggggcataaccaacttgtacgctacttgccctat

SEQ ID NO: 362463 - DNA, 627 bp, Cannabis indica
tatgacctaaaaaaattaaagaaaatggcaaaaatatataaacgtgattgaatagtaaggagctgggcgtttaatatcggtacacgtttcaaaagtattaactgcattttcatgaaataaaatttgtaagtatataaataaattaataattaggttgtgcagtgtaattttctcaaaaaaatcttactttgagttagcataataaatgagtaaaaagtaaaaaaaaatgcgattagaaatatttattattaaatttaggcgtgtgttatcatatatcattaattttaatgattaaaattattatttttttgagataaaatgattaaaagtattagttacaaaaattacaattgcaactaaatataattttagctataataattagagttatttgcagtataacctccttaagtagtcaggtgtttgcaactaacccccaattctaaaattttggtggtaaaacctcctaaaaccaagttttgttagcaattagtcatttccatctatttttggctgttaactgccatggtagaatgtccacgtgtacacagtgtacacgtggcacaattttattggtccacgtaataaatattttaaaaaaataaataaataattttaaaaataaaa

SEQ ID NO: 362464 - DNA, 682 bp, Cannabis indica
acatcaatatttcactcgtgcctgaagttcccaacaaagaatggggtagggtgtcttagagggaatcaacaatctgctcgggaatgttacaaccttgcagtggccaaggctaagaaggaaatatcctccagccagagcccaaacaagggaaaaaacattcccaagtaggaaacttcccaaggcgaggatgaagatgtggatcctcgacttggggacccaagcagcaatgttggacttgtggaagagttagaggagatcgagatcgatctagctatcccggccagaaagctaaaaattggaaagggtttgttgctcgaagtaaaatcataattgataaaatttttgagagcaaacctggacattttttcctggtcacatgtggatatggtcggaatcgacgcttctattatttcacacgtcctgaatatcaatcctaacattcggcctgttcagcaaaaacaaagattgctcgataaataacgagcagtagccctgaaagatgaagttgaaaagctgcgcaacaacaacaacttcataattgaagctttttacctggcttggctcgcgaaccccgtactcgtgcccaagctgaataagaaatggcgagtctgtatttatttcacagacctcaacaaagcatgccctaaagactattttctgcttccaaggatcgatcagctcg

SEQ ID NO: 362465 - DNA, 1204 bp, Cannabis indica
tccttgaactccatcttccaagtccaggatctcagccactccctcactgtggtaagtgttttgtagtttgcttttctccttattgttttctttttcggagattcttacttatacttgtattattttctttagcttgctgctgaagtcggccgtctctccaagaacataatcaaccatggtttcgtcctgtccgattttggggacatggacgaagtcaggaagattcttcaggatcttactgctgagaggcggctttatcaggaggctgctgagcgccgggaggccattgccaaagctaatgaggaagaggccaagcggagggaagcgcaggcggaggcaatgatccgggaggaggccctgcggagagataggctggaggccaggcaccaggaggagttgaggacggaaggtgaagccactgcgaaggccaggcgggagcttcgggaggccagggaagccttggaggagatggctgccaaggtgaggtccttagaggaaactcaccaggcaaacttagaatccagggccaccctggccgcggagctgaaggagctcagggacttcaaggaacaagcctcaaagaaggcaaaaagagatgagcttctttctcccgtctcctgcagccggtgcgccaagcgttttgatgatggcgtcttcatggcttggtctacaaatgaccagaacatcaagcttaccttctaccccaaacccgaggagatgatcgccaagttccgggagaagaagaaaaagcttgatgccatggtggaggcacgcatcggacctcgtctccctcctcgcatcgattaggccgctccgagtttgacccagtacaaccaggatttcactcttctctttttttttttttttatatttgtttatttacagctatttttcttttatttaagacaatatctatatagctgttttatttaaaggggagacaatttctaaggcctgtccccgggccatttgtatatatttagacctgccctttaaggctaggatttttatatttatacatgatctcttttgatgcacatatttttcttttggacctgtcctttggatcaggatgtttatacttatgcttttttattttttttgtgcatactctttttgacctgccctttgggtcaggtatattttacttagtttgttttttgtctgtccgtgcggtataccctagtacccccctgagtggcat

SEQ ID NO: 362466 - DNA, 766 bp, Cannabis indica
gctaatgcccacacgtacttgtaaagagcagcttgattccattatggtattttcctaaaaccaacacccccttccttctttggtgacaaacctgctcccatgccacaagtcctgcaccatgcatcatactttgacccttccaaagaaaggctcgacatattgcttcaagttctgtaattactttctttggtagcttcatgatttgactccaataagtgtgtatagagagcagaaccgagttgatgagtatagctcttcatgcaaatgagatatttctagaactctatgtttcgattctagctgccatcttttttgcaagtaggtacactcttttcctgatatcttcttagcacatattggaattcccaagtacttgaagggaaggagttgcccgctaaatccagttgcattgattatcctctgaatttaagcttcttgcataccactacaatagaaagctgattttgatgggttcggttgaagtccagatgtaagagagaacaattttaaaccttgcatcatgaagtacacactcttgaaatcaccatgacaaaagagaagcacatcatctgcagaagctcaaatggttgagttgtaagctttcacatctttcatggaatttaaattcctgctttttcccaatcttgctcataatccttgagagatactccattccaagcacaaaaagcagaggggatagtggatccccctgccttaatcctcttttagactcaaaaaatccatgcattgttccattgaacatcaa

SEQ ID NO: 362467 - DNA, 1094 bp, Cannabis indica
ttcaatcgatgacacatgacctgcagagatattccgaacatgtctgaataattccaggcaaaaacatccaggttttacttgagaaaagtgacaagcttttctcgttgttgaaaagttagtttagaacctattttcaaaactttattattatctattggatcaataggaaccttgatagtgtctttcgcggcctgggcggttgcggcgtagtcgaggatcctaggatccaaacctggttcgtctttatgcagtatttcttctattctgaatacctcctgtcgaggaggcggtgcctctagcaagtaaatgacgttaactgacttcttttctgctagttttactgcagtgttgtagcattctcgcgagttcgattggactcctcgcacagatcctacgactccagcgggagtagcgaacttcatggtgagatggtagatggatgtcacgatcttcatctccttcaggataggtcgaccaatcacagcattgtatgtcgagtgttggtcatttactgcgaagtcagccattgatttggctaccacgggtggggctcccaaagtgattgggagtttgatcattccctttaacgcgatgacgtctccagtaaaatcgtaatacttaataccacaagtcgcagatccttctcatgtaaccccatttgcttgaaagcctggaaattcaagagattcacggaacttccattgtccacgagtatacgtggacattatctcccccaatgtttgcgacgatgaccagcgcgtcaaaatgtgggtggtggacccacctcgcatcactttccatgaatttgatatcgtcacattcccttttgaatagcttttccggtcattcactcaagtttttcacattggtgagcggcttatccttggcttctcttgcatattgctcctgcgactttctggaatctcctgcgatatgaggtccaccaataatagtcaggatattgcgaggagtcctcgaaccactcgcattttgattttcttctttttcatccgctcgggggtgactttcctcatttttcttgtatttgttgaactttccccgcctgattagttcttcgatttcgtcctgcaaaa

SEQ ID NO: 362468 - DNA, 594 bp, Cannabis indica
caccctacgcagagtctgttcattctggccataagacaaggcaagcaagagacctaagtagctctcacctcccctattcaacaccaagcactacctgcatggaagtaataaggggaggtgagtaacttgacaaagctacaaacacattcaagttaatagtacccaagggtaccttaccaggtaaaacaaaatgtacaaggtcgatcaacgaccaagtaccgtcttaagtacacttactaagccatatagtaagtcttaagttgtataattgactataatggactcactacctagccttacacagagtttccaaaagaaaccatgcataaggctgcagctgtatatgcctctaaggccgtcatgggaccctagccgaggtctaaagagggagaaaaattggttgcccacttggatccttggccttggctggccagggttccaggtcttagtggcggccagaccccaagacctagtctagtggctgggcaagaaccctaattccaagcataggtcgtgtgacaggcagtagtcccgtgatctgtaaggggaaataccaggtaagctgtacaatcccacaccgcctggggaaggtca

SEQ ID NO: 362469 - DNA, 855 bp, Cannabis indica
ataagttaaaaataaaatttaaaatataatttacttttgtagtttataaaaaaataatattattatttaagcatttttcaattgttcttttttcttattaaaattataataccacatattcataactcagcaataaaatatactataaatgctaaaatataaaaatgtgaggggttaaaattgatgcttttgttgcacgtttatgttctagctattatatgtgtctgctagtattttttttttcttattattaatgtatatgaatataataaattaaagtattgaaatatttatattaatataataaataaaaaaatattaatatgattatttttctcaaagtattaaaattaaaaaaataaaattattcgaatttaatacaaaaacataaattaaagtaagtaaaataagtaataaaaatatcaatatctaatagtgggaactttttttttttgttttgagaattaatagtgggaacttgatgttgctaaagaaataaaagtttggcgattaatttatcaaaatataaaatttgaagaccaacttgccaaaatttatatagtttggagattaatttgccaaaaaataaagtttgaggactaactttccaaaatatatatagtttaaggacctacgatataaataagccatatttattttagggcttgagcaaaaattcgtgctaataacgtgttataaaataatatattagataaaaaaataaaaaaaaaaaagagaaaacaaaaagagtgaatgaattttttgtcactaatttattttaatataggctgaattcttatttatataaaaatataactaaaataacaagaaactaaataataaaataaaaaataa

SEQ ID NO: 362470 - DNA, 389 bp, Cannabis indica
aacaggcactccaactgtcatgctcttgatgtcatcaggcaattcccaatcatcctcgtcaccaactggcataattgttccttcatatgtcctcctccaatattcagtcgtgtaatatggcgagcatagtgtgtacgcgctaatacttcgctcctgagatgcagcacatgcatgaggacaaggaaacttcatgcactggaacaagccgcaagtgcaagtatgttcctgcaagtccactacgccaccggtcataactgttcctccagggtgaacctgcaacgtgtaaggcccgcatgagtcaacgttcaaataccgacctttttcaaaatgcaatgtcaagtcctcctccatttctggtgctaggggtttcgtccacttgtcagcttttt

SEQ ID NO: 362471 - DNA, 963 bp, Cannabis indica
aagtgataaagttctaagcctatctgataactctcttcttcactctctctctcatcaacacttgagatttgccaaccttgatttctactttatatccttaagggagctatattaggttccacctatagagatctgaatagtattatcccttagtatcaatacaactaaaatgggagtaggtcattacccgctatcaaaaggggccaggcctctataacaattttatatgggttctttactttctcattctaattgtgtaacacgtggcaaacattaggttcatacgaccctgctgtcagttgaccactttttgatgtaacaatttggtactttcattgagagtgaggataccgtatctaatcaaatgtcatggttaacacgagaagaaccccagtcgcaccatcgccatctttgagtctccctcaaagacccaacagaatatagattttggatgctcaggttccagccacaacttgaattcctgtgaacactgtagatgtggtcaatcttgttatcacaacaggcgccacaagcctggccactacagctagccaaactgataccaacatcccagtggatcagaatagcaggcccttgcctctgagggtggaccttctgctagcacctcccactgaaggaaggacttatgggagacaaccctcagggatagcagtaggatctcgtctccagtactacgttggagacacaggactaggagttggtgagcccgcaattggtgagtcccatgtggatttgggagaagatctcagattagtcagacttaataagtcgttggccaagctagcctaactgaagaaccacacattactgtgttggaatatttattttaccaggatcttagatctactcacaagtatgttgtttaacaccctaaatatgaactttctaaaacgataaattaaacacatataaagttaagaaaaccttacattgatgcagcag

SEQ ID NO: 362472 - DNA, 1933 bp, Cannabis indica
tggaattggacttgatacttggtccttgatgtcctcatcagtatgtgtctgggtctgtgtctgagtctaggtctaggtctgggtctaggtccatgtttcaggcgatgtctgggtataggtcttggtcttgttctgggtctgggtttggattctggtctagttctcgagtcacgggtcttgggttcgggttcagggttgcagcacctggtgcaagtctaggtcttggttccggtcggggtcccagtatcgatcccagccagggtccggctccgtgttcggttctgcatcttcatccagtttttggttgaagtctaattcctattctagggtcctgatttcagttcttattctaattttgggttttgggtctgagttagtgtttgggtcctggtttggaaaaagttccaagttcgggtcttggtacgattgcaagatctagacaccaactacgggttaggtctgtcccccaggtcgtaggtcaagatccagatccaaatcttgggtccctatcttgttttgattcagatcttgggtctcggtccgtattcgtgtccgtgttcgggtctgggtctaagaccgagactggggtcgggtcctaggtccaagtcctagtcatgtttcccgattctggttctaattttgagtatgggtttccaatctaggtttgggtcctaggtccagatcttagtctccaatcccggtctgggtcctgtgtctgggtccgtgtttttgttcagattcgtgtcctgagtctcgatccaacttttgatttgggtccacgtcccggtcttggtctgggtctgggttctagttagatactagttcccagactcaaacccaaactcagacttggacccaagtcaggggtacaggtatttgtctaggtcagggtttgggtctgagtccgggtctaggtttgagtctgggtctaagtttgtatctgggtatgggtcccaaatccaaacactgactatgggtcaggtccgagccctgggtctagatttggatcacggtctcgggtctcagtctagtttcacttcggttcccaggtccccgtttgggtcctatgtcagggtataggtccgaggtcaggtcctgggtctcggtcccagttttgatgcccgtgtcctaggtcccccatctaggtccgagtcctaggtctcggtccaagtccaagcaccggtcagtgttcaagtcttcgtcctagttcgggttcgggtttcgatctctgtctgcgtctagatcagggttcgagtctaggtccaggttctggtccgcgtcctgagttccaatctgggtgtgggttctgaggcccacgtctaggttccccatccaggtctagggccttggtcccggtctgggtccatgttcgggtttgagtcctagtcctagtttcgatttcgattcagtgtctaggttcgggtttgggtccaggtctgggtcggggtctaagtcttggtccgagtttgggtccgggtctgggttcaggtccgaatcccagtctgggtatgtgttccagtctaggtccgagttcgggtcccgggtgcgggtccaagtcagggtctgggtcagggtctcggtctagatctaggtcctaagtttcgatcccggtgtgggtctaggtctaggttcgagtctaggttaatatttggatcccgtatctaagtttgagtctgggtttgggatcgggtcccaagtctaggtctaggttcgggtctgggttttgggttcgggtctcggtcctggtcagggtaaacgaccgtgtctgagcctgagttccggtctcgatttgggtctgggctaggtccgagttccgttctaggtctgggtctaggtttgggtcctggtcacggtcctaggcttgttcgagggtccttgtaaggcagtttttgttcaggttatagtttcgggtcccaggtctgggtcagggtcc

SEQ ID NO: 362473 - DNA, 636 bp, Cannabis indica
atctaattggaaataaggtaatagtttacacagaccactcaacaattaagtaccttatgaccaagaaggatgaaaaaccaaggctgattcagtgggtgcttctactccaggaatttgacatagagataaaggataagaagggcactgaaaatttagttgcaggtcatctgtcaagactacaattagaagaaatctagaatgcaaaagaggtgcaaataagtgaagaatttcctgatgaaaactctttagtttgagggaaaacctgatggtacactggtatgctaattatatcaacttcttggatgccaacataactctcctgagctatctcgtcaacaattaaagaaattcttttctaaggtaaagcattactattgggaagagccaattctctacaaacactgtgcgaatcaaattaattaggagatgtgtgcctgaagaggagatgtactctattctaaaccactgccatgctttaccatgcgggggacatttcaatggcacaagaactgctgctaaagtggtacaaagcggattcttttggcctactcttttcaaggatgctagtggctttgtaaagtcatgtgatcgttgtgagcgaacaggaaatatctcaaggagaaacgaaatgccttt

SEQ ID NO: 362474 - DNA, 546 bp, Cannabis indica
aagtaattacatatttaataaaatatgtccatttaaatattatttattttctgggatattacagtgagtgtagtggcggtagtgatgccgatggtggtggtgtggtggtagttcttgagaagaaaaggcacaagcaagataggttagggtggagatgattagagttttaagggaaaaaaaagaaaaaaaaaagaagaaaataaaaaaataaatgacatatatttttgtttataatttatttatttttataattttgaaattatttttttataatattttaataattaatattgtgtggatcactaaaaatttgctaaagagcaaaacaaaatgagagttcagtaagttttgccgttaaaaatatagtttatgtggttaagtattaaaaaaatggatattagcagctaaatcacctgaactttacgttttgtaacacttaaccacaaaaaccaaaattttggtggcaaaacctaatgaactcccatttcgttttgctctgtaccactccgtccaaaaatcacagttaagtgccacggtggactgtcc

SEQ ID NO: 362475 - DNA, 539 bp, Cannabis indica
gatatttttgaattcttctgtcaccttgttaaagctttcggcagcgttgcttgtcattatgttgtatcgatcacctggacaataaggacgagcccacttttcaaaccctatttgctcaacgtatgtagcaatggcaggttccatctgtttcaacacctcaaaatgtctatcatattccgtcttgttccatccgtaagctacaagccatatttgctggttgcatacatcagtcttgagcttgtgaatgacatttatagtaatatgcttgaagcatgcacagtggcatgcttctgggaaaacaacctcaacagcatgttcaatgctttgatgcctatccgatatgaccataagattttcaacctcctcattggcttcctttaacatccgcaagaaatacttctaagagtcatgattctcattgtcaacaattgcaaaggctaccgaaaataattggttgtttggatcgtacgcaacaacagctaacagtgtttctccatacttcgtctttaagaatgttccgtcaatactaatcacaggac

SEQ ID NO: 362476 - DNA, 597 bp, Cannabis indica
tccacgagggataaaacacctcgcgtataacaacttatccacttttggtttgagtgccccttgtctctcggaatccaggggtctcctcttttgtctctttgctgggtagtttggatcgacatttaaatgatggcagataatattagggtcaatccctatcatatctccatggctccaggcgaactgatccgggttcgcccttaaaaaacttagtagctgctatttcaattattcgtccaggttcttcccaatgtaaacacactttgtgggatttcttgggtccagaacaacttcttccaattcttcaattggttttaataagtttctttcatcttgaatccgaggattaagatcttaatccttcttctcgccttcttctgtcaagacttccattagctggtgaccggcttttctatgatgtagctctatgcgatagcattcgcgagctagcatctgatcaccttgcactactcccacacccactagtgtctgaaacttcaaggataagtacttgattgaactaactacccctagtctgattaatcctagacgacccaacagtatattgtaagccgatggcaggttgataaccaaaaa

SEQ ID NO: 362477 - DNA, 777 bp, Cannabis indica
attaattttttttagttctcatcaatgggtattatccattaagaagtgttccatacatatatatatatatatatatatttatttatatatagaacacttcttaatgagtacccatatatatatattataaatttaagggaaaaaaccaggaaaattccaaaaagggtaaatattacacaaatactgtgggccggcccaatcaacatttgtacagcccacattgaatatattacaaaaataccacctgacctataccttcagccgcacgtcacgaacggagacgatgaaggaacctccatcgatgcagtcggctacgcaaccagatcgagcgtagaacaaccataaattctggcgaatttcgataggaaacgaacaaatccaaggatctaaacagaaaattaaaaaaaaaaagaccagaaaaccgtggagaaactgaaattaaacatttgatttcggttttttatcgtgcaatatcactcaaacgagcgtcgaaaatccagattgaagcaatgtaaatctgtattgaacagatctggagctccccctcaaatccaaaaaaaggtatgaaatgaaatttttttcaacaatgatatacgtcatacacagttgcattctggttgattcactggtgtacaacaggaaattcagattctaaaaacaaaaaacaagaactgattctaattaaggaaccacatgatactaataaggcttttttttaattttttgcgttgccttacagttgcattatcgttttaaaatggtttacaaatcatgaag

SEQ ID NO: 362478 - DNA, 513 bp, Cannabis indica
gttgtcatcccatgtcctactaatttggggacctatattagaggttgaggaatggttggatcgggatccgtccccaccggatctctctgattcactagagtttccacattgggatctatagccattggatctgttcactacaagaaaatcatcttttgccggcgcattgttgctccggcaaagctttgccggcgcagttgtgcgccggcaaagcttatctgggaagcttggtcagtaaaggactttttgccggcgcgtatagtaactgcgccagtaaagcttccttttaccggcgagaaataacgccggtgaaaaataagtgccggtgttaaaaaatggccttatccgccataaacctgctatgataagcttttgccggcgaaatagtgcgccggcaaaactattggcgccatagttttttccagtttttaccggcgcaatattgcgtcggcaaaagtataattttttaaaaaaattataattatattatatatatatatataatatatataa

SEQ ID NO: 362479 - DNA, 805 bp, Cannabis indica
tccataacataggctcgtaacatatcttccagtatctgaatcgtcctttctgactgtccatcagtctgaggatggaaggctataatgaacttgagtttggtacccatagcccgttgcaaactttgccaaaaatttgaagcaaacttcggatctctatctaaaactatggatttcggcacaccatgcagtcttacaatttcattaatgtacaaatccgcatattgatcaactgagaaggttgtcttaacaagtagaaaatgagcagacttcgtaaatcgatccaccactaccaaaattgaatcaaataaacccgtggttctaggtaatccaaccacaaagtccattgtgatatcttcccatttccactcaagtacggttaaaggctgtaacaaccctgtcggtctttgatgttcgactttgatctgctgacaagttaggcgtctctatacgaattctaccacattcttcttcatttcgctccaacaaaagtagggtttaagatcttgatacatcttggtggtgccgggatgcagggaatatggagttgtatgagcctcttcgagaatttcatttttaaattctgcactaacaggaacacaaaccctggttctaaacaacaacatcccactatctgacactgtaaagtctttggtttgaccagctaaaacctcctctctaatctttactagctctggattagttagctgagcagctttagtacgttctaacaaattagattacagcgtcaggttatgaagtttgcctacaacaaactcgatgcttgatctgaccatgtcctctacta

SEQ ID NO: 362480 - DNA, 627 bp, Cannabis indica
atattattacaatgaaagataaaaaagatatatacaactcaattgtaaaaataatacaaggacaataaaagagattgattaaaaaatatgttacaacacacatattgtaaaaacgacttagtttaaattggaaattagtagataattagggtttaattataaaaattatttatttatatttaaataattatttatgttgatttatttgaattcagaatgcatttttcatatttttatatgcagatccaaaatgcagagatattgagttccaagtgggggatcatgtgtttctacgagtttgggatgcgtgctgatgcaagccgattgagttatcgcttatgcttcccgtcagttaaaagattatgagcagcgatatccgactcatgacctagaattggccgcggtagtgtttgctttaaaaatttggcggcattatctttatggagaaagatgtgaaatttataccgaccataaaagtctcaaatatttctttactcagaaagatttgaatatgagacagaggcgatggttggagttagtaaaagattacgattgtgagatcctttatcaccctgggaaggccaatgtagtggccgatgccctgagcaggaagggtcccgggcaggt

SEQ ID NO: 362481 - DNA, 497 bp, Cannabis indica
catcagggtcattggcccaatctgcatcactgtaaccggttatatctaggttggaaggtttctgcaagtaaaagaccatgatccaaagtccctttgagatatctcaacagccttttaacagttttccaataagattgtaaggggttttgcatgaattgggaaactctgttgacagattaggcaatttcaggtcttgtaatacacacatattgaagagcaccaaccaagcttcgatataaatgtggctcaggaataggatcactccctgttgcagagagtttttcaccacagtcattggtgtagttaaaggattggcatattgcatcttggcacggcacaaaacatctgcaatgtattctctgagaagaatcatgccatccttagtgtagtgaacttcaaatcaaaagaaagtagtttaaaggaccaagatccttaaagagcaaactcggtttgaagactttgaatagagccgaatgactgtgagactgcctgtatat

SEQ ID NO: 362482 - DNA, 802 bp, Cannabis indica
ttattattattcaggtgagaatatgggctgttgtacatgttatattatagatatgactttttgtgtagtcttgttcaaacatgaatatcaattaatctcaaaactacaccttaaatattttacttgccatattacaaacatatatatatacaatatagtccttttgttgaccaagtacacatattgactaaattaaacagagcgcaaattaaacgttttttttgttaatatatcacgtgagagccttcctttcttcaccaacctattttttcaacaccagcttagaaatatattaggaaatttacaccatacattttaaattatttttttacatttttacaaacttttttttatttatatttttacagttttgtattgtttcaatgttgtttttactctagtaaaaaattcataaaaacgtaaattttagttgttttgggtattttgaaaataattccaggcctcatggagtgagggccaggggttcgggtaacggctccagccgccctatcctaaggacaaccctcgataactttacattcggctcacatctctccctaggaaaattttatttacacctcaaaaatttataaaagcacccgatttaataatttttactttatacaaaaattaaaatattagtttatacttaagttttttttttttttaaaaaaaaaaaaatcatccttcctatattcttcaaaaatttacatatgaataaaaaaaatatgttaaatattaagtcaaaaaaattatatgaaattttattaataaaaattaaaataggtatacaaaactttta

SEQ ID NO: 362483 - DNA, 528 bp, Cannabis indica
aatgctctatttttactttttgattaaaaattattatttgtctgtttatttttccatttattctattatttggttcttaattataatttactttgtgttatcgaattaaagtataaaattaaaaagtataataattagtaaaatttaataatcaatgcctgtgggttcgataatatttttagtattaaaactttgtgttgaccttgaaaattaatcaaccgacaacggggtcatgcagatctaatgctttccatgtgtttgcacaaataagagtaaaaagtaatagacaatgagatttgttatagagattcgaccccttgtgatagcgggtaatgacctactccccttttagttgtattgatatcgagggaatcactatctagatcgctataggtgggatctactatagtgcccttgggattacaatgtatgaatcgatatttggcagaactcaagtgttggacagcctagagtgttatgcaacataggcttaggcgtgtgaaagaatgaaggagagagagagagaga

SEQ ID NO: 362484 - DNA, 595 bp, Cannabis indica
tagttcaactgagtgggagcgctgatcatagatatggaatctgtagcttttataagtatttagaagtaaaacgataatttccttcgagctttgctgaatagagataaatgattgagacctcattttagtaattattatagtatactgaagtgttatttataagtggctaagtgttttaaggataatatacattgaaaggtagaacggtaaatttgtccctatttagggtagatcatcaatataggatctttgactattaggattgtaactatggataatcataacgtatctatattggggtacatatagagtgttccatataacttagagtgttattcaattccaaatctataatagcacaaggcggaatgaacaagttagagaatttacttggtgaattctagatctgcttattgaaagctcagttatataggctcatagtcccgtaactagttgagaaaatacagattgcagactaagttaattgattttaattaatcacactactacaaaaacaccctttagaggcggtttttaagccctttaggcgccggttttcgcgaaattcgctaccgacgctgatcagggcgacgct

SEQ ID NO: 362485 - DNA, 541 bp, Cannabis indica
aatgactaaaaggtaaaaccacaacttgttagtaggatcccttgacaaaagggaaaaaagaagaaccaagcgaactcaaaagtagcatgtccgcccacagagagttaccatgccattcaacaaatcgattgaggaagaaattctttgcaagagatttactcctagaagaatattccttgatagcatagatcctccagcaagaatgttcagaccgaactaaaaaggtcctcaccacgttacaagatactgataatggtgcatacaagtttggcaagtacaacgagaacttggagttggtacttctacccaaacactaaaatagagaacatttgggtaagtactcttactagccaacttgtcaattagtttctctaacatttcatcatgtaaggacctataaaaaaagctagtatccatttcttttcagcatggcctcccatcactcatcagtgatggccattgcatggtaagccgcgtaggggtagccactacgtgatttcaaaagtagacactaagcgataagcttttgttacacgtaaga

SEQ ID NO: 362486 - DNA, 468 bp, Cannabis indica
aatgaaaacgagtgcgtaatgtgtgcgtgtgtatacacctttcaactcatcggcgatcgcgtcgatgtagagcttaattgtgtgagaagcctgttcaggagtgagttctgtacgaagaaaaacgtcgtcgtttcgaaggttgatgcgttggagagcagatgacttaagggtttgaggcaaagtgagaccaaagagagaggcggaggcggtagaatcggcaaggtcgaggagctgagctccggtaagggagggcggcaaggtgaggtcgaggggtcggaggtgggtcccgtcgaggaccgttaagggtccgtcggacattttgagatgcagagaagaatgagtatgggtgtgatggagtaagaagttgacttgagaattgatcgaccagcttacacttttttctcctcctgttttcttttttgaactctttgtaatgaaacgacaaacgagttttagatttctaatgtc

SEQ ID NO: 362487 - DNA, 709 bp, Cannabis indica
acaacacaggcatactatataataatatagttccattgagcacgtaattaaattaatttcatcatttacccttctcaggtcataattactaaaatgcccctgactcaccaacggggtcttcacatataattaatcaaataaattctcatatattgaactatataataatataattcctctattattcatacatatctaattaggtgtgctaatccatttcttattctagggtattacaatcaccccctccttatagaaattttatcccgaaatttacctgaacaactccggatatttctactgcatatccgtctcaagttcgcaggttgcctcttccactttactattcctccacaatactttcacaagtgccactgtcttgcttcgcaagattttttctcttctatcgagtatctgcaccggttattcctcatatgacaagtcaggctgaagttctaatgcttcgtaactcagaatatgggaaaagtctaagacatacttccgaagcattgaaacgtgaaacacatcatgtacagttgccagcgctgggggcatagccaacttgtacactactcgccctatcctctcaaggatttcaaaagttccaacaaaccttgggctaagctttcctttcttaccaaagcatttaatacccttcatcagagatatttagagaaataccttgtccccgacttggaaatcaatatcc

SEQ ID NO: 362488 - DNA, 1105 bp, Cannabis indica
aaaagtctgtaaagatatttttttattataaatattagttaaatatttggatatatgtttgaatgttaaattattaatattttatattgaatagtttatatatgaatatcaaaaaaattattatataatgttgtgatttgtattgtactaagaattaagatcacttaactataaataaaatattaaccaacatattaaagttatagaatttttaatcaacaattgttatagtacggttcactgatgcctgttattttgtgcaaataatctcaattcagattattaatgtagtataacatctaagtgaaggtattgtatataatagagattatgtatgacatggaccaatatgtaattaagttgtctttatcaaacatgtcgtttgatataaagacataattcatctcataatgatgatcaatagtagatcgacctgaatactgagcaatcatgaactcttagccatattattagtttctttgattcactcgttaaagtttctgagagaacatgattcttacagcttttgtttttggaaggtactaatgtggatggccaggaacttggtttaccattatagaatcttgaatttcctaacggatcaaatgttagttcctgttgcccctgattttgcccaatatacgtggaccaaccggacagtgacacgtggatggaaagggtttagcgtttcaattaaatagctaagtctttataaagcaaagcattattttggatatgcctcccggagaaggcatgcaaggtctcatatgctcccggagagcaagatggcatcaaagcatctccgggtggtgtcaggcttcctctgagcagtcatctcgcatttaatgccgcatgggaggaggcgtattggaactgccacacgcaataaagtctgacggcacaacccccgatctgtacctactaggctatgaccaataaagtctagtgacggctactctgtgaagaatcacatcagtcaagagggattaaggactgccccaaaaaaatccctacagcacctagggattagaccatgcataaccccatgatatattcattgggaatgtacaaactttactgatagttacagacatgcatgtacctt

SEQ ID NO: 362489 - DNA, 1070 bp, Cannabis indica
aaaagaattacccttaaattattttcctaacttaaatagattcttacaaactattcatcagatttaaaattaataatatggaatgaacaaattttaaattgttgaaaaaaaactagaaagtcatcgttttccttttcgatgctcagtcagggctcaactctagccatggtgggtcgcagccgacctaggaagatcgttcaggggacacgacgaagtacgaccaagacggtgaggaagagaggaccaacgtctttggacaaagttcttaaaacaaaatcaatggaggagatcattggggtctctgctttctctatttcaggtgatgaaattgacgaagaagaggacatggagacgaagagggaactggagagggagcgatctccccgtgttgctcaataggacgaagaaaccagatctgaaatagcttcttacctggagaagacgaaaatgtgcgaacgagatgcacgatctggtaagattactccacctgcgattctccactctagaaaattgattcagaaccttaatagcaagtttggtgaaattgaatcaaaacagaaatgtttatttggagttaaaattgaattggatgatatcaaagaagagataaaattttggaaatttgccatagtgtgctatgtattgggggcaaatcctccttttagtctgtttgctggttttgctaatagaatgtgaaaaaataaaggattgcagaaagtgggtttgttggctaaagggatccatattgtgaggtttatgactatagctcaaagagatgaagttcttcaaggagggtacctatttttagacaagaaaccagttattgtgaaagcatgggatccctacacagatttcacttaggaagatgttcgctctgtagctacctggattcaaattcctagtttggatcttaggtactggggagaaggaactctatttaaaatttttggccaattggggaccccaataatgctagatgaggtaacaaagaacaaagagaggttgagctaccctcgggttgttgggttttatgccctaaataaaactctgtttcaatgtaatccagatta

SEQ ID NO: 362490 - DNA, 652 bp, Cannabis indica
gtgactgcgctcaaaaagaggaagaaacttccggcctagcctaggcccgttgaacatgccattcgaattagggagcccagctcacctgctcggccaccttctcccgtactaggaaaagggaaggccgtcatggcggagataaaagacttgtcaggtgatgatgaacttttgagtcttgctcgaacaaatgcttctcacgaagcacgggatactacgtcttgtttttaaacttcttgattatcatgctttcatacttctgatgccttttttcttctaaccatgttgcttttattctaagatgacatgtctcaaaagatgctcgatgctctgaagaagagagttggaggaagctcaagctcatctcctccagccaagaaatctaggggcggcgaggcgaccccagccaaggaaaaggcaccgaccggggaggttagtgatctttctgtggagctaactgtcgcggacccttgtgctccgaaaactgctaagtccaaagattctcgaggaggaagctcggacaggcctgaacaatcgaagggcggatccgagctggccaagagcggatctgagcagatgcgggctcctaccccacctttgccagtgttgggttttatgccgtaaataaacttcatttcaatataatctattttat

SEQ ID NO: 362491 - DNA, 609 bp, Cannabis indica
tactagaattttctagataaaaaagtgtagaaatgtgtagcacttttcatcactcctccttggtacttatttcgataactccgatcatgtctcgcaataattcaaacttgcctcttggtagtgctttagtaaatatatctgctagttggtctttaatcttgcaatgtttaagttttatttcattgtttgtttctgatattccttaatgaagtggtacttgctgtttatatgtttagttctactgtgaaatactagattttttgccattattatagttgatttgttgtcgcaatagacactacaagaaatgtcacttttgctagcacatttttgtgctggcaaaaatcggtattgcgctggtaaaatagaatttacttgtgatgtgctgacaaaagggggttgacaaattaatgttggtattagaacttttgtcagcataaaatgaaaagcgctggcaaaaataacttttctcagcgcgtaaatgcgctggtaaaagttagattttagccactgcaaatgtacgctagtaaaaatttgacctctttgccagcgcagtttgcgaaatgcactggtaaaagtgatatttcttgtagtgagatctttgtagct

SEQ ID NO: 362492 - DNA, 955 bp, Cannabis indica
gctaattgccttttctaatccaatttactaaagcggtcattacaaaccatcccaaaacaaactcaatgtttgcagttgcttagaaatctgtttcattgtattcatctggttttggcccttccttcttagggaatcagctacaacgttggcctttccaggataataaaggatttcacaatcataatcctttaccagctcaagccaacgcctttgtctcatgttcaggtctttctaggtaaataagtatttcggacttttatgatcggtgtaaatctcacatttctcaccatataagtaatgccgccaaatctttagcgcaaatactactgatgtgagctctagatcatgagtagggtacctctgctcgtactcttttaagcatcaccagaaatgacaaatttttccttatcaaaaggaagagttaatactagagcggtaatcaagccctactttaactcctgaatatttttctcgcaccgatcagtccaaacaaatttcagattcttctgggtcagtttcgttaaaggtgtttctatttttgagaaaccttcaacgaactggacgatagtaaccaactagacctaaaaagcttctaacctcagtagctgattttggtgttggtcaatcccgaacagctttgattttggctagatcaaccatgatccaatttttatccactatgtgccccaagaaagagacacgtgataaccaaaactcacacttcttgaatttagcataaagcttgtgataccgtaatcgctgaagtactaatctgagatgtagttcatgttcttcttctggttcaaaatataccagaatatcgtcaatgaacactatcacatgcttatctgggaaatccttgaatacacagttcataagatccatgaatgcagctgggcattggtgagtacaaaagacatcaccagaaacttgtaatgtccatacctagtacgga

SEQ ID NO: 362493 - DNA, 776 bp, Cannabis indica
ggcataaaacccaacagttgttttcatgaatggtcttgctaacaaaattggagtggagcaagggatggaatcatcttccatatcgagaacatagaaatctgctggaaattctaattcattgacttgaactagcacatcttcaatgacacctctggggtaggcattcgacctatcagcaagttgaatgattatcccagtttcttcaagtggacccagattcaaggagttatagatagagaatggcatgacgttaatggaggcccccaaatccaacatacactgctcaatcctagtgtttccaatagtgcaaggaatagtgaaagttccaggatccttacactttggaggaagcttcttttggaggactgctgacacattgtcccccacacttactttttcattaccccttaacttgagcttattggtgcaaaactccttcagaaacttggcatatcgtggtacttgttttatggcatcaagaagaggaatgttcacttccaccttgcaaaatgtttcaagaatttccttgccagcttcttccttcttagtattctttaatctgcttgggaagggtggcggtatgagaatggtaggctttggtggagctggattgtttggcttaggtgcctctttttcatcttctggactatcatctaggggtttggatggcactgattttggttttggaatgataggtgggtcgtagtgttttccacttctcaaggtcactgcactggcattctccttaggatttttctcaggttgggatggtagtt

SEQ ID NO: 362494 - DNA, 566 bp, Cannabis indica
atgtccataaacacttccattttgcatccgctggggtagtatgtgtgatacctttgacactccggcacgccgatttaattgagaagagtccactaggttctcccatccacatccaagcatcccttgtgtcatcaaccggtagttggatattcaagattgctttcgcgtcactccggttaaaccattcatggaccatctccacgttccacgttcgatcgtccctcataaattgacttacccaagcgacaccgtgagttacatcttggagaggggtaggtcttgtattggaggaaggcacccacggatcgaaccagatggatgtttcttctccattaccaatctttttacacacctgagttagaagcatcggtttagctcttagaactgatttccaaaagcttgagtccccctccttcatttcagcatctaagaaacaccttccattgaggtattttgattgaataatggtcccccataagctatccttatccgtaagagccttccatccccatttaaggataaaggctgcattaatagtttcaattcttctaaacccgagaccaccc

SEQ ID NO: 362495 - DNA, 1019 bp, Cannabis indica
tggatttggagcaaaggttcgcaaaaatggaagctatgatccaacgacatgaagaggagattcaaaggttgaaacaacaaaggtctcgtgtagtacattaacctcatatgacagtcattcatgattcggtatcaacagcagagcttcgaatgtctggtaaccaagtggaatcattatatggaaaaattttgatgtgtgaaccttcagtccttcaaggagattcagttatgaaggatgctctttggactggaagctctaaagaatttattctaagacatcaagaggttatgacagaaggtcaggataccactagccttatttcagattatggtggaagtggtaggggctccgtggttgagcagaggaggaaacctacgtcagcagtggtgggtttaagacgaagcaaacagctccgaaggtttcaaggaaaaggtggaagccagggttattcttaccccgagtgcccacgttgcatgaaacaccatcccagagaatgcaaccgaaaagcatgctttcaatgtggcatgattgggcattttaagaaaaattgcccttaggcggagaaagaagagcaagagcaggaagcaaaattgtacctacttcggtgtatgctaatgctcaaactaatgctgcagccactccttctgtaatgacaagttagcttcctgttaacaactccttttatactgtgttatttgattcgggagctacacactaatatgtggctacacgagtaatcgatctttttggtaggctatgtgattttctggaaagagggtttggaaccttaatgcctagtggggagttgcttatctccaataggcatattaggtttatgccagttaagatcgaaagatagggagttgagtgctgaccttatagaactggaattaacagaatttgacaccatacgtgggatggattttctgtccaagtattcggctagtatagactgcaagcggaaaatggtgacttttcagccagaaggtgaagatccatttgtttatgttggatcggtt

SEQ ID NO: 362496 - DNA, 537 bp, Cannabis indica
tatgtaaagatttttagggtttggtcccaaagctaatctttaagggattatttcacaaatatataaaaccaacaaaaaaaattacaaaaatacggttgtacgaaatttgaaacattttttatgattttatttacagaatatacggtatttttatgttgtattcttgttactttgttgttaattttttctttatctgtatgttatttttggttgttgtttttgatgttattttcctgtacttttatatagtttttttgtttgtttctatgaaaaattgtaaaaatgtaaaaaaaaaataaaattggttaaacgtaagaatgaaatttttttttactaaaaataagtaagtgatgtaattatccaaatctttaacctactccttctctgggaagaaaattagtctaccgacatcattaatcaggcattttcttcttattaattctttgagtaatacatgagcttcacattatataccactagaatatactagaaataaaaaggtagaaaaccaaatattctattaaaaagaaagaaaaa

SEQ ID NO: 362497 - DNA, 746 bp, Cannabis indica
aaattaacagaatttgttagacggcaccttaaaaatacaaatagaattacagtttggtaggttttcccactaaattttgagtttagatggttaagtgcaagtaaaataaaagttgggagggtttagccgccaattactctttcatttaataaaataattaactaaatattttctttatttaaatattggtcttttattttttgtgttaaataattaatttttccatcttatatatatttctatccatttttcatcatatatcaaaaataaaaattattttgaaaggaaagaaattaattatttgtgttattatacatattttcattttctagattttattttttttagaaaaaaattaaaatatagtatcattaatattaagaattgttggaaattaaaactatttgatatataagagttcagattatatttcactcaaaagttaataacaattttaataaattagtttgagctttttggtgtttaattttgtaaaatatataataataatattttaaaatattatttataattgtactttttttattagggtcccaattatttaaattaaaatagggccttaaaaatatttaagacaaccctgaacctcacacaagtatgaagtttaattggggggaaaaatattacaccaaaagtaagtcttgatgacgtggacatcaatatttgacacatggcaagaaagatggcatctcaaagttaagtagtctcgagtcataacaaagttt

SEQ ID NO: 362498 - DNA, 523 bp, Cannabis indica
atggtccccatcattgaatacataacaaaaggtgagttgtcccaagaaagggtactgcccagaaagattcagtaccaggctcaccgttatgtgatgatggacaaaattctctaccgaagaggactcaacatgccttatttaaggtgtgtatcataccctgaagctaagcaaattatactagaggtccacgaagggttctgtggagatcatacaggaggaccaagtctctcaaagaaaatattgagacaagggtacttctggccaacaatgaaaaaagattgcatagactacgtccagaaatgtgattcgtgccaaaggttcgcgaacgtaccgagagctcctcccaacgaaattaccctgatgtctagtccctggcccttcgcggtctgggggatagatcttatcaggtccctgccaacaggaaagggaggagtaaattatgcaatagtagcagtagactactttaccaaatggacggaggctgagccaataaagactataactgctaaaaaagcactagact

SEQ ID NO: 362499 - DNA, 831 bp, Cannabis indica
tattctttagggaataagccttttatgaggaatctcttttctcaatctgtttgttgaagggcctggtaactctttgtgggtagacataatgttttgagttagcttagtctcttattatttcccttttgttaagggatcatgctagtaagatgttattttacctcttggtcactatagaccagaagtatgagagcagactattggtggatcaggctagccagggtacagactaggtggccagccacgctgaagcattgcctggccatttggaggaggctatgactagctaagttcttgactctatggtcgaccaacttgtggaggtggtggctagccaggttgattattctatggccggccagcctactaaggccagagtcagccagcctttcggaggctaagtcaatgctgtagtttgattccatctacactctatttgattttcccccagcatgattgtcgtagagcatttgtgaactcctatcaatagctattcagtttctttcttggtaacgctccttagagctggtgttgggataccatgtctatgtgttatggtgtgcaggattggacatcttgtagccatccccctaatccctacttatttggtaaggtttttgtttggaggtatgttactctaggtgtatccatgttggttgtctagcaggtctatttcttttaaaatagggaggcttagttcttgaagaactgagtgggtaccaagtttgccttggttgtcaaggcacaactagctagttgaccgagtgcatcggttgttgtgtcgtctttggggacttgccttttagtatagcctttgagctgacttaacaa

SEQ ID NO: 362500 - DNA, 639 bp, Cannabis indica
cttgatgggaaagaggccgaaaccattgaacgatgcattatctttggcctccgtaccattttccaagcttggatggcaaatccaaagattgatacgagtttattgggagaatctgaggaggaaatccttgccttctgcgagaagactaagaaggaggaagaagatgccaaggcagcagtagaagaagaactgtccaagtatcctactatgtaggcttggtgtttatttatttttattttatttaagcaaatggccttaaggcctagataatagtttgccccttgtggcacttttgtaaagacaaatttgcaaggttggatggccaacgttgcttttaatctatctttattgaatgcttcatacttttatatttgaacttaatatatttgcttatttgcgattttattcacaacttaaacaattatattttgatcaaacttaaaacattttaggcctttccattgctcgtgatttcctttgatattatttaagtagttagtaatctactatgtacgagagcagttataatctgctatgctttagatttgtgagcaattatcaattctacttcgcataaataattataatctgtttttaagcaaacttgagtatattgttaatgatttatcactttgtata

SEQ ID NO: 362501 - DNA, 597 bp, Cannabis indica
ttttgtctaaggcatttgatctcactcttttctcctttttcagattactacggagaccacccgcctctccaggaccaccgttaatcatggcttcgtcatgtccgaatttgggggcatagacaaggccgtgaggatccttcgggacctgtctgttgaaaggcgggcgatctagaaggaggctgagcgaagggaggccctcgctatggcgaagctcgaggaggaggccaaacaaagggaagcccaggcagaggcgaggctccgagaggaggtccaatagagggaggctgagctggaggcgaggcatcgagaggcgctgaaggcggaaggtgaggccgtcgccagggccaggcgtgagcttcgggaggctaaggaggccatggacgaaatggccgccaaggtgaggtccttagaggagttgcaccaggcggacttgcagtccaaggctaacttggccgtggagatgaaggagctaaaggacttcagagaccaggccttgaagaagtctaaaagagatgagctcatgtcccctgtctcctgcaagcgctgcgtcaagcgtttcgacgacggcgtctacatggcctggtcgacaaatggcca

SEQ ID NO: 362502 - DNA, 917 bp, Cannabis indica
atcttttgatgggtcgagtgctaactggcagggatgactatatttgggacaaacaggaaattctggtcactcacttgactccattctatagggttcttcatcgagtagccttgtacaattggtttcctaattctcatttgtctgctgttacccttgagattggcaagttcttgtatgctgtaggcactaatgtatccattgatctgccctcgctcatctttgaccgggtactggaagcatctgaatccactggcactcgtaacaagctaccatttccaagtttagttcaacgggttctcatggatgctcaccctccactcaccacgcatgattatcaagttcagaatccgattctcagtaagagctttctctcggtggtcaacaggaagccttcttcaaccactccctcagcaaccacagtgagtaaaggcaagtctcctatgttcaaagggctctcggattccagctggcaggtacaaatgtttactgagtttcaatcttttgccaaacgctataagaaggatcaaaagcgtcagcttgcctttgaggcctcaatgtatcaaatggtttgctctatcaagtccactcttttgcaccattttcctggggattctctgcctgacatctctctgcctgagtttcatcgtgattcgtttggcgcctcatcagacacatctgggaataatgcacatatgcagggggagccttcagccttggatccagtcactagttcagcacaacctgatctagatcctccagctgacactgcaacaccctttgtgtcgacaggaccaccttcccagggggagtctggcacagcacaggaacctacagatcatattcaatgaagggggagatatatgtcattcgttttgcttgtgtagtggatttgtttatattcctaaaaacttttatat

SEQ ID NO: 362503 - DNA, 528 bp, Cannabis indica
acagatgtgaaataagatattaatataattaaattattattttaaactaaccaattaaattttgaaaatttagggttgttaaaactcattataaaaattcatcaaaatttaaaattcaaaaataaaaactaatttaaaatatctaggtttattttgaattatttttatcaaattatattaaaggttaaataagataattttaaaaaaagtatcttcaatatcatattctaatcttataatttaataaaataaaccaattttaaaatagatgtggttagataattattattttaaaaataaaataataaataaataataattatcctaattatatgtcaaaatatctcaaattaagcaatattcaaatttctacaaaaatatctaagttatttaaatatttaaaatataatttataaatttctaataagtaaaaacatataaaatagtaaaatatcaaaatttttaattggaaaatattatggtaagtatgtctataaaaatatctatgttaatttcaaaatttattaa

SEQ ID NO: 362504 - DNA, 845 bp, Cannabis indica
aaggacatagcacttatctaaggtgcaagtaaactacattgtagattatccaatcagttaaaccctgtgtactgataaatcataggaatacatttagtcacacaatcttgattactttccactgtgttgacaacacaataaacaagaatatcattgtgataaggatttggatgaatttataaatcaaacaaatgatcatataagccaaataacacatgaattagttatgaaataaatctgtttctttattgataaatgaatatgaaagattatattgaaatagagttttatttagggcataaaacccaacaaactccaacttgcactaacataaaacaatcagtacatttaaattaatcttagattcagtttgtgctattcaaatgcagttaaagtcaaaattttggtgaacggataagctaagttgtcttcagtatcaactttctctaccagtaaatcccttcttgccatatattctccgatgatgtggtacttcctctcaatgttttgcttctcttgtgtcttcgaggctctttactattggctatagcactagtgttgtcacaaagtaaaaccaatggtttttccattctaggaacaacaccaagttatgtgaagaactttcttagccaaaccagttctttagcagcttaagcaaaagctatgtattcaacttccatgatagagtttgatgttacggtttggttggtacttctccaaaaaattgcttcaccctcaagagtaaataccatcccagatgtagacttccagtcatcaagacaagcctgaaaatctgagtcggtatagcctacgagatttaaagcaccacccttgtagactaacac

SEQ ID NO: 362505 - DNA, 289 bp, Cannabis indica
gtcaaagtttgggagaaaaaattgctaattagcctaaattttatattgtaaattatttcgaatttctcaaaattttacagaatgtcttaactaattataacatgcatgacttcgaaaaatattaaactaaaaaattattttagatgccgaaacagtaaagggttgtaggtacacctattttagtgtggtgcattgtacaaacaccttaaaacatttattaaaaaaaatatttattaattattaaaaataacatattaataaaatacttagaggaaattacactgtatac

SEQ ID NO: 362506 - DNA, 565 bp, Cannabis indica
gacaaaaatagaaaattgaggaaaaacctagacttttcctaagtttctctccttctcttttgaatcaccaagctttgcaaggaaagggggatttctttgctgtaattctcaaggttctagcaagaatttgatactccaatcaaggtatgtacccctaggtttttttcttgagtcttaactaagtttaggttgtgtatagcataactttgttgtttaagttgctgtatgatctaagatggtttaatttggtgttctggaggttgtttgatgttgattgagttaatttgaattgagattgtgggttgatttgagagtgagctaagtttgagcttaagaactcaaatatagctctctaatggtggaattggattttgtgtgttttgatgggttctattgcttgggtttggtttattataatgcaatcaggtgttctggaaagtattgaaaagtttgggattaatttgagttgtgggggtcggatttttggttcccagaccagaaccggaattccggttcctgggagcctgcgtcaaccggtcgaccggttggtcccaggaaccggact

SEQ ID NO: 362507 - DNA, 845 bp, Cannabis indica
ggtaacaggggtttatgatgccgcatagagatttcgggtttgaatggtttgtgaagctgcaacctccgacttttctgggaggcactgacataattaaagttgagcaatagatgagtacaatcatccgtatcctggataatatggaagtgacgggaacagagagagtgaattgtgcagctttcatgttgcaagatcatgcccgcatctggtgggatattatgggacagactcgtgatgtcaatgtaatgacttgggatgagtttaagaatctgtttgaagaaaaattttataatattgttgtgaggacttcacatatggaagattttgtgaagataactgaggggaagatatttgtggccgagtacgctctggagttcgatcggatatctaagtttgctggtgatctggtgcccactgatttcaccaggaaacagaaatatgtgagagaactgaatgccacaatcagttgggacttaaaaattacaactacacatgacactttgtacaagaatgtggtagagctagccttaattgtcgaagaggctgagcagcatgtaacaaaagaacagattgcaaaggatgccgccatggcaatcactactagaaaaacaggttttagtgacacacattgagtaactctaaaactatttagtgacacttcaacgcgcgtcactaatgagggtgactggaaagacagtttttagtgacacttcacacgtgtcactgaacctttttacattcactttttgcgcgtcactataggcgtatagagtcaaattttgtcagactaaaaatgtaatagccacacacatgaagtgtcactatatcctttttttttttttttt

SEQ ID NO: 362508 - DNA, 638 bp, Cannabis indica
ggatttaaataacgaaaggacaaaagcaagaaaaataattaggaacgacaaagaaacatctactttttgataacccaccatgagcttaccttggagttaagcatacttaacttgggtaatctcaagagggaaaatctttcagggagcatcccggaaagcgtatgagtgaagacaaaatacactagaaagattcatgttaggatgcagaatcgataatcgttccagagatttttaagaggaacgaatgtgttaacaagtaaagatttacaaggtatcaagatgagttcatgttagtggctggaaataagaaatgctctaattgaatacctattagaaatgaatacttaacttgttattaagctaagtcagtaggtcagcctagggaggtcccatataaggaatggaaagatataattatgaattatgtattgtgggatcttataattttgaccaaatagtaacggatggacataccgagttaatatgatgtctatcaagatagacaatttatacaataaataaggatatggaattcatacgaatgaataatctaatcttatgaaattctaaggttgatatatttggctatgatattaagaattaaaaaaggttattgagaaccatggagattaaagcaa

SEQ ID NO: 362509 - DNA, 740 bp, Cannabis indica
gaaaccatatgtaattgaatgcacaatgcaaggcatcaactccgttacatctggcaagacaaaagcgacgcatatcgaccgtgaaaacacttagcatataatgtacaaactaagtataacagtctggtgggctcaagacctaataagcgaggcgccaatctctctataggaaggcgcatttttgctactttcattagttaacttcaaacattttttcagtgagacttataatcttgacaagtcagaagctaacattgaaatgagcctcaagaaactctctgttaataagaactgcgatagtcacaatgaagcgttaagcattcaaacaaagaagcaaccagacgtacatcatcaacctcggaaagataggaaaaaaaggctccagctcgctatcaaagtcactggaaccaacttcctgtcgaggcatcccagaatgctacaattaaagacgtgtttaaacacacgataattttgaccaaataaaagcaggagaatcacaattgtgtgattttcaaataataatcgcatttacactacatgttatgtaatcaaaccccatgatttcaggggagaaacattgtaaagatcacagtcaattttgtaattaactgcctactatgtgattataaataggggcaagtaagatcaaaaaaggggacgaaaaaatcatacaaagtaggccctgaaaaactatcagtaatctaataagattgactcgtggactacgcagaattttaact

SEQ ID NO: 362510 - DNA, 1028 bp, Cannabis indica
gcatacttaagctgtttttagacacctgcagccaaaagtgaaaaaattttgaatgatacaattcaattacatctcttcaagctaggataacaactgacttgtcagatacatgaggtgaactatgggatgatttgcaaggtcaacctgtaagaaacatttatgagttcaatgaaagagcacaaattttcgtgcagaaggaagaagcaccaataaaatgacgttgcaaagttttgctcgggagacaaacccagcacgagtaccacaatagcgagaactgtgacaaccaaagcaagaaattcaaacctaaatggcccaattaccaagaaaaaatatgggtcgagagacttgtcaaaaggtaagaaaaaagaaaagaagcacgagaaatatattcttatatactcggtatatacgaaattaaatgaaactcctgaaaatatttatctaacgaatgaaaatagggtcgcatttcagagacccgatctaatgagacatgcagaaataagcaagatcctaaaaagtattaccatttccatagagacatcagacataccactgaagatttccatcaactaaaagataagattgaaaatcttatctcacgaggttcctaaggcaatatgtaagacctcaaggaaataaacaaaatctgcccaacaactagaataactaaagattacaacctcccccagttgagggtgaggatatcttagttatttctggagggctacacctagtaggaaacaaaaataatgctcgaaaaagatatataaataatgtgaagaacgaaaaattagcttttgcttcagaactcctaaaacgagctctgatgaacttcctatcatctttactgatgaagatgcattgcatgtgagttttccccacacggatcctctagtaataacagttcaactcgctaatacgaggataaagagggttcttatagataacgagagttctgtcaatattctctaaaaaaaactttaaagaaaatgggcttagaagaagtatggtttaagccatgtatggtt

SEQ ID NO: 362511 - DNA, 648 bp, Cannabis indica
tgcttggttttgattcaagaaaagtgtgtgctcaaacaattatgaagttaatcaaatggattcagcgaagaagaggattagaaagtgaagaagcaggtgctcttatatatagaatctggtatactaggaatgataagtattggaatcattcaaatcattttgtgtgctcttaaatatgaaagggaggcttgcagaattagcttcaataaagttagtcaaatagatagagagtagatggaaatgttgtaaatgttacagtctattatcaggcctttaaggtgttgaacgattgtaaagtttcaaggtgtggaatatatatttaaatgatgactcataaaaaaaaattagtgtagtgaaataataatttaaatttttattttatgattcttatttcattaatttttatttatattattatttttgttaatttttatctatattattatttttgttaaaatttatttatattattattgtaattagataataatttatatataataaattagtttaaataattttttttttaatttacataatacttttgccaacagttgtaaacagtcatttaaaaagattttttccaacagttataaactgtcatttaaaataacttttcccaacagttataaaccgtcttttaaagtt

SEQ ID NO: 362512 - DNA, 1019 bp, Cannabis indica
ttttcttcacaaattaaaggaatttacaataagatcttagtgatttcaagctcaaggtgagttcctaatacttctcttattgatttcttgggttttaagttaaggaattatgcatgattttagtattaaagtgttttagttgttgttgatgtatgaaacggttttctaaaattaagattattcatgttatttttagatagattgaagggttgtagtgttgattcagcaagctttaagttttagaactcaagcttggctctttaatgatgaatcttgattctgagcttatttagttgttttgttgcttgagatatttttactggggtataatatgcaggtctggaaggtttggtaaggtttggattcgaattggctaggttttctaattgtttgggttacctagtgtaaaactggttagccggttttacaggccctataaaaccggttaaccggatcagcagctgggctcctaaatttttcgtgttgtcgatttgtgttaattttagagctttagttggttaatttcctgttagtttagggtattgccatgttaactttcagtacgaaaacttttggtttaaaaccttggtcctcggttgtgatttagcgtgtcacttacccgtgttatgaacgatgtgatttaggggcctgtaattcgctgagcagttgttccactcaggttggccagcacacttgagttcagaatcaaggtaagattagtataatgttatgcatatgtatttacatgtttagtgtacatgttgttatgcatgttagagtacattgatagcagtatcagtatacatagagttatactggatactaacaaatgtatgtttggctcaaatattgatcgacgctatcacatcaatatggctagagtatgactagcatattgaatataggctggtattatggtcgatagtattgtcgtataaacgttctaaactcagcaccgtgtgggacacggggatagggttatggttgggtgtatgggtgcctgattataatctgggtta

SEQ ID NO: 362513 - DNA, 719 bp, Cannabis indica
gtcatcttccgtttctcccaggggaatgacgttcgacgattgctgacctacagtttggtaggctcttcgtatcagcacggtggcttgtcgactacgatcttcgatctctgcatggtgagcccttaatgcctccatctctttatctctccattcagcgaacatacgcctttgttcgtcaaacgggagatttactgcagcatgcagttcatcctgatcatgatgcagagtgttgttatgaccctggatgagtccgagtgcgtcacggagattttgcaattcggttgcgtctccgatggtcgtctgggcgttggttctaggtggaacagtcgtattatggatgccctggttgggtgcggaactgttattcccagtctcttgcacaccaggcgcaattccagtaacaggagctatttcactattcaccacacttcccgtctgtcagggattaacagcaggcagaacccttgaactccccgggtcttgtaatgccgaatccagcgtctgtgaatttgctgggtcagacaggcctctacgagtttgcaccatcgtgttggcagttgagtgtcgaataaagagcgatttgtgatccttctctcaatgaaagtaccaaaatgttgacttcgcttttagccaacgacaatgagtctattttataagcgataaaacgatatgtagtaacagatatataataaagcgataataagacacaggaattttat

SEQ ID NO: 362514 - DNA, 552 bp, Cannabis indica
acttctagggtatttggtcaactatgagtaccccaaaataccccgctatttttaaaattaacttacctcaataatccaatcaatatttttaacttatacttttgtgacaattttagcctccaatcgggtttccagggtccttgaacttaaaatcattttttgtcacaaataatttacattatatccacatattttaaataaatctccgtaattatcaaattacgcttatttatccacatataacaatatttatagtttattgtaactaggttagtatgatcataatcctactcattactaccttatcaatccataatatatattaaacactaattattcataattaggtctttgggatattacaaccattccctccttatagaaattttgtccttgaaatttattgaaacaattctagatattacccccgtatttatgattttaactctcaagctgctgtttctatcttactctttctctacaacactttcttaactagtgaaattgtctcattccataatacttcttttttctagtccaaaacttggacaa

SEQ ID NO: 362515 - DNA, 629 bp, Cannabis indica
aatagatcttgggttaattgttaatttatctaacatgtggtatcagattgcctattgtatatgatttagaacctataattagtataattaatttttatatgttaatcatccaaaattatatatcaatttcgttattattttatgttcaattttttatttataaatcttaaaactttagaagttttattgatctttaaattttcttttgattgatatattatatgcatgaaattattatgtatattatgagaattttaagtttaaagttttagggtttatatatatatatatatatttttttttctttatcaaattaaatttaggttttttgattctattgtttatacaataaaattgatggtgcaaatctcattaccaactaatttacaatgtttctacatcatttaatttgaattcggctgcaacaaaaaaatcaaaatcaagttttttttgttcttagttttcggattgaacacaatccgatcgacacccttatagtcatttatacccgaaattaataccatatgttgatgagaaatcgattcccaatcaaaacccctagctttcccgttgttttggtcgcgtttttgggccggaaaactagctccgacccgcctgcgcatgaaccg

SEQ ID NO: 362516 - DNA, 619 bp, Cannabis indica
tatttatttttgtaactaaaaaagtgggataaaagatagaacctgattagtcttggcaagccggagacaagtctcctcaggtaggcttaccaactcaatattcttgactatccagtatcaaaaataaattttcttttatcctgtgtctcaaaaatagaagcattagttacattttcaagaaaaagaaaatgatctttgtctaagtcgtagaggaaatatggtaaatgactaagtgaaaataattttctaatttcctcaacggctttgtctatcacatcagtatgatagcatttcttttcatccagaattaggggaagaatgatagaatgagaaagagtttcattctgaatagtggtggtatcatccttctctatgaataatgtgggtaccacatcagtatgataaccatcacatgtactcggtagagtggattctttaaaattttcaccactataggtagaggtgacacttacctcatcaaaattgtgaaaggtagtattggagattagtgcttcattcacctgttgtagaggaaaatcgttagcatgcgaacttaccaggtgaccagataacttgctcaattcttgcttaatttctttcagctcaacaagtaagtctt

SEQ ID NO: 362517 - DNA, 517 bp, Cannabis indica
tctaactatatcgccccgctatactaaagatactaagatgtgattccaatagccaaacaccgcgttccaatgttgtcgggcactgaatatgtaaaattatgaaatttctatatatgacataaaaatgcattctgaattgaaataaatcatcataaattaataatttagaattaataaataacttccataattaaatcctaattatctgctaatttccaaattaaagctaagcggactttacaataatggtggaggaaagtctgtattgaatacaacctgtcagatcctattacagagagaatactacatactacacttgatctagataccaaagtgttaagattatttgaattgcacattttgttttatattagtgcaactgggagtttgttggattttttgccctaaataaagctcatttcaatataatcaaatttcctaattaataaaagattagaaatcgcattttatgttgcttggttcacatgaaatatttcatgattatgtttaatgtata

SEQ ID NO: 362518 - DNA, 956 bp, Cannabis indica
ggttttggttgatttctctgcaattgcatgctggttttagcaaggaattgtgatctcgagttcttcgtaagattcttatagctttctcttaagtttcttgagttttaagaaaaataaattttgcatgcttggagtttatgcttgttgtggtttctgtggttaattgttgttgcgttcataggttaaagcatgtttgattgtgttgatttaatctggttatagtggttattggttggatttaattaagttttggtgtttgaattcaaatcttgaatttcactggtgaaatgatgttttagctactgtggatgttgtttgtgtttagggatgcttgttgtagttatattatagttatttgaagtgatttaagcaggtttttatggccaattagttggatgagcaagctttgagtttttcaactcaagcttgactcatcaatggtgattttcatatttgagcatgaagctttgttttgttgctttataattgatctttggggtctaattagcaggtttggaaagtttgaattggtttggagttcaattggtcgagttttgaaattttgaaaaaatcctgcactaaataggaaatccggttcagggaggcctgtaggaacaagtctaccggttggtatccaggaatttctcccagaataggaattccggttggggaaccggtctatcggttgaggcaaatttgggagccctagtttttcccatttttgtgttatttagggtatttccatgttatttacagatagggaaacttttagtttcaagtgtaactccccgggaagtgatttagcgtgtcacttatcagtgttgtgattaatgtgacttaggagcctgtaaattgccgagcagattgttcaactcaagttgaccggcacacctgaatttggaatcgaggtaagattagtataagagtatgcatatgtatttacatgtttagcgtgc

SEQ ID NO: 362519 - DNA, 682 bp, Cannabis indica
cccatgctagtgataatatggaccaagaaaaccaagtgagatctcattagataagctaagtattttaagaggttagtggaatcacttatctcgacctaaaaaacccacaagctctcctaatagaaaggtttgacgatgttaaagggaagaaatgagagggggatgggatgcgttctgtgatggagattgatgatcgtggtgagaagaaaatcaatctgagttcttgaagagtgggagatgaggccggtgatggtgatcttccattgggtgaaggtgttggtgggtttcatatggttaacattggggtactccaagagaggaaaagactagcaagaaaaaaggattgatcaaggataaagcttgccatttaggtgtgggttgagggggctcgaagctagattgtggataaggtaagtctgatgggtttatttatggggttatttttcagggagagagtatttcaaaggattcttatttctcttctcctactaatatttctgaagcagtgagctttgctcagcaaagtcgtcgaaagcaataaaaattacactgaaactttctcgcctattttcactaaagattcattcagatttattatggttgtaattgcgcattttgattaagagtgcatcaaatgaatgttaaaactactttttgaatggagaattgagagagcacgtct

SEQ ID NO: 362520 - DNA, 1083 bp, Cannabis indica
atttgtagacccaaataaatggcgaataccaagtcccgtcccgatctggacaatattgaagatatttacgaaaatgccactgcatacaaactaagcatcagcatgccacctgcatgcaccacaacatgcgccaccactttgaccaccagttggccaacttgtgggcatcacttagcttgtaacgtgccggtgatggtccgaatgttggaacaagacgtcgttgagccagttagtcttttaaagaggatcagtaggctgagatggagttaagacttggttgcttctcttcatgggaatactggacatcctaaagaggagacatggatggttgcttcgagtcaaattcagggatgttagaaagacaactaccacatgcaactgtagaggggcgcaacaaaatgtttgaaactcgttggcataggacaaggttgaggggatagtccatgttgtatgcttggtacactaggccaagtttgcctgattgacattgtaagccgcaggaggtgcttccgttgaaaggaagcttgctggcaggagtgtggaagtagtgtaggaaccgtcagattcttgttagtcacgacagaggtcgagagttgataactgagatgggtctaattgaaatagacatgggatgcttcagttgctacatgtgtgtgtcaagatgggcgcacatggagaccaaggggcagatgccgcaatcgtcagaggatgattgtacttggaagtgttcgcatgtgagttttatttgatccatatggaagcgccgaggcagttgagtggaatgtgttggcttgacaaatcgccagagggcgtaagtcacacaaagatatcgatagagaggtgtagttgtggaatgaaggcatcaaagaagccagcagggctgagaagaccgagcgcaagcattgagatggcgctagagtttgtgtggaggccagagggccgtgccagtgagacttagtagtcatgttggcctgcgaaggtcgagaagggtgctagagtttacatgaaggccagagggctgcgtcattggaacttagtacaccgtgggagccaaaagacgtgatgcaagtgtgaatcagttgg

SEQ ID NO: 362521 - DNA, 506 bp, Cannabis indica
ctaatctaaaataaccgatcaaacccgcagtgcagattggattggattagattgaatttgaaatattgtgcggattggattgaatccaaaaaaataaaacctgcacttagtgcagatcagatgcactatgaacaaaatagtgcggattggattggatgaacacccttacctcaaactattatcactatcaaattattcctctcaattttgaaaggcacaatttggtaattataataatttaagaagaatttaaagcaatcaaagatagtggttataatattgaaaaatcatgttattttttaaacattatatataaaaacatttaccaaccaatcgagtgagtaaaacttgttagacttttatttgggcttacattaaattttattgtttttattaaaacttgggttgattggatagttctttgctgtgttagcccatgttgttggtgatcaattgttaatgggcttagcatctgtgagtaaagtctaggtgaagcagaagtgtgg

SEQ ID NO: 362522 - DNA, 694 bp, Cannabis indica
gtcacaatatttgttgtaactaaaactaataaattagtgacaacttgtaactaaatattatgctttaaataacaagtaaattttttgttgtagactaaaagtcacatttaaacataaaaaaatttatgttgcgaactaaaaaaattgtaactaaaagtaataattttttgtagtgtacttttaaaaataaaatagaataaatggatagatgagtatgagagtcctacgtacgaatcaactttttgtacttctttcgatctcttaacaataatgtttatctccaataatgcactaattttgaatgaaaacacgacaaaaagatcttgaaaataaaatatctagaatcaattggacgaaaattgctcactctttcaattctaaattgtgatctacatttaaaaagccaacttctccattgcttatggtggcctatagccccttatccctgcaatactcaataacaaccactcatcttatatataaaaatcactatgaaaaatctcatttttagtcagtaaaaaagattgcgactaattattaattatgattcctatgttgtaatgaaaaggtccgtagcttagtatattagtcacaaaagttacaatttgttttgactaaatgtatttttagtcacaatacttgttgtgactaaaactaaattaagtgacaacttgtgtccaaatgctatatttta

SEQ ID NO: 362523 - DNA, 606 bp, Cannabis indica
acaatacttgttgtgactaaaactaaattagtgacaacttgtgtccaaatgctatattttagtcaccaataattttttgttgtgactaaaagtcacatttagtcacaaaaaaaatatgttgtggctaaaaattgtcactaaaagtaacaattttttatagtagatgcaagaaacactatataaaattttacttttagttagaacaaaatttgtaataaaaaataaaaaagttgcgactaagtataaatcatcattcttatatcgtgactaaaaggtcaatgactaattgtactagtcacaaaaattataatttattgtgactaaatgtgtttttagtcataatatatatttgttgtgactaaaagtaaattagttataacttgtatataaatactatattttaatcacaagtaactatttgctgagattaaaaattagttaaaaaaaaaattatgttgagactaaaagattatcactaaagaaaactgtttttttgagttgacacacaagttttttttttttttttagttttcaataattcattgcatcaaaactacaaacaaaaacaaaaagttgtatatatatatatagacaaaataaacatcc

SEQ ID NO: 362524 - DNA, 522 bp, Cannabis indica
cagtttctattttactttccatcaataaccctcaatccaaaacctcgaatcaaaacccaaatttgtaacctcactgtgatttggaccacgccggtggagagcctagccacgactggatcgcggagggtctcgctgtgactggaatgccaagatcggggtctcgctgtgattggaccgcggagtcgctggccacgactggaccgcggagggtctcgcggaggctggttagtttttggtggccggttgacaagatcggggtttttgggtgcttgtaggtttaaaaattgtgatgaagacacttgggatatggttgaggtgcaactggtggctcggagtgagttttggcgaaggagatggatgtttaagatcgaaatgatgcggctgagagatcaagagggtgggtggtgagttttggtggttggttgacaagatgagggctgggagtggggtcaggttgggggtgaaacggtgctggagtggagatgaagaagacgaagaagaataaagaagaaaagaaaaaaa

SEQ ID NO: 362525 - DNA, 559 bp, Cannabis indica
tatctaaatttgaagtttctactaaattcaaacgtcttgtgtggacaagcgaagacatagaggaaaataatgtgtatacaacatctcttagtggtacgccttcaggggagatatatcttggcaagttgtacaaaaacaaggaagaattgaagaatgtagtgggaaggtatgcactgaaaaataattttgagtggatggtaagtaagtctggcactgatgtgttttacgttacttgtaaggatgaaaattgtaaatggagattaagggggaagaaaaaggcactttgtgacatgtttgacgttaccatgtttcacaacgaacacacatgtaacttggattctagacattctgatcactggcaagcaacaccgtgggttattggtcacattcttaagaacaagaacacatcagatgggtctaactacaaggcaaaggacatacagagggatatgtttgatgaatatggcatcaagatgagttatgagaaagcttggacatgtagagagaaggcatttatgtacaagaggggtagtccagtagaatcttatacgaagttata

SEQ ID NO: 362526 - DNA, 763 bp, Cannabis indica
atccatggagtggatgatttttgataacaacttagagcatttatttctaatactttgttacctgcatatgcaatagaggcagtaggaataccagatgaggacgaggtagtgttcagcaatgcatgaaggtgattcatctgctccttagtgaaggggctggactcagcttcatgtgcagaaggggttcgacctgccttttctctctctgccttgcttttccagtttgctggtttgccatggattctccaacaggtctctcgagtatgacgaggtttattacagaaatcacaccaaacacgtggcttctcatcagttttctgcatgtatggggtgttcttgttatatcctgcgcccatggtggctagcgctgaactctcaacaatagatgtaggtgtcttctttcccaacataacactccttcgactctcctctcttctaacttcagcgaatacttcaccaattggaggtaggggctgccttccaataatcctccccctcacctcatcaaactcaacattgagaccagccaggaacttatagatttgggttttctcaatcgttttcttgtggtgtttgccatcttctgcagatttccactcataagtatcgaaaagatctaagtcttgccagattcttttcaaagaattaaagtactttgtcacgctgtcctccccttgctttatttctccaagtttgatatttaacccgaaaatctgagattgattttcaagatcagaatacatttcaataatgttgtcccata

SEQ ID NO: 362527 - DNA, 654 bp, Cannabis indica
acccgaactacatcccggtcaaacagaagaggcgaaaaatgggaacaaatcgaaacaaggcagtaaatgatgaagtcgcaaaaatgcttaaaaataataccatcgaagaggtacaatatccaacttggttcgccaaccccgtggtagttcccaaaaagaatggaaagtggagagtatgtgtagatttcactgacttaaataaagcttgtccaaaggacagttttccgctaccacacattgatatgataattgacgccaccgcggggcacgaactaatgagcttcatggacgctctctcagggtataatcaaataatgatgcatcctcccgaccgggataaaacatcattcatcactgagcgggggacatattgctacaaggtgatgccctttgggcttaaaaacgccggggcaacgtatcagcgaatggtgaacaagatgttggcccaacaatagggacttactatggaagcctatatcgacgacatgttagtgaaatccaaagatggcgccgaccacgtcgatcatctaccagaatgcttccagatcctcctcgcccactcgatgaaactcaacccagccaagtgcgctttcgcggttggatcgggaagttcctaggtcatctagtaactcgacgaggggtagaagtgaaccc

SEQ ID NO: 362528 - DNA, 654 bp, Cannabis indica
aacgctgatttttcttagttaactcagttaatggcatcgagattttagagaatcccttgacggcatgtcgataataccagctaaaccaaggaaactttgaacttttgttacagattttggcctcggccaattcttcactgacttgatcttgcttggaccaagcataattccattcttcccgacagtatgccccagaaaagatatctcaaacaacccaatttcacactttttgaactttgcatacaacttataatccatgagtcgttgcaataccattcgaagatgatgctcttgctcctcttttgactgagagttctcaaggatgtcatcgataaacacgataatgcagttatcgaggaaatccttgactactctattcatgagatccataaaagctgcaggagcattagttaatccgaatgacatcaccagaaactcaaagtgccaacatctggttcagaacgcattctttggtatttcttcttcccatattcttagttgatgatagccagatcgcgggtcaatctttgaaaacaccgtctttccatgaagctgatcaaataaattgtcaattttgggtaacagatacttattcttaatcgtcaacttgattagttttcgataataaatacacattctgagggaaccatcttt

SEQ ID NO: 362529 - DNA, 593 bp, Cannabis indica
tttttttttttgttgttttttttttgttgtttttgtacatttgtgaaatttaacccataaaaattagatattgtacaataataataaatagtatatttttatacatttaaaattttaatttaaatattatttttatttaagagattctccgtcttgtcttcctctcctattaggggactccttgtccttgccctaataaaaaatgtgaaggaaagaaattaaaattgttaacaaaaatagggataagagaatatttacggtcaattctttgtcctatgtacatccctaatagtagtagtaggggtgttcgcgatgcgagtggtgcggtttttgactattttttcaaaccaatccgcacatgcggtttcttaaatttctcaaaccgcacccgcagcgcgaaactaaaaacccgcaaaaactgcaccgcaaaaaatagtgcggtgcggtgcggttttgtggtttatgcagttttgactatcactaaataattaaactatcacagatacaacaaactttgagcaaaacttgtcaaaataccataaggcttgaaaataaatatgaaaaaaaaaattaagtgtcaaaaatacaataat

SEQ ID NO: 362530 - DNA, 732 bp, Cannabis indica
tgactcccctttgggtttaagccatcacgattttatttttgggcactatctaaaaggcctcgtactaatggagaaggtcaaaaacacttatatccaagacaattcttgtctattctttcaatgtgggacttgggttgatatcccaacaatcctcccctcaaaccaaggaccacatatttgtgacctcccctccaccaggaagacttttgacacaggtcctaacactgatctccatcttgaaccgccgtaatcatcaacgggactcgccacctgactacatcaacggcaccatataaatcttcaatcgcgatgtcatcacattgagggttttttccacacatcgcaaatgtagtccattatcccaacactcctaaacttttggctctgataccacttgttgggtcccgctcttctatcttgtcgggccactatctcaccttgacttctattagtatgatattgtccgttttaagcttaagccctcgcggttttgtttttgggtaccttcccaaaaagcctcatactaatgaaaaaggtaaaagcgcttatatccaagacaactcgtatctattcttgcaggacttgggttgataccccaacagttagagatagtagttattaaattaatcattttacacaatgtttgggaagcttaaactttgtatagatagagaatcattcaagggtatggtgtgtgaattgtctggaaaatcatggccggccagagggtgg

SEQ ID NO: 362531 - DNA, 537 bp, Cannabis indica
ctcgactctcaatctcgcgcaacatccatccagtcaattttcacggcgcagtctttgacaaaatcagagtatcttttttttttaagaaagatttataattttatgattgagattatatatcgggtatatgttgtatatatattgataaatatacaaatttatatatttagagtcattcaattttgttattcaaatatatatgttgtttcttaacatatgattatgtatgtttttctttaattatttaaaaaagtaagtaaattgagtatttgatgtttgtctaactcttagtacttgacattaattaaatatataaaactaattaatacgtgcattgcacgtaatttttacctagtataaaactaaacatcatatttattctaggggccatggcccctatattacatcacgtacgtccgcccctccgtatatgcattataaaaaaatttagttttagttaatttgtgactaaaatatcggtcgtcaaaattattagtcataaaaaattataatttgttgtgactaaatatgttttta

SEQ ID NO: 362532 - DNA, 1620 bp, Cannabis indica
gtgggtgtcctgttgattgttggccagtaatatccttgtctattgatctttttagatagactttgccaacttgcatgatctccacaaaagccttcatgaatttctctgatgatctcgtttgcttttgtaggaacaacacaccgaagtagaggcattaaataacttcttctatacaatttgccttcaactattgtgtagcgaggcactgaatacaagagttttcgtgccttgtttttgtcagttggaagttgtccgtcgagtagatagttgattatagtagtcacccatgtgggtgagctatctatcatctcgatgtcttccttttcacatatacttggctcatttagcatttccactagaaccaagtttaattcatccaagtcattctgcgaggccagttttgctaaggcatcagcgttagagttttgttctcttgggatttgctcgattttgaaataatcaaacctttcaaagttcttctgaaccctctctagacacttagccattttcatgcccttagcctggtattcctcgagaacctattttacaatcagttgtgaatcactatgacatatgagattcttgaccttcaatgcttctgcgatcctcaaactagcgatcaaggcttcatatttagcctcgttgtttgacgcatcgaattgaaatgtcaaagcataatgaaacttaaagccttctggcgaaattaatatcacccctgcacccgagccctgcttgttagatgcaccatccacaaataacctccatgtatttgcatctctctgaacaagtagattttcctttggagttattccttctattaggaagtctgccaaagctttgcccttgatggatgttcgagggtgataagttatgtcaaactaccccagttcaatcgaccattttattactcttccagaagcgtctggtttgataaaacttgcctcaagggatgatcagttaacaccttaattgggtgtgcctcgaagtaaggccgtaacttgcgagatgcgtggattaggcataaggcaagtttttcaagagggggttacctcgattctgctcccagtaaccttttactgacatagtaaacaggttgctggtgctttccctcttctcacactattgttgcactaattgcgtcttccaagattgctaaatagaggagtaatgtcgctccagttactggttttgccaaaaccagaggtgtcgccaaatgccttttaatgctctgaaaggcctccttgcattcctctatccattcaaattttttgttacctcgcagtacattgaaaaattgtagacacttatcaattgacttcgaaatgaatctgttaagtgcagccatccttcctgttaaggcatgggcttccttgggcttggttggtgatggtatatctatcaaagccatgattttctcaagatttgcttcaattcccctcgcgtttactatgaatcctataaaatttcataaggaaactccaaaggaacactttttcaggttaagtttcatattgtacttctttaatttttcagagcactccgcgaggtctgtggtatgacctccactctttactgatttcaccaacatatcatctgttggaatttattttaccaggatct

SEQ ID NO: 362533 - DNA, 1020 bp, Cannabis indica
actgttacaaagtaatgccttttggtttaataaacgcaggtgcgacttatcaaaggctagtgaacatgatgttcgcagatctcattggaaaaaccatggaggtatatgttgacgatatgctcgtaaaatctcaacatgcgaaggatcatattgcccacttacagaccatgtttgatatattacgacggtataagatgcgactaaaccctctgaaatgtgtttttggagttggctctgggaaattccttgggttcatggttaatcagcgaggaatagaggccaatcctgcgaagatcagggcattggtggaaatgccatcaccaaccaagccaaaggaagttcaaagcctcacaggtaaagtcgcagccttaaaccgctttatatccagatcttctgataagtgcaaggagttttttcagattttgaaaggcaacaaaaagttccattggaccgaaaagtgcgagcaggcctttcaaactttaaaaacacacttggggcaacctccgatcttgtcaaagccaatgaccggtgaagtcctgtccatctatttagcagtgtcggaatatgcgattagttcggtactagtacgcgaggaccaaggacgtcaatacccggtgtattatgtcagtaagcgattactggatgccgagacgcgttatccccaaatggagaagttggcatttgccttgataacatcgtcaagaaaattgcgaccttatttccaggctcacagtattgaagttttgacgaactaccccttaaggcaagttctggcaaaaccagaagcatcggggagattgttgaagtgggcgatggagttgagtcagttcgacatcaagtataaaccaagaactgcgatcaaggggcaagccttggcagattttatacttgaattccccagcaccgaggtagcactcatagaagatagaagcgacattgctatagcgaacagagagatgtggacattgtacgcgatggagcctcaaaaagcgaaggctctggtagtgggatcttgttaat

SEQ ID NO: 362534 - DNA, 504 bp, Cannabis indica
ttgttatcacaatgcatcaaaactggcccttcgtgctcaatttttcaactctttaagcattgacagcaaccatatgatttctaaagtagcattggccatagctctatattcagcttcagctgaagatctagagattgtatgttgctttttgctttttccaagaaatcaaagatttcccaaggaaaatacaaaaacttgtggtcgatcttcttgtatctgggcaagcagcccaatccgaatcagtgtatgcttcccatttgatcttggattgagctgaaaacaagatcccttgacctggtgtgcccttcacatactggagaactctttgagcaaccacaagatgagatgctcttggtgttcccaagtattgactcaatttgttgaaagaaaaactcaagtcaggtcgggttatggtaagatattgcaatttaccaatgattttcctatatgaagtagcatcagcaagagcatcatctttagaatcttgacacaactttaaattgg

SEQ ID NO: 362535 - DNA, 635 bp, Cannabis indica
ctcaattattctacttgaaatataagaatgcgtcacacagaatcaattagaacagtcaataaagtacaaggaacagaaagctgacctatcacagtagaaggacaagcatcagcctcagcctgagtcagggcaaagactcgggcaggagcaggtgtatcatccttcttttgctctagtggtagtagttgtgggcaattcctcttcatgtgacccactatcccacagtggaaacaggccttggtctgacactctccctagtggcgccttttacatctcgggcattcagggaaagtctgccagtttttgttcccaccacgacggaagccttggctaccttagaaccttttgtttgggtctgctgttgatgattcactatgccttttcttgcggtcaccaagatcagtacgcctaccagaaccaacagccaacgtttgcttccatgaatctcttctggcaatatttttctttcgtatctgatcttctgcaccctcaaaagctagggccagttcaactatctgggcataagttcgagcaacccccggttatttagaagcaacaatcacatcccgtacattatgttcatccaacccttgaataaactttgcttttctagcagcttcggtagccacctcatc

SEQ ID NO: 362536 - DNA, 528 bp, Cannabis indica
gcctgatatcattaaagaaagcatattaagttttcttctcatcactaaccaaggaggaagattgtacagaacaaggaagacagaccatgaactatgacgactacttagagatctatgtatatttactccattcgtaaacaaacagagacgaatatgtcttggtccaaatttgaattcaagatttatgtagtttacttttttctaagcttgggaatctgcgggatgtgtgagttttccatctttcgctctcttggtctcgtgccaaaacaaatttttaaaatgttttgcactacgatataattatttttaagtcatggaatcaaagacatgtacgcactttttgggggataagttttctattctctttaatcttgtttattttatggcgggataaaccacaagtcatgcaatatccatgtcttattctttacgatataaaatgcaattgctcgaacatacatggatcttttcatacttcaatcctatggaatgtaaagtatttttcacttcatatgtagatttcgggaa

SEQ ID NO: 362537 - DNA, 586 bp, Cannabis indica
ctataaaattttaaataatttaagtgcaaaaaaataaattgctaaaagatcattatatagtaataaattgcgaaaaaataattaataattataattaatttaattttaaaatataagtaatcttaattaaaattttataaggaaataaattattaggtaactttcaggttacaagttatttattatttatttttatttaatttccgaattaatcacaaccatttaatagtaatccaatggcttaaaaaaatgtaaccatgatggttacaataaaaatgtaaccattgaaacctcttccatcatatatatataatcctaaaattatattgttttattgaatctttgaaagcccaacctatatatgtgtatttattcttttgatcatcaaagataaatatcatagtaaagaagaaaagaggaagactataacatgaaaaaaaaattaagaattgaatttatgtcaatatgagggcagctggctgtgcactctaaatgggtattactcatgaatgggtaaaattagaaaattttgagttttatacttaatttttctatctaattaaaaaaatctctcatttttatatca

SEQ ID NO: 362538 - DNA, 565 bp, Cannabis indica
aaaagatgactcgagagaatcatctaaaaataagaagaaacagaaaaaacgtgacaaatatgttctaatttacacagtatacaccgagttgaatgaaactcgtgaaaacatctttctcgcaaatgaacacatggttgcattctgcaagcttgaaccaatgagacatgcgagacataaacgagtttcaacaaaattttgtcaatttcataaagacatagggcatactaccgaagagtttcgacaactgaaagacgagatagagagcctaatcttgcgtggatattttagatagtatgtgaagcgtcaagggaacgagccaaaccaacccaataacccaaataactagagattgcaacctccccctattgagggcaaggatttattggttatcttgggagggtcgcgtctcgctggagagtgtaataatgcccagaaaagatatgtcaatgaaataaagaatgagcaaatcggtgtttgctctagaaccactaaaaaaagcaaaaacgaaggaacctccgattatattctcaaaggaagatacaaagcatgtgaggtatccacatgt

SEQ ID NO: 362539 - DNA, 430 bp, Cannabis indica
tttccaaattaaactaagcagtctttacaaacattcaactccctacgaatatatgacacattaaccgtgataaacttcttgcacaaacgttgacaaacacaaaacagaggataagtgtcccaacaaaaaggcaaataacccgcctggaaagcattgacagcagccatggaatccgactctatgcgcactttctgaattctagcctccaaagccatgtgtaaggccaaaagaataccctgaaattctccttccaacacactataaacatttccaaagttcacagcagtgagtagattctccatgggagcagcgacggcttgattctccaagttactcccagaaaatacactgcagcaaatgttgggttttatgccctaaataaaactcatttcaatataatcagtttgacctattaatatagatcagaaat

SEQ ID NO: 362540 - DNA, 536 bp, Cannabis indica
cataactataactattatgcaggacaagagaatggatctaattcgcatatatcaggatatgtgcgagtatcctctctatattcctgcgtaagcatagagatcgattctctataatgcgagtcggtcccgatgacccaacaaccttgattaaccgatatagactagcatgtataggttctaccagctcgtcatacgatgtccaaagaggcgactatataagaacgcagacatcctaaacttaattaagtgttggacccgcgagcttaacattagaatatgaacactcaactcgcacgttagaagacgcatacatcgctgcatttagtgaatagaaactgctattcatttattgatttttacgttaattagtttagatattgtaattcaatgtgtgaacggattgacaataaatgtaatctttgtgtaactaattggacacttgctttgtatataaaggagtgatccaccatgacatgagacctacaaaaactcttgctacagtggactaagaagaccgtgatctggctgaaccacta

SEQ ID NO: 362541 - DNA, 1329 bp, Cannabis indica
tttaacgaggaaattagactctatacttttttatattgtcctcttttatttttactctcttttttaaagcctatcattttttatctcttttttaaacactttaccaatattacccatgtcacctcaatatacccggtaaagaggtatatttcaatatactcctcttttaattgtaaggctgaattattgaattgtactaaatcatgatcctctactttcatctatgttaagcaattttattaaaattaaaaaaaagtcatttaaatccaataatcttcaaaattttagagggcatttttaacctccttaaaaattcaaaagaagtataatttgatacatgtgggagaaaaatcttgattagcctaattgcaaatataatggctctgtttgatactctcttagtttgtgtctctgattctgagtgtgagtaacttgtccaggaaggcagcgccaccattgccaattacttcaaacaaggtcactcattctctcgcactactttatatttattttgctcatatatatatatatatatatatatataatccaaaattttgaattttgtaaactccataaacctagagacccaaaggtatgtaaaatctaaatattgggtggttatgttgtggcttacaatctcaaaactttaaataattgtgtcactatttagcttatatatttataattttgtttatttttcaattaattacatcttatttgttaaccctttttcttgtttttgtttataggatcaaattaagtatgttgatggcaaacaatcaaacctatggccttatgccatgttgcagatgtggtattccaatggccccaaacgatgccaacacatgcttaaaatgtttgtattatgaatatgatatcacacaaggtttgcaaagacatgttacaataatccattgtcctgaatgtgatacctatttgcagccaccaacaacatggattaaggcccaacctgaatccaatgagttattgaccttttgtgttaagagattgaagaatttgaacatagtgagattggttcatgctgagttcatatggacatgagccacattcgaaaaggatcaagctcaagctcaaagtagagaaagagattctgaatggagttttgtttcaacagtcttatgttgttgagtttgttcagcatgaacacatgtgtgaatgttgtatgaggattcaagctaatcctgatcagtgggttgcggctgttcaactccgccaacatgttactcataggtatggacatagtattagaatatttttattatggaaattattttctaattaagaaaatgattttctatttaaggaaat

SEQ ID NO: 362542 - DNA, 777 bp, Cannabis indica
gaggtcaggtaggatcgaggctgaccagaagggtatgtacgcttgtcataccgagctaaagatggcatatgagaccagccatgtagagctgaaggctggtcagaacgtaattatggagcagctcagaaatatattggccatgttgcatcttccgccaacgacaactttagcactggaggccctagcagatccatctaccccactaccagctacatcacccccactacaagaggatgaggtctttcttgacgggtatgatccttatgagggagctccagctactcaaatcggtgcaggtgttatctgtatagatgacagcgagtcccagggtgaaattttggcgatagaggcacaacctacaggggttaagagtgggaagaggaagagaaatctccctatatggtttcgtgactacacggagatgaaaaagaaacaaaggccttcttcgacgtttgatcccctagcaccaacggatgagcgatttttggatgctttctgaaagtggtgctctggactcattcccaaccaccggctttgggatttgaaaagtggtgattacggtccatcgttcttttgggagccgttgacactacaggaatggcttacagatgacgtaagtaaactaatttataattttactttactttaccactaatctacaattaatattttttgttgtctaactgctttctctaacctttatatgtagcatatagatgcagcagtccatatgctgaggaggcgacgcttcgactatccactgacatttcctcagaa

SEQ ID NO: 362543 - DNA, 879 bp, Cannabis indica
gagattgattgttgttcaggatataaagtcaagaagactcggaacacaggcaatgacagttatctagggtgaaagtctgcatgactcaggtactaagataacaccatggcaatgttggcctaaggtgaaagtcaataggactaaggtactaaggcaacattgaaatgtcgaggggcgaagagtcagaatgaccgaggcattagttcagcatcttcatcaaagtgaaaggtggaatggaggaactgtatgcgagtatgcggttagcttgcgagctgtatcttgaggggtattcctctaagagagaagttcttcccaagtttaagtggcgaagcccactaattcatgtgtttgaagaatcagggtacttgttcagttttggtgtgtgaatctagacggaaacactacaacagatggtttgttcagtgcgaagatttgcatgattgctgcaagctgcagatagacaatatacaggggcatagactgagatcaagactgagctagtttgcggcatgtatgggcatgttttgtgtttatggggacattggtgttgtacgagacactgtaagccgaatggttcagagagcatatgtcgatgggagatagcgaattgggatgacttcaagtcttaagagtaagattgggtgttatcaagtttgtcaaaagtaagcaagtcattagaggatgcagggttgactttaagggatgagcttgttacacagttttaaccgacacaagcaggacctcagaggagcaagtatgcagtgggtcagtggggccttttgcatgaagccgtgggtgtgcggtagggcatgagggccaatgttgtgaacttcgcaaagagaatctgtgcaagagtgcacttggtgctgcattgggtgc

SEQ ID NO: 362544 - DNA, 2527 bp, Cannabis indica
aacatgtcactgtcaaactgctccgttgtctgacacaatcttctgtggcagtctaaacttacatatgatattcttgacaacaaagtcgaggacttccttagaagttattgtcgccaggggtttagcttttgtccacttggtagagtagccaattacgactatggcatactacacacttccttttccctttaatagttgaccaatgaggtctattccccatatggaaaagggccaacgagactgcatcaatgtgagtttattgggtggagctcttggatctttgagaatctctagcacttatcacattttttaacatagtctatcaaatcctcgatcatggtggccaaaagtatccctgtcggagtaacgttttggataggctttgcccccagcattattgctacaaaagccttcatgcacttctatcaataaatgcccaacttatgtcttagtgacacaccttaggagcggtattgtgaaacctcgtctatacattactttcctaaaattagatacctagcaacttttcttctcatcttttttgcctcgtttttgttctcaagctaggcttcagtttggaggtaagctgcaataggtgacatccaggttggattttcatctaacatgttgaccttttctaggatggtaatgctttgttcttttaagaaatgtataggcaccaagttttccttgtcgacaatggtgctgtttgccagatgggcaagtgcatcggctgttgcattatcttatctagggatctgccttattgtatagcctctgagccaacttagcaagtcttggatcttgctaaaataggctaacattcttttacctcgagctatgtactcacttaggacttgatttaggactaattgaaagtcgttgtatatgtctaggtggtcagcccgtactttgtgcagcaacttaaggccaacaattcgggcttcatattcaacctcattattagaggctttgaacccaaacttgatttccccgtacagttgttgctcctaggtatgatgagggcaatgcctgcaccggatagttggtcagtgtagcttccatcaacatgcaatttccatgttgattcttcaagtttttactgctgctcttgctctcacttcttctctggttcttgtttttcccctaaatcttgagagacttcaggagatatgcttgtacatttagccacgaagttgataatagcttggctttttatggccactctcagttgatatgcgatctcaaattagctgaactcgatggcccacttgagtagtctactagatgcttcaggtttttgtaaaacctgtcgtaatggctagtcaatgtacacccttatcgggtgagcttgaaagtataaccttagctttcttgatgctaagagtaagttgtatgttagcttctccatgagtgggtatcgactttcaatgtcgattagtcttttgccaatgtagtatactagatgttgtataccatattcttctcttatcaagactgcactcacaatatgttctgtgacagccaagtacacacccagatcttcattgtctagaggttttgataggataagaggttgagccaattattttttcagctcttggaatgctttttcacactcccttgtccactcaaattttttgttgcctttaagtatgttgaagaaaggcacgcatttgtccgtggatttggacacaaattttcttagtgcagcaatacacccatcaggttttgtacttttttgattgttgtgggtgacttcatgtctcaaagggcttggatcttgtccgggtttggttctattaccctggcattgattatgaagctaatgaattatcccaagcctactccaaatgatcatttgagggggttgagtttcatgttgtactcttagaagatcttgaagcattcatctagatcctccacatgcccccaacttttttggacttaactagcatgttatttgcgtgaacttccatattgcggccaatgagatctttgaacattttattcacaagtctctaataggtggcctagatctatcatgaagcttgtgtattcttgatttggtgggtgcatcttgatttggttgtaacctgaatacatgaagcttaggatctcatggctagttgtagcatctactagctgctcaatccttggaagcagaaagcagtcctttggacatgctttattcaggttggtgaaatctatacacaccctccacctgttgtcaggttgggtaccaacacggggttggatacccaaagtggatagaccgctttagtgatgaagtcattggcactcaacctttcgacttcatcttttagcgcttgggcacgctctttatccaataaccttcttttctattgcacagatcagaagtgtaataccctagaattgagaagtggattagtaaaaccctaattagataattatgaataattgaggaattatattattatatagttcaatttatgtgaattaatatgatttgttatatgttaagaccccgttagtgagctagggg

SEQ ID NO: 362545 - DNA, 760 bp, Cannabis indica
ccatcaacgcatacaacaagtcgacaaaacctaaacccccgaatacaaggacccagagagaagaaacaatacttgaagcgaccatcttcaaccacaaaatccgtgatggtacctggatttctcaactgtagcatgtgcaagtaactaggtaatttcgagtacgaatcgacaggtgtaccccgagctcggtgtagtgccttctctctgcacctccatgccttttcataactcatttggatcccgtaatccttgtgcatactttttcttatattagaggccaagtgatccgagccgtcaattgcgaacttatccttaattagatgggcaactatcaaagttgatgcttgacagttatcttttagtatgttcaagggaacatgtatgtacattatgaaatgtactcacctcaaacatgttagaaagtacgttcttcttcgctcttaatctccacccacaatctgtatccttacatgtgacgtaccaaatatcagtaccggacttcctaacgtagtagtcaaaccctttcttcattgcatacaagccaacaaccatcttaaatgcactttgtctctaaaaaactttcccacatgtaacttcccgcctggtgtgccacccgtagatatatagtgactatgatcctcgatgtcttctcttgtatacattttctccttgaatttaccataacttgtcgaagaagaaaatggatcgctccatccagtcacattggtccctcgagcatcagtaggaccactaatatcat

SEQ ID NO: 362546 - DNA, 904 bp, Cannabis indica
cacgccactttgcccagcgccgaacaggatccagccgtccagttggagggggatcatgaaggggacgctgaggtccaacagatcgaggagcaggatgatgtacgtccttacagttcctccgaggtggaggaagaggctgaggttgaacccccaaactatggggagtacaacgaggctggggagccagtcgatgctgacggagacgtcctggttgagggcgtagactacgtcagtgaggaacttgctattgcggttccttatagaaggcaaggtgccttgggcgccaggtgggtaagccctccgtccagggttactgaggcgtgccttcggactctcgaccaggacggatacttgggcgaactggattgctacatacgagatagagctcaaaagcttgctcgactaccgggggaagacaagaatattatctagttgacctctgagaataatttttgtgaagtacgggctctatcccaaggacttcattcctaagtccgtgttggggaagaagaggaaatctggtgctggacggagcgaacgagcttattcggagaatgagttgattcaactgaagcgtgaggctaagttaaagggaggtgcaagggccaagcagtatgctcaggagcccttgaatcttgaagatgaagctgaggaagagcaggtgactccactaaagaggaagaagaaacttccggccccgcccaggcctgttgaacatgccattcgcataagggagcccatttcacctgcttggccatcccctcctgtgttcagtaaagggaaagatgttatgtctgaaataagatcgatgtcaggtgatgatggactttcgagtcttgtttgggcagtcaccttgcatactactttgtcttgtttttgagcttcttgacttttatgccttatg

SEQ ID NO: 362547 - DNA, 599 bp, Cannabis indica
tagactttcatttcattttacaaaaaattacaaagtttaaaaaatagaaaaattggaaagcttttctctcaaacctctctctctttttcggctctcttggagcatcaaaagccagccattttccttggtgattcaagctttattttgcaaactctagtgatctcttgttgtggtatgtgctccctaactttcttcctttgtttcttggaaaaaaatgataaaaaatatgagttatgcatgttcaattttgatgttattgctgctgtagttttaggttattttctgtgtttttctatgcttgaattgaatggaattaagtaggtttcatgcatgctagttacttggttcaagtttatgaaattttgttcaaaagctatgattttctaagaaatgtgttgaatctgttaattgcttgttgtaggtgtttgttattgttttcagaggttattctatgcatgattaagtagatttatgttggtttgattgcatgttagctaggtttactcaagtttgagtttagaactcaaagcttgagctttaatggtgatttttgattatgtgcaatctgggtggttttgaagctttagaaatgttctagg

SEQ ID NO: 362548 - DNA, 1257 bp, Cannabis indica
agttaatccaaaagttatagctagttcacgtaattatcttatgagtattgttattgagaattaatagtatccaacagaatcgtctaagcaagttgacagccttacgtgaaaaattaaatttgagcattttattaaaaaaaacaaaaccaattatcaattaatactttataaattcaactactaattatgctgcgcttcgtgtaaattaaattattatataaatattaattgaacaataaaatattatcaaacaatttaaaacttatttttatgtatattttttttaaaaaaaatgataaatatatatagaaaactctaaagaattaaaaatataattttttatataaataaaaaatcacacaaattattttaaatgtacattatatatagtgaagaaaattaaaactaaataattcttacacaaaatagagatctaaaacagaaagaatgcaataaatctatatagaaaattcatcatataactttaaaacaactatcatcaccgtatctcatttgtagtcaccactgtatttaaagttaatgtcattactgtatctcacttgtagtcataattaatatcctttctaataggtttgttttgtacataaaataaattaaacaatgatcggtaagtacttactttaattatgtgaggaagagagagtgataaacataatcaagtttataatttgtatatttttagtatattagttaataatttatttcgatacattatattagttaatattaattatatctctctagctgaaaaaaaaaaattagtttaatttttttaatacatatatatttatttattagttattatatataaatgtattaattttttttttatttttaattaattagtgatctctaattcaagtaaagaagaataaaaaaatagaaaaatgagagagttaagaagagaatttaaagtacaacagaaatatttaaaaagtgagagaattaaggagaggataattatttaaaaattttaatttttaattatataattaattatcataaattcaaaaattataaatagatagtttgacatttctttattagttatcatgtatgattagatactttttaattattaattataaataggtaatttactttttttcttaagttatttattactaaggtattatatatatttatatattttttttttaaaaaaaaaagtaaaactagaatatatatatatacatatatagatctggaaaaaaaaatattgtgttttatattgat

SEQ ID NO: 362549 - DNA, 865 bp, Cannabis indica
ccaggaggagagggatcatgaaggggacgttgaggtccaatagattgaggagcaggacgacgtacgtcctagcagttcctccgaggcggaggaagaaccagaggttgaacccctaaactacggggagtacaatgaggctagggagacagtcgacgctgacggagacgtccttgctgagggtgtggactacgtcagtgaggagcttactactgtggttcctcacagaaggcaaggtgccttgggcgcttggtgggtaagccctctgtctagggttactgaggcacgccttcggactctcgactagggtggaaacctgggtgactactacattctcgcccacaataaccgtgccacaaactctaaaaaggggatttgcacatggtcaggtgcccatgccctacaaggggcactgatgcctttgcatcaatagttcaagaaagtggcagacttcttcggcctctgaccggcccagttcactcctacggcattaagtatatgtctgccctcttcgtcctctacgcttcccagaagtggggtatgccttctcctcacgaagtcagctggttttttgatttgaagttcacccctaagcaaggcaggtcggggtacttttatttctctcaaccagacttcaagtggttgacaggcaccgatgactcggccatcagcaaaattgggcattttgttgatgagtacttcatggaggatggcacggggcgggatagagctcagaagcttgttcgactgccgggggaagactggaatatcatcctgttgacctccgaagataattttgtgaagtacgggctctatccaaaggacttcattcccaaaccagtgaaggggaggaagaggaaatgtgatg

SEQ ID NO: 362550 - DNA, 679 bp, Cannabis indica
atttgtctacccctcactgttggacaagcttcgacgagcatgactatcatggcacagttcctgatattggatgttccttcagcttttaacgtaatgctaggctggccggccttgtatgacttaaaggctgtcacagcaatattccactcatgcctgaagtttccaacaaagaatggggtagggtgtctgagaggaaaccagcagtcggctcgggaatgttataaccttgcagtggccaaggctaagaaggaagtattctccagccagagcacaaacaagggaaaaaacattcccaagtagggaacttcccaaggcggggatgaagatgtggatcctcgacttggggacctaagcagcaatgttgggtctgtggaagagtaagaagagatcgagatcgatcctgatatctcaaccagaaagctaaagatcggaaagggtttgttgctcgaagtaaaatcagaattgtaaaatttcttacagcaaacctagacgtttttcactggtcacatgcgaatatggttggaattgatccttgtatcattttgcacgttctgaatattgatcccaacttttggccagtccaacaaaatcgaagactattggacaaagaatgagcattagccctgaaggaagaagtagaaaatttgtgcaacaaaaattttataattgaagctttcta

SEQ ID NO: 362551 - DNA, 543 bp, Cannabis indica
agcaaaaattacttttccttacaactcaagaaatcaacaacaagttacaagaagcttacctagaacatgagaccactaaatccttgctaaaacaatcttgaaaatcacaaagaatccccacaccctagctgctctaggccgaaagagagaaagagagagtttgagagaaaacctctctcttgattttccaaatttcaatttttgaataaatgaattaaaaacctagtttcactatgttaaactcagcttaaaacatgggaaaaaaatcagcttattaacttaattaactatcactaaagacaaactgcaaaactcaaaaagaccataatgcccttgcccatactaaagagtcatacaaatcacttagggtattttggaaaaactctaaattctcgactaatctcgaccttcccaatgtctaactatactgccccgctatactaaaatactaagatgtgattctactgagccatacactgcattccatgttgtcgggcactgaaaatttaaaaatatgaaatttctatatatgacatataaaat

SEQ ID NO: 362552 - DNA, 1146 bp, Cannabis indica
agcttacagcttagtgtctgcttttaaaatcacatagtggttactcctgcgcggcttaatgaagtaaaggccaccgttgaagaatggtgggagaccacaccaagaaggttgtgagtactagtacttttatgggttcctaaacgatgaaatgttggatgaatttaattgacaagttggcctgtgacagtacttactgagatgttccctatttcactgcttaggtacaaattctaacttcaagttttcattctactcgccaaagttgtatgcacctttattgttatcttgtaacatagtgcagacctttttagtttggtccaaaaatgcttactgcaggggttttgttgtcaaggaatattcttcagagagtaattctcttggcgaagtatatcattccttgttctttttgttgatgggcctggtaactctttatgtgcagccatgctgccttgagttggcttggtctcttcttctttcccttttgtcaagggatgctgctagcaagatgttgtgtacctcttggtcattgtagactagatgtatgagagcaaactgctggtggatcggactggctagggcaagaccaggcggccagccacgttgagagagcattacttaggcaattggatgaggccatggtcggccagcatgtggaggaaatggccgaccagattgtaaattctatggtcgggcagcttgctgaggacatggtcggtcatccttctaaaggcccagttaatgctttggttggatcccgtctgcattcgattggctttgcccccgccgtaaatgtcgtagatttctttgtccacttttgtcaatagctatacatcttgtttcttggaaattctcctttatggtattgggataccacttctatgtgttatgttgtgtaggattggacaccttgtacccattctcctaatccttgctctttggcaaggtctttgtttggaggtatgttgttgtaggtgtatccatattggttgtctagcatgtcttttccttttgaaatagaaggacttagttcgttgaagagctgagcaggtaccaagtttgccttggttgtcaaggcgcagctagctagttgagtgagtgtgttggccactgtgccgtctttgggggcttgccttctagtatagcctt

SEQ ID NO: 362553 - DNA, 649 bp, Cannabis indica
tagtataagtatgttggagtgtcatctagtgagaaactaagagaaaaattcacagagtccagccctgatgaaaagagatggtgattctaagccctataatgcccgagaagagaatgacaatggattttgtcaaaagctaaaattctgaagagtaaagaatttggaaaaatattagatgtttttctcaatctaaaaatccagtaatagagatctttggaaggaatatctcaagctcacaataactaacttattacacacaactaagttttgtccaattgaaagttgaaaatttagaagaaaagaacaagataggtatgtataatttggttacgcttggatgtacaatgagaagcttaaacgaagtattgacttgtgcttaaaggtagtatgggaagtaagagtcaaggatccctcactaagggattataaatagtgagtctttagaagtaaatcaaatacaagtgggggtataggaggtataatagtgatggacagaataaggtctgttcggtatgatttgccaattatatatatagtatccttaccatgataacttggctgatcaatacattatgagattagtatggttgacttattgttaaaagtcaacagaaagtaaatagttgggctacgataagccatggtaggg

SEQ ID NO: 362554 - DNA, 695 bp, Cannabis indica
aaaactgttaactaaggtttggatgtttgataacgattctaatttattagaggtggaccatcctgtggtcattaagttaagaaagtgtttgcttcaacaaatactacttttctaagaatatgactaagtctgaaaataaagtagtaaagtagaggagataatcttcattccaaagtgttctatcatcttattctatataatatggtcccactgcctctgttatcttgacacaatcgatgagaaaaataccacttatgttcttagatagaaagtcacggtaccttgtcatatgggagggtttcaaggaactcgccctgttatgacttggaagacacttgtgattaaaaatctattgttagtttaaacaagtaatggatagtcaaaataaggaactaagaagcaaagcaaagagaactatggttaaaaacattcatatggagtaaccaaaaggttttctattacaaggacaagaaggaaattttttattagaagtctatccaatggacttaacaaaactttctgatcctactataacaggtttgagattatctaaacctatagcatgtggtatacctggtaatttacttattctagtacaagcaacttacttttgtaagatgctgaagcattttttttttctaatggctaagtctataggaagccttttggctcttagacatagattttatttatct

SEQ ID NO: 362555 - DNA, 591 bp, Cannabis indica
agttaagagtggactgggcagctgggaaggagatgcgcgagtcaacggagatggtattcggaggtgagaaggaagggcggcgaacggtggagaaagtgaaaattaggaatttaaattgaaattgattttcgttttaagggcttttggatccgagcaacaatgaagagaagacctcgaccccgtcgcctgagaagacgctgttacctgagaagaaaacaaggaagaagaataaaaacgatgagagttcggttttagggctttggtttatttttttttaggtctaactaggattttaaccctgaactttttaaggttgttgaaaatgcttctgaactattgagattgttggatttaagcactttttctttaattttcatttaattttattattttagttgtattgtttatgtactaaatcaatgttcctcatctctaaaaaaaaatcatgattttgatatctaccaaattatgtccctcgaactttgacatgtactaaatcatgcccctgaactttcatccatgttagattgctttactaaaattagacaaaagtctttaaatctaacaatctcaatagttcaggagcatttt

SEQ ID NO: 362556 - DNA, 507 bp, Cannabis indica
catgcccttttagaggtcatgataaatctaaaacatcaattaatcgtggaaactttctagagttattgagtttcataagttcttataatgataaggtagcagaagttttggataaagctccacgaaatgccacatatacatcaccaacaacacaaaagcaagttttgcatgtcttggggaataaagtgaggaatgcaattcgtgaagaaattggtgatgcaaatttttctataatagttgatgaagcacgagatgaatctaagaaggagcaaatgtcaattgttttgagatttgttgacaaagatggttgtgtgcaagagcgtttttttgggcttattcatgtcaaagacactgctgctttaacattaaaacaaggtattttctctatcctctcaaatcatagtcttgatgttcattccatttgtggacaaggttatgatggtgcaagtaacatgcgtggtcaatggaacggtttacaagctttaatttcaaatgaatgtccttatg

SEQ ID NO: 362557 - DNA, 733 bp, Cannabis indica
gatgattgggcggccccagctcgagagttaggcgaggaagaagaaaatgcagaaggaagtgggattgattcggtggacaacacttagttgaacaagcccttttcatgcgaggacatggtctcgagggtcaccaaatcagatcttaccacttttacgagactgaaccttctgtgacttgcttctttgcgacctaaacctactcagagagcacacctttcctttaccaatcctgcgatcatacctaaagagtatgtggtagtcttaatacccattcttcgatgtggggtatcgatcccttttcaccccttcattgtggccattctcaaacgttacgacgtgtctccttttcaattaacccccaacagttatcgcacgaccctagccttctatgcgatgtatatggaatacgtacatacggcacccacagtagaagagttcagttacttctacgatataaagagcataggcctccacaacggtttctactacttcagcaagtggttttatattttcaaacttccagggattaggactgattttaatcatcgacctagtatgtccaatgtttcctgacttagtcattttttgagttattttgagatttcatgctaactcgctctttttattttctcagatagaccagctcgacctacacttgactcgactcgcagagagacagctgaagttcttgggagccttcctgtacaagatcgcgactggcgattattgtgta

SEQ ID NO: 362558 - DNA, 116 bp, Cannabis indica
tcttagcttattcatttcgaattagcttaaataatatatcattagatgaatggtctataaatcatttgcttatgatgtcattatgttttctcttaagaaattgaatggcgcatatg

SEQ ID NO: 362559 - DNA, 568 bp, Cannabis indica
ttagcaatggagtgggcagcaagaattgttgtacgaaagtgttgtgttaacctattataagacagatatttattaatggggtaagctgtggacatagtagcagtggtattgcaaatataatctgaaagacgtttaggtttagataaggttcttcctgtttttgaagtgacaggagaagtaattattgattccctgggtgtggatggaacttcatcaagaggcgggacatgtgtgttgatgtcatgcacactttgaggaatgtccattgtatgagatagagtgacatcatggtcgggaacagattcatgctcctcagaagggtgttgagatggtcctgtagaggacagtaaagaatgtgagagtaattgatttgtagaattaggagagttagtgtcagatagtggaaagatatcttaaagctaatacatgtcactaccaaaaacaacgtagcagatatttttacaaaacccatttttccctcttattttcatacacttgtaaccaagatgaacttaagaaacttatacagttcatcttgaagggggtattagatattgcttaggcccat

SEQ ID NO: 362560 - DNA, 704 bp, Cannabis indica
tatcctcctactcggattctcaactgatgatagcccgatcggatatcaatctttagaaaagacaatcttctcctgaagttgatcaaaagatcgtctatcctaggtaaaggatattattctgtttgttagcttattcaattcccggtaatcaatgcacatccgtaaagatccatctttctcttaacaaatagtaccggagctcccaaggatgacacactaggccgggaaaaccctaggtcaaacaacccctgaagctgaattttaatccttaagttctgctggagccattctgtaaggagccttagaaaccggttctactccaggtgctagatcgatgatgaaatcgatttccctctgcggtggtaaacctagaagtttatcagaaaaaacatctaagaaattttcccaaaccaccctgatatcttctggctgaactgtctctggcagtgtggtatccaataccacggccaaaaaccctaaacatccatcttgtaacaattctcttgttgataatattgaaatcactgggatccgggatcccggaaccgatcccacaaaaacaaacaattcctcaccctctggttggatgattaccatcttccgtttacaatcaatactggttgagtacttggataagaaatccatttcaagtataagattgaaatccgctaaacccatttctattatgtaacgccctaaataat

SEQ ID NO: 362561 - DNA, 1084 bp, Cannabis indica
agcatgtgcaaaaggctacttttcgcttccaaggatcaaccagctggtagacgatacaactagccatgatatcctaagcttcatggatgcttactcaggttacaaccaaatcaaaatgcacccaccagatcaagagcacacaagcttcatgacagacataggcatatactgctacaaagcaatgtcctcagactaaaaaatgcaagagccacttataaaaggcttgtgaataaaatgtttaaagatctcattgcccgaaatatggagcagtatgtggactacatgctggcaagtctaaaaaggttggggcatgtggacgatctagatgaatgcttctagatcctccaaaagtacaaaatgaagctcaacccccttaaatgttctttttgagtaggcttaagaaatttcctcggctttagtcaatgtcgggggaataaaaacaaacccggacaagacccaagcccttttggacatgaagtcgcccacaacaatcaaagaagtacaaagcttgacgggacgtattgctgcactaagcagatttgtgtaaaaatccatggataaaggtatacccttcttcaacattctcagaggaaatctaaaatttgagtggacaggggagtgtgaaaaagcattccaagagctgaaaaaaaaaactgtctcaacctcctgttctatcaaaacttctacacaatggagatttaggcgtgtacctagctgtcacaaaacatgttgtgattgcaatcataataagagaggaagacgatataaaacatcaagtatactacatcagtaagagactgatcatgtatatagcttactcttggcatccaaaaagttaaggttgtacatccaagctcacccaataagggtgtacactaaccaaccattacggtaggttttgcaaaaacttgaatcatctggccgactactcaagtgggtcattgaactcaaaaaatttgatatcacatgtaacgccctaatctattaggacgccaagtgtgtgattttataaactagtttaatactagtagcataattaattattaaaaaccgtgataatattaaaaacttgactaaaagaaaa

SEQ ID NO: 362562 - DNA, 550 bp, Cannabis indica
cataacatttacacattaattataacgagcgtaataaccctaggccattaaaccgctcatgttagggtaataaccataatcccgattcctaattactcacatagatcaatttcaatataagcacaaccatgcataactctacatgctaactactgttttacctaatgtctcgcaaacgtggagattccgaatctccaagtgctcctgaccaagtgccgataatcctagtcacaatttcaaagatttacaaagatagggtcaatccctaaatccactttcacataatacaaaatttccatttagattatagatattcacatagagcttggaacgagctttccaacgatatatagaactcccgagagggagtttggatcacaaagttatgaatatttgaaaattgcattcaaatctgctcagaaacacggcggcgggccgcggcacccacacatggtgccgcggtacctggtttaaaacctaggatttcaacagaagtgagtcgcagtgcccaaaaagctgggccacggcccctgggtttcaacccagaaaa

SEQ ID NO: 362563 - DNA, 687 bp, Cannabis indica
gaataactttaacataataatgcaagtgactaatgtgacgaacaatttacgctgtatttttttccccaccttgcttgttggagcagcgagcagctggtttaacaaatttcctcatcattcaataatttcctgggagcagctgtctagggatttcaagaagcagtttcaggccgctagggacatgcgacctgaagcggcctcgctaaccaatataaagtagcagcctagcgaaacacttaaggcgtacttaattcattttagcacggctgctgctagggttagaaatttggatgacaacacgcaacttatagcccttcaggtggggatctctactgatccattaaccacagggggcgagttgtgggatgacttacaaggacgtccagtgagaagcattactgagttcaacaaaagggctcaggtgtttctccagaaggaagaggctcgaaaagagatgaaattattgaaaacaagggaagcaaacccatcaatgtttcaacaggtactgcttccacgagaattgataactcgggggcttctggtccgaagagaaaggacagaattaaggaaccgtcaaaggagagaaagaaacaaaagaagcatgacaaatatgggccagtgtatactatttatggcgagcttaatgaaactcgggagaatattaacctcgcacatgagtagaaggta

SEQ ID NO: 362564 - DNA, 801 bp, Cannabis indica
gtaatgggttttatttagggcacaaaacccaacaaaaaccactatgaacaagatgcaaatgccataaatttataaaataatgtggttgtggtcttttgatgacttaggtctagttacaataaagagttcttagaatagttcaagtggatcctggtcacagaatactaaactcaaattccatacattaacatacagtttggatccagtgatagaaaatggatattaaaaacttatgaaagttgatttgtattgtattttgaaaactgaaatttaaaatttcaatttggaatctaaaatttagagtgaaagacttaaattaatgccaaatatacaatgagttattattctttttggaccaccactactaatctaactctaagtctaatttgcctaaagtaagcatatacaagtaggagatttctaagatcgagaatttatatcatttcgggatagaatgtcgggagtatagtcatctgcgccattcaatttcataagagaatatagaatgacatcataagcaaatgatttataaaccattcatccaatgatatattatttaagcaaattcgaaatgaataagctaagaggaaaaattaggataatttcgattaaaataagaatccaacaatgtcctggtaggcgagagtcaaagttattcttattttacacgaaatttacaactacaattaataacagaaattaacatggttcaatataaattcatacacaatttagaaattattaagcatttagcaaataacaaagaacatgtgaaaatacaaaactatcatatcttaaata

SEQ ID NO: 362565 - DNA, 539 bp, Cannabis indica
taataattatagataattattaatattgatacatatgtaatcggaatttatcaaaataaaataaataaataaataacttgtttttgtattttttgtgtaacatgtaatattaatattaattaaataaagtactgacttacaaattagaacttaatgtttttaaaattttattttgtaattactctgtaaataatgatcagtctcttgattgtctcttagtgaagcaagagtggtttttgttttgaataacaacgttttagattaataccataaattagaccttatatatggtcattacataaaatgttatctggtatattgacaagattgatcatgccaattatattcttggcgaaagtccactagtcacattatgagctgcaaaattatactatctagaaataaaaataaaactacaacttaacaaaagattcgagagatgtttacattgaatcacatagttaccaataccccttcatgagcaattttctttcagtgcattgataaccgtctcagagtcactctcaatcaacacaaaa

SEQ ID NO: 362566 - DNA, 1054 bp, Cannabis indica
tcagtcatgaatctacttatgtaagctcgggagaggctctcttggtctttgctttcacgttttaccaggtcttctaaatggagtgggagttggcaagaagaagataattatgcatgaaactctgaggagaaggattttcaagagttgaaccttcctggtgtcaacttgaagtaccattgctgtgcgacttctgagagtgtggcagggaatactctagaatatgcacatatcctcgtaccccttgtaagtccatttgcattttaacatacttgagatgcgataagggatcttctttccctgtgtacatcttccaggtcgacatcttgaacctgaggggtagctttagaacattaatctcaagagtaaaaggggatccacgtgctcagtccaacttgagatcattgagcttttgaccagccaggccttggaacatatttttcagttcagctaactgtgcttgcacggatggatgaacttggtcggcctcttcgccgatcagtgctacgtcaagatctctttgagctggatcttgaatgtggaatacgagctgagtggctggttgaaaatattgttcgtctaaatctctccttctatttagatcatccctaagatcctgagctgttcccagtctgttaaatactgaaacaccaggttttctcaaggtctggttggttttgccgagcacttggccaaaactgctagtttggatggagttattaggtattaccccacctgatgaattgccaaatatggtctagccgcctaccacttggcccagaggtggaacctgtgattcgggattggacggttgaccgtttagagtttgggtagtatgcccagcgagaatttcttctaagctgcctagtgggatatatgttggacgtatgctgttggttagcaacttggtaggcctgccgtatcagtacggtagcatatcttgttgggtcgtcgatggctgcctgttgggccttcaatgtttccatcctctatccctccatttagcgaactggcacctctgctcttcgaagacaaggttgttaggttttatgcccta

SEQ ID NO: 362567 - DNA, 699 bp, Cannabis indica
tgttcgaggagcatgctgatgaagttgttgacttaggagagaaattagttgctgacactgagtggacagatcaactgaaaccgaggtgttgttggtatcttcagagtgaagattggcagtggcttgattaccagctcccttccctttctcttgcctttttttgtctccataaccaggtggaaaaccatgcaagaaatagcacttttcgacaaaatgacctggttttccacagttggaacaagagggtcttggcttcttgttttttgggggattggtggggtatgatggtttaaccgatgatgcaaagcaggatgcatcagaggtgcctaaggttctttgacgttcttcttgaactatcatggagaagacccttgaaaggttgggaatacgctcattaagtagaatctgagccctaattgaggcaaatgactcatttaaaccagtcaaaaaattgaagaacgtggtttgggttataatggtcaagaaatgccttcatagctccataagtacatgttgtgttaggttgaaactccttcaattcatcccatagaaatttcaatttagtgaagtaggaggtgacagactgatcatcttgatgcaaacgagttaattgggtttgaaattgaaagatgcgaggaccatttgcctcgttgaatctttcagcaagatcttgccacatatccgtagcaagatcaaagt

SEQ ID NO: 362568 - DNA, 650 bp, Cannabis indica
agattgatgattggaaggttatgatttttaaataagagcaagaaaaagaaatgggctgattgaactatataagctgcaaccattgtctttctcttttctgttgcggagtggctggtgtcaagggcaagccacaaggttagcgcaagccacaaggttagctcataacaacccttttccctttagttgcatatgtataggattttggatttttattgacaagtgagcatgattttagagtatgaaataaagtatggttattgaattcattagaagtagtaatttgttttattttcttaggtttggttcacatttataatgttaatcaacattgttgttttttctgttaaaagaaagaggagtttaagaaaccatcaaggttgttgattcatgattgtgcttcagtgttcattcatacatactactctcaatttttgaattttgaagcctaatatagttactaatttgagattatatctttttttctattttatttttttgctgaaagttagggattatatcttagttctaagttttttctatgtcgattctgatgttcaatatagtttttatttgatttctatatttttttatttctgtgatgttgcttgtgcaagttcaacgacagttttttcgttgttcgttttgtgtgt

SEQ ID NO: 362569 - DNA, 179 bp, Cannabis indica
atctgtttttccttacaagaaatctcttccatcttcttctgcccctcatgaagcaattcatcagttttcaactgcttctccacttttcattcagtcacatatccctcctcctcccggaaagtgatggattaaatttttctgaaggcaaaaattctgattttcaatctcttaacaagtgt

SEQ ID NO: 362570 - DNA, 1330 bp, Cannabis indica
gccaccatttttattggctatctggacttccacgaccagcgggtcgttgtgcggaaacttgactttgacagcgtcttcatcgttgaatggtatggttggctctcctgctcgtggaactttgggcttcttttcttccacgactaggataatctcttcttgttcgtgctgcactgttcgggcatacctctcccgagctttgcccgaatctccagcaatgtgagggcctccaataatgacttgcaagtgtccgtctaccggtggaggtagcaaatcttggttgttctgaccttggtcggtcttgacatacttctgcaggtgtggattgtttttccttattaggaattcaatttcccgcttcaagttgtagcattcgttagtgtcgtggccgtagtctccgtggaaccgacaaaactttgtcatgtcccttttgttggtatctttcttcatgggtctgggcttcttgtacggggccaacgactgggttgccatatatacactttctatatcttcagtcagaatagtgaatgcaatgtatttggcatgattctcccggggagtctgtccggatttatcagtgaactttcctttcttcccgttcccttgcttgtggttgttgctagaacacttgccacttgagcttgaattatttgggtagttgggaagttgggaggatgttccagttgaaggagcctttgacttgtctggcttttgttcaccttctgctcgttgaatggcttcttcgagcttgatgaagccttcgcctcggtcaaggaaatcactcattaagtctactggcccgttcttccttatatctttccaaagtttaccgaggactttgatgcccccagtatcgcgaataactttccatcctcggttactcgtgaaactttggtcgcctccgtcatgcttctgctaatgtattcccggagtggctcgcctggtcgttgcttaactttgaccaaatctcccaaatgcaatgggatttggcacgaggaggagaattgcgcttggaattctaaagagaaggttttccatgaactaaacattccagcggccaacttgaaataccattgctgagcggcttctgacagagtggcaggaaagattctgcaacatacatctcctcgtaccccttgcaaatccattcgcatttcaaagtacttgagatgggaaaggggatcttctcaccccgtgtacattttctacaacgccattttgaaattgtggggcagtggcaggagattgatctctgggaagaaaggagttatgcgtgctcggtctaactcaagatcattatttcgttgtccagccatgccgtgaaacatatttt

SEQ ID NO: 362571 - DNA, 943 bp, Cannabis indica
gtccagccatgccgtgaaacatattttttggttcgtctagcggagcctgtacagctgggctgccctgctcgacattctggtcaacttggattatgtcagcatctttttgagcggggatttgagtacgggcttcgggctacacgattgccgtaacattctgatcatctgttcccctccttctgtttagatcattccttaggtcatgggttgttcataacctttcgaacacagaagcgcccggttgccttagcaattgattcgcttggttgacgggtggaatggcaccattggtttggttggagccatcaggtatgactcctcctgatgaattaccatacaaggtctgctcgcctaccgctgggcccatgagcggaactcgtgaccggggattgggcggctgatcattagtagtctgggaagtattcatcattggatcctcttccgtttctcaaaggggaatgccgatcggtgattattgacctatagtttggtaggctcttcgtatcagcacggtggcttgtcgactacgatcttcaatctatgcatggtgagcgcttaatgcctccatctctgtatctctccattcagcaaacatacgcctttgttcgtcgaacgcgagattcattgcagcacacaatttgtcctgatcatgatgcagggtgttattatgacccggcatgagtccgagcgtgtcacaaagattttgtaattcagtggcatctccgatagtcgtctgggggttggttccaggcagaacagtcgtataatgaatgccctggttgggtgcggatctgttattcccagtctcttgcatactaggtgcaattccatcaattggagctatttcaccattccccacgcttgccgactgtccaggattaacagtaggcgaaatcctcgtgcttcctgggttctgcgatgtaggatccagcgtctgtgaatt

SEQ ID NO: 362572 - DNA, 528 bp, Cannabis indica
gcaatagatgctatatttgcaagtccaattctcgaaaatcacaataaaaaccacattgctggagttgctttcggcaccgggaaagtcacaagagctactccccgccggtttaaagtcatcggaatcggcattatcgcaaaaaaaaaaataccaagaaactggttccctcatcaagaaattggtttcttaatgaagaaactagtttcttggtgatttttctgacgataatgccaattccgacgaattttctggaattttcagtcggtaccgaaaatgtcgccggagtagctgacggtgtcggaaaagtcgtcagagttgctgccaacgccagaaaactcagtttcttggtaatttttccagcgactatgccaattccgaagacttttctgaagtttgttgtcggtgtcggaaaagttgctagagtagctgccaatgtcagaaaagtcgtcagaattggcattgtcaccggaaaaatcaccaagtggtttcttcatcaagaaatcaattttttagtgattttttcagtga

SEQ ID NO: 362573 - DNA, 502 bp, Cannabis indica
aatatattacattattcttcttttttctacttttttaattaagaaattaatcttcttttttttttatttttttctacaatttttaaataaaagattaatttatacgtaacagtaaattttatacttttaaaaaaaaaaatacactaaaaaaaattgctaaaacaaatattgaaaacttactattattatatatgcattataaccattttacttttaaataaattaaaacatggtgttacatctacataaattgtatcattatatgtggataatcaagacattatcaatcatcattaatgaaattgatatttgttggaaatattaagaatcttttaacaaaatatataagtgtcttagtgtgtgtgagttggaaagagtcccacatgggatatgaaccctcatttacaagggtacaaatagtgcaactttggcatttgggtttgggccccaaggggtacccgagtttggtgcaaatgggtgaggacacacacacttgacccac

SEQ ID NO: 362574 - DNA, 906 bp, Cannabis indica
ttcttccacttcttcttgttgctaggttcggaagtagaggcaatgtttacctcaaccttagccgccccattagcattcccagaattaggagttttagatcctcctttctgtggtcctccaatcaaattttcaaatgtctgaaggttgttgaccaactagtgcaagtcaagctccaacttgttcatgacataatttgaagtaaatggcagaaaggctggagtcagactgcttaagatcaaattcacttgagttgtctgatctataacaactccatgattctcaacttcctcgaagtaactagtcatttggagaaggtgatcatgcacgctctgatgaggtctcatccgtgcattgatgaaattctttgttgcctcaaagcgagcttgaattgatgccatcccgaatagttcagtcaactggttcatgatttctacagccgtgagagtgttaggaaaccttgtcttcaaggtgtcaaccatgctagacgctcgaacttctcctttactgctttggttgcattctcaccaggctactcatgagccatttcagtcaacacaaacagggcattttcaccaatgagagaaatgtgaatgttctctctccatttaataaagttagatccattcagtttattatcagtcaatagcgataccatggggttggtcattgtcatgttggatactacaaataataataaatagaaatcaagtaaggttcaacacaaaatcatattcagaaattattagaacttagcaattaggaatgacaagcgaaaatactaaaacatacaatcctaaataacttccaaggtcttcaacaaactgatatcagtgtcccatttaggccagagtcaaagataccatccattgaatagagttgtcagctcatctaaaatgataaacattc

SEQ ID NO: 362575 - DNA, 639 bp, Cannabis indica
cttaagatcttgtttctttgtccagccatgccgtgaaacatacttttcagttcgtctagcggtacctgtatgggtgggctaacctgctccgcattctagtcaatttgaattacgtcagcatctttctgagcgggaatttgtgtacgggctccgggctgcacgatcatcgtaacattctgatcgtctactcctatcattctgtttagatcattccttaggtcatgggtcgtccccaatctcttgaatacagaagtgccatgctgcctcagcaattgattcgcttggttgacgggtggaatggcaccattgatctggttggaaccatcaggtatgacttgtcctgatgaattactagacaaggtttgccagcctaccgctaggcccacgagtggaactcgtgaccggggattgggcggctgacgatttgcagtctgagaagtattcatcaccggatcttcgtccgtctcacccaggggaatgacatttggaggttgctgacctacattttggtaggctttttgtatcagcacggtagcttgccgactacgattttcaatctctgcatggtgaacccttagcgcctccatctctctatctctccattcggtaaacatacgcctttgtgttgggttttatgcc

SEQ ID NO: 362576 - DNA, 704 bp, Cannabis indica
aaaaaattaaaattgatatatatacatataaaaaataaaaaaaatataatatataaatatttaacttaacaatttacatgaaagacgtatggcataattggaatcggggcttttattggctttgaggttgagggttcgatcacttcttcagtcatcttttaaaatgtatatttattatctatttttttaaatatatataatttaaacacatttttttttctttcaaatgtgttaaaatacatagcactttaataaatatgctcttaataattaaatattacttaattttattttttttaaaaaaaaaagaaatattacttgattgagttagcttacgttaaataaaaaaattaaaattgatattttgtcaaaatttcattaaaatttatttaaaatttttatataaaaaaggtctcaatttaaattttgccctaggcctttcatcaccttaagacgggcctggcgtctggttatatgtgataatatatttttatatttttttaataaatatagggaattttacaaaaatactgcttttggaccaaaactttacaattatactgggacacggcaaaaacaacatttttactgccccagcccaatttcattacttttgtactgcccaagcccaacatcatttcatttatactgtgaacagtaaaacacacgggaaacaaccttcttcgtgtgtggggagtcgccgg

SEQ ID NO: 362577 - DNA, 639 bp, Cannabis indica
ctgagttcttgggggaaggaggttacggggaactttaaggacaggataaagaagtgtaaaagtgaagtgcatcggtggaaattggggtatgatgagtcttcggttaccaattataaaaaagctaagaaggagttggctgaagcttatgtaaaacaagaagtttcttagcgtcaaagatcgaagcaattgtggctccaagaaggtgataataatagtaaatattttcatgcttatgctactaatcaacgtcgtaataactttattgctaaactcaaagataagaatggcaattgggttgattggagttcgggattgcctcaagttatggtcgattatttttttgcacttttttcttcttcaaataatttttggctggaagttacgagtgctgtggaaaatcgagttttcagctgaccaaaatgtcgacttgctacagtcggttactgatgaggaggttcgcaaggctttatttcagatgcaccctgacaaggcttcgggtcctgaaaaaatgactccagcatttatccaaaaatgctggtcggttgtgagtagtgatgtaatcactttggtttgaaatttctttgaaacggggcagcttcctagaggtttaaataacactaatttagtgttaattcctaa

SEQ ID NO: 362578 - DNA, 714 bp, Cannabis indica
tgttatcctcgctagtcactgtatgtataattttatcgtttttaattgatagccataatataatacaatgtgagacaacacatcattgatagtagcacatcccgagataagataacttttgtatttatgtttccttaatttttgagagcaatatccacgtgtcacgcccatatttatggctcaaaatatggacataaaaattgccccctaaaaagttctttgtgaaactgaaagggttttttaagtaattcttggtgggtcactttggtcttttctcgattggtaatgagtgtttttctttggcagatttatttttctagagaaagattatttgatcattaattaaatatcctttcatctaacgggctttttacctatctttttgtattccctagacagatccctaaccgtttaatccaattttgaactagatcaacgattccttacctttttgatataaaaggatttttttaccatcgtcttcctaattacctcttttgaagtaccaaaccagagaaaaaaatccatttcagcttcagagatttttgaaaatcttgcatgccttaacaatatttccaaacctcgctctcagtacatcccagacccttagtatcggagatttccagtaagaaatcatcaacgccctcagagaaacccagaattcggtaagtctttgatttttttaccttttttgtctctatgttatttttatta

SEQ ID NO: 362579 - DNA, 648 bp, Cannabis indica
attagcagttctgttcggccatgggtcagaggtcttccagcagtgtacatatcaaccgtgttgtcttggctttcgtgaagcaggatcaaccattttctatgatttgatgtatgacctattcttgttcaaatggatttgtaattagttgtaaaagaattttcttagcaggggatccccatattacaacagtatttaaaatgaaagtctttatgttgaatttaattaaaggttttaattaaaccacactttttctaaaaatttatagattagtagtaataataataagtttataaaagcacacacgtggcgtccctaagagtcagggcgttacagcacccgttcaggaacactccttacaagttcagacccaaccgttggtggtctagactccttagacttggcagcttcgggggtagaggggttttcagcagtcaactcctcaaaaagatgaataacctccccggtaggcatcttttcctttgtagaggacccctcaccgcccttagacttcttggccagaggagaggcgctagagcttccgcctattctcttcctcagagcgtcgagcatttgccgagacatctctgcaaagaacaaaaataacatgtttagaaaacagacataaaaaacataaggcatgaaagtcaa

SEQ ID NO: 362580 - DNA, 690 bp, Cannabis indica
tccctcgacaacgaaaggctaccggagttctggcttggtgatttctcgcccctgctatggatgaattactatcaaaaactaatcaacttcatgtctcggatgaagaagattgggaggtggatcagagtctctcctcaacgattgacaaaaacattctcagaggacgactgtgctctaacgttgatcatagcaggggtttcttaaagaaagtcttgggaagaatatggaggctaaaggaggcggattggaatgtcaagattcaggaaaaatatgactcaggtatgttctttacgttttcttttgcctctgaacaagcccagtcacagaaactatcaaagatgccatggtatttatctaatggagtattgatattggggaaaatggtgagcactagtgaatcttggaagaatgatcttacagcttttcctatttggggtagagtattgggagtaccaaccgattatcttactgaaaagaataccttgagattggcttctatggtagggaaggtaattaccatacagaattcggatgtctcaaaaatggtgatgaacaaattctacagatttcagatttggatgtctattaccaaacctgtttggcctggttatctattaccttgtgggggttcaaaggtgtggatagccttcaaatacgatgagctcccgttcatgtgcttccgatgtggga

SEQ ID NO: 362581 - DNA, 902 bp, Cannabis indica
ggtaataaataaaagatttgggcatccacataattattaatatttataacagattcactatagtatgacttttgtattgaggcaggcgggtccaaaaaatactcattggtgttgtcatttaatgagtcagaaattgcttgattgttggtagattgtggtccttgagatccattattctgatgatgggttggcaccgacgataatcatgggttgatgagcgataaatacaataatatcttgagtttcttgagatttgctcctcgtttggtccttcccttgtatttccagtacccttggttctcacaacttttgggtctttaataatgttgggattgttacgaaatcttccaggttgtggcgtctctccttccagattagagctcaactcaaattcttccttaaacattagtgttagtcgttcaatctcttcctttgcatggttgtacgaattctctaattttgctgcatagaaagtcaagttataagctaatgaagtgcgggatccaaacctagccatctcataaatgtgttgttgttgtggtgctgtctggttaaaatataggtggagatttgtctttgcagttttgctctatcgttttatgagaagagtattaggaattcttctaatgtttaatcttttcattgtagcccaaaaatgtctacaagggcacccctgactttcatatagcatgcaactacactgtagtgctcattggccttcaaagtaatgaacttggtactgtactttcagatgctgaaactttccaatattgaatatttgccactctccttcgtcctcttgacctaagatataataattattctccaaatcaagctgatcaacaactttatggtacatatttcttgtgtagaattcaacacattggttatagtatgtggtc

SEQ ID NO: 362582 - DNA, 901 bp, Cannabis indica
gatagacgaggagggggaagtcgaggaaggcgaggtggaggatgcggccgcccttgagcgcaagcgaaagggcaagatggttgaggctgaaccacccaagcggacccggaggggggacactccggcggtgagcaacgactttaggattccttccgaagcggaggaatacactgtgtcgcatgacatagtgttgaccccgattcccgcggatgagaagaggcaaaatctccgagtcgccaagcacaactatgccctggataattacagtcgggggcacgcagaggtggaggccttgaagaagattctgcgggaggagcagaagaataccttgcacgaggatgccttccagaatccttgggaccttaatatgatccctttgacggattggttcaaccgcttcatcgggcccacgctagcccccttcgccttggagatgaccagctagtttgtctcccacctgactcaattcccagctaaaagatatgcggcttgtgcctccctgaactcagtttaccaggtccaagacatcagctctgccatggccgcagtgagtacttgtaattcattccatcctttgatattttgtctaaggcatctgatctcactcttgtctcttctttcagattactgccgagaccgaccgcccttcaaagaccctgattgaccatggcttcgtcatgtccgaattcggaggcatagacgaggccgtgaggatcctgtgggatttgtctgccgagaagcgggcattccacgaggaggctcaacaaagggaggcccttggagaggcaaagtttcgagaggaggccaagcaaagggaggttgaggcggatgcaacgcaccaggaggcattgaagctggagggcgaggctgcagccagggccagacgcgagcttcgagaggc

SEQ ID NO: 362583 - DNA, 637 bp, Cannabis indica
attcagaaattatcatacatttgacaagtaaaaaagacatgtgaaaatacaaaacaaacacatcttaactagtttctaaggttttcaacaaactgatatagtgtcccgtttaggcgagagtcaaagatatcattcattgaatagagtagtcaactcatctaaaatagataccattctagcaaccttttattcaatcaagactagaatctggcgttgttccgtttaggcgagagtcaaggccattctatcttatgagcttctaccattgtttcatactttaaaagtcttactcttagcacccactttagggtggaagttagtaagaataaaacacttacaataatacttatctttcacgattctacggcgttaaattgttaatgaacgaacaatcattagggatgaatctcactaaaacaagaactatgtaaaactaacaatggagatcgaatgtccttatagctaaagctcattattttaaaggattgtatttcatttgatacttactttaatctatttattttaatatatatttatttaattgaaattactaatttagattactctaaatattaattttaatttaatatttataaagttatactttaggaagatctgaaaaataaaaatttatttt

SEQ ID NO: 362584 - DNA, 601 bp, Cannabis indica
atcaagactagaatctggcgttgtcccgcttaggcgagagtcaaggccattctctcttatgagcttctaccattgtttcatactttaaaagtcttactcttagcagccactttagggtggacgttagtaagaataaaacacttacaataatacttatttttcgcgattctacggcgttaaattgttaatgaacgaacattcattagggatgaatctcactaaaataagaactatgtaaaactaacaatggagatctaatgtccttatagctagagctcattattttaaaggattgtatttcatttgatacttattttaatctatttattttaatatatatttataaagttataccctaggaagatctgaaaaataaaatttatgttttatctttagttttgattttccaataaatattatgaaaattactgaatttaagttggtccaaaattacttaaataattaatttttaactcaaatttaattttctattaaatatatatctatatatatatgacagaattcgaaatctaatgtattaatgttatacatttttgaaaatctcatgaaaataaaataaaataaaactagaaaaattatt

SEQ ID NO: 362585 - DNA, 1124 bp, Cannabis indica
agcccccatagttgtggttgggcatctcctcgtctcggggcagccggtggtaggtcccggaggtggaaggcttgatgcctgccaccaccacgatcggctccagcttatgggcgcaggtcagggtagaatgaagctcagccgtttcccatccgttggcacgggatttgtacccttcttgggccatgggacccttcatgacctcctccagggtggccacacgcttctctcccttctttgacgacttagaactagaggctgaagaagacattttaggttctgaaaaagattgaaaaatccagcagtcaggccccaaaccaaaccctaattcaaaaagggaatgggggtcccctaaccgctggaaagaggccccctctggacacttgccaaaaaaaaaagaaaggcctcaaaagtttccctggataagagtcgggtgcaagaatcccacagatggtgacattacgaaaaagtaaggaaagaaaacgaaaaaaggggtaaaatcgagaagacgaagtctgctcaaagctctaaagtgtcattacgttggacgaagatgattcctcgacaaaaacatgatgaaaagaattgatctaaacgcaaaagaggaggaatctaacgcgttgtgcagaaactcaaacaaaaattcccaaaaagttcaacatctaacccagaaaacataaatgaacagtaaagcatgctatatgaacaaacagtgaaagagtgtacaaggtacgaggaacttagataaagtgtggaagctggatgttggtgttggtcgccggtaaaaggttcactggcaactgcgaaggaataagagcaggaaatctatggtgtttgaggtttcttttctctttggaaaactttgaggaaatttggtgaaatgctgaaagtaaccaaatgaagtaagaaagttggcttttataggccaaaacatgtgtgagacagctgtgatcagccaccatcgaacagctgggatagcaatcgattcgaattctataaatccaacggttggattaaatcgtcatcaaggcagtggaaatgtttgagtacccgtctgacacccatttaatgcgccgtatcaataaatggacaagaaacgaatcgacgcctgcaaaaagcgaataact

SEQ ID NO: 362586 - DNA, 559 bp, Cannabis indica
aaatatcatttatctttatagtacgggcccaatttttttttcccatggcccatttcaacttaggccttgctttgggtgttcattaaaccacttaaatcgcttaaatcgaccgcaccgcaaaaaaatgtggtttgaaattctttgcgttgcgatcgcagtttaaatttttcttaaactgcgcggtgcaaatcagcccacgaatgactacccgtgtcatctcgtattgagactcgtgaccaagacgcaccacaacgtctcttagagattaaggccacatcctgttcgagtcataccggcaagccaagagaaacatacccgttaacctctggcagaattcttagacgcactaccgggccagcccgatagtgtccacgagtattccaactcatggagacatatgagtcccctcatggtcctcatatgcccgccctactagtcccactaactagtagtagctcacttggcaccaaggtgccctggggtggtggagagctaacaccaggtactcccccttaaagagcattctaagcttttagccttctaccaagaacatacatga

SEQ ID NO: 362587 - DNA, 1239 bp, Cannabis indica
  modified_base (1030)..(1030): a, c, t, g, unknown or other
aaaataaataattactattttaccaagttaaaatatattttttcagacaatattatacaattcattatccctacccttgacaatgcttcaaggtggcaatttaggggccatggacatataattttaagctccaataaactagattattcattgaatctcatcaaccaaatattaatgtttattaattctgtaattactccactataaatatagaattgaattcttagtcattatagaattatatttacttagttttactacagtgtcaattgatacaatcaattccagtgactagctctcgttgtgtcggttcgtaattagttttggtcaaaatactgttttacccttttaattaattacttctttatcgtttagtaccgttaattcactagtaaaagtataatttagaaccaagattcgatccgttaggaaagtcaggattctataattgtagatctgttcccagccatccacattattagattcccaaaacaaaaattgtaagaatcattttctctgagaaactttaacgagtgaatcaaagaaactaataacatgaacatcaattcatgattactcaggatttagacaaatctactactaatcatcgttatgatatgaattaggtctttatagtatacgacatgtttgataaagacaactgttaacacagattttcgttaactaaatttaagcctcacgatagcgattccacacagaaaaaataaaagctatagaaataaaaatatgaacacaaggtttttttacgtggttttgcagttaaaattctgcatagtccacgagtcaatcttattcagatttctgattgtttttcaggaactctcccgtatgaattctttcgtccccttttttatcttgtctgccactatttataattacatagtgggtcaataaattacaaaagttgattgtaatctttacaacaattattccctcaaatcatgggatttgattacaaattatgctaagtaaatgcggtttttatttagaatccacacagctgtgagtntcccgcttttattgggctgagatgaatgcatatttaaagatatatggtaagacttatctcatgggggatgcctcgctaggaatggagccgatttaactttgatggcgagtctgtggctcgtctatatttacgtccccgtaggatttaaaatgtttagctttttaaattttgtaataacttacattttttcccaatgtttgagattgatc

SEQ ID NO: 362588 - DNA, 702 bp, Cannabis indica
tcctccttctcccttagacttcatggcgtaagggaatcgttaaatttccctcttatactattatgttggttagagccatcgttgttgcgcttgcctccaccattctcattgttggagaattgatagagattgtctatgatgaccggcatgtcagatagtacttggggcactatgatgccctgtatctattcgacattgattttccctcttgcttgggcttaccagacagcttcttccaactttatgaagccatcaactcgcttaaggaactcatttatgttgttcattgagatccatctaatatcttttcagaagtcattgaacggttggatgccttctgagtatgggtatatatcagccttcctctattaggcctttgaccttggtggcctcagccatgaaccgttttatgtggtccttcaaaggttcatcatgtctttgctttatttcgacaagatcctccaatcgtgaaggcatttgtcttgaagcaaataattgaatatggaattcttgggagaattcttcctaagaattaaattttcctggggctagtttgaaatacattttgggctattttagctagagttgccagaaagattaggccatgcacatctctagatacttgttggagattgtttggatcttaaagtatttcaggtatactaggggatcttctttccccgtgtacatcttctaagttgg

SEQ ID NO: 362589 - DNA, 547 bp, Cannabis indica
ctaagattctagtaaaataattctaacaacttgcctcaaagccatggtaattgattttctttcaagaaatttagacttaaaacaatttgtgtgtggtttggatggtttcatgttgatctgtgtgttatttgatgattgattgatgcttgtaaaattgtttgaaaaataaatgaattttcgtttttctaattatattttttggatagtttggaaaaaattgagcaattcatttttttacagaacttaattttgattttatttcaattagttatgattttttgaagttttgaaaaaagatagggtgatgacacactctcacgcgcgcggacaccgagtttcactcggtgagacgcgtgttcagacacgttgtgtctgaagaaacacgctcagggatgtctgaaatcccttcctcggcacgcggaaaggctgcgtgcagcctccaacgccgatgttcctcggccgtgtcctctcccctacgcacgctggtggtatgctgtgcataccatccgtacatctcacaattttttcgattttcttcatttttcat

SEQ ID NO: 362590 - DNA, 929 bp, Cannabis indica
cagcccaaaactcaatcttttcattgcaatttcacaaccaagcatacaaattaacaattgggatcactagcaattataaggtgcgcaaatattatactttaggcatccagatccccataaaaataccacaattttagactgagaaacaccacaataacatgctcaaactaagcaaatctcaagctcaagaatagagctttctcttcaactaatcaaacagtttttccagccattaaaacattactttgcacatgaaattccaacctaagaataccataaaatctcagcccaagctcaacaacaattcaaacaataaatagaagctcaatttcacaagattaacaccaaatcacctaacatgcatcaagaacaacctaacacatgcataccaagattacaattacttaaccaagcttttccaacctaaaattcagcaagagaaatcaccaacaatttctacataaactcagcaagaaattacctaactccaagctcaggaatccacaattccaaagcttcaatccacacccaacttcaagcaatttctcaacaattaactttgaaaatcaaaagggttatagggaaagagagggttcgggtgagagagaggaaaaccagaaaattatcactccatttccctcaaaattcacttttaataaacttagaaaataaaggtctaatgaccattttgcccttagggctataaaacatgcataagcattttcaaggacataaatgccatttcacactcaattatatccaaattaatttcagattatcacatgtcaaataaaatgccaaataatcaattcaaattgcatttcgggcccgaacccggttcggcccgaaattcccgattgtgactatgccgcgccaacctgtcagaatacacctgaaaagacaacacatgcatactatataataatata

SEQ ID NO: 362591 - DNA, 536 bp, Cannabis indica
ttccaattcacccccctcttggaaacatatcttgggctaacaaggagctcctctcgccacacgacacccaatcaaaagatgatgcctctcataatatttcagcaaacatgaaaagccctccgcacaaatcaaaaagagaaacagagagagcggatcaccttgtcgcaaacctctacttagattaatagggcccatagtaaacccaccatgggtgacattgtatgatagtgttgtaacacaaaacatgatgagttgcacccaatgagtattaaaccccatacgaagcatcgtgttttcaataaacgaccattcaacccgatcataggccttactcatgtcaagtttaagagccatataaccctccttaccacttttttccttttcagataatgcgtgatttcaaaagcaatcataatattatctgaaatcaaacgacccgaaataaaagcactttggttatctgatatgacaatgggcaacacttgtttgattctattcgccaaaaccttagaaataatcttatataccacattaca

SEQ ID NO: 362592 - DNA, 672 bp, Cannabis indica
gaaagagaagatgtatcataatacttgtttggcatgtagtaacaaattttgtaatatgtaatatatatagggacgcgattttgtcctgtgatgtacttttacagaatgtatttcgtggtacattagatgagtatcagggtacattagatgaatgtcaggtacgttactattttttaaccttaattacccttagatcaatttcagccctcagataaaataactccctcatctaacgactaccgtacatcacaaaacacattccgtaaaagtacaatcacgggagaaaatcatatcccaatatatatatgtctcttatttagtttggaaaacacttgttgcttaatgcttagaagttagaatccaacaaaatttacatattatttttaaatgttaatatttattttagaacaaatttatctaatttatatttactttagaacaaatttatctaattttttctttcaagtttgagaacgttttaatttaacttttaagtctaccttttgaagtttgtttgggataaggaccaccttagacttgggcctagtgtgtcaataaccggagcctgtggcaaggtaatgaccaatgagacagtgtatgaaaaataactttttttaagccaaacactttataatttttttatttgtacgcggtgatcaaaatcacacaaga

SEQ ID NO: 362593 - DNA, 850 bp, Cannabis indica
tgtaggtaaaggaaaggcgaaggctaaacaggagtgagcctcgagctagggtgatgttgtacatgtcatggcggcgcgacctggagtgttcggtcccgggacatctggggttttcattttgtagtcgctgtacaacctgacttttgtatttggaatattttgtaaaaagtttaacaacaggatcccgacacttgtaaatatttatataaagttttctagttaattccaaaagttttaatttcacacgattttcaaggaaaattctttgattagcgaagattgcactttgattgaaaaatcactgtagcgtgccttagtattagggtgttacaattttagtatcaaagctaccaggtttgtctaccaaagatcgccaagacatgtacaatcatcatcagagaaagcttgactcacggttcagaaagcatgtacttatttagtattgtatgtgattatttaaggatgttaggaagcatattagtttttagttatttattttaatgcgttgcctttaaatccataagagcggtattaagttttgtgatcgctgtctgacctgcttggcttatgggttcacaggctaagtcctatttaatggacgcctaacgaaatacaatgagtcagggtaatagggtcgagatcgaaggcggtaagggaaatcaaattcccacgaattctcgtggtcgcggcagaggccgtggaaggtttcagggtggttgacatgcgaacccacctcaatctcctctggattaggagcaaagattcacggaaatgcaagatcgtatctgccaacaagatgaagaaattcagagattgaggcagcagggtccttgtaaagaccgcttagttt

SEQ ID NO: 362594 - DNA, 1274 bp, Cannabis indica
atgtaagctcggagaggttctccttttgcttcactttgaccaggcttctaagtgcaacgagagttggcaagaagaggagaattgtgcatggaattccaaggagaaagccttccatgagttgaacctttcggatgtcaacttgaaataccattgcttggcggcctctgagagggtggcaggaaaaactctgcaacatacatctcctcgtgcgacttgcaggtccatttgcattttaaaatacttgagatgggataagggatcttgcttcccagtatacatcttccaagttggcatcttgaacttgtgaggcaactctaggacattaatctctagggagaaaggggatccaagttcctggtccaactcgatttcattgttcttttgattggccaggccttggaacatatgttttagttcatccaactgtgcatgcacgactggattaacttgttcagcctcttggccgactagagtcacgtcagcatctctttgagcgagattttgagcatgagccccgggctgaatgattggcgcgtcatgctgctcgtccaaccctctccttctgtttagatcatctctgagatcatgaactgttcccaatcgattaaatatagaaacacccggctgtcttagtgattggtttgtttgaccaattagctagctggaaccattaacttgggtggagttattaggtatgacttttcctggcgagttggtagacaaggtctgcctgcctaccgcttggcccacaggtggaacctgtgatcggagattggatggctgaccatttagagtttgagaggtgttcacggctggatcttcgtctgtcttacccagggggaataacggttgcaggctattgactggtagcctgataggctttttgtattagcacgggggcctgtctggtttggtcgtcaatggctggttgctgagccctcaatgtctccatctctttatccctccatttagaaaaaatgagcctttgctttcaaatgcgagattcaccgcagcacggagttcctccttatcatgatgcagggtgttggtatgaccttgcatgattccaagagcagcatggaggttctggatctcgatgtcatctccaatggttgttcagacatttgttactggcggaacgacagtggtgggaataccctgattagctgttgaactggtatttccagtctcttgcacaccaggcgcaattccactcaaaggagtcgtcacaccttgacctacagttttccgttgttcaggattcgtggctggtg

SEQ ID NO: 362595 - DNA, 311 bp, Cannabis indica
gacaggaccaagaggctgaaaaagtgggttgttagtgatattcttcgatgatcgagaattagacgatgactcaaaatattgttttactcttgatagtctctttgagtattgtctgcactagacatgtacacctgatttgcccaagtaaaaacaagttagtaagacaaaaattaaatatgaataataaaataaaataatagtccctgacaacggtgctaaaaatttaatgtgtgtcgtatgccgtatcaaatttactattattttgattccaatatttctaattattttattataaatgtaagtaagggtca

SEQ ID NO: 362596 - DNA, 493 bp, Cannabis indica
ttcaaattgaaaatatttaaaattggaaaaatgaatcttgggaaacaatcccatgaaaaattgggtttttgaggagaaaccacaaaaaattgcaatatggggttggctgcccaggaggctgcacgtgcagcctccagaggctgcaaaagatcccagggcgcgcgcggacagaggcaccctgtcgaggtttctcggcggatgcagcctcctggaaggaaactgcaaggtcctcctgggcgtgtgggtcggcatcagacagtgcatgtccgaggcatacgcgcgcgcatggcttcctagtccgaagcctggtgtgcgtccgattgaggcatgtgcactcgatttttcaaaattcataactttctcgtttttcatcggaattaaaatccgtaaaaacaaaaattgcttaatttttcacaaggaatcaaaataaaacattttaaaaaaatagaaaaaatctttttcatggaaaaatttcgtacaacacaaacattca

SEQ ID NO: 362597 - DNA, 942 bp, Cannabis indica
gaagtgagctactactagtcttctctacacttgaaagggtgttttgctttttgttcaatattcccaaaaggctatcaatttcaaagacaagagttggtcttattatggatggctgaaaatcttgtcatgcgctccaagggaaatagaagaatggaagaagttgccggtgagtcctttgatgatttagtatctatgtcattttttgtaaaatccaaggacgggaggggtagatctatttttctgatgcatgatctacttgtggatttggctaatattgtttctggaaagtatagttctttattagagcacaatgaagatattgttaagtttgagaagaaaacacgtcaccttggatgtgacataaaaatttatgctgataacataatatcaagttgtgattttgaacctactcatatgcgaacctttttaacattattaggtccaacatataatacaatcagtatttctaagaaagtagtccagaagttgaaatctttgagagttctatcttttcgtggtttttatatgattgagttctctgattcaattggtgaattgaaacatcttcgctatttagatttttccaacactggaattgtgattttgcccgaatttgtaactaaattgtacaatttggagacactgaagttagaatattgtaatcatcttcaaactatgcctaaagatatgcatcatcttattaatttgagacatcttgttatcagtggaaatagtctagtcgagatgccaagtcaaataagtaaattgacaaatctccaaattttgacaacttttgtggtggggaaggatagcggtgctaaaatagaagaattggcagaacttcatagtctacatggagaactttccattaagaagttagaaaatgtgaccaatattacaaaagcaccggatcaaattatactggagaagaagcaacttgag

SEQ ID NO: 362598 - DNA, 529 bp, Cannabis indica
gacttggacttggaatcataactgaaatttgacctagatccagaaccgtaaccggacttggacccagactccaaatcagacctagagccgaattgagagccagactcggatcccaacccaaaactgaactcgagacttgaacctgaacctcaacacagaaccaaggtcgggacctagaaccgtaccccagtctcgatccctaacctaaactcagaaatagggcctgggacctgatcaaaaactagaccgagacccgtgagaatgatccagatcttgacccgggattcgggtaacgcggcctggaacaaactagtagttggtgtctagatctaggactcagactaggaccagaacccagacgaagaacaaaacccgaacccagacctagacttgggacccaaaattagaacttgaacaagaatcgcctaaccaggacactagaacaagactaggaccgtgacaggacccagacccagacttagaaccgaacacaggaactagcctcagacccaaactgagactggaactc

SEQ ID NO: 362599 - DNA, 610 bp, Cannabis indica
ttgatcgcggtattggtgatttatgtttatcctttcccttctccaattctgccagagaattctcaattctcttatgaggttcagtcatagcgaagaattcgactagcgattctggccttcgagcttgtaactccttccagaaatcggttctcgacaaaatacctattatcaacatgcaaacaagcgaagactcgggagccttctcgacttttgttacttctgcattaaaccatttaaaatagtcttgtaaagactcaccgggctcttgtttgatgttggccagagttgtataaggaggcatgtaggtcatcgtggcctgaaagtgcgtgaggaataggtcgacaaaggtttcccatgtcgatattgaggcctcaggcaactgggtaaaccaatcgtgggtgttttcctcgagtgttgccgcgggaatgcgacatttagcaagctgtggtacctgatccacttccattatagtattaaatttttcaagataatctataggattagaggtacctttatattttagggattcggatagccaaaatcccttgggaagttgagcttgtcgcacttccgtagtgaaaggagaggtcccatgcagcttgtatatggg

SEQ ID NO: 362600 - DNA, 892 bp, Cannabis indica
aagtgaaaaaattatggggaggtgctggaaatttttttgagtgatttttggtttgagtgagaatggatcttaagaggtgaagagttgatgaagagggtgcttcatcatccaacccgccaagggtttcgagaaggtcaaatgtagatcggacaaggtttgttagtgctaaggcccaagatcgctatctagaattgaagaatatggcatttattgatgataggggtattgatggtggtgatactacgatgcctagtcacccactatttgaagaaattaggctacaagtccataggagaggatgggtgcaatttgttcatgttaaggagagagtgaaccaaaccttagctctagaattttggcccaaaaaaaagaatgagattgttaaggtgaggagtattgatgttccaggtcacaactagagcacttcattcatgttgtatattcactacccacctttactcatgaagagcaacacctatgaatgatcgaggagggggagaagtttatctatgttgatatggctgagactattggcttcctgggcttaatgtttcatgagtatgatgggaaactgtactaattgtaccgatgtgagttaagccaggtggctcgtgcctggttgtattttgtgagtggcaggttggtcccaaacaaacatttttctgatgctcaaatggataggatgaaatatgtctatgccattatgaaaggatttaatctaaaatgtggggggacagtcattaggcacagcttttgacataaatgatacaaggagcttctagaggtggacttggtttagctgatgctattactgatttgtgtgagacatatagggtgccacaatactcttgtaacgccctaatgctaaggcacgctacagtgctttttcaat

SEQ ID NO: 362601 - DNA, 908 bp, Cannabis indica
gctttttctcacagcacaactacagctgcttttttccacatcacagctgtgccaaactggcccttagttgtcccaaagatccaacactccaagtcaaactgtctcaatatatacaatcttcattcagctcaaaactcactgccgttcaacaacaacttttcctttacctgcacataacataacatttgtgagtcgatagactcagtaagaaaagcataaaacataaatatataatcgacctatgactaagtgcccatacacctatcaacaattcataaatcatgcaaacatgtataactgagtctcgaacgttcttgaccatagtataattgaccataataccacatgcactcaatactctagtcgtactagtattggtagcatcaatccatactataagtacaactagccataataccacatgcacttagtactctggtgtaatagtgttggtagcactagttcatgctttcaaaagtataaccaaccataatgccacatgcactctgtaatctggcgtactagtgttagtagcattggttcatactttctgaattgccaaacacatacattcacgatatctagatgcaatcatatatacaccaactatcgttctaacagatatctcatacatctagaaaacataaacataaatatgtacatatgtacgtgtgttatactagtcttacctcaattttgatttcaagtgtaccggtcaaccttagtggaaatagctgctggtaatcgaaggcccaaagtcacatttccagaaaaaaaataataagtgttgcactaacactttcggggacttaaattgacaactaaaagtttccctattgatagatattatggaaataacctaagtattgagaaaacactcaatcagggtcctgggaaaagtcttaaga

SEQ ID NO: 362602 - DNA, 709 bp, Cannabis indica
aggaaaaattctgcaacacacatcccctcgtaccccttccagatctatttgcagctcgaaatacttgaggtaggaaagaggatcttctcttctagtgtacattttccaggttggcattttaaacttgtggagcaacgccaagagattgatctcgggagagaaaggggttccacgtgctcggtccaactcgagatcattctttctctgccagcccatgccttggaacatactctttagtttgtcttgctgtgcctgcacagctggactaacctgttcggaattttggccgatttgactcacgtcagtatctttttgagcgggaatttgagcataggtttcgagctgtacgatcgccgtgccaagctgatcgtctaatcccctccttctgtttagatcgtttatgagatcatgagttgtccccaacctatcgaatacataagccctggctgtctcagtgattgattggcttggttgacaggtggaatggcaccattaccctggctggaattatcaggtatgacttctcctgatgaattactagacaaggtctacccacctactgcttggcccacaggcggaacctgggacaagagatttggcgactggccatttatagtttgggaagtattcatcgctggatcttcgtctgtttcacccaaggggatgacattcgggggttgctgcccgacagtttggtaggcttttcgta

SEQ ID NO: 362603 - DNA, 890 bp, Cannabis indica
cacattcctctaggaatttagcaaatggtcttggacgttgttcacctgagccatcatatctaccgtagtactcaccaccacgatcatattcgaagttcttaatctttttgttgagttgattctcaacttcagctttgtaagctttgagcacgtccacagactgaaatttttcatgaatgagttatgaggaacccataacgtgagtaatcatctatgaatgatataaaatattattgaccattccaagatgtcgtagggaatggcccacaaatatctgtgttaatcacttctaagacttctgaagctctattggcacgaagctctattggcacctaatctcttagttttggtctgttttcccttgatacaatctacacagacattgaaatctgtgaagtcaagagactctaaaatgtcatcagacacaagacgctcaattctacctcttgagatatgacctaagcgtttatgccataatgacgctgaattttctttatttaatttgcgtttagtacctcgtgattccacatgcaaggtttcattataggatgcaattgtttctagcaaataaagattgtcataagtattcaaataaccagttccaataatatttgaatttaaagacaaagtaaactgattgtttccaaatgaacaacaatatccaaatttgtccaacaaagaaacagaactaaattccgtctaaaagacggcacaacaaaagtgtctttcaaatccaaataaaaaccagttcctaataacaatctaaaatgcccaattgcttccacttccaccgattgtccatcgcccacaaagatgtatctttcaccatcacttggctttcggtagctcaggcaaccctgcatagaaacacttatgtgagtagtagcacc

SEQ ID NO: 362604 - DNA, 628 bp, Cannabis indica
tatgttttggttgctaataaagagcttaatcacaagtgtgattaacttttgcaaatctttgtggcactttgttctctttcttgtgtcaaagatttccattaagaagttacttaagaaaaacagaaacagagaagagacaattgggagaccccaaagcagaaagattcatcctcagtcaaagtgccactccttaagggatatcagctttttctggtagcccatatacagatcttttttctgctgctaagcacactgctaattgctaaaacttcttcatagagaggatctataacattaaactttgtttgaggaaatcaagagtataattcctccaagatcactaacgacatcagcacgctgcaaaagaatctgctgctgtggagatataaggatattgttgttgtggatgtatttcaatacagtgtttgtcatactatttcttattctcatttgagatattactatgttcaaaaatactaatgttgtagtagccatcagcaaacttaactaaaaaaccagcagtatacatcgttaaatgaaatatgccttttattaacgttaatatgaatctgattaataaacaatgtctctatccaaggtaaaaactaaaataacttatcaccaaata

SEQ ID NO: 362605 - DNA, 505 bp, Cannabis indica
aggaggaggacgacgagagagagagactgagagaatggttgagtgataactgagatcataagagagaagagaagacagagatctctcttccttttcttttctattttttttttaaatattctcttctttttctaataatagagaaatataagaatattaaattataccaatcttttttataaaatatcaacatttagtttttgatattaagaatattaaattttaaaataaaataaataaatataatatatctgagccttacacgtagggatgcatatttcccccacggggatgggccccgcggagacccgcccctaatggggcagggattccccgtctaaattttattataaactttatttttctattaggggattccccgccccgtccccgcccccattaggggattccccgccccatccccgatggggaataagcggggatggggattaaaatccttaacggggatggggacgggggagcactccccgccaattccccgccc

SEQ ID NO: 362606 - DNA, 710 bp, Cannabis indica
attcagattttagaggacatgctatgggcatgtctgttagattttaaaggatcatggataaagtaccttcccctgatctagttctcgtacaatgacagctatcaggcgacaatcaggatgactctttatgaacttttacatggaagaaaatgcagatcacctattcattgggatgaaatgggtgaaagaaagttcttaggtcccgaagctgttcagagaacaagtgaggcagttgataaaatcagagcgcgaatgctcgcggctcagaacagacagaagagttatgtatccaaagtgtctggatattgattttcgtatcgaggatatagtatttctccaagtatcgcctatgaaaggcatcaagcgctttggtaagaaaggaaagtttagctcgaggttcattagacctttcgagatccttgagaggatagggcaagtagcgtacaggatgactatgcccccaacgctggcagctgtacataatgtgttccatatttcgatgctttggaagtatgtctcagacccatcccatattctgagttatgaagcattggaacttcaaccagatctatcatacgaagagcaacgagtgtaagtactggatagaagagaaaaagtcttgagaacaagacaattacactgataaaagtattaccgagaaacagtaaagaagaagaggcaacctgagaactcgagaaagatatgcagca

SEQ ID NO: 362607 - DNA, 738 bp, Cannabis indica
atgatggacttctgagtcttgttcgggcagtcaccttgcatattacttcattcttgtttctgatgtctgttttctaaccatgttgttttcattctgtacagacatgtcgccgcaaatgctcgacgctttgaggaagagaataagcggaagctctagcgcctctcctccggccaataagtctaagggcgatgaggggtcctctactaaggaaaagaggcctactggggaggtcattgatctttctgaggagctgactgctgcaaacccctctacccccaaagctgccaagtctaaggattctagaccagcgaaggttgggtctgaactggtcaagagtgatcctgaacgggtgcgggcacctactccacctttgtcggtgcttctagaggccaaaaagggcaaggagatgctggcccattatatgaaccggctatttcatgaggtcagtgagcaactggctagtgctgacaatgactattgtttggaattgctggtgggcggagtcttgaaggagttcaccagggtaagtctttcttaatacttccctttaatcttctatacttagctcaaatgctaaagttttttcctcgtgcaggccggtttgaagttggcctacacttactcccgggctaagtctgctgcttccaagaacacgactctgtccgacatcctgagggcaaaggcagacttggccaggaaggatgttgaagaagccagggcagaagtcgaagctgttcg

SEQ ID NO: 362608 - DNA, 636 bp, Cannabis indica
atgttttgtgcctgacaacattgaaatgcaacaattggctattagaatcacatcttagtatttttagtatagtggggcaatatagttagacattaggaatgttgagataagttgagattttagatttgaccaatttacccctaagtggttttatgacttttagtgtaggcaagggcattatgggctttttgcctttttgagatttttcgtcatttagtgagagtttaattgattattaatttgatttttaatggctgatattagttaaataaaacatatttttatttctttttattaaaaataagaaattagataaaaatagatgtctttctctccaagcactctctcttttgaaccccataaaacccagctagggtttgaagttttttgctgctcaatctaaggaattttagcaagttcttagtgatctcaagtcaaggtaagttcctagcatctctctctttggtttttttttaagttttaagttgagaattttgcatgaaattgagtattagagttctgtagttgctgttgttgtttgtagttgtattctaaagttagattatggtgattaatattgaattaagctagttgtggtggttgttataaggtttgagcaagctttgagtttaagaa

SEQ ID NO: 362609 - DNA, 584 bp, Cannabis indica
tatctctgtaatctgatccccaagttatagggatttctttaatgactcaaaatgcgaaagctgaattcgctaagtgttggtcgctctacgcggattactgatcactttgcttcgggcatgcctgcgaggcatcctgttcggactgtactctccgagcagatactcaaagttgattccacctgtcaccatcatgtgatgccacgtcagagtgcaaaaattgggataacaatatcaaaatataacattctcccactttgattgaataaatatacaattttaagaagtcttgcttaggtgcattagataaaatatctttcgacttgaattttaccttagtgtaattaccgttaagtttgatgaaattttggttaccgtagcattgaaccactattcctttagttcaaaccggtgataacacacacccttgctaatgctcacttgagaccgcatgtctcgctcttgcaccattaatggccgtgtacaaaaatctaattcatggactctctagagactactcccatttctcataagaggcggcaccacctctagttcatataggtagagttttagtgtctcactactct

SEQ ID NO: 362610 - DNA, 185 bp, Cannabis indica
tttttttaaataatgagctttaatcaagagacattcgatctccattgtggttttacatagctattgttttagtgagtaatcctccctaatggaggaacgttcattagcaagttagcgccgtttaatctcgaaagataagtattcttgtaagttttttatatttgtattgatcaccctaatggtgg

SEQ ID NO: 362611 - DNA, 508 bp, Cannabis indica
caagtggccataggtggatgtgtatcttgaaagtcctggattcgagtcccaaataaaatatagttgtaatatataaacgcttaaattaaaaaaaaaaaatctatataatctctaatcacgataatatatttcataagacagcatgagtaccctttatcgttgtatttacatatatattgtcacacattactcataaagggatttgtggatttatattacacttatggcatgtttacttaaagggaatgagaatgaatggtatagtattgattcacatacaattgtttacaaattttgaaaatggaaaaactagtgaaacccacacaaattagagaaaaaaacaaagagaaaggtctactcctattttttatagggaatgtctttcccttttcttacttaatttattttaattttattattaaaaataaaaagacaaatataccccttaaaaatctataaacagaaaataattacatgttctaataatgacaattttgtcaaattaaag

SEQ ID NO: 362612 - DNA, 826 bp, Cannabis indica
ttccttgtggcgcacaaagacttagcaaatgtttacaagttatctgatccacgtgtcccctctcgactggtccacgtattttgggcgaattctggagcaacatttaccccccaagccttgtttacttagtaaaaataaaccaaggcttgttcaagtgtctccggtcgactcctcgtttccctagctcaagcctcgagcgcgtgggggcaaattaaatgatgtcatttaatgcagcgatttgctttttgcaggaatgtctccagccgcctcctcggtcttctgatacgaacttggggcgcgtgcgattcgcttttgcagaggtcgattcgtttcacgccctatgattgatgcggcgcattaatggtgtcagacggatactcaaacgtttccaccgcctttatggcagattgatctgatccgttgattttcgggaattcgaatcgtgcgtctcccccaccgtgcgattggtaggtgatgacgcctgttcctcatgcgtttttgcctataaaagccaccacttttccttcatttcggttactttccattccttgccatttctgctcgaatttcctagagagaaaattccccaaagtagcacgaactgccttaacacttacacactcctttcagttttccagtgtttgccttcgccggttcttctcaactttcacttgttcacattcagtaccccacgttcagcgatctactgtaagttccttgtcatgctttcatttacttcgttcgctttctgggttcgtattttgtagacttctgggtgtgtgagtgtttaagttcttcgagttctgctttacgtttactgcgttag

SEQ ID NO: 362613 - DNA, 765 bp, Cannabis indica
gtggaggtttgtgccatatgttgccctttgggagtgattagaggctgagcgagaagcttaccacgctcttgaatggctgaagaatcatttaactttgttaattgaatttttatgtccttcaattcctctatcatctgagcaaaataagtcctaaactctagttgagagtttgcgagaattttcatggaattctcaagagaattattttgttgatcaggtttccattggctcccggatgcttgattttgacttgtatccttccaactgaaattgggatggttacgccaactaggattgtatgtgtatgagtaggcattataaggcttcttgtaatcccctaaggcattacattattcctcatctcctcccctcaacatcctaagattagggcactcttgtggttgacgatttgtccctccacaaataaagcatggttcttgcttttccacttttgcaaccatttggagtgctttaccttcttgagttttgaaagcctcaaattgttttttcagagcttcaagttgagctttcacactatcctcctccttcaattggtagactccggctgttagtggcctatccgtagcacttggtgcactccatgtgtaggatttttcagagatttcttcaagatattccaaagcgtcttcgggatctttctgaaggaagtcgccattgcacatcatttgtacgaattgtctttcgtcggctgtgagaccgtagtagaaatagctgacaagacgccaactttcgtatccatgatgt

SEQ ID NO: 362614 - DNA, 1304 bp, Cannabis indica
ggcacgctacagtgctttttcaattacagtgctatctttgctaatcaaagagttttcttgaaaaacgtgtcaaattaaaacttttatatgaattattaaactttataatttataaaattatttacaagttctgggatcccgttttcaaactttttaaacataatacttcaaaatacataatatccaggttgcatagcgactacaaaatacaacccaaaaagtcccgagaccgaacactccaggtcacgctgcttcgacatgtacaacctcatcccagcttaggttcactcttgttcagctttcgcctttcctttacctacacatggaagcagaactgtgagtcgacagactcagtaagagaagcatataacatatcatataatctccaacttgtatttaggcgcccatacacctatttacaaggctcaacagataagtaagaacattcaatactagggtatagccactataccacatacactgcgtacctcactgtacgagtgttggtagggtttgtttcataccctgagtaccactgagtgatataccacccacactcagtactttcccgtacttgtgctggtatcactataatgtactctcaaacaatattcactataccaatacactctgtaccaaaactatacaagtgttgttagtgcaataaacaatttaagcatgcatatacgcataacatatacatacactcagatatcaatatcacacattatataaaatttttaccttctttctagattcaagtgtgctggccgacctgaacggaaagtctcgtgctagatggatgccctagtcacattatgaaactgagtaagctacaagatcaaaaccctaatcctgggaaacccgaacccacaaccctaggttctgttatactttctaggggttaatctaactttggaaatagggaaacacccaaccacgaacaaaatggacaagaattgaggaaatgaaaggcccggggaaccctgcctagccggctttacacgtatgtgtaaatttggttacccggtttgcaccagttcacccaagaaatttcatttctgtctcaaaactccaccaaaagcaaccaaaccttccagagtaccgaattagggtatacacgacataatccaaccaatatttcacagaaaaacatacaaaatcaatttatgccattagagatcaaagctttgaactcaaagctcaaacttgcataaatccaacacaacacattaaaaccagctgtaagaacttgaaaccaactcaaatgaaccctaaaattcgaatcctaaacatcccaaacc

SEQ ID NO: 362615 - DNA, 1043 bp, Cannabis indica
gggcataaaacccaacagttagctcgttgggcagagctattggtatctttgaaaatctctggcacttgtcgcacttcttaacataggctctcaaatcttcaatcatcgttggccataagtggcctttccttagaattttctttgataagctctatccggctgcgtgatttccacagaatccgtcgtgaacttcaaataaaagtcgtgcagcttcatctggtgtgacacatctgagtaatggcattgagaatcctcttctgtacatgatcccttccactatgacgtaccgtgccgcctttcttctcatcttccgagcttcatttcggttatatgggagttccccagagttgaggtaggccgctattggcgtcatccagtttggggatgtgtcaatcatttcgatttcttccatgccagtgatgctaggctcttcaaggaactggatagggaccaagtttgccttgtcacttacattgctgcttgccaatcgagccagcgcatctgcagttgtattttcttctcttggaatttttctgagaccgtagcttttgaattgtgcgagcaggtcatgtattttgctcagatatgctatcattttttctccccgagcctcgtattcgccgaatacatgatttaccaccagctgtgaatcactgcagatctcaatgtgttcggccttcatttccttggctagcttaagtccagcgattagggcctcgtattcggcttcgttgttagaggccttgaatccgaacttgactgcagcgtgcaggtgttgcccccaggcatgacgagggtaattcctgcacaagatagttgatctgttgctgacccatctaaatgtagtttccaggtcggtttgtcttcaatattacttggctatggtactggctcgggatcccttcctggtatgctttcttttttgcctgtgcattttaccacaaagtcggccaaagcttggcctttgatagctgttcggggttggaagttgatttcgtactgacccaattctaccgcccacttgagtaaccgtccagaggcat

SEQ ID NO: 362616 - DNA, 1145 bp, Cannabis indica
tctcagacaaattccaagggaagaaaacacaactgcagacgcgttagctcgattggcaagcagtaatgcaagtgataaagcaaacttggttcctatccagttccttgaagaacctagcattactcgcacggaagagatcgaaatgattgatacttccccaaactggatgacactaatagcaacctacctcaacactggggaactcctagataatcgaaatgaagcgcgaaaaatgagaaggaaggttgcacggtatatcatagtagagggaattctgtacagacgagggttctccatgccacttctcagatgggttactcaagaagaagctgcacattttttatctgaggtgcacgatggattctgtggaaatcatgtcgccgagtagagtttatctaagaaaattgttattttttggccgacaatgattgaaaattcaaaggcctatgttaagaaatgtgacaaatgccagagattttcgaaaatacctcgagcttcgcccaacgagttaactcatatgcaaagtctgtggcctttttccatttggggaatcgacctcatcagacaattacccaaaggcaagggaggagtgcaatatgcagtggttgaagttgattacttcactaagtggacggaagtcgaaccactggtcaccattacatctaagaaagttcaagagtttgtttggtagaacataatctgccgattcgaattaccgtacaaaatagtttaggacaatggcaaacagtttgacagacagtccttcactcatttttgtgcgaactatggtatcatcaaaagtttctctgcagtggcgcatccccaagcgaatgatagagttgaagtagtcaacaagaccctgaaggatacatcagagaaaagactcgaggatgctaaaggaaactggccggaggagcttcctaaagttctatgattgtatcgaacaactgaaaaaatggcaagcggacaaactgcattcccatggcatatggatatgaagctatgctacccgtagagctcgagccaccatcccacagaaggttgacgtacaaccaagaagcgaatcacatactcttagccgaatcactttatgaaatcgaagagaagcgaaccacaacaaacttaaagttgatagcccatcaaca

SEQ ID NO: 362617 - DNA, 277 bp, Cannabis indica
gtgctttcattgagagaaaaaacccaagtttgttctttgccttaagtcttaacaggcatacagaatggtagtgcaaactcgcagaggcttggtcgatcagaacgacccaatggtgacggatcctgccatacaaacccctagaaatacaagggtaccaccagggaccaatcccgagcaagccaacacacaaccacctactgtgggccatggcgtgacttcccctctggttgggatcacactaggtgtgcaagagactggaaatactagttcaacagcc

SEQ ID NO: 362618 - DNA, 773 bp, Cannabis indica
ttgaaaacactcaaccaatcaataattcttaggtggacccccaccattttaattttcaaaaacataaaatagttttcaaatcctaaaccaatcaaataaaacagttagacctcgcggtcattgtaaaatagattctccaataaagaagagatcggaatagatccaaacagttggtgggagaaggcccacttagccacattacgggcaacatagttacaatacctactaacattaaaaaagatacaacaaatagaagagtgagatgacttggtacaaaatgagacatagttctcaagagcccaaagagatatcttcccattaagcgcattgataacttgtctcaagacactctctacaatgacatacttataccttaaatccatagccagcgaaacaaccaagcagcaggctgcagcttctccacataatgcatccgagaagtccaaccgagtagtgttaacccaaaccaccttgcccagatgattacttgctacaactgcaatgcacatagtctctaagcccactctaacatcacaattcggtttaatccaatcttgaggaggaggattccacatctctctcgagatcggattaggagcaggcaagaaagaatcatgtaactctgcaaaagaagtacaaatattgtcaatacatttcaccacatctagaggagtgttattgtttaccatttcattgcgcatcctccagatagtgtcaacaacaatcgaagcaaagagaaatacatcctcagcacagatccccctatgcctaag

SEQ ID NO: 362619 - DNA, 691 bp, Cannabis indica
gtactcaccaatagagatttagaatataattcaataagacaaaaaaatatagctcgatctcgagaccattaattaattgtagagaagttataattaagaagaaagaccctgcattatacactagcttttatttttaatattgatttaccattttagtcataaccaaaagcttttattggctctcattataataaaatattaaggggtgtttgttatcatagcattgaaaccgcatgaaatagtattattcaagtgatttactgttatcatgatttttaacatatattcataactaatgctctcatatttaaaattaactaaaacatataaaagtttagtctgatgataattgtatatatctagcgggtcttcatgaaaagatgtaaagtaattaaaattataaaatatatatatatatatatattagtaattagctttttaatttgtaaataaaaatacaaaaatataaagcacgaattcaagtctgtataaaataataggttggtctatttaaataaatcggcccaaataaagcacgacacaaatcaagcatgacatgaaattactaggtttacaggctatgccgagcttaccctgtaaaattgttgtatggtacgacactaattgtatttttttttataacatgacactattagaatattttatttatggaaattattttctaattaag

SEQ ID NO: 362620 - DNA, 719 bp, Cannabis indica
gttgcccagatatattatgaagcgtatgatttctcttctgattagagtttggctgttgcccatatcaaaagttagatccttcctagtattttattttgtgaaaactccaattgtttgatcgaaatgttacctaacccatcttcaagcctttttcactttttctctgttaaggaaataagctcatgattaatacaaaatgttgattgttgtaagtatttcgctgcgtgatcttccaagtgtgtgataaatgcattttacaggatgttctatggtcccggagggccgtacgcaatgtttacagggaaggaagctagtagagctttggctttgctttctttcaagcctcaagacatgaacgacaatcttgaagatttgggtcctgatgagcttcaagttttagaggattgggaggataagttcatcgacaagtatcccaaggttgggaagcttgtgaaacagtcaacctcgaccgaggaaccatctcaaagtggagaggaattgaagaaggaaaattagattgtaggttaagtaacatgatgaaacttttgtgagctgctgcaaattattcaatgtaatatatataggatgattgatcaatccagtttaatgagaatgatttgatcttttgtgtaattgtaattaacatttttatgaggataattgtgcattattataaaagaaacttgtgagcaagttattcatagcaccaatgcaatgcc

SEQ ID NO: 362621 - DNA, 592 bp, Cannabis indica
ttcttccttattcttaagtcaatacaactaacgaggattaggttattaccgaacggctcggggctgaacctctataaaatttctgtgtcttattattgctttactacatattcttattacgacatatcgtttatcgcttataaaaaagactcattgtcgttggctaaaagcgaagtcaacattttggtgctttcattgagagaagaatcacagatcgctctttcgacacgatgatgcaaactcgtagaggcctgtccgacccagcaaactcacagacgctggatccgacattgcaggacccagagagttcgagggttccacccgctgtcaatcctggacagacgggaagcgtggttaatgatgggacacctcttgttactgaaactgtgcctggtgtgcaagagaccagaaacaacagttccgcacatagccaggacgttcctaacatgactgttccaccaggcatcaacgcccagacaaccatcggagaggcgatcgaattgcaaaaccttcgcgctgcgctcggactcatgcaggatcacaacaataccctgcatcacgatcaggaagaattacgtgccgcagtaaacct

SEQ ID NO: 362622 - DNA, 536 bp, Cannabis indica
cgtattttttcctgagtattcaaagaattacatttttcttagaaaaccgttatgtttctaaaacaaatgtcgttgttttagttatgacaactaatttatttgatttacctaataaactcagaacgctcctcgggagaggaatcagatttcggtttcctaaaattctcaggcatgcaagcttcatatacattgttgattgcagtgtttcctcccaaggaaactaaattgcccacttcttcagcattccattcatctagcttcactgatagaacctaacataaaatttggatcaaatcataaggtaaccccttctaaattgtaaaaaacaattatagctacaagagagagactgacctaatctatgatgaaaaaagtgatttgggattttgttttacatttgctatgccttagagtttcacttgaataactagcaagatgatactaaatatggcccaaccaccattgctttcaaataaaaaaacgtattaacaaaatgaaaatgatctactcaaccctcaaagtccgggttaaaaact

SEQ ID NO: 362623 - DNA, 1609 bp, Cannabis indica
atcttattcggccataaggcctttttttaagacatcatcaccaaccaagcggtctttaaacttggaattatttttccttttacagacaacaggctgatcgggcatattttaatcccagtattacgtgcttttgcagtctttaatgaatttcattctctatttataatcatcgtgcaattgtgtttgttttatctttacaaaatgctttgtacaagtataggtgccccccaagttaccgagcagacttatgactcttggtcacttgttttttacaagtatacttttttatctattctgggttttgggttcgagcaaacattttgtacgcattggatggtaaattagcaacatgttaggaatttcgactcaatttgaattttgaaataaacatctttattcatttattgatcgaaagtgtttttgttaccgtagtgacttacatgttccccattccaataccgtggtacttaatatggtcgtccgacttggtactttattgatagtatttgcttaaatgttccccattccaataccgtggtactaaaacaatcatacttacccaatttgtatgctcctgatttgagaacttcgaccacctgatatggtccttcacagttaaggtccaagcacacatgtcgtactgtcttttggtgtgtccggatgtcattttctcagttgttcgatatgaccataaaacttcaggaagttcgttcggccaatttcctttggcatctttgagtctttttctttagtgtatccttcaaggtcttgttgactgcttcaacttgaccattcacttgaggatgtgccactgtagagaaacttttgatgataccatggttcgcacaaaaattagtgaaggattggttgtcaaactgcttgccattatccgaaactattttgtacggcaatccgaaccgacagattatgttcttcacaataatgtcttgaaatttctttgatgtaatggttgcgagtggtttggccttcgtccacttagtgaagtaatcaaccgctaccactgcatactgcactcctccctttcctttgggtaattgtctgattaggttgattcaccaaatggcgaagggccaagaaccctgcatctgagttaactcgttgggcggagctcgaggtatcttcaaaaatctttggcatttgtcacatttcttaacataggcctttgagtcttcaatcatcgtcggccagaaataaccttgccttagaattttcttagataaactctgcctagcgacatgatttccaaagaatccatcgtgcacttcagatagaagtcgtacagcttcttattgagtaacacatctgagcaacggtatggagaatcctcgtctgtacataattccctctactatgttatattgtgctgcgttccttctcatctttctagcttcattccgataatttgggagttccccagtgttgaggtaggcggctatcggtgtcatcaaatttggggaagtatcaatcatttcgatctcttccgtgccagtgatgctaggctctttgaggaacttgataggaacaaagtttgccttatcacttacaatctacttgccaatctagctaacgcgtctgcagttgtgttttc

SEQ ID NO: 362624 - DNA, 763 bp, Cannabis indica
agatctatgctgattgctttggttgctaggacaagtcaaatcgtaatggaaggttaccacagcctgatgaagatcacgatgactacgatagctggtgtcgatgtaatagcaccatgatttcatggattttgcacgctatttctgatgaaattgcagacagtatcgtgtatcacgataatgcagcagaaatctgggctgagctgcataaacgattcaatgagagaaacgcaccttggatctttaaagcaaagaagatgatgcaaagtcttgttcaaggatctaatactgttacaacatactacacacgactgaaatctctttgggatcaaataagagaacttcgcccaccacctgtttgttcctgtggcgcagtgaaagtgatacaagagtatcaagaagaggacaaattgcttgagtttttagttggattaaatgattcctacaaccttgttaggtctcagatcttgatgcgtgatcctcttccaagtgttaacaaagcttatgttgtcgttatacaagaggaaagacagagaaatttgacaaataattacagcaatactactgatcaggacaaaggtagcaatggacaggttactggttcaggaaataatggtcagtttgctggtgctgttcaaccattcagatctaagtacaattgtactcattgtggtatgaatggacattcaatcgagagatgctacaaactgaatggatatcctcctagacataaataccatggaaaatttcctaatcgagatgctaa

SEQ ID NO: 362625 - DNA, 431 bp, Cannabis indica
acttgaatgtcatgaaaaccctgcttattgatctcttgtaagaatggtttaagagctttcagcttcgccacaatttgatacattttagttcccctcacattcatcttccaaaccgattccacctgatgctgataatgggggtgacttgactacatcctgaagtacttaaacgatttcctaccctaggagtggaagaccataagcagagcaggagtatgatcaaataacccctcataaagaaagagtgcttcagcattaggaaaagaatccatccaattttggtttgccattactctatcaattttagagtatatccgatcctcacctttttgcttgttattctaagtgaaaaaactaccaccaaacttgacatcttcaaggttacaagcaacgtatccttaaaagaagaaggattgtactttacccgagcc

SEQ ID NO: 362626 - DNA, 743 bp, Cannabis indica
ttgtcgcatttctttgcgaagttgaaagcgccttgtcgcagggtaggccaataatacccttgttgcatgatttttagggcaagggaattaccaccagtatgattcccacaaataccctcgtgcacctggcggagtatgtagtcgcaatcttccccgtcaatcatttgagtagcggctggctgaagcttctgcgatataatcttccaccatagatgacatatcgggctgcccgctgctgcagttttctcgcttccattttgtcatcgggcaagatacccttctccagatatgcaattattggagtcatccaggtgacttcttgggcaatatctatttccattatttcttctcgatttactgtcgggtaagccaatatatcgacaggaattacagcaagtaattcagcttctctagtcgaggccaaacgggccaatgcgcctgcgtgtgagttatgagcacgcggtactcgagacacgactactttcttgaatttctccaacaacttgcatactacggcgagatacttaaccaagcacccgcctctggccagatattctccattcacctggcatatgatgatttgggagtctctgaaagcctgtaagtattcgattctcatctcaagagcgagcttcaatccggcgattaaagcctcatactcggcttcattgttcgatgcagaaaattcaaaacgtaaagcagcgtgtaccttaaaattgttgggactgattagtatgattcca

SEQ ID NO: 362627 - DNA, 716 bp, Cannabis indica
ttatcctcccgttaaaaggatttttgtcctcgaaatgtaacctaaataactctggatattgagccttcatattggactccaattcctaggtggcttcttccaccttgctatttctccaaagtaccttgatcaaagctatggtcttgttctggatgactttatcctttctatcaaggatatgcaccggttgttcttcatatgacaaatttggttggagctctagggcttcataactaagggcatgtgtcgggtctgaaacgtatttccttaacatagaaacgtgaaatacgttatgaactgttgatgttgctggaggcaaggctagacggtaaactaccattcccacctttttgagaatctcaaaaggccctgtaaatctagggcataactagcccttcttcccgaaatgtttaatccctttcattggagatactcataggaatacatgatctccaacctaaaattctatatttctacatttcggatctgcataacttttttgcctagctactatgaaaggcaagccttatggccttgatcttttctattgcctcattggtccgttgtactgtgtctggacctaagtatttcctttctccagtttcatcccagtgaattagagatcttcactttctgccatataacatctcgtagggagccatccctgtagtactctgatagctattgttgtatgaaaactctatcagtggtaaata

SEQ ID NO: 362628 - DNA, 983 bp, Cannabis indica
agtcggggcctttgagctgggagttgagtaacctcccaaacctcatcgtgcttcacggcccccgcataccgcttcaattctttgcgggtagttcctccaatatggggtcctcctgagatcatggccactctcccattgggtctgggtggcagaccggggatatgctgggcatctccggtaggagcaactggagccaatactcctgctgcaccccctggtgctccctgcggcacaacccctgtcgcctgacccggattaaggtgaggcagccgattcttgatccactcatagaggtgccccaatcggattaggttttcaatctcatccttgagatttttgcattcattggtgttgtgcccaatgtcgttgtggtactcgcatcttttgttggggtccctccgggagctatccttgtacaagggaggtggtctccggtagtgcgtattttgcctagtagcaaagtacacacgctcttgggagtctgtcaactccgtgtactgggtgtactgcggagtgtatccccttttttgtcgtttctcctccgtccgggtgctgcctttggaggatcgtttactcctcgagccctgggaaggacctgccaagctggcggttggagcggagtgcgagggagcttgtccatttatccccgagggatttccaaaatgggacgatgcgggggccaaggcctggccctgactgtatccgggagtagcagagaattgtatgccgctcataggtggagctgcggtcgggacagtacccgacggcggggctccgggcatataccctgctatcccggtgggatagtatcctccataggccactatttgggcctcttcaaggttgatgtatttttggactcttttctggaagtcctgaaggtttgcggctccttcctgttgtagttcgttccagaagggggtccctgtacggatgcctgcctggagaagggcaagctgttgtccgtcatcaactctctgggt

SEQ ID NO: 362629 - DNA, 538 bp, Cannabis indica
agggtcgggtagggtctgagttcgggttcgggtctgggtcccggtcttggtcccgggtctcgagtctcggttcgggtccgagtcttcaggttcgggtctaggtccaggtttgggtcccagttcgggaccgagttccgagtcccaggtttgagtccgggtctggggtcggggtccgaaccaggtccgagtcctgggtcccgcgttcagatccgggtccaggtctgggtctcgggtccgggtctgggtcccgtgtctgggtctgggtcccgatccgggtccgggtccaggtcccgggtttgggccctggtcagcgtccgggtcacgggttcgggtaccgagtcagggtctgggccacagccctgggtctcgagtccaggtctggatctcaagtccaggtttgggtcccgagtctaagtactggtccaggtctgggtttgggtccgggtctaggtctgtgtctagttccaggtcccaagggatccgagtctagggtatgagtcttgaatttaagttttttttaaataaattgaaatcgagt

SEQ ID NO: 362630 - DNA, 1123 bp, Cannabis indica
cctccaccaacatatgtgattgggacccggtgctcctgttggtatcttttgtactaaaagtgcaaggcttgaattttttcgttgagtatgccactcaatactttttccatgctatccaccgtagtttctagcctctggttctttcaatagaggtcatttctctcctcttcatagtggcgagtttgagtgcttgagctcactaagtgcactcgcttctcctttctgggtccacatctaaaagtgtgggcgaggtcttgttgcacagatggtggtggatgccactattgggatttatgccctaaaaggaagtaaaaaaatgaataatatattagagaatatataaaatacatttataatataaatgatatattaattataagagtataattattaaatgtctaaaaattccttattcatatggagaatgtataattttgtaaggatgtacaagagaattaagattatacgatataaataatataagtcggtagtgtattaaagttctgagaatctttaatatgaaactgctaagtatgatttactatacactatacttctagtgtgtgtgattttgactcagatcacatatgtagatgcacatgtaataaaggtactgtgtataattagattatgcatgactggatcaatatgtaataaatatcttttattaacttgtcgtttaccataaaaagagtttatcatatcacaatcatgatcattagtagatcagcatgaatcctgagtatacatgaactcatgtttgtgttcattgagttctttgattcactcgttaaagttttttagagaagatgattcttacaacttttgttttgtgatcttgataacatgagtggctgggaacatattatataatagtggaattgaagctttcctaaaggatcgaatcttagttctcttatagtgttaattctaggagtgctaacaattagatctaaatctataataagttatagattaactattcacattgaattaatggtacatatagaatcaagagataattagagggtaaaacaatatgttgacaaactctaattatgtactaataattagagggcgaactacttatattgattatatcaatagactacaagtaagaatt

SEQ ID NO: 362631 - DNA, 588 bp, Cannabis indica
aaatttaaaagttagcaaaatatcttatatctattcaaaatatcatgattatcgttatcttattttaaatttaaataaggtcaaataattttaaaaaaaaaattaaaaaattaatatctcaccttgaattaaaaataagattaaaaataatcaaatttaaaaataagatagataattaagcaaaaaaagtagatatttacctattgacaaattcaaattacactaatatcataaattaattctaaaaaattcaattaatttaattatgatatttagaattgaaataggaatagtaaatatctaaatacaaaactacacaaaaaatcggaagttaatttcatgaagtagcatgaaaattcgaagaaaacgaaaaaaatttgtgagctgtaagcataccatccgctctcgcataaggggaatgctggccgaggttcctcggcgctggaggctgcaagcagccattccgcgcgcggatgaggggcattaggacagcccgtgcatgtttcttctgacatgtgttgttcgaacacacatctgaccgagtgaaactcggtgtccgcgcgcttgagtgggtgtcatcacccctat

SEQ ID NO: 362632 - DNA, 526 bp, Cannabis indica
ggggctcctacccctcctgcatcaggctttagcaagagaggtagtggttcgaccatggaccagaagaggaaagcatccactgcaaccggtggctcggggcagaacaagaggttccgggggaaccagaaccgaggcaatcgtcagggtggtgctgagacccgttatttctacctggagtgccccacttgtaaaaggcaccatctcggtgagtgcagaggttagggatgctttcagtgtggcatgcccgggcactacaagagggattttcccaggctcagaatagaagtaccaaaggctccggcgagacccactccaactagggtattcgccattacgcaggctgatgcagaagccagcccttcagtggtgacaggtcagctctcagttaacaactcattttactcagtattgtttgattctggggccacacattcttgtgtggcagccagaatctttagtaaattggatagaccgcatgatagatacgaatcagggtttggaaccctattacctggcggagagttag

SEQ ID NO: 362633 - DNA, 660 bp, Cannabis indica
caatcggtctcgagtagcattagatacattagtactgaaaaataccgaggacttactgaaattaacctattgaccagaagcgatctcaaatagctgaagcagatataatatattcgaatcctctctatcagttgcgcaacaatagacataactatcatcggcaaaaagcatatgagatataaccggagcaccagtagccaccttacaacctttaagcctcccatcccgctcaaacttccgtatcaaagatgagaaaccctcagcacaaataagaaataaataaggtgatagaggatcaccttgtctaatacccctctcgggaacaatcggacatagctcatgtccgccatgaattattttataccgcacagagctaaccatagcagtaacaagatcaacaaaatgcaaatcaaatcccattttactcatcatagctcgaagaaagccccactccacatgatcataagctttactaagatccagtttgagtgccatatagccttctttgcctttacgctttcttttgagatagtgcataacctcaaacgctatcataatattattagtaataaggcgtctcgagatgaaagaagattggtttggggatatgatctgaggcaacacttcttttaaacggttcgcaagcaccttagacactat

SEQ ID NO: 362634 - DNA, 558 bp, Cannabis indica
gttggggtggattgctagagatcgcgctagtttgtgctttgctgttgctgccgtcaagcttcggggtgaagttgaccctgtggttgctgaggcgttgtcaatgaaggaggctttgagttgggttaaatcaagctgggaagaaggaggtgctgctgaaggatttcgtcctacagcggtggttatggagtcggattgtctcttgttggttaatgctatcaatagcaagagccaagttctttctcctcttggtcttattatttcggattgtattaatcttatacgatcctttactatttttcatatttcagttcagtttgttaaacgatctgggaaccaagcagctaattggttagctcgttcttctggttcatgtcctgatcgtatttccagtagggggtctgtcccttctggtttggaagctattatgttagctgatttgctttaataaagttgtaatctttgttttaaaaaaaaaaaatatttatttatttattttttgaaagaaagttcaaaacttcattcaatagttaaaaccaaagacaaaattccattacaaca

SEQ ID NO: 362635 - DNA, 629 bp, Cannabis indica
atcaaccagtttcctttgcagatcaaagcttatgtgggtttgaagctcaagattcaatggctggaggtatttcgatccttaagttatatagtgtatatatttgtttattccgcattttatatatacatacatatatttcagtttatacatataaatgtctaacagtcttaacatcaagttgttcaacctcgaactccatttgaacagcgaaagacagcatcaaccttattgtcttgtactttaccataagtgagaagatttaagtgtagtctatactaggagtatttattagaccacatccaatgtttttagacatatccagatccgatccaattatatattggatgttagattttaccatccgatctgatccaattagtttcaatcatctaatcgatttcaacatctattgaatgttggattggattggttctatcccttagatgtattttttatatatttattggtttaatttggggttgttcaataatttagacctagtattttttagatcggatcagatccatctaatattttaggtccagtatgtattggattggattggatccatccaatctaagaaaaaaagagtaaaattttaaagttaatttttttatatatacatatat

SEQ ID NO: 362636 - DNA, 673 bp, Cannabis indica
aaaaatgttaatacccaacatgaggaaactcatcatcattctaggaaagggcccattggctctagaatgtctaccaacccacaatccagacggaccacctgctctaggaggagtcaacctgagggaggccccagtgctcgaccacacgttcacggagaacccaacccgacattggtcctagtgcaaagacaacacactcgaggagaactcggcgtgggagtggcccgaaccgtgagataagagatgaagagcccaatcatgaagagacccaacctctgggagaaggtacctacaaaatggaaaactgccacttaagacgccgtttagaagaggcgcaacggcgaaacattgaattagaacgtgaggcagctgtgacacaggggacaaatgctcaaaatcaacctgaacttggagtgagaagaccacgagacagacctcgtggctcacgaaccaggagataggaaaatgtctgggaagaacaacccagggaaaatgagatgcccactgaaaatcaaaatcaccagccagaaccctctcatgaaaatgagagtgggaggcaaccagaaactaatgaacgagaagttcctcatgaaaatgtggaaaatcttgagaatcagcctggagaacgaatatcacctgcgaggaatcaccagcattcttcccaaacccatag

SEQ ID NO: 362637 - DNA, 606 bp, Cannabis indica
taatatatttttttaaaacaaataattaaatatataaattataaatattaaatatgattggatggacattggatgatattggattggatcggttcggttatccattggatcggatgtctcatccaacatccgatccgatccaattggatttttaaaatttgcatccgatccgatccaattatgattggatatccgattatattggatcggtcggttgggattggattggatgactttctgcacacccctacgtatattatacaccttgaaacatatacgaagcctctattttcaacacttacagtccgaactactaaagcaatactagaacagctaaaaaataattattgttgaagtccaaacataagtatttatttaagattccaatcttaaaataataacataaaaattaaataaaataactgcaaaacaacaataaaactacgaaaaaaaaaacacaaaaaaatattatacttcaataactcttttatcaatagggatttccataatatcacgagagataatctttaatttgaaaattttctccttactctaaatacattaaaaataattcataacaaccaaaaaacaaccgttaaaaaatat

SEQ ID NO: 362638 - DNA, 610 bp, Cannabis indica
tatatattttttatagtgtaaattttataattaaatatttttcgtattgggcgttacaaaaaatgtcataacgattttagtgaaatattgatgagattattgggataagtttattttagaaatactgaggtatttttgagtacttggagttgaccaaatactctagagatatatatatttttagtggctaagaaataataagataactatcaataataaagtttttattaatattattattatattattataatatcaaatacataataagagtcttgtttatatcctgcttgttttacaattagaccctcttattttaatttttatgaagggcttttatgtaattttcataaagagcttttatgtattttcactttataataaaatgtttcttttaataaatatatatttgtctttacaattcagcctctctcttttaataaatataaaaaaagcaattaaaaaaaacctacatttgaaaaccctcaccgactttgtgttcttatgtcatttagagtatatatcacacgattcaaacatttatcgtttgcttggaagcaaatcagacgaagcaaatgttagggtttataaaacacttaagaaatatata

SEQ ID NO: 362639 - DNA, 603 bp, Cannabis indica
gggcataaaacccaacaatgcgtccaacgccatgaaaacaaaaagcaagctgttgtcttctgttgttttcagatccacaactgatcctgggtttgttttttccaccatgtgtaagaaactcggtattaggctgtacgagtcactagcgtttcctcttaagtcatttactgcatgttccttacttctccaagctttcatgtagttcatcttgatgccatacctgtatttcaactctccttttatgtccatcggtgttgcctttgtctttatgttcagaaacttcggttttatgcattccccgatcagtttcgatgttgcttgcctttggtcttcatgcctaatatttatggggcatgtgtggatttttgagaacctcctgattatgaatgtgtttgttgggccatttctcgatgctcgtagagaccaattgcagctttcgtaaacacatttcagactgtactcttgagagcaggacttccacactttgtactgaaagttgtttttgattgcgtagtagctgaggacattctttagagtttccttgtctttgtatgcctgtcctttttccacttcggggtgatgcttgtctgttattaactttgc

SEQ ID NO: 362640 - DNA, 1787 bp, Cannabis indica
accagtcaacaacctacaaccgttattctcctgggtgagacagactaagatctaactctgaacacttctcaaactctgaatggtcagccgtccaatccccagtcacgggttctgcctgtgggccaagtggttggcgggcagaccctgtctagcaattcatcaggagaagtcatacctaataattccacccaagttaatggtgtcagccaacagattggccaaaccaaccagtcactgagacaaccggatgtttctatatttaatcgattgggaacagttcatgatctcagagatgatctaaacagaaggagaggatttgacgagcagcatgacgtgcctgtcatttagcacggggctcgtgctcaaaatcccactcaaagagatgttgacgtgactctggtcgaccaagaggctgaacaggttaatccaaccgtgcaggcacagttggaggagctaaaaaatatgttccaaggcttggccgatcagaatataatgacctcgagttagaccgagcacgtggacccctttctccccagagatgaatgtcatagagtgcctcacaagtttaagatgccgatcttgaagatcccttatcccatctcaagtattttgaaatggaaatggacctggaaggagcacgaggagatgtatgttgcagagtttttcctgccaccctctcagaggccgcccaacaatggtatttcaagtggacaccgggaaggttcaactcatggaaggctttctcctcggaattccatgcttaattctcctcttctcgccaactttcgttgcacttagaagacttggttgaagtgaagcaaagactaggagaacctctccgagcttacatctgcagattcatgacgaaggcaactaaggttgcatggttgacggaagacgggaaattgtccgcgatattgagggcattaaagttcttgaagagctttggaaggacatcaagaaaaatggaccaacagattctatgagtgacttccttgatcgtgcggatggttttattaagcttgaagaagccattcaacgagcagaggttgaggaaaaacctagccagccaaaattccctctgctgggacatccgtccagctccctcagtacccaagcagttcaagttctagtggtaaacggtccaacaacagcaataggcaaggtaatgggaaaaagggaaagttcgccggcaaaattgagcagaatcccagggaaaatcccaccaagtttactgctttctctgtcttgatagaagatttagaaactatttacatggctacacaatcattagctccgcattagaagcccgcacccatgaaaaaagacgtgagcaagagagacatgactaagttttgttattttcatggggattatggccatgacaccaacgaatgcaacaacctaaagcgagaaattaaatttttgataagaaaaaataatctgcacgtgcaaaaatatgtcaaggtccatcaaaatcaaaggggcgataacaacaaagatttactaccaccaccagtagatggacatctgcaagtcattattggaggtccgcacatagctggagattaaggcaaagcacgggaaaggtatgcccaaatagtacagcatgagcaagaagaagtagttctggccgtcgaagaaaggaaaccaaaaataccacgggcaggggagcccaccataacatttagtgatgaatatatcaagattaatttcccgcacaacgacccgttggtcgtggaagtccagatagccaacaagatggtggcccgaaccatgatagacaa

SEQ ID NO: 362641 - DNA, 607 bp, Cannabis indica
atttttatcatttatttttactctaaatctgaaaaataacataaaaattaaagtaaattgaaataaatttacgaattaaacaaagaaatatttaatttatactaattatatatgcataaataaaggcttaaaatataccaatttgatccttaatcagctacaactgtcccaactactccaacatagcttgtaaagtccctattcatacagacattcgcacagggacttgggggcaaatgttatcccaatttttatcctcctaatgtggcatgcttatatggacaaaatcagtgccacatggcagtatagctcaccgataagaaggctaagtttacaccaaagcaaacagagaccccgacactcaaccgggcttcaagtgactaacaacctccctcacaagagctgcccgaccacccctggccgaccctatggtcagccagccttgggactgcaccatggcaagccaacctaccctccataggggtctggccgacccagaggtgtcctacagggtttcctgtgcacttctacacgtggacaacatcctctgggttgtgaatttggccttaaaagcccaacaaaatagctgaataatatctagattcaa

SEQ ID NO: 362642 - DNA, 972 bp, Cannabis indica
tttacaaacacaaagttatcaattgaattttttgaattctatttcccctatttcttgtaatggcattcaattatgtattgctcacatggaacaagggctttatggtttaagactagatttaccaattgtgctcatgaacgaactttttaatgttgctaaacataaaaaccataaaaaagcaaaagattgataataatgatgaaacatatctatggcatttacgacttggtcatataggctatgatagacttcacaagttaacaagaggtggtccattgaaaattgtcaccttgggtgaattaccagtttgtgaatcttgcctagaaggtaaaatgactaagtgttctttctctgcaaagggagagcgtgccaaagagcctctagggttagtacattcaaatgtctatggacctttaaatgtaaaagccagaggaggttatgagtactttgtcacttttattgacgattactctagatatagttttcttcacctaatgcaaaagaaatctgtaacatttaagaaatttcaagaatttcatgatttggctcaaaaccaattgggtaaaacatcaaaaatcttgtaaactaataggggtggagagtatatggatatgcatttcaaagatattttaattaacttagaattgaatcgcaatatactgcccctgacactccacaacaaaatggagttgcagagagaagaaattgcacacttttggaaattgttaggtcgatgctaagctattcaaatctgtcaacatccttatgggatatgctattcagatggcaaatgattttcttaatgtcgttccatctaaatcagtccccaagacacctgtagaactatggaatggtcgtatacctaatttacgctattatagaatctaggggtgccctactcatgccttaagaaagaaataagacaaactagaagcacgaactgaggtttgcatgtttgtcagaaattctaag

SEQ ID NO: 362643 - DNA, 549 bp, Cannabis indica
atcccacatcgcctagagaaggtaaagagtgatatttccgagattgtgtaggtaagggactacacagttgaagagtgtttaaatggattgattggtactacctataccaacaaggtcatcttattttcttgtagcccatcatgaaagaactctacaatttagtgtgattaacctggggtaatttcaggatgggtgacgtcatgggaagtttttccaggaagcgtgcgagtgaggaaaaagcacaatggaaacactcatattgatttgtaaggtcagtcatcattcgaggaagtagccagagtgatgtactcctatataagatcaataattttgtgggtgtaagggcccaacggaggcttgaagcagggactttacaaaatggtatcagagccttgactttacctacaaagaagtgcggtcgatgagaaaattgatccttgtaagtaggcatgattgtgacagtcagtagtcctatgatctataagggaaaatactattaggatattttagcctattatttatgttattttaagagttaattttcttctt

SEQ ID NO: 362644 - DNA, 1147 bp, Cannabis indica
agacttgtaataaagtttgtaaatatttttggatcccacctactgtaaagtttaaattattacaagttttattttcattccgtttaatgtaaaagtttaaattatgcgccgctgagattagcaatcccgtttaggggattaggatttcgtaaataacttgggtagcgtgcctaattatttaaggcgttacactagaggtgaatgttttaaacattgtaaataaccacctgataacgatgagtgtttccaatcatttctaattgatacacttatttcagaagaggtagaagcacaatacacgtccactgatttcaatgacctctttgaaatttctacgagttctgagtcgggtaatactgaaatcaaccatgaagtcaccaatcaatcaccaaccaaaagaaccatgttttgaatccaatcttcgagggccttcctcaagatagagaaacaccaaaaccatccactgtacaagctcctcaaccaaacttggctcaacttcctaaagaacttaagcacgtcttcttgggagcaaacaacactttccctgtcatcatatcatccacccttaatgcaactcaagagcaacaactcatcagcgtgctcaaagagcaaagaggagtaattggttggacgttagctaacattaaagggattagtcctttgatttgctcccatcacattaaattggaagatggggctatacaacaacgtgatcctcaaaggagattaaacccaccaatgaaggaagcggtaaagatagaattcttgaagattctagattacgggatactttatcctgttgccgacagcaagtgggttagcccaactcaggttattcccgagaaatcgagagtaatagtggtaccaaatgataagggagaactcatccctaccaaggtcacaacaggttggtgcatgtgcattgattatagaaaattaaatgccgctacacataaagaccatttcccacttccattcatcgatcaaatcttggaacgtgtggcaggtcatcctttctatagctttctcgatgttattcagggtactaccaaatccagattgctttagaagatcaggaaaagaccatattcacttttccttttggtacttatgccttccggcgtatgccatttggcctgtgtaatgc

SEQ ID NO: 362645 - DNA, 871 bp, Cannabis indica
gtcatctatggacgacgcaaagttaaaattagcagttgcaaatgagatttaactcataaaaacaacactaagctacatgcgaagctgaatatttaacgacttgcatttcataggaacgtattaaacgaggtaccaagatgccttgaaaaaataattaaatcaaggtgtgaatagaaagcttaactattcctacgagcaatcaaaaacatacaaaacaattcataaggtgaattattcgaagtatgcttaagtttacttaaatcaaattataattgttaacgggaagtagaactaataaactgctcgtgtacataaaacacgacaaacgatgactgctcacttacatagtagattattaactacttaagcaataatacaaaaggaaaagaagatcaggggaaatgcttaaagtattttaaatttgatcaaagtataattgtttaaattatgagtaaaaatgcaagtaaaaaaatatattaagttcaaatgtaaaaatatgagacaatgaataaaagataaaataaaaagcaaagttggccatccaacaatgcaaatttgtctttacaaaatgccacaaggggcaaaccattgtctcggccatgtggccattttcctaaataataaagaaaatgcaacttaaaaaccaagcctaaattgtaggatacttggatggaacttcttgttacacttcaacctcttcttccttgcccagttcttctctcctagtcctctcgcaaaaggcgagcatggcatcagcattgtcacctagaaagctgaaatccaaatcaaggttggctgaccagatttgatagatggtcctcctcccgatgctaataaccctatctttggtttcagcctccatctctttgag

SEQ ID NO: 362646 - DNA, 584 bp, Cannabis indica
gcctggcagtcaaatggccaaagtattaagcttgacttctatcccaatcctgaagaggttcttgctaaattttaggagaagaagaaaaggcttgatgctttgcttgaagcacgtcggggccctcgtcttcctcctcgtattgactaggacgtggagtccaacccattataatcatatctctttttttttggacctaccctttgggtcaggatattttaaatatatatgctcactttgatacatattcttcttgtctgtttttactttcggcctgttttacatctgtccgtgtggtatgccttagtacccccctgagtggcatgaaaactttgtttttaaggcactcagttttatttaaaatttagaggttgcatacactttgacggtacaaattctttaaacaaagcctaagtttacatatttggactactggtaaacctttcgaagatgatcggcgttccaagcccttggcacaatggttccgtccatcctttttagcttataggtttcggagccgatctcatcctcaatttcatatggcccttccaaatttggcccaagtacccccactccgggttcttgag

SEQ ID NO: 362647 - DNA, 623 bp, Cannabis indica
ctgaaaacatatcccaacagcaacaacaagaacaagaagcaaaacaacaaaacaaagcatgatccacttccttaaaaaaatcaagaaactaaggggaagttgtctaaaaccttaccttagcttggatattacaaatactagcagaaaatcacttgaatcaacaaaaaaaaaaagaaaactcccaaccctagctggccaagagagtttcgaaagagagagggcaagagaaagagaacctttccttcaagaaaatgatacttttgagttttttttaaaaaaacatgagaaaagaattgatttaactacttaatattcagcataaaacttaactaaaaaatcagattaataaactttaaataaaatccacaaaaagacaaaactcacttaggcaaaatgactactttgcccttccaacactaaaagtcataaaatggcactaacgggtattttgggaaattctaaaataccgactattcccgacattcccaatgtctaaactattgtcccgatatactaaaaatactatgatgtgattcaaatagccatacactgcgttccaatgttgccgggcaccaaaatatgcaaaattatgaaatttctatatgtaacataaaaatgcattc

SEQ ID NO: 362648 - DNA, 1471 bp, Cannabis indica
acaaggattgcattcattgtcaatctgtttgcatattgatttacagtaattaaattaaaaacgtaacatcaataaatgaataacaatttctattcactagatacagcaagtatgcgtcttctaatatgcgagttgactgttcatattctagtgtaagctcgcgggcttaagatagacctaacatttaattaagtttaagatgtctgcgctcttatatagtcgcatctatggacatcgtatgatgaactgctagaacctagacatgcgaatctatattggtttatcgaggctgtcaagtcatcgagaccaactcgcattatagagaatcgatctctatgttttcgcaggagtatagaaaggacacccgcacatatcttgatacatgcgagttggatacgttctctggttccacataatgcgagttacagttatgcaatcagactttggtcatactcgcattatctcgctgactctagctcaggcgaggtttaaactcgaggagtctctcatggacatctcagctttcattggaaatctgaatacacgtgtcctccaaacaggagtctggtctcgagtttctaggtgagagaaatctcactataacacatgcccctagtttcgcgatgtgacagatgcggtcacgagggaaactatacgcgagagacaggtgaaaggttgtcacgaggaggtgacctttggttgtcccttcgagggcttcgaaaaatgacggctgtaattattgctttttattgcatttatggtgccacgtcacgaaactcttcggtttttgtgtaggcgtggccatggctggccgttagattgggcgaccttaggcattcttgctgccacgtgtcgtaatcccaattaataagggatatgggtatttaaaccctttgatacgaactaaatccttcatttttccctctcgttcttaacttcccttttccctcctttacagagatttcaaagaaaccttcatactctgcccagattcctgcctctccttctaaaatctcttcaatctcagaagtgatcgagggcaatcgcaggagcttaccaaaactaaaggttagttgcgaattccaatgcatttttggtttctgtttgagatgcaaaactgctttttttctgggttttggtattttgagggattttaggaatacatgcttgtaggaaatgaacatagggctatgttttttcagtatagaactgggtaatctcagaaaaattgacctgaaatttgcataaccgtgaactttaggaagaatgtttgaataatcgcatccttatcttttgaatacacgtgggtatttggatgaacactttgaatactcacatgtttgcttatcctaggtttcacagagactttattacttctagtcgttgttttaaaccttaggattttatactatgtatattttattgcgagaacattggttaagtctttcaaatggtgggcgtgtcacagtat

SEQ ID NO: 362649 - DNA, 870 bp, Cannabis indica
accgattactctctgagcggcttgaatacttggagggcaaggtcccacaagctactttcacaatttaaggttgtgagtatgcaccgggatgactcctaataggaagatacccgcctcacgaaagaagtcgagaaactaaaggaggaagcccaaaaggcaatgaaagaagccgagaaggcaaaagaggaagccgagaaggccaaggaggaggccgagaaggcaaaagaagaggctaagaagaccatcaaagcccaagctgatgagtttgaggagaagcttgctgaaaaaattgttgagaaagaagtcgagactgtagaacggtgcaataaggttggtttacgcactgtacatcgggcctggctttggaaccctaatatggataccggcttcttggaggagcaggaagaggaatctttagcactttgcgagaagaccaggatggaggaagaagatgtcgaggtcgaggaagaattagatctatccaagtctcccagcatgtagacttggtttttattttatctcccttttctcttttaggaaatggccctttggccgagacaatggtttgcccctagcagcacttttttgtaaagaaagatttggacggttggatggccaactttgctttttaatgcctcgcacttttaaatttaaactttaatatgcggatgtttgcttgcattttattcacaatataaactatctcatgcataaagtttattaggggtttccattgcttgtcccttcctttgacattaagtagttaatttcctactttacgtgtgagcaacttacctgcccgttcctcaatctgtgagccatcattgattccacctcgcgatcatcggaaatgatcatattttaagcaaa

SEQ ID NO: 362650 - DNA, 611 bp, Cannabis indica
aagtatacaaccattacatcattctgaaaatgtattaccatagaaggatttaggcaacgactagtaacgactagctgttagaaactgttacaatactcaattatatcatttaaatgggtattgggacgttggaaaatgatttaactcggagaggagttacattttgagttctcaggaaacagttgtttaatagttgttcgtatgttgttttatggttgttttcgaacatctggaaccaggatttttgaaaacgttcataaacgcatacaaattaattgagcatgtttccagctctcttgtccaacgtttttatctcatcaaatacaaattaatgtgttggtaacaaccatgtgatgaaggaatttgattttcaaaagtgatcctcaaaacactataaatagagggctttggttcacttgtagacaacaacaattttctatcttctaaacactaagctagaaaatattgagaggcttgtttattcccaaaagcatttccattctgttccctttggcgatccccctttacttatttgtgttcttcttcatcttctttttcctatttttttttctgcctcttcttctcttgattatatatacatatattatatc

SEQ ID NO: 362651 - DNA, 532 bp, Cannabis indica
tttgatattatactgggaatggatttcttgtccaagtactcagccagtattgattgtaagagaaaggtggtaatcttccaaccagaaggcgaataaccgtttgtctttgttaaatcggttcagggatctcggatctcggtaatttcagtgctaacaaccagggaattattacgagaaggatgtctagggtttctggccgtggtattggatactgactctgttcggccagaagacatcaaggtggttcgagaattactagatgtttttcttgatgaacttccgggtttaccacctcagagagaaattgattttgttattgacttggcacctggagcagaacccgtttctaaggccctctacagaatggctccagcagaacttaaggaactgaaaattcaactccaggggttgcttgacatagggttttcacgacctagtgtgtcaccctggggagctccggtattatttgttaagaagaaagatgggtctttacggatgtgcattgactaccgagaattgaataagctaacaa

SEQ ID NO: 362652 - DNA, 548 bp, Cannabis indica
ttcattccatttcctctctttctttgttcggccagcctagaccagaaggaaattcagttcttcttctttgttttgctgcaatcaaccagggaatcaagcactcttgaagttaaggtaaaattctagaaccctagaacatgtttatttaaagttttcttcttagtttgagcttgtgtttttgtagtaatagttgttgttttgatttgaaatgcttagggatcaaattctaggtttggtttgggttaattaaggattatagcagctgctttggttggttgatttaggtgttgtgttaatttgagcataaaaaccttaacttaggtctttaatggcatatcttgacttagtgtttatttttgggatttcttggttggaaaacgttcaaaatacattatgcaggtgttctgaagagtttggtgaagtttggtggacttttgaattaaggggttggtttttgggttcctagcacagaaccggtcgaccggttctgggggacctgtaccaaccgttcgaccggttggtgtcctagttttggactttcggttggg

SEQ ID NO: 362653 - DNA, 631 bp, Cannabis indica
aatcagccatgagtgcaggagcaggataatgtatgtacatgttcgggctacactagaccaagcgggttagggtctatcattgataatttttgtaactctgctttgccgcttaggtcggctagtggaaaaaaacttgtaataatattttgtaagatatttttggggtcccgagacatgtaactttttttggtttgtaaagttaaaattactacaagtcttttttattccttttgcattgaaagtttaatttctacgcttattttattagtaatcccatttagggtattcgggtttcttaaattatcttgggtaacgtgcctaatagttagagcgttacaatttggtatcagagcgccaaggtttttaaacttcctgtagaccagacgaacatgtacattcatcgtcagagacaagctcgactcatggtgtagtaagtgctgcgagtaaatactttactgcttatgtgatcatttatttgccgctttccattctaggcagtatgcaagcaccttgagtatttaggtgttatgtgatgccatactttaaatgctatatgattaagtgtttatttatatggagtaaataattgacttagggtttaaggcaataagtgcataagtgtggtattggt

SEQ ID NO: 362654 - DNA, 881 bp, Cannabis indica
atgaaaccaaagatgcttgtccaatttgtggaagtagtcgatggattacttcagcaaaagctaatggaaaaaaggtgcctcgtaaggtgttgcgctatattctgttgacacctcggttgaaaagattatatggttcaagacatacaacaaaatacatggtaaggcatcatactggaaaatctaaggatgaacgagtgatgcgtcatccggttgatggattagcttggaaggactttgatactacacaaaatttgaatataaatcaggctgatgaaaatgttgtggatggtgacgttgatgatgtaatagatgacgaaggtgacaagttgctaattgatcgacgtgaagacgatattgtttctgaaaataacgagtgtggtagtggctattagtttacttatgttattaatttgtttgtaataatattataagtgatgaatttgatgatgttaattgtaattcaaactataaatattttttaatctatatttatactaatttagtcatacaactttgcttttaaagagtcataatgtcagctgatatagcttcttctcacgggggagacggttatggttttgatccaccagatcctagtaggataccctcaacttgcgaggcagcaccaccgcccaaaagaaggtcgtggtgttgctagtaatataccattagagactcacaggcgtgcgaatcaggggccattgccccttacgcttgatcctgcaacaggaaaagtagttggcttggagaaccaaagctttcatccgggagttgggagttgaagtgagcacattattgctggggaactacttagacttttctgatgtacctcaacattttaaggaacaagttgtgcagagaatgaaggtaatcaattgatg

SEQ ID NO: 362655 - DNA, 771 bp, Cannabis indica
tcgcgaatcccgtactcgtgcccaagccgaacaagaaatggcgagtgtgtattgatttcatacacctaaacaaagcatgcccaaaacgaactgttttcttacttccaaggatcaatcagctcgtagacgcaacatcatggcaagcttcatggacgcttattcaagctacaatcaaatcgaaatgcatccacgagaccaagaacatacaagtttgcgaacagatatgggtctctactactacaaagtcatgccatttggtctcaaaaacgctggagctgtgtaccaaagattggtaaaaaagatgtttaaagaccacattgggcgaaatatgcaagtgtacgtggatgacatgcttgtcaaatccagaaaggctgggggcccttaaacgacatagacaaatgtttcaaagtcctcaagaaatacaacatgaaactaaatcccctaaagtgctcctttggagtcagctcgggaaagtttctaggcttcatcgtcaatgcccgaggaattgaagacaatccagtaaaaattcaagacctcctggataggaactcgccaacaaaaaccaaagaagtgcaaagcttaactggtcaaatcgccgcactcagcagattcgtgtcaaaatcaacagacaaatgtgttccattcttcaacatcataggaggaaacaaaaagttcgagtggatagaagaatgtgaaagagcttttgaaaatctaaaggcacaacttgcaaaacctcccgtactttctaaacctctagacggtgaggagctg

SEQ ID NO: 362656 - DNA, 751 bp, Cannabis indica
ttgaagcggggacgttacattgctactcaatgaggtttatgaaaatagtgattaatttaaattttcttatttaattaactacttaaagtaatatatagaaaatattccgggatcccgtatacaaaatactttacaaaagtttgttatgcatataatcaaaagtttgtcgcccggcgactaacaacagaaaccctaatgtcccgaggatcatacgctccaggcctaacagccccgacaagtacaatcatcatctgctcgtcctcacggttcctcgaccttagccttgcccttacctacacataaacatagcactgtgagtcgacagactcagtaagaaaagcataaataataacatacataaatcccgggttatgatcagacacccatacccctgaccacaaccctaatcctcgtgtcccacacaatactgagtctcgaacgttcgtacgacggtaccttagacatagtaacagcctatactcggtacgctagtcatactccaaccgtaccgatgtgttactgtatcagcctatactcgatatgtcagtcgaactctgatcataccgatgtgatactgtcaaaaagtacggtactatcgaccataatatcagcctatactcggtacgctagtcatactctagccgtaccgatgtgatactgtcggatagtacgaagccaacatacatatctaatgtaatctaacaggcttcataacatgcacgctaaaaatgtaaatatttacatacgcata

SEQ ID NO: 362657 - DNA, 789 bp, Cannabis indica
gaccccatgtgctgggttcctcgtgtttggcattatttttcgaagaacaaagtctcctactcgcagaactctttccttgaccttagagttgatgtatcttgcagttcgccgctgataagccgcgttttttaggtgagcctgatcgcgcttttcttctagaaggtcgaggtaaagcgactgcttttcttcgttctgttcaatgttgaaaacatctcttcgtagggaacctgccccaatctcaactggtaccatagcctcacatccataagagagcgagaaaggagtctcactagtcgtggatcggggggtcgtgttgtatgaccataaaacttgcgaaagctcgtctggccatacccccttacgttcttcgagttttcctttgatgttgtgctttattatcttgttgactgcttcagtttgcctgttactctacggataggcgactgctgagaacgcctttttaatccctaagtcatcgcacagttgcctcatttccttatagtcaaatttatttctgttatctgaaatgagcttgtaggggatgccaaatcgacagattatggagttgtagacaaattcgcgcagtttagccgctgtgatggttgctagtgctttggcctcggcccattttgtaaaatagtcgaccgcgactacatcgtacttgaccctaccatttccttttggtagttcgcctatcaagtcgatgccccaaactgcaaagggccaagggcttgtgatggaatacaagtggctcggaggttgatgggcatactgttgggttttatgccc

SEQ ID NO: 362658 - DNA, 531 bp, Cannabis indica
ttttcctatcaagctccttcaccagttcctcctatttaaataaaaattattagaatatataattaatataaaatattaattttaataataaatcattttattcacttacataatcttttgcagcagcttcattaacgaatgtgccaaacggcttttccaaatgaacctccttccatgcatcaactgcatgctctccaggaggacccccctatacgaacataaataattaaattaatttattataaattttaagaaaaatcatatttaacaattaaagaattaatagttaccattccgtgttgtatcaaaaccaacgattttgtgccttgcgttgttggatatttcatctgttgccaatttgctttgtttttacctgagcgattcaaaaaaatttcgctggtgaacaattcacaaatcagctcccaactctccgtattcaagtggtcaggaggcaatccaagaactttctaccaatcttctagtttagtgtaatgttgtttaaaatacttgtgtctgattgtctttcgctca

SEQ ID NO: 362659 - DNA, 622 bp, Cannabis indica
tatatatatatatttttctaattgattaattgatttagctaataagtattttataaagtctagcaaggaccaaagtagggtgccgcatttgagtttggagaccaccttattactatttattctcattgcatttgaattgctaaataattaaagacatcgtgttaaaacttcacattattgtttattagaacttcaactacttcaatttttaatgagtattattatagggtactaaggtgtctaccattatttgttggaattattttaccaagatcttagatttactaacaagtatgttatttaacatcctaaatatgaacttctaaaacgatatgaaataaacacatataaagtataagaaatattacagtggttgcagcggaatataatgtctctttccgctcagatctctaacccttatatcttttctgcagtagagtattaccaagatctgagcccaaatgtccttctcttgaatgaagagagaggaagagaggtttcggctagtgtataggaagaaggctcaaaatttatctgaaggaaagagataaatcatctttttccctaaagctatcactacatatttataggaaaccacatagggttaggttagatttatttg

SEQ ID NO: 362660 - DNA, 1095 bp, Cannabis indica
tcttcttgagtaacacatttgagcaatggcatcaagaatcctcttctgtacataattccctctactatgatataccgtgcaaccttccttctcattttttgagcttcattccaattatctgggagttttccagtgttgcggtaggcggctatcggtgtcatccagtttggggaagtatcaatcatttcaatttctttcgtgccagtgatactaggctcttcgaggaactagttaggaaccaagttcgccttatcacttacattactgcttgccaaccgagctagcgcgtctgcagttatgttttcttcccttggaattttctgagaccgtagcttttgaattgtgcgagcaggtcatgtattttgctcaaatacgctatcatcttttctccctaagctttgtattctccgaatacatggtttaccactagctgtgaatcactgcagatctcaatgtgttcggctttcatctcctgggctagttttaggccagcaattagagcttcatactcggcttcgttattagatgctttaaatccaaacttgactgcagtgtgcaggtgttgccccccaagcgtgacaagggaatttcttgcaccagatagttgatttgtagctgcccgtctacatgtagtttccaggtcgacttatctttactattacttgactgaggtgtttgtaccggctcggggttggaaagtaatttcgtattggcccaaatccaccgcccacatgagtagccattagaggcatctggcttttccaacatttggcgtaatggttggtcagtgtacaccctaacaggatgagctggaaaataaggccttaactttcttgttgctagaataaggcagtaagtgagtttctctatcaatgggtatcagccttcggcctcaatgagtcttttactgatgtaatagactgggtgttgtatgttgttctcttctctgattagcacgacacttatagcatgttccgtgacagctaagtatattccaagttcttctccgtccagaggttttgagagtacgggaggttttgcaagttgtgcttttagctcttggaaagttttttccacattcctccatccactcga

SEQ ID NO: 362661 - DNA, 561 bp, Cannabis indica
ttaaaaaaaaaatactcacatagaaaataaaataaaataaataaaaactggttgtcaaggaaattgaccaatgacttctcatagaattactcatttttttagtgtgaaaaatcagtttttttctttaagtggtgaataaagtcacacagaaatagtaaagcagcaattttataatcggtagtggcaccttctcgaacgagaatagtttatcgtctaactaaaggatatgttttgacaagcaaattctaatcacgaaccacatgggacaaaactgtccctgaaaatttagacaataaaagtataacgtattcaaacagcgccccatcacattgaaaaaatatcttcctaatattaaaagttatcgccagagctaggaaacctaaaaaaatatcacaacaccaaactaaaaaaatacagttatattagaatgacaatttttaaaataaaaataaaaagacaaacttaaaatttaacacacaatctataacactagctcaacattactaaaaaaactaaaaaccaacataattttgatagggtgttcatccaattcaatccgca

SEQ ID NO: 362662 - DNA, 568 bp, Cannabis indica
ttgactgcaacttccacgagggtagggtggatgaaagtcgatggaagttaccgatgatgatgtgttaccccttttggctttaaggagaccaatcaattcgtgttttgtgacaaactcagaggaagatgagcctcttcaccaatcctttcagcaatctcagaagttttgattcctcgaacattatcatgtgttgcccgagtttgttgttcaacaatatgtacttgccttatcaaagattcattcattgcacattcttcaagtaagcccctccttttaacagatgcttcttggtgtgtctgtggtagaagtgaactcagtagctgcatcatgccgtcttagggcttttggagcttttccaatctggctaacacaacctcatatgtgtttgtcggattagtattattgtaattattgttgtagttgttgttatcatttcacaatgtatctgtttggatccgactgtccggctcttgagtatcggagaaagacatttggatttagatgagagaacataatcctattttttaagtgaacgaattgagcggtttccttagtatatctatataag

SEQ ID NO: 362663 - DNA, 744 bp, Cannabis indica
attagtctacaagagacagaatgctaacactataattgaaggctacagtgattcagattatgctggggatagagacaataggagatctacatctgcctatttctttataattggagggaactgtattagttggaaagttcagctccaacctgttgtggcactatcaactacagaagctgagtatgtggccacaactgaagctataaaggaggcaatatggctaaagggactaatgaatgagctaaatctacttaaaggtgtgcctactgtgtattcagacagccagagctgcatatttctatgtaaaaatcctatgttccatgacagaacaaagcacatagaaatcaagtatcactttatacgagataaagtgactcaaggtgaaatagacattgaaaaggtgcctactgaggataacccagcagacatgggtactaaaattgtgactcttaacaagttcacacattgtatgaacttgttaagaatcgactcaggagactaaaagtaggacctatcaagctaagactctcagagataaacaacagacatcagaactggttataagaggaattcaggtggaaattgttgagtaaattccacttataaccagtcccttatacacataatagtatccacatcagcaaaggcactactcatacactaaagtaatttcgaatttaaagtaagaagagagagagagtggtcagctaaagatagggagagagaaggctcagtttttctgaa

SEQ ID NO: 362664 - DNA, 1109 bp, Cannabis indica
aaacgctgattctttttagtaagctcggttaagggtgttgaaattttagagaacccttccatattacccttccatactaaaaccactaaaggtcactaaggggtatttggggaaattctaaattcccgactactctcgacattcccaatttctaactatatcgccccgctatacttaaaatactaggatgtgattctaatagccaaataccgcgttctaatgttgtcgggcactgaaaatgcaaacttatgaaatttttatatatgacatataaaatgcattctgaattcaaataaattccataatcaaaccctaattatctactaatttccaaatttaagctaagcggtctttacaactatccctccctttaaaggattttgtcctcgaaatcgaacctgaataactctggatattgggctctcatgtctgattctaactcccaggtggcttcctccaccttgctgtttctcgagagtactttgaccaaagctgtggtcttattccgaaggactttatcctttttgccaaggatttgcagtggctgttcttaatatgagatatttggttgcagctcaagattttcacagctaagtacatgagcagggtctgaaacgtattttctcaatatagagacatgaaatacgttgtgaactgctgaaagaggtggaggcaaagctaattcatacgccacttgtccaaccatctcgagaatctcgaaaggtcctgtatatctagggcataacttgcctcttctccggaaacgtttgattcccttcatttgagatactcgcaaaaacatgtgatcccttgcttggaactcaacatttctgcacttcaaatctgctaactcttttgcctactctgagaggcaagcattcgagctttaatcttctaaattgcctcattggtccgctgtacttattctggacctaggtatttcttctcccctgtctcatcccaatggatgggagacctacacattcttccatacaacagttcatagggagccatccctatcgtactttgataactattattataagagaactctatcaacggtaggtacttgctctggagccctcgaaatccgtaacacaggctcgcaa

SEQ ID NO: 362665 - DNA, 809 bp, Cannabis indica
agattcttgaagatcttttcgagacgcgtgacaggttggctattctctctattcctctcagttcttccattcacgaagacgcatggtattggagctttgaaaagtcggggctgtacactgtcaagagtgcctatcggtacttggatgatttaaaaaatggcttttctaccgataattctgctggtttttggaagaaaatctgggctctaaacattccaccgaaggtgagaaattttatttggagagctgcttctaatgtgttgcctacgtgtgctcagttggttacaagacatgtcccgattagtagcatctgtcagttgtgtaacagcagcaatgaaacaatttttcatgctcttgttggttgctcttttgctcgctcttgttggcaccggtcttgtgtggatattggtagctggttggagatggccttctcggcctggtggtctaatttgtcgcacagggtcagtgagcatatgttggaagaggcggctatggttgcttggggcatttggcgagctagaaacgatgtagtttggaaccagaaatcttcaaacgctgctggtgttgttctctcggctaggcgtactcttgatcaatatcaaattgctcaatcttcgaaaaatgattctttattattttttcgtggtgatgaaacagttgttgagcattggaaacctcctaattttaaccagatcaaggtcaatgtcgatggtgcaatttttgagcagtgggggcgttatggtgttgggtgtacagcccgtgatcatgaaggtaaaattgtggctgcattcaataaatcttttgaaggt

SEQ ID NO: 362666 - DNA, 560 bp, Cannabis indica
acttggcattgaaaagttcctgaaacttttcccaggtcatcgttgtgacatcgtgtatcatggacaccatgtcccaccatagtaatgtgtcttcttgaaactgaaaagtggcacagaccactctatcattcccggtaacgcccatgaaattcaaaatcttaataatcactgttagccactgctcggcttccatccgattcactgcaactggaatttcggcctggataacaggggcaggtgccactggaatttctggaacaagcactgcaggagcaccctgctatcttagtcggctgtcttagtccctggatttcactgtcttgttcctcaattctggcttgcatttctgcaaacctattttcccaattctgggcatcctgagtagcttgggcagcctgtggcgggttagcatcaccccggccacgtgccctacccctgggacctctacctcggccagagcatttgggggaaactgagctccttgaccttcatttgacccgaccgaattgccctcactcctggtatttttcctggcgtccatctagtctgaacagcctgcg

SEQ ID NO: 362667 - DNA, 497 bp, Cannabis indica
caccgtcttactcactatgattgagtacttgactttctatgtgtgggcatggcactctatcactaagggttcgagtatgaagaacaatgaaggatgcttcaaatcactatacaaggtgtctctcatctactagttctctaacagagttagaaactagattttggcaggttgaaaatcaattgtcaagtggatagagtttcaactagggcttagagctaaattatataggaattaaaaaaaataaaattgggtgaaaatcacttctaaggctggccatacaaaggaccattttctagttacaattttgccactttattttaaccacttattcttctttcaataataccatattttccaatttaatcctataaatgtcaaaactcgccttacaccactatagatttagaattgaatagaactttcaattatacagaatgctctatatgtaccacgatatagatacgttatgatcatccattgttacaatcctaatagtc

SEQ ID NO: 362668 - DNA, 658 bp, Cannabis indica
aaatattaaattaaaatttatatttagagttatccaaattattaattttatttaaataaatatatattaaaataaatagattaaaataagtatcaaatgaaaatacactctttaaaataatgagctttagttataaggacattcaatctccattcttggttccacataaatttaattttactgagtaatcatccctaatggatgaacgttcattcgtaatttaacgtcgtagaatctcaaaagataagtattatttgcaagtgttttattcatagtaacgtccaccctaaagtggctgctaggagtaagacttacaaggtatgaaataaaggtggaagctcataagatagaaggaccttgactctcgcctaaacgggataacaccggattctaatcttgatcgaataaaagtttgctagaatggtatccatttgagatgagttgactactctatttgatgaatgatatctttgactcgcacctaaacgggacactatatcagtttgttggacactttcgaaattatttaagatgtgcctgttttggattttcacatgtctttcttacttactacttgtatgataatttctaaatgtgtatgaatttatattgaaccatgttattttctgttattaatgttgtagtttaatttcaaatc

SEQ ID NO: 362669 - DNA, 782 bp, Cannabis indica
tcctccggattgggagcagaggtttgcgcagatgcaagagtcaaatgaaatttccagattaaggcagcagggtcttcctgtcgtgcctccacaacaagcttaggccattgtagctccagcggtgccaacagaacaacctattgttggcaatcgtatggagctgttatacaaaaggttccgtaagaaagcacctccactgtttctgggaggtccagatgtgatgaaggctgaggagtggctcacggtgattgagcgaatattgaatttcatgggggtggttggaaatgatcgggtgacgtgagccacatttcaattccaagaggacgctctcgtgtggtgggagttcgtgtccctcactcgggacgtcagtgttatgacctgggaagagttccgacagttattcaataccaagtattataatgaagctatctgcagtgctaagcagaaagagttcactgaattcgtacaaactgaggtgatgtcaattactgaatatactacgaagtttgatcgtttgtccaagctcgcctcgagtatcgtgccaatagattttagtaagaaagaaaagtacctggccgatttgaatgtgatgattaggcatgatctgatgatctctactaatgaagcaacatcatatgcagaaatggttgaaaaggccctgggagctgagggtgcgataaattccttcaggtgccccaactgactccaaatgttggtgggacccccactcttcctactcctatctatggtagggatggtgatgattccaccactgatcaaaa

SEQ ID NO: 362670 - DNA, 663 bp, Cannabis indica
atgaattactagacaaggtctgccagcgtaccgctagatagaattcatgactggggattgggcggctgaccatttgtagtctgggaagtattcatcgctggatcttcgtccgtttcacccaggggaatgacattcggtggttgctgacctacagtttggtaggcttttcgtattagcacggtagcttggcgactacgattttcaatctctgcatggtgagctcttaacgcctccatctctctatctctccactcggtaaacatacgcctttgttcttcaaacgcgagatttaccgcagtgcggagttcgtcctgatcatgatgtagggtattgttgtgaccttgcatgagttcaagagcgtcgcggagattttgtaactcagtagcatctccaatggtcatctgggtgttggttccaggcggaacagttgtgttatgaatgccctggttgggtgcggaactgttattcccagtctcttgcacaccaggcgcgatttcatctataggagttgttacaccattccccacgtttgccggctgtccaggattaacagctggcagaacccttgtgtttcctgggttctaaaatgcaggatccaccgcctgtgaatttgctggatcagtcaggcctctacgagtctcaccatcgtatttgcggttagat

SEQ ID NO: 362671 - DNA, 1160 bp, Cannabis indica
aattaccctctctctggctattgcatttatactccagtcgtcaccctattcattatgaaaactcccctaatttctcgagcccagatagtttgtaatactctttctctctcacacctccatttaattttggcggcaccatcgctttcgcatttaatgttcctgcaatctatccatctcttcctcttcccatgtcgaaatcccagagataaaccaaccgtcaattggtatctcttcagtttcaacttccaaatcatcattgcctatcttctccaagtccagacagcccttacaggaattgaagaggtggctcagataccgattcactcttcgaggcgccctttcttctccaggtatcttcttctattgcttgttcattctagtacttatttaaatatatgcttgcaatgtctctctccacaaccatttcctccttctccttccaaatctgtccttccttcttctgtggtttaatggcgtcctcttctcgaaaccccattcctcttaccgctcttgatgatgaagagagtcttattcacgatttcgaccacatttccctacactcacccaataattccaactctttctgtttgttctttaagttgctgtctcctaaatctgtgaaaccttcttggattgagaaagccatgactgaagcttggactctctgatttcccgttcaaatctctgaataccactctggattattcctggcttcctttcaatgtgacggagaccgtcgtcgtgttcttgaagaacagccgtggcctttcgataagttcctaatggtcttcacccatcctgatgtgtcccccacaccaactcccgaatctgttcggtatgtccccttttggatccatgcccataggattccgtttggtcgcaaaagccctcagttggctcaattcattgctgatgagataggtgaacttattgaaatattccccctctccttgcttgagaactttggtccttatctcggtcttcaggttttattcaatatcacaaagccattgcgccggggtatgactatacgcttccgtggcatcaatgatcctaaatggatcagtttcaagtacgaaagtctccccaatttctgtgacttttgtggtcttgttgatcacacctaaaaaaaatgtgccaagtaccttctgcgttgcgat

SEQ ID NO: 362672 - DNA, 771 bp, Cannabis indica
tagttacattaaatatgtaaccacatgagttatttgtattttagtcgttggatcattattaaacggttgtgattactttagtaataaataaaaataattaaaaaattatctgtaacatgatactaacttaattttatttagtttattataaataaaaaatgataaatatttataatttataaacattagttgtaaaaaaatatcttattaaatattttcattaaaaatttagtttattttaagtatataattgtatataattaatttgagtctaaaaattaaatttttacttgttattgatttcctatagtagattataaaaagatgtaactattataattacatttttaatataataattgaataatcaaccataatattttctaaaaatttggtgtggcaagactttccttggctttcatgagcaatgtcaattattttcttcactaaggcatatcagaaaagacttgaaagaattacaattaggtgtaatagaaagtaattagtaaaagagcattgctatttatttattttgtttgataaataaaagaacattgttattagcgtagtacataccatctagacgtagcactttataaattgttagcgataatgctaaaatgtgctattgatgtttaatactacttaaaatgtcatatcactattgatgtaattaattatcaaactctatgattaacagggccgaccctgacttttagtgggccatagaaaaaaaattattttgggcccttatttagaaaaaatatggta

SEQ ID NO: 362673 - DNA, 442 bp, Cannabis indica
ttgtcaagcaatatggttgtggaatttcatttcagcactagatgttgtaaactctatcgcgaggccgctgaaattgtattgtgataattctgcagcaatagttttctctaagaacactaggagtacttctcactcaaagcatattgatataaagaactattttgttaaagagaaagtcgctgagtccctcatttctatcgagtacacacctaccactagcatgttagcagacccattaacgaaaggcttacctatgtgtgtgtttttagaacatgttgcctgaatgggattattggaagcctagcttgttaagctcagtgggagtttgttatttatgtattgaacatgctagtattttgtacggattgcttatgacttgtgttttgttaagaacatgcattatgatactgaagtcacttctttattgttgttacatatgtat

SEQ ID NO: 362674 - DNA, 736 bp, Cannabis indica
ttccatgttttcatgagaataaagttttcaaaagaaatttttgcgttattgagcaccactagcttaattggattatgtgctgttatattgttgagcaaaccccttaaaagttaatcatagtgggtatattaaaaatattattcgttgcttatttcattattttgcttatttctaaaggaaattttgatatcctaggttatacgagcgttgcagggcttatttgttattattagattacatatcaaaatctttttttaggtcttagggtctcaataagggttagggatcctaagttgattatgaagtaaattgaaagagtttagcttctactagccaaagggtattccctttggctagttctagtaattttataggtggtctagttgtttagttttggtgtttgattgattttgatcagcttgataattttctaattataaattttttctggttttctaatttttttcaggtgaaatttcagtgttacaggctgaaactttaaccctgttggttggactcaattggtctcatatgtgtggttttctgattcatgcagtttaatcagatttgttagctttggtgacggccataaacaacgaaaagatgtatttcaacaagtttggagcgttgtttgaagatgttttagctttattgtctaaattttcgggggcagttttgccccatgtggtttgctctgagaatttagcagcccatggcttggcaaagcatgctttgc

SEQ ID NO: 362675 - DNA, 539 bp, Cannabis indica
gactgctatgaatgagtctcttactattccgattaacgctgagaggttcagaaagcactctttcaaatgcatcctgataaatctcctggtcctgatggctttaatcctgggttttatcagaagttctgggatatcgttagtaaggatatcattcgattagttcaacacttctttacttttggtgaatttcccgatcatttaaaagaaacgaatattgtgcttatcgcgaagaagtctaaaccccaaagcatgagtgatctaagaccaattgctttgtgtaatgtgggctataaaattgtttctaaggtgctggccaatcggttgaaagttgttcttcctagtgttatttctgacactcaaagcgccttcttacctggaagactgataactgataatattctaatctctttcgaggtgatgcattatttgaaaaggaagcaaatggggagggaggggtttatggaacttaagttcgacaatgagcaaggcttataatcgagtggagtggggcttttttacaggctatgttgaggagattg

SEQ ID NO: 362676 - DNA, 803 bp, Cannabis indica
gaatcacaacgaatgtcaaaatcgagtcttttctatcaggaaataacacattatgcagtctaaaattgtcatgcgaacctaaaagattacaatctaacgtgagatttaaaaaatttcttaaagcttgaaacttatcaatgacaggttcaaagaagagatgtcaaagaagagaggataagacatatatggagagaaaagatcaaagatctaaaagcatgccatgctaaaagccaacacttggctagacaaggctgctcgacaaaggctactataagcaagacgagaatgaggaagttcccattcgaccaaatgttcgaatagggacttggggagcaaatgttatcctaaattttgtctacctaacgtggcatgttcacgtgaggacacgtggaatacatccttgctaattgcagaataaagtctccttagaaggtatggcaaaactgtcaagcaacaagtgaaaggagttaagcgagccgtcaaggagctatactgtaaagaccgcttagtttaatttagaaattagcattaattatgattaattatgaaaattatttatagatatttaaataattatttatgctgttatttttgaattcagaatgcatttttatgtcatatagtgaaatttcataattttgcatttccggtgcccggttaccatggaactcggtgtttggctcagtaaaatcacaacttagtatgttagtattatcgggacggtttattagacattgagaatgtcgggagtggtcgggaatatagaatttcccgaaataccctttaagtgcctttatgttatt

SEQ ID NO: 362677 - DNA, 848 bp, Cannabis indica
gtctcctcttgttttaaaactctgttgacaaagttgttaagttcttctttgaatctcttggctcgcgctctgaactttacttgtatctttagccttagtgttctcatcattcccctccttttgaaaaggattttccctcaaatcttcacttgcatcaaaagggctcaaatcagaaacattaaaagtatcactaacattatattctctaggtaaatcgagtcagtcgacattgtcattgatcctttcaagcacttgaaacggaccatctcctcgaggtagcaatttggaacgtctttggactgggaatcattctttcttcatgtgtaaccatacccaatcacctggttcaaaaacctgcttgtgacgacccttgttagctttctttatgtattgctcggttcttctttatatgttgagtcgtgccctctcatggatttgcttcacaaattctgctttctttttgccatctaaattcaaatgctcagaaacagaaaggagtcaaaggattacaaccataaaaaatttcaaatggtgaaaatttagtagcagaatccatagaacgattacaaacaaattcaacatgtggtaaacaatcctcccaagtcttaatatttttacttatgatagccctcaataaagtggataaagttctattaactacttttgtttgaccattggtttgagaatgacaagtagtagaaaacaaaagttttgtcccaagttttccccacaatgttttccaaaagtaacttaagaacttagcatccctatcggatacaatggttataggcataccatgtaatctcacaatctccctaaaaacaaatctgcaacattagaagcatcat

SEQ ID NO: 362678 - DNA, 687 bp, Cannabis indica
agcttaaaatttaatcatacccaacttagaagtacatagcaattcaagccttaaaagtttagctcatattcaagtaagaagataaaatccaaactaaaaacaattcatccatggctgctgcccaagtttacaatctcacaaagtttttgatactaagtacaaacaacaataaaagagagcaaagaaagaaaaccaatgagaaagggtaaaagaaaagtcaaacactaagacttggtcccctcttctttcttctttgttgtacttcctgctgtaaattaaagctcctcaccagaaaaatagcagctgctcaagtatgtgatgatgaagatgatatcgtgtacttggtttttctcctcttttagatgttgggtctttagggtacaaaattcataccccaaagtagaagcccaaacttttccacttttgcccactagggttagtcccctttcttccacgtcagttggctggtgtaatttgagtgtctggatcgaagttgctgaggtggataagtgaaactcgtgtttccacgtcactgccaggatgctaaattcgcttcagcattgcttcagcaatctgcccaatttcagcttgtgttcctttctttccttgcttccttttctttttcctatcaatttaattcttcctttttcaacaaaataaacacagttaattggaaaaacacaccca

SEQ ID NO: 362679 - DNA, 547 bp, Cannabis indica
tgagtgggttgcagcctcctgatctgaataggcagcaactaaaaaaattctttcatgatgtgagattctactattgggatgatccttacttgtataggcagtgtgtggatcgaataatgtggcgttgtgtacctgaagaggaagttgcaagcatcctagagcattgtcattcatctccctatggtggacactttggtggacaaagaacaacagcaaaagtcttccaatcggggtactattggccttccattttcaaagatgcccatgattttgcaagaagttgtgatcgttgccaaagagttggtaatatttcagcaaggaatgaaaggccattgaatttcatttttgaagtggaactttttgatgtttggggaatcgacttcatggggccatttccaccaaccatcttatggcaatctatacttcttgttggcggtggattatgtctctaaatgggttgaagcagtagcaagtcccactaatgattcaaaagtggtgatgaaattcctcaaaagcaagttttcactcgctttggaacaccacgggc

SEQ ID NO: 362680 - DNA, 862 bp, Cannabis indica
atatatatatatagactatagtgatgagttagtccagtaatctctgtttctgctggggtacagggcttgtggattggtatgatatgtggtctgtcgtgccaagcaataacactcatggtgataacgatgcgtacacaatggaccaaattggagctgtctgaagagaattccgagatggaagagtcgtcaattttagcttgaatattgattgtcatgaattaagcatgcaatgaaatcatatattatatattcatgtaaatgaaatgcatgcatttgtggcaatcaaggatgcttggcttgtttttagagacgttatagaaatgatggagtaggttttgtagtttcaaccatgagcttaattcactgtttataaaccctacttaaaaaagaaaagaaaaactaaatcagtaaacaaacatatatacctattttatcaaaacgtttagaaatacatcaagacaactttataatacatatttgtaatctattttccatacagttacgtatatatagtataattaaaatttggagcagcattgaaaacttggagtactacttagtacctaccttaattgattctatcagtatttacatagttaccttagtcttaattggctctattagtacagaaattttatcttaaaattaattaatttaaaataatattgtttgatattcacttttaaaatagtgatttttttttccttttcaattttgaattactttatcacaagtgtcatttgcttgcttgcttgcttattgttttattcggattttaagtttctttgcacgattttgtgtagataattttactatttggatagatatagatggaaatctatagttttgatatcatgtcaag

SEQ ID NO: 362681 - DNA, 801 bp, Cannabis indica
taaataaaaacaaaaataattgaggataatatcaaaaacaagaaaatcatctctctctcctttcctctctcttgttcagccccaaagaacccaaagggaaactaaagaaaaacttatagcttacagaccaattcaagcttaattcaactagaaaattcaattgttaattgaagagaaaatcccaaggacctcaaaatcgttgaacagtactttcactcaggtttgttagcacaactgattacggagaggtaagattagtataaatgatgcacatatatatacatgttgtatacttgtgttaataaaagttaaagtagttctaccaacactagtacaattaaaggtactgagtgcatgtggtatagtgactcaagctagtcctattaatattagtatagttaaaggtactgagtgcatgtggtatagtgacacaaactaaccttacatacactagtacgttagaggtactgagtaaccatggcatagagattaggaggttcgaactaccttaccgacactagtacattataagtactgagtgcatatggtacagaggttagtggagcttcgaaaggggtatgaacttatttttactcttgtcaagagcgcttgtacgcgttgggcgcatgattattctttgtaattgggtgtatggacgcctaagctacgaatgcaggttatatgttattgtttttatgtttttcttactgagtatgccgactcacatatatgtacttcatgtgtaggtaaaggcatgacaaaaactgattaaggtgtgtgtaacgctctaacccgtaggga

SEQ ID NO: 362682 - DNA, 688 bp, Cannabis indica
ctcttgttggggtccctctgggaactatccttgtacagaggaggtggtctccggtagtgtgtattttgcctatagcaaagtacacacgttcttaggagtccgtcaactccgtgtactgggtatattggggagtgtaccccttttttgtcgcttttcctccgtccgggtgctgcctttggaggaccttttactcctcgagccctgggaaggaccggccaggctggcagttggagcggagtgcgagggggcttgtccatttatccccgagggatttccaaaatgggacgatacgggggccaaggcctggccttggctatatccgggagtagcagagaattgtatgtcgctcatcggtggagctgctgtcggcatagtgcccaacggctgggctccgggcacaactaggggtggactattttatagtcgcaaggatgataaagtgtttgtttctacaaagccactttccttgaagatgactatattaagaatttcaaatcacaaagtaaagtagtgttggaggaaatgctttcagatataagtccttccaatgttccgtcctcttccacacgtgaagaggacaatcccactccctcagttgaacaaactgagaaatctactactaaagtttctgttcagaagatcaccgcacctcgtcgtaatgggagggtttcaacaaaaccagctcgtt

SEQ ID NO: 362683 - DNA, 1011 bp, Cannabis indica
tgatgatgctaccactcttgctgatttatctttggaacaggcgggtgttgctgggcacaaccgcccaggaaaatgactattatcagttggaatgcacgaggattggggagtactcatgcgttccgaagactctccctgttggtgaaggagcataggccttctgttctttttttgatggaaaccaagcttacttctggagctgtggatagagttaagctttctttggggtttaattcgggttttgaagtccctaagaaacagttttggggggggggggggggggaggacttatgcttttatggaaagctgatgtttttgtaaatattttaacttattcttgtaatcatattgactatcatctctattttaatgataatataatgtttcactttactgatttttatggttcacctgtttctagccaacgttcttttacttggaaccttttgcataaagtgttttataatgcccctaatcttccttggtttgtaattggggactttaattcttattttctatatagtgataaaattggtagtaattatcataatgttgctgatatggaagagttttctcttttttttttggataaatttaaactttctcctatgtctttttttggcaataaatatacttggaaacatggatccacttatgagcgattagattggactgtttgttctgattcttgggttgatctgtttcctaatgctactctgaatcatttagcttttttttggatccgatcatagagtcttaaaagttgatattaggctggataatgtttctgttcctgttctttctaggaagaggtttcaatttcagaatatttggttagaaaatgaggagttttttcaaattgttcagctttcttggatgagtccttcaactcttacttattctgatttttctaattttatggccaaacaggagtcttgtatatcttctcttaagtcttggaatgtctctgctcgtagtttgtttaagaataaaattgttgctcttaataaa

SEQ ID NO: 362684 - DNA, 789 bp, Cannabis indica
aaaaaaatacttactaatttatttttataataatttaaattgtacacgctgtaaaattaatcatgaatttcaatcataaaatatataaacttcactataaaatataaaattattttaatatatataattttcaattattattaaaaccgcccgaagcgcggtaccattccctagttgaaatataattgaaagcctctttaatttgtaaaaattctcgctttctaaattgccctgtcaatacctccaaatctttgtaacaaacttatattccagtgctgattatctacttaagactataccatatatgtattaaaacatagaaagtgcactaatgttccctttaaaataagttcaaccttaccatgggttatcgtagctcaatttctgttgacttttgacaataggtcaactataccaatcttaaaacgtactaatcaaccaagttattggaataaagatactatatataattggcaaaccatgccgaacagaccttactctatccatcactattatttctcctatacccctacttgtatttgatttactactaaagactcactatttataattccttagtcaggggtatttgactcttacttcccacactacctttaagcacaagtcaatacttcctttaagcattttattttatatccaagcgcaatcaaattatcaatacctatcttgttcttttcttctaatttctccactttcaattggacgaaacttacttgtgtctaataagttggttactgtcggcttgagagagtccttccaaaaatttct

SEQ ID NO: 362685 - DNA, 713 bp, Cannabis indica
tgctctcaggcttatttattttttactccgcccggggatggggctctcccagcccggcggagatattgtatttttatgaacttgtttccgtccccaagaagggggacaaacttaaagacggtttttatggattccgggcccaccctgccaatgatggggtggtcccttataataggcaaactcatgttaaggagtatcgccatcgttttttcttctcttccgggttccgagcggtggaacatccggagctcctcacggagtgggttaggattcccccttatgagcggacgcgcctactcaggtctttcttcggagagcccaggccttcgccacttatgaccgggcggacctcgacgtcgggggcctggttacgacggagaattgccggaaggccaagctcatcctgccgcaccaatctgtggaggactctaacctttccagggttatctgtcccaatgtgagggcgcctgccgcggagaagatcttccgggacgagatcatcgccactgccgagaagaagtaccaggactatctctaccggaaggctcaggagaaagcttactccaaggctcaagcagcttccgggaggccacttcgtgtggggagcccggtcgagaggagaagccaggcgatcgctgggaagccccttcatattggggactcggcggagagaagggctcccaggccaaagccttcggctcaggagccgaaca

SEQ ID NO: 362686 - DNA, 742 bp, Cannabis indica
gtgtgtgtaagaataggggcgaaataaggtttgtgttgtaacttgtatttaaaaattaagagggagctttattaatattaatggggtacttatgctttgttttgctttttatttatatctagcttttcgtttcacatactttatatgcttttgctaaaagaaaaaccaaatatataaggttgtaatatgttttgtagttgattgtaggacctaaagatctttaattttctctccctccgatgtgtaaagtaaatttttgtttatgaggtgatagcatatctctatccttttctttaacatgatatacaatttcttgaataagaaatatcattaataacatatatacatatatatgtgcaacttgtacagttgtactcgaaattcgaaatgatttctccaataaatcactttagcttcacagcaaaaaaataaatcactttagctagccacttaatttctatagtacaacttggcatatattcttttaaaattttaataataataattaaaagcatatatggtacatacaaattaatgtagtttagttgtccgtacaaataacacgcaacgcgaacgatgcccaataactataagaaattaatcttttgataatatgaagactttcaagtggttaattatatataataatataaatatcaatgcaacaccactaaaggtaaaattttgctattgattggttagtaatattaaaaaaaagttattatattaaatttgatattta

SEQ ID NO: 362687 - DNA, 582 bp, Cannabis indica
acaacccttaaaacccaaaatcataatttcgactcaacaccaaagcttggaaaactaagaacaataggtgtaggaattacctcaacttgatttccccttgaattccctgctgaaaacaccagaaatcagcaaccaattcccttggtcttggctggttcaaagagagaaagagaagggaaggagggtttcttcaattttggtcttttctttttttttctcctctaaaatgaataaaggatttttccaactaatcctttgctcaaaaaggaaagggcaagtatcatcaacctaggcagccaccaaatcaaacatttggttaattactaaaatgccctttaacttaaaacttaggcattttcaaaactgggggtaaaatggtcaatttccataatcccgctcaacctcggtatttaattttctccaaaatatatcccactaagaaataaggttctaaacttactcatgtgatcaaactagccatccatagcattttccgttgtcgccgagcaaaattataaaaataacatatttcacatataattcaaataatacatttagagtttaataaaatctccgaaattg

SEQ ID NO: 362688 - DNA, 1267 bp, Cannabis indica
cagctccagctttaggcctcttttgaaacacaccatcaaaatactccgagggttggaatgttggtccagtgattgaaggctcaagtgtttcatgagattgggccacatttttctgagaggataaaaccttaaagattagatttggaaatacaagcttaaaggttggccttttacctcttcaaaatgaaacaatttggttcaaaatgtgggaggccaagtcaatagatgctccagaggtgatgcggtagaggaatgaggccacatcttgagacaccacggtcttgttggagtttggaacccaattgctaagagcaaaccgcatgagtgatgcatgagcaaaggtaagatgggtgattcaaagactctcccctgatttcaattcagaccgtgcaccagtgagttcagagagcatcaattaacgatccatagacataatggcatttgagacattctcaggagaggattccttcattagctacttgcctttggtagcagtagaagcctttgttgctgaagaagatcgagcaggagttggagcagattttgtcaattgaggctctggctcgagttcagtgtcctcactgtctgaggaaactcccatgtcctctggaatctccttctcggaatggagagaaacggatttgtcagagacttccattggttcttcttcttctgaactcgaagaaaccgaaggaggattggtcttaagcttcttcttggctggaggcactggcttatcatgacttcgagatgatcgaagttccttctcgacagaggcttgctgggcacgagttcgagtagaaggaccggttggagtgggggcaggaactgatgcagcaggaggagggactgcagcaggtggaggagattccttagaagatgaagacgatgaagaccagattctgtaaggacgcacagattttcgagccactttcttaggaatgcgatttggcttcttgggctgagattcatgctggggaagcgatgaatctcctgtttttgcagcagtaggatgcacggatgaagcagcaggatttggattcgagggggttgcatcgattttcaccatctttttaagatgccctaggttctttgttctcaccattttaaactgaaagagaaaatgaacagtagcaacaagagagacaaggaatagatttgggtaggtggtgagtttaaatgacaaaaaatggtttaaataaacatggaagcaagaagagaaaaggaaaccaattttgaaattttgaaaaataaccgccagcccatg

SEQ ID NO: 362689 - DNA, 860 bp, Cannabis indica
tttcatttagggcacaaaacccaacagctgttctcaggacgcaggggtcattctccattgttcccggcgagattcttgctgatggaacttggtgggcactttccatctcttcatcaggttgctcttgagatctttgggttaacacgattttttccagtgaaattgcttcaagactttggctaaagctctcaatgaatgcaccaaaacgttgactggatttttagcaaaccgaagcggagtcgtaataagtgagatttaaacaaaaataaaagtcataaatgcagttaataacaccaaaatttgcaataaatgtaaataaaagacactggaattttaagaggtttggctccagatgtcggcaatagcctactccccttaagttttattgatctgagttagaaaagtcaagaacaaactcttgattgcaatgaatgagaagtatttattttactaagtgtttcagattgtggatccaactcccaggtcatgggtgagcccttatataggggaggggggtcgatgcttctcgctttaggagacgcgaccaacgcggaactatctataccgtctccttgatttttggaggtagttgaactttgatttttatgataatatcccaatattttcatgggttgacaagtgtctttgagccttttgtgggatttgaacatttgaaggagctactgatgatgagggtcccttatgagtgtgacatggtcgtcaaccacctttggggatgaagtccatacttagggacaacacccccgggaccctcgttgaggtgggtgacaaccatcctttttggctgaccccccccaagacccaacttgaggggggagtgacaaccaccatcgttgggt

SEQ ID NO: 362690 - DNA, 782 bp, Cannabis indica
tctttatgttcattggtatatcatgaaggaaagaaaaagaaaaataaaacatgtggaatattaaattaagtttttggtatatataattttttaaaatttattatattaatttttcattatagtatttactgcttatggttgtagtatatagtttttgtatgctattatatatcttctgaaaaaataaaattcatttaatagtatattagtttaagtttgtggtatattcatattcactacaagaattttcatagtaccagcggagacatccgtcggtattaattattcaaactgccggtaataagtaataccgatagaatctgccggtattaataggtcgctattaatgactattagcggtcaaaatggacttctgccggtaataatattaatactggcagattaatagcggtggggtccgccggtattaatgtttgcacttttacgcgcagacacattaataccggtggaccacaattagtgtttcgccagtattaatattttttatataaaaaaattactatttttattatttatataataaaattaattataattattatctattataattattatataaatatattattaattagaaatctaacattaatattaatttgtccattacaatataaactactatcttaaataaaattagaaaattgtcttcaaataaactttaaaacataaaaattgacataattaaaaacctaattatcattgttcaaatcagtaaatttaagaaatttatctgcattcgagctaagtcttgaactgtc

SEQ ID NO: 362691 - DNA, 726 bp, Cannabis indica
aaagcttaaggtaaggattggttttgttttaagttgaaaacaattggttttatagagtgactttgtgatttagagtagttatggagattctcactttatggaattattctttggtagctatgggactagtttctatgtttacttgttgaatttgaggtgattttgagttagaaattgagtttggaactttttgaaacttaagttcgagctttaatggcgttttctaattaagggctcactactacaaggaaaggccttttatcccggtttttaaggctttttatcccggttttcgctaatatgaaaatcaggatgtatgccagtgggataaaaggtatttaaaaaaccgggataaaaggggtactttttatcctagttttttagaaaaaaccgtgataaaatgtaccccttttatcccgatttttagagaaaagtgggataaaagggtacttttgatctcacttttgacgaaaaaagtgggataaaatgtaccgttttatcccactttttatgaaaaaactgggataaaaaggtgcattttatcccacttttttttttatataaaatttaaaagtgacctttaatttgaaaatgtataggttttttattttttttcttttaattttattacatttcatttcatttatttttttccaataataataaatataatttttatttttataattatatagagtatgtataaaaaaacttaaattaaaataa

SEQ ID NO: 362692 - DNA, 760 bp, Cannabis indica
gcgactacaacgtacttgactccgccttttccttttggtagttcacctatcaagtcgatgccccacactgcaaagggccaagtgcttgtgatggaatgcaagtggctcggaggttgatgggcatacgtggctattcgctgacatttgtcgcatttctttgcgaagcgtcttgttgcagggtaggccagtactacccccgtcacatgatttttagggcaatggaattaccaccagtataattcccacaaatacccccgtgcacctcgcggagtatgtagtcgcaatcttccccgtcaatacatttgagtatcggctggctgaagcttctgcgatataatcttccatcatagatgacatatcgggcagcccgctgccgtagttttctcgcttccattttgtcatcgggcaagatacccttctccagatatgcaattattggagtcatccaggtgacttcttgggcaatatctatttccattatttcttctcgatttattgtggggtaagccaatacgtcaataggaattacatcgagtaattcagcttctctagttgaggccaaacaggccaatgtgtctgcgtgtgagttatgagcacgtcgtactcgggacacgactaatttcttgaatttctgcaacagctcgcatactatggcgagatacttaaccaagcgcccgcctctggctagatattctccagtcacttggcatacgaagatttgggaatcgctgaaagcctgtaagtattcgattctcatctc

SEQ ID NO: 362693 - DNA, 556 bp, Cannabis indica
tttcgcctatctatcaaaatttttgtgcatactcagtcacagtaagggtcccctggaccaatccagtaaattcatcgaccttcgctgctagaactgctgagttataatgtttctcattaaagacccttttgaaatcatcccatttcatggtatctacatcctttgtttgttccaccacctcccaccagatacgagcatctttcctcagcatgtatgatgcacacttcactcggtcattcccatcgacccttagcaactgtaaaatgctttctgtgcgattcatccactattcagccactaccgggtctatgcctccatcaaactcaggtgggtgttgtttttgaaatctctctgctaacatctcatgtctagcctctgtagcaggatataccactgcagctggtgggtctctattttctgcatcctgccttatttggactggcggctccggttgacgtctcagctgacgaagttcttcatcctgcctatgaatgattccttccagtgcggcaaggcgctcttcccatccctgtggtgcttgaggtggttcattgat

SEQ ID NO: 362694 - DNA, 990 bp, Cannabis indica
aaacatttctcgtaatacattatatatattatatgcaagctgttttattaataattaataatatatattatatatagacatactataatttatataatcttgatcattaattataagactttgcaatacatcaattcatattattttgtatctttctaaaattcgtataaaatatgtattttaaataattttatataaggagtgtattataagtttaccataaaatttattcacatgtgtttttttttataacattgtgtgttttgtttggtgccttagggtttgtgaatattgaaaaaaaaaaaaaaaataacttacaattaaaaaaaatacaaaaataatttttccgtaaaaacataataaaataaaataaaaaatttaaaaagaattatattattatgatcatataataattaatatctagatctaataaaaaatacaaataatttctaataaataattaaatgcagataatatagacctaatatattattttatataagacaaaacatgataattaatttcacatctccattaattatacaatatgcatgtgtttatatatcattatatatatatatatatacacattatacataatcagatccacaccaaacactggaaaatccatcactctctcactaattacacaaatatatatatagttatatatatagtacttgcactaatatatatatatatatataattattataagttcataataatatgtatatatttgatcagtagtactgctacatcaaaaggagcatattaattttccctgatcatgattattaattaagttgataataattataaacgtacttaataataattaatcaccactaattaataataataatgatgattaattagtggcctttacgtggatcatgaatagggtttgctcctgggtcttgataatctaacattgcatcaactttcatcagtagtttcctattaattcccttcatcatcatcacctat

SEQ ID NO: 362695 - DNA, 630 bp, Cannabis indica
aatattataaattttgaaatattcttttataacttataaataataatattaggtgtaccaatatacacgtaccacgtgtacaaatacaaaagtgtacacataatcagttcatgttagctattaactgtgaaaaatagatgacaccttaaatttgctaacggttcaatagtttgaagggttttactacaaaatttaaatttggaaggttaagtgcaagttgaatgaaagttgaaagggtttagccgcaaaagactatatttatatacaaagcgaggagactaaatgaaaaactactaaatacaatttactttattttttacaactaatacaattaatattctaacactctccctcaagctagaccatagatgttaatcttgctcagcttgttacaaagataatcaacccgcacctcatcaaaagattttgtaaaaatatctcctaattgttctccggtcttcacaaatcttgtagagatcaagccttcttaaattttctcacgaacacaatgacaatcaatcttaatgtgcttagttcgctcgtggaactcgaaatttaaggcaatatgaattgtaacttgattatcacaccacaattttgttggagcagaagtcttaaacccgaattcag

SEQ ID NO: 362696 - DNA, 684 bp, Cannabis indica
ttatctctatcattaaaagattgttcaccacttcagcatcccactgttttgaccctaccgatagaagatttggagtgtcatataacttaagaaaataagttttagaaaatatcgctaaccaatcgttaagtaatagctatagaaagtgtcagacaccactgatacctaatagcaatgcttaagtgaaaaactaaaaacaaaagctggtggataaaaatgactcatctcccttgggatttattaatgagctctatttattaatagttcaacttcgaactgtgtgtacagattgttgtctcacaattaaattaagacgtataataatgattttaatgagtgtattaatagtaattagtaaatgtacatattttttagacacgtacgaaatgtgtacccctgacttggctcccgactcctagctctcgattcgtactctgctccttagctgagcttaaactttgaaccctaaaactcaaactcatcaaacttagacctcgaacccctcacctttgtcccaaacccaatcccaaacctcgagccaactaggacttcaaaccactggcttgtaaagtctcgatattctcaataatttcaaagggatcgaaattttgactttctatgaatttattggattaaaattatttcactaaacctaagttaacccatattggtagaataggctaa

SEQ ID NO: 362697 - DNA, 703 bp, Cannabis indica
atatataaattatcttttcttatataagaaaaattaaagtgtacttttactcatctttcatctttttttttttctccgataaaaaaaattaaaattataataatctctctaattcaaacaagaaataaagaacataaaataaggatcaaccattcttaggagttcaaacacaaaggattgaaacatctcttaattaacatgcatatcattaagcatgctcaattagtctaatggtttacgcaaaggattaataaatattagatttactaagtgatatatttcgatttggaatatatattaagactatttttcgcctaatttttattttttttttttaattttggatgataaattatgtatcatggctagtgttttgaatacagaacagacttgttaacaaggtaatataaaataggcacaagcctaagaggcaatgacactaaaaaaatatgagattagacactctaacgctcatgcttcaagcctccattgggtccttacacccacgaaatgaatgactcttattcacgagtacgtcactctggttgcttcatggactgacgactgaccctacagaccaacacgagtgtttctaacgtgctttgtcctcactcgcacgcttcctgggaagttcccaggaggtcacccatcctgaaattgctccaagccaagtacgcttaactgtggagttctttcgtgatgg

SEQ ID NO: 362698 - DNA, 661 bp, Cannabis indica
aatcattagtaacaaataataaacaaatatttgttaatcatcaaaacaaggagatctaaaagtttgagttaacaccttccactcagatctctaacccttgtatcctgtctgtagcagcgtatcaccaagatctgagcccgaatgtccttatcttgattctggattcttcacaaccttacacactatgattgagttaccacttgatgtgtgtgggtacttgctctatcactcaaggtatgaaaaatatgaagagaggaagagaaggtttggttcgaaaataatagaagagaaggcttagtaaaatttgactgaaggtgaattttcatcatcttttattgtgagccatcaccatctatttataggcaaccacctaggtttaggttataattaattaggcattaaaatattgaagaaattaaatggaaaattcttccctagtggccgggcataggaagtgggcctccactttgtaatttttgctattttacaacaatctttccttattttctgaaaattgccatattaccaattctaaccacttaaattccaaaactatttatttaataattaaaattaattatcatataaaattgccatttaaaatatttattaattagactaattaaagtctcataattaataaataaaccctagaatctct

SEQ ID NO: 362699 - DNA, 484 bp, Cannabis indica
aaaataatttccaacatggaccacgtttcaagaggtagtcgttttccttagataataaagaggcccagactgggactgaggggaggatcgaaggatatcgaatattcactctctttctataattttacgacaaaacttatcacttctcgacgatctgacgtactctttctcgttctggtgagcaaggtgaccgtcgatcatcgcataaccatagacacaggaagtatttatttatatttcttattttcttttctacttcgcactataaatttactgacttgaccgtcggagtgccttcggccggcaccaccccagtgtcccaaggattatctggataggttcgtgattgtgtttatcgatgacattttagtgtactttgagacggaagaagagcatgaattgcatctcagagcggttttacaaaggttacgggatcacaagctttatgctaaatttaaaaagtgtgagttctggttatctcgtg

SEQ ID NO: 362700 - DNA, 788 bp, Cannabis indica
ggaaccgcagcaggcggttgcagaggaagctcaacaggagcatcccgctgcctaagtcttcgaatctcatcctctttcttgctgattctggcttgcatttcagcaaacctttgctcccaatcaaccggagcctgaggtggattctcctgaacacctctcggggcacgaccgcggcctctaccgcgtccacgggggttttggggatttctatcaccctgagcaccttcggtctcaaccaattcaccttgccttctaacatttcgctgggcgtccattagttaggactcagcatgcgaacccacaaggcacgtaggtcagacagtggtcaaaatattttcaagaccgcaattaggattttataacatccatttaatcatacatgcaacatatcttaaaacaatttccaaaaagaaataaagcttacggaaccgtgagttgagctcgacactggccttgattgtacatatcttgacggtcttcagtggacaacctggtggctctgatactaaactgtaacgcccgtacttaacatttactaaattgaaaagataattttaatataatataactttattaacatataggtcgggatcccgagtatcaaaatatgatttagaagtattttactaacatatacatataatatttctttttataaacacgcgaacaggcaacttcaaaatacagactcaaaatagtgaaagaccgaaaccctccaggttgcactgccgcgatatgtacaatcactgccgagctccatctcactgttcctccagctttgcttttcc

SEQ ID NO: 362701 - DNA, 569 bp, Cannabis indica
gaaaaagctcagaaaaagcctcctgacataaaagtgatggatgaaaccaaagataataatcctcaagaaggaatcaatcatcgtcccggaaaagaaccattgagtcctcaaagatctattgagtcatcgcatgaacagactgcaagcaccaagaagacccagtactgggctccctggcctgacggaccttggatgagcaacaatcgaccacttcctaatcaagttgatgaggatggcgcctacgacccaatcagatacacacaaatcgtggaattagaaaattgccttcttaggtgtcgattggaggaagtaaaccgacagaatgctgagttagagcgtgaaatagctgcaacaaaggcaacgcaggaagatggtaaccaaaaacaacctgaccttgggagaagaggttcacgaggcaaacctcgcggcttgcaaaccaaagggcttggaaataccaagagatatactcagaactctcaggagatgcaacctgaggaaactaatgagagtctggggatacagccttggatacatggaacatcgtgttggaatttattttaccaggatct

SEQ ID NO: 362702 - DNA, 828 bp, Cannabis indica
tcggttcagtcatagctagatgatttacagcaaaaaaagtaaaaaaaatacctaaaataattgaaaaacaacataaatactttcagcactttgggtatttcaaaatcttcatcttcaagttcaaaataagagtctgaatcttcaatgatcggtttcgaatgttttaattttctcttttctaaagaatgaacaacttattttcttttggaagttatagaagatgtagggctatgggagattttttgaaatttttcttactcattgctgatttactaacaaaaataaacaagtatgaatgaaatataattcatagaaattgagcgaaaataaatcatattaaaattacaaatcaatatcaaataatctccatctataccctaatgaactgtttagctactcatgttcattgtagcaaattcacacatattaatttttgaaaagagaagaaaataatgctaaaaactccgttgaaaaaaccttcgcggtcaattttgctctccaaaattcgtacttcttgattgcttgttaaagactactaaagtccacttcttttataaacaaaaaatgataaaataaaataaaaataaaaaacgctaaaaaaacttattctgcttaggattagaaggggcgggccgcagcatgggatttccatgcctaggcatgaccccttttatttggacagtgagttttctactgcattgactgatagtattttggtcataactctctcgatattgctcagaattggacgattcaagatgttctggaaaaataaaagagatatctaaaacttttatgttttaacttttttcaaaatatgatcagaac

SEQ ID NO: 362703 - DNA, 610 bp, Cannabis indica
aactttatgtggaaacttatatatgcttgatttacatgatgttgttcctattacttctccctcttgttcttcttcttctttctcttaatgctaatgttggttctaaacgtgcaagatcagatttgaaatcttccatgctttggcacaaacatttgggccatatttctagagatagaatggagagattagtgaaagatggtgtgcttcaggatcttgatttttctaattttactgcctgtgttgattgtataaaaggaaagttgactgccaaggttagaaagagtaagtcagacagatgcccagatattagagtttattcatactgatatttgtgggccttttgttccacgtgctatgggtggttataaatactttatcaccttcattgatgaattttctcgatatggccatgttgaactcattcgttaaaaatttgaatctttagatgctttcaagatttttaagacgaatgttgagcttcaaaagggaaagaagattaaagttgtcaattctgatagaggtggagagtattatgggcgttcttatgaaactggaaggaaccctaggccgtttgccaaatacttgcaagaatgtggtattgatgcaagat

SEQ ID NO: 362704 - DNA, 429 bp, Cannabis indica
tgtttaaacaacatacttgtgagtagatctaagatcctggtaaaataaattccaacactaatgatgttccagatgactggggcaacagaaagggaagacaatgaagatcagtaggaactaaagaactatcaattagctagagatggagagagagaagacagagaaaaacccctgatcattttagttatgctgaattcattgcatatgcacttatgattgcagaagaggctgacagttcaaaacccactagctttcaagaagctatgagaagtaaagatgctgcagcatgactgcaggccatccaagaagagatgcagtctcttaggaagaatagaacctagatttttacgaagaaaccagagttatacaagctagtaggatgtaaatggattttcaagcataaagaaggtttagggaatgagcctacca

SEQ ID NO: 362705 - DNA, 620 bp, Cannabis indica
tcactgtaattgtaaatgactatatgttctggacttaacagactttgtatatacattaaaccataaacatgaaaacaacatgtaaacataaatgacttctaatctcttattgataacaaaacagattagattgtaataggttttatttagggcataaaatcccaacaagaatgttgtaccagtactattggccccctaactctcacacaaggcccaaaggagaggaatttaaccattaaataaataattgttattcattgaataagcccaattctaattgggcctaaataaaattacttatgtgaaattttattttagcaacctagtccatttaattacttaaaacttaaatgggcttcaaaaatgcatctaagcccaaaagcaaacatataagctcacacaggtcaaatgatacaagcagtttgtctcaactagtatggggagcattggcctatataaccgagcttccaataagcagacctagaatttacaaagtaaatccactaacttattaattcctcattgcatccaccatagaacttggaatttcactctcagtcatatagaacgctctatatgtttcacgatatagatacgcttttaattatccattgttataa

SEQ ID NO: 362706 - DNA, 902 bp, Cannabis indica
caggcaggtagctagcatggttcgaatttcatctcaattagcaagagatatggtcagatcaagcatcgagtttgttgaaggcaaacttcataacttgacgctgcaatcatatctgttagaacgtgttgaagctactcagttaactgatccagagttagtaaaagtcagagaagaggttttagctagtcaagccaaagactttacagtgtcagatagtggaatgctgttgtttaagaccagagtctgtgttcctaatagtgtggaccttagaaatcaaattcttgaagaggctcatagcacaccatattccctgcatcccagcaccaccaagatgtatcaagatcttaaaccttacatttggtggatcggaatgaagaagaatgtggtagaattcgtatcgagatgcctaacttgttagcaaatcaaagctaaacatcagagaccggcagggttgttgcaacctttaacccaacctgaatggaaatgggaatatatcacaatggactttgtggttgggttacctagaaccatgggtttgtttgattctatttgggttgtggtggatcgattttcaaagtttggtcattttctaccagttaaaacaaccttctcaatggatcagtatgcagatttgtacataaaagagattgtaagattgcatggtgtgccaaaatccatagtttcagattgagatccaaagtttacttcaaaattttggcaaagtttacaacgggctatgggtaccaaaatgaagtttagtacagcttttcatcctcagacagatggacagtccgaaaggacgattcaaatgctagaagatatgctacaagcttgtgttatggatttcgaaggctcctagagtaagtacctaccgttgagagaattttcgtacaataacagtt

SEQ ID NO: 362707 - DNA, 537 bp, Cannabis indica
agcgagaaggcccgtcgatcgcaagtttactttgttcaaaaggaatttgcacgatcgaagaccgtaaggtagagtcattaagcgcctgtgcctactaaacatctcgaaggtaggggtagatctcgttagaagaactgtcaaaacaaacaacacattagtcaagtacttaaaaaaggaaggctgatgtaaataagaaagaagagaacaatcacttatggagtttgcgaaatgtggttgtgccaatgggggagagaccatacgtccaaaagaagtcgtccttgaaggacaccttatttggcaagtctacgataatttttggctcactagcatgagtacggagatagaaaaagccccctgcagcgttcttcctcgatggaacgactttaactgagtaaagataatcaatctctaaaggcatgggacaaccccaattcataattttgtacaagactttcaaactagcaagaatcatataagaaataggattcaactagaatggggcaactgttgggttttatgccctaaataaaactcttt

SEQ ID NO: 362708 - DNA, 559 bp, Cannabis indica
aaaaaattgagctactatttataactgtcaggaaaaataagtattcccgacgattttgaacagtaggtaaaacaataggtgacggttattattaaaacatgaaaaaattaaaaaaaaaatgtatgggtatttaaagtgtcgggtatagtatagccgacggtttagtgaccaaattcatcaaatcaccccaggacctgttgatgtcaccgtttgggacgatatcatatcatctcgtgataatgctgaaggattatggttgaacgaatctatcaacacacgattcatatatcaaacacgtattggtatttagtctttttgatatatttacatttagctattattttgactattcttgtatattctaatgtatgattttaaatttgtgtaggcttttatatcatggaacgaggtggggacgatgagtggagtgcgtggttggattatgatggtgatgatggtctatccttgccagaaggatctagtgttgatcctgaacaaccatccatggaagaaggtagtggtgatcctgaagaagcaacacagaaaaatactcgtggga

SEQ ID NO: 362709 - DNA, 537 bp, Cannabis indica
ttacttgctttctatatttcttccaatgcaaacatagtaaagtaaaagattgagtgaaaaataatatcagtgtaaccatcaacttaacttaaatataataataataatttgaagccaaaagtttttgagagataggctaagatgattatagatagtagttgaatttaatggcttatgattatataaatatatatatggaagagattttaatggttacatttttattgtaaccatcatggttacattttttttaagccattgaattactattaaatggttgtgattaatttggaaataaaataaaaataaataataaataacttgtaacctgaaaataacctaataatttatttccttataaaactttaattaagattaattatattttaaaattaaattaattataattattaattaattttttgtagtttattactatataaggatctttaagcaatttatttttttgtcacttaaattatttaaaattttgtagtaaaactttttataatttcataatttaaattttattatact

SEQ ID NO: 362710 - DNA, 552 bp, Cannabis indica
ataaaaatatatagaaagagcatgactaagtctatatatatatttagtatataatagcatatatagtagtatagatggatgaagaacaagaaaataaaagtgaaataagaacttgcattgctcaaataaatattacaagtgaatcaaagatacaaaataacctcactttgcatatggaatcatccctaaccttccaaggaagattagaccattatgctaatcattctcataaagaaatatgagaagaaaagtgaagagaaaattttctatagtttctttactctaataattacgctaaaagattgctaaagagagatctcccaagttatctcatctcatccttatatatagccaaagtgagtgaattaaagagaattactcctttttcttcaattctttatttcttttcaaaactcccaataatttctacttcctacaaaaaaagataatgaatcaaaactaaatcaaatattttcaacataaaaatatatctcattaatttcatgaaaatattaatttattttttaatttatcttatactttaagcttact

SEQ ID NO: 362711 - DNA, 1181 bp, Cannabis indica
actttaatttcagttatcaagaagcaactagttagcttctaattaataaaacttattgaaaatttcaaataacaataaaagaaaattatctatctattatcggctattaatttaattcttgataagagttcgaacttattcgttgagcctacttttttgttttgttcccattgtctcttccgtttttggtgtaatttataactttgaagaaaaattcgtctagaagcgtagtattttcatcacgtaaactttgaaccattacaattaggtattgtaagagatttattgtcgtgatgatcttcttcaaagttgaatatgatccaatttgtattagatgatgttaaagttagatcctcaatagatttgttggtaactaaactttgatcggccattatgaaagttgatgaattggtctttgtaaatgtatagtttattaagtgtgtgtgtgtttactagtactttagtttaaaccctttcttctaagtgcttttataggccaatatcctttacgtgtttatttaaatttatggtaatcaatcagagtttttttttttataaaaaagataaaatatttgacaatctatttcttgtcctacaaaaaaagctgtttatagaaataatcaagactcctattcctatactttttaggacttaataaatagtaaaatatatattttaaaaaaaaaaatccttgaaatatttgataatatgtggcagtttgatgactttcatatatataatctaaataaaattgaccaagtcaaaggacactgaactatttttcgttcaaatgtaatttccaacaaacagatattataaaactctaaatttattatttttattattattggaagattaaaaaaatatcaaattattcagagattaaacataaatttagtaattaatcctctaaaatattttacaacagcactcaaatttttaaattttttcaaatttaaattatacgtgtatgagaatatataaagttttaggataatattatatggttaaataatattaattataggatttatcaaaataataataataataatcaggttttttttatcataaatatactcttttcatgttttatttacaatttatgacctaaaacttttatttacaattttataaatttatttttaaaaaatacgattttaaagtttgaaaattataaa

SEQ ID NO: 362712 - DNA, 547 bp, Cannabis indica
aatttaagagacaaaattgttaatttacaaagatacattagcatttaaacagaatattgagattgaacctaatataaagattaaatttatgtaaatataaaagttcatgaaatttttttgacaagctgtatatttttgagggcaaaatcagtattgttaaaagttcaggagctgaaattgatatttattgtaaaaaaaattacatatacatagatatatataacttttataatataactctaaatctatcactctataactttaatttcagttatagtaaaacaaatcaaaatgagtcaacacaaatcctacgggttgtattagtattgagaaaattaaatgtaggtcaaaaacaggttgatacatctaacacgtttgatacgaaatatataagtgaatcaaaaaaaagtaatgacatgtatgactagtgtttttgcttcctctaaactttagacttagtaatacatctaattttcattctttctcaagagaacacacaaactgtaactgtgtgtaaaaagagaggttgttgtgatattgagatttg

SEQ ID NO: 362713 - DNA, 693 bp, Cannabis indica
ctttgatttcggaagacgtcatttgatgttccagattttgattgaatatatattatcaatatttgttttatgaattttttgtggtatacggtgcggctggcttttggtatattttgttatttactgttatatatatatcgttttttttatggtatttatgctgcagccatatggtatatgtttggtctgacctgtacttcagtacctaccatcatagtttttatattctcgatgaattcgttgaatatatataacgaattgaattgattcattgtttgttcaagcgtttgaaaagttcaatttttcattctttattgattatatacttgaagttttatttcagtacacagtataatatatatattacagtataatttagtatatatatttttggttcaaacaatttaattcaaattttggtgttggtttatgactaatattttgagtaaattaattgaaacaatatgtcgccaaagtgacctcttttgtgtagattaatttatttaaatattaggatggttgtatgtttgtaattaatgcttatattgactagcccaaaggtaagtgaatattttgctagatttcaaacatacctgtggcgataaatgtgtgacaattataaggtattttgtgtgagcaatacgttagtccaaagattgacctattgtttgacacagttttattgtcaatatt

SEQ ID NO: 362714 - DNA, 727 bp, Cannabis indica
acataaacaaccccaattgtgaaggctcatttacctcatttgaatgactgtactaggttaattaaactagtttaacctagtaaaattgattagcaacataattaatttcgaaatatatgaaattaatttttcatttaataattttgaaattaatttaagaaaaacacacttagtttaatgaaacttattcaagataaaccatatgtatttttcttgtatttaattaaataaagaggttataattaattagattcttctagatacttaattatttaatatttcataaaaatatatttaagttgaaaattggttatttataactaatttttgatcaacttgaatttgaatattttttgaaattaataattaagttgaatttttctaggatattagttattgagatattcttcaaatattgttttaagttgaaaatttgttaattttggatcaacttaaaattgaatatttttcaaattaaggtgattagttcaatatacttaatttgttgtttaattaaatttttgaaaataatttaagttgaaaattttgttactttagaacaacttaaattagatatttttcaaatatttattgtattatattttaattatttttgaaattttatatatttttaaatataatgattttcgaaaaatgcatttgaaaattaattaattttagatcaacttaaattaagtaattttcattattaaaatatatagattaa

SEQ ID NO: 362715 - DNA, 578 bp, Cannabis indica
aaggaccctaacctatgccaagatatccttgcgtcagcctctctccagtgttgagaaatttcctaaggctgggaaagagatctcggcttcaggaaatgggatctgatgatgaggagaatagggttttctgcagagatcagggctctctacgtgtagacgatctttctcgtctatgtgtagcctatctttctccaagctatgtgtagacattctttctctctcatcctctgcttaggagaatgacttaatggtttgctcctagtagcatttttgtaaagacaagtttgtaaccagtcttaggtttttcttatcttaaatgccttgtagtgtattcattcgaacttaatacaattgtattttcttgcatttttatttataaggtaaacaactatattttaatcgaatatacagcacttttgggtttctccattgctcgttatcttcttgtctaagtagttagtaatctaccaaactttatgaatttcgagtggttgtcaattctgccttgcaattgtagttataatctgccttaagcaaacttaaatacactttaaggattttatcacattgtatatttt

SEQ ID NO: 362716 - DNA, 318 bp, Cannabis indica
tttctaattttttctaactttctaatttttataaaatgagagaaattgcatgtaataacatttacttcagccaacaaataacataataaactaattaatttcacaacactaagtccactagaggacaaaacataaatggggcaaaatgaaaacataaatggggcaaaatgactattttgccccttcacactaaaatagcataaagagcactaaaggggtattttgggaaattctaaattccctgccaatctcgacattcccaatgtctaataaaccgccccaaaatactaacatactacgttgtgattttactgagcc

SEQ ID NO: 362717 - DNA, 590 bp, Cannabis indica
agtggaaatgggaagacattgctatggattttgtgacagggttaccgaagaatagcaaacaacaggattctatctgggtgattattgacagactcactaaatcagcacattttctgcctgtgcgcactaattacaatgcagagcaatatgctgaactgtatgtaaaagaaattgtaaggctacacggagtcccaaagaccattgtatctgatagaggttcagtttttacctctaagttttgggaaagtgtgcaaagcgctttgggcacaaaactgaggttgagtacagcattccatcctcaaactgatggacaatcggaacgaactattcaaatactagaagacatgctacgagcttgtgcgttggatttcccaggtaactggagtaactatttgccactaatggagttctcgtacaacaatagctatcaatctacaatagggatggcaccctatgaaatgttgtatgggaggaagtgtcgatcaccactacactgggatgaggttggcgaaaagcgatacttaggcccagacctagtaagagaggccactgaagcggtagaaaagattcgaaatagaattgtaactgca

SEQ ID NO: 362718 - DNA, 1125 bp, Cannabis indica
tctccttttataggtgaatgaggcccacaaaaataagaaaaatacaaataagatattttttatcgttgatgatgaactaacggtgaaatgagctcttggtggtgatggccattttttggagcctggagggtcccgctgtagtaacctaagcttatttttgtaactcccttgggaatgaattttgatgatgataaattcaaaattacaattgaagtgggaaacatgacctgataaaaaattgaattagctttaaaatgcaagttgaatcacatcaatcaaatcaaaattgagtgagttatggctatttttactgaaggcagttcatgacctaacgccgaggttgacatcgagtgcccaagttgacatatgacatcaacttggacgttgggtaagtgtagaaacatccaagggatgcactttaatatgcctaagtgatattttgatatcacttagttagtttttatgttctggcaaagctggtcaccagttctcgaaaatattgttgttctacggaatgagagactcgaaactcttcatttccgagtgagttggaaatgagaaatgcaaagttgtgaattgacttctctgacttcatgaatatttatattgtgaaaaactagatggacgatcgaaacgacatcagaatcgaataagcagaacccaacccactaagccatttgtcaacctgggtgcttgatacttactcctgagctctcaggatctcgtttttgatacttctaaggcttctgaagttgaggacgaggtctcttcccctatttttgaccattctagattcgatggtcgcattagttttggcatttgagaaattgaaggcatcgtcctaggttgattgtcaacctgggtgatgggcccagcacaaggtcaacttgggcactgggctccgttctaggggctcgagtttgttgttttctccccaagtttgtttggatcttattacttctgatgatggaaaaatgctcggaacactttttggtaaacttgatcagaaacagtccaggttgacaatatgtcaacgtgggcgttgggcccaaccctaggtgtcaacttggacgttgggtcccagttttggccctctggaaattctatttggtccatggaaatagt

SEQ ID NO: 362719 - DNA, 509 bp, Cannabis indica
actttgaaaatgcatatctttgtaatctgaactccattttgggagttcgagatatcattggaaagctcgttctgagctctacgtgattatctgtattttagatgccatgaatatattttatgaatgtggaattatgggttaaccttatttgtgtaaatgctggttatgactaggattatcggcacctggtcagagcacccggggatttgggatctcttttattggggacatcatgtaagacactagttagcacgtagagttatgcgcggtggtgcttatattggaaatgatatatgcgagtaattagtaatcgggattagggttattaccctaacatgagcggttgaatagcctagggttattaccctagcgatatatgttatatgaatgccatgccatgatatatatatatatgagtatatgagcatgttaagatttagggttatgtgttcaaggcataaccaggttggactcggtaacagaactgagatgaaccattctatggcctt

SEQ ID NO: 362720 - DNA, 1154 bp, Cannabis indica
ccatccctattgtactttgataactgttatgtacgagaattctatcaatggaagatacttactccaggagctttcaaaatccatattacaggctcgtaacatatcttccagtatctgaatcgtcctttcggactgtccattagtctgaggatggaaagttgtattgaactttagtttggtacccatagcgtgttgtaaactctgccaaaatttagaggtaaacttcagatctctaaccgaaactatggattttggcacaccatgcaatcttacaatctctttaacgtacaaatccgcgtactgatccactaaaaaggttgttttaacaagtagaaaaggagcagacttcgtgaatcggtctaccacagcccaaattgaatcaaataaacccgtggttctaggtatcccaaccacgaagtccattgcaatattttcccatttccactcaagtagggttaaaggctataacaagcttgccggtctctgatgttcaaccttgatctgctgacatgttaggcatctcgatacagattctaccatattcttcttcattccgctcaaccagaagtagggtttaagatcttgatacatcttggtggcgccgggatgcagggaatatggagtggtacctcttcgagaatttcatttctagttccacgctatttggaacacaaatcctgttcttgaataacagcatcccactatctgacactataaagtctttggcttgaccagttgaaacctcttctctgatctttactaactctgaatcagttagctgagcaactttaattcgttctaacagatcagattgcagcgttaagttatgaagtttgcctataacaaactcgatgcttgatttgaccatgtcctctgctaattgaggtgaaatctgaactatactagttacctgctcgggacccttcctgctcagggcatcaaccactacattggctttcccaggatggtaaaggatctcacaatcgtaatccttaaccaactctaaccaacgcctctatctcatattcaaatccttcagagtaaagaaatatttgagacttttatggtcagtataaatttcacatctctctccgtagagataatgccgccatatcttcaaagcaaacactactgcggccaattctaaatcatga

SEQ ID NO: 362721 - DNA, 434 bp, Cannabis indica
tctctggcatggccccgtagactagtaaaaatctggaaggattgttgaaaccttgtgtgtttttatttttctgcattgtttgcttctagttttattttgtagttacatagttgtgttctgtagttacacaataactgtttcagtaccatatttattattttatatttaattaattgattaattaaataataaattgataatattaaaattcagaatttcagaatttttattactcatgagaattataaaaaattagctaagtgtggatagtttttatttcttataacaattataaagaccattttgtccattttacttaacacttaagtaatctctaacctatgggtagtttggtcataaccaattatcttgaaataatttgtaaaactcaaaattaagtgaacttctcgaaatcactaataccatatactaat

SEQ ID NO: 362722 - DNA, 853 bp, Cannabis indica
ctgctgatgtagcattcctaaggcaagtccaacagtggtttgctacacgaaatgaaaaagctgacaagtggacgaagaccttagcaccagaaatggaggaggacttggcattgcaatttgaaaaatctcggtatttgaacgttgatacatgtggaccttacacgttgcaggttcaccttggaggaacagttgagaccggtggcgtagtggacttgcaggaacagacttgcacttgcggcttgttccagtgcatgaagtttccttgtcctcatgcatgtgctatagctcaacaacgaagtattagcatgtacgcactatgctcgccatattatataatagaatattaaaggagcacatatgaaggtacaattatgccagttggtgacgaggatgatttggaattccctgatgacataaagaacatgacagttggagtgcctgttgagaagcaaccagtggagcgacccaagaagtaaaaggttggaagaattaagtcaaacgaactgcttgtaatggtgaaaggattatcataccacaaaattgtggcaagtgcggtgccaaggggcacaatagaagcacttgcacctatcgagtttaaaaatcaatttttaatttagtcataatgttatgtgttgtactgttatgtattgttattggattcatgttggaatttttaaaacattagaatttgtgatattttatgtttagatatttattataatttgttgcatgaaaaaaaggcctaaaattgttatgaagtaataaaagaacataaacataccaataaaaaactagttacattgttatcttaataaataccaattaaaaaaacataattgttcatgctaaattc

SEQ ID NO: 362723 - DNA, 672 bp, Cannabis indica
agatcctggtaaaataaattccaacaggtttgtcctcattgtggcttggctgaggtattggtgatggctcagggttgctttctggtatgctttcttttttgcctgtgcattctaccacaaagtccgccaaggcttggcctttgattgctgttcggggttagaaagtgatttcgtactgacccaactctacaccccacttaagtaaccggccagaagcatctggcttttgcagtatttgtcgtagtggctggttagtatatacccgaacaggatgagcttggaaataaggcctcaacttccttgttgcaagaatgaggcagtaggcgagtttttctatcaacggataccggccctcggcctcaatgagtcttttactaatgtaatagactgggtgttgtatgctgttctcttctctgatcagcacgacactcacgacatgttccatgacagctaagtatattcctagctcctcgccatccagaggttttgaaagtacaggaggtttagcaagttgtgcctttaactcttggaaagctttttcacattcttttgttcactcgaactgtttgtttcctcgtagaatgttgaagaatgggacacatttgtccgttgattttgacacgaatctgctgagggcttgaatcttttctggatcagcttcaattcctcggg

SEQ ID NO: 362724 - DNA, 1006 bp, Cannabis indica
tatatatatatatatatatatatatatatatatatatatataatttttggcatgactcaagatgaattacagcttacaacgaaaaattcaagacaacagagaaagttaattcaagtgtaaagtcattttttttttggcaagttagatgcataaatattttttattttatggtgagatttatttacattcataaccgattgtctcacctttaagattcaattttattcctcttttctatgttagaaaatatgtattttcagcaggccttctcttgtatggaaacttcttgtaagagaaacaattttcttatagaaagttagtttttaaaagaaactttgactatttctattttccttattaaattcgattgtgtcttgatacaataagattatacacactgtttatgccaggtatcaagacccaatacaagatcgaactcatttatggcaagtttccttttttggtctgatttgctgcgtcagaatccgattttgatgctacagatcaagtttttcttaggaaagttttgtatagttgtagatttgactttgtggctgtctctagggtttctatgctctataaatagaatctagagaccagccactcgaatttactcttctagttttcattttttgcatttttcttatttgtgagaagagagttctttttgtgagaacctagttgttcatctaggctcttgtgtttttcatatctgttcttactctgtcttagagtttgttagaacgacttgattaaacaagagagtggtcttcgggagaagacttgttcaagccttacttctggaggaagtaagcatgcacacttcaaagatgaagagagttcgctgtttgaaggtatttcagaagtcagattcataaagtgcattacaaagaattgcggcaataatttagagggagtctaaacttgtataagtcaattgtctttgtaattgttgatactttattaattaatttcattctttgggcgtggccccgtggactaggag

SEQ ID NO: 362725 - DNA, 660 bp, Cannabis indica
ggcaatcgagcaagacactcctaccgcatggtaaaatttgatgcgtcctacctggacgaggctcgcaagccaactgcacccaatgcagcaccaagtgcactcttgcacaaaatctcttcgcaaagttctcaatattggccctctggccctaccgcacacccacaacttcatgcaaaaggcccctctgacccactgcatacttgctcctctgagcttctttcacgtggtaaatgatctatcaatcacctgaaaccatgaattttccctttggctcctgctcgtgtcggctctcaaaactatgtcacaagtctatctcccaaaatcaaccctgcatcctctgatgactccctaacttcttgacaaatttgataacacaaagtcttactcttaagacttgaagtcatcccaatctgctatctcccatcggcatatgctctctgaagcattcagcttacattgtcccatacaacaccagtgtccccataaacacaaaatatgcctatacatgtctcaaactagctcagtcttgatcttatcctacacccctgcatattttctatctgcggcttgcagcaatcatgcaagtttttgcactgaacaacccatttgttgtaacaagtaccctatgaaagaacaacttatccaaatttcatgattcaa

SEQ ID NO: 362726 - DNA, 669 bp, Cannabis indica
aactttaaatagtcatattatatgtcgttggacactattttcaatgtagaatgcaatgatgataattatttagccatttgatggtacatgtgagagtaatatctaagattggactaaacaattggagctcgggacttaagagcttaagatcgtcttttggacaaagtttaacaactgaggtagggactcaacttgattattggacttgatttttataagtgttgtataacactaaacataatctaaatttttatgatttgcaaattatttgaaaaattaaaaacttaatctgcatatttttccggactaatctgggggcactgccaaatatatttttgacaaatatttatgcaaattatgatttttgagtttattcaaaatacaaccgttatgctgctgaattttttagaaaataaaatggaatatgttcttttgttattatttgttatttgcttactttggttatacttatgagagtcatgttgatcatgttcggtgcatattgttatttcacgacctagtctctgtgtcatcataggtagatcaggtgtgcactcacctgtaggtgaaagacttagaatttgtacaaggagtaaattgaatctgagccccggtattatggtggttattaggtgcgactacctacttttggatgtcgttttctatgat

SEQ ID NO: 362727 - DNA, 506 bp, Cannabis indica
gccaatagaatcacattttagtagtttagtaatagcggggcaagctagataggcattgggaatgtcgagaatagtcagggtttaagaaatgaccattttacccctagccactttactagttaagctttatgggaagggcatcttttgtcattttgacttgggtttaggtggctggtttttagtgtggcagctggcaactctttgataaaatagtttaattttatctttcatttagtggaatatggaaaatagaaagaaattaagaaaaatcaagaaagtcattttctctccaactctctctttctcaagctccctagaagcagcaaagattagggattttttagcttcatttttgagtaatcaagcaagtatttggtgtttccaattcaaggtataatcccttaggtggcatttggttggaggtaatgaaatggaatagaatggaaaggaaacaatttttattccattcctttgtttggctgcaatttaaagtattggaatatcat

SEQ ID NO: 362728 - DNA, 646 bp, Cannabis indica
acaagaagaagctacaaagatctattacgatagcaaatcagctatagcaatggcacaaaatccagtatttcacagtagaactaagcatgcatattagcatcaagtaccatttcatcagagaagcagaagcaaacaaagaaattgagctcaagcactgcaaggctgaagagcaggtagcagacatattcacaaaggcattaccaagaggcaagtttgagctactgtgagacacaattggagttaccgaaatgtgtaccaaggaggagtgatgataagtgctacacaattctacacttttcttatttagaaaattctaatattaactacacaaagctaaatttttttagagaaaactataattacctagaaactatatttgtaagctaagaaacttaaaaaattctagaatttcttagaaagttaaattgtaattcaaaataagaatctagaaagttgtagtatcaatcttagctccctataaataccaagcttggattgaggagctagtgtaacaaccaacacccaaaggctagccaaaagttccaaactatcaataagagcttactactttacatacaattttctctttcaagccaaactaatttcatatactaaatcaacaactactcattaacatcactacttc

SEQ ID NO: 362729 - DNA, 671 bp, Cannabis indica
aaacaaacataaaacatttaaaaagaaactaacaagtaaactgtattctgaaataatgaacttaaaaataaaaagtaatacatcggtattactttcataatattaaaaacaataaaacagtttctttattttaatataaagctatataaaaaagaatgatgaaattaaaatagaaaaaacaattaattgcaacaaataggaaaccatcattatgttgatgaatattctatgaaaatagaatctcttttatttatttctttattaaattaaatccaacatagtttctatggtggtcaagaaaaggggcattaaggcacaaaactcagaaaataatatatataagtgtttaatcaaatcaaaaacacttaatcatagatatatcctcaagtaaatattcacccataacatcattaaaaagaaactaacaagtaaataacataaaaataaaaagtaatataacaatattacattgatcaagcacaaaaccaaaaaaaaatctacttaatataaaactaatacaacagaaactaattagtataccaaccaaaactatagccaaaaatactaataaatcataaacttttaataacatacaacattaaaaataaaaaacacactagaaaacctaaaataacaaatatatatatatatatatatatacattccattag

SEQ ID NO: 362730 - DNA, 503 bp, Cannabis indica
cagccaccaaattctcaattttcactttgaaaactcaagcttttgcacaagaaaattgacaaattaaagcaagcacaactagcatgcatttcaacctatctaaacatagttaattcaacattttaaacatagaaacaacaacaacaactagcagcagcaacaacatcaaaatcatccatgcatttactcattttttcatcatttttcaagaaaacaaaggaagagaagctagacaagaaatacctctactaggatcactctaaacttgctgaaaatcacttgaatcacaagagaaaaatccccttttcttgctgctcaaagggccgaatagagagaaaaagagagagagcttttcctttaattttctaactttgaaatttttgaaactttgtaaaatgaaagtaaagaattccacttattcatttcagccaacaaatattatcaaataacatttaattaaccaaataaagtccactaaaggacaaactaataatggggcaaaa

SEQ ID NO: 362731 - DNA, 745 bp, Cannabis indica
attaatgagccttttcgtaataataaatatattacagataataagaaattaataacaccagacatttttacgtggttttgcagttaaaatctgcatactccatgagtctttcttattaatggtattttgagtacagaatacaatataaaattaataatattcttctctaaaaaattcttcgtccctttttctgtggaatctgtctctatttataggaatataggttggcaattattttcttgggatcagtttaaaaatgtaattgttcatgaaacaggaacaattcccacgttttgtttaattgcatgtgggataatatttgataactgcactgccttttgttcttatccttttcgatgattaatgctgatttggacgattgtatctcgcttaacatgagttatctcccttgtccatcgtgatgtggaaaaaatgctaagtgtgagcagatagtttgcctcattatgtctctttatttgagttatgatcgtgaagtgtcgtctcgctatatgtaattcgaggttaccatgtatgtttgtatttattctacgaataaataaatatcttctttgactatgtactccaaggcaggcgcgtgtctcgttaatatcagttttaataattttttatccttatctcgcttaatactatatagtcagcgagttgttaatattttctattaaacttttataacgagttattttatttttcttttaatgatataactttattatatcaggtggtt

SEQ ID NO: 362732 - DNA, 619 bp, Cannabis indica
gtcggtagcgaatttcgcgaaaaccgacgctgaaagggcttaaaaaccgcctttaaagggtgtttttgtagtagtgtttaaagaatatttttttacatttttacagtttttcaaaaaataacacgaaaataacataaaatcaacaagaaaattacataaaagtaacatgaaaataacatacagataacaaaaaatcaacaacaaattaataagattacaacaaaaaagaccgtattttctgtaaataaaattaaaaaaatcgtaaaaatgtttaaaattccgtaaaaccgtatttttataatttatttgttgtttttatgtttttgttgtttttatgtttttgtgaaataatccctttttaacattcactttttttatgcaaaatgctttgttaaataccaagtaggacaattgacatgtaaaaaattatacacgcgtgaggtttttattcaatttttccgtgtaaccttaattttccaataaactaaatagggaaatttgattttctatacttaaaaattttcaaaatttcctttttgaaccaatacattttacactatgaaaaatatgactctttttttcaaaaattccaaaaaatacccccctctatctactttgt

SEQ ID NO: 362733 - DNA, 704 bp, Cannabis indica
gggtttggattcaggttttggacaccaatcccagggtgggcctgtgtccgagtctgggtcctggtccggttaaagttttgggtctgggtacaggtcctagttgtggtcctgttcctgggccccaatcagcttctagtttcggttccagtttcatgtcacgacgtacgggttcgagtcgagtttgggtatgagtctgggttcgggtcctgatttgggtataggacgaggttcaggtctggggttcgatctcggttaaggtccaaggcttggtccggttccgggtttgggtctgggtccaggtcccggccccgttcccgttccaggatcctagtccggttctcgttcatgtttcgattttggttcccaagtgtgggtctgggtcttggtatgtgcccgagacctggtttgagatcgagtttcgatttaggttctagtctaagtcctagatcatgacactgactacgagtcaggtctaagcatcgagtcctggatccctggtcccgaggtgggtcctaggtccaagtttgggtttgaggttaggtcccgaatcccgatccaagttctgtggcccaagttctgatcctagttcgggttctcatttcctaagtatgggtccccgtactatgttcgggtcctaggtcccaatttgggcccaagttcgtgttcaggttcgggttctggtccggtccgagtccaggtctcgg

SEQ ID NO: 362734 - DNA, 601 bp, Cannabis indica
ttaaagttgaaaattaattaattttaattaattttggaccaacttaaatcaagtaattttcattaatgatttattaaaataaatagattaaaatatattattttttaattagaaaataagtaattagttagtgaaatatctagatagttattttttgtttacttgaagtatttttctagtgatatttaattaaataaaaatttaatatttaagttaattttattcaagatacttaaatatttgatatttttcttagaaatttatttaaatatgaaaattatatttgtgtggaaaattaatttattaattaattttagacaaacataaattagattattttttcaggatttattttattttattttatgcaattttgaagatgtatttatttttttttcatacattgaattttgaatttggctatatatatttatagaaaactaaatttgagttgaaaattaattttaattaattttggaccaacttgagagtgatttttgaaatatttattgagaattattactatgatagaagatagttttatttattttcagaactatctaagtataattttataaatattaaattaaaatttatattt

SEQ ID NO: 362735 - DNA, 609 bp, Cannabis indica
aggggcatgtgttatagtgagatttttctcacctagaaactcgagaccggactcctgtttaaaggacacgtgtacctaattttcgcaaggaaagctaaggtgtcaatgagagactcctcgagtttaaacctcgtctaagctaaactcagcgagatgatgcgaatatgaccaaagtctaatcgcatttacgaggctcgcattaagtgggatcaaggaacggacttaacttgcatataccatgatatatgcgagtattctcgcaatcctcctgcagaaacatagaggacgattctctataaagcgagctagtccccatgacccaacaacctcgataaaccaatacagactcgcgtgtctaggttttattagctcgttatacgatgtccgtaagtgtgactatacaagaacgcagacatcctagacttaactaaatgttaggtgtatcctaagcccgcgagcttacaccagaatatgaacagccaactcgcacatcaaaagtcgcatatgttgctgtatttagtgaatgaaactgttcttcatttattaatgtttacgttttagcttaattattgtaaatcaatgtatgaacggattggcaatgaatgcaat

SEQ ID NO: 362736 - DNA, 625 bp, Cannabis indica
ggcacaaaacccaacatttacttactttataatatttcaatcgtactgaactacttgtcacttacaaaattagactcactgtcgttggctaaaagcgagatcaacattgtggtgctttcattgagagcaaaatcagggatcgcttttcattataaatttaatcacaagtacgatggtggtacagactcgtagtggcgtggttatccaacaaatccattggcggtggatcctgcactgcagattccaaaaaacacaagggttccgctagccgtaattccaggacagccgtcaacggcgggtcacggtgtgacaactcctgtggatgagattgcgcccggtgtgcaagagattgggaataccagttcagcagctcaccagcgcgttcatagcacagccgttctgcccactaccaatgttcaaacgaccattggatatgacactgagatccagaatctccaagccgctcttggactcatgcagggtcataccaacaccctacatcatgatcaggaggaactatgtgctgccgtaaatctcgcgtttgaagagcagaagcgcatgtttgccgaatggagggacaaagagatggaagcgttaagggctcatctgttggaattattttacc

SEQ ID NO: 362737 - DNA, 702 bp, Cannabis indica
tcttgatagtatcctttagcgttttattaatggcttccacttttccatttgcctgaggcctggatactgacgagaagcttttgataattttattcctctcgcagaattcagtgaacaatttgccatcaaattaggatcaattatcgaatactatctttatgggaattccaaacctatagattatgttcttaacgccgaagtcaaggactttcttgcaggttatggatatgaggggctcggcctccgtcaatttagtgaagaagtcgactgccaccaccgcatacttagctcctcctcgcccagtgggtaatgccccaattaggtcgatcccccatatagcaaatgggtagggcgaggtcatcattctaagttcggttggcggtatgggagctacatgtgaaaatctctgacatttatcacatatcttgacaaactgatgtgtgtccttattgctcgttagccaataatatccttgtctaatgatctttttagacaaactttgccaacctgcatgatccccacagaagccttcatgaatttctctaatgattttgtttgcttctccaagaggaacacaccaaagtaggggcattgaacatcctcttcaatatagtttacctttgatcattgtgtagcgaggcactgtatacaaaagtttttgttcctcgttttgtcatttggaagttttccatcgagtaaata

SEQ ID NO: 362738 - DNA, 485 bp, Cannabis indica
agtcatccaccgattgattctcggctatcagcttggccttccgacagttctccgtcgtcaccaagtccccgacattgagggcctccttgtcatacgtggaaaaagtcttggcctgctgaaggaatagttgagtaggggcggtctgcatgtaaggcgggatcctaacccagtctgtaaggagctccgggcggtctatcacctaaaaatcggaagagaagaagaagcggtggcggtactccttcacgtgcttctgatggttgaaagggactaggccctcgttcaaagggtgggcccggaggccataaaatctgtctttaaatttgtccccgttcttggggaaagatacaagttcgtaaaaatacaaaatctcagccgaactgggcgaaccctagctccgagcggcatacaaaataaataagcctgaaagcaggcagtaagcttgagggattagttagtacggcacaaggccaacaaaaacaagaaaa

SEQ ID NO: 362739 - DNA, 563 bp, Cannabis indica
aagggcaccagtggtgcctagctcctatgtgtcagtatcgctattggtcttactaaatatcgggtcccaaatagtgtaaaataataatttttagggagtatcgctaggcaatcgcaacgtaattgtcgagaaggtgctaagcaccactggtacctaatagcgatactcaaaaattaaatctctaataaagtcaataaaagtaattaacatatttaatataaatttgattaattgatgtgtcaaactttgatagatttaacacaatatgagacaccaatttttaataagagatcttgattccagtcaacccttgacctgtgacctgcaaacccgctcaactggttcatttcacgggcgggtacggtctcatttttaaaccctaaacatgtgaactcgatttttcaatgaagaaacaaaaaatcttcatttgctggggtagtgacacgtcatcaaatgaagaattgcactcctaattacatagaatgttctatataccaaaaatggatgcgctttgaattacatattgtttcaatcaaaatgatcaaagatcctctatagatgat

SEQ ID NO: 362740 - DNA, 661 bp, Cannabis indica
atttttgttttatctaggcaaatggccttaagaccgagacaatggtttgccctttgtggcacttttttaaagacaaatttgcaaggttggatggccaactttgcttttattttatgttttattgaatgcttcgtacttttgaacttaatatatttgtttgtttgtgttttaattcacaacttcaacaattatattttgatcaaatttaaaatactttaagcctttctattgctcgtaatttcctttgatattatttaagtagttagtaatctactatgggcgtgagcagttattatgtgctatgcttttgatttgcgagaaattatcaattatgctttgcataaacagttataatctgctttaagcaaacttgaacatacttttaatgattcatcactttgtatattttttgattgcttatatgaatagttaggccttctactcatacattaggtttaagtattgtttcaagtcatcttggtgtctcgtttaatactttcccacaaaatgtgagccgttagtattcaatttcgcatgtagcttatgagttatatctcatttacaacttttgattttccattctcatggaaaaggttctttactaaaaaacattaaaaaattaaaaaattctaaagtaatgggtttgtaatatatcatgtat

SEQ ID NO: 362741 - DNA, 303 bp, Cannabis indica
ggcctagaccgaaaacagtgacagaaattacaagtttcttgggtctagcaggttattatcgtcggttcgtagaagggttctctaaaatctcaacacccttaactgagctcactaaaaagaatcagcggtttatatggtcagacaaatgtgaggctagctttcaggagctgaaagagaggttgattacagcccaagttctagctttgccttctgacaaagaaaagttcgtggtttattatgatgcatccaaacagggtctggggtgtgtactgatgcaagctgatgttggaaattattttacca

SEQ ID NO: 362742 - DNA, 560 bp, Cannabis indica
gtttggacttaggcctgctttgatttaaggtatagagcccgtttggtgaagaaatgggtcatggatgggctttattagagagagatacaatcaggcttacacacaaaggctcatgatcattccattgtgatgtaatatgagctgctaagttgaccatggacttcttacaaaatactgtgaaatgggaaaaaaatttacaaaatattgtgaaatgggaaaaaaatttacaaaatactgtgaaatgggaaaaaatttacaaaatattgtgatacaaatttttttatatttttactgtactaattttataaaacattgtgtttataatttcaaaattataaaaaactatatttcagtaaaataataataaaaaaaacaactcgaaaacaaccctataacaacctagaaaataacatgaaaattttaaaacaacaaaaatataactacaaagcaacagaaaaataacaaaatattagcctaattgtaataagaaaaataatatcaactccttgatatgtttttgtattacaattttttttttttacttaattttgacaattcaa

SEQ ID NO: 362743 - DNA, 1097 bp, Cannabis indica
atgtttgaaacatcttgatagtggaatcgagctctcaaattcgaggagcagctcaaacggagacgtagccaatttcattggtgaacttcgggaaatttctggtgttttctatccctaaactaatcctatgtgtgtgtgtgtgtgtacagatcagatcattgtagatctgatctgtgtagtgtgtttggggcttgattttctgggtagattgaaacctagcttcgagtttctcagagagaaactctctgctagggtttcgaagagaagacagagaaagagagaaagtggctgagaagattctcgagccttgggttttgttcaaatacaaaacgctgtcgttttgggttctctgactttgaaaagtctttgaacagggaaaggtcgaaattgaccttatatttgattagttttgtttgttggtgtagggggcaagatagtaaaattctatcttaaaattcctacaataacctgtgtaagaatccgatcagatttgattgagtgtaaatcataatagtgtaaggttgagtgagagagtctaaactagagagagaaacttcttctcgtaatctctgagagtttgtgaagattcttgtaattttgtaataacatttatatcaataaagatatggttgctattgttttggctaaaatgtagaatattgtacaagattcgaacttattaaacttagtgttattttttttttttttactacttaattcattacttaaaatttattaagatctcttggtgtgtagtttcttgtttatgtgtgtttgttggctcactaaagtgaatcataaatcattaattatttctgttttgcacaccaaattaaatattgtgcatgtatattgacacacttaaagcttaaaatcatattatatatttaagaatattcttataataggaaacaacaaaaaaaacgtttcttcagaaaaaaaaaaaggttatattttcaatactttaagttagtatcggatcaacttacataacaaaaaaaaaaagttaagtatcggatcagagaaatattaaataaattaatatttgttataaatattattaattatgtggatgtccaaatcttttatttattacc

SEQ ID NO: 362744 - DNA, 539 bp, Cannabis indica
aagccctcttcaactgtgtagtcccatacctacacagtctcagaatcatcccacttgaccttccccaggcgatgtgggattgcacaacttacccagtatttccccttacggatcacaggactactgactgtcacagatgggagtctctatgaccagggggtcatggtgaggaaaacgcaccgtctttgcgtcttcttctgtgaatgtaattggttgatccatgagtcggggcctctgagctgggagttgagtaacttcccaaatctcgctgtgtttaacggccccggcgtagcactttaattcctttcgagtggtccctccgatatggagccctccagagatcatagccactgttccattgggtctcggtggtaggcgaggagttttctgtggttctcccgggtgagcgactggtgctaacgctccgggtgcaccccctggcgttcctttgggcaaaggtcctcctgccggaaccgggttgagatgggacagccggttcttgatccactaatagagatgacccaatcgaatcaagttct

SEQ ID NO: 362745 - DNA, 488 bp, Cannabis indica
ttagtttaaggtagggttctaaaaaaagcccaaccagctgactggttcccaaccggaagaccggttcctggggatcaaccggtcgaccggttgttacaggctcaccagaactagtgcagggaaccccaaaaatgtcctccacaactcaaatcgagcccaaaactctaccatactctctagaacacttgcatatactatactaaatccatttcaagcaacagaacacatcaaatagctcaaaaattaaaaacaccattagagagccaacttaagctctctaacttcaagtttgagtaatctgtagcacaactagctatctcagcacaaaatcaactaaaacaaacctatcttaaccccagaattcaaacccaaactagctgcacactacagaacctcaaatcactaaaatcatgcaattaacctatcttgagctaaagaaaaccataaagaagaaggctaagcattataccttgaattggacctcctat

SEQ ID NO: 362746 - DNA, 2558 bp, Cannabis indica
gcgaggtaccaagcgctaaaagaagaagtcgaccgccttctagcctgcggctttatacgggagcgttctaccccaattggttagcgaatcccgtacttgtgcccaagcctaacagctcatggcgcacatgcgttgactttacagatttaaataaagcctgtcccaaagacagcttcccacttcctagcattgaccaacttgttgatgccacggcaggtcacgagcttcttagctttatggacgcatactcgggatataatcaaatcccgatgtatgaaccagaccaggagcatacctcgttcattactgatcgaggcctatattgttataaagtaatgccttttggtttgataaacgcaggtgcgacatatcaacaacttgtaaatatgatgttcgcagatcttattgggaataccatggaagtatatgttgacaatatgctcataaaatctcaacatgcgaaggatcatgtcacccatttacaggcaatgtttgatatactacgacgatataaaatgtgactaaaccctttaaagtgcgtttttggagttggctccgggaaattcatcagattcatggttaatcaacaaggaatagaggcaaaccccacgaagatcagggcgttggtggagatgccatcgccaactaagccaaaagaagtctaaagcctcacgggtaaagtcgccgctctaaattgctttatatcgcgatcttttgataaatgcaaagatttttttcagatcttaaaaggcaataagaagttccaatggaccaagaaatgcgaggaggcttttcaagccttaaaaacacatttggggcaacccccaatcctatcaaagcccatgaccggcgaagtcctatccatttacttagaagtgtcagaatatgcgattagttcggtactaatacacgaatataaaggaccacaatacccagtgtactatgtcagtaaacgcttactggatgctgagacgcactatcctcaaatggaaaaattggcgttcgccctggtaatatcgtcgagaaaattgcgaccctatttccaggctcacagtattgaagttttaacgaactaccctttgaggcaagtcttagcaaaaccagagacgtcagggaggttgttgaaatgggcagtagagttaagccagttcgacatcaggtataaactgaggactgcgatcaaggggcaagccttggcagattttatcctcgagttcccaagcaccgaagtggcactcatagacgacaaggttgacactactatgcccaatggagaagcatggacgttgtacgttgatggggcttcaaatagcgaaggttctggtggcggaatcctactaatcagtcccaacaattttaaggtacacgctgctttacgttttgaattttctgcatctaacaatgaagccgagtatgaggctttaatcgcagggttgaagcttgctctcgagatgaaaatcgagtatctacaggctttcagcgattcccaaatcgtagtgtgccaggtgaatggagaatatctggccagaggcgggaggttggttaagtatttagccattgtatgcgaactgatgcaaaaattcaagaaagtagtcgtgtctcgagtaccgcgtgctcgtaattcacacgcagacgcattggcctgtttggcctcgactagagaagccgaattgctcgatgtaattccggtggatgtattggctcacccaacgataaatcaagaagcgatcatggaaatagataccgctcaagaagtcacctggatgactccaatagtcgcatatctagaaaagggtatcttacctgatgacaagatggaagcaagaaagctgcgacagcgagctgcccgatatgtcatatatgatggaaggttatatcgcagaagttttagtcagccgttactcaagtgtatcgacggggaagactgcgactatatactacgtgaggtacatgggggtatttgtggcaatcatacaggaggtaattcccttgctctaaaaatcatgcgacaagggtattactggcctaccttgcgacaagatgctttcacttttgcaaagaaatgcgacaaatgtcagcgaatagccacatatgtccatcaacctccgagcaacttgcattccatcacaagtccttggcccttcgcagtgtgggggatcgacttaataggcgaactacctaaaggaaaaggcggagtcaagtatgcagtagtcgcagtagactattttacaaaatgggctgaagccaaggcactcgcaaccattacagcgactaagttgcgcgagtttgtctacaactccataatttgtcgatttggcatcccttacaagctcatctcagataatggaaagcagttcgattgtaaggagatgcgacaattatgcgacgactgggaattaaaaaagcattctctgcagttgcttacccgcaaagcaatggacaaactgaagcagtcaataaaaataataaaagcacaccatcaaaggaaaactcgaagagcgtaagggggtatggccagacgagcttccgcaagttctatggtcatacaacacaactcc

SEQ ID NO: 362747 - DNA, 695 bp, Cannabis indica
cttttaatttgtaattttttattttcaaatagtaaataatgacataatatgtatttatactatacatattggatggggatagtcatttttccatttagcaaggaatgctatttctacgatccagctggtagcgatccaagggaggatgccttgattgtggttagaacgtaagttttacattaactttatctaatatgcaaatcttataatgttaataatcattatattgtctaattgaaaatttatttcattgttaagggcatttggcataaatgatgctttcaatccaagaggaaagagtaagaaaataatttggtttccaatgaaggtatgatgctaaaattgaaaagtattttatttgatcatttattttatgtataaatcaaatattaatacattttatattatatgtagcgccctaagcaacctaatgacactgtgtgcggtttttacgtcatgcgactaatgagagatttaactatagcaaaagatacaaaagaatattttttgaaacacgtaagtaattaacatattcttttaaatttgattaattttaattatcaaaaaactaacatattgatttactcttatattgcagtgtgatggaagaccgagtatacaatagatgatattaacactgtgtgtgaagaatgggtcgactactatacggaatattttccagcatagttttactt

SEQ ID NO: 362748 - DNA, 554 bp, Cannabis indica
ttgaccaagctatggtcttgttctgaaggactttatcttttctgtctaagatctgaactggttgctcttcggatgataagtctggttgcaactcaagattttcataagttagtacatgagcagtatctgaaacataccttcgcaacattgaaacatgaaacacattgtgaactacagatagagctggaggcaaagctaaacgatatgccactagtccaaccttctcgagaatctcgaaaggtcctgtaaatttagggcataacttgcctctttttccaaaacgtttaatccccttcatcagagatacccgtaggaatacatgatctcctacctgacattctacatttctacgcttcgaatctgcattactcttttgcctactctaagaggcaagcattctggccataatcttttctataacttcgttagtctgttgcactaattccagacccagaatttcttctctcccatttaatcccagtgaatgggagatctgttggaaatattttaccaggatgtagatttacgaccttgtatgtttcattaacatccta

SEQ ID NO: 362749 - DNA, 567 bp, Cannabis indica
ttttcctctagctctgtcaaatcatcttcaattaagatcaattctaaagggtcatcgatcaacttcttctcactcacaatcgtatcaatcaaatcaacaaagtaacaattatcacttgccttcgggtaagtcatcgcctttaacacattaaaaaccacttcttctccttggactctcagctttaattcacccttctgaaaatcgatcaaagcttggcgaagaatgggttcccaagtatgattgggacattgctatcttcctccatatccagaacaataaagtcaactggaaagatgaacttgtcaactttgactaacacatcctcaatgactcctctaggatgagctagtgattggttcgccaattgtagagttaccgtggttggctttgcttctctcaactgcaatcttctaaaaacagacagaggcattaaattaattctggctcccaagtcacaaagtgcattaattccttcaattctcccaatggtataaggaatagtgaaactccctggatctctgagtttgggagggagtttcttttgcagaatggcgctgcactcttcag

SEQ ID NO: 362750 - DNA, 527 bp, Cannabis indica
ttcttttctgtcacagagtattatcaagatctgagcctagatctctttttctcctttaggtttggttaccaccgtcttactcactatgattgagtatttgacttgctatgtgtgggatggtactctttcactaaggattcgaatatggtgaagaacaatgaaggagttttgaaatcactattgaaagtgtctcttatctactagttgtctcacatagaaaactagatttgattgggttgaaggcatcaagtggatgagtgagagcatcatgttccttagctcattgttgaatatgagatctcgaccttcgtaacctttctcagtactaggttatactgtacaacatacaatatgcttagattaatgtatggccttgtactttatgttttctaataagattatgctattctttcaaaaaaaaaataataataagactatgctataagtctcaaagttttccaacaactataaaatgaaataaacttctttacagttatgactcgtccaaattttcattatttataatt

SEQ ID NO: 362751 - DNA, 832 bp, Cannabis indica
taagcctgaaagcaggcggaagcttgagggattagtggtacggcacaaggccaacaaaaacagaaaatttacaaagtagcctgaagagggagcatagccccggacatcaagtgggtctggctccaagctgcgaagcccccataattatggttgggtgtctcctcgtcccgaggcagccggtggtaggtcccggagaccgaaggtttgatgcctgccaccaccacaatcttttcaagctggtgagcacaggtcagtgtggagtggagctcgtccgcctcccatccgttagcacgggacttatagttctcctgggccacggggccctgcatgacctcctccagggtggccagttgaacttctcctttcttggaagatttagaaccggatgcggaagcagacatgttggttctgaaaaaatcgagaaaacccagcagttaggccccaaccaaaccctaatgttcgaaaaagggagtgggggtcccctaaccgctggaaagaggccccctccggacacttgccaaataagaaaatcccaagaggctttccttggcaagaatcgggtgcaaaaatcccaaaggcagtgacattgcacagggaaaaagaagagaaaagataaaaagggcaaatctgaaaaagcaagatctactttaagccctaaagacgttattacgtaagatggggaaaattcctcaacaaaaacgtaataacaaggaacaatctaaatgcaaagaagaggaatttaacgcatcatacagtaaactcaggcgaattcattcctaggagttcgacatccaacccagaaatcataaaacatgctatataaacgaacagt

SEQ ID NO: 362752 - DNA, 513 bp, Cannabis indica
gctcctcttctaccatctttcccctgcgcttgtgcacaagagcaagctcttgctcttcttcaccttcttcagcttcctcaagaagtgcctcctcctcgtccactaagacaatagtgcctgaaggggcgttggaggaagctctcccgggagtgaccaactgagaagaagtaggaggacgggaagcagcaggactatgggctccagcaagagtggccaagatttcgtccatgggtacggctgctgcaacaagtgttagaacatctgtgaaagcaacgtatacttaacaaaaagcaatcaagctggtcctaccctaactctctaattcggccctagcgaagtcctgaatcttaacactggctgcgtcatccccgagatagctgtctgagggacggaactagctagaagataaataggctgaagggtccaaaggaatgggcactgaaggtacagaacccatccgggaccgacctaaataatcgcctaagtgggagaaataatactccttggcatgat

SEQ ID NO: 362753 - DNA, 722 bp, Cannabis indica
attaatagaaaataaaataaacacatatataaaatattttatattattagtatgtttattataattgtaaacataaaaataaacatagccaataaacacatatataaaatgttttatattattagtatgtttattataattgtaaacataaaaataaacataaccaatattaccatatatatactaatcaataattattaccatatatatattataataaaaattgaaaaaaagtttttaattatatataaaagtgtatgagaaaatgataataagtttttttgcacatattttgtaattaattaaaataatgtatacaaaattgtaaaatgcccataaataaactaccaaagttagggttcaaccctttgtcgtacaataatagaacaaattgtcaaatgttggtagttttagtatgttctcccaacattgcttatatttattctttgttcagttatttgtgacctaaatattaaaatttattttccagttacagattaatatttaagtaaattttgtaataataaaaatatttttcgtcaatattttattataaatgagatcatggccggccctatgtgcaaaaataaaaattggggagtgagactattggaatttatactctcgagcttttagttattaaactaatcaaattaccactaggttataatacatatttaacattaaaagtattattatttattttattactaattatattt

SEQ ID NO: 362754 - DNA, 529 bp, Cannabis indica
gaaaattatccatttagaccctacacgtccccacaaagttcccttaaaaatttctccaattctgaaaaagtaataatttaattactctttatttaataaatttttcaattaactattgaattgaaatgttaatattatttttaaaatagagcataccagatataggggcatcagatgcgtatcttgggccatggctaggaattttactagcaaattgtctaagacaaccgaaaaatcaagaatgtggtttttatgttttgaaatacatgactgacatcgtcggacgcgcaaaccccaaccgttatatacaatatcaaaaagctgtaaattttaattattaattattgtatttattatattaacaaataaaaaattgtatgatgttggcaagtctctgtctacaagaagttggaatacccccaaagaacaccgttgatttggccttgttggcagatagaccagttgcttcactaaaccgttggaaggcctctttcactatctgaacttatttatcattgcccttgcaaaa

SEQ ID NO: 362755 - DNA, 776 bp, Cannabis indica
tattattattattattatgaattcttttaggacgtatactatgaaaaatgtgtcaatatttaattgattttttcgacaatagaatttgctagaaattaaaaaaatgcacaattggcattattatatattatgagattaaaattattcgttgaatatctatgcttacctgtcgtaagttcacatgtcaattatcgaaaattgtgatttatgttaatacttttctcccgtatcaatcacaattaatactaagatctatacatgcaatttagtcaccatgtcaatttgttaggtttgatgcttaaatggtaaaggaaacacattagatgtcatgaaccacacaagattttctatcctatcattagtgtattaactgaattttggttatgatatttgaagtagttgtccttacctgtgtaaaagtcgtatgttttgtttaaacgacgctagcataacatgatcgtttccgttgtagatatgcttagatggtgaaggaaacacattagttgtcataaaccatacaatcttttctaccctatcaatagtagattaacttaattttggttatgacatttgaagtagttgtccttacctgtgtaagagtcatatgttttgtttgaacgactctagcatgacatgatcgtttctgttaattgaccattaaggtatgtaagaaaacaatcagattgcataatccttggtgccgtttggtaacacttttgtttttaattttttaatcacaaaatgaaagtaaaattttgtttttaaaaaatttattt

SEQ ID NO: 362756 - DNA, 796 bp, Cannabis indica
atccactggattgaggttgggatggatttgatgcactcgttgacttcagattcacatcaaccatgtcttcttgattcgttgaggaaagtgtttctatttttggtaaagcagcaacaattttccaaaagagtgcttgaaaaattattcaagcattgtaacgtaatccatatactctcatgagcaaatcaaaatggaaagaggaaattcccaacatgaggttcacatcactcaattatttaccaagttagtaatatcaatatgaaaaatagtatttgagaaaattttcatatcatcttatatgccagcaaccctgggctattttctatatccctttcatatctcttttttgtgattttagcgtgatttatacatgatagtgagatatgatatgtgaaatagggctgttgttggtgaggaggaagaaggcgatgacgatggggggtgttctctggtctgcacctctggttctcagaagacgatgagggagaagaagttgacccctaaatcgcagaagagaagggggagaagaacgagattttagtgttctcagattttttgggtttggaatttaattttgtatttaatttaattttaagtgtttatgtttagtttaattttgtaatttttttaatttaaaaaaataagttttatttaatttttaaatatataagaattaatgataaaaataaattgattatatttttgttcatttttaaacttttaaataataaataaaaaaaaattaatgagatggatcaatgaacgagtgacacgtagacactaatctggcacataa

SEQ ID NO: 362757 - DNA, 618 bp, Cannabis indica
atgacagaaatagatagtgagtgcttatttccaataatttattttttattttatgtaggagttatagatgagacctatatctttgcttatgccttcgtatgatatgaaaatacagaagtacattgtgattgtctgttgtgggattcagaactttataaggacgaatacaaaaagagacgtattttgatggagatgaagagattccatgaagtacaagatactactatacaaagcacccgtgtaattttgaatgacagtgttgagtttagcatttcaagagatcaaattcgtgaaatgactaatgtccgtgatgaaattactgatcatttacaggggagcaaatcaacgataaagataatgagtgaagtctattaactgttatgacttttttaaatttttcttcaagattggacaattactagttcatattttattatgaatttggcgattttgtgttataaataatgagtctcgtgatttcagattacttgaatattttttaagatgttaacgagtattttttttactataatttttatatatttatttaaaaataaaaataaatgatattaataattttttttatttaaaaaaagcaaaaaaaaaaaaagaaaagaa

SEQ ID NO: 362758 - DNA, 778 bp, Cannabis indica
tgttaacctcacttttagccaacgacaacgaatatattttataagcgataaatgatttataataacaaatatatgataaagcaataaaaagacacaggaattttatagaggttcagccccaagcagttcggtaatagcctaatcctcgttacttgtattgacttaagatcaaggagaaagattccttttcttatagctcttacaacagtatctctgaatatataattcttagataatatatttagggtatagtcttagctcaactgcttttcgaccgatcccttgccaagtgaatatgcatcattatttatagggctagtaagcttggggaggaagagtttcccctctcgttacaatgcgtataaatagaaatatcgtgggatcaatgctgaatgtaaggattgtgggattgaggctgaatacactgatagtgggatcgtgtgtatgccatatccacgtaaattgacccctgagttatggggattgtgttgatgactcacgatgcaaaagttgaattcgctaagagtttggccattctatgcgggttactgaatactttgctctaggcatgccagtgaggcatgctgctcggactgtgcttctcgagcagatgttccaagtagactccacgtgtcaccattcatgtgatgccacgtcagagtgcaaaaattgggataacatttgccccctaagtctggacgggacttccgaagctgcgtgtagattttatcagagccgcttctgcttttggatggggacacgtgtcgagtgcgaccat

SEQ ID NO: 362759 - DNA, 710 bp, Cannabis indica
atcttccacgttggcatcttgaacttgtgaggtagtggcaagaggttgaattctggcgagaagggagttccgcgtgcacggtctaactcaagatcattgttacgctgctcggccatgccatgaaacatattcttcagtttgtcaagttgggcctgtacggctgggctgacttcattggcattctggtcgggttgggctacgtcagcgtctttctgagcggggatttgagtatgggctccggactgcacattcgttgtagtattctactcgtctattccccttcttctgtttaggtcatcccttaggtcacggggtgttcccaacctttcgaacacagaagaacctggctgccttagcgattggttcgcttggttggcaggtggaatggctccattattttgcgtggatccatcgagcatgactcctcctgatgaattcccggacaaggtctgtctgcctacctcttggcccacgagtggaactcgtgaccggggattggacggctgaccgttggctgtctgggaagcattcaccgttgggtcatcctcggtttctccaaggggaatgacgctcggcgcctgctggcctacagtctgataggctcttcgtatcagcacagtggcttgccgactacgatcttcgatttctgcatggtgagcccttaatgcctccatctctttgtccctccactcagcgaacatacgcctctg

SEQ ID NO: 362760 - DNA, 655 bp, Cannabis indica
agaaatttttgtgtttttatgtttaatttttctatctaattaaaaaaatttctgatttttatatcatatgagctgagattgttccatacggtaaaaaaaaaattaaaaaaaaatttttttttagcaagaaaaataagaaaagaaaaaattaagtttgagttaaatatttttgtatgaacatttttttgatatagtgtaaaaagagattatttttttatttttttttaattaagtagttaaaaattaagcatagaaatttaaatttgtgatttcattattcgttattagatcaaaattcgatggtttgatatttttaaaattaatatttatagttaaatttgtttagtaactattcatggctactacccattaaaaagtgttgcatatatatataatacttaattattcatgaataaaatctaatacataatagaaaaaaaaggtgaaaacattaccttctcaagccatattaattgtaaaagaaaggaagaatgatttaattgtaaaaaaacaatgaaggctaaataaaagtttttatatatgtatatttatatatttagtgatataaggaattagatagatttagttagtgaattctttttaaaaaaaataataaaataactaactaatgttagacttttatttgggcttacat

SEQ ID NO: 362761 - DNA, 1421 bp, Cannabis indica
aagatatgtttccaagagggagagtgaattggaaatttaagctcatttcggtaaattaaaacttttaacacaaaactatgcaattgaacacttgaccaagtaaatgcaagtaatatggcaagcaataatgatagcaaataatcaaacttgtaaagtaaagagtttaagggtaagaaattacaaactctcaatttttaaaaggttcggtagagctaagccacctatgtccttggccttcaaagctatggacttagctttaagttctaatatcgagccaagttaacgggcttggctaacccttacaactgggaaatttttaccaatgtgtttccaaacctcttacaatagttttgcactgccaaggactattaacctctttctcgaattgttgtagtgaaaatctcaatataactaggttgtttacaataccgatgccaacctcacctcaatcaccatatgtaaatgtgtttgaaattacaagaaaattcactctagaagtatggtgatataatagaaacctagaaagatgagcaagcacacttgaaatgaataaacacaaatattggctcaaagtgtgtgaaaagtgtttgttggattttaaacttgggagctcattaatttcacttgaataggttgggtatatgatacaaatgctcaaccaacttgattttttgagtgaaaatcgagttcatatagtgttgggataaaatgtagccatttatagctgttagcacgcattccaagaataaatcttccatgaaccggaattctatatgggaactggaatttaggattgatgaaaaccagaatttcagattccaatcagaattccagatggctaacagtggcaacttttgcaattttttagacttaaacgtgtataactttttactcgatttcaaaaattctgattgtgttctctaagttaaatgaaatgtaatttagaaactcaataaaaaaatttgaaccatcaggtgagaaaacttgttgcacaagttagtgagtgagctaaaatttgaacttataaaccctagtgtactatgcaaatcattttaacaaggctaaaataaatttataccatttgattgtgtgtggtcttgatgtagtgagcttcctagcttgatttttatgttttgatccaaagttgacttctcccgagagttgacttttacttttactttgactttggagttgacttttgactttgagcttttgaagacctcttttgaatagagtcttgaattcttgatcctttgatgaatcttttgctcttattaagtatgaagtagttgatgggcttgttgaatcaactttgggtcactttgagaagtttggtaaaattaccattttgcctttgaaaattttatttttctttttatttgtgctacaaaatcaacaatcattagtaacaaataataatc

SEQ ID NO: 362762 - DNA, 617 bp, Cannabis indica
gttccagcttactcaaaatatggctttcacacttcagtataggtcgctctattccagcaaggggcctaacaagaaattgaaataaaaattgctcaactctatacattaatactttaatttatccaggtcacagatagaagtaacttaatcttttaacccaacctcaaaagtattaggagtataagacactaagctaattatcatccaaaactattaagatgctttgtcaaccaagaatgaaacaaagatagatgcaagataagaactacttaaaatttttgtaccaaatagagaaccaaatgaaaagaattaagcagtggaaactcccaaagatttcttgaggcagccaaactgacttgaatatagggccttagtaaaaatatcaaccaattatttttcaatatcaacatattccaactgcaatgtttagttgtcaacaagtttcttaataaaatgataccttatatcattatattttgtacaagaatgttgagcaagatttttaaaaatatctatagtgatggtattttcacatacagaatgacatgtaagaaaatatgtgagagtatagaaattatcaatagatataaatgttggaatttattttaccaggatct

SEQ ID NO: 362763 - DNA, 529 bp, Cannabis indica
gttattttatgcgggttttagacaatattttggaatagacccttattgatttacctttgtcgtgacataggacccaaaattgtcgagcatcgttccatttaagttggtccacatacttgactttggacttgaggtaagaaaagtattatgcactgtttatggttagtgattataattgtgatagtctcgattatgatcgagggaaataataggaaacgattatcatcgttgtgactcattatgatcgagggaaataataggaaactattatcatcgctgtgactcgattatgatcgagggaaataataggaaacgattatcatcactgtggctcatttgcagggggagctgtttcatggcaattgagactacaaaagtgtgttgcttttgttaggttttgtgccctaaataaaaccctttacaaactgattagctatcaatgtaagaaatttgaagtgatttatgtttgcatgaattttacatgctaatggtttaatatgtttattacatttacacacaaaatctgtta

SEQ ID NO: 362764 - DNA, 584 bp, Cannabis indica
agtagtaaagtaggataattttttttcttgattccaaaaatgttctatcatcttattctatatataagatggtcccactgcctctgttatcttgatacaaccgatgaggacaagactatttaggttcttagacagaatgtcacggtaccttgtcgtagcgagagggtttcaaggaactcaccctgttatgacttggaagacaccggtgacaaaatctatagttagtttaaacatttaatggattgtcagaataaggaactaagaagtaaaaccaagagaactatggttaaaaccattcatatggaataactaaaagttttctattacaaggacaagaaagaaaattttgaaaaataagtctattcaatggacttaacaaaacttcttgatcctagtattatagtaggcttgacattatctaaacgtatggcttatggtatgcctgatgatttacttaccctggtgcaagcaacttactttagtaagttgctagagcatttttctaatggcaatctatagaagcttttcaacttctagacatagattttatttatctaaggaaaagtctcaactattccaaaaaa

SEQ ID NO: 362765 - DNA, 888 bp, Cannabis indica
gcaatgataaaatcagattttatatgtttaatgaaaagagttttatttacactacctctttgataatcatgagaaattaaaaaattgagttaacctttcatatcaggcatgaggatcttatttcagaccatacaaagccttttcaagtttatatacatggtctggaaactaaggatcttcaaatccttttggttgctgaacataaacttcctcactcaaaatgccattcaaaaaggccaacttcacatccatttggtacaatttgataacaagaatacaagcaatgcacaagagtaaaaaagtagattctaatccttctacaagagcaaaagtttcatcaaagtcaataccttctacctgtgtatacccttgtgccaccaacagagccttattcctcacaattgtatcgaattcatcacttttatttttaaaaatccactttgtaccaatcacattgatgccttttggtctttgaaccaaaatccaaaccttgttgtggacaaactgattaagttcttcttgcattgcattgagcctttcttcaaaagtcatggcttccttcacatttttcagttcaatttgtgagacaaaacaaaggaaactaatcaaattaacataccttcttcttgttaccatgctttctttaagatttctaagaatgagatctttaggatgattcatttttactctggtgcttggttccttctggatagaatcagtaatgatgtttggatgagtcgagataggctgctctggttctcctgtatcagttgcagtggcagattcatcatttgcgatgtcagaattcaattttgctgcattagaaactacatttgctgcttctggtggagtatctagaaaactatctatctaggcttctgtggaaaa

SEQ ID NO: 362766 - DNA, 1192 bp, Cannabis indica
atctcaaatgcaacgacggccaagaagcgtgggaaagcttcaagcttgcaacaaaggagcggagcaagtgaaaaagatttgtcttcaagctcttagaggtgattttgaaaatttatttatggaatgtactgaatcaatttctgattatttcaatagagcattatcaattgttaattagttaagaagaaatggagaaaaattagtgaagtaaaagttatagaaaaaactcttcgtattgtgagtccaacctttgagtacattgctacaatcattgaagagatataaagatttagaatccatgactattgagaaactcctgagttctttacaagcctatgaggagaaacaaaaaaggaaaaataagcgaaaggagaagatggagcaattactaaagctcaccttagaagaagaaaattctaacaactaaaaaaaatcaacaaggaagaggacgtgaccgaggaagtgaacgtggatgtggtcgaggacaacgaagagaaggaaggggtagctataataacaataatttcaataatggagaacgaaatcaaaattcacaagcaccaagagggcgcggaagaggcaactcattgtcaaggagtgacaaatctcacatcaattgctacaattgcaacaagtacggtcattatgcctccgtatgtagatcaaggagagtcgaagaaagagccaattttgtcgaagacaaatgtggagaagaagaaactttgttgcttgcctgcaaagacaaagatgaagctgaagaaaataaatggtatcttgacaccggcgctagcaatcacatgtgcggagaaagaagaatgtttgtggagctcaatcaaagggtaaaaagaaatgtctcttttggagatgaatcaaaagtacctgtggaaggcaaaggtaagattcttataagtttaaaaaagggaggccatcaattcatctcaaatgtttactttgtgcccaacatgaaaaataatattttgagtttgggtcaattactagagaaagattatgatattcacttaaaagaaaataacattttcttaagagatgataaaagtactttgatcgccaaataagttcccatgacaaagaatagaatgtttctcttgaacattcaacatgatgttttgaagtgtttaaaggcctgctacaatgagtcatcatggctttggcatctacgctttggacatct

SEQ ID NO: 362767 - DNA, 581 bp, Cannabis indica
ttttattttattatttttttaatattttattaaaaaaaaattgaattaagcctaccaacttctattttctaatattttattaaaaaatcttgaactaattgtataaatttcatttttagtccattttatttaattaggtttataaatatctatattaattaagaaaaaaaatataatttaaataaaaataaataaatatcacttctaaccatgccatatataagaggatataactatatacatgagttcctattctattttaatttttagcagctattgttgagtgaaggttcttttgaattttgacggtatgagaaggtaaaactttctaattattgagctagaacaatattaacatattcttactatgttttcactttactgatcgataaaccatataattgcaccacaggcacatgtcgctgaaatccaaattccaaaaagtctctcttctttttttttttttttttctaatcattcttttatttttgatgcaatttcaagatctattgaaaaactaaattgttgggttttataccctaaataaaactccatttcaatgtaatccattttattcaaca

SEQ ID NO: 362768 - DNA, 545 bp, Cannabis indica
cgaaatttcttttaaggagggtactgtaatatcaaaatattatttaattttttttattgggatattaattgtgagagaataattatctcatttatttgtattgttagtaagttaagattattgcttagagtagttgtaccaattttctagagagaattaaagttgtatcaagtacgaaagtaaaatattattgtatttttacaaggtaggtaatcttttacttaaagctcaatatgaaggtctattaggattttataatatatttagtagatttaattaattgtataagtggtattaaataacattattatctacttaatgttaagaaattcgtaagtttatagagaaattcgcaggtttagaaactgttttactaaaaggaccatatatggagtttaataactctgatcgaggtgattctagtggcgttggaaagataattcaaaaatcgataaattttgtagaaatagatatatcataattcggaaattttttaggtcaaaactaagccctaaagttagaagatggagagcttataatttaaa

SEQ ID NO: 362769 - DNA, 592 bp, Cannabis indica
gtcataagatcttgaaataaacaaagatcaagaaagaagagatgcaacaattcaaattatatgtgagttgactaacataaactaaattaaaggataaattagataaatgtaagactaatgacaaagtaagcaaatgtgtaggagtaacagtgccatatccaagaacagaagatggtgaaccataagctaatgtaacggaagaattgggactataagattgaagagtgaaaaaagagtggaattacctgtcatatgatatgtagccccagaatcaatgacccatttcgatgaggtggaaagaaggcagacattagatttacctcaatcaacaattgtagtgacagaaggagatgaagacttgagtgattcctggtaccttgagaacttggcaaattcatccgcaaaaataacgaccaatttgttagatgtatcactagtgattgcaatattaacatagtatttttgttgatttttaaattgaagcttcttgtgtcagactataatatagagtatgtaatatagcatatacaaacgatatgaaatgtggaaaaacaactgtaatcatatctataatatatgcaatgaaaggatc

SEQ ID NO: 362770 - DNA, 607 bp, Cannabis indica
atcccgagtgtcctaatgcaagaaacaccatcttggtgagtgtcgagccaaggcatgtttccaatgtggcgtggtgggccactttatcagggattgccctcaggccaagaaagaggagcccaagaagaatactgctcagaacccggggtgacttttcaccatgactcaggctgacgctgatgctagtccgttagttgtttattaatggttgttcatttaatgtgttgtttgattgaagagatactcactcttatgtatcgagtagagttattgaacgtttccacaagccgtgtgatatttatgcttcggggtttggaactctgttaccttcgggagactttataatatccagtaggtggattcggtctttatccttctggattgacggttgtgagttgactgccaatctaatcgaattgtaattatctgattttgacttaatcctgggaatggattttctatctaaatatggagcgacgatcgactgtaaacggaagatggtagtgtttgagcccgataatgccaacccagcggtgtttgtgggtaaggttgttggaaatattttaccaggatctagatttactaccaagtatgtttcattaacatc

SEQ ID NO: 362771 - DNA, 556 bp, Cannabis indica
cacgcactcaaccaggacgtctccatcagcatcaactagctgccgagcctcattgtactccgcgaagttagggggttcaacctctttctctccctccgcctcggaaggcctgcccggacgcacctcgtccaacgcctcaacctcctggacctcggcgtccccctcatggtcctcctctatcgggacggccgaatcctgttcggcgtcgggtagagtggcaagccgagccacttgaggatcagaagcgtcggctagacgcgtggttttcttcgtacgagccatcatcctatggttgggtacgaggtcagaagaatttccttcgctagaaggaggactagcatgaagacgaggatgaacctcatggagaagttgaagctaatcctggttgatctgatgcccgagttcccaagactcacctgggttcatctacaaaagacaacacacaagatgagtgttggacggagtatcaaacgaaaaacaagcaaatatgccgaccaggagtactcaacaaattgaagaacgactatgtttaaagaaaagtcaaaactcaagaaat

SEQ ID NO: 362772 - DNA, 546 bp, Cannabis indica
atccgcactaagtgcagattttatatttcagatccaatccaatccaatccgcaaaagtgtagattggatcgattattttggattagttactttttaatattaaattatttaatatttatgattttttttacataactagcaataaaataaaataaattattattattttatgtctccaataaaaaattaaaataaataaagtaacaaattcaaaaggaagaaaaaaaattgtatgcatacgtacaaaaatgtgtaattttgttttgaatatgtagaagaaaaaattatatatgagaatgaaatatacatttaatctattaaattttgaaatataattgtattatatgtattagacttttaaattactattttttttttcattaatgttaattgtatgtatatttttttttttttttttttttataaacatgtgtggattggtttagatcgattatttttacatgtcaatcaatattcaattcacacaagtgcggattttaaatttccaatccaatctagttaatccccacaagtgtaaatatttgc

SEQ ID NO: 362773 - DNA, 539 bp, Cannabis indica
aggggtactagtaatggaccctccacaatcatctagaccacaaggcgagcaagtagagcctggggctgcccaaaccgatccaccgacaccgcctccacttcaacagaatctgggggataatgcgtgggttggtaatgctaatcctcctactgattggcagcagatgtttcaagaaattcgaagtgtcatacttcgtcaagaagaagaattgcgacgattaaggtaaccggcaccggttgcccctgtagatcaagtgttaccaccagcacttgtgccagtggtgggtgaccacgagtttgttatgccgcatagagactcggtgtttgagcgattcgtgacaagcagtggatgagcacaatcacccgtatcctcgataatatgggggtgacaagaactgaaagagtgaactgtgcagccttcatgttacaagatcatgcccgcgtctggtgggatatcctgggccaaactcgggatgtcagtgtaatgacctgggaggaatttaagaatctatttgaagaaaagttttacaatattgctgt

SEQ ID NO: 362774 - DNA, 612 bp, Cannabis indica
acactaataagaaaattgtttgagttatactaaaactctaactccgaagaatcatttaattgttttgattaaccataccctaaacttctagctaactaaaggaaaatctaaagctaaagactaaaccaagctaagcgtctattcatccccttcttctggatcttcttctggatcctcctctgactcttcttctagattgtcttctgagtcctccccttgttgttccaccggttcaggatttgctggtagttgtatttcttcttcaggctcatccggatcttccacatcagaaccatcctccaagatgtctcttgaaattggctcatagtcaaaattttctgcatcatggtaaatgccaactgttgtctctgggatgttggcaatgtagtagtcatgatattctgcccccagtttatggttgagcaaggttctcacaccctgctcattcattcgtacatccaagacagagaaagtgttgaggaatctctcaattgactctttatacttgttatgttccgaaatataaccgattccgttcacttgtctccatattcgatctaggtgagctcttgcttcctcagaccttagtgagtgtgacataactatatattt

SEQ ID NO: 362775 - DNA, 431 bp, Cannabis indica
ttgttaattataaattattattcctatgttgtgactaaaaggtccgtaactaaatgtattagttacaaaattcacaatttattgtgattataatgtgcttttagtcacagcacttgttgttgttgtgactaaaaataaattagtaacaacttgtatctaaatactatgttttagtcacaagtaactttttgttgtgactaaaaatcatatatttagccacaaaaaaattatgttatcactaaaaaattgtcactaaatatagctgttttttgtaatgtatatctcaacgaattgctaaatcaacaaattaatgtcatattgctattaatatattattataggctcctctttgtacctagttcttctatgaaaatgggcgaattcatataaaaacgagagagacaatctctcttttaaaaaaaaaaaaaaac

SEQ ID NO: 362776 - DNA, 607 bp, Cannabis indica
gtacgggttcgggtccacttttgggtttgggactaggttcaggttcgggtgtgggtttgggtccttgtcaggtttcgggcctagtactggttcctaaatccagacaccgactacgggttttgtccaagccgtgggtccagatccggatcccaaactcgggtcccagtctggttccatttcttgtgccgggtcacgagctgggtcctaggttaaagttcaggtctgggtcgagtactaggtccatgtcgtaggggtgttcgcggttcgggtggtgcggtttttaaacattttttcaaaccaagccgcacatgcggtttttccaattttccaaaccccacccgcaccgcgatactaaaaaaccgtaaaaactgtaccgcaaaaaatgatgcggtgcggtttcttgcggtttgaactatcacaatttttttttttgaaatcatcataaaataattaaactattattaatataattattccaaaatacttaagaaaatacaacaaacttgagactaataaaagttataacaacaacaataagtcagtaatgtttttaaagtttcaacaacacacctaaatcaaaataacaaacttgaaactaattaaattc

SEQ ID NO: 362777 - DNA, 603 bp, Cannabis indica
aagaagttaatatttctgtatatatatgtattaagctattgcttcacattttctctaaatccaaaacattatatcccaaaacttaaacaaactttagcagttctttgaatctttttgtattactcttcagaaagctatattccaaaacctaaacattgtatctttttgtattattcaaggaagctatatatatacttcttgcttactagagcacccgacaccatttctacatcgaccacattaaggtaatttcttcaaggttggtaccatcttcatatcccactttttttttaactacatatatgttttgggtacaatattaagatatctgttttttttttttaatgtacatttcagttagattagtatgtattttactaaacaaagttttacattctagtagcatcatttaaaacctgccactttttataattgtttacaattgtttaaagggttattttcaaaaatatgggaaaaattattaagattataataaatatggcataaaaagtaaatgataccaaatatggtattatctaaccaatcaaactaaaaatatgaatttttttagaaaaaaaaatctgaatttaaaatttataaaaa

SEQ ID NO: 362778 - DNA, 665 bp, Cannabis indica
gttagtgaatttacttggttaatttctagatctgcttattggaagcttagttatataggcccatggtccccatactactttagacaaactgcttgactcagttaattaattttaattagtccattataattctaacattagactacgtctagtttatgaattttcactatgcaaggacttaattgtgaagaaaagagattctaggttttatttattaattgagagattttattatgtctaattaataaatatattaaatggaaattttatttgattattaatttttaattattaaataattagttttggcatttaaatggttggaattggaaaaatgacatttttagaaaataaaggaaagattgtcaaaaggaaaaatatgagattttccatttaatttttctattattttattgcctaaaaaatcctaacctaaacctaggtggttgcctataaatagatagtgatggctcacacttaaaagatgatgaaatttcttgccttcagaaatagttgagccatctattcttccttcttttttcgaaccaacctcttccttcttctttcttcttcagttcgaaacacttagtctttctttaccaaataatattcagccattagtgattgagtaagtgcccacacacatcaagtaggtcctcagtcat

SEQ ID NO: 362779 - DNA, 489 bp, Cannabis indica
taggtgagaaaccatttgtatttatgggaagagttaaaggttctcgaattccaatcatatcagtattgagagctaaagacttattacaagatgggtgtataggttatctggaagtagtgattgataccagtaaatcaactaacttattaattcctcattgcatccaccatacaacttggaattgcactctcagttatataaaacgctctatatgttccacaatatagatacgctattcgttatccattgttacttggagtaagtgttatgctctttccaggacatgggtaaagtatactagtttcgaatgtatggagtatacattggactggaccgatattgaacttagtcaagatattataatcttaccgttgtatatttccaagtcaatatcactagttgatcttagattaaaagagtctaaatcttgatatgcttaggctcaactcaggagtgctattcatgttcattgatttatagttaagccta

SEQ ID NO: 362780 - DNA, 511 bp, Cannabis indica
ccaaatgcttggctctggaggcggtgcattcaatggcaaccaggaccatcagaaggatagcttcatcccaacttctatctcagaagaggagatccctactgccggagacaccgagttgggcccgctgtcctctgcagacatcgagaggatggtgtaggagctcgttgaaccaggaactatcgagattcgagagagcgagtctatggtgtcagcccgtgaacaccttattcactccaggcacgctcctgacgtcgaagtcgaggagatggatgaagactggatggttccagaccttgagtcagatgaggaagaggacgctgagggaagtgggactgattcggtggacaatactcaattggatgatcccttctcatgcgtggacttggtgcgcgagtcaccaaaatctaatctcaccacttttacgagattaaattgttgcgacttgcctccatgcatcctcgtcctacccagagagcgctaccttcctttttacaaccccgttgcgatcata

SEQ ID NO: 362781 - DNA, 562 bp, Cannabis indica
gacagtgagtctacggtgtcagcttgtgaacaccttgttcactccaggcacgctcctgatgtcgaagtcgaggagatagacgaagactggatggctccagaccgcgagtcagatgaggaagaggatgctgagggaagtgggaccgattcagtggataatactcaattggacgagcctttctcgtgcgaggacttggtctcgcgagtcacaaaatctgatctcaccacttttacgagattaaacttgttgcgacttgcctccctacgtcctcatccttcccagagagcgcacctttcttttactaaccctgcgatcatacccacagaggatgtggttgtctcaatacccatacttcgttgcggagtatcagtccctttccatccattcatctccgctattcttaagcggtatgatgtgtcccatttccaactaaccccaaatagttatcgcatagctttaggtttttatgcgatgtatatgaagtatgcgcatagagagccttcgatggaggagtttagttattttatgacataaaaaacgtgggtctccacaacggcttcta

SEQ ID NO: 362782 - DNA, 720 bp, Cannabis indica
atttgtattaactcaagaacaaggagaaattttccttttcttatagctcttacaaaagtatctctgaatatcaattcttggacaatatctctcaattaaaatatttgcgaccactttccagtgaatatgcatcactatttatagggctatgagcttggagacgaagtatttcccttctccttacaattgatataagtagaaagattccatagtaaatacataatacactcatcttgggatttggacaacttgccatatctctataatctgatccccgagttatagggacttccttgatgactcacgatgcgaaggttgaatgagctaagtgtctgttattctgtgcggattcctgactgctttacttcgagtattcatatgatgtatcctgttcggactgcatcttgcagcagatacccagagtcgattccacgtgtaaccatcgtgtgatgccacatcagagtgcgaaaattgggataacatttgccccccaagtctgtacgggactttcgaagttgcgtgtagacttcctccgagctgtctttgcgtttgaatgggtgacacgtgttaggagcatgtgttcgtgacttgatgtgaggctaactgggcgtcccttcggttttcaactaataaatgctctgacgcaattaatatttcgaaatttgattttctcttaccacggttgacgggtgcacttgattgcttttgatttcctatatt

SEQ ID NO: 362783 - DNA, 486 bp, Cannabis indica
tttgggtacaatacatataaaaagatgtacgtttcaattaaatataacattagaggtaaatttaattaattgattaataaaagtagcatttttcaacttacctcataaaattatgtaattttaattcaaacccacaccaacccgacaccattacacccacctatactgccctctttaatgtcaccatgagtaatactagtgcccaaaaagcccctcaagcctccaccccgagccagacaaaaacacttcacagaactctagcagttctaaatccaccagttccaaatactgccatgttcccctgcctgaaaatatcccgctcctcgacactagcaaacgacttgaagctatgaacctgacctaccaacctggggttgctactccctcggactccaaagcctcaaggaaaagaaacaaacccgactcaaaggacaagtttaaacgacaaactgaaatggtgaatggggaattgttgggttttatgcc

SEQ ID NO: 362784 - DNA, 643 bp, Cannabis indica
tggggctgggtcggggtgggtgcggtggctgggtgcggtggctcaccgtgggtggtgtcgagttttgggtggtgcgatctagcctcacgggttggttttcagtgtgcatacggttgggaggctttctttgacagagaaaagaggaagaaagagaaggttgaaaataataagaggggtattttagggtatagggaaaagtgatcctactttttcaatagatataagtattagtttaaaaaattaatttaggtataaaacatgcatataaattcaaatttccctaatcaaaatctatccaatgatattaaatgtttagatttgattaaacaaagttacaaaggtttaatcatttttttaaagttggacagcttccaactttgagtatgtaaatatcaagaaagtaataaattattggagtctggccatattaattaaaaattgttgtaaatttgcttttaatatttattgattagatattttttaacatgatgtgattacacacgaaaattagtgcaagaaacaaaccatcactatttattgaggaaattacactctatatactttttatatggtcttctcttatttttaccttctttttaaaaatctaccatttttacttttttttaaaaatattttactaatt

SEQ ID NO: 362785 - DNA, 925 bp, Cannabis indica
ttatgccttgagtgcataatccctaaatctcatacatattaacatggcatggcatttatatacatatttcactagggtaataaccctaggctatcacaccgttcctattagggtaataaccctaatcccggttacaataactcacatatatcatattcaacataagcgccactgcgcatactctacgtgcaaactactgtcttacctgttgtccagcaaatagaaagagattccaaaacccccgggtgctcctgatcaggtgccggtaatcctagtcacacaaacccgggataattcacacttagggttaacccctgactttcaactcaataaaattcaagcatggcatttacaattcagataatcatacagagctcggaacgagctttccaacgatataaagaactcccaaatcggagttcggaatcaaaagttacgaactttcgaaaatcaactcaaatctgcccaaaaacacgagggcgggccgcggcatgcccaaaccatgccgcggcacctgggaccaattcccaggtccactcaaaggagcgggccgcggcatgctccagagcatgccgcggcatctgggtgcagaacccagaaaccagcaagctcctcttcgaaatttcagcccaaactcaatcttttcatccccaaatcatcaacaaaacttctaatttaaaatatccaataacaagcaaacattggggagattaaacacctaaacatgcattaagaatccaattataaaccctcaattcagattgcatataattcacaaaattaatgatttaaccaagcaaacctcaagctcaagaacaagagcttcaaaaccaagctcctcaaataatttccagcattaatcactaaatttaaaacctgaaattaaataagaacataccctaatcattccatctagggctcaaga

SEQ ID NO: 362786 - DNA, 661 bp, Cannabis indica
ttggatttgtcaacaagttaaccttggtgttatatccgaaattcggctggaggacacgtgtcaaggtaaagggaatgtgaatcggtgcaatatcttttcatggaataactcattaattgcgtaagtatcagagtatatttgtaacccgctgactgttagatcttaggcaaggaatcattgtacgaattgacacttagtgtattaacgagaaactatatgtcgctgaaggtgaatagcgaggcaccggagaaaagtaacacatacattagcttgcaataagcaaactaagtgtaaaagtccgattggctcgaagaacaagaatgcgagatgaccatctcactacgaggaaacttccaatagtttcatccaactaacaggagcgaggctcataaccctggcaagtcagaagatttctgtatacccgcgatcgacgtaagacatatcttgtcgacctcagaaagaagaatggttccagctcgccattgggatcactacaattaagtttccgtcgagacatctccagattcaacaattaaagacgtgtttaatacacgatatatttgacccagtaaaagcgggaaaatcacagctatatgattttcaaaagggcttttttcataaatgtacaacaaaaacaacataattacaaaaaatgtgcaaa

SEQ ID NO: 362787 - DNA, 694 bp, Cannabis indica
agtttattctgtattagaaaaaaataaaatattgttctaaataaacagaaactagtaggtttattgacatatttaatggtaaactataagaaatgagatgaattattgttctaatatacgaaaaagaagaatgaaaatttatttcaatatactaaaataaaataatagatttgttagcatatacgatggtaggctatacaaaaaatataaacaaagaatgaaaatttatttcaatatgccaaagtaaacaatatgccaaaataaactaataagtttatttgacatatatcagtatagacatatttgattacaggatttttggtctgatcattatctttttatttaaaattgatgattttatcaaaagtaaccaattggtatcttatcgaaatcataactaattagtcccaaaaaaatatcgtatttgtaataatttaaaagttatttgtaactttattctttatttaactaatcaaaatgcatatattaatttacatttataaaaaagaaatttttacatcaaaaatttaatttacacaatttattacaaaaaacccctacacgcctacatcaacttttttacttaccatctttgttttattactaaaataccacttactcatcattccatgcacagacacgtgtgccatccccatcacacatcaatcaaatcccactctcttccctctctttt

SEQ ID NO: 362788 - DNA, 348 bp, Cannabis indica
taaatagatagtgatggcttcaggaaaaagtgacttttgcatcttgtttccttcagagaaaaacctgagcctttcactctaacttagccgccactctcctttcttaaaataatttccaacacctactgcacaatagccagaacatccacagaagaaacacctttctctctagcctatggaatggaagcggtcataccaacaaaaagagaagtcacaacagcttgacatgaactgaataccgaaacgcaaaattgggaagacatgtgccacgaactagacatagtcgacgagagaagagaaggggcatctataagaatggcagcctaccaatagtgtctagcaaagcat

SEQ ID NO: 362789 - DNA, 749 bp, Cannabis indica
ttttttttataaaaaaaacttattcattaaaattactgaaaatatataatttcgaaattattatatataagattttacaaaatttaaaataatattaattaaataataattacctaaattgattataaaaaaatatgataataaatatattcttcttaaattattagaaatttatatcaatattttagaaaattaatatttctattaaattggtgattaaattattatttagcataaataattttgtattcttcaagtatttttgctttactattttaattatttatttaataaaaatatgataaattattttattatatatttatgatatatatttaattatgtatgatatattattttattttataatttaattatttttttcgctagggagattattcagttttatttaagaaaaaactggtatgaaataattttgagttttaaaatatggtccacacctataagattaaagcccacacgtgataatagggtgacatataaaagtgatattatttgttttgattattttattgaatatattaattaaaataaattacttatttaattatttaattaaatcttttatacgataagatatataagattaaaatgatgaaataaaataaaaataaattgaatatacgatgcaattttacacatttttttacaattactatcaaaatattattaggattcattattttgggtatattttttttgaaaaaaaaaaactacttgtttggtct

SEQ ID NO: 362790 - DNA, 550 bp, Cannabis indica
aataacacattaaacaagtaatgaaattaaatctttttctttattgataattgaatagaaaagattgcattgaaatagagttttatttggggcacaaagcccaaaaaactcccagttgcactaacataaaacaatcagtaaatttcaattaatcctaaattcaatctgcgcttttcaaatgtagttgcggtcaatacttcgaggctctttactattggctaaagcaccagtgttatcacaaagtaaaactagcaatttttccattccaggaacaacatcaagacctgagaagaacttttttagccaaacaagtttcttggcagcctcaacgacaactatttactcgacctccatggtagagtctgatattggggtttgcttagcgtttctccaaacaactccacccccaacgagtaaaaaccaccacccttcgcagactaacacataatgcctagtacttttccaaatattttagtaataattcttaactgcagtccaatgttcctctcttgggtttgtcgtatacctagaatctcttttctttacaatt

SEQ ID NO: 362791 - DNA, 787 bp, Cannabis indica
cttttctttaatttttatttttagaaaaggctttctactaaattggcaataaaatacattactaggacttgaataagtaatttgggcttctttattgggccttcaatccacattcttaacataaaccataatatggtacatatattgtgtaaactatatacatataaatatttagaggaaattttaaatttagtgggttatattttttgtgcaaatatatatattttttaaaaaatatatatattttatggaaaaaaaattacattagaattttacccttttttttttgtcaaacctacacatctatctccaaagaacacaatctattatgtttaaaattatttcttggttatatatgtgagggtgtgaggataattgaagacaatactcataaaaagaggtatatttaaattaaattttatttagaggtaaagcatatgcaaataagtgatacaaatataaaatatagctcactttatcaaaagtgtactccaatagtgtaccaaattgtgatgcaaatatctcaataaaaaatgatccaaatttagatcacagtatatatagcatgatccaaaatttacatcacaataaatactaagagtttatatttaccattataccatttttaatattttattattaatgtttagttagcatgttcatttgcataaatgacttttataattattattattttattattaaacataatatttacttttgtataattattattttatatttctaataaattattagatgagcattaaatgagatattaaatttt

SEQ ID NO: 362792 - DNA, 1023 bp, Cannabis indica
aaaactttctatttccccctgacgctccggaagcctcagccttccatttgtgctcagggttgccaatgtcggtccccttactgacattaccactagcaggaggatttgatgccatgacggcatcctttgcagtctgctttcattacttgttgctcggcctcctcagcaattaaggccaagtctaccactctcttatacagagtgtcatgtgatgtggtaatcttcaagtcccgactaattgtagcatttagtcctcgaacatatttctgctttctggtgaaatctgtaggcaccagatcaccagcaaatttagataaccgatcgaattccagagtatactcggccacagacattttcccctgagtcaacttcacaaaatcttcttggtgtgaagtccttacagccacattatagaacttttcctcaaaaagtttcttaaactcttcccatgtcatcacactgacatcccgagtttgattcactatgtcccaccagacgcgggcatgatcttgaaacataaaggccgcacaattcaccctctcagttcccgtcacccccatattatcgaggatacgggtaacagtgctcatccactgatcggccttaataatatcaatgcctcccagaaaagccggaggttgcagcttcacaaaccgctcgaacacagagtcccggtgcggcataatatacccttggttacccaccactggcacaggagctggtggtaacccttgattaactggggcagcttgttgccttaaacgttgcaactcttcctcttgacgaagtatgacacttcgcatttcatgaaacatctgctgccagtcagcaggaggattagcattaacggcccccgcattatcccccggattttgcggaggtggaggcggtgctggtggatcggttcgggtaaccccgggctctacttgctcgccctgtggtctagatgattgcggagggtccattactagtacccctgtaatcaacaaccccagcgagttaagcaccaataccacacttacg

SEQ ID NO: 362793 - DNA, 635 bp, Cannabis indica
tatgttaatgggccttcacctaaattttagaatgaattaaaccattttcgtacgtccaaaatgaaacattgtactttttgtttttttttaaaaataagtttggaaaataaggaaatttaattaatgagtttaaagtacttagatttttgagtagtatgggtagttggtcccatttaaatctattgggctgatattaatgggcctataccaacatcttttaatgaattcaaccattcttgtactttacaaaaataccgcagtactattaacaaaaccccctacgtgtacacgtgtattaaatttggaattcatagattttactaccttttttttacacatcagatgtggccaatggagtaaagctaagccaaaaacgtactataacttatacttgggacaatatataacacacttgagaagtgttgcaatccatcatcaattttatatagcaaattaacttgtaatttagttattcatatcattacaatatatcaaatatgagttctggtcctcactgggttgttttcaatggcccgaacgaaggtatttatagtagctacgaagatgctacgaagaaaaaccctaattcagattccacaatcaaaatatgtcgatatgattctttcatagaagcc

SEQ ID NO: 362794 - DNA, 635 bp, Cannabis indica
caatgacacttattttttacttcgttatctgtatagtacttcctaatgtactagcacaaaatatccatgatgactatttgaatcaaaagacagaaattttgctcattttaatcggggcatttttcttaattttgataattaaatgcatgcataccgtatatagcgctaattttcacggtgacgaagaaaatccatccgtgcaattaactgtgcaaaatgcaccagaaaataatgcaccggccgtggatttatctgcacaaaatgcacccgaagaaattgcacctgtgcttactatagaggcatttcccgaagacaaatatctgtgtggagataacacaacatctgaaggagaagaatgcccaatatgtttagaagtatacgaagagggagcgattgtaagaaaatttccttgcggtcatatatttcaccctgagtgcatgcaagatatattaaatagtagacttaagaagtgtcctaattgtagatttatgtttgcttagtacttattgttataatactgtaaactcagaatatagccctaattaattcatgagaatcaaacaatagaatatagattagcggaagcgtaccggagtccatagaatcgacctttgattggtatgatcttccaattt

SEQ ID NO: 362795 - DNA, 808 bp, Cannabis indica
atagcgcattatataagaggcttatgaatttcctgttctaagccttggtatgaagcttgtaaagaccacttagcttaaatttgaaaattagcagataattgagatttaattatgaaaattctttatagatatttaaataattatttatgttattatatttgaattatgaatgcattttatgtcatatagtgaaatttcataattttgcattttcggtgcccgacaacatggaacgcggtgtatggctcagtagaatcacaatttagtattttagtatagcggggcagtttatttagacattgggattgtcaggattggtcgggaatttagaatttcccaaaatacccttttagtgcctttttatccttttagtgtgggaagggcaaaatagtcattttgccccataagcctttgtccttttgtggacttaatatttggtgatattatgttttatgttatgttatgttggctgatattaatttaataaaatgaaataagaggattcatttacttctttttacaaaatcaaagaaaagcaaaaattccttttttctcaaactctctctctctttcggccctctttgagcagcaagaatcttggtattttctttggtaattcaagctattttctcaagatttagtgatctctaattgttggtaagattcttatagctttcttttaagtttcttaatatattttttttaagaaaaatggatagttgcatgcttggtaatttgatgttgttgctgctgggtttatgggtaggttgtctgtagttttttatatgttcaaattgaatggattaaa

SEQ ID NO: 362796 - DNA, 659 bp, Cannabis indica
gaatgtgaaatgcacaaaaccgaatggtaactgacaacaacggccacagagcatgaacatgggcagacactctttaagcaagaaattattcttatattattattcaattcatagtatgcaaataaaaatactctttctttttctcttctttttcattttaattaaaactataagaacaaataattaattatacatatataatggcatacattattatatatgatcactgttccattatttgatacacctcaaagacaatgtacgaaaatcaaatgatactagttttgggacttgtttggtacgtagaattagactgaattagacacgctaatttgttcagtctagtgtttaggcataatgaaagtctgaataacttaactaatctcatgtgtctgaaattatttatcctaccagcatgggggggataaataatcccatataggtgagatttttttttatcattattttaaattttaattttggtaatatattctaaacttattataaatttattcatatattttttataaaaaacttactcatgaaaattaataaaaatatgtaattttagattatcatacataaatttttaaaattcaaaataatattcattaaataatagctacttaaattgattttaagagaaacctaataaaatt

SEQ ID NO: 362797 - DNA, 513 bp, Cannabis indica
ttatggatgaaacaaatgatggcagattatgggtttaatttgaaaactttaactattttctgtgataatagtatttctataaacatttcaaaaaatcatgttcaacactcacacacaaagcatatagacattcttcatcactttattagagaacttatggaaaataaaactcttatcttagaatatcttgaaactaacaagcaaataacagatatttttactaaagctcttgactcagtctggtttatctctctaaggaaatccttagggatttgtactatttaatgtttatgttcttcatgatccttgatatttgagttgacttagggttcataatgtcttgtctttgtctttgtcctagaagaaaatctcaacctcataagtattacattcattattttattactaacgtttttggtattatggtttcatacaggtttggctcaggaaaagtgttcactcctcccaggaatattcaggttcttcaaacagtgttatgtaagctaccatttt

SEQ ID NO: 362798 - DNA, 890 bp, Cannabis indica
tttgctgatgagtacttcatggtgaaggatccgagcattacccggactcggtttcaacagattctgacctatcaccgtcctcccctcactctctctcttagggatagagctgagaaactcgcccggttgtcgggggaagactgaaatattatccaattgacctccgatgataatcttatgaggtacgtgctttatccaaaagactttactcctaagtccgtggcgggcaagaagaggaaagttggtgctggctggcctgaacgaactcatcaggaggatgagcttattcaacttaaacgcgaggctaagttgaaagaaggtgccagggccaagcaatatgctcatgagtcttcaaatcctaaagatgatgtcgaggaagaacaggtgactccgctgaagaggaagaagaaactcccggccacgcctaagcctgttgaacatgcgatttgtataagggagcccatttcacttgttcagtcatctcctcccatgtttggaaaagggaaaatcgttatgtctgagataagatcgatgtcaggtgatgatagacttctgagtcttgtgcgggcggtcaccttgtattttactttttttgttcttgagcttcttaattttcatgccttgtatttctgatggctgtcttctaaccatactgtttttgttctatgtagacatgtctcggcacatgctcaacgctctgaggaagagaatacgtggaagctctagcgcctctcctccggccaagaagtctaagggtagcgaggggtcctctttaacggaaagagaccttctggagaggtcattgatctttctgaggagctgactgctgcaaacccctctaccccaaagtctcccaagtccaaggagtctggaccaccaacggctgggtc

SEQ ID NO: 362799 - DNA, 835 bp, Cannabis indica
taaaataataataaatgtaatgcatttggacattccacgtgtccatattgcagtagtaacggatgtaaaaaaattgtaatattgagtatttttatcctcaaaaataaaaatcagatatttaaatatataaaatctaaagtatttataccgcaatttatcttattcttattaatagtattgtatatcatacaaataagtagtatttgaaaaatagtattttttatttatttatttgatgggaaatcgtatgaattatttgatagtagaaatatgggcaaatattttgtcatatgtgtagaactgcaaaggtaggaccacattgttttccactagtactactacatagagtcaaatcacaaaagacaaatgattgtctatattatttgtctaatcaaattttacattatcacatttctttctttccaatactagtggttctaattctatgtcagaaagtaaaattatgcctacttttctaataattgtggcattgcttttgccataaatgtcacaaatgataaggtgtagattcttacatcttgtgctaaaaatttacatgtttctaattggttctattttgttgcatcactcattatttgtactagtcacgtgggctttcacctataagagtaaaacttttataatttagagagagttgcaaaaacaaaaagagtaggtagccttttggtacatgtgttttcgatagaccgacaattcaggtcataatacaataacacaagggaaacttacaaaaatactggattttaacttactctttataaaaatactgccacacggcaaaaataacttttatactgccttgagactttttttt

SEQ ID NO: 362800 - DNA, 633 bp, Cannabis indica
gtaaattctaaaatatgtattgtagtatactatttaaatctataaatttcatattatatagttagaaaataatataatatatagggtaacaacaatattattttttttttaaaaaaaaacaatatatacatacttatcactttattatatttttaaaaatatttttagagatgcatataaaaaagtttatagtacaagttcattagaaaaaacatgtataagttatactttgttaataagttcaaaaatatttttatagatgcatataaaaaggtttatagtacaattaagttagaaaaaatatgtttatatagtgtgttacaaaattaatttgttacataaaaaaatatatgtataaaagagacgttaaacaaaataaatttttgaagttaaatttcaaagtgttaaattcgattaattattatatttatgaaatataactattatacttttagtttaatgtaaatttttatagtaaattacatatgcaatatttgtattagaaatgagttacactaaaataattcttgatctgaattctaatgtgtagttgttgggtttgtgtgctctaaatataacaaatttcaatataatcagatttactgattaataaagatcagaaatcattttatg

SEQ ID NO: 362801 - DNA, 554 bp, Cannabis indica
ataaaaaaaatgggctttttcatttttacacttcaaaacattttttttttggtatttttacggaattctacatacaaatccatattgcaactagcgctgcaacctaaattgcaacaaaaataatcgtatagaaactcctattacaactagcgctgcaaccagtttagaaatccaaaccgtaaatttgaaaaaaaaaattaaaaaagtatatggggtaattttccataaaaaaatgtacataatttagaaaaaaaaaatatgatattatatgagtataataggcaaagaaattaacacaaaataatgtaaaaaagaaaattttaaaaaaatattaagactaattttctaaaattatattagtttaattttttttttaatattggggtcatttataattttgtgcggtgaaaataaaatttttcataaatataaaacaagttacacaaacataactttataaatacaattttttaaaaaactttatagtttctcactttcattatatgtttttttatatatgaatttatattttaaaaaattataattaatcaaat

SEQ ID NO: 362802 - DNA, 731 bp, Cannabis indica
tcttgtccgggcagtcaccttgcatttttaatttgtctcgttttttgagcttcttgattttcatgccttatgtttctgatggctgtcttctaaccacaatgtttttgtttctgtgcagacatgtctcagctgatgctcgacgctctaaggaagagaataggcggaagctctagcgcctctcctccggccaagaagtctaagggcggtgaggggttctcttcaaaggaaaagaggtctaccgggaaggttattgatctttccgaggagctgactgttgcaaacccctctacccccaaagttgcaaagtctaaggagtctggaccaccaatggttggatctgaactggtcaaaagcgatcttgaacggatgcaggaacctactttacctttgccggtgcttccagaggccaagaagggaaaggagatgctggcccattatatgaaccggctggttcctgaggtcagtgagcaactggcttgtgctgacaatcactcttctttggagttgttggtgggcggagtcttgaaggagttcgccagggtaagtcttttttgatacttccccttaatcttccatactttgctcaatatgctaaagtttttcctttgtgcaggccggtctgaagttggcctacacttattcccgggctaagtctgctgcttccaagaatgcggctctgtccgacaccctgaaggcggaggcggacttggccaagaaggatgctgaagaag

SEQ ID NO: 362803 - DNA, 617 bp, Cannabis indica
tcagccgacaaagatacgcccatcgacattgattcttgtaactttgttacgtaaaccggttttgtccaatgtaatttagcactactttttagaacactattagagtattaatttcttttaagtgtgactaaaatatagtaattacacttatttttttagagttcaaatctctattaaagttatttttttctttctaaatttacttacgcaccccttcctttaaattttagatctgctactgtgctaaataccttggtgtcttataataatattatttatttaaaacaaatgaaattataaataaaaaatataaattacataatttttttataaatgaaagtccattaattaaacaaacttaagtttaaaatattttatttatgttaataatctaaatattttattatgataagttgttttgaaatttcactaaaactatttttttcttcaaaaaatgaatatttaggaacaaaaatgtgtggaccaaaacgcacaatgggctggacttctcttaactattcagcacacaataaatataacatttgcatgcaatttcaataatgccaagagtcccacattgctcaggtaagactttttacatatatttatatatgcct

SEQ ID NO: 362804 - DNA, 578 bp, Cannabis indica
caaatttatgtcggacctatatcagacactatcagactgattcaagaaaattaaaaaactagaaaattatagagaacgtcttcgttcgtgttctctccattcgtggtctgtgtttgtggtctttattcgtggcggtagtctctctgttcgtggttgaggaaggagattgacatgggcttggacggattaaatggagtcgagagggttggtcaaattaattttttagcgggttgagtggtctttgatggtggcagtagtcttggatggtggcggtggtcgtggcagttcgattctgttgaagagagcgaacaagaatggagggagagagagacaggagtgagttgaaaaaatggagggataatcttgggtttaatgaaaaattgacctaatctaacaatattagtacaataatgattaggggataaattttagcctaataaatatataaagtcaaatttcccctataaaaattacaaaattgtattaaatataattatatctataaatatatatatttatatatataatagttaaaagaaaaaagaggtaacttgtctatttgattagaaactacaaaa

SEQ ID NO: 362805 - DNA, 736 bp, Cannabis indica
ccagacccgaacttgaacctaggacccagctcgtgacccgacaccagaaatggaacgagattgggacccgagattggaattgagatcttgaccgagggcttggacaaaacgcgtagtcggtgtttggatttgggaccctgccctggacctgaaccctgacaaggaaccgaacccacatccagaccttaacccaatcccaaacccaaaagtagacctgaacccgtaccctttgtcccaaaattggagttggaatcataacaaaaattggacctagatctagaatcgtaaccggaccaggactcggactccaaatctgtcctagacacgaattggaagtcgaactcggatcccaacccaaacctggactcgggacccgaacccgaacctaaactcagatccaacattgaactagactaaagacacagaaccagggtcgggaccttgaaatatcgagctaacttatgttgatgggccatcaaaatcaagtttgcaatggctcatctttcttcgatttcatcaagtgattttgccaggagtacgttattggtatcttgattgtacatcaatcttatgtgggaaggtggctggagttctacagttagcatagcttcatatccgtacgccatagcgaatggtgcttgtccggttgctgttttctcagttgacttcttcaggaagctcttctggccaatttcctttggcatctttgagttttttctttagtgtatccttatag

SEQ ID NO: 362806 - DNA, 880 bp, Cannabis indica
acccaacccacataaccccatcggaccactcggaacccccccacataaccccataccggaccccaacccacataacccatcggaccccaaccacataaccccacgagacgaccatcagaccccaacccacataagccatcggaccccatcagaccctaccccatgtaacccatcagaccatcggacggcatcggaggtccgatgtcttcaacctcagatctgaaaaaacccaaaaccgaccgaggaaaaactaaccttcgacatattcgcgattgcgggtggtggttgtgcgtggtcggacggtgctcgtgcgtggtcgggcgctgctgtcgatggtggtgggtggtcgttggtggccgagcgtggtcgggcgctcaagccgctggtgtttgatggggttgggtcgagcgtggtctaggtttcagcgagagggagagagaaaagttttgagtttttgtttgggatttgtttttgaaatgggaggggtattatggggaaaaatcaaatgtagtcatatatgggcaattttaatagatatagatttagggaaataattttagagtgttttatggatagtttttcaaatttccctttaaatattgcctacacccctagcttgaagtaacttcttatgctcactacataataatgaactatttgctctccagataaaataattctcagcatagttgctttctggaatttcatgttcatcatgagcaagtgtgaagtgataccttcaccaggagtcatcttcacactttggagttcatttgtaaaggcatatacaaaagaagattggggtgtgggttgtatattttgacactacaaatattaataaacagaaataaattatcagttcaattaaattcatacacaa

SEQ ID NO: 362807 - DNA, 1065 bp, Cannabis indica
ggcgctgacaaactgactgtgagcaaggcgatctatcattaccacacttcatatggcagaagaaggagagtttgtcgcccaggaacaacccaatgtcaatgaacaacttgccacaataatggcccagatgcacgagatggctgagcgaactggagttctggagcgacaaaatgcaaactttaaggaggagaacgcaacatttaggagtgaaaatgccgcaataaaatcacaaatggagtcactaaaggctaccatgacgactcctggtgttgctcaaagtcggttccgagttccaattacaccaatggcatcattagactcaactcctataagaatagagacccaagtctctaatcaacaaacacttggagggacatcgactccaacgttaggaaatcattctgtcgcaggaggttctcaatctcaacaatctgaacatactgatatgcaaacagatgggacaaactctagaggtctaacaaccagcaatgtggcctccgacctgcctacggtcagccttcctacaactgatctgcctacggtcagccttcctacaactggtcttcctacggtcagccttcttacaactggcctgcctaacgtatagagggactttttgctcctaatgatcaagatattacatcattcataactgagcgagggactttttgctacaaagtcatgtcgttcggactaaagaatgcaggtgccacgtaccaaaggctagtcaatcgtatgtttaccgatatgcttggaaagacgatggaagtttacattgacgacacgcttgtcaaatctttagcagcagagaatcacctcgatcacctcaagcaagcattccaagtattagaaaaatacaatatgaaacttaatcctactaaatgctcttttggtgtctcttcaggaaaattcttaggttacctcgtcacaaaaagagggatcgaagcaaatccagaccagataagatcaatccaaaatatacaatctccaaagtcaatcaaagacattcaacgtctcaacggaaggatagcagcactcagccatttcatttcaaaattgtctgac

SEQ ID NO: 362808 - DNA, 785 bp, Cannabis indica
cgcgttgttttctttgtacaagctatcattctatggctggataaaatatttgagggagagtgtccttcactagaagaaagtgggctagaacagagacgaggatggtcctcatgcaaaagttaaagcaagtcctggtcaatttgatgtttgctctcccaaaactcacccgggttcatctacaaaagacaacacacaagatgagtgtttggacggaatatcgagcgataaataagcaaatatgccgaccaggagtactcaacagattaaagaatgagaatgttcaaagaaaagtcaaaactcaggaagtttgaaattttctcgagttagggcaaaaatttcatgaagcttagaataagcaagatgaaagatatgcattatgcagttcagaaagctagcattatggactataaaattgcatgaaacgatgacaatgaagaatcgcagagtttctaaacctagggtttcctctgaatgttctacggcaaagttgaaaggtgcattcgaaaaaataaacatgcaaaaataagaataaaggaaatcgagaacttattaaagagttagatgtctagattcaagccacgtcaaaccaacgagcagttttgatgaacgcacttcagcaaacttgaaaccaaaaaacctctcttttcgctctgaactcacttagcaaagaaagatggtgaaaatgagtttatgtgccaatgctcattggtatttataggcaagtcacgaaaagaggtaatcatttcaaaaggacctcagacacctcgtttccctctaaaaagtga

SEQ ID NO: 362809 - DNA, 915 bp, Cannabis indica
ctaagtctcttccctaacgttatatatacatattgtctcattacaattgtagacttttgataaccagataaattaaattgcttctaatttagagttataggaagaaaaacttaattgatagtattgtactatcaaatcgaggtaattactataaattaatcatgtatacctaattattatctaattattattatattctaaattatatacaattttgcatcttaagtttattgatttctaacagcactcgataatgaatagcacaaacaatattaatacgctatcttttgtgatacttagcccctgatggtaggacgacacatttgtacttgaaaacttgcccttttgagaaactcgccgagcctaacttggaaaaacccgaatgaataggttttaaaaaattattgggtgagttcgggagtcgtgttccagtgtagaaaaatacaagtattggagttcgagtgtaactcgaacctgtccgatacctaattaaaataataaggaaagatatttatgtatatatatattcttttcaaatttcctaaaaactaaaaaaataatcttatggtctcaacacaacatcctctccaagtctccttacctttttccatctttctttctctttccaaggttgaccctaggcataagtgaatttggcccgtgcttagggcccacacttttagggagcccaaaataaaaaataaaaggcatcatttgacatttatttaagcaaaattaagtgtattataaacaacaaatattcatagcttgatttgtgagatgtatgacacattatacaatggtgtgtattcgagtctcatgccactctttttcaatatattttttttaaatatttataaaagtgagggtcctaaaatttaaattccattagtagttttttttttcactttcttt

SEQ ID NO: 362810 - DNA, 603 bp, Cannabis indica
ctttcataaaatatcaattaaaacgatggtatgtgttgatttggatggtttcatgtggtttatgtgttagttcatgaatgtatgtgttgtacggaacctttttcattgcaaaatattttttctgtttttgaaaatattttatttggattccttgtgaaaaattacgcattttttgtttttacggaacttaatttcgataaaaactgaaagaggtatgaattttggaagattggagtccatggctgtcgagtgggtgcatcaaggcactcggacagcctgggttatgcgcgcgtgtcctgaccctgcagcacgcccacgggaatcatgcatcttgttgaggtttctcggcagatggggctgaaactctctacgtccccgtgcgtccaaggctttttacagcctctcatggctgcgcctgcagcctgttgggctgccttcacccaatttccgaattttgtgggattttttcgcaaaatttgatattttccaattttaaaaccctaaatttaaaataaaatattatttttcaatatatttgaacttaaatatcatatttcaaattaataatatttatttttaatgattattattaattttgatatt

SEQ ID NO: 362811 - DNA, 943 bp, Cannabis indica
cattgtgtggtggccccaatgctatggaacaagttatggaatagcaaagtgcttgagcggcataagatcctttggtggtgcattctctcagaggcgctccctgtcagaacagtgatcgggaggagattccaaatagaggatacaagctgtcctttgtgtggagtgggggaggaatctgttgaacacctatttctctcgtgcgatgtggcgttacacctttgacgctcatctcctttgggcatatatccggtctgtggcaatgggatttgtgtgtgggactgggtgaaatttctttggaatcttaacaataggggtatccgagtggaggaggtttttctttatgcttcgattgtggttgataccatctggagggcgcgaaatgaaaaaatacacaataaaaatcacccggatgttttaaaatgtattgaccttattcatacttcttttgtaaaattacatacttctctggtgccatgctcgactcctattttgacggaaagctggaatccactccctgaggattggatcaaactgaattgtaatgttagagtgggattggcaagcatgtgcacaactattattgctaggaaccacttgggcaaggtgattcggatccacacgtctcagttggactttttggatgctttatgcggagaggcggcgacttgttgttcaaccatttttgtggcatttgacttaggtttaaagtttattattattgagagtgactctatactagctatcaatgctctcaatgggaaggagtcccattggacacttgagaactttgtctccttttgtatgagatccactctttcttttattagttgtaactttatgaatgttagtaaacgttgtaactatgttgcccataatgtggttaagtgggcttttacccaccagaggtttggctgtattccggtctcctccttgccggagaacc

SEQ ID NO: 362812 - DNA, 853 bp, Cannabis indica
cttgtaataagtttgtaaatatttttgggatcccaacggtttaaaagtttaaaagtattacaagttttattttcattccgattaatttaaaagtttaaattctgcgctatttttgattaataatcccaaattaggggattaggattccataagcattttgggtagcgtgcctaattatttagggcgttacaccacaagaccttaggtctataggatctcatattggagaggtactaaaatcgtgtggcatcaagtatgggcaaggatgttgagttaggtctgttgccccaggagaatttagttgtttttctcctgaacgtgtgagtcgagaagaaggttgtagtacaagcgagtcatctaggataggtgcttggggcctcgaacaaataagagttggagcagtactccatcttaaagattatttcaaggaattttgtaactacctcgtcattgctcctttccagctggtaccaaattcttatagaatataggccagtgaaagttttatatcatattttgaagtgggagtgtcagaccccactagaaattttatatttttattcagtgaaggcctgtcccgcaaggaagcgaggagcaagtggtttccactatctcgagacccacactgatgatcaaaggatcattgtgaggctacccaacaaaaataaattcaaggatgaattcttttggacataaggtctcgcccccatcaatacaactgcgtttcgcattatacataagtattacctcatctcaaaaacttggtttcgagttttaaacttaattaatgcatgcatttacttattttatgttgtattgacagcagttacgaggagtgttggaaattatttta

SEQ ID NO: 362813 - DNA, 625 bp, Cannabis indica
tggatcatcttccatcattccaatgccatcctcatgttcttgaagatacactatgtattcatctggattaatagcatttcttctttctctagtggatcgtcgcaaaggcacttgttcttgaggttgttgagtttgtacctctggggtttgattgactatgtttggttgctcttgatctaaaacttgatcaatattaggaatggaatcctgaatattgtcaaaagcaactattggaataggaatcaactcatcttcaagagaagtggttgattctaaatcctcctcaaaaacaaagtctttaaccgtatttctccccccaaactcaatatcctcaaaaaactttgcagttcccgtttcaaatatattctttactttgggatcataaaacttgaaacccctagatcgttcagaatatccaataaagtagctgctcacagttttgggttccagcttcttttcatttggcctataaggcctagcctcagctggacatccccaaacatgaaagtgcttaagactaggctttcgccctgtccaaagctcataaggtgtttttgcagctgctttagttggtaccctattcaaaatgtaggctgctgtcttaagtgcctctccccagagtgat

SEQ ID NO: 362814 - DNA, 961 bp, Cannabis indica
tttgttatttgagttattttccttagaacactatgaattatacacccttaaatttcctctgcaagtgatagtgtattctcctctttctcaaatggttggggtgagtttggacaataaggagggtactggtgactccaagccttaagggagggatcccaatgccattggtaattaaaatctgtcatgtcagtcaacaaattcatcatatcatggcttctccttaacaaaggctctatagttacctctgcttcataatctacctaactttttatttcatcatcaagtctgttataatagaatagagtaaaacatccacttgagaaattgggataacatctctatccgagtaccttaaatctccccccacccaagcagaatagaatgactcattatattgttggaaaaaattcacaaagtactgatcttgatataacatttggatttaccttgcaagtcaaactcattcagtaaaacattagtaaaattaaattaaaagaaactaaattagaatagaattcaactatattaatattaacgaaaataatccccagcaacagcactaaaaacttgttatggatttttctatgcaagtgtacgcaatcgatttcaagtaatataatgttaagtagagtatcattccctcaaaattgtagttaagtactaataaattaaattcctaattctatttggtaataaaaaattaaaggacgaatattataatctagtgaaaataaaaacaactaatttaggatgaaaattaacaatggttagagtttagggttattaacttcaattgaatctattttatatggatttatataacaattttgaaatactaatttctacggaataacgtgcttactggagtaacctatatttggactaggatatataaatctcaacttatttataaattttttactctcgtaataaatttaaatatataagaggtattaagtaa

SEQ ID NO: 362815 - DNA, 574 bp, Cannabis indica
ctaaagggtatgatcatacccgcctagttaaaaattgacatttagaggcagatttttgatgaaaattataggtatatatattgttaataccccttagaggcatttttagaatcaagtatttggggtgtaagtcgagccatctatggcgtcagttagccatatcagcgcatgacacgtgactgttttagcatatgtcatccgttatttatatctaactatataaaagctccaactagtaaaactataatagtaaatttttctttacatttgaaaaaaggtacatttgacataatctaaataatgttggaaaagaatcacgtttcgcctcattttgttttgaaaagatgtattctatctccacatgaattacaaatttaaaggaataagatttcaaattataaatgccaaaccaaacaaatgaattcattcactttaagaaaagtcattctattcccagatccattctaatcaactaaatactaccctagttagttaattacaacttatacaacttaataacatgaactaaaactaaaataagaattatagtaatttataaattaatatgaataaa

SEQ ID NO: 362816 - DNA, 1188 bp, Cannabis indica
atagaatccgtcagggacggccaagaccgaaaacagtaacagaagtcagaagcttcttgggtctagctggttattatcgtcggtatgtagaagggttttctaaaattctgagcatccttaagtgagctcaccaaaaagaattagcgttttgtatggtcagacaaatgtgaggctagtttttgggagataaaatagaggttgattacagctccaatgctagccttgccttctaacaaagaaaagtttgtggtttattgtcaggacgggtcccgggcaggtagctagtatgacacaaaagtcacctcagttagcagaggacatggtcagatctaacattgagtttgttgtaggcaagcttcacaacttgatgctacaatctgatctgttagaacgaattaaagttgctcagatgactgatccagagttagtaaaaattagggaagaggtttcagctggtcaagccaaggattttaccgtgtcaaacagtggaatgttattgtttaaggcgccagggtttgtgttccaaagagtgtggaacttaaaaacaaaattctcgaggaggttcataccactccatattccctacatcttggaaccaccaagatgtgtcaggatcttaaaccttacttctggtggagcggaatgaagaagaatgtgatagaattagtatcgagatgcttaacctgtcagcagatcgatgctgaacatcatagatcggcagggttgttacagcctttaactgtacctgagtggaagtgggaagacatcacgatggacttcgtagttgggttacctagaacctcgggtcagttttattctatctggattgtggtagatcgattcacgaagtccgctcattttctaccagttaaaactacctattcagtggatcagttagcagagttgtatgttaaagaaatagtaaggcttcatggggtaccaaaattcatagtttcggatagggatccgaagttcacctctaagcttcggcaaagtttgtagtgagccatgggtacgaaattaaaatttagtacagcattccatcctcagacagatggacagtccgaaagcacgattcagatattagaggatatgttacgagcctatgttatggattttgaaggctctttgagtaagtatctaccgttaattgaattttcatacaataacagttatcagagtacgata

SEQ ID NO: 362817 - DNA, 793 bp, Cannabis indica
tagttttttattctgattttctacaaccgagcttacaaatatagcctctattgcatctggtgttgaggctgtgcagaagatggttagtttttcttaatcatttttgtattctttttgttttttatttattttagcgttgttttacggttgttttccataatttatttatttgacgttgatttcactattcttgctctatctcgccgaaaataatggttattttttttgggtgttctcgtattgctatggtagttctatccataggtgtgaaagatagagactataaatacatttcttcttctttctttatggttgttttgtgatttttttattctgattctcctataaatacattagacgagctcacaggaaaaatgattttgagatgtgtggttcttttatatttttctaagtggttatatctgcttctttattttacatttgtttttgtgttgttttagtagtttttttattctgattttctaggattaggcttacaaatatagttgttattgcatctggagttgaggttgtgcagaagattgttagtttttataatcctttttttcttttgttttgtttgatttgttttagttttgttttacagttgtttttccatgattatttatttaacgtcgatttcactattttttctcaatctcgctggaattaatggttattttccaactgttctagtattactgtggtaattctatctgtgggtgtggaagatggaagcctcatttttttttggtatttacagtataaaaaaaaaagggaggacagtataaat

SEQ ID NO: 362818 - DNA, 714 bp, Cannabis indica
ctgacgctagcagctacgtccggtgacttttctggcaccgacagtttactttgaaaaactcatcagaattggacaatcgccgaaaaaattaccaagaaatcagtttcttggtatttttttgacgacaatggcaattctgacgatttttctggcgttggtagtaactctgacaactaatacaccgacaactactctagtgactttttcagtacccacagctctaggaaattcatcgaaattgacattgtcgctgaaaaaattaccagaaaaattaccaagaaactggtttcttttcttcatcaagaaattggtttcttggtattttttttttggtgttttttttttcttctatttggttaattgatgaaactggtttcaattactttcagtgtatatcatttttgttttgttttcataatctttattattgttgtgtaacaaaattagttccttgatgaagaaaccactttcttggtgaagaaatcggtttcttgattaaaaaaccactttcttagtgatttttctagtgattttgctggcgacaacgccaattctatcgacttttttgacgtcggcaataacttcgacaattttttcgacgtcggcaactattctggtgacttttccggtaccgacatcaaactccagaatagtcgtcgaaattggcattatcaccggtaaaactactggaaaaatcactaagagaccagtttc

SEQ ID NO: 362819 - DNA, 402 bp, Cannabis indica
tttttataaaaaataattgaattttagtttctggaactatttttattggatattttggaaaaaattaagcaattcatttttttacaaaactcaatttcgattttatttgaattagttatgaatttttgaaaatcggaaaatatcaaggtggcatcacccccacacacgcaggcggatgagcctcattcctcggacgcgttggcttcggacatgcttgtgtccgagttttctctgtcaaacatgagcgccttgttcgaaatcgtcccggtgcaggcacgaaatgggtgcttgcagcctccagcgccgagaaacttctgccagacaccctcgtgagcgcgcgcgaacagtatgcaatgaatactgtccgtaccacttacagatttttttcgttttcttcgattt

SEQ ID NO: 362820 - DNA, 681 bp, Cannabis indica
gacctaagatcaaccattgatattgacagaaagatataacggtaagtttatgatatttttttcaagatcaatatcggtcccttccaatgtatactccatacatccgatactagtatactttaccacttccctagaaaggacataacacttatccaaggtgtaagtataccttatcgttgattatcatgctagtctaaatatagtgaactgacaaatcattgtgttatcccaatttttgcactctcacgtggcatcacacgatggtgacatgtaaaaccaactttacatacctacttgcaagagatatgccgaacagagcaccacatatatttgcatggacaaaaccttcttaaccggggagtgagcaatccaaatagcacgccaacacgtagcagtttcagcacttgcatcgtgagtcacaagagaaatccctataattttgggatcatatcacagagatatggcaagctgtccaaatgccttgatcaatgtattctatatttaatgtgtaatcttggcaattatatctgttgtaatcagaagggaaacttcttccccacagtttatagccctataaatagtgatccattctcactgggcaaagggtcgaaaaacttatctaagaatccatattcagagatattattttaaaagctctaagaggaggaatcatttcattct

SEQ ID NO: 362821 - DNA, 703 bp, Cannabis indica
taaaagagatttaagggtttatttgttaattaagagactttattaagtctaattaataaataaattaaatggtacgacgacacgaaaattttgctacttgtatttgtgttttatcattttttttatgttacgggtcatgttcatgtctaccatctaaaataaatttcaaaattcaacataacacgaacatgacatgatgacattaaaatcaacaatttagtttacaacccgccaacacatatgcgattttgtgggttcgacacgacatgaacttattcgagtcgtgtttgtgtctgtgttttttaatttcttcgtgtcacgtgtcgtgttcgtgtcagcaacttttagtaaatttaagtcctcagcacaacacgaacacgacacaccaacactaattgccactccaactgtaaagcatgacgagcacaagaaagttcaatcccaatccaaatggcacatgtaacattatttacaatgcatgattggctacagtatgtgctacttgattagcatccctacaaataaaattcaaaccaattacacaatcatgtgtaatattaatttattttaatatgaattaaaaaaaatgtttattaatttatttttgagtaatttatggcgtaaatacttaagtttaactctttattgtagataaatacctaagtttaattttttacggtaataatacctaagttatatttct

SEQ ID NO: 362822 - DNA, 548 bp, Cannabis indica
tattattattattattattccttgagaaagtcttcgaaatgaaaaacaaaaaaatgatgtggtattttttattgtggtcacaaatatgactgcctacctataaggttgtttgtctaaatcatatatggtcatcgattggcatcaaattcagtgccatggaaacattggagggtggggttcttttagttgtccaaagtacatacatgtggtaataattaagatatatttaattattaattacccattttaatttgtgttttattttttaattttaattaatgtaagtttcatttggttggagatatggcaatcggtgtttgatgatcttaactaattaatgatcaatatatataatgcgatcgatcttgattcaagatccaaggtagaccttgatcgatcaaatattttgaaaaagaatattccaaataggataattatttatgcatgcatgggaactaaaaattatataagtatttataaatttagacaacaaaaaataatgcatgcaaacattaaaaaccttagctttggttattatgaatctagct

SEQ ID NO: 362823 - DNA, 510 bp, Cannabis indica
cgtgggggaaatatgcatccctagttaaaatccttaaatgctcttctatataaaaaaaaaaaaaaaaaatagagtaatttgcgtgtaaatgcttaagtttaattcttgattataaagaaatacataagtttaatttttaactataataatatctaagttatatttctagaactttcgtaggtacctggccgttaactgtctaatcattatccacatgtcattttcttattagtatatttaaattaatttttaaacaaagtaaacatttaatgaccaggtacctacggaagtttcgaaaaatataacttaggtattatttgttgataaaaaaaacttaaatattattgccgtcaaaaattaaacttaaaatatttatctgtaattaaagattaactttaaatatttatgcaataaatattttttaatttcttcttctatttatttgttcgtatactcaaaatattatgtatatatatatggatcattttttaatgggtattacccatgaat

SEQ ID NO: 362824 - DNA, 764 bp, Cannabis indica
gaacagagagtacaacatcgactaagtattgtagaggagaattaatatctaattcttcttctgtttgtttagttgatttgtgaaagtttattttattttatttattgatttcttatttagctctagttttcactttttttgttttaaatatatatatatatatacttcttaaatagttcttgagaaatacataaaatttattcatacactatgtggtatcattttatactttagtttttttttttagaaaatataagagagagttttaaaaatatatttattttattaattaattgtcacattttaattaagtaaaagaagtttttagaacacttaagtaaaagtaagtttaatatttgtaacacttaattaaaagtaaagtaccaaatatcttggtaattggtattagtattagagtaggtctaaattgaaaacttttcaaagtaataaaggattttgtataaatagtaaaagagatctgaccgattacaaatatatatataaaaaaaaagtaagaaaataattaaaaaacaaagagaaatcaataaaacaaccaaaaataatcagaaaagtattatcgtgataactataaataaactataaaacaaccaacaaaatggtttattatttttactaaagaggtatttttggtgccgtttggtaatactttttgttgggttttatgtcctaaataaaactcatttcaatataatcagatttacttattaatacagatctgaaataacatttaatgttgcatggtt

SEQ ID NO: 362825 - DNA, 504 bp, Cannabis indica
ttgtctattggtacattaactgtcctttagtatttttacattagtgtctaatttctacttgacttcattgagtatttatatttatacaattcactacttattaagcttctctactttatttttcaaaatatgtaaaaaaaaattattttacctcacatattttatattttatattatagtatacattaatttctttatatatttatttttatcatttaaatgttatatttataaatatcatttattcatttaaataaaagattttttcatttttacacttaaaagcaattttttttttacattttacggaaattcacatagcaactaacggagcaacttaaatcacaattaaaattcacatgtaaaaccgcaataaccaaaactataaatttaaaaaatattaaaaaataatatatgagataatttccataataatagtatatattaattacaaaagtctttaaaaaaaaagaaaataaaataccagctaaaagattttttttt

SEQ ID NO: 362826 - DNA, 646 bp, Cannabis indica
ttttacttgctaatgacaaaagaaaaaaaaaaagaaaccaagtagacaagctttatgaaacaattttgggaaaccaatgagaaacaaaaataaggaaacagatttgtgacacaaatagggaaactagaattcaacaataacaacttggagttttttatttttattatttttgaatttcaataacaaaaagggaaactaattgtcagaaaaatttggagacacgaaattagccaaaaaaattaagagttttgaattttcgattttttttaagaagaaaagaaaagcaaagacacgatgtttgacacgagaaaattatcagaatgtggttctaacagttttcaaatttcacaaagaaaaacaaaagagatgaaacacgaattgacagtaaatagaacacaagttaaacaagattatagaacatgaattgaaaagaaaaacacaaaagatagataggccaaaccaaatgaaacgaaccacaccaacaattgtgatgaaacccgataccaataatggcagcctctaagaattactcaaaatttggatgtggaaccgcaactgaatgcttagttaagcatgaaccttggtatgaaggaagatgccacaaacggtgtggaaatccgtttgataagtcaggttgaacgccaca

SEQ ID NO: 362827 - DNA, 566 bp, Cannabis indica
agagtacacaaggatgtcgtcgataaatataataacacaaatatcgaggaaatccttgaatactctattcataaagtccataaaagctgcgggagcattggttagtccaaaagacataaccagaaattcttaatgccaatacctagtgtggaaagccgtctttggaatgtcctcctctcagattctcaactgacaatagcgcgatcggagatcaatctttgaaaaggtcgtcttcccgtgaagttgatcgaaaagatcatcgatcctaggtaaaggatacttattcttaactgtcagtttattcagttcccgatagtcgatgcacatacgcaaagacccatctttcttcttaacaaacagtacaggagatcctcagggtgacacactaggccatgaaaaccctaggtcaagcaacccttaaagttgaattttcagttctttaaattctgctagagccattccataaggggccttagaaactggtactattgcaggtgccaaatcaataataaagtcaatttctctctgtggtggtaaacccgaaagttcatcaggaaaaccatcta

SEQ ID NO: 362828 - DNA, 815 bp, Cannabis indica
tttgagttattggtagtactctcagtagatccacgtcgacgcatattagttggttgttgagtatttgagataccatcaaactcatcgtatttcttcatcatctccaccatcatttatgttatcatcaactttaaattccacaccagttgcatcatcatggcgtattttttttttcatcatcatctgcattaccaacatttgtcctagtagcacgatctcgtccatatatttttgctagcttgtggtaataagggaatgattttctatataaaccacttgcatcttttcgtttctggacattcacaaattaaagcatattaagtctatgttctcataaataagcaatattcacatatttacatatatataatcatagtatatatttaccttcacgtactcatcaaatacacttttctcacacactaacgtactatgtgcttcatcccaattgaaaccacttaataataacaattctgttaaacaagaatactttcccttcaaagtcttaatacgtgatttaatatgaggtgatgccttcaagttagaacctggtaattttgcctctagcatactctccatttgttgtaaataactatttttaaattcacaatcagctcgccatgtaggatttcaactcaactctagaaggcagtcaatcaatgaattatcttgttctagcgtccaataatatttattcttacctcttcctctttgatcaacattagagtttgagctcatcctgtatattcatttaaaatttctcattataaaaataaaatcataaatttatctatgcataagcacatcaaagcata

SEQ ID NO: 362829 - DNA, 533 bp, Cannabis indica
ggatttcctcgataattttgtaactgtatttatcgataatatccttgtgtactctcgatcagaagcataacacgaacgacatcttcgaatggttctgcagcgacttagagatcataaactctaagcaaagttcaaaaagtgtgagttttggctgtcacaagtgtcctttctggggcatattgttggaaaagacggaattatggttgatccagggaagattgaggcagtgaagaattggcctagacccaaaacagtcactgaaattcgaagttttctcggtttagcgggttattatcgacattttgtggaaggtttttccaagattacaatgtcgttatccgaattaactagaaagaatcaacggtttatatggtcagataagtgtgagaaaagtttccaagaactgaagcaacgaatgattacagctcctgtattggccctgccatctaatcaagaaaagttcgtggtgtattgcgatgcatcaagacagggtttcggctgtgtactaatgcaagcagataaagtcatagctt

SEQ ID NO: 362830 - DNA, 499 bp, Cannabis indica
ggtttaggttgggttcgagtcccaagttccaatctctatctgaatctggattcatttctgggtctaagttcttgattctgatccttgtctgggttcgagtttgggtccgggtccgggtccgggtgtagctttgggtctgattctaggtgtgggtttgagttcgggtccgagtctttgtctgggttttatccaggtctggaccccgatatgggtctaggttcgggtctatgtccaagtttgggtcttgactgcgggtcctggcctaagttccagtctatgttccggtctgggtacacgattgtgtcctagcctatgttccagtctcattttgggtctgaggctgaggctaggtctgtgatcggttttagggctaggaccgagtcctgatcacggttctaatcttgttctagggtcctagttcagcgattcttattcaggtttcgaatttcaggtctcaggtatggtcttggttcgagtttggtcttcgtctgggttctgg

SEQ ID NO: 362831 - DNA, 750 bp, Cannabis indica
tgcaaggaactttttttgctttgccgttctcggaagtaacccaacgactagttccgcaaactggacaagcctccttggatgcattctccttataaaataagcaacaattatacaaacagacatggatagagtcataacccaagcctaatttcttcaatctcttttttgcctcgtagtaagttgctggaatattattttccttcggaaatgcaaactttaaaagcttcaacaattcttcaaagatgttattaggaattttcctctaacttttaaatgcaatagctttgctaaaaagttgagagacgaaatccaatcacaaccgggatacaattcagcttcaatttcctcaaataagtcatcaaaatgtgggtttgtggttggttgttcatcttctccttgtacatcctctgttgtcgagggaaagaagtcttctagaataggaatcatttcatcctctgattcaacatcgccaactgctacatcatcgacagttgcataaaccctcgatcaaatacgtgtgctgtaaccctatctactttttcaaacctactatttatacatctcacacaaggacatcgaattcttccatcacaatgcttatgttctgatgccattgctaaaaaggcttgtagaccattccaaaattcatggcaaccacgatttctgatttggtccaagacttatcgattgtcgccatctacaatttaggcgacaaataaagtattaaaaatttgaatgatttgtaaagtg

SEQ ID NO: 362832 - DNA, 631 bp, Cannabis indica
tataattaattcttcgttttataatttaatttttttctaaatttatttataacccaacatgcatataagtaaattcacttatgtcacaagtaacacatacaacttctcaaattccaattaaaattggctaaagattctattttaatacttaatcactttaattacaagaccttgtgtggttttgcccattcctatctctgctgactacttctagtcattgttttccaattccaccaacattttttttttttttctaatgtcactaattgcataacaaaacaagttttcaataaaaaataaatgtcaacaaatgcattaaatgttgcaaatatcacaaaatttctctttcaaaaacagcaatctgtaaatacaatgaatttgtagtttcaaatagacaaatacagctacagttacttctttatttaacatttgaaaagcactttttccctttaggcaaacccaaaattacattttaaaaatttggtaaatattattttggatttaatgttttgtaaaaattataaattagactatttattttgtaaattgataaattagatcttgtattttttaaaatcgcactaaatagcactctaaatttattttttgtcaaaataaaacttaatagtaa

SEQ ID NO: 362833 - DNA, 544 bp, Cannabis indica
aatgaataattgtcattcctccatcttgattgtgaaattatctatattcgtgtttaattccatgtgtaagcttgatcaccttctacatgttctatgatctcaattcaaaatctgaaaagtgagaattgagaatgctaaaattggataatcgaggttccatgtgaaacaagagtatttgcaggacttatgtgacacttagattattacttaatgctgattacatgttagtttaattaagagattaattagagaacatgtggtttagaacctaaaagatctgaaaagagttaggttaatatataatctgtcattcacatcaagaaaaggatagcaattaggcattaacaattgggtaaacaaacaacaagattctcctccctatttgttcatcttgattaatattcacttgtttctttaagtttcttgaactacttttattcagttttaatcttgaaaattatcgattttccaaatagaatcataagtataatttagtggtaattaatccaattccctgtggttcgacctcacttgcgtgagttta

SEQ ID NO: 362834 - DNA, 545 bp, Cannabis indica
ttctccaatccactctattattgtaatggattctattcattaataataataatttttttcaaaaaaactaaataaataaattgtgtagaataataatgaaaaataaaatttttagagacaaaaataaaatatgtaagaatatgcataaaaaatattaattttatggagataaaaatataaaaattttgtttatagaaaatcaaggaacgtccaattcaaaaagaaaacgaaagaaagaaagttaagggacgtgaccactactacaaaaatgggttttcccgacgcttttaaacagtcgtttaaagtattgtcgtcggtttctataaccgtcgcctattattgttgctactgttcaaaaccgtcgggaatgcttatttttcccgacggttttgaacagttacttaatttttttagcgacggtcccaaaaaaaattcgtttttaaaaccgtcgcgaaaacgaatatttgtagtagtggacccacaagcctctctttgcctcgcccctccgaacttgtatctttataatttataatgttaaatataat

SEQ ID NO: 362835 - DNA, 710 bp, Cannabis indica
taaatttattactttttcatctactttccaaaaaatcaaaatctagaacgaaactaaaattatttatcatcgtaaaattgcgatttctatacaatcatcaaatatgcacataaaccaacatgaacacatccaaattaacacaatcattgtttcaaatccatatttcatgaaattaaatcattaccatggctctgatacgagttgttggggattgttttgacaggatctagaatttctaccttgtatgttgtttaacatcttaaaaatgaatttaaaaaataatagaatctacacacatataaagttcaagaaactttacattggttgcagtggaattaaatgactcattttactcagatctctaacccttgttcctctctatcgcagagtattatcaagatctgagcctgattctcctttagatgttggattcttcatagtcttacacactatgattgagtacttacttgctatgtgtgggcatgtactctatcactataagggatgaaaattgaagaaaagagagagaggaaggattcaaaatagagagagaagagagaacgctcaaatttcactaaaggcgtaagttgcatcaattgttagttttgagtctatcactatctatttatcggaatccttctaagtttaggttcgaataatttaacattaaaaaattgataataaatggtaaaaagaagcttaagtggccg

SEQ ID NO: 362836 - DNA, 540 bp, Cannabis indica
tcttaataaataccaattaaaaaaacataattgttcatgctaaattctggtaaaacaaatctatacaccaccgctctctaaaaattttcatattgtatcaaacgtaagatccagcatactatgctcgatgtgctctattacacacatcccgcaatcactgctgtatgagacaataaaaagtaaataaataaaagtatgcaaattaaattcaagttaaataataaaaagtcaattgtaattaagttaccttgattcgatctatctacaatgctcccgtcgatgactttgaagtaaaagttctaacctagctctctgagacgattagttgaggcatgacgatcattttatgactctcgaataggccgaactgcaacatcaaacttgggaatataatttcccacaatgccaagtgactcttcaattcatccagggaaatcgatctgaggctcgagtcaaatatgctcaacaaccaatgatcaaagtctacctctaatgtcacccaatgccttgcacaatgaaagaagaggaccatatatattc

SEQ ID NO: 362837 - DNA, 886 bp, Cannabis indica
ataagaagatagccaggatgatcgtacatccatagtaaaaggctttgaggataaataatagtatgttcaaaaatagagtgcctgtagaccaaaagaaagaacatgaaagcctacaagaaaaatatgaataaaaaatcagttcaaatgcataaggccaaggccctagaagaatcgtacaggtagagaagaaccagatagagttactataggaaccacgttccaggctaaggcaaggcagagttcttggtaggttccaagccaaaaggcagagttccttgcaggttccaagccatagacaaaactttgggcaaccgtacccaagggtacttaaaatgccctatagcagagggacgccatgtgtgtgcttttattaattagtttataataataaactattagtttaagaaaatttagtttaattaaaacttttaataaaataacttaattcataactaaaacttttcttacaaaataccaccggttttgaggatccccttgtttataaacttttacaacatattacaaaatagctattacgaaacagggttatattttcaaaacacaacaaaagatggatcttgtccactaaatgccaagacacagcggttgatatgtacattaccgggagacctctgactcatagctggtcaagttttccttttcccttacttgcaccacagagcacccgtgagtcataaaaacacaggaagaaaaacagataaaacataatcaacacataaagcataatgttatcccaattttcacactctgacgtggaatcacatgaatggtgacacgtggaatctagggctgtacaaaaaagtttgtaaaccgcctaaaccgaataacccgcccaaaccgaaccgaaaaaaccgataaaaattac

SEQ ID NO: 362838 - DNA, 922 bp, Cannabis indica
tatttatagggctaaatacttgatggaaggtttcccttttacttacaatgtctatagttggtaagaacatatattacatatttagaatacacaaattgtgggatttggacaacttgccatatctctatgatatgatcccagattatagggattgcttttatgcttcacgatgaaagttctggaattgctaagtgttaatgcactgctcggattgtccactgctcgactgggaagacattatccgtacaagtgtatgctatgctctgtttggaacatctcttcagccatatgtagggaatcaggtccacgtgtcaccagcatgtgctgccacgccatagtgcaaaaaatgggataacatttgtcgccaagtctgcacgagacttccaatgttacgtgtagacttcactcgagccgaccttacatctgaatgggtgacacgtgttggatgcgtctgttcgtgatccgatgtgactctgacctggcgtcccttcaactttggctaattaatgctctgattgaagtataccccgagacgcgcatttcactcgcacgcttttgacggttactcttcttcaggtacttgattgcttttaatttcgcaatatttgcttttgggggaaaattgaagcgtttgaaattccaatcgattacacccttccactaatttgcttacaaatagggcagaaaatccttataaactacttttaccatttttcttgctaagtacttttagagcgaaagtagtattttctcttgaatccgctgtggaattttagcagaaaggaccgatcagctttgtccgaccaacatcaaagcttcgaacagtgagaaagtttcttatctttttctcctttattcttgaatcatcaattttgtgggtttccattgtagaaaattcaatcgttcttgacttgttttagga

SEQ ID NO: 362839 - DNA, 1760 bp, Cannabis indica
gtcgctgccttaggtgttgacacctagcttcaatttttagccaaaagattaatgtagttaatcttattttcatttgaaggaaaaataaagaaaattaagaaagaaaaagccaaaatcaaagaacctctctctttaccttttaggaaccaagagatttgctgctggtttttggtgtttccagcagtaatttgagcagattataactaaggtaaaccctaggaacttttatctattgatttctttaagttctactttgtttggttatgcaattttgaaagttacgggctgttagggtttaaaggttgtgtgatttgatttctaagctaattttgagttgattctaggttttggatactggttatgttgtgttgtgatggaattgcacaagtttgagctttgaaactcaaatttaggtctttaatggcatattgtgattcagtgtgtttttttgagttttattggtttgaatatgttgtgtatgtcctgtttaggtagtctagaaggttttgtggcatttggataaattttgagcaagttggaggttgtttggggaaacctagtgaaaaccggttactcgatttgctatgtcttgtaaaattagttaactggttttgacagattcctcgaacaactcattttttcaattcttgttcatttcagtgccttagatgagtgtttccctgtttcctagcttaatgtagtccctaatgataataaaagaaccttgagttataggtttgggtttcctgaaatagggttttggacatgtgatttacccggttttaatatgtggttagggtatccatctagcacaagacattccgttcaggtcagccaacttagttaaatctggaaagaaggtaagaactacgtataatgtgtaatatgaatatgcgaatgtatgtatatgttaagtgtatatgcatgcttatatgtttgttaaactaccaacacttttacagatatggtacagagtgcattaatatagtgtatattgttaaggagtacattatggtgttaccagcataagtacaggaaagtacgaggtgtgtgtggtatatcactcagtggtagtcagggtacgaaataaaccctaccaacactcgtacaataaggtacgaagtgtatgtggtacagtggttgtacatgtcatggcagcgcgacctggagtgcttggtctcgggacatctggggttgtcattttgtagtcgttgtgcgaccatgattatgtattttgtatattttgtataaaaacttgtaaatattttactgaaggctataaagcttaattattaatgcaaaagttttattttgacaggaatttcaagagaattctttgattagcaaagatagcactataattgaaaatcactgtagcgtgccttaacattagggcgttacaatgacggaatcaaagggctgatgaacgtaaggaacatcttggagcttagatgaaacctcatatccctgggtgcgcttgaagatgaaggatacagatacaaatccattcacataagcttgacgatcaccaaagattttttggtagtaatgaaaggagagaatataaatggtttatatgttctccaaggagagattgtcccagctggagaggcaagcatggtgaaagggctagaattggatatgaagttgtggcatcagacttaagacatattagtgaacaaggcctcaaagaactgcacaagtaaggtataattgaaaatttaaatcttgtgcttaccattttgtgaagcttgtgtttt

SEQ ID NO: 362840 - DNA, 587 bp, Cannabis indica
atgggcctatataatcaagctttcaataagtagtactagaatttaccaagtaaattttttaactgattaattcctccttgtgcctttatagattcgaaatttcactcttaattatatagaacgatctatatgtaccaagatataaatacgttatgagttatctattgttacaatccaaaaagtcaaagatcttctatagatgatttacatcgaaaaatagacaaatttacagttttacctatttattcttaaaaagactactactacaaaaatttacaattaccaacacttattcaacaacattcaattaaaaagtgttgttaatttatttatttttatattttgaataagtgttgctaataactctcacatttttaaacttatcttttttaagtaatataaataagcaataacatcacttctaaataagtgttgttaatacctataggtaaataaaaaaataaaggcaaagtaattaaattagaaatcaaattgatgtttagtggattgtaactactctgtaaacttctatttatatatgttacatatagatatatatgtatatatattaatatgagatatattat

SEQ ID NO: 362841 - DNA, 584 bp, Cannabis indica
aataacatcccactatctgacatcataaaatctttggcttgaccagctcaaacctcttctctgatctttactaattctggatcggtcatctgagcgactttaattcgttctagcagatcagattgtagcgtcaagttgtgaagcttgcctacaacaagctcaatgctagacctgtccatgtcctctgctaactgaggtgaaatcttaatcatactagctacctgcccaggacccttcctactcagggcatcgaccactacattggccttcctcggatgataaaggatctcacaatcgtaatctttgactaactccaaccaacgcctctgtctcatattcaaatctttgtgagtaaagaaatatttgagacttttatggtcagtatatatttcacatttttgtccataaagataatgccgccaaattttcaaagcaaaaacactaccgcggccaattctaggtcatgattcggatatcgctactcatgatcttttaactgtacgggaggcataagcgaaaaacccgactcggcgttgcatcagcacgcatccccagaccttttttggatgcatcgcagtaaacca

SEQ ID NO: 362842 - DNA, 578 bp, Cannabis indica
tattaaataaataattttggcattaataggattgaaagtgaaaaaagtggtattggtaaaaaatagataaatgattgagaaaaatggcaaaaatctaactagtgatggacccacataaggggtcggccacttaaccctatttttgctctatttttatcatttttttattccaaataattcaatctaaccctaatagaattagtataaaaagaagagtaaggtctcactatccaactaatgcttctatagctttaaacctagttttcattctgacagagaactagtgttttgagacttcttcttcttgttttctcttttctaattcaaaattcttagtcttcttcactatcaaaatttgagcctcaatggttgagtgcatgcccacccatagcaagttagtcttcaatcatagtgtgtaagattgtgaagaatccaaacaattgaaggagtgtcgggctcagatcttggtgatactctcctacagaaaggatacaagggttagagatctgagcggaatgagtcatttaattttgctacaaccaatgtaaagttttttcatatcttttatgtgtttattt

SEQ ID NO: 362843 - DNA, 497 bp, Cannabis indica
aaacaaataaaactatagtgattgccgaagttgtcactcgtattggaaaagtcaccggagtttactgtcggcaccgaaaaagtcgtcggagtagccgccggtgccggaaaagtcaccgaagttgctgctggcatcgaaaaaatcgtcataattagcattgtcgctggaaaaatcaccaagaaactggtttcttggtcatttttccggtaattttaccagtgacaatgccaagtccgacgactattctggagtttgatgtcggtgccgaaaaagttgtcggagtagttcctggtgttggaaaaatcgccagagttattgccggcgtaaaaaaagtcgtcagaattggcattgtcgtcggcaaaatcaatagaaaaatcaccaagatcaagaaactggtttcttcaccaagaaagtggtttcttcatcaaggaactaattttgttacacaacaataataaagattatgaaaacaaaacaaaaatgatatacactgaaaa

SEQ ID NO: 362844 - DNA, 554 bp, Cannabis indica
atcgagaacctatcaaaaaactgttgagaaagatcgtctctaaccttgggacatttagctacaagttgtgactaatttagtttttgtcacaacaaattttgtgactaaaaatactaggggtgttcatcaaaccgttcaaaccgccctcaccgcaccacaccacaaaaaaatacggtttgaatttctttgcggtgcggtcgcggtttaaaatttttctaaaccgcgcggtgcggtgcggtttggttttgaatttttaatatacagttcaaaccgcaccgcactacatattataaaaatactaatttttatatttatttaggtccaatatgtgaatgtccaagccaaagcccactaattattgtattattgaaacttaaaagtttttttcatatttattttcaatccttatggtatttttgacaagtgttgctcaagctttgttgtatttgtgatagtttaattatttggtaataatctaaaccgtagaaactgctaaaaccgcaccgcagtgcactattttttgcggtgcgatttctgcggttttttagtttcgt

SEQ ID NO: 362845 - DNA, 1181 bp, Cannabis indica
gcaagatactccatcttgcctttagctttcctttttattatgctttctagtaagttttcctaaccatgttacttttatttcatgcagacatgtctcaaaaaatgctcgaagctctaaagaagagagtgggagggagctcgggcctgtctcctctggctaagaagtccggtgagacaactctgttcagagagaggacaccggctgaagcagttatcgatctttccaaggagccaaccgtcgtggacccttctatgccaaaaataactaagtccaaagactctcgaggagggagctcggacaggctcgagcagtcaatgggcggatctgagcttgtcaagaacgaatgtaagcaaatccgggctcctgccccacctccagtactgcatcgagagactaagagaggcaaggatatgctcacccactacatgactcggtcagtccttaaggtgaatgagcaactggtcagagctaataatgacctttctctagagctggtgatgggaggagtcttaaagaagtttacgagggtaagctttcctgacagtttccttttatccttctttacttggcttagattctaatgttttttctttgtgcagaccagtctaaagatggcttatgcttatttccgagctaagtcggctgcctccaagaatgttgccatgtccaacaccaagagagcggaagtggacttggccaggaaggatgctgatgaaccagggttcaacttggagctgtccgaatggagctgagtgaagtcaataaaaagcttcttgctgcaaaaaagaaggtggccgagctgactaaagacctccaggcttctgatcaacttgaagctgccattgcctccttgtcaaaagaagtgaatagtctccaagaagaaagggaggttcttcgaactgtttttcacaggttagaagcaaagaagaagtcaaaggaggaggagctggttgctgaatttgagaagtacaaggctgaggctgagcagcggagagctgaggttgaggagcacaaggcagaggctgagcagtagaggtctgaggtggcgaggctcggagggaaggtaaatgccttagagcagcaggtctcgagattttttatgacttctggaaggctaatcccaaggcaaacttcgattacttgggcgattttaaagcatgtttctcgaatattgcgcttct

SEQ ID NO: 362846 - DNA, 794 bp, Cannabis indica
gggtttgtggcacgattattgtgagtgggaatgtagcagtccagctcgccctggtcaagagttcgaaggcgcgcctctataatcttggacagaggacttacccacctggcgcccgaggcaccctgccttttatgaggaaccgccgcagcaagctcctcactaacgtagtccacgccctcaaccaagacgtctttgtcagcatcaactggctccccaaccttgttgtacccccgtaatttgggggttcaacctcttcctcttcctccgcctcggagggactgccaggacgcacatcatccagctcctcgatctcctagacctcagcgtccccttcgcgatcctcctccatctggatggccggatcctgttcggcgctgggcaaagtggcaagccgagccacttgaggatcagttgcgtcagccagacgcgtggttttctttgtacgagccatcatcctatggctgggtacagggctagaagaatgtccttcactagaagaaggaggactagaacgaagacgaggatgatcctcgtgcagaagttgaagcaaatcctggtcgatccgatgtccgagttcccaagactcacctgagttcatctacaaaagacaacacacgagatgagtgttggtcagaatatcgaacaataaacaagcaaatatgccgaccaggagtactcaacagattaaagaacgactatgtttaaagaaaagtcagaactcaagaagtcaaaaaaatttcttgagttagggcaaaaagttcacgaagcttagaataagctagatgaaagacgga

SEQ ID NO: 362847 - DNA, 671 bp, Cannabis indica
atagaatattatagtttttaattttttttttttaataaaagggggcaaaattttatattagtcaaagtttaaggggtaaaaatactaatttttaacggtaaaagaaacagaacctaacagaattaagggcataattatgtaattgttatagtttagtgaaaatttttaacaagtcgtatattttagaaagtaaaatagataatactgaaaattcaggaggcaaaaatactaattactcattaaaataataatagtaataccactgttttatttaacctttaaatttttcgactttttgttataaatttattcaaaaagaaaagaacttgttttattagatatagtttagtaatagtgaaacatataaatatatatagaataatgatagggatacttttattttacaccttatttttacacacatatacatgatattgttagaataattttaccacgatctagatttactaacaagtttgttattaacatcctaaacataaacttctaaaacgatatcaattaaacacatataaagtttcagaaaccttacagtggttgcatcagaatataatgtctccttccactcagatctctgacccttgtatcctttctgtagcagagtatcaccaagatctgagtccgaatctccttctcttgaaactggattcttc

SEQ ID NO: 362848 - DNA, 980 bp, Cannabis indica
ggtaaaatatttccaacatacttttgctgacttttccagttttttttcccgacgattgtgattttcctgataacttttctgaggacttttctgacggcaataacttttttggtgacttttccggcaccgatgacttttccggcatcagagactttcccgaccaaacttattattgttttacaaatatgtgatcttcatcttcttttataaaaatattgcataaaaaagtctatataaatctaaaaaataaaaaaaaacctatatcccataatattatttatttatgccataaaaaaaataaactcttataattttcttatatattgtaatttttactttaaaaaattgaatttgtgattggaattggaatcttaaaataaaaaaggaccaaaatatttgaattttttttagattcaacaattaaaaacataaaattattattttcttttttgaaatttttacatcaaaaatacaaaatgcaatctttattacactaatatcactacacggctatatcaactttttttactcttcctatatcaactttttttactcttcttatttattttattactattttaccacatgcacacttattccatgcatcgatgcacgtgctgacttatgacccctatcaatcaactatccatcatttctctttctttttttcttttatttttctttttatttttccatttcttttcaaatttttttttttaaaaatagtaacctccatagctgaatacttccctctccacgatcccaactctattttccctcttttttttgttcttcaattttttttttcaactcccattaactgaatctcataattgttttccctcttttaatttttctcttaatccatatataaatatggctgtaactcgtgttgggttttatgccctaaataaaactcgttacaatctgattagttatcaatataagaaatttgaagtgattgatgtttgcatgaaatt

SEQ ID NO: 362849 - DNA, 680 bp, Cannabis indica
ggcataaaacccaacaacatcttgtaaggagccatccctgtagtactctggtaactgctgctgtacgaaaactctatcaaatgcaaggacttgctggaggagccctcgaaatccaacacataggctcgcaacatgtcttccagtatctgaattttcctttcgaactatctatcagtctgaggatggaaagttatactgaatttcaatttggtacccatagcctgctgaagactctgccagaattttgaagtaatcttcgggtctctatccgatataatggactttggagcaccatgtaacctcactatctctttcacgtacaaatctgcataatgatccactgtaaaggttgtttttacaggtataaaatgtgcagactttgtgaattggtctaccacaacccaaatcgaatcatataatctcgtgcttctaggtaacccaaccacaaagtccatagtgacatcctctcacttccactcaggaagtgtcagtggctgtaataaccctgtcgatctctgatgtttagccttgacctgttgacaagttaagcactgggatacaaattccaccacatctttctttatcccgcaccaccagtagtagggtttaagatcttgatacatcttggtaatgccaggatgcagtgaatatggagtggtatgagcttcctcgagaatctc

SEQ ID NO: 362850 - DNA, 1177 bp, Cannabis indica
ggtcagataagtgtgaggaagtttccaagagctgaaacaacgacttattacagctcatgttttagccttgccatcggatcaagagaagtttgtggtgtattgcgatgcattaaggcagggtttgggttttctgctaatgcaggtagataaagtcatagcttatgcttctcgacaattgaaagattatgagcagcgttacccaactcacgacttagaacttgcagtagtggtgtttgccttgaaaatttggcgacactacttatatggtgaacggtgtgagatctatactgaccacaaaagtctcaagtactttttcactcaaaaggatctgaatatgagacaaaggagatgattagagctagtgaaggactatgactgtgaaattctatatcatcctggaaaagcaaatgttgtggcagatgccttaagccgaaaaggacctgatcagatattcaatatggtaatgatttctcctcaattagcctctgagatgtctagggcaaacattgaattcgtgattgaaaaattacataatctgacacttcagtcagacttgttggaaagaattaaagtggcaaaattagaagaccctaaactgtttaagattcgagaagatgttttagcaggcaaatctaaggacttttcaatctctgacagtggaatgctactgttcaaagcacgagggtgtgtccctgataacactgagcttaagaaagagattttggatgaagctcacactacccgttattcactgcacccaggaaccaccaaaatgtatcaagatctaaaaccctatttctggtggtatggaatgattacttcaaccactatctcttccagaatggaagtgggaagacattgcgatggatttggtggttggtttgtcgagaactataggaatgtatgactctgtttgggtcctggtggatcgctttacaaagtcagcacatttcttgcctatcaaagtaacttatacaatagatcagtatgctgatttgtatgtaaaggagattgttcgccttcatggaataccaaagtgtatcatttcagatagagaccctaaatttacctcgaagttttgggtgagtttgcagaaggccatgggaactaatttgaagttcagtacggcctttcatcctcgaatagatgggcaatctgagcgaactattcagatact

SEQ ID NO: 362851 - DNA, 924 bp, Cannabis indica
gaattcacttctactgaaaatttatgagcactagggctggtcttgagtacttaaaatagattataaggtaaaaaaaaaagaaaaaattggcccttataataaaaataaatagtattttttaaaattattaaaaaaatatatgtatattttataaaaaatagtttttttatttgagtccttaaaatgggtgaactctaagcgtaggcctaatctacctatgcttaggaccgacctggatgagcactatataccatgatgtttggtaagcaatttttgacattagaagtggtttagagcgcctcaataataacgaaggaatatttgaagagaaatcataaatgaagtgacttcccacatacatatttttgtttgtgagagacaaattcaacaaaaaaaatataggatatatatgtaccaagatctaaaccaggtgaagaaatcatgaaagagtttcagatgtgagtagtggacatgtgcctgagattaaattaaagaaatctcgtatcaaaaatctctctttctataaattcatataaataaatcatttgtctattttgtgctaattatgagttgtgtttcattttctatttcacattgcaatcaggttcggttctgagcataagtatttaggcttggatatatgttgagaaatacatctttttttgtatccgttaatcaaaaatacttttatattatattttattaaaatatacctacttttatgaatgagttgctcaatatatcctcactcgatctctatttaaatctagcatataatttacattcacttaaggaatctaataggtatatcatttataaaagtaggtataccttaaagaatatgaaaataaatataaaaattaaaacaagaaaaaaaagtgaatatacaatataatttgggagaaattgaagaataccctcttt

SEQ ID NO: 362852 - DNA, 593 bp, Cannabis indica
atttaataggccctatttaagattttaattttttaaaataaaaaagattagtaaatatttgatgtgacgtttggttatcacatttgtgatagtatttcattttttcttcttttaattcactacaacaaatctgctaattaacaaaatctaccgctaataatggtggtattagcgacagacccaatgtccgccgctaattggacggtttattgttttaaaaaaaaatactattaccgacgggcagttcgccgctactttagccgctccatttgctccaactagtacaaccgtgaatatgaactagcaaataggttggatagcattcaggcccggtcggataaacttgaggcccagcaggaagccgtcatgttggcgcagacggggttagtaaatagccatatcagtatgaggcggtccttcacggagagtcagaaagatctgaaggagactctattggctaagattgaccagttgatggcaatgttaaaaccgaatgagggggaaccatagcccaccccggcaacacaaaatggcagaccaatggagagtgataacgaagatgtgttcccagaagattgggaaccagatgataa

SEQ ID NO: 362853 - DNA, 602 bp, Cannabis indica
gaggactttttattgagagtaacgacccttttagttttcttgatatctttagcaaaggaaattgaaatttgcattttaccctcgggtagtgactaatcgattttccttagtggtaaagtaaagcttgtcataatggttgtcatcgaatcttcgatcggtgtcaaagctttttgccctactcctcgttgacttttagggatatacttgaaggttcgtttttggttagataccttcaagttctcctctttgggctgaggagatttcacaggggataattgcttaatttgtagagagttttgtgcggttgagctttcatgacgtttgctctcctcaggtttccctttcaaaatggtcacattagctggcttgtaaaattttgcatcagcataattcacttgttccccgtaaaagggatttgggtctgcattgacacttttgactttgcctaccttgcaaaacttaaagcattggttaagtgttgaaggaatgactccatattcatgaagccacggtcaccctaacaacacattgtaggatgtatctgaatcgatgacatgaaataaggcttcagaatttaatttgcctatttcaatttttagtgt

SEQ ID NO: 362854 - DNA, 894 bp, Cannabis indica
atagagtaaataagctgttgggaagtttatatcttagctaaacatattttattattattttttgttgttttcttctttttctttcacattatttatagggtaaatatcattttggactttgtgttttgcaaaagttattaattgaaccatttaatttgttaaatgacagaatatctatatttttcaaaatggtaaagagctcaattttcaacaattttatttttaaatataactaactttaatacaatttctaacacggacaaatatagaaaatgtaactagttttgtcataacatctttaaatcagattattattaagttttattttgacaaaaaatcagtgcaaggtcctatttgtacaattttagaaaatacagggtctattttttcatttaactaaacatagggtccaattaataatttttacaaaacgcagggtccaaaataatatttacccttatttatatctataaatacataaaataaattaaatgaataaaatatatcaaacaatataatatttaaattatataaagagaagatagagtaactaatgtttggtgttatgtaaaagtgtgatgtaaaatagataaagtagaattttagtaaaatattttaaatgatagaggtagactagaaaatgggagtgctcttaacatgtgccaaatttagtacactttaacatcattagaatagtagcttttcttagagaattgctaaaagatattattcgtagtagttaacaccctctttagtgtcataacgctagcactattggtgtccaataacaatattttcttaagtgtgctacaatatagtaatgcacactaatattttggcattctattaagggattattttacaaatacacaaaaaacaacaaaaaattacaaa

SEQ ID NO: 362855 - DNA, 442 bp, Cannabis indica
tatatatatatattaaattttattctattccatttctattcttattcacattcccattcatattcccattcccattcctattcccattcccatttcttttcctatattttcattcctcccaaccaaacgccatatctacaaacggaattgcaccttaaagggaatgggaatgaatgatatggtattgattcccatactattgtttactaaattttagaaaggaagaaagtagtgggacccacacaaattagggagaaaacaaatggaaaggttctctctcatttttataaggaatacttttcccttttcttacttaatttacactactacaatttggccttttagtgacactatttagtgacacgcacaaaagtgcgcgtcactaaatagataggagtaatttttagtgacatgcacaattagactctaaatgttcagtgtt

SEQ ID NO: 362856 - DNA, 693 bp, Cannabis indica
tatcttaaatatattcattcatagtgatgtagattctatgatatcactacaagaaaaggtgtttttgccggcgcatttcgtgacatgcgccggtaaaagttgtcgagactaccaaaattgtggaattccaaatttattttgggtttacttttgccggcgcatttgtgcgccggtaaaacatagcaatgccggcgtagtcaagttaaatgcgccggtaaaacgtaacaccattaggcgcgagaatttgccgcctttgatttcatttttggggcgcttttctacttttaccggcgcatatatgcgccggcaaaaggctgaaaaaagttggagggaaaattcccgcgtgggttttatttggtaggtggggacacttttaccggcgcaattatgcgccggcaaaagtgttagtgaaacgcgcgtttcactcctaggtcaaagtaattttttttaaacacttttaccggcgcaattggatgcgccggtaaaagtagtcatatgtatcaggaggcacgaagccccctttcttccccattttcattttcagaaaaacacagccccctctctcaatctctctggttctctctctctcgttctctctcatttccctctcaatctctatcaaactctctcaatctctctaaatttatctcaaaatctctctttcccactcaatctctctttgttcatctattt

SEQ ID NO: 362857 - DNA, 538 bp, Cannabis indica
taaaaataatcatgaaataaatcatgtgaaccatgcaacatagaatgaattctgatcttttattaattagtaaatctgattatattgaaatgggttttatttagggcacaaaatctaatatagtgtacatagagttatactgaacaccgatggatatatatttggcataagtattgattgatgttattacatcggtacaactagagtaccgagtataggttgatattatggtcaatagtactgtcgtacgaacgatctagactcagtaagcgtgggacgcagaataaggttataattgggtgtatgggcgcctagttataatccagtttaagtttattttatgattatacttttcttactgagtctgacgactcacagttattacgggtatgtgtagataagagctagaaccgaaccggaatgagtctaaagttaatggtgaagattgtacatatcaagacggttagacctagagcattgataactcttgagtaaagagttatttgttatcactttaaacatgtgtttttttttatgt

SEQ ID NO: 362858 - DNA, 684 bp, Cannabis indica
atttcctacttggctagaatatagcataagtaaaaattctgcgttttgtctatattgctatatttttaaaccaaacaatggaaaacaaggtggcggtcaaacatttgttagtaaaggtttttcaaattggaaggacaaaaaaagatttattgttcatgtaggagatcacaatagtgatcattatcaaagttataagaagtgtgaagatttgatgaatgaaaaacaacaaattcaacatatattttcgaagaagaataacaatgatcgaaatagctactatgttcgattaactgcatcggttgacagtattcgatttcttctacgacaaggtcttgcatttcgtggtcatgatgagtcccaaaattctactaatcaaggtaactttcttgaacttttaacttttttggctgatcataatgaagaaattagagctgttgctttgaagaatgctcctgaaaatcttaaattgacttcaccaaagattcaaaaggatattgtaaatgcatgtgctatgtgttgttgaaacaatcaatgttattattgaagacatgggagatgctatattttctgtgttagttgatgaatcccgtgatgtagctataaaagagcaaatggtcgtaatgtttcgttacgtggacaagaaagggtatgtaattagattctaacatacttcactggttgtat

SEQ ID NO: 362859 - DNA, 894 bp, Cannabis indica
atattttaattttaaacctttaaatatcaaatctatttatttaataattataattaattatcaaataaaattgctatttaacctatttattaattagaccttataacaaagtctcttaattaaaaaataaatttcaaaacttatttttttctcaattaagtctttgtttagtgtaaattcataaataagacatagtctaatttagaattctaattggtttaattaaaattaattaactgagtctacaagccaatattatctcaactagtgtggggaccatgagccaattggtcatctttaacgaataactcaaagaacataaataactcagttaagcaagaacctaaccatctcaggtttaagatctattgatctaggatcaaagtgatattaacttaaatagatacaacagtaagtttataatatctcattcaagttcagtatcggtctagtacgatgtatactctatacatccaataatagcatactttaccaataccctagaaaggacctaacacttatccaaggtgtaagtaaattttatcgctaattatcacgtcaggatatatattggattatattttaccaggatctagatttactaacaagtatgtttttaacatcctaaacatgaatttctaaaataatgaaacttaaacacatataaagtatgagaaatcttacattggttaaagcaaaattaaatgactccttccactcagatctctaacccttgttcctttctgtcgcagagtataatcaagatctgagcccgacactccttctcttgtttggattcttcacaatcttacacactatattgaggactaacttgctatgggtgggtatgcactcaatcactaaggctcaaaattttatgtgatgaacactctt

SEQ ID NO: 362860 - DNA, 568 bp, Cannabis indica
acgtggaacacaaaagtgagtattgtctaaagctgaaaggccactggccataaaaagccacaggctatgcgaaacatgaaacattatctatgtgatacaaatataatgctaaatgatgctaataaaaatactgtctaaatgtgtgtaagggcagaaagagctgaatttggagttgcgagatcaagatccatagaatctaggcaggccccatcatcagcatactggccggcctagtggtcaaggtcttggccgaccacctcctccacaggtgggtcagccaactcctcattgtctgtccctaatgatgacccctctcaataggcttcaacctagtctatctccatctggctctcaaaaaatgcctttccacgagccaacgttctctccacaaaagccatactaccgatgtacgaaagtatagctcgagggttgtgcaattggaactcataggtaagttcagaggacagattaagatactcatccctaatggcctgctggccatcaagagcctcttgcaacttctgttggaaatatattttaccaggaacttagatctactcacaagtat

SEQ ID NO: 362861 - DNA, 566 bp, Cannabis indica
aatatataaagggagggtttcgtcgaaagaggtggaaggtttcgttttgttttcattttactactgataacttataacatataatatatattaaacttatcgattgataagtttataaaaataatattataataataatataataattaataatatattaataaaaatttcattattcataattatcttatcatttcttagctattaagaaatctttacttctagggcgctaagtcaaatctcacatactcataattatcccaatgcatatattatcaacttatcataatattctcatcaattctatcaattaaacctcttatgacatatctagccctcgatcgagtcttcaagttcgctaaacctgaaaatatttttaatttattccacatatagctcatattactttcacacatgctatataaatctccataatttatcaattacgcttatttactcacttatagcaaatttaaaatttatgttgaactagattagtaagattataatttcactttttacttaattaacccaaatataaagataaatcctaattatttaccatt

SEQ ID NO: 362862 - DNA, 1071 bp, Cannabis indica
tttctttacttgaacctgctttgacataactacatctctaataaaatgtagctttatgtcaatgtgttttgatctctcatgaaacataggatttttcatgagatgcaaagcactttggttgtcacaatggacaacaatatcttcagagtttaatcccaattcacttgtcaatcctttcaaccagatggcctccttaacagcttctgttgcagccatatattcagcctctgtggatgacaatgcaacaactttctgcaaattcgatttccaacttacacagcttcccaacacagtgaatacaaaccctgtgcagcttcttcttgtgtctatatttgcagcaaagtctgagtctacataaccagtaacctcttcttcatattggtgttcacatttgaacacaataccagtgtttagtgtgcccttcacatacctcatgacccactttaaagcttcccagtgttctgttccagggtcagagatatacctgctcacaacactcatggcatgtgctagatcaggtctagtgcacaccattgagtacattaagctcccaacacagctggcatatgggattctgttcatcttgattctctcagtttcatttgttggagactgagatgatgaaagtttgaaatgttgtgcaaggggggtagcaactggcttgcacttttccatgccaaatttatctaggaccttctgcaagtaattgctttgagacagtgtaatacagttaagtgtaggtctgtgtatatcaattcctagaattcttttggcttttccaaggtctttcatttcaaattcttcattcaattttaccttaagatcattcaactttgatctttctttcccaactattagaatatcatcaacatataacaacaagtaaatatgatcattgaaatagacacagggatcatacttacttttgatgaatcctatcttgatcatgtaggagtcaaatctgagattccactgccttggagcctgcttgagcccatagagtgatttcttgagcaaacagacttgatctgcatattctttgtcaaatccttctggaacctccatgtacac

SEQ ID NO: 362863 - DNA, 545 bp, Cannabis indica
actcagcatactgatcaatggagaagttcattcgaacaggtaacaagtgcgctgacttagtaaacctgttatgacccacacagagtcgtactgtcttgtagttctaggcaatccaaccacaaagtccatagcaatatcttcccatttccactttgagatattcagtggctgcagcaaccctacagacctttaatgttcagctttcacttgctgacaagtttaacacttagcaacatagtcagcaatatcattcttcatgcctggccaccaaaacatggccttgaagtcttgatacattttcgttgatcctggatgaattgagtaaggagtcgtatgagactcattcatgatttctcttttaatgtcatcatccataggcatacaaacatgattcataaatcgtagcattcccgtatcatccactctaaagtcactagttttccgagccaaaaccctatctcgagatttcactaactctcgatcttgcagttgtgcttctctaattcgctccaatagagtagatttcagggtaatattagccaatt

SEQ ID NO: 362864 - DNA, 527 bp, Cannabis indica
tagtataatgtcatgcatatgttattacatgtttagcgtacatgttttttatgcctattagattacattgatagtagtaatagtatacatagagttgtactgaatactgatgttggctaaaatactggtcgatgttgtcacatcaatatggctagagtatgactaacatattgaggacagactgacattatggtcgatagtattgtcttataaacgctctagactcaatattatgtgggacacgggggattagggttatgatctggtgtaggtgccaggttataacccgggttatttgtatgttatctgtcatgcttttcttactcatgagtctttcgactcacagtgctatcttcatgtgtaggtaagtgcaaggctaaggctgaggagccatgagtacgagcagatgaagattgtacatgtaggggcggttaggcctggagcgtatgatctttgggacatcgaggcttttgctgtgtagtcgctgggcgacaaacttttgtttatgtgtatagcaaatttttaaa

SEQ ID NO: 362865 - DNA, 589 bp, Cannabis indica
agttcatcaatttttttagtctatctaattataatttttttttatttatagctatttactttatctaattaaataattttttgtgagcaattattataaatttaaatacaaacaattcatattcttcccttctttgttttttttttcttttttgatattttctaatttatttagtgttcaataatagttatattgattttttttttacattaaaacaaaacacaagtgatctatgtgttttgaattaaactaataataataataaaaaatatcgtataaaagcatataaataaaatagttttaattactatttctatgattatttaaattgttaaataaattctactcatactttataattttatttttttattgttttgttttttcaaatggtgttataattttgtttaagatatatatttatatttagctctaagaaaatatttaagataattttattgtaatgacatacatgtaataatgcaataatattatgtctaattattaagtacaaatacactaatcttaaaaaatgacatttgtcactaatttataaagagtataaaagaaagtacaaagaaagtactca

SEQ ID NO: 362866 - DNA, 2188 bp, Cannabis indica
tatatatatatatattttaacatgtgagtattagtggctaaaagtaattaaatcattgtaaataataatcgttgcatgtcttcatcaaggagaaactggtaaataatgaattcacttgtatgccataaaattctactaaaggcctacagaagttgtttgaaaggctgtatcaaagctggttatcaaagatattttcaaaccagcttgagcggggtgctagaaatcttggtataataatcaagattatatttgtgaatctatcaaataatgaccaaaatttgtaagaaactagctgtgtatgctgtacatattttgatttctattacaagaattaatcaaataatcgagtaagaattaggttgtaacaactgtatagctctggtagttgtgttctatttttcatttataggaatacttaagctaatctatatcaaataattcaaaattctacctgccagtttatatggaaaaaaaaaatacaatccataccctgaaaagagctctttctccaactaaagaataatgaggtgtgccaactaagttatacttattctcttcaccctcaactgcaaagtacatatgttggtggacatcttgaatagcaacaattgatcctacatagacagagtaattgataactcaagtctccaaaatttacccaaaagaaatctggagaattaaattttattaaaaaaatcacaataaaaataaaaataccttcaggaatcattgcttctatattgtccaattcgtcctcgtggttaatggacctttgctttttattgaagtcactggtggtagtcttgctgaatactccagagaaggatgaaacaatatttaaaatcatctggtgtataaaaatatgttagactgctaacacttgccattatgtagtaaaccagaagtaattacatgagaacatccttttattacattacacaagcataatcagctgtacgaaaagttttgtgttgactaatttttatatcaaaagctcacctctatttctgacagagagatgatgatattaaaatctgaaatagaaccacggcctagccatgactgatgtgagcaaatagcaccattcacaggcttttgaaccgaaaagaaagcacctaattgtttcaagatatatttctgagaacttgaattggagtccttgggtacaaaattctcagcagaaagttcctctggtgaatcagaatttcttgagcaactcagatcattaagttgatgcatcacatccctacgctgaagttctgaagcagaatctccatattcaaagtgagtagacgttctattgaaagtatccgaataaattttaggtttatgaaattcattttcaccactttgtcggaggacttgagaaaggattgatgacttaaggtcaaacatgaattttctttccatatttgtcaattcaaattttagatggacatcaaattcaagaacaagttctcgaacaccacctgcaacatgtaacaaacgattcaaatacaatgtaggcctagcggtgcagcacatgagtatagttggagaggaagaacatggcatgtaaatacaaaaacaaagaagatggagcaagtaaataaaaagataacaatttagactaaaataaaatagaaaatgagatagatttcatgaaaaccataacaatccaactaataatcgatgcttatctagcaaataatcctaaatcagctaggaaacttatagtaagaactgaaaagataaaaactctctaaatgggccaaataatataaaatcaagtaatatttctaacatatccatattaaaaaaatactaattatctaataggtatctacatcaacacacctttctcatctttgattacaacaatagtagaaagtcgagagacatttacagttaacccttgcatttggttcccttcaacttctaaaggtgtttgaagagtcccttcgactttctcagtaacatagtcatcatccactctgggcatatccacattgcattgtgcttttccaatccctttatatgctaactgaacattagacattatttttgcaatagcataaagatttgcggtagcacaactaatgaatgtctccaaagcagttgtttcaaggaacagagtaccaccctgcacaatagcaacatatataactccaatttgaaatccattatcatctatacagcactactcact

SEQ ID NO: 362867 - DNA, 869 bp, Cannabis indica
ccaaatcaatttttgcaccaatagaaactttatacaaaaacaagggaagttcatttgaaatatttaccagatttgagcaaggaaaccaattggatagggcaaacctcataagagaagcatgatgataggtgagttgagacatatgtattgtgttggagagctccacatcattatcaccagtgagatacctggacactttttgacgatcaaactccacatcagttggctcaattctcataggtagatttagagcttcagccacatccttcacagtaaaggaataccagtgtcccctgacaaagacattaccaaacataaaagagtcatcatcgaggcactcatcagtgacattaacataaaactccttgacaattcgatccacatacccatcaaaaccgattaaaatatccacccattgtctttctttcaacaaattatataccccaaatggtttatgagcaatgacattaaaatttttctccacaataaaatttatattctcaaaatatttcatatctctagcattatcattgtaacaaaaataatgacaatgggcttgaagttttcaagagtaataccagagggcctcttccttttctgaggcagaatagggcttggagaaaccaggagtctttttcctttgtccttctttggaactgcagcagctggttcagcactgataggatcaacttcaggcacttcactttcagatccagaatcatcaacagagggttgttctttgggaacaaatcttcactagaattagccacaccctatgattcttgatcatcttcaatctcttcttctggttcggaatccaatatgatttcttgtttttatttagggtgtgtttggaagtaaatgtgtaa

SEQ ID NO: 362868 - DNA, 623 bp, Cannabis indica
ttcttcttctcctccgggtttcgagcagtggagcacccggagcttctcacggagtgggtcaagattcctccctatgagcggaccgcgcctactcaggtctttctccagagggcccaggtctttgcaacttatgaccggccggaacttgacgtcgggggcctgatcacgacggagaattgccggaaggccaagctcatcctgccgcaccaatcagtggaggactctaacctttccaaggttattggcccgaatgtgagggtgcctgtcgcggagaagaccttccgggacaaaatcatcgccaccgccgagaagaagtaccaggaatatctctaccagaaggctcaggagaaagcttactctaaggctcaagcagcttccgggaggccacttcgcgtggggagcctagtcgagaggagaagccaggcgatcgctgggaagccccttcgcattggggactcggctgagagaagggcttccaggccaaagccttcggctcaggagccaaacactggggctcctagcgctagcacttccggctccgataagtcttctttagcagtacattacgttcctttcgttggcaaatatgtcagtcttaggcctgtagggttcgatgagcgttt

SEQ ID NO: 362869 - DNA, 672 bp, Cannabis indica
tattagtattagtattatttaatcggggtcccggtcccgggtctaggtcaagattcgggtctgggtctgggttcgggtcttgagtctcggaccgggtccgggtctgagtccgggttggggtcggggtcggggtttgggtttggggtcggggtcgaggtcggggtccgggttctggttctgggatcgggtcggggtcggggtccgggtttcgggttctgggatcgggtcggggtcggggtccgggtttcggttttgggtcggggtcggggtccgggtccagggtcagggtccgggatccgaggtccgggtcggggccgaggggcggggtctgggtccaggtcccgatttcgggtccgggtccgggtccagggtcggggttggggtccgagttggggctgggggccggggtccgggtccaaattggagattggtgttgacccggaatcttttataaatattataatacaagctaatacagaccatttgttatgtattaaataatacaacatacattgtattaaaaattttggtcgtaataattaatacaatacattgctttatccaaacatagtgttatttattatttaatacaatacgacccttatacggcgtaccaaactagtcctagaactaaataataataaatcacacatgagttgtgcttctaccatc

SEQ ID NO: 362870 - DNA, 635 bp, Cannabis indica
ataacattttagtctaatataaatttttataattaaatgtaacttttagtcataacaaaaaattacttgtgactaaaacatagtatttagttacaagttgtcactaatatagttttcgtcacaacaaatattgtgactaaaaatatatttagtcataataaattgtaatttttgtggctaatacatttatccacagacattttactcacaacaccataataataatttataattagacacaaattttttatttttagttataaattttgttgtgactaaaagtaagattttttgtataatatcaaaataaaaaaagagaaaaattgttcatttataaaaaaaaatacagtaaatatatgattttaaatcatacatacagtttcactgtattttgaataatcaattactaaaaacaaaactaataaaatactatatcaatgttctagataatttgttcatttgtagcccctgtacataccaaaactcacactactcaccatatgtattatcagttccccgtctaatattttttaggagaaaataaaagggtaagctaaaaacttagtaagaaaatacttaacacatattaacattcaatacatcatacataatatattaaatccacaatttttgca

SEQ ID NO: 362871 - DNA, 582 bp, Cannabis indica
ttcacttacctgacaatcatcattaatcatccacatgattggctgaaaagacgtcggacacagggagccataggtccttgaatgtctgaacttgtgttctattactaatggatctccgaagaccgtatttaagcaaaatcatttcccaaatcaaactcgaccaaagatgagatgaaccattcgatatgatctagttgatttcgatttatctaatcgatccaacatccattagatgttggatttgatcggttttatccgttagatgtatttcatatatatttgttggtttaatttggatttatttaatattttagacttagtattttttttggatcggatggaattcatttaatatttaagtccagtatgtgttggattggattggatccatccaatccaagaaaaaagaataaaattttaaaatgttaatttttatatatagatatatattttacgtattataatataaaatttaattattcatccaaattaaatgaaaatattaattagttcgattagatgtttgacgtattggatttttagacacctcatccaatatctgatccgatccaattagatatt

SEQ ID NO: 362872 - DNA, 620 bp, Cannabis indica
attaaataatttaatatgaaaaaataatcaattcaaaataaccgttctaatccgcattagattgaattgaatccaaaatataaaataagaaatttggcttagcaattagcatacttaaatgtaaagcattgtcttttagtatactacccaattagaaatagggtatctatacttttaatatctttttctcttaaaaatactcttacatttcaaaaataaaaaactctctctaactctctcaccctaactaagtcttgccgtctccaccacgaagtcccaatatccacgagctcaaccaccctgaaatctctacccatcgctcgttttctacattttttttttctaattttctaatttttgcgataaatgtatttgcaatgataggccaaatcttaagttatggatgaagtttagcgatattttgcgtatttagcgatgtatttgtaatatgagactaaaaaatgcatagcacatcgctaatcattgtgaaaacttaagtgtaatttagcgacatttaatgatgtttagcaatatttagcgacatcgagaaaactagaaaaaaagacgtagaaaacaagagatgggttgagaactccgacgatggctggggatttttgggg

SEQ ID NO: 362873 - DNA, 1127 bp, Cannabis indica
aaaactcgaccccagactcgagacacgagacaagacctggacccgaaacacaagacctaactactgggacacaaccccaaaaagttgaccaaaagccaaacataggatgcggcccaagacccgagactacaactggaataacgtggacccggatctgtatccaaactcgatcttgaacctagaattagaatcggaacctgtttgggacttaaacacagacttgggacactaacaagacccaaacctaaacccaaactcaaaccagaacccataccgggactttgaccctaactgggacctaaaccaagaccgggacttggacccagacccagacctaaaaatttggggcccgacctaggacctaagaactagactcggacctgggatccaaaactcgaacccacactaggactgggacttgaactcggacctgaacccaaatctagacactgactacaggttgggtccaagccccgggttgtggtcaagattcagatcccaatgttgggtctcggtctcattccaatttggatccttggtccaagtatgcgtctgtgtctgggttgtggtctgggactgagatcggggtcgggtattgtgtcccagttccactccttggtctcaattctagttctaattttgactttgggtccctaatctaagtctaggtcatcgctccaggtcaaagtctccaatcccggtctgggtccttggtctgggtctgggtccaagtccatgtttgggttttggtttgacaaagtttcccgagtcccgattcgagtttttatatgggtctgcgtcctggtctgggtctgggtctgggtcctagttagattccagtacccgaactcaaacccagacttgaactcgaacccaactcaagagtatgggtctgggtccaggtcagggtctgggtccgagtctaggtcttgtttttatggatagtatggaaaaaattaaagcaatttacttttttactagaactcaattttgatttaatctgaattagttatgattttttgtaagtttcaaaaaatatcaggaatcgtgcatcatcacacgcacgcggatgaagggcgaaccttcagacagcacgcgttcagacacggtttcttgtctgaaaccga

SEQ ID NO: 362874 - DNA, 553 bp, Cannabis indica
gaactacggacaatgtatagcgagacatttacctcactacatataaggaagtattgacgaggaaaattggttgttgaaacacttagcgtataatccacattataataattaggtgtaacaacttgggagcatgtaggacatgattgtccaatctgcgaggcattatggtcaaagagcagttcttaagtttgcttagtacactggtgctcatgccattactagaaggcatatgaataaaccaaatcattattggtcatctatgtacaaagtgagatgcctctagcgagatgttcttagccacctcagcgtcgaccgcctagaagataggagtgataacggttaggcagttttctagtattatctacacgtgttaaaatagaatgtggtcaaagcccacatttcttgaaaacagtaattcaaatttaaatgtaaataactactaacctatgttcctatatataaatagaggcagactctacagaaaaagggacggaaaaacttttagagaaaaaagtatcacaaactgtaattctgtatccagaaatatctttaa

SEQ ID NO: 362875 - DNA, 543 bp, Cannabis indica
catatgctgggccatgtaatcaactgtcgaaactctcatgagatctggactacattcgcccaactctttgccaccagatctcgagctcgcctgctgcaacttcgtaatcttctccaaaccaccagaaaggttctctttccattgaagaatacattctcaagatgaagcaacatgctgatcaacttgctgctgctggtcagcctatccatgatgaagatttagtgctttacattcttggtggtcttggcacagaatatgaagccgtcgtcatcaatttaacttcaagaactgaacctctcactcttcaagaagttcagttcatgttacagagtcaagaaatgagaatacagcagcacaccaccgattcccttcacaatgttcaagccaatttggctaacaccagagatgattagtaactaacttactaacagaaaacagaaatggcagctttaaagaaaagaacacttggattcttgtgcctcgcacttcagagatgattattatacaaaacaaatgggtctatcgaatcaaacttaatgcaga

SEQ ID NO: 362876 - DNA, 863 bp, Cannabis indica
gagtctacaagtagtattatctctactagtttggggaccatgggcctatataaccgagctttcaataagtagttttagatttaccaagtaaatttcctaacttattaattttgccttgcgccactatagatttggaatttaatagcactctcaattatatagaacactctatatgtaccacgatatagatacgttatgattatccattgttacaatcctaacagtcaaagatcctctatagatgatctacactgaatagggacaaacttaccgttctgccctttaatgtattttatccttaaaacacttagtcacctatatatgatattttattaaactaatataattactgaaatgaggcctgaatcatttatttctattcagcccagctcaaaggaaatcatcgtttcactcctaaatacttatagaagctatagattccatatctataatcagggctcccactcaattgaattaccatgttttcaagatgtaaatatcttcgtgaagcattagttagcttccacgaacaacttgaagagcataaataatacaactaagttgaacctaaccatattaagattaagatccatagacctaagatcaactattgatattaacttagaaagatatgatagtaagtttatgatatcttatccaagatcaacatcggtcccttctaatgtatactccatacatccgatactggtaaactttaccaatgccctggaaaggacataacacttatcaaaggtgtaagtataccttatcgccgattatcatgttagtctaaatccagtgaactgacaaatcatggaaattaaacttttgaacatatagtcataattatattccactgtgct

SEQ ID NO: 362877 - DNA, 580 bp, Cannabis indica
gggggatccaaggtctatcccataactcactgtctccatctgcaataattatacctgcaccatcaatacagatttagcgagcctcaagaatactcttccaacaacgtgaatcactgactttcttttccattgaccaaggggacatatgctggcaatacttatctcttagcacacgaacccagaccttattttcatctttcaacaccatccaaaaaagctttgtgagaagagccaagttcatgttagcaaaccttctaaattcaagccccccactctttttcggttggcaaatatcactctaacttttcaatgcacaatacttgttcctttccgatataccaagccactagaacttagataaaattctatcaagttcactgcagagagtcttaggtacaaggaacatagacataaagtaatttggtatactttggagtactgaaccaatcaaaacagatcgccctgcttgagccaaatggcaagccttccagcctttaagtctacccaaaattttctacttcaggaattggtaatcctctttttgttagctgtgaaaaagaaaggatttccaaggtatttt

SEQ ID NO: 362878 - DNA, 536 bp, Cannabis indica
aggagtcgttacaccatgacccacgtttgctggctgtttaggattaacagttggcggaacccttgtgtttcgtgggttctgcgatgcaggatccaccgcctgtggatttgctggatcaaccacgcccctacaattttgtgccaccatcgtacttgtggttagatttagactgaagagcaattcttgattctactcttaatgagagcactaaaatgttgacctcgcttttagccaatgacggtgagtctaatttagtaagcgacaagtagtttataacgattgatatatagtaaaacaatataaagacataggaattttatagagattcagtcccgagcagttcggtaatagcctagtcttcgttattcgtattaactcaagaacaaggagaaagattccttttcgtatagctcttacaacaatatctctgaatatgaattcttagatagtatctcttaagtaaaatcttttgaccccttgcccacgtgaacatgcatcactatttatagggctatgagcttggagaggaagtattt

SEQ ID NO: 362879 - DNA, 1601 bp, Cannabis indica
cgcaggctaagtcctattaaatggacgcccaaaaaaatacaagaagttagggtaataaggttgagactagaggcagtcagggaaaacaaattccctagaatccccgtggtcacggccgaggccgtggcaaaattcaaggtggtcatcctgtaaatccacaacaagctcctctggattgggagtagaggtttgcggagatgtgagatcaaatccgccaacaagaagaagaaattctgagattaagatagcatggtcctcctactatgtctccacatcaagcttaggtcgttgtagctccagcggtgccagcagaacaacctgttgctggcaactgttatatgagaggttctataagcaagcacctccagtgttcttgggaggtcctaatgtgatgaaggctgagcaatggctcactgtaatagagcaaattttgaatttcatgggggtggttggaaatgatcgggatacctgcgcaacatttcagttccaggttgatgccctagtgtggtgggaattggtctccctcacctaggatgtcactataatgacctgggaagagttctgagagttattcaatttcaagtattacaatgaagcagtccacaatgttaagcagaaagaattcactgagttggtgcagattgagggtatgacattgagtatactacaaagtttgactgtctttcgaagttgcatcgggtatcgtgcctactaatttcagtaagaaagaaaaatatctagccggtttgaatgtgaaaattagacaatatttggtgatcactactaatgaggcaacatcatatgcggagatggttaagaaagctttgcgagctgagggtgcaattaagtttcttctggagcccgtgtgactccaagtgtaggtgggaccccaactcttcctacacctgtttttggtagggatggtggtgatttgaccactgaacataagagaaaagttacctcggcatctggtggctcacggttgagcaagcggttctgtggcaacaaaggtagaggtggatgccagggttacacttaccctgagtgcccacgttgtaagaaacatcatccaagagagtgcaaccggaagtcatgctttcagtgcagcatgatggggcatttcaagaaagactgccctcaggcaaagaaagaagagcagaagccagaggcaaaacccgtacctgctcaggtgttttccattactcaaggtgatgctgcatccagtccttctttggtgacaggtcagcttcctgtcaacaactccttttatattgtgttatttgtttcgcgagctacacactcttatgtagctacacgggtaattgatcttttgggtaggccttatgattttcttgaaagagagtttggaaccctaataattattggggagttcgttatctcgaatgcgcatattaggtctatgtcagttgggatcgaagataggagttgagtgctgaacttatagagctggaattatcggagtttgacattatacttgggatggatttcctgtccaagtattcggctagtatagactgcaagcaaaaaatggtgacttttcagccagaatgtgaagatccatttgtttatgttggatcggt

SEQ ID NO: 362880 - DNA, 341 bp, Cannabis indica
aagggagttcgttgttggtggtgtttgaaaattagattggcaaagtacattacaaaagattgtgacaaatcattagagagagtctaaatttggccaagtcaattattaccattgttattgcctcctcttcctctattgctactgtttcttggactatagttaccaccaccaaatctatttttgttagcaagataagcaatgcctgaagagttattaaaggactcattgttaccaaaaagtgagctcaatctctctggcttattgtcaaagctcataggaatgtcatgtattatctgccaagttattttctctcttgcttaggcaaatattccacaccgaaa

SEQ ID NO: 362881 - DNA, 1665 bp, Cannabis indica
ttcgaacatataattaagattatattccactgagctgacaacactataatcattaacaaattcatatgttctgaacctaaatagaattcatacattatatgtataatcatgaaataaatcatgtgaacaattcaacataaaatgttatttttgatctttattaataagtaaatctgattatattgaaatgggttttatttagggcacaaaactcaacagtcttagtttgggtcctgggtgtgggtcctggtttgggtctactttaggatctctgtccggatccctatcttggtccgagtttgtgtttggaattgggtcctagatttaggtccaggttcgggtctcgttctcggtctaggtacacgaccgtgtccaaggccgagtttcggtctcgatttgggaatagggctaggtccgagtttggttttaagtttgggtccaggtcttggtcatggtactagtcttgtcccagggtcctggttcggtagttcttgttcaggtaccagttttgggtctcgggtctaggtttgggtcttggtttgggccctggtctaggtccgggtcctagtctgagtccaagatccaaacaccgactacatgtctattccaaggtccgtttctcggatctcgactcaagattagatccctctcatgggtctagcctagttctggttcaggtcgtgggtcgtaggtccgagtttgggttcgggatcgagactagggtctggtttaaattgcaaccctagttctgtaatcgagtccagttccatgtttgggtttgagttcgggtcttggttcgggtcctgagtccaggtctgggttgggattcgagtctaggtcccagttcgagtctaggtatgagttggactccagatccttttaggttatagtttttggtctaggtccaggtctggttatagttccaggtccaagtcctagtttcggtcccgttcgcaggtgccggtctacttgtaattttggttctaattttgggtcgcagggtacggttctggtctaggtttggatttgggactgggtttaggtccatgtttgggttcaggttcttgtctggtttgggttcggggcccatatccaaagacctagtcctagtctcggttcaggtttgggtatccgtctgggtttttatctgggttcgagtttgggtttaagtcctggtcttagacctagtcctagtccggttccaattccagttgtgattgtgagttcgagtttgggtttgagtttaggtcggggttcgagtccctatttgagttttggtttgggtccagatttcagtctaggtccgaatcaggctccgggtgtgggtttgagttctgtgtctgggtcaaggtctgagtttgagtcccaagctctgatcccgatctaagactagcttcaattcagggtcgaagtcctgggttctgatcccggtctgggttcgagtttaggtatgggtctaggtctaggtttgggtcttattctaggtctgggtgtgagtttgactccgggtttgtgtctaattttgggtttaggtccaggttcgggttcggtccctgtgtgggtctaggttcttgtcccagttagggtctgggggaggttcgagtctgggtctaggtctgacttcagattctggagtccaggtcacgtcctggtttggatttgagt

SEQ ID NO: 362882 - DNA, 574 bp, Cannabis indica
tttattttttggttattacgattaacattatgttttctacaattttattaatacaaaatttccttgttttcttcttttacaggaaatttttcagttttgcaagcagaatgtatggcaattgtggtcgctgtggattggattatttcttcaagattagaaattaacattgttgaatctgattgtttaacagttatttctgcttttaataatagccatgtccatttaaatgactttggttccttattagaggatgttgcaattttgttcttcagatttccaagagtgtccctaatccatgttcgtcgaatggccaatacggctgcagatggattagctgtgcatgctcttcggatggatgaacaaattgtttggctagagaactatccttcctttgtaacttttgtttagtctcttagcctgtacaatattttttggttttcaatgatattaatcattggttgtaaaaaaaaaattaattaagatttttttataaaatgtgattaattcaataaaaatagtttgaatgtaagtttgagtgtgaaatgtaaaaaaatttaaaaaagcaaaaaaaaaa

SEQ ID NO: 362883 - DNA, 542 bp, Cannabis indica
agggaccaacggacttacagaaagtgtgaccttagggattattaccgccaatttttgaggttggggactaatcggcatcaacctcaaatttttggggacttttgccgcaattatcccttatattaaatataactgtacctcgtaatatttatctatacaaaagagcttctataatattatttcttatatagaattaacatttgaattattgttacatttaggagaccaaaaagtatgactttatcaaatttgtcctcactttgggtgtacttaaagttagacacaattcaatgaacttgtaaatgaaaccaaaaagaggaaaagaaaggataaggtaaaagtaaacataaaacagcttcggatttgaatgcatattagaaattaatcatattataataataattattgttatttattaatgtttcttttttcttttcttttcatgttactataactacttaagtatatatttagactatgtagtgtaatattagaatatttctacttaaggaaataaaataatattattgattctgataaat

SEQ ID NO: 362884 - DNA, 743 bp, Cannabis indica
taatagtcgccaccattagggtgatcaatactaatataaaacacttacaaataatacttatctttcgagattctacggcgttaaattgctaatgaacgttcctccattagggaggattactcactaaaacaagaactatgtagaaccaacaatggagatcgaatgtcctaataataaagctcattatttaaagtgtattttcttctaatatttattttaatcaatttattttaaatatatatttatttaattaaaatgtatattacatagttttatttgaatattactatgaagtatactaaataaaactatttcatatatatgcttactattttaaaaaggtatataaaataattggtaaataaaaatagtagcttattatattgtttgacaaactcattcgtttcgaaaataaattttaaagttacccaagtgtattttaaataataagatagcacaatataacttaaaaatagctattgattattaagatgtttacaaataagattttagaggtaatcaaattataagtaaaagtaactaattagtttcttattagcatcataagtaaccaaaaggttacttttgaaaacccaggaaaataatagaaaaaaaacggaatttgggattaatttcgtttcaggcatattattttagaattaaggtattttttaatgacgtgacaagatattattgtaattgagatttattaaggtatttttgataaataatttatagtttaa

SEQ ID NO: 362885 - DNA, 2000 bp, Cannabis indica
ttgaaacactataaaaggaacatgatgctcccactcatccacttgattttcaacctgccaaaaatctagttttctctgtcagacaattagtagatgagagagttccttttatagtgattttacctcctttattgttcttcctatatcggcccttagagatagagtgtcatgcccacacatagtaaatctagtactcaatcatagtgagaaagacggtggcaaccaaacccgaaagacagaaagagatctaggctcaagtcttgataatactttgtgatagaaaggaacaaaatgtaagattttctaaactcctctgtgcttaatttcattgttttagagtattcatatttaggatgtcaattcaacatacttgttagtaaatctagatcctggtaaaatattcccaacaatctcttggatgtaacttacccaacgtccaggttgacgtcatatgtcaacatggacgttggtacctaaactgcctttagtaaaacggccataactcactcaatttttaatctgattgatgcgattcaacttgcattttaaagctatttatatgatctatcaagttgtgtctcaaatctgaaacgtaattctaaagctatcaacgtcaaaattaccccaaggagttccaaaaataaactccgcgtaatccacaataggacccactgggcaccaaaaattggccatcaccactaggagataatttttaccgttagatcatcatcaatagtggaaaaaaaacttatttgtatttttttcctatttttgtgggcctccttcacctataaaggagagcccccttagctcatttttcacattatgaaaacaacccagaaggtcaaagcttctctctttagaccttctctctctagaatttggagtttttgatacttagtctattgctgtaattaccatctcatgagatttaaaaactaaaagtagacatagccctattactatcgcgatataggggtgaattgctataaatttgttgtgtctctctaaattacttaactacttttcttattctcaccaatctagtgagcagttgtggcttagaagtctagtctagagtcaacattttagtgctttcattgagagccatggctcaagaaagacactaattaagatggtcgtagcacgttctataagtattgacaaatagactccggcaactagccaagcaattaggggaacgccaattgacggagttggaattgggactacttctgcgccctaggctccaggagaaggccttggaacctgctcctcaacttatcctttaaggccattgtagagggtaaaatctacaatgatcagaatggaaggatcgcgggcaccgacaacctatagaacaaagtaaaaaggacagttgagaccttgggacaccggaatggtgccagccgaagggactccgacgatcaagtcagtaaacaattcaaataaagagtatctgaatgtaaataaagaagatagaaaacatatatttccactgtacagcgatggagaaggactggtaataataatagtaatgtatttcgtaaatgcttgaataagtgttcagtgagtgaggatgagatgatcctttaggactcctgggttctccttttatagagcccctgatggttgaattcccctattctgaagaacgaatatgggaagtggtcttcccgttttccaagagaaaggatcgattcttcagcttcagttatagactcgttcctatcctttgtatcaaattggtcttatagttgctgggctcgtttgggccttgtattttatccatagcccaatgtattttggatgagtgggttacatttactgacttggtttgaagggttataatttcgatttgggccgtaagaggcatttgggcctagtgtaatcattggccactacagccatcaccaatagctcccaagactggcaccaacgaccagatcccacctagaaagccacacatggagataaaaaatcctaaggagtgttggaaa

SEQ ID NO: 362886 - DNA, 627 bp, Cannabis indica
catcaaaaaactaataccactcatccagaatttctttaaaaatacaaataaatataataattttggtacattcccaaaatattgacaacaaaccaaatttttataataatttgacttcccaaatatatctgaaccaatatattctcattaaaccattagtgtttccacctccctttattagttgaacattttgatatatgcttgaatattaaatatttaataatttctatataaatatcaaaaaatatcttgttcatatatgagattgtgacttgtattgtacaaagaattaagatcacttagtcatgaataaaatagtctgcaacatattaaagttaaggaatctttaatcaacggttgctagtacggttcagtgatgaggcaatctcgattcgaattgatgatgtagtatgacatctaagtagggctgtacaaaacaatttgtaaatcgcccaaaccgaaccgataaaaattacaaaccgaaataacccaaaaaaattacaacccgcccaatctgttaattgggcgggttgaaaataggtcaacccgcccaattaaaccgaataacccgaccaactcgactttggctttacttttatttttttactttttaatttttatttatat

SEQ ID NO: 362887 - DNA, 568 bp, Cannabis indica
agtatttttaccccttgaactttcgacattatcttattttgccccctaaaatatacggcttgttaaaaattcttcttaaaatataacagttacacaattatgccccttctgttaggttctgttatctttaccgttaaaaattaacatttttatcccgtgaactttgaccttgctctcttttattaaataaataattttaaaaattataatattctattttttaagcaattataatattctattaattttaaaaaaaaataataaattttttaaaaaacctgcaaaaatataaaattaataaaaaaatattaattttacttaaaaaaaattaaattattcttaaaaaatattgtcaaactttattttatttataaactcgaatcttaaataattaaactaaaattattgagaatttaatatataatttaaataaactaaattttttcgaagaaagaatcaaaatgatttatgtttatatactcatatattaacaaataaagaaaataattaaaaattcaataaaactataaaaattattttgaaaaaaagttataaattaaactaaaaa

SEQ ID NO: 362888 - DNA, 551 bp, Cannabis indica
aaaaaaattaagcggggcgggtcggatttgattcaagatccaataactatccgaatgtttcggatcagtaatgatccgtcggatcggatcactgacccgacccgaatgaatggatctttttgccatgcctaatgtaaatgggtcccaagtccgggtcagggtctgggtctggtccgggtccgggtcccggtccaggtccaggtccgagttcgagtttgggtcccaaattctagtctcggtcccggtcccgggcgggtctgggtcctgggtccgggtccagggtcccgagtcttggttccgagtccgggtcccgagtccgagtctgggtccgggtcccgagttccgagtccgggtccaagtttgtgttcgggtctgggtccttgtccgtgtccatgtccaggtccggtgtcttgggtacgggtccgggtctgtgttcggttccggatcccagatcctaggtccgggaccgggtccaggtctgggtccgggtcccgggtttgggtccgggtccaagtcccgggtgccgagtccaggtctaggtctgggtccgg

SEQ ID NO: 362889 - DNA, 500 bp, Cannabis indica
acatgaaataactcaaaaccggtcataactagaatcgaaccggttatataacataatgaatacaaacaagtaatacacaataattcaaactgattacaattaaaaaataaaggggaaatcagttcctaaaacactgaaacataaattaaaaacaaaactagttctataataaaaaaaatctcataacccataatacatcataaaattgattataatttttttaaaaaaatggagatcaatttcaaaaaatattgaggcataaatatgaaaagaacgagttccataacaaaataaagaaacacaaataataacacacaataactcaaatataatataaagaaaccgtttatatttataaactagttaaaaatttaagacaaaaaaattagttctgtaaagcaactaagttaaaaactcacacacacaaaccagttaaataaaatagcttaaacaaaagcatccattcaacatgctccaacccaccaaataattacactcat

SEQ ID NO: 362890 - DNA, 768 bp, Cannabis indica
taatccaatggcttaaaaaaatgtaaccatgatggttacaataaaaatgtaactattgaaacctcttccatattatataatattttacaacacttccttttggatgtccataataggtgctcaaaaatcttgccagaaaacctagtggatcaaaaacttggtcaagagaaaaatgagtggaatatgaattaactccccattatttaggcattcatggagatcttctaatcgacgaatttcaatcttgtgaaccatcttctcgaatattaatagcggtaatgacttcgtgaataagtctgcaagattgacactttattgaatatattggacaccaatatgcattctcttgaaatgtattaagaagaatttggtgaaatgtgttttaattctatctccttcgatgtaccctcattttagttgagtgatgcaagcagtattatcttcatagagaattgcttgtgttgatatttttttattgagtgtaattcatatattttccgaatatattatgccaataatctcactttcatatattttctacttgcttcataaagtgcaagtatattagcatgatttaaagttgtctcgttaaaaatattgtcaggaaaacccaatgagataaaacttgagctaagaaaaatagagcgcaatatatatatttcacattcataattatgtgcaaattgtctcgttacaaaccttgttaggaaaactcagtggaccaaacctgaactaagagaaaagagtgcaacatgaatatgtctcacc

SEQ ID NO: 362891 - DNA, 560 bp, Cannabis indica
gatcttggaatcgtactaagaccaaaacctggagcaaaatctagactaggacccaaacccagactcggacttgtgacttgaaattgaaacaagaaccggaatgaagaccttgggataggaattagaggttgacccaaaaacggatatagacacagaaccgaacacagacccgaaccccaactgggatcgatagctggacccatacttgcgttaggacctgcgaccaagaacctagaacccaggacttataacctgagaccttgaccagaacccagacccatacaagaacccagacccagacccagatccacaccaagaccgggaccctaaaactgactgaaattgggaccgagacccagacccagacccagacccaaacccaaacccggactcgtacacgaactcggattggaacccgagacttggaccaggaccgagatcaggactgggacccggaccaggacaacgactgagacctgaacatcgactggggctaggacccagactgggactgggactaggactgggacccaggaccgagactgggatacgggacccaa

SEQ ID NO: 362892 - DNA, 561 bp, Cannabis indica
tactttcactatttttcttattttaattttctctcaaattcttattcaaccaaatagaagtagaaatttaattttaaagtacttaactacaatccctgtgggatcgatctcactcttagtgagtctattacttgttacgacatgtacacttgcgtgttgaaattaccacaacaacacaccctatactttcatcaatatgcaattcgaatttctaagcaggtaagtttgaatacaattggaagttcaacttaataatctttgaactgtatatccaccaaatatttctccatccttatcagttcacaagatctttaattacttaccttaaagtttctcaacaatactagaaattcattaaatttttcaaacatttcaaatttctttgcataaggtaaatatctagagtgattgttttaagaatttaacgataactcatatccacccctaaatgtacatctatattttcaaatacagatgattctactttcaagtggatattggcatattttctctttgtaaagaatcatcttgtcaaaactactatgaacaagatacatatgc

SEQ ID NO: 362893 - DNA, 627 bp, Cannabis indica
aaaggccatccaccttagaatccaagcttggtacgacgccagtgcctacgcttggcattgtaccaaatggtgttgtcggtcctcaaccggatccagtgaggaatcagcctgttctagtacatcttcttctccagcttcttcttgatcatgaaactcttgtgcgagggcatctttgctgagatggatagctgtctggctagcttacgaagatctcaaaattttggtctggcagaggtttgtgcgcgaaaggagaatgagagagagagaaggcgactgactgtagagagaaaggtggttgacggtggttagagttccactggtgctgggaagagagaaggtgcgggtgcgagtgcgggtgcggctgagacgagaggaggtgcggttgtggctgtggctgagatgagaggaggtgcggctgcggatggctgagaagagaagtgcgcacggctggttgagaagagagaagaaaagtgcggctgcctgctgagaagagagaagagaagggtgcgtgcggttatatgtttagaaaatttagggtttttttgtttatgaaggaagagagagagttagaaaaataagatatatatgaataggttttttttatataaatatgttatttatttattt

SEQ ID NO: 362894 - DNA, 792 bp, Cannabis indica
atcatttattaaaaattagaaaattgaagatatcaactctctctctctctctttgctttgagtcggccaccaagaacccaagaacaaaatcagattttctcttctaagtagttcatttcttgaggaattcagcaatcttgactctagtattttgctaaggtaaggtccttcttcttccttttggaatttaagtaggaaagtgtagtggttttgcatgaattttggtattagggttgctgtaattgtgttttatttttggagaagtattctggagttaaagttatgttttttgagctgatttgaagcttgttggtagcttgatttagttgttggacaaagtttgagttttagaactcaaactttggtctttaatggtaagttttgattctgtgcatgttgaggtgttttgttgccttgaatttatttattgggatgtttagaacaggtttggaaggtttcatttgattttgggttgatttgggtgagatatgaaattttgaatgtttcctacactgaaccaaaattccggttcagggggacctgtaagaactggaattccagttggttatcaggaaaccccgcagaaccggaattccagttgggaactggtctactagttggggcaattttgggaaccctagtttttcccatttttgtgatgtttagggtattgccatgttgtttattgatagtgaaacttttagtttcaagtttaagtcccgaaaagtgatttagcgtgtcacttacctatgttatgattgatgtgatttaggagcctgtaatttgccgagc

SEQ ID NO: 362895 - DNA, 419 bp, Cannabis indica
tcaacgatcggtgaatgaaatgtttgcgaatcagattagatggaacatggaggtttacgtcgatgatatgttagtgaaatcagtaaaaagtggaagtcataccacagacctcgcagagtgctttgaaatattaaggaaatacaatatgaagcttaacccgaaaaagtgttcctttggagtttctttaggaaagtttctgggattcatagtcaacgcgaggggcatcgaagcaaatcctaagaaaatcaaggatttgatagatatgccatcaccaaccaagcctaaggaagtccaagccctaataggaaggatggctatacttaatagattcatttcaaagtcaactaataagtgtttgccattttttaatatatttcaaggcaacaagaaatttgaatggataaaggaatgagatgagg

SEQ ID NO: 362896 - DNA, 534 bp, Cannabis indica
ctaatgtatatcatggtcagtagtaggcctgatataactcattctctaagtgtattaagcaggtttatggcaaaccttgggttagattactggaatacagtgaagtggctgattatatacttgaaaggtacaatcaagtatggtctgatttatcaaagagacacatcaaatgtgagattagaaggctatgttgatgctgattatgcatcaaatagggataacggaaagtctactattgcttatgtgttcatggtcaacaaaagctacatatgttggaaatcacaacaacaaccagtggtggcactgtcaactatagaatctgaatttatggccaccactgaagctttcaaggaagctatttggttacagggaatactgtaagagctgcatctactcaaagacaaagggacagtctattttgatagtttgtcatcaattcacctatttaaagagcaagcacattaacattagactatactagatttgagagaagattgaggagtggctgttggaattatttttaccaggatctta

SEQ ID NO: 362897 - DNA, 853 bp, Cannabis indica
tagcgtgtcacttacctatgttatgattgatgtgatttaggagcctgtaatttgccgagcagagtttccactcaagttggcggacacacctaaattcagaaacgaggtaagattagtataatggtatgcatatgtatatacatgtttagtgtggatgttagttaagcatgttagattacattagatatgtatgttggcttttgtactatccgacggtatcacatcagtacgtctagagtatgactagcgtaccgagtataggctgatactatggtcgatagtaccgtactacttgacagtatcacatcggtacgactagagtataactagcgtaccgagtataggctgattttattgtcaatagtactgtcgtacgaacgttctaaactcaacaccgtgcgggtcacgtggataggtttatgattgggggtttgggcgtccgatcataatctgggttattgctatgttattgtttatactttttttactgagtctgtcgactcacagtgctatttccatgtgtaggtaagggcaaagctaaagctgaggtgccgtgagagtgagcaggtgaagattgtacatggtcggggcggttagacctggagcgtacgatctttgggacgtcagggcttttgctgtttggtcgctaggcgacaaatcttttgtatatgagttgtaaacttttgtaaatgtattttgtaaacgagatcctgggattttattaatcacgttctttaataatctcgttgattaacaacgagctgtaggggtgttcgcggtgcgggtggtgcggtttttaaccatttttcaaaccaacccgcacatgtggtttttcaaattttccaaaccgcac

SEQ ID NO: 362898 - DNA, 478 bp, Cannabis indica
attacattagatatgtatattggcttttgtactatccgatagtatcacatcggtacgtctagaatatgactagggtaccgagtatatgctgatattatggtcaatagtaccgtactacttgacagcatcacatcggtacggctcgggtataaatagcgtaccgagtataggctgatattatggtcgatagtatcgtactacttgacagtatcacatcggtacggctagggtatgactagcgcactgagtataggctgatattatggtcaatagtactgtcgtacgaacattctagactctgcaacgtgtgggacacggggatagggttacaattgggggtatgggcgtcggatcataatttatgttaatactatgttattatctatgcttttcttactgagtctgtcgactcacagtgttatttccatgtgtagggaagggcaaggctaaagctgaggagctgtgagagcgagtaggt

SEQ ID NO: 362899 - DNA, 380 bp, Cannabis indica
ggtaaaataattccaacaggtcctacccctagagagttggctggctagatctgagctttaaaggatggatatcggtgcagcaggcgttctaagaccacgttcgtttgtctttgctatttttctcatgtagatgagggcattaggtcttatttgagcaacacctctgatctgtacagttttggccctcaaccggacctcgacaagggattaggaagtcttcctccttctctcgcatggactttctttccgataggcctatgttcataaccaccgtgcatatctctttctttagctctcaatgaaagcaccaaaatgtttactgagtttttcgacaatcgaatattttttttgatgaatcagactttcattccacacaaaca

SEQ ID NO: 362900 - DNA, 614 bp, Cannabis indica
ttctttatgcctctattgtgataaacaggatctggcgggtccgaaatgataaggtacatgaccagaggattgataatgtgaatcaatgtattgaatctatttctcactcatatgcagtctacagagattctctcatcccacctcttgcaccaaaccaactcgttgtctaggagcctccccctcaggactggattaaactaaattgtggtgttagagtgggtggggagcattcatgtgtagcagtcatcgcaagagaccatctgagtaaggtgatatggatgtacacgacaaaactggacttttcagacactctttgtggtgaagctgctgtagtttgtttggcgcttgaagtggcaaaggacaaaggatataatttcatcctagttgaaagcgattctaaggtagtgatcaattcgctcaatggcttcgaccctagatggaaaattgagaaatattctttattttgtaatagaatcatttcatcttttgttagctgtgtactatgtattactgccagaacctgtaattttatggctcataatgtagccagatgggcgttttcccataaccgtttggggtgctttgatgtggcatctatccctatgaatatttta

SEQ ID NO: 362901 - DNA, 518 bp, Cannabis indica
ttatttaaatgttaattttatctatttaataattattaaactaaattattattttaaatatatttattaattagactcatgtagtgtcttaattaactaataaactcttatttctcttttattttcaaataagccgttgcttagtaatattcataaacaagatatactcttctttagaattctaattgatttaagaaagtaatattgagtctacaaggcaatattatcccagataatgtagggaccatgcacttatgtaaccaagctcccaataagcagttcccaaaatttatgaataaattttttaacttattaattctccatgactccactatagattcaaactgttgggttttatgccctaaataaaaccaatttcaatataatcagatttattaattaataaagataaaaaaatcattctatgttgcatggtttacatgatttatttcatgattatgtttaatatacaaattctattaagtccagaacatatataaatatgtatatatttgttc

SEQ ID NO: 362902 - DNA, 404 bp, Cannabis indica
tgtaacatacatgtaatcataattcacttctaaattgataactaatcagattgtaatgagttttatttagggcataaaacccaacagtatcaccctacaattaatgccttaattgatcgcccagccctgtatggcctgaaagcagtcacttccatctttcacctccttgttaaatttcctacgaagggttgaattggctacctgaagggcaatcaaatcgtagcacgagaatgttacaacctatccatcacaaccggggagaaagtagccaaatccctcaaagctacaacaagtagttctcagcaatgaggactcgcccaaaacggtgtcaaagacattgatccccattttagggatattgatgaagggattggtccaattgaagaattggaggaagtaccatt

SEQ ID NO: 362903 - DNA, 569 bp, Cannabis indica
aatcacgtaatacgcctatgttagttagggtggtacacaacgaaactaacgaagcaaaataagtaaaaaagtttgcatagggttcgattcggaggtgggagggaaagagagggaaagagagggaaagggagagacttacggaggtgggagaggagatttacgccggtggagaagaccttcagaccttcagagcaaaatcgcgagcatatagggttcgaatttggtctgtctaagaaatttgggagtaagtgaaaaatagaagaatttgcgtcgttttaaaaacgccacgcaatctctttaccgtcggtttaaaaatgtcacacaaagtattcgtgagctttgtaaaacgacgctaatattgtatgtattttttttttggcttttaccgtcggttgtgttattagtgagggatatagaaccgacacaaattatttattatttgcgtcattttacaaacgacgaatatatttaatatggtactattcacgtcggtcaacgcgaagaacagtggcgttgaccgacgtgaatagtgaattttgtaatagtgattttgggaacacggtaatgca

SEQ ID NO: 362904 - DNA, 658 bp, Cannabis indica
aaattggattttgaaatattaattgtcagagcatttattagccgaaaaccaaagggacatccagctagcctcacatcgagtctcggacggtcgcactcaacacgtgtccacattcaaaggtagaagcggctcggataaagtctacacgcaacttcgaatgtcccgtgcagacttggggggcaaatgttatcccaatttttacactctgacgtggcatcacatgaatggtgacacgtggaatccaattggaacatctgctcgggaagcatagtctgagcaggatgcctcgctggcacgcccagggcaaagtattcagcaatccacgcagagcgaccaacagttagcgaattcagctttcgcatcgtgagccatcagcacaaccctaaaactcagggaccaatttacatggatatggcatacacacgatcccgctatcagtgtattcagcctcgatcccacgatccttgcattaagcatcgatcccacgatcttttcgtttatacgcattgaaacgagaggggaaactcttcctcctcaagcttactagccctataaatagtgatgcatattcactgggcaagaggtcgaaaaagcagttgagctaagacaacaacctaaatatattatctaagaattatacattcagagatactgttgt

SEQ ID NO: 362905 - DNA, 743 bp, Cannabis indica
ctcattatttaaaaaaaatgtatttttatttaatcatttattttaattatattttaaaaatgaaaattataaatttaaagttggtccgaatttaattgaaaattatttttgaaataattttcaatatttaattttttcgaaaattatatatcaatatataaacttcgaataaataaataaataaaattaaaatataataaaataaaatttgaaaattatttaattcaagttgatctaaaataactaaatttcaaacttaaattattttcaaacaaaatttaatgaaataaaaaattaagttactaaccacctaatttgaaaaatattccattttaagctgatccaaaattaacaaactttcaacttaaaacaatattccaagaatctttcaatagctaattccaagaattcctcaaaccaattatgaatttcaaaaatattcaaattcaagttgattcacaaaattagttataaataactaatttacaacttaaataaaaatatttaattaaatattaaataattaagcattagaagaatctaattagctataattctatagttaattaaatacaagaaaaatacatataatttatcttgaagaagtttcattaaacaaagtgtgtttttcttaaattaatttcaaaatattcaaatgaaaaattaatttcatatattttgaaattaattataatgccaatcaattttattaggttaaactaatttaattaacctagtacagt

SEQ ID NO: 362906 - DNA, 521 bp, Cannabis indica
actctcaatcagaagaggagcatgagcaacatctttgaatggctctgcagcgactacgagaaaataaactatatgccaagtttaaaaagtgcgagttttggctatctcaggtgttttttctcggacacctcgtcagtaaagacaagatcaaggtcgatctaagcaagattgaatccttcagggattggctgagaccaaagacagttacaaaagttaaaagtttcctaggtttggtcggttattatcgtcggtttgttgagggattttctaagatctcaacacccttaacggaactcactaaaaagaattagcggtttttatggacagacaagtgtgaagcaagctttcaagaattgaagtagagatcgatcacagctccaatgttagccctaccatctgataaagaaaaatttgtagtttattgcaatgcatccagctagggtctggggtatgttttgatgcaagccaaccatgtcatcacatatgcctcccgtcagttaaaagaatatgaacaacaatac

SEQ ID NO: 362907 - DNA, 618 bp, Cannabis indica
cctcgtcatgcacacgtgcaccccaaatggttgtcaatacataagttagcaattcgtacgaatctgcctcgcagatggctattcagccagccgagttataaacataccctgcgaattatgtttccaacgagtttttccatgctaagtgtacttttcgtttgtcgttcttcgttcttcccagctcgacacgtgtcttcctctgatgtgcttaccgaaattcgggtatagcaatactcttaccctctacttaagtataaaacataatttacattaacttaagcggtataataaggacatcatctataaaagtgaatatatcttaaaaaatgtaaaattaaaagtaaaaattaaaacaaataaaataaaatgagtatacaatatagtttcctcaatattttatggggtaagttaaaaaatgcctcttttattaatcaattaatcaaatttacccttaattttatgtttatttgaaacatacctttttttatatgtattgtacctaaaataccctgacataagagagtcacatgaagagtatcttgaagtgacaagggcgaaattggtacaatgttttaaaaaagaggtaaaaatgatagactttaaaaaagagggtaaaaa

SEQ ID NO: 362908 - DNA, 665 bp, Cannabis indica
agaccagaggcccaaaaccaaataaaaacccagaccgagacttaagcttgaacctcgactaggacccaaacccgaacatagaatgggaccctaatcgggacctagacccagaatcgagatacggacttgggaagcggaacaaggaccgggacccaagacccgaacccaaacccggacttaattataggacccaactcgtgactcgacacacgaaatggaaccagaccgagacccgagatcgggatccagatctggacctgcggcttggactgaacccgtagtcggtgtctggatctgggacccagccccgaactcgaacctagaccaggaccaaaaactagaccaagacttgaacccagtcccaaatcgcaacctagacccgaacacgtaccttgtgagccaaaattagaaccgaaactggaagtagaccgggacccggaacaaggttagaaaccaagacttggacctggacctggacctggaaacgtaagcagacctggacctagactcggaaccgtaaccggactaggacccgaactccaacccagacctagacccgaaccaaaaccccgacctggatcccaacccagacatagactcgaggccaaacctggactcgaactaagacccaaacatggaagcaaaatcgggacacacaattgggg

SEQ ID NO: 362909 - DNA, 707 bp, Cannabis indica
ggttttgctcacacgcgtggcactctctataggtcatggtttttttatttttataaaattataaatttttggatttttagtatttagtgacactccataattttagtgacccacattttgggtgataaacactaaatatttagagtcatttagtgtgtgtcactaaaaaccactcttaattttttagtgacccacacttttatgcgtgtcactataaagtgtcactaaaagcttaatttgtagtagtgtcaccatcaaaaaataagtcaaaacacaccccgaggggtctgaaaacatgtatggccgagagttgccttttttggccatgtaagtgctcgcaactagaacaaaacagtagaagctacccttcagtaaaacgatcataactctctcaatatttatctaaatgaactgaataaacttgcattggaaatatattttcaagatggatctaagtgtgtctcatggtcatagcttaattcgaaagttatcaggtccaaaattggctcatgataactcttgaataaagagttatttgtcatgttcttttagcttaatttatgtgtgtatttaacttatatttagttcttttcctcccatattgtgagaatatatgttattttgtgtttttatgttcttttgggtaatggagttgttagtgagaattattaagttttatttgggttttggtaaagaaaagggcttaa

SEQ ID NO: 362910 - DNA, 653 bp, Cannabis indica
tcgttatgcgatgtccgtgagtgcgactatgcaagaacgcagacatcctagacttaactaaatattaggtatatcctaatcccgcgagcttataccagaatatgaacagccaactcgaacattagaagtcgcatacgttgctgtatttagtgaatagaaactgttattcatttattgatgtttacgtttttagtttaattactgtaaatcaatgtataaacggattgataatgaatgcaatccttgtgtaactaactggacacttgctttgtatataaaggagtgatccaccatgaaatgacggtacgaaactcttgcaatagtggactaagcagaccgtgatctgactgaaccactatactcctttgtcttcttgatatttcaagtttttactaagtacttacgttcctagttcgagtactcgccgttctaggttgaatactcgcagttgttcttcacgtaatttcttcttattattaatattattattcatttttggtgttgcgaattttgctcgacaacagcctgctgggcagactacgctcaaaggttttgacaaatggaaaaaagtactcaggtcagatgaccactatttaaagtacaatttcttatttctacaatttgttttatttcatgttatgctaaaagaatca

SEQ ID NO: 362911 - DNA, 1128 bp, Cannabis indica
tttttttcttttttctttgaaatatggatcattatttatttatttgtatatgtagtgtagttgatgcctgaactcatgagacatatgggatggcatttattaaagatacataaaacaaattttttttgctaaacacattctataatactaacaattcaattattctcataatttcattccatagtaaaaagttattttgcaaacaatgattaagaatattcctaacttcaattagtttataatgttctaaaaaatcagatttttctaggaagtttttgttagaaacaaataaaaaagtaagcaataaattattgggtaagtatattgtgcacttaaatttgatagattcctatttattttagcatacaagagagctttttaatctattatttttcataatcacatacattataattgtttatgaccacctaaaaacttttagagaattacgagtagtttacaatactaaaaataagatttatatattttgttgcacgtatgcctattttaaacctggaaactttccttggtgacgtggacattaatatttgacacgtggcatgaaggataatgtcacaaagttgagtaagcccgaatcatagcagtcgacctaggaggggaccttaaccttgcgcccaggttgacttcaagatctttgggatggaagttcaaacttcaataacttgaatccaactaaccatctttaagtattctataacatgaagacatggaaaaccctaatccaaggcccgagagctaaaattacacgaacctgcaacccagaagccaacttgggcaactagggtttcacccagcgcctaggttgacatattcaactagggttttagtttttcggacagtcttagtgcacaagggtcaaaacatacattacatcaactagatataccacgaacatatttgaggcatcaaaattagaatcggagcaagtccatttttgagcacccagagccttgagcacccatcacccaagttgacaatctgtaaatctaggcaccttccaagtatcagatcgaaggtgcaacttttgcatcttcttaatcttcatcaaaaacaggaaataggtcctttcaaagaagaaacaacacttcttgggtacaaaaaataggg

SEQ ID NO: 362912 - DNA, 1962 bp, Cannabis indica
gttttgttttttaccaaatgcttcgtataggtataagtgccgcccaaatgaccaagcagacttatgactcttggtcacttttttttattacaggtatattttttttgttcggggtttcgggttcgaccaaaccttttgtatgcactggatggtaaattaataacatgctaatgaactcgattaaatttaaatttatgcttatctgatctgatctttagcttaacatgaacaagtcaaatttcagaaaataaaatcgtcatttgaaaggtggtcatccgacctgagtacttgaaaattgtatctgaacctttgggcgtggtccacccaaaaggccatttacttaagagaaaatattcttttattttgtacttgatatggtcgtccgacctggtacctttattggtagtattttcttaaatgttccccgttccaataccttagtactagaacaagttgcattttttcatcgtacttacccaacttgtatgcccctgattctagaacttcgaccactagatattgtcctttccagtttggtctgaccacacttgtcgtactgtctttggtgttcaaaaatactcttcttaggaccatatctccgacaaataatttctgtgctttcacttgttcgttaaaaataccaagctactttttgctgatgggctatccgttgaagtttgctgcggttcgtgtttattcaatttcaccaagtgattctgcaaggagtatatgattggcctcttggctatatgttaatattctgtgggatggcgggtcgatttctatgagcagcatagcttcatatccctgtgccatggcaaatggagcctgtccggttgtcgttttctcagttgtgcggtatgaccatagaactttaggaagttcttccagccaatttcctttagcatcctcaagtttcttctttagggtgtccttcaatgtcttgttgactgcttcaacttgaccatttgcttggggatgcgctactgcaaagaaactttttatgatgccatggcttgcacaaaaatcggtgaaggattgactgtcaagttgtttgacattgtctgagactatcttgtatggtaatctgaaccaagaaattatgttcttcacaatgaagtgttgaacgtttttggacgtgatggttgccagtgtctcaacctccatccacttggtaaagtaatcaactgcaaccattgcatactacactctgcctttgcctttgggcacctgtccgatcaggtcaattccccaaatggcgaaaggacagagactttgcatctgagttagttcgttgggcggtgcccgagggatctttgaaaatgtctagtatttattacatttctttacgtaggccttggaatcttcaatcattgccggccataaataaccttgccttagaattttcttagataaactcttcctggcagcgtggttgccacaagattcgtcatgtcttttgataaaagtcgtgcagcttcttcttgtgttacacatgaacctaagtaatggcattgaaaaatcctcttctgtacataactccctctaccacgatgtactgtgcaacctttctcttcattttctgagcttcgtttctattgtttggaagttccccagtgttgaggtaggccgctattggcgtcatccagtttggggatgtatcaatcatttcaacctcatccgtgccggtgatactaagttctttgagaaaattgataggaatcagatttcctttatcatttacagtagtgctcccaagtcaagctaatgcatagcttttgaattgtgtgagaagatcgtgtatttttctcaaataggctatcatcttttttccccccaagtcctcgtactctctggatacgtgatttacctaccagctgtcaatcgctgcagatctcaatgtgttcggcccgtcatctctcgggcgtagttttaggtcccgccgatcagagcttcatattc

SEQ ID NO: 362913 - DNA, 774 bp, Cannabis indica
cccatggtccgatgggtccgattggtcggaccccatcggaccatgtggtccgaccatcggaccatttttttttttttttttctgttcgattcgagagagagacgaagagagtgagagggggcggtacagtgggtgggtggtggaggtgagccgtggtggtgcatttgggggtgggggcggtgaaatggtttgagcgtcgacggcgtgggtggtctgccgtgggtggtctgccgtgggtgtgtgggtgcggcaccgagagaaagagagaaagaaagaaagagaggcgaaagagagagagggctgatggtttcaaatggggggtattgtgggaattaagaaaatgttatcccattttaccaatattccctattttaagtttagggaaaaaattattccttaatgtaagcatagaaattcaaatttctcttaccaaaatgcctcttacactatcacttacataatcagacgatggttgttgggtggttggtcgaatgtggcatattcaaacaaaagtttcattcagaggaaggttgctgggtagttggccgaatgttgcatcagacgaaggttttaataaaacgaaggtttcaatcagatgaaattaacttttagcaaaatgtttatgcaactgtaatgtaactgttatgaaacattaaaaatcggaacagtgtttccacatacgtaactctatctacatgtcttatcatgatttaatatgaacaaattcaccattagaaatttagaaaacaacgaaaatacaccaagataaatatt

SEQ ID NO: 362914 - DNA, 604 bp, Cannabis indica
atgaatgtatatgttgtacgaattttttccattgaaaaattatttttctaatttccaaaaatatttatttggattccttgtgaaaaattaagcaatttttatttttacggaacttaattccgatgaaaaacgaaaaagatatgaattttggaaaatcgggattcaaggctgtcgagggtggtgctcatgcgcaccagaccctcggatcagcccccccttgcgcacgcgtgtgacgagcctcacgcccgagaggatcctccaggtttccttcgaggagctcgcatacgccgagtttcctcggcatggttcctccttcccgcacccgaggctgcgtgcagcccttcctgggcagccaactccctaaaccgatttttgtgggtctttccccaaaaatcttaattttcatgggattgttttctaaaattcaattttttcaattttagattttttgaatttgaaatatttctaattttaaatatttccaatttgaaatatttctttttaaaaaaaaatatttccaatttggagtatttccaattttaaatatttcctattaaggtaagatttaaaaatttgttaacttctttaatatttatatattatt

SEQ ID NO: 362915 - DNA, 669 bp, Cannabis indica
taatctctcccgtttagtttctttttgtaatcctgctgtcttatttattacggaatctaggcttgctaagaatgttgttgacaatcttaagcacaagctccattttgactcgggtttggaaatacctaggataggtagaagcgggggcttgcttttattttggtctaatgatgtaactatcactttactttctcaatctattagtcattttgattgttatgtctcgtgtacggttaccaatgtgtttttccatcttacgtgtttttatggctctccggttgactctcttaagccccacacttggaatatcctgaacagaattggtagggataatcctcgggatctgtggattatcattggggactttaatgcttttcttttttcccatgataagcaagggggaaaccgtgacaggggcccctcctctgacttcagacggctccttgactcttttaacctctccccgcttgacccgtctggtcccttgctcacgtggaacaataatgtcgcttccctaagaaacatccaagagcggttagactggggcatcattaataacccttggactgataattttcctgacgccacccttgctcatttgggtttctacggttctgatcatcgagctcttgaacttgtcacttccaacccctcaggtacccgtcccaa

SEQ ID NO: 362916 - DNA, 559 bp, Cannabis indica
tatatgataataatattaattttattactattgatgtggagattattatcatatatattatgaataaaggaaatttgaaattctttttcaatagtaattttgagaaaaaaattgtaatttgtgagaatttacattctttgagaataaaaagtgataattatctcattttatgagataagaaaagtgaacaatgagagttacacttatgagaattgtcttgtcataggaagaacaaatagatcaaaagtggatctaaacttgtgaaatgagtcatgaattggaagagaacttttagactcaaagtaaataaatcaatgtggattcaaaaattgtgaaaagataacaaaattgaagaagcaattttaaatcttaaataatcaaagtggtgatgtgagtttgatattttagttttgttgagaaaactaaaaatatcaaatggaatttttaaagtgaccttaaagagtcatttcaagaggaaaatacacaaaagtgatattttatatacactttttggtagaaatgtgggggtgagccataaacttaatcaaaatgtgatgag

SEQ ID NO: 362917 - DNA, 451 bp, Cannabis indica
agttactcagaaggaggcaaaatactcatcctacggctatactgcaccgttgcagtattgggcatacaaggccatcttacagctgggcaacgagtacgcagtgaggaagtcgcatcgctttccgagaatggtgaactgggagagtaagtcgaacactacactcgggaaggatgaagtgatcagattatttgctaaaaatgtaagtatgttacgctttatgtttaattcatgttaattttcatatagtatattaatatatttgttttattttttaattgacagtgtactccatgttctgtccacggccgaatgagattgagtttgtcagttacattactgggggtcagtcgccgttatttgttgacttggaggaacttgtgttgggtgaggatgggcaaccaacacaggatgatttgcgaagccaggccgaaaagtgttgggttttatgccc

SEQ ID NO: 362918 - DNA, 728 bp, Cannabis indica
tctctctctctctctctctctctctctctcacagcccaccctcaccaccacctccgacctccatcctccgacctccgaccctcaccgcgacctccgaccacccgcaccaacaccccgacccagccccactctctcggaccgcccaaaagtcgcaccccgaaatctcttcctctctctgaaatcgcagaaaaaaaaattgcccccaggtccgatggtcggaccatggagtccgatggggtccgaccaattggacccatcgaacccatggtccgattggtcacatgtcactgctgcccgtgcctaaacaagcatcactgacaagaagaaacctaacaacggtttcagtttatagtcatgactttataaacggttgcctcacaggaacaacctgaatgccaatattcatatatcacatcacctaatcaggtgagctcgtatatcacctaatcaggtaagctcgtattttcataaccatgagtttagtctcctttgtcagatagaaaatagaaaagagcccctcttctattatttcaaaatcctcttcttcttcctcataaattttgaagcacatggtgaattaagagtatgccctctcatgtcaaagcaatacctagcatattgaggaagactgttgctgatcatattgaaggagagaagatctaggttcagatattgataatgctctcctacagaaaggaatcaagggctagagatctgaatggaaagag

SEQ ID NO: 362919 - DNA, 548 bp, Cannabis indica
attttacataatacccattttgttctcaagaagagaatatttggatatatgcaaacgctattaaataataaaaggatattagcaactaaaattttaacatttaattataaaatttaatttttgacggttaatttttaatttttaaattaaaaaaaagtaagaaaagaaaaaaaaaattgattttttaattttttaaatatttataatcattttttaaaactaatattatgtgaactactaaaaacttgccacgtgtataagtgtgtacacgtggacagttcaccgtggcacttaagtgttacaaaatacaaactgtaaaattcaagtgatttagctgcaaatatcccaataataaatagttctacaaggcattttggcatgcacaatacctttttattttataattatttgaatgttatttttagtctcttaaatctgtataaatttctcaaaaatttaagatgtgctaaataactatgcttttaaatgtccaaaatagattttttttaaaaaaaaatatatatatccaaaatagatagtttactcat

SEQ ID NO: 362920 - DNA, 589 bp, Cannabis indica
cccaccgtttcgaggaatctaaccaatcacaacctgcgagtatgtcacgcgtatccgactagcgatatacctcaaataactgctgggcatttcccagtgacccaaggggcatgccttttggagcatgaccctaaagttactgggaaacacccagcgtttcgagcaaatctactagtcgaagaatacgattatttgggaactgagagcactggcttatgtcgcaaatggctgggtgtatcacagtacttcaaggaacatgcgatcgcacgcatgaacattagaatgtggtgtcacacccaccattcgaaagacttaaccagtattcccacaacaaaataaaaccctatgctctaaacaacaagtaaaatgataaagtctctaggaattcctaaaggaagaagatatggaagtattcaagatgctcatctgaatacccgcgagtatttagggataagcaatcaaaaaggtgcgagtattcagactattcttcctaaattggcagttatgccaattacaggtccgtttttcctggggattatccaattttaacaaaggagtaaaagtctatgtgtattccctacaactaaac

SEQ ID NO: 362921 - DNA, 1508 bp, Cannabis indica
aataaaaataaaagcaaacacaattgtattaagttcaaatgaaaatagtacaaggcaattaagataagaaaaaacctaaaactggttacaaacttgtctttacaaaaatgccactacgggaaaaccattaagtcatcttcctaaacaatggatgagaggggaagccgataaacttgagaaagaccgtcttcatacagcctaagaaagaccgtctggacgtagctcgaagaaagactaactacacatagcttgagaaagatcggctacatgtagagagccttgatctctgcacatacctcattatcctcaacatcaaaagatcccatttcctgaagccgagatctcttccccagcctcaagaaattccttgttaccagaaagagtttggctcaaaggtcttctggcgcaggtttagatcttgggttggctggattctctgatagaaaccacgccaacttccttcccgaattcatatgaaaccacaccaacattcctctagaattctttatcagcctgaggacgacctttaagatcgctcacaagatttgtgccctcaaggatcacttatgaggatctcccatggcgggatatgaggttcccctggtttggattggtcggaagctcatcagccttggaatcaatcgttttcggctccaattgagggttaaagtcctttggaacaaatggaaaatggttggtgcatcctggtattatgaatttgggagggtgaacttctgaactcagaagggacattctagcaagaaagagggtgatccattttgaaaatggatctcactaaaaccagaggtttatgagaaaggacaagcttgagccgccattttatacacaaattccagtgacaagaaagctaaatattgggaaatctaacggtaaggagtcggatagaatatgaagagacgattcatattgaccattggaaccgtataactgccagaatcaaaggacgcattttttccaagacgggatcttgacgaaaatgccctatgtaattattaaaaacctctttttactaaaaaataacttttaaggggtaattattatacccgaaattcagttgccatctcaatggaggacacatgtcaagataaagggaatgtgaatcgatgcaattgcttcatggaataactcattaattacgtaagtatcagagtatatttgtaacccgctgactgtaaggtctgcgtgaaatcattactgtgaggctcaaatttggttaacaaaaatctgcgttaacaaattattttagaaaaacacacttagtgtaaagaaatattatagatacaaatttcaagtaactaatttatattttctaatatttaatttagtagaaaaatatatttaagttgaagatgatccaatcaacttgcaccagtccatgaaaagttctaactctcaaaaatggaatgataccatgaatgaagacaataagtctatccaagacaataaggtttgagaagttgtcccattaccaaaaggtgtaaaaccaa

SEQ ID NO: 362922 - DNA, 1146 bp, Cannabis indica
cagaaaagggggtccactccccagtacacccagtacacggagctaacggactcacaagagcgtgtgtattttgctaccaggaaaaatacgcactaccggagaccgcctcctctgtacaaggatagctcccggagggatcccaataaaagatgtgagtaccacaacgacattgggcacaacaccaatgaatgcaaaaacctcaaggacgagatcgaaaactcgatccgattggggcatctttacgaatggatcaagaaccggttgcctcacctcaatccggctcaggcagcaggagctttgcctcaaggagcaccaaggggtgcagccggagcattagccccagttgctccccccggatatgcccagcaaattcctggcctgccaccaagacccaacggaagagtagccatgatctcaggaggacctcacatcgggggaactacccggaaggagctgaaacgttacgtaggttccgtgaagcacagtgacgtttgggaggttactcaactcccagctcaaaggccccggctaatggatcaacccattacattcacagaagaggacgctatgacagtgcgctttcctcatcatgaccccctggtcatagaaactcccattgccaataagattgtggctagagtcctaatcgacaacggttgttctgtgaatgtattattcaaagaagccttcacagcaataagccagacggaccgagatctttcaccaagcggttctcagctcacagggtttaatgtaacaacacttatcccaatgggaaaagtgaggctccccgtcaccttgtgcccagacacaccccaaagcactttcaaatactgcacatttgtggtggttgactgcccaacagcttataatgcaatcctcaggcgaccggccctggtggattttggtgcagtcacgtcaataaggcacttgtgcatgaaattccctactcaagaggctggaataggaaccgtaagagggaaccaaggggaggccaggcagtgttacaacgttgctgcccacctacccgtcctaactggtccgtgaaattattgagctaaaaatggcagaagaagaggagttggatccccgtgtgggatccaaaaaaattgtagaacccatccgttgaggaagtgtcagtgtgcg

SEQ ID NO: 362923 - DNA, 804 bp, Cannabis indica
tctatcaaatccaggacgtgagcgtagcccttaccacggtaagtttgtttagagatattttcaagcttttttgacgcccgatatcacgtattcatatatatttttattgtcaaattgctgcagagaccggtcgtctttcgaagactctaattgaccatgggtataccacgtctgagtttgggggcatggaggaggccatgaagagtcttcgggagtcgaaggcgtagaagaggactatctgggaggaagcctagcagaaagaggcccttatggagcggaaccaccaggaggcgttgaaggctaaggacgatgcgttaaagggcaaggatgcgactgtggccacagcgaggcaggaccttcgggattctaaagaagcaatgcaggaattgaccgccaaggtgaagtctctagaggagctgcaccaagtggatttgcaaacgacagccaacctaactattgaagtgaaggggcttcgtgagtttaaggagcaggctcaaaaggaggcagccaaggcgaacatagatgctctcctggccccagtcacttgttaacactgcaagaagcgcttcgatgatggagtcttcatggcctggcaatccaacggttagaatctttatctcagcttttatcccaagccaaaagaagttcttgctcgcttctgggagaagaagaagaggctggatgcagtgcttgaggagtgcaggggtcctcgtcttcctcctcgggctgattaaatcatttatttatatcctttgttattatcatttttttttgtttttacatatcctatccttcccctcactt

SEQ ID NO: 362924 - DNA, 504 bp, Cannabis indica
ctggtaaaaaaaaattccaacagatgaatagaccaaagggaacgtcgaggtagaggtcttggagaagtggttaatggagaaccaatatagtttgctctggggtagtatagtgacccaattcatgaccttaacatggacccaatgacataatggttttcaagtttcatggggtcttcctatttatttttatggtccatattagagttataaaagcagaagtagaaatttgataaaataatttttttctaatatgaaccataagcctaaggatctcaacataatgtatatagattaaatctgactactgaaagaaattcaattaaatcttgatgactatcagggtatccttgattctttttgtataacaatcgaacatccaatcccagaacttgattgaagaatcgacaccttaatcttccaagtcaacctcaacactcaagaatagattggcctattagatcttataggatgaactaatttaggtattacagtgtgtactcaact

SEQ ID NO: 362925 - DNA, 1193 bp, Cannabis indica
aaggtgtaaacactcgcataaactcgcctaacgcaccagcaacgactacggggttaatgtcccagcaaacctggccacagaaggcacagctcctgcagtcgcagcaaagcatgcttttgtaagcttggaaaatactcaagcagcagagaaagcccatatacaagctgcatgggacctctccttttactacggaagtgcgacaccctcagcttcccaagggatttcgattatccgaatccctaaaatacaaaggtacctctaatcccatagattatttagaaaagttcaatactattatggaagtggatcaggtacctcagctcgcgaaatttcgcattcttgcggcaaatctggaggaaaatgcccacgattggttcagccaattgcctgaggcctcaatctcgacatgggagacctttgtcgatctattcctcacgcattttcaggccacgatgacttataggccgccctatactactctggctaacatcaagcaagaacttgagtctttgcaggactattttaaacgtttcaatggcgagataacaaaacttgagaaggctcccgagtcttcgcttgtttgtatgctaataacaggtgtcttgccgatttttggaaggagctacaggctcgaagaccagaatcgctggtcgagttctttgctgtggccaaaccgcataagagaattgagaattctctggcagaattggagaaaggcaaggacaagcataagtcaccagtggcgtggtcacgatcccgcagtccctgagggaaaaattccagtggtcgaagcctaagaagacgcactccacggagacagcgaagcctgaaattggccaaatctcctccaaagaaggagtcctcgccgaaattggccaattggaccgcgcttcgtgaattatactgagctcgcggtaccacgagaccatatctacgccattgaggagaagaatggggtcttcaagaagccaccctcgatcaggggaaatcgtgacaagagggatcccaagaaattctgtaagtaccataaagatattggtcacaatactttggagtgttgggttttgcaggatgagattgaagagctgatcagaaggggaaaattcagcaaatacaaaaggaacgaggaaagtcatccccgagcagatgacaaagaggaaaaccaaaacgcgagtggctcaagaatgcctcgc

SEQ ID NO: 362926 - DNA, 522 bp, Cannabis indica
aatgtagagcatgaatagtgaattttaaagaaattttaaataaagaactagtttagaacatttgatgtaacgtatttttaatttagctatttaattattttagagaatctctattttaagcatctaatgtaagtgctctgatataaaaatttaaagtaaaacagagaaattgagattttaatgatgtaatttggataaatattattttagacgttttgcaaaagttatcagttggactgttttgttaaatgacaaaatggaccttgtattttttaaaatgatacaaataagacactgaactaatttttgtcaaaataaaatttaataataatccgatctaaaggtgttatgataaactgttgacattttctgtatctgtttgtgttaggaattgtcttcaagttggttatattaaaaaaaaagttatcaaaaattaagctcatggtcttatttttaccattttggaaaatacatcgtcttttttgttatttaataaaacaaaaaattcaattagtaactttt

SEQ ID NO: 362927 - DNA, 431 bp, Cannabis indica
tttcttttgggtcttcaagtcagacaaatagaaggaggtatatttgtatcacaaagtaagtatgccaagaaccttgtcaaaaagtttggccttgagtcgactaaacaggtaagtactcctatgagcaccactttgaaattaacaaaagatgagaatggagtgaaggttgacactactctttatcgtagtatgattggtagtctattgtatttgactgctagtcgtcctgatattagttataatgtgggagtttgtgctagatatcaaagtaatcctatggaatctcatgtatctgctgtaaaaaggattattcgatatgttaatagtactctcgactttggaatctggtattctaaagatactaattctaacttagcttgctttagttgatgcagattgggcgaggcgaatttagtatgatcgaaaaagta

SEQ ID NO: 362928 - DNA, 617 bp, Cannabis indica
atagttaaaaaccgcaccacccgcaccgcgaacacccctaatgataaccatcgtggtaactatttcagtagaaggaagtgtttttggttttttaggttaattttctaacagagtattaattctaattatttaataaaatatttttatttattttataatatttttatatattttataatattattatatatttttaaaataaaaattatatattttatataaaaaaaattaatttaattatatatatatttaaaaaataaagatttatcttttatatataatcacatctatacattaaaatatatatttaaactttaatttcacgataattttttgtttaaaaataattaatgatatgcatatacttctaataatttgtgcattttattattgtaaagtccttttttggaaagttagttgaaaaaatattttttcttttatggtaagatttttgtgcattcataaccgatttcttaccttgtttattcggttataagattaggaatatgttaggtttaaaatttatcttattagacattttttttattaaaattatattttagcaaaaataacatgaaatttgaaaaatttgttagtttagtttgaatagatatttt

SEQ ID NO: 362929 - DNA, 533 bp, Cannabis indica
ccaggagtttgttgaaaacctttagccactaatcttgctttgagtctttcaattgatccatctgcattaagtttgattcgatagacccatttgttttggataataatcatctctgaagtgcgaggcacgagaatccaagtgttctttttctttaaagctgccatctcattgttcatagcagcattccattttggatttggaaaggcttctttaaaagatgttggctccttatcatcaatagaatatgcaagatatgtcttaggtttatagatgactagcttagacctagtgaccatgggatgttggttattactaggacatattgggggactgttgttgacagcaggtgctgatacagtagaggtgctggtgtgaagaggggggttctggtttgggcaggtggcaatatattttgagcaattggtgttggttgttgtggggatgttatgggagggggttgatggacattagtgggtctgggaataaaaaaagttgctgattgtaaatgggggagttgacagtgggtgtggtaa

SEQ ID NO: 362930 - DNA, 583 bp, Cannabis indica
agagccagacctggtatagccactaagagtacgactttgtgaggacgaaaaaacgagatttagcatcgttaacctcattacgcggttgagccctgctatgagggttgcgtcgctctgggtcttcctcttgcggcacttcacggttggagtgtcgtacgacttgatccctctgcattagctgattcaaattgagtccttcttgtccagtcctacgttctctacgagtacgattagtttgttgcctagtatttgttacctgatggttatttgagcgtgtggttggtactcgtggaggacgtcgggtcatagcccctccattgatctcagcctgcaaagcctgcatttggtcttgtaatgcagtatattgggttctggtcatttggatgataccttcagacaccacaacaggtgtgataggtgggaacggccccacagtggttgttagtgtagacgtttctccagcatgaggggcagtttcagggaataaattgagagaagtaatggtcgttcgtcccactcctacgttgatggtgtcggcaagtgccgttccattacctgggagtggaacattcattgttccaac

SEQ ID NO: 362931 - DNA, 602 bp, Cannabis indica
gtcgtgtacccagaccggaactgagacctggactttgacctaaatctgggacacgatcccaaacacagacttggacctaaatatagattcggatacgaacctggactcgtaccaagacccagactgtgatcgaaatgctggacctagatctgggccgagatcctgatcaaaactcaaacttggaccggaactcaggacccaaccttggacctggacccgaacctagacccagaccggggtccagacttggacacaaacctcgacacagactcagacccgaactcaaacccacacctagaatcaaacccaaagctacacccgacccggacccaaactcaaacccagacaaggattagaaccaaggacttagacccagaattgaactaagtaccctacaaagacctgaacttgaacttaggaccaagctcgggacccagcacaagaaattgaaccagactgacacccaagattgggatccggatctggaccgaggacttggacaaaacttttagtcggtgtctggatttgggacccagccctagacccgaaccctgacgaggacccgaacccacaccctgacctgaacccagtcccaaacccaa

SEQ ID NO: 362932 - DNA, 806 bp, Cannabis indica
tggaggcaaaaatacataatgttacaattctcttacaccgttactactattttcgttaactcataaatatagatacgtggagggttcctatgcattatattttatattttattttattttaaaacttaatattcttaatattataaattaaatgctacttgttcaaaaaaaaaatcaattcacaattttcacataatattggtatttcaattcgataatcatgttccatatatactgcactggttcactcaactatggtaatttagtattgcattttttttaaataagtagtatttagtttttgatattaagaatattaaattttataataaaataaataaatgtaatgcatttgagccctccacgtgtctatatttatgataagttaacggaattggtaataacggtgtaagaaaaatataacattaggtatttttgcctccaaatataaatattaggtatttaagtgtataaaatttgaaatattaggtatttatgccacagtttaccctattatttagggaaatttgacattttatgcttaaaaaatgcacatggtattattttatacacagaaaatatacatttgataattattcttaactttcaatttgttccaaaaataccctcctcatttcaattccccccaactctctctaacttccctctctctcctctctctctctcaccaccgcaccattatcaccaccgcttgacccagacgaccgacgaacccagccgacccacacgacccacgaacccagtcgacccacaccacccacgaacccagtcgactcacgaaccca

SEQ ID NO: 362933 - DNA, 1516 bp, Cannabis indica
gtaacatttttgggacatacaatacgagagatgctaacaaaattcatgggtatcctcctggttttaacaagaataaacccaaggaagccaatgacaaatacaagtcgaaaccaatgacaacagtagcaacaaccagtcaagaaagtcaggccttgtttcctcaattaaatgcaacacaatatcaacagttgcttaatcttcttgcctctcaacaatctggtatgaacatatctgaaccatccacttcaacgggcaactcaggtatcatactatcccataactctcaatctcccttaaatggttcttggatcatggactctggagctacgagacacatatgttctaacataaaactctttcaatatgtatgtaagatacctgctaccaaactcattttaccaaataatgattattttcatgttcatcaaagtggtactgttattctaaataacaaaattgttctcacagatgtgctttttgcacccaatttcaaatataatattgtttctaccagctatatgacagaacatgctgctatttctgtactattcgattctgattttttttgtatccaggagaaaatcaaccagaagacgattggaaaaggtagcaatatcaatgggctttacatccttgatgatgcaccagattccacacaagttttctctatctctgctgagacttggcactctcgattgggacatttgtcaaataaaagattagacattcttaaggaaactctacattgtaacactactgctttacataataaaccatgttatatttgtcctgttgcaaaacagaaaagactcccttttcaaaataaaaacaatatggcaaatcatgttttcgatctaatacattgtgatgtgtggggaccttatcacatagcttcacacactaatcacaaatactttcttactcttgttgatgaccactcacggtttacttgcctttatttaatgcagcacaaatctgacgtcaatactataattcctcagtttttatcttatgttcaaactcaattccactgcacttttaagactttcaggtctgataacgcacctgagttagagttcaaagaattatttgcaaaatacgggatcatgcatgactttacatgtgtcgagacacctgagcaaaatgctgttgctgaaagaaagcatcagcatttgctcaatgtggctcgagcattgtactttcaagcaaagtttcccattaaattctggagtgaatgtgtcatggctgctaccttcttaatcaacagaactcctacacctttgcttaaaaataaaacaccttttgagtgtctttttaataagcaaccgaactacgaacatctcagaactataggatgccttgcatttgcttcaactctcactgcccacagaactaagttctcacctcgtgctcgaacatgtgtcttcatgggatatcctcacggagtgaaaggatataagttgtttgaccttaatacaaatcaattctttatttctagaaatgtggtatttcatga

SEQ ID NO: 362934 - DNA, 897 bp, Cannabis indica
atttattcaacattttttttcttttttttttttctattatttttttttaatcatcatttttttttcagaacgtaaataacattagtgatgttgaaaaacacttttacaattcacacattgtcccaatcacccactttaaataataatttcatccacacacaattcatctcccccaaacttatttctaagcttatggtataatgcaagggacaaggatagagaattacaagtggattcaaagttagtctcataaagtggctaaaaacaattgaagaggctaagctcaaataggcaaactagggataataaagataaaggtaagcttgaaaggcccaaacgatccaaaaaaattgcctcatcattttctaaacaagcattgtcaaggatttcgcctcaaaaaataattcatgcaagttctatcatattcaatcaatcttaccacaaaccaaagtaaaataattatgatacaatccaactattgacaatttacatcaatacaaaatttttacaagcatccaaattaattcaaagagtaaaaaaaatcaagcacacggtttaaaattttaatccattccacaaataacaacagcagaaaaaaattgacattagcttaattaacaactaaaacaaataaaactaaacaatgaaaaataaaattaagaccttcccccaaacttaaaattttcacattgtccccaatgtgaaataaaaatttaaagagaagggaacttaccttaagtccatgccacatcaacaagtggttgacgcccataataagcgtcatgctggacaacttgaaagttgtttttaaaaattccctcaagcctggcatgcaatgagtttgaaccaaaagccgcaccaacaacacaagactttcgatgatgagcttggggagaa

SEQ ID NO: 362935 - DNA, 527 bp, Cannabis indica
ctacttgattgcgtgcacttgcgtagtatttaataattttcgcaacaagtttttagcgtcgttgccgagaaattgtataaagattaatattacataaaattatactaacttctgctttgctttattttttttcttactaattgctaatctgtcttgcaagattgttctatcaatttcaggagttttaggtgtatgcgccgtcaaggacaagcagtcatattaccagttgatcctgaaatcgagaaaacttgtaggagaaacagaaagaacaagaggcaagaaagagtttcagcaactgctgaaacatcagaaatcatggctgccaatgttaatgctaatgctgtgaataatggaggtaacaacggcaataatggaggtgccgttgaagatcaagctaatggtcgcagcttgagagattatattctcccaactcttactagggtgcagtcatgtattaggccaccggcagtagatgctaacaacttcgaaatcaagcctgccatactacaaatggtgcagtcttcagt

SEQ ID NO: 362936 - DNA, 692 bp, Cannabis indica
gaggcaaatcttaagaggaagaaattcacgaggcaaatttaggttgattttaggttgcaacctaagaaaactgaggaaaatctggggacacagcctgggatatgtggaacatcaggcagaaatcgccaaccctctcttcaggtacctcaaaacttaagaggaagagcaaggtccgaccgcagtcccgacaaaagtgatctatgagagcatctgaacttgaagaagcctgttcttcgtcaacaactctgtccaaagcaaaaagattcactccatttgcgaatggacgagttggagaataagttcaaaaggcatcaattcacgaaacccagaagacaaccatggcatgatattgttggagaatttgattcggaagcctcaggatcaaagaggaaagacgattccaaaaggctgcccaaggataagaaacacaacaaatatacccctctttatgctaaatatactgtaatatcctaagattaagagaatagattagcagaccctaactagttaactatgtataattatggaattatattattatataattaattatatgtgtattattatgatttatgacatgttaagaccccgttgttaagccaggggtattttagtaattttgaaatggaaggggaaaactatgaatttaaactaattacgtgcttatggattatattattatatggtatgcc

SEQ ID NO: 362937 - DNA, 788 bp, Cannabis indica
tagactctttggccttaacattcgcaacatccttagccatctcttcattgcctgcaacagcctcagattgattcacatcagcagcaggaacatcactaacaatcttatcaactccagcagcatcaccaccatctttacccaactcatcaccatcattggagtcggaatcaatattctctggatcaggtaatcccttgtcatcatccttagcatcatcatcatcagaatcttgggttaccaactcatcagatgacttaccctgaatcaaacaacagtattgcaactaaaataaaacatgaaaaaaactaataataacagtagtaaaaaactaaaacaagaacaatataaataaatacctcatcaaaaggtcgacgatgaatgacattaaccctttttttgtatatccttaattacagtcatgatagacttgaaatcaaggtcaacaaaacacctcaaagaaatgaagtcttcagccaaggattattgattcgaaatgagcagctccaacttagatttcaacaattcaatgtcctctgaattagactttttagaagatgaaccactctcaaatgtttgcttagatgtaccgcgatcatcaatagattcatctaaaaataaaccttccaattataacttctcctcattagtaggacgaatgtttttaacttcaactgaaaatcataatcaaaacaacaaaacatagaacaaaaataattaaaaaaataaatattaataaatcagcacaaaacaataaagaaactaaaaatacacttgttcaacgacaaatc

SEQ ID NO: 362938 - DNA, 532 bp, Cannabis indica
taaaaaaaataaaatatctcatctattattcttatatatttttaaaaaaaattatgacttgagttacctcggtatataagttgttttgtggattttaattgtgatttaagttgctctgttaggtgttatgtgagtttttatgtaaatttccgtaaaacaaaaaaaatgctataaagtataaaaatttaaaactctcatttttaaggataatttgcagccaaactttttgtacttttaagttcagtacgatctaatcctcatacttgaaaaattatagctaaaatcctcaaccaacacaatcattttggtttgcactcattccattaatttttggcagttaactgtcaaatagacatactacacaagtatacatgtagtgaaattttattgaaccacgtaatattaaaacttaaaaaataaaaataatttaaaaatatggaaattaataaaaattaaaactttccttcttttgaaactgaaaaaaaaaacgaaaaaaaaaaaaaccttaacgactctcatccatccaaccgct

SEQ ID NO: 362939 - DNA, 576 bp, Cannabis indica
taaaaagtgaaaaataaaatagattatggtgagaaagaagagagggatttaatggcagatggtttgaaactgtgataaattatggtgagaaagaagagagcaaatgttggattccacaaatgtgaaagattacattcattttccttcagcttcttcctttatgattttccttcccttacttgaacaaaaccctcgaaattccatagctgacacagtcttcctttcggaagtaaataatcttctggaaaagttccaaaatacaataagcaatatttgagatggaaaggcaaatgaacatagctgagagagagaaattcaaaattcttttttctagatagtaaaccagctatgacctctatatcaagtggcaagcctcgacatttttttgagaatctcataagataattttactaactcttcagggcaacaaccattaaactcatgtctaaatacctttttagaaaatagttcaagagccattttattgtaaaaaaataattaattaaaaatttattataagcttgaaacccagcactagcttgaggcctcatcatctaattgtgaaaaaaaaaatta

SEQ ID NO: 362940 - DNA, 531 bp, Cannabis indica
ctaggtcccgaccctggttctgtgtcccttgtctggttccatgtttgggtcttcaagttcgggttcgggtcccgagtcaaggtttgggttgggattcgggtccggctcccaattcgggtataggtctcatttggagtccgggtcctggtccggttacggttctgtatctagatccaatttcagttatgattctaagtccaagtcctagttctagtcccggtcgacttctagttttggttccaatattgggtcacagcgtacgggttcgggtccacttttgtgtttgggactgtgttcaggtctgggtgtgggttcgggtccttgtcagtgttcgggtccaagctgggtcccaaatccagacaccgactacgggtttcgtcgaagcccttggtctagatttagatcccaatctcgggtcctagtttggtaccatttttggtgccaggtaacgacctggatcctaggttcaagttcgggttttggtcgagtactaggtctcggtcctacttctgtttcccaggtccctatcct

SEQ ID NO: 362941 - DNA, 605 bp, Cannabis indica
aaatcgtcgagcagctgttctacacaagttgttcgacacacttgaattcggaaacgaggtaagattaatatagttatatgcatatgtgattacatgtttagtatgcatatttatgaatgcatgttagattacattgaaataacagtatcaatatatgtagagttgtattagataccgataaatgtatgtttggctcatgtactgattggtgctatcacatcggtacgactagagtattgagtataggctgatattaacgcagatttttgttaaccagatatgagactaagcagtgataaacttgcatagaaaaaataaagacagtaaagaagaaagtatgaacacaaaggatttttttacgtggtttggcagttcaaattctgcatagtccacgagtcagtcttattaaatttttgatattgttctagggccttttttgttatgaattattcgacactctttcagtcttacttgcctctatttataattacatattcaggcaattaattacagagttgactgaaatctttacaacaattatcccctgaaatcggggggtttaattacatatcacgtaagatgaatgcggttagtatttgaatatc

SEQ ID NO: 362942 - DNA, 766 bp, Cannabis indica
acggatctctatctaaaattatagacttgggaacaccaagcaatctcactactgtatgaaaactactgtaaaggttgtttttactggtaaaaaatgtgcagacgtcatgaatcgatccaccacaacccaaattaaatcaaataaactatggttctaggtaatccaaccacaaatccatgatgatatcctcccacttccactcaagaagtgacaaaggctgtaacaaacctgctggtctctaatgttcagccttaatatgttgacaggttaggcatcgtgatacgaattctaccacattcttcttcatccagctccaccaaaagtagggtttaagatcttggtacatcttggtggtgccaggatgcaaagagtatggactggtatgagcctcttcaagaattttgtttctaagttccgtactacttggaacacaaaccctagtcttaaataaaaacatcccaccatctgacactgtaaaatctctagcttgaccagctgaaacctcttccctgatcttcactaattctggattagttaactgagcagctttaatttgatctaacagatcagattgcagcgtcaagttataaagtttgcctacaacaaactcgatgcttgatctgaccatgtcctctgctaactgagttgaaatctgaatcatactagttacctgcccgggatccttcctgctcagggcatcaaccactatattggccttcccaggatggtaaaggatttcatagtcgtaatccttaaccaactctaa

SEQ ID NO: 362943 - DNA, 638 bp, Cannabis indica
tgaaatgcttaatcggtcacttctcttctccatcttattccctatttctctctaattcgtagcaatgactctctgaacggaaatgcagaaggggcgggcttggccttcgacagcgatttggtggcggcaccgatcaaacagagagatgaagaaaggactttatttttacgggcgtcgagcttgactttgtggtcagattcgaccaccattactgagatttggtcgcgcatctgggcagagagataggcgacgcgcaggtcgcgcatctgggcagagagagaggggaggcgctccatatgtgtaggccgtcataacttagatattattatagcaaaaaaaaatcaaatttaaatttttatttgcaattaaaagttaaacataaatatttttactatatattactcaccaaaaaaatataataaaagtttagtgaaaatgattgcacttttaaccggaaaagctaactaattatatcctatacacaacttataaaagctaacgaattactttccttactttagacataatgcctctaaattgtaattgctcatagtcatttggaaatttaaatcaaaaatctcttttcccttctaatatatattactaagctgttcataaaatagccgatccaattcaat

SEQ ID NO: 362944 - DNA, 1338 bp, Cannabis indica
aaataaacacatataaagtttggtaaaccttacattgggtgcaacggcatataatgattccttccgttcagatatacccagagaatgaatgactcttatacacgagtacatgactctagctgctttttcccaagaagcatgagagtgaggacaaagcacgctggaaacactcgtgttagtctgtaggatcagtcatcagtccacgaagcagccagagtgacttactcgtgtataagaatcattcattccgtgggtgtaagggcctaatggaggcttgaagcggggacattatagaaagattatacctcttgaagcctatcagggtatgcttgtttcttttttatataattatcgaacattcaatccaagaattttgttgaagaatcctcacattgatcttccaagctagcctcaatactcaggaatagaatgagctattagatcttatttggatgaataaattaagtattacagtatgtaatcaactcatgagacactggaatagagttagagttttgatttcacacacacctgaataggtaattatgagtgcacatttgtacactcattcttagtcaattattagatggattagtagttatttttgtatagatttgatgtgttttctccaagtgtgtaggtttgtgccgaaaagacattttgtgatggattgcgatctttgagcccatttttgacaatgattttatcattttctcgaagaatttatgaaacccaaaatgatggagctcgttccaagctttccaaaacatgtgaaatgatctcatttggagaccggacacaaaagttatgtatcatttactacgcaaggtcgaagtagaaaaatttggtgttgtgcgctatagcgtcaggtgtctgcaccgtatcgcccggctaaaaaaaaagattttttacgaaaaaagaggataattttagcacggatttaggatttttcctcttgggcgctatagcgcaaggtatgggtgctaaagcgcaacacttattattcttttaaataaatcctaattctaagaggattgatcaatctttgttgacctatataaagaaacatgctaatcatattgagagaagactagagagatagaaacaagcaactttgagattggaaaacacattaaagagcaagagagaagagacttgaagcaattagtaacaactatcaacattagagttcttttcttcttcttctttattcttttgcttcgttatttaattatgaatatgattatttttgttattatgtttgtgattataaaccaaacactcattctagagtgttgatggaactattttagattatgaatttaagtttttagatta

SEQ ID NO: 362945 - DNA, 131 bp, Cannabis indica
accagtggtttttccattccagggacgacaccgagtccagtgaagtatttctaatccagacaagttcttttgcagcctttacagaagctatgtatttgcctccatggcagagtctgaaattgtggtttgtt

SEQ ID NO: 362946 - DNA, 518 bp, Cannabis indica
aaatcaatattactgccaaaaaattaaaaaatggtcgacaaaatatcgtcatgtcggcattatcaaacaatcaacaattacaaaatcatgtcgacaaaatatcgacatccagtcgatattcagtcaaaaatatcaagcagtcaacaattacaaaaacatgtcgacataatatcgacatcctatagatattcagtcgataatatcaaacaatcaacaattacgaaaacatgtcgacataatattgacatcctgtcgatattcagtcgataacatcaaacttaaagcaacaacataacattgtcgacaacatatcgacatactgtcgacaatttaggacagaaaataaactcaatcaaatatcaacatcctatcgacacacatacgatatcctatcgacatacaataacaacacttacaattctaatggtcaaacagatacccaaaatatcgacatcctattgatatcctatcgatatttcatcaataacattgtaaaaacacagacaccattgaaacat

SEQ ID NO: 362947 - DNA, 593 bp, Cannabis indica
ttaggtattttttatttataaaaaatgactaagtataaatacaaggcgagtacaaactagcaaatgcgagtagtattgataatagaattttaggctctcgccattccaagcccgttgaatcgcagtaccatcgagttctgcgagtcggtatgtggcgtcaccaattttttctgcgatgagatatggtccctcccaattatctctgaagacctcatgtgctgggttcttggtattttgcattactcttcgaggaccaagtctcctactcgtagaactcttgccttgatcttggaattgaaatatcttgcgcttcgtcactggtaagtcgcatttttcaggtgagcctgatcgcgcttttcttccagaaggtcgaggtagagcgacggtttttcattgttttgtgaaatgttgaaaacgtctcttcgtaaggaacctgccccaatctcgactggtaccatggcctcgcatccataggagagcgagaaaggagtctcgccagtcgtggatcgaggagtcgtgttgtatgaccatagaacttgcggaagctcgtctggccatacccccttacgctcttcaagttttcctttgatggt

SEQ ID NO: 362948 - DNA, 951 bp, Cannabis indica
atggcaataccctaaatatctcaaaattgggaaaaacctagggttccaaaaattcccccaaccggcagaccggtcccaaccggaagtccatttatggaacaccaaccggtcgaccggttggtacaggtcccccagaaccggtcgaccggttctgtgctgggaacacaaaaaccaacccccttaactcaattcaatcccaaactttcctaaaacttccagggtacctatacaatgcataaacaaaaatttccaaccagaatttcacagaacaaaccatcaatactcaagttgccattaaagctcaaagcttgagtttcaaaactcaagcttgcttaaaactatcaccaagcatcaaaatcaactaccaggacctctaatcaactaaaattgagcataaaaactaaactctaaacatatgaaaacctaacagcccctaaacctagaaatcacaagttcaaactaaactttaaagcttccaaaatatgaaactatggttctaggtttacctttgattgatcctcttgaattcccttactgcaaacaccaacaattcacaacaaaaccccctggttttggctgcttcgaagagaaagaaaggagggagagacttgttcttactttttggtattttctctttagttttacaaaatgaaataaaataaattaagggaaaatcaatttcccttggctgaaggtattggcttgctaggtgtcaagtcactaggctgccacctaacttctcccttggcaatttactaaaatgccctttgttgaccgaggttttcggcaactaataaaatattataagtttatagagctgtaagaaaattagagaaggatttttatgtggttggggcgttaatgagccttagtccacgagtctatcgtatttatggatgtatttaatacagagatgtatttggtgagtgtttcacccttataaatacagag

SEQ ID NO: 362949 - DNA, 512 bp, Cannabis indica
aatcacgtaatacgcctatgttagttaggtgttacagatgatttgtattgatttggatggcttcatgtggtttatgttatttgatgaatgaatgtgatttacagaatttttccatagaaataattttaattttgtttctgaaaatattttatttggattccttgtgaaaaattaagcaattttctcttttacggaactcgattccgataaaaattaaaggagttatgaatttttgaaaatttggtgccatggctgccgaagcttggtgcacgcacgcaccaggtgcttcggacaacaaggccgcgcgtgcagaataaaggggacaagcctgtgtcttcagtcacggagtgggcattcagacacgcccaggacgctgcacctgacggaggtttctcggtcagggaggctgcaaatgccgagtatcctcggcgtctctccttgctacgcacgcgtaagcccctatttgcaccctcttgggctgcacgtgcagccttgctgccagcagcctctcc

SEQ ID NO: 362950 - DNA, 760 bp, Cannabis indica
agaaacacatgacttaatattacataagcttgtaggaagcagtggagacaatttttgcaagaaactgattttttttggtcatatatatatatctcattcctgtaacagttaaaacaaaaacatcataaaaataataaacaaactataaagtaactatacaataaaaaataaaaaactacaccagtaacaaaaaaaaaaagtactagcaaaaaaatagaaacaaaatacacacctcaagaggattttttttggaatatcaaaatcttcaaacttgtctgaactcctaaaaggaacatgtaaaaatgtataccattaaaactcaaaaataaattaaaccaactaaatatttaattttaaaaaaatatttatctgagcatcagaaaaaaaaaaccaaaaaataaactacaaaaaatatgttataacaatacaattaaaaacaaccaaaacaaaaaaagcataaaaatttgaacaaaaaaaaaacataaaaacaactatttaaaaatatgaaaacacttgaaaaaatgttaaactataaaataaacttaaataacactaaaacaaactgaaaaaatacataaaaaacaactgattaaaataaaaaccaataaaacactaaaatagaaatctaaaaaacgatttacaaaaaaaaaaaaaaaataacataagaaccacgaaaccttacatactcccaaaaactagaaacaaataacaacaaaagttactgaaaaaaaaaaataaaacatttaaaacttaaagaaac

SEQ ID NO: 362951 - DNA, 524 bp, Cannabis indica
agagttattactctaaagtgagcgttttattggcttagggttgttaccctagtaaattgtcaatatgtaattgttatgccatgatgtatatagatgtatattgaaattaagggttatgtgttcaaggcataatcgggttggactcagtaactagaaccgagatgaatcgttctaaggccttattgtaattagacgtgtgagcgtaacatgtaggtctataccacatagacataaataggcgtgtgagggtaacacgcgggtctgtgtcatacagacaaatatgaaatggcattattatttatgtgatgagttatatatgattattgatatattttactgtcttgctggacttggctcacgggtgctctactgtgcaggaaagggtaaatctacttctgatcagccatgagtaggggagttgggcgatgtgtgtacatgttcgggccacactagaccaagcgggttggggtctaccagtgatgatttttttttgtaactctgttttgccgcttaggtcggttatt

SEQ ID NO: 362952 - DNA, 672 bp, Cannabis indica
tgttgttttgatgttattttcatcttacttttatgtagttttcttgttgtttctataaaaaactataaaaatagaaaaaaaaaaaaaaaaacaatatttaaatgtaaaaatgtatttttttttaaaataattagagaccataagtgatttttttaataacattattttatttccaagaacaaagtgaattataaataattacaatatatatatattagcatagatctgcatattttattatgaaaaaaatacatatttttaattaatatttatagctttgtttgataatatatcatactatttattgtttatatttcatgtgcctttaatttaataattaactacaaaaaatttgagtattaccggtagggacacccgccggtaataatagagcaggccgccgggactaattaataccggcagaattcgccggtaataatctggcggtattaattggtcgctataagtcactattagcgacgaaaagggtcttccgccggtaataatattaataccggtggattaatagcggtggagtctgccggtattaatatctgtacttttacacgcagatacattaataccggcggaccacaatcagtgttccaccggtattaatatttataaatattaaaaaaacaaaattttaaatattttataattaaattaatt

SEQ ID NO: 362953 - DNA, 968 bp, Cannabis indica
aaataattaagcaaaattttaattattcacgatttttcaataatctcgttgattagcaacgagctgcatagtatgttaaaaattacgctaacacgcctataatagttagggtgttacagtttagaatttttgttattgcttaaattaagttcattatggaatatttaggtactttggaaggtttggtatgatttgggattgattcgggatgtttgtgaggtttttagggtttctacactgaaccagtcgaccggctcagtttagtcctgtagaaccggtcaaccgattctgcctaggcagaccccatagaatcgattttctagttgggaaccggtttaccagttggtgcagtttagggaatcctagattttcatatttttgcaatatttagggtattgctatattatccatccatagagaaacttttagttttgtttttaagtctccaaaaagtgatttagcgtatcactcatcagttttacaaatattatgacttaggggcctatgaatcgtcgagtagcagctccacttaggttaatcggcacacctgaattcggaattaaggtaggattagtataattatatgcatatgtgatttcatgtttagtatgcatgtttatgaattcctgttaaattacattgaaatagcaatatcaatataagtagagttatattggataccgatatatgtatgtttggcttaactactgattaacgctatcacatcggtacgactagagtaccgagtatatgatgatattatggtcaatggtaccgtcgtacgaacattctagactcagtacgcgtgggacgcaggcaggaggagatttgaatggggtgtatgggtgcctaattgtaatccgatttatgttatgttataattatgtttttctaatgatttgtcgctcatgtactgtttccatcgtgtaaagggcaagctaaggctaacacagtgactttgagtcggg

SEQ ID NO: 362954 - DNA, 754 bp, Cannabis indica
ttgcgtttgggcttggtatggatcccagtttgggtctgggttcatgtcggttctgcatctagatctgattttgggtctaggtccaattccagttccaaggtcctcattctgattcttgttctgatttcaggtctcgattccgagtctggatttgggtctttatctagaaatggttccaggtgtgggtcttggtacgattcaaagattgagaaactgactagggtgggtccaagccccgggtcgtgggtcaagattcggatccaaatcttgggtctcgatctcgttctgattcggatactgggtcctagtccgtgtctgtgtccgtgtccgtgtcggggtctgggtcggggttgaggactgaaaccggggtcgggtcttgggtcccaatcccactcctgggtcccgattttggttctaatttcaagtttggttccccaatctaggtctgggacttgggtccaagtctgagtctccaatcctggtccgggttgtgcatctgggtttgggtccaagtccgtgtctgggttcgggttcgtgtcctgagtcctgatctgagttttaattcggctccgtgtccaggtccgggtctgggtttggccctagtcagattctagttctgggaatgagactgggtcccagtccctcggtcttgttcccgggttccggtacgcttacagttctgcatccagtttcgggtcacggggtacgggttaggtccgagtcctggtctgggttcaggtttaggtctgagtct

SEQ ID NO: 362955 - DNA, 734 bp, Cannabis indica
gtatcaatataatgagaaaatggtcatcgataagtacacatatgaagatccgtatttgctaccacccaatccacctccattagcgtcattccttggcttccattatactcaatcatttaagaagagtcaagttgaacattggagctcgcaaatttcacatctcgccaagcttgagggcatccaaaacaaagacccatatgtgagggcgtatgccactctctatgggcggaagccgctctttaatgagcacttctccaaaagtcaagctagtgactttaaatcagcctgttcttgggaggcaacccaagtttttcaactttgtttttaatcttataactctagttgatttcctttgaaaaaaagtattatgtttaatttttgttgtcaatttctagtttttatttttattttgtgtgtggattttacacttgatttggtgtttcaggtatttttgaagcacaatttagagttttggatgtgatttgggggtctgaagtttttactaaaattttgattcaattttgctacagcaaaaactgggtatgaaaaaaagtttcttttcgttgacttggaaaacttcgcctgctgcagcatttttctagcaaaaaattagcataagtggtacaaattaaatgagcagtcaggaaggtttttgctaaatttttgcaaaaaaaattgctacagcaagcgtgtttgagtttgttaggttttgtgccctaaataaaacccattac

SEQ ID NO: 362956 - DNA, 490 bp, Cannabis indica
atggtcgctcgacctgagtactttgtttcttttatcgaaacctttgagcagtccgcccagcaggccattcacttttaagtaaatgttcatttagtacttaaagtggtcatacgatctggtacattattggtagtattttcttaaatgttccccattccaataccgtggtactagaatgagttgcattttttcgtcatacttacctagtttgtacgctccggagtcgaaaacttcaaccacttgatatggtccttcccagttaggtcctagtactcctgccgtactatctttggtgtttaggaatacccttcataggaccatatcgcccacgaagaatttctgagccttcacttgtttgttgaaatatcgagctactttttgttgatgggccatcaactttaagtttgcggtggctcatctttctttgattttcatctttcttcgatttcatcaagtgattctgctaggagtatgtgattggtaccttgat

SEQ ID NO: 362957 - DNA, 945 bp, Cannabis indica
gaggttattcttgaatagagtattcttaaatagaggttctactgtatataatgtaattttttaaaaaattaatcgtcacgagaattccaaatctcatattcttatgaaatgatgttgcaaagaggctacgaagacctttttatgggactgccataagtaaaaattgcacaactcacagcaaaaaagatgatttggagtttagtttagagaaatccattttcttatttctcagtttcccaataaagataataaatattctcagttagctaattcgtaaagaaaaagtgcaattggctgatgaagaagatttgtttcattcatgtccataatggaggcaaagccaattggttcaaaacttcaaattcgtaatttgagaaaaaagaaaaaaaatgttataatgcacgcgctaggggtcgaacctacgaccttctgcttaggaaacagacgctctatccactgagctacaggcgcttattgatatattctaaattttcattctatttgtcgtcttgataaagttttgctaattttgttttcttattaaatatttagtagtttatgaagatatttatttataattttaaattaatatatagtacaaaatgtaattacataaatttttatttaataatcagttaaaaattgtatactgtatccagtgtaccgatccatcttaactgtttcgacatgctctatgttgtaaattatttttaatttttcaaatttttaccaaatatcttaaatatttatgataccatcacaaaaataaatttgactaaaaaatatgcccgctcatattcttttggatacattggtacatatttttttaggcattgttataaaatatcaaaatatctaataccccaataacatcatgttttataattagttacttgttataaatattaataattatgtggatgtccaaatcttttatttattacc

SEQ ID NO: 362958 - DNA, 682 bp, Cannabis indica
aatctttgtattgcactcatattttgaagaaagagagtctttattgtgtagaggagagagtgtttgtctcttcctttgtgtttatgtattttgtattgtcttgagtctataagaagaacaacagtgctacctttaagagaatgttctaccagctttcgggagatagcttttcaagtcttcttcagccaacccgggtcattttgacccgtttttctgcacgtgggtccgacggacccgacccaaacccgatcggtgaagagaattttgacgaccaaattacgtgtttttaatcccgaaatgatccaaatgaaaaaataaagagatctatgtggattttatgcatctaaaacacgtaaaagtcgattttaattccaatgaagatgagttgggtccaaaggtgttcttcaaaaaaaaatttccagattttgatgtttattcaaatctttttcatgcacgaaatcactctataattttatatgaatgtgatattgcaataaagatttaaaatatacacccaaaatatatatatatatttttttttttcttaacgaagaacgaaacttaaaactttatgtatatatacatatatacgtatacaatatatatcacataaaattatcaatccaatatgaaatatatataatgaaaatatatataatcatacataaatatataaatatat

SEQ ID NO: 362959 - DNA, 572 bp, Cannabis indica
gtcttccaagaagggggcagttccactggccaccctagaagaggtcatgaagggtcccgtggcccaggaaaaatttacttctcgtgccaacggctgggaggcggacgagctccactccaccttaacttgtgcccaccagctcgagaagatcgtaacggtggtaggcatcaagccatcagcttctgggaccttccactgcctgcctcaggatgaggagacacccaatcataactacaggggttcggagattggagccagacccatcttatgttcggggctatgctcccccttcaggattactttgttaatttcttagtttctgttggtctcgcgccgtatcaattaatttcccaagcataccgcctactttcatgcttatttatcttgtacgctgcatggagatggggttcgcctagtccggctgagattttatacttttatgaactcgtttccgtccccaaaaagggggacaaatttaaagatggtttttatggacttcggtcccatcctttgaatgaaggcccgatcccttataatttttagaagcatgtgaaggagtaccaccaccgctt

SEQ ID NO: 362960 - DNA, 791 bp, Cannabis indica
cctgagcagtatgtctccagtattgcagttgatctctctactctgtatctgaactctcactttttttctctctgaaattgcttgctgaaatcaactctcttctgctttttatataggcatccaggtcctaaaaagatggaaaaccgcacatgtttaaattccattcgaatttgaattttttcgggaaacctcacgccagattttttctctgttgacaaagaggcgggccgcggcatgctaaacccatgccgcggcccgtgtggccaagtgaggggctccttcgactttttccatgtaggcgggccgtggcatgctaataccatgccgcggcccgtgtggttctctgcacccaacttccacacgtttttatcttttttttccgaatccgaatttgatcttttccccaagatatttttatgcgatattttatcctttttctcctaatattttccaactcttcaactattttaaatctgcaaaattaaaagataaaagcgtaaaactgctccaaacataatttaaacttaaccgaaaaatgtgctaaaattaacctaaatttaatactaaaaatatcctaacacccatcgggcccactatcgggcccatcgggccatatcaaattctacttttttacacaggcatcgggcccatcattggacctatcgggccatatcaaattctatttttttttacataagcatcgggcgacatcgggcccaccatcgagccagtcctataaacagaaaaaaaaaaaattaaagtgggcatctgaccatcgggccctacatcgg

SEQ ID NO: 362961 - DNA, 706 bp, Cannabis indica
acttgtatcccaggttcttctcatttcatcttttagatccacaagcttcctccaataccaactactatggatggaagccttgtggttccaacagtcaccattcttcagatagacactatggatccatttgacccataaattatctttcttgacagctagtgtccatatattcttcattaaagcagccttattccaggtattgatatttaaaaaacctattccaccttcagctttggatagacatactttatcccaggctacggctccagctcctaacatattgttagagcctttccatagaaaactcctgcagattctttcaatttcagcaaccactttctttggtaagactaggatctgactccaatatgtgtgaatggttagcaagacagaactgatgagaactgccctacctgcaaatgagatgtgtctagtactccatattttgatgcgagccgtcattttgtctaccagaatattgcattcagtctgagagattctctttgagcaaattgggatcccaaggtacttaaaagggactgagcttctagtaaaaccagaaatccgaaccaccctttggatctctgtttcaggcatccccgcacaatagatagcagacttactattattaggcaagagtcctgaagatcttgaaaagagtcgcaagccttgaagcattagtttgatgctctgcaagtctccttta

SEQ ID NO: 362962 - DNA, 1235 bp, Cannabis indica
ttgttaaggagaagtcatgatgtaataaatattctattgaacgatatgacaaattttgattacgatcggcattaggatccatcacttcaggattggagtcaccaatacactccttattgtccaaacttaccccaaccaattgaagaagaggagaatatactatcacttccagaagagattaatcgattggcagacatggtaagagctctatgtgataatttaatggtacatgattttgagagttttaagtataataactcaaataatgaaagttatgagagttgtttgaagatagtagaagcaccattagatgaatttatagaagagattgagcctataattaaagagaaagaatcctttgaagtggctaaaaatttgggtacaatggatatgcttgctcaacaaatgatgatctcaatttggtgaatgaagaaatatccatcctcaattatgaagttattgaagattaagtcacagtcaaagatgtggatggtcaggagaaaactaaacaaccaattgagaggttatttgaggaaagtgagaaagaggtgtcattggtggttgaagaatcacatgtagttgttgatttgaggtcatcaacaccactatattatgaaccactaatggaccctaatgttctactaataccgcatttcccatattgtattctgtacgagttaccaatagtttcttcccaagctcatcatccaagatcttgtgttggcggtgcggctttcggttcaaactcatcacatgccaagcttgagggtactttcaaaaacagctttcaagttgtcttgcatgatgcttatgatgggcgtcaactgcttgttgatgtggcatggacctaaggtaagtgtttcttctctttaattttgtttcacagttggggacaatgtagtaaagttttaaggtttgggggaagggtctttaatttttattttttattgtttagttttatttattttttttgttttagttgttaattaaggtaatgttaattttactgttgttgttattggtggaatggattaaaattttaaatcgtgtgcttattttttttgctctttgaattaatttagatgcttgtaaaaattttgtattgatgtaaattgttaatagttggattgtatcataattattttactttggtttatggtaagattgattaaatatgatagaacttgcatgaattattttttgaggtgaaatccttaacaatgcttatttggaaa

SEQ ID NO: 362963 - DNA, 506 bp, Cannabis indica
acttctaggaggcataaagaacggagagggcggacggatacttaatgcccttaggagtgaactgggttggacagaggcgaaagaagtctgccacattcttaaagtatgggtgcgaaggcaacaatgcccattgttgggcatgagcacccgaccaggcgcacatctccctttcaggggttgtggctcagttattgtgggcgggaatgtaacagtctaattctccctagtagccattctggtagccatcctcgtcgagagcccgcatgcgtgcttcagtaaccttggacgcagggctcacccacctggcacccaaggtacattaccttttatgagaaaccgtagtagtaagttcctcactgacgtagtccaccccctcaaccaggacgtctccatcagcatcgacaggctccgcaacctcattgtatcccccatagtttgggggtgcaactgttgggttttatgccctaaataaaactctatttcaatgtaatccattttattcaaca

SEQ ID NO: 362964 - DNA, 786 bp, Cannabis indica
actgtataggttaccttgaccggtaatgtgctgactttgtaaagtgatccacaacaacccaaactgagtcgtacattcctgtggttctaggcaaaccaaccagaaagtccattgcaatgtcttcccacttccattctggaagtgttaatggctaaagtaatcctgcaggtcgttgatgttctgctttaatttgttgacaagtcaagcacttagtgacatagtccaccacatcccttttcattccataccaccagaaatatggcttcagatcttgatacattttggtggttcctggatgtaatgagtagggagtagtatgagcttcatccaaaatttctctcttaagctcagtgttatcagagacacacactcgtgcttcaaacaataacattccactatcagagattgaaaagtccttagctttgtttgctaagacatcttctcgaatcttaaccaattcaggatcttctaattgagccgctttgattctttccagcaagtatgactgaagtgttagtgcaatttcccaatcacaagctcaatatttgccttagacatatctgaggctaactgaggaggaatcattaccaaattaaaattctgaccaggtccttttcggcttaaagcatcagccacaacatttgcttttccaggatgatacagactttcaaagtcatagtccttcacaagctctaaccacctcctttgtctcatattcaaatccttttgggttaaaaagtacttaagactcttgtggtcaatatagatctcacacctttcaccata

SEQ ID NO: 362965 - DNA, 577 bp, Cannabis indica
aataataaggatgttatcttaatataagatttcttatccacaatattcacaatattgaaaaaggaagctaaggaagtcaatgataatttgaaaagaatatcagagtaaaaacagtttccaattattcggagtcaaacataatgtcaacactataattggcaaaacgaaaagaaaatcattgtttaactaaaagcggaagcgaaactgaattactttaaaagtaggaatcaagaaagtactgttcaaaacaatctgaacactaaacggtaattcaagaattaatgtgccaacataaataacgtcaactccaatataagtgcccactgtaagcattgactccctctcacttggctttctgagatcccttagcccctggctgtggttgcttattttcatattttctttatcctttgttgggcttgagttgagaaacatagtgagaagatgtatgaaaacctcgatgaatgatgtaagagtcaggaagagaaatattatgatctttcaacttgtactgaactttaatgatttttaaaataaaacctctcactcctttgatttatcatactgaatggttgtc

SEQ ID NO: 362966 - DNA, 720 bp, Cannabis indica
ccgatccaccagcactgcctccacctccgcagaatctgggggataatgcgggggctgataatgctaatcctcctgctgacttgcagcagatatttcaagaaatgcgaagtgtcatacttcgtcaagaggaagagttgcaacgtttaaggcaacaggctgccccagctaatcaagggttaccaccagcacctgtgccagtggtgggtaaccaagggtatattatgccgcaccgggactctgtgttcgaggctacaacctccgacttttgtgggaggtattgatattattaagaccgatcagtggatgagtacttttacccgtatcctcgataatatgtgggtgacgggaactgagagagtgaactgtgcgacctttatgtttcaagaccatgcccgcatctggtgggatatagtaagtcagacccgagatgtcagtataatgacatgcgaggaatttaagaaaccttttttgaagaaaagttttataatgttgctaagaggacttcacatcacaaagattttgtgaagtttactcagggaaagatgtctgtggccgagtatactctggagtttgatcggttgtcaaaatttgctggtgatctagtgcctacagatttcaccagaaaacagaagtacgttgaagggctcaatgctacaatcagtctggacttgaaaattaccacatcacatgacactctgtataagagagtggtagacttgg

SEQ ID NO: 362967 - DNA, 927 bp, Cannabis indica
gctcttttaattaaaaagaactttttaaggggtaattattatacccgaagttcggtaagcacataagaggaggacacgtgtcgagctgggaagaactcaaacacacaaacgacaagtacgcttagcatggaataactcgttagaaatataattcgcagggtaggtttataactcggttggctgaatagccttttgcgagacaaaaacatacgaaatgctaatttatgcattgatgagaaaccatgtgagtgcatacgctcatgacgaagcctcaaccttgctgtgtgaaagagaaagcgacaacactaaaaatacttagcgtatattgtacgatagacaaactgagtatagatagtatggcaagccaagataacagatagcgaggtgtttatctcgctaaaagatgttttgcatgcgaggaagatcttctcggccccagagagtataaccatcaaggttaagacaatattagtctcgagaagctaaaatgacaagcagctgctcgctatcaaagtgatcttggctccctcctcggcgaggcatccctatgagatacgacttaccgtacatatttaattatgcgctcatctcggcccaataaaggctggatattcatagctgtgtaaaaacctcatttatttggcttgatttgtaattaaatcccacaatttttgggatgatagccgtaaatgtattttggtcagctttgtaattaattgccactatgcaattataaatagtggcggataagatcaaaagagaggatgaaaaaactcttatacaagaggccctaaaaaatatactcaaaaatcagaataagattgactcgtggactatgcaaaattttaactgcgaaaccacgtaaaaattcagtgttcatttttttatttttctataattattattattatttctgtgttgaatcat

SEQ ID NO: 362968 - DNA, 935 bp, Cannabis indica
cgtttttcatttaaaggcccgatttttatttctgttgcataaggatggtaatatttatggtgtatatgcgccctgtgaagtttggagtgaattggataagttttgatagtgtttcggtgagtgcgaaaattaggattttcgagttttatagtttttagaaattcctaagatatcagaaatcgtattttggtcataacttttgactcgggtgtccattttggacattctatataccgtttcgaagcttgcaacaagctctacaatatggtgtatgttttagagccaaaatataagttttattttagtgtatttataccgcgggattttataaaaaaccatagattatcttatgtgaatattaagcagtgttttgggataaacacttattggtttatcgttgttgtgacatagggccgagatcatcgcggatagttctccacttgggttggccgaaatgtatgaacctggattaaaggtaagaaaagtatattgtactgtatagtacgttgtatgtaatacaattagtattgttatgaattgattaatattgagatatagttaatattgttatatattgaaaagactgattggttgagcattgataatgttataatataatgtatgtgatatatgggctcaccttattaggtgatgcatagttaatattgttatatattgaaaagactgattggttgagtattgataatgtgataatattatgcatgtgatatacgggctcacctgattaggtgatgcgattttcctggcgacgtattgggcgtaagtacgggcgtcactgatatatgatgagtaccgagcgtaggtacgagctcacctgattaggtgatgcaattttcttggcgacgtatcgagcataggtacgagcgtcagtgacatatgataagtaccggctgtaggtacgagctcgtctaatt

SEQ ID NO: 362969 - DNA, 785 bp, Cannabis indica
ttactaccgacgacaaaaaccacctatgctgaaatggtggaaaaggcactgcgagctgagggcgcctttgggtgcatgactgagtctactaggactctaatggttggcggggctcctacccttcctgcatcaggctttagcaggggaggtagtggttcagccatggatcagaaaaggaaggcatccactacaaccgatggcttgggtcagaacaagaggttacgggggaactagggtcgaggcggttgtcaaggtaattctgagaattgatacacttacccggagtgccgcagttgtaaaaggcaccatctgggggagtgtagaggacatgggtgctttcaatgttgcatgccagagcattacaagagggattgccctcaactcaaaaccgaagcaccaaaggctccggcgagacccactctagcaagagtgtttgccattactcagggtgatgcagaagccagcccttcagtggtgacaggtcagctctcggtcaacaactctttttactctgtattgtttgactctggggccacacattattatgtggcaaccagaatatttagtaaattggatagaccgcatgatagttatgaatcagggtttggaaccctattacctagctgagagttagttatctgtaaaaggtggattaggtttatgccgatcagaatggacgatagggagttaagttctgacctaatagaaatgagcttagaagattttgatatcatactgcgaatggatttcctatccaaatattcagccagtattgactgtaagag

SEQ ID NO: 362970 - DNA, 571 bp, Cannabis indica
tggataaatcttttataacagggtccccggaattcctttttactgtcattataatgtccgtttttagtgttttattttagtcaagtttttattatcctcacagttttcaataattaattaatatattagtattaaactagttttataaaatcacacacgtggcgttcctatagattagggtgttacactatatatgttccacaatatagatacgctatgagttatccatttgttataatcctaataatcaatgatcatgtataggttatttacattgagtagggacaaaatttaccgttacacccttcaatgtattttatccttaacacacttagctacctataaatgagatttcaatgaactaatataataactaaaatgagcgctctatcatttatctctattaagctaagctcgaaggaaatcatcgtttcacttttatgtccggatagaagctatatattccgtatctatgattagcgatcccattcaattgaattaccatgtccttaatctatatgtcacgagaagatctatttggtcgactataacaaacagattgaagaacaca

SEQ ID NO: 362971 - DNA, 1563 bp, Cannabis indica
atcatgacagtctaaatccagtgaactggaaaatcagggaattaaactttttgaacatataatcatgattatattccactgtactgacaacactatagtcatgaacaaatacatatgttctggaccttatagaatttataaacatgaaataaatcatgtgaaccatgcaacataaaatgatttctgatctttattaattagtaaatctgattatattgaaatgggttttatttagggcagaaaacccaacatcaccatgtagtcattgactatcatagtcggtaagccactgtactgatacaaaaaagcctatcaatttgtcgtgcagcaacccccgaatgtcatccccctgggtgaaatagacgaagattcagcgatgaatacctcttagactataaatggccagccgccaaatctcgggtcacaggttccacctgtgggccaagtggtaggtggcagaccttgtctagtaattcatcgggagaagtcatacccattaatttcgaccgggttaatggtgttggttagcacattaaccaaaccaaccaatcactaagacaaccaggcgcttccgtattcgataggttggggatgacacatgatctcagaaacgatctgaataggaggagaggagtagacgatcagcttaacacaccgatcatgtagcccagaacccgcgctcaaattcccgctcagaaagatactgatgtgactcagatcggccaaaatgccgaacaggttagtccagctgtgtaggcagagctggacaaactaaagaatatgttccaaagcatggccgatcagagaaataatgatctcgagttggacagagcacgtggaacccgtttctcccccgagatcaatctcctgacattgccccacaagtttaaaatgccaacctggaagatgtacactggaaaagaagatcctctttcccacctcaattatttcaagacgcaaatggatctgcagggagtatgaggagacatatgttgcagaatttttcctgccaccctatcggaagcctcccagcaaacctggaaaggtaaactcatggaaagctttctccatggaattccatgcacaattttcctcctctcgcaaacttccgttgcacctaggagacctgatcaaagtcaagcaaagaccaggcaaacctctccgagcctacatcagcagattcatgacggaggcgactaaggttgcacgagtctaaaataatgaaattaaacacatataaaagtttcagaaaaccttacattgggtgcatcaaaatactagtgtctcattctgctcagatctctaacccttgtatcctgtctgtcgcagagtatcaccaggatttgagccccaatgtccttctcttgaatctgaattcttcacagccttacacactatgattgagataccacttgatgtgtgtgggaactcactctatcactcaaggtatgaaaattttaagagaaaaagagaagaagtggttcgactatgggtataaaatagatggctcaatttttcctgaaggcaagaaatttcatcatctatttaagtgtgagccatcac

SEQ ID NO: 362972 - DNA, 490 bp, Cannabis indica
atagtgggatcgtgtgtatgcctcatccacgtaagttgatccctgagttatagggattgagctggtcactcacgatacgtttagttgaattcgctaagtgttgctcattctgcacgacttgttgagtattccattctggatatgccagcgaggcatcctgctcgacatgttgatccaaacagattgtctaagtagagtccacgtgtcaccattctcgtgatgccacgtcagagtgcccgatttgggataacagtatgtatatgtatttacatgtttagcgtgcatgttaggaagcctgatagattacattagatatgtatgttggcttcgtaccattcgacagtatcacatcggtacgactagagtatgactagcgtaccaagtataggctgatattatggtcgatggtaccgtactattttaccgtatcacatcggtatgctcagagtatgactgacataccgagtataggctgatactgtaacacatc

SEQ ID NO: 362973 - DNA, 546 bp, Cannabis indica
gggactccaactcaaagatctaatcccctgtgccaaaccggtgtatggtttctctggccagagtgttgcacatttggggaaaatttgtctacccctcactattagagaagctccgaagagcacaactgtgatggcacaatttttgataattgatgtcccatcagctttaaacgtcattttaggccgacaagccttatacgacccgaaagctatcaaatcaattttcaattcgtgcatcaagttcccaacaaataatggggtagggtgcctaaaagggaatcaacaaattgcacgggagtgctataaccttgccctgaccaaggccaaaaaggaaaattcctccagccagagttcggacaaggggaaaagtattgcccaataggaagtcatccaaggtcgggacaaggatgtggatccccaacttggggaaccaaaaacaaatgtttgcctagtagaagaattggaagagatagaaatcgacccaaatgtcccgaccaggaaactttaaattggcaaaggttcattgcttgaagtaaaataagcttt

SEQ ID NO: 362974 - DNA, 872 bp, Cannabis indica
tcatgtaacatgagaaaaaatttgatgaattttaataagaaaaatttatgcattttaaattttattttattcaattcttattcacattcccctaaaacctaaaccctgaaccctgaaccctgaactctgacccctacacccctgatcccaaacgactaccgctacccctaccactacccccaaccctacccaaaaccctaacctctaacccttaaaccgcaaccccaacccaaaaacctaaaccctaaacctaaaccccaaacctcaaaccccaaacctcaaaccccaaacccaaacccaattcccattcccattccaattccctttccctttcccattcccattcccatccccatccccattctgttcccattccctttgcattcccattccctggcccactcctattcccattcccattccaaggcccattcccattctcattcctattccaattcaaattcccattcccatacccattccctggcccattcccattcccatccccatccccattcccatacccattcccattcctcggcccattcccattccccagccaattcacattcccattcgcattcgcattcccattctcgcattcccattcccattcccattcctattcccattcccattcccattcctatttctattccgattcccattccctgacctaggggtgtgtagaaagtcatccaatccaatagaatcggatatccaatcataattggatcggatcggatgcaaattttaaaaatcgtattagatcggatcggatgttggatgagacatccgatccaatggataaccgaaccgatccaatccaatatcatccaatgttcatccaatcatatttaatatttataatt

SEQ ID NO: 362975 - DNA, 725 bp, Cannabis indica
ttcaagaaaagtagcattagtagaaacaaatactttgttatcttgatgactatataaatagtcacctcgagtctcatctgaatatcctacaaatatacacactttagtcttaggagcaagcttcctagactaaggtttaagaacatgagcaggatagccccaaacacgaaaatgtttcaaattgggttttgtcccattccataattccattagagtaatgcttatgctcttcaatggtactacattcaaaatttaagtagctaccaaaagtgtgtatccctagaagatcagtggcagtgatgagtagcacatcattgatctaaacatgtctaacaaagtctaatttcttctctctacaacaccattcagctgggataaaatcccttcttccaacaaatagtctttaaatttgaaatccaaatactcgccaccacaatctgatcgaagtgtctttaacgatttacctaattgctttttagccatagccttgaattctttaaactttccaaaaatttcagacttcttggccattaggtaagtatgaccgtatctagaataatcgtcaatgaagtgacaaagtattcataacctccttgagcttgaatattaataggtccacacacattagcatgtattagctcaagttgctctttggcgctattgccttttgcagaaaaaggtctttttgtcatctttccttcaagacaagatttgcataccagaag

SEQ ID NO: 362976 - DNA, 527 bp, Cannabis indica
ttggagaaaataaaatatcgaggttgagcggggttatagaatttgaccattttacccctagtattagaattgcttaagttgtaaattaaggggaattttagtcattttgcaaaggtgtgatttggtggctgccctaggaggtgacacatggcctattatttattcagcaaggattaattaagttatttttaattctcattttagaaaataagggaaattggaagaaaaagtaaaaaattgagaattctctctctttctctttcggctaaagcaaaccagggggatttcatcttcaatctggtgttttctgaatattaagcaaagtctttgtgaatccaaagcaaaggtaaaaccctataacctttatttatgtgtttttgaagctttgggttagtttaagtatgtgattttgataagtgggagatgttagggttaaaaatgcttatgggttcgaattctaagtttgatttgagttaattttaccctctagtagctggtttggttgtgttgtattgaatttatgcaag

SEQ ID NO: 362977 - DNA, 1019 bp, Cannabis indica
gaacaagcttaccattaaaaacacgtatcctttacctcgaatcgaagatctctttgataaactgaagggaagacggtctttctaagatcaatctttgcttaggctatcatcagttgagaattcgagaggaagatatcccaaaaactgcgttccgtactcgatatggacattatgaatttcttgtgatgtcttttggactcaccaatgccccggcggcattcatggatcttgtgaattgggtattcaaggattacctggatagatgtgtgatcgtgtttatcgatcacatcttgatgtattctgaatcagaagaggaacatgagttgcatctcatatccgttttgcaacggttacgagaccacaagctgtatgctaaattcaagaaatgtgaattttggttatctcgtgtctctttcttggggcacatagtagataaagatgggatcatggtggattcgaccaagattgaagctgttcgggattggccaacaccaaaatcggctaatgaagttagaagcttcctgggtttagctggatattatcgtcagttcattgagggtttttcaaagattattgtacccctaacggagttgacccgaaagaacttgaagtttgtttggattgatcggtgtgagaaaagttttctggagttaaggaagcgcttaattaccgctccagtgctaactcttccttcagataaggaaaagtttgatgtttattgtgatgcctcgagacaaggtctcggctgtgttcttatgcaagctcgaaatgtaatagcgttgaaatatattttacaaggatctagatttactaacaagtatgtttttagcatcctaatatgaatttctaaaacgatgaaaataaacatataaaaggtatgagaaaccttacagtggttgcagcggaattaaatgaatccttccactcagatctctaactcttctatcctttctatagcagtgtatcaccaagatctgagctcgaatctccttcttgttgtttggattcttcacagtctt

SEQ ID NO: 362978 - DNA, 709 bp, Cannabis indica
tttattagcattatttgaagagtagtgaaagttcaaatcccatcatataaataaatatataatttggaagagtttatactagttttttagaagattaacttgtcttagtgattcatctttaataggacgaaaatcctcaagataaaaatactgaaaacctaacaaagggatgataagtatgagtccactataacttatacatgattttcaaaattgtttaaaattaaaaagatgagaaattttgatcaatgaaattgtgcgcaaaataaatcttttgatttttatatgttttcattaaaaaaaaatggagaatggaatgagtagattgaatcagttagtaatacgatcaaaatcaatatcgatgcagcaatttttagtaatcagaacaagcatggatacggccagggacggagggactttagcccatgtgtgggctaaagccctcactcaaatatatacatcaaattttttatatgtagatatatacatatattaattcactttgctcaatttattaaagtccaattcacaaaagccctcactcaatattttaatcatgattcatgagcctactcttattctaatcaagcccattttaaaagtagtccaatacaaataataaaaaaaataatactttattaaaaaataaaataataccattgacaatattttattttatttttgtcaacagtattattttattttgttg

SEQ ID NO: 362979 - DNA, 645 bp, Cannabis indica
acatacagttattcacaattacagtgatgtcagcatagtggaaggtaattgtgattatatgcttcaaaagataatgtcccatgattcatcagtgcattggatttacacggatgtgatagtcagcgataaagcttacttacaccttagataagtgttatgttctttctaggatattggcaaagtatgttagtatcgagtgtagagtatacattagactggaaccgatattgatctttgtaaagatattaaaatcttaccgtcgtatctttctaagtcaatatcactggttgatcttagattaaaagatattaatcttgatatggttaggttcgatctcaagagtgttatttgtgctcttagagttgtttgtcaaaacctaccaattggttcaggtcacacatacatcttgggaacatgatagtacaattgagtgggagcgctagtaaagttactagtgaggggagtatgtccttcagatatctttctagaagtcactcaattggagtatgtcccctagtaaagtcgtatattagccttcttctgtgaggcctttgattttggtagcctcgtgttgggttttgtaccctaaataaaaccctttacaatctgattagttatcaatataagaaatttgaagtgatttat

SEQ ID NO: 362980 - DNA, 519 bp, Cannabis indica
cacaaagaacgtattcaagttcttgaaaaacacatgtttagatttgacatataccttggcctgccatggcggtcttgtttaagacctggctggccttagggggttaccctaaaagctggccggcctatgcctagaaataagattcctagctggcccttggctgggtcatgggacctgactggtcctcttgagcttgggaaccctggtcggccaaggccaatgttccaagtgggcaaccaacttttcatccttttttgacctcggtaagggtctcgtgacgaccatttaggcatatacaactgtgatcttatgcaaggttcccttgggaactctgtataagacttggtagtgagtccattatagtcaagtgcacaagttaagactcaccatttgtctagtaaatatacttgagttggtgctttgctgatacccagccttgtacaatgtaatttacctggaaggtatccttgggtacaattgactagaactttgtctgtagctttgtcaggttgctcacct

SEQ ID NO: 362981 - DNA, 760 bp, Cannabis indica
tttcttgtgatgtcttttggactcaccaatgccccggagacattcatggatcttatgaatcgggtgttcaaagattacctaaataggtgtgtaattgtgtttattgatgacatcttggtttattctgaattagaagaggaaaatgagttgcatctcagatgagtagttcaacggttacgagatcacaagttgtacgctaagttcaaaaagtgagaattctggttatcttgtgtctctttcttggggcacatagtacataaggatgggatcatggttgatccgtccaagattgaagctgttcgagattggccaacaccaaaatcggctactgaatagaagttttttgggtttagctgaggattatcgtcgtttcattgagggtttcccaaaattgttgtacccttaacggagctgactcgaaagaacctgaatttgtttggaaagatcggtatgagaaattttttctcgagttaaagcaacgcttgattagtgctcaagtgttgactaattgtgtttacttcgcttttagccaacgacaatgagtctattttataagagataaacgatatataataacaaatataaagcaataataagacacagggattttatagaggttcagccttgagcagttcggtaatagcctaatcctcattacttgtattgacttaagatcaaggagaaagattcattttcttatagctcttacaacattatctctgaatatataattcttcgataatagtatagtcttaggtta

SEQ ID NO: 362982 - DNA, 653 bp, Cannabis indica
caaaaagcaagcattatgaacgacgaagttgcacgaatcgttacaaaggaaaatcacagagtttctaaacctagggttttctacatatcttctacagcaaagttaaaattgcattcacaaaataaatgtgcaaagtaagagaaattgagaacttactgaaggatcgatgtctgggttcaggttatgcaaagctgaacgaacagttctcgtgaaaatgagtttgtgaacaaatgctcgatggtatttataagcaaacaacgaaaagtaatcatttcagaaacctcagacccctcgtttccaccaaaagcgaatatgagaaatgaaaagcaatcaagtgcaaccgtcaaacgtagtgagagaaaatcagtttttgaagcattaattgcgtaagagcatttattagccgaaaacttaagggacgcccagtcagcctcacatcctcgcgaacagacgcgcctgacacttgtcacccatctaaacgcaaagacagctcgaatgaagtctacacgcaactttggaagtcctgtacagacttggggatcaaatgttatcccaattttccactctaacctggcatcactcgatggtgactgttggaattattttaccaggatcttagatctactcacaagtatgttttattaacaccctaa

SEQ ID NO: 362983 - DNA, 807 bp, Cannabis indica
agtaacagttggagccttcttcgattttttagaaactttcttcgccggagatggtgatttcgaaccacttctagtggttgccatttatatagagaaaatatagtggaggatgacaatgtaggttgaggaaaacgtgggtgagggcttggagaaggtgatcgtgggaagaagaaattggttagggcttgataatggtgatcgtgggaagctcggtttgaagagtggaagaatcagataaatgaaaaattcaaaaaaaaaaaaaataagaaaggagttatgaggtggcgtgcgtgtacgtgtgtaaggaagaagggaaaagataaaattgtaattattaaactttttgaaaagtaaaattgaaaaatgtaaaagttaaaaaagtttaaaaaaccgtgtatggataaaaatgtaaaaaaggtgtcaattttgacatgaggtgtaaaaatctcttaaaagaataaaaaacacaaataaaaacatgtcaatttgcattcttctacgttgttatagatatatatatttggaatacttcttaatgggtatttacccattaataggtaataaataaatttaactataaatattaattttaaaaatattaaaccattagattttggtctaatagcgaataataaaagagaaatttgagtttctatgtttagtttagctacttaattaaaaaataaaaaaaaatacctccttttacaccatataaaaaatatatgtatatgaaaaatatttaagtcaaatttaacttttttttatcacttttttgccgaaatacttttttttaattgtttttttttt

SEQ ID NO: 362984 - DNA, 587 bp, Cannabis indica
cgagctggagctttttccatgtctttgcgaggttgataatgtaaccctcgtcgttcctgcgcttgaacacataatcctccatctgaaaatcacagttcttggtgagaaggtgaacctctacagtcaacatcaattgtatgtcaacttctatgtgagagaactgcctcaacggagctgtgaaccccattgaaagttgtctgaagctgattagtgaaggtaccatgagtgcgccttcctatataaatttggatttactcgactattatacttagtttgtatagtgtgtattatacactaagtgtcttaccagtcatcatgtcttgtcttttaatgcgtagtgagattgatgccttgccttgtacatttgaagtcctatggtttctcgttaatgtgcgagacaacagtttgtacatctatatctcgcgtaagaccttgcagtcggcaagttgtaaatatactctgtcaattccacatttaataagttattttataaatttcatgtaattgccccttaaaaagctatttttaataaaagtactttgcaatgattacaaaggtattttgtcataaccccttttggaaaaatg

SEQ ID NO: 362985 - DNA, 1222 bp, Cannabis indica
gtgggccaagaggtaggcgggcagaccttgttcgggaattcatcaggaggagccatacctgacagatccaatcagaataatggagttattccacctgtcaaccaagcaatcaaccgctaagacaaccaggctctcctgtgatcgataggctgggaacgacccatgacctaagggacgatctaaacagaagaaggggaacagacgagcagaatagtgcaacaatcttgcagtgcagagcccatactcaaatccccgctgagaaaggcgctgacgtaatccaaactgaccaaaatgtcgagcaagtcagcccaaccgtacaggcacagcttgacgagttgaagaacatgtttcacggcatggctagatagcgtaacaatgatcttgcataggaccgtgctcgcagaactcctttctcactagagatcaatctcctggcactgcctcacaagttcaaaatgccaacgtggaagatgtacactcggagagaagatcctctttgcaatctcaagtacttcgagatgcaaatggatttacaaggtgtacgaggggacgtatgctgcaaaatctttcccgccactctgtcggaagccgcacagcaatggtatttcaggttggctcctggaaagtttagttcgtggaaaaccttctcttcggaattccatgcacaactctcttcctcacgtcagctcccaatgcatctgggagatttggtcgaagtaaagcaacgactaggcgagccactccaggcatacatcagcagattcatgacggaagagaccaaagtctcgcgggtaaccgaggatggaaagatatccgcgatactgggggcattcaagtccttggtgaactatggaagggtataaggaagaacgggctggttgactcaatgagtgatttcctcgaccgagccgaaggcttcatcaagctcgaagaagccattcaacgagcagaaggtgaacaaaagccaggaaaaacgaaggctccttcaactggaacgtcactattctaactgaagatatagagagtgtgtatatggcaactgagtcgttaatttcgtacaagaagcccgggcccatgaagaaagataccaacaaaagggacatgacaaaattttatcggttccacggagactatggccacgacacgaacgaatgttataatttgaagtgggaaatataatatcttatcaaggaaaaaaacccgcacctacagaagtatgtca

SEQ ID NO: 362986 - DNA, 697 bp, Cannabis indica
agtcatatatttcaaaacataaaaaccacattcttggcttttaggttgtcttggacaatttgctgtgaaattccttgccacgggccaagatactcatgtgcgtcccctatatatctgaatgcactgttttgaaaaattatattagcatttcaattcattagttaatttaaatttgttacataagaagtcattaaattattaccttccgatcatttgagtaatttcttcgggaattgggcggccacgtacagggtctaaatggataattttctttggcgtaaccaccactagcgtccaatgcgcactagaaaattatattggaatataagtaagatagtataaaaataatttgaagtcataatatagaaatgaacaattagcactaaagaattaaatagagtttacccgatattccaaggaataaagaacatttggtggttgttattcattaatgataaccaatcagccaatcgtcttgccgcatcgtcaaaagactgactcttttcttcatcggttttcccatgcactacgagaagctctgggtcgtaaaacttgaaaatttttctcataccgttgatgctctcccagatgtgcctgccaaaaaaagtgttagtgtcttataataatttgactagaatttgatatataaggttaattagattaaagaagagtatacatcattccaaacagcattccc

SEQ ID NO: 362987 - DNA, 566 bp, Cannabis indica
tttttcaatttctttttattcttagatgaatctctcgagtcatcctttctttttgagtttgaaccacttgggttgtccactttagtcgagactgtacttggtgttgccttactcgtgttgggtttacctccggagcttgttttcaacagcttcatttcatttcttgcttcctctttgggcacaaatacttgcgctctttcattgaattcattaattttcctcactgggcgaccatgtagatcatcccacaattcacctccaaccgtggataggtcagttgtgatccccgcttgaagtgtagtgagttgaatattttcatttaggttttcgacctttgcagtggctgttgtaaaaaaacttaaataagctttaagtgacttgcctgattgttgctttatgttggttaaggataatgatttaagtcgtctgtttctagtagcttgaaattgctttttaaagtccttcgacaactgtgcagctcgttgctaatcaacgagattatttgaaatcgtgaataattaaaattttgcttatttaattaaaacataatatattacatttataaa

SEQ ID NO: 362988 - DNA, 916 bp, Cannabis indica
gcacctatacctgtacaaagcatttcgtaaacataaaacaatcacaattggactgcaattataaatagagaatgaaattcattaaggataacaagagcatatagtaccgggattaaaagctgcccagtcagccacttgtccaaaaaatgaaaaataattcaaagtttaaaagccgcttggccggtcatgatgtcttaaaggccttaaggccatatataatatatataaacaggagagataaaaagatcaatgttcaaacggctggagtgccaggctttgggtttgcttcttctgagcaaactggagcaagaggatctgttgttcgagcaggagaagcatcagcagcctggtcagaagcttggccggaggtttaagcagccacctctttctcaccataggcaacttgggctgcgcagtactcgaggtacatatccttgcaatcgcccaagtagtcgaagttggcctggggattagccttccaaaaatcaaagaagagctcgaggccggcagtctccaaagcattgaccttctccttcaaacagttcgccttggccgcctgagcgtccttatcttccttcagcagaagaaggacctgccgcagagaactcctctcatcctgaagacgatcaacttcagcagataaggtctcgatggtttccccaaagcgatcagcagcctcgaggtcctttgtcaccacggtgatcttcttctcggcggcaaacagcttcttgttggcctcacccaactcatgacgaacagctgcagtctccgccctggcctcctcaacttccttcttggccaagtccgcctccgccctcaaggtgccgaacagagccgcactcttggaagtagcagatttagcccgggagtaggtgtaagccaacttcataccgacctgcataaaggaaaaattcag

SEQ ID NO: 362989 - DNA, 828 bp, Cannabis indica
acatgaaccaaaacatacacaaatgaatgaaaaatacttttgtttctttattgataatgaataaaatggattacattgaaatggagttttatttagggtttaaaacccaatatgttcgaaggggaagaaaaaaagaacttaaatttgatagttatttagttgtgatttctttatatctagttgcctttttttcttaatggctgtcatttcaaaatattaaacaatgttgcttttagttttcttgtaaaagtttattttatcttttttagtaatatttatcatgaagagttgaaaggacaatgagttaaactttttctttttaattaatataaaattttttactatgcatatttataatatagtttttgaaaatgtgaataaaattaaattattacaagcaaacaatttttgtatagttgcaaaatagcaagttgtattgtgtaaaaaatcttaagttgaggtaagaactaaaccctaaatatttatttaaataagaaaaattatttctaacttatacagataatatctaagatcataactaaacatgcatatcatatattgtaacacaatatttggttacaattggttaaagtcttgcatatacaagacccacaaggtagttacatatacaaattatataattgcttaacaatgcatattctaaaaggcatatcaaggcataaacatctaatgcaaatagttccataataaacatcttaagttgaggtaagaatcacacaataaatatttatttcaataagaaaaattatttctaactcataaagataatatctaagatcataactaaacatgcatatcatatattgt

SEQ ID NO: 362990 - DNA, 731 bp, Cannabis indica
caagcagtataaaatatcaataacatgtttatcatactttataaacaataatgcaaatctcatatgcctgtatgtcacagacctgtatgttacgctcacacgcctatttatgtctacgtgtcatagacctacgtgttgcgctcacatgtctaaatacaataaggccttagaatagttcatctcggttctggttaccgagtccaacctgattataccttgaacgcataatccttaatctcaatatatatattacataattaatggttccactgcactatttgtctatttgctatagatctgcgtgttacactcacacacctatatatttctatgtggcatagacctatgtgttgctcgcacacgtctatatatatctatatggcatagacttacgtgttacgctcacacgtctatttacaataaggcctttgtaaggtttatctcggttataattaccgagtctaacctggttatgccttgctcgcataatcctattcatatatatttacgtaatccatacattacgttctttcagttgtttatcctagtaatatactaggtctaaccaagttatgtcttatgcacataactcttgaccatacaaagtcaagagttatgtatgcattcaatagatttcaaagcatatagaatcttagggtaataaccctaacttgcatactaaatactcattcctacaatatattacggtatgcccgaaataacatttattg

SEQ ID NO: 362991 - DNA, 595 bp, Cannabis indica
taaaataatttccaacagttacgccgtgagactttaagacatatggcagtttcaatatgccttctcccacgcgacattaaaagcgagatgactgttcagatagggtctgacacctcccggggatgctttgttgtgactttgctctccgggagtatgtgagatcgacatgccttctccgggacgcatgtgtaaggctgatccttgtggttaaatagtcttagctgaattatttaaacgttaaaccctttcagtctacgagtcatcatccgattggtccacgtattttggacaaaatcggggggaacatttgccccccaagccttgtttgttgataaagtaaacaaggcttgcttagatgcctccggttgccttattactgcagtggtgacacattaatgaccatcattactgcagttatttgctttttgcaggcgacgattcgtttcttgtccatttattgatatggcgtattaaatgggtgtcagacgggtactcaaacgttttctaccgtcttgatgagtgtttaatccaactgttggatctgtggaattcgaatcgattgccatcctaaccgtacgatggtggttgatcacag

SEQ ID NO: 362992 - DNA, 771 bp, Cannabis indica
tttttattgtaatttaattagtggaatcttgctgaaattgttatggaaaaacatgatttaagttgtatcttgccttgtgattgcatgttcttaagtgtgaataaaaacctgaagaaatgaaggtgttaatctttggatttaagttcctgagcatggattttgttctagggtttttttctagcattgaatcatgtgttattgtgatgttgtgttggctggaaaaattatagagatagttgaaggtgatgctcttgttcaaagagttggatgtgccatgtttgtgcttgatttgagttggtttttggcaatttgaaatctggaattttaatgcatgtaatatgttaaaatgagtatcttttatgtgtgaataatcctataggtcaatttgtgaattggttgagaatttggggtgattaggttgagatttcttgctgaaaattcgaagtttgcttgctggtttctgggttctgcacccagatgccgcggcctgccccttgttgttggaacctgggttttgtcccaggtgtcgcgacatggtctgggcatgccgcgacccgccctcgtgtttttgggcagtttgtgttgaattttcaaatatgcataactttgtgatccgaactccgattcgggagttctttatatcgttggaaagctcgttccaagctctgtatgattatctgagttataaatgccatgcttgaattttttatgagttgaaaatcaggggttaaccctaagtgtgaattatcccggatttgtgtgactaggatt

SEQ ID NO: 362993 - DNA, 459 bp, Cannabis indica
tttttcgtttgatactccgtccaacactcatcttgtgtgttgtgttttgtagatgaacccaggtgagtcttgggaactcgagcatcagatcgactaggattttgcttcaacttctgcacgaagttcatcctcgtcttcgtgctagtcctccttctatggaaggaaattcttcagacctcgtacccagccataggatgatggctcgtacgaagaaaaccacatgtctggccgacgcttctgatcctcaagtggctcggctcgccactctgcccgacgccaaacaggatttagtccggcccagatgacggaggaccgtgagggagacgctgagctccaggaggttaaggagctggacgaggtgcgtccgggcagtgctcccgctgtggagggagaggaagaggttggaccccctgacttcaggagtactatgaggctgggcagccagtcgatgctgacgga

SEQ ID NO: 362994 - DNA, 751 bp, Cannabis indica
gctttttctttggtttcttgagtttttaaggaaaaagatgatgatttgcatgcttaattttggagtgttgttgctgctgtgtttgggtgttaatttcagaactttaatcttgtttatttgagtagattggaggtgcttatgatgcatgttacttgctttagttcaagcttgaaattttttactcaaaattatgatttttaaagtgaaatgatgaaatctgttgttgtacttgttctagatgtttgctgttgttttcagctagaggttataatatgcttgattaagtagtttaaatcaggttatgatgcttgtaggtgagctttagccaagtttgagttttgaactcaaagcttggagcgcacatggtgatttttgattctgtgttttctgggctgtgttattgctttagaaatgtttattggggtatttagaataggtctggagagttttgcatgatttgggatcgaattgagtgagatatgactttttgagtgtctcatgcactaaaccggaattccagttcagtgaagcctgcagcatacggtctactggatggggcttctaggaattcccagaaccggaattccggtggtagaaccggtctaccggttggggaaaaattgggaaccctagttcttcccatttttatgtttgttagggtattgccatgctttttatcgatagggaaacttctagtttctaatttaagtccccgagaagtgatttagcgtatcacttattagtgttgtga

SEQ ID NO: 362995 - DNA, 623 bp, Cannabis indica
catgccgtgagtgtcgtactaattagagaagagaataacgtacaacacccaatctattacatcagtaaaagactcattgaggctgagggccgatacccgttaatagaaaaactcgcttactgcctcattgtagcaataaggaagttgaggccttattttcaagctcatcctattttgggtatataccgaccaaccactacgccaaatactgcaaaaaccagatgcttctggactgctactcaagtgtgcggtagagttgggctagtacgaaatcactttccaaccccgaacagcaatcaaaggccaagccttagcagactttgtggtagaatgcacaagcaaaaaagaaagcataccaaaaagcaaccccgagccggtacaaatacctcagccaagtcacaatgaggacaaacttacctggaaactacatgtagatgggtcagctacagactaactacgtggtgcaggaattgcccttgtaatgccttgggggcaacccctggacgctgcagtcaagttcggattcaaagcatctaacaacgaagccgagtacgaagctctaatcgctgggctaagactagcccaggagatgaaggccgaacatgttggattttatgccctaa

SEQ ID NO: 362996 - DNA, 696 bp, Cannabis indica
gcagatcattttacaaaatacaaattgtgaaggcataaaatacccctctgaatcacttggacacacaccaagctatctgtttccaacatgactctatcccacgaatgagttacaatccaactcaatgcttctttaatgcctattatctcagcaatttcgggttgaacacatccaatcttcctcttcttgaatgcttctaccatagcaccatgataattctgagctacacaacccatgccaaaagacaaactcgaaccagaaaaaattaaaaaaccatgtcaaaagacaagactaatggaaaaactaaattagtttcaacatataaacacgatcacagcattaaacttaattaaggaatgaactccttataattctaaccccaaaaaaaacattaaataaatttaaacttataatagtaaattactaaatgaaaacaaaaatctgaaactgagaacgtcgttgagccgaaccgaaccactctcagacaaacaactgttcttgaacccctcattattattaaaagtaattaaagatattcaatcatattttgattttcattattcttgtaattttggtcgatcggtaggccaatcaagtttacagacttctaagttttttatagcataaccataatttaatttgatataattttacggtacataacttttcatatattgataaattaaagaaaaaaaa

SEQ ID NO: 362997 - DNA, 563 bp, Cannabis indica
tattttcattttacaaaaataagaaatttgaaaaaagaaagcatcttctctctcaactctctctctctctttcaaatccacctagaaccagctagggttggtgtatttctcttcaattcaagctagattcagcaagtttttggtggtctcaagctctaggtaagctcttagtaacctcctccttagtttcttgaattgtaagaaaatagattttgcatgaagttgtgattttagctactattgttgctattagtgcttgatattgttttctgaggtttgtttatgtttagatatgttgatttgatcatgttttgatagctcgtttgttgtctgagcaagctttgagttttagaactcaagcttggctctttaatgggttttttcgattctgagattgggtagttattttattgcttggaatatgtctattggggtataatatgcaggtctggaagttttggcaaagtttagaattgatttagttaggttttggaatttttaggatttctggtataaaccggctaaccggttttacaggacttgtaaaccggttacccggattt

SEQ ID NO: 362998 - DNA, 521 bp, Cannabis indica
tgaggactaacttggtatgggtggacatacactcaatcactaaggctctaaattttatgtgatgaacacttgtctgacaagatgtaaagtaggtttagagtcattagttggattatgagactattattttctttttatactaattcacttagggttagaattgaattttatgtaataaaaaatgataaaaaatttccaaaaataaaggataagtggccggccatatgtgggccccactcattgtatttttgtctccaactatttatctattatttcacaaatgtcatattttctaatttcaatcctataaatgccaaaactatttatttaataattataattaattatcacagaaaattatcatttatattatttattaattagactccacaaagtctcttaattaacaaataaatcctaaaatcgtttttcttcacaatcaagccataacttagtgaaaatttataaataagatatagtctaatttagaattatatatgattattaattaaaatcaatta

SEQ ID NO: 362999 - DNA, 678 bp, Cannabis indica
aaaactgcattcaagaacgtcatttgcattttatttatagaaatattatcactaatttaattaatatatataccgcaaatactatttatactacagttatatgtgtcaaaaaaattatcattttggatacttctttccacggttttctttttttatgaacttttaatatatatatatatatatatataaatctattaaatattaataaaaaactaattacttactcatatactagtgactatcttctaggcattgaagcctatacgttttctctttctttttttttccttttgtaaatttactttttttttgttttattatggtctcaatcatatacagtgaaattattttttaataataatgataaatttgtcaaatattctctttcttgttttttactaagtattttagtttttttttattattttttaataaataaataaatagcatttaaattttaataaaatttaatgtatcaaacaacttagttactaaaaaatatatactttttatttttatatttagacattacaagattaaataaaataaatttattttataaaactatttaataagttgtaaaataattgtaaataaattgaattgtatataaacatcatatgagttacattaagaaaaaaaaaaaaaaaaagtaaaatctaaggtatcttaaacaat

SEQ ID NO: 363000 - DNA, 429 bp, Cannabis indica
tgactctttgtcactagtttctgctttgcattgttgaactgtgtactttaatgaattaggtgttttatttttagatattaaaactctattgtttaattttttcggagtatctctctgatgttagttgcaattttaatgttgtgacttatgaattggctaagtatgccttaggttaattgatgaatttttttggatgtagaaaatccctcaccttgatgtaatttttttttcgtgatgaataaagtgatcatgcaaaaaaaaaaatatatatatatataatgggataattgcggcaaaagtccccaaaaacttagggttgatgcagattaatccccaacctcaaaaattagcggtaatagtccccaagataacattttctgtaagtccgttggtccctaacataactgatccattaaagataaataaaat

SEQ ID NO: 363001 - DNA, 1403 bp, Cannabis indica
aatcacttcccggggacttaaactagaaactagaagtttccatatcgataaaaagcatggaaataccctacacaacataaaattgggaagaactagggttcccaataatccccaaccggcagaccggttctacaaccggaattccggttctgggaactcctggaagccccatccggtagaccggatgctgcaggcttcactgaaccggaattccggttcaatgaaggaagcaatcaaaatttcataactcactcaaatcaaacccaattcataccaaaccttccacacctgttctaaataccccaataaacattttcaaagcatcaaaaaaacccagaaagcacagaatcaaaaatcaccatgtgaactccaagctttgagttcaaaactcaaacttggctaaagctcacttacatgcatcagaaccttatttaaactacttaatcaagcatattataacctcataaaacaacagcaaacatctacaacaagtacaacaacaaatttcatcatttcactttaaaaatcatagttttagagccataattctaaattaccttaaaaccaacaaaatatgcatcaacatcagtttcaattcactcaatcaagcattcttaaacttctgaaaacaacataaaatcacagcagcaacaacaaaccaaaactaagcatgcaaatcatcatcttttccttaaaactcaagaaaacaacaagacaagttcaagaaccttaccaacaacttgaattacacttagaatggttgaaaaatgcttgaaatgctaaggaaaactcccagccctagcagcccacaccaagccgagagagagagagagagagctttgaattttcttaaattttctaacttttgaataaaatgaagaataagtgcctaaatcctttcttatttcagccaacacacattaaataaatcatattctcagcaaataattagtccactaaaggacaaaacataattggggcaaaataaccattatgcccctcacactaaaataacataaaagggtactaaaggatattttggaaattctaaattccgaccaatcccgacattcttaatgtctaataaattgccctgatatactaacatactaaattgtgattctactgagccaaacaccgagtttcatgttgtcgggcaccggaatgcaaaattatgaaatttcactatatgacataaaatgcatttcagaattcaaatataacaacataaataattatttaataatctataaataattttcataattaaatcataattaactgctaatttccaaattaaactaagtggtctttacactctataacttgatagatgccttcctagttgggtccaaacactcctcgtgatggatttttggtattcaggaacactctttggagct

SEQ ID NO: 363002 - DNA, 1044 bp, Cannabis indica
cttgaatcgatggtgtctaagttctggtgggactcttcccctaatcgtccttcaattcactggaaaaagtggtctatgatctgtcaatctaaatttgtgggaggtatgggttttaagtccctggttcattttaatcaggccatgttagcaaagcaggcttggagaattttccacaatcctaattctttacttagtcttacccttaaggctaggtatttcccacacacttcttttcttgatgctgttccaggtcatagcccttctttctcttggagaagtatcatgtggggtagagatcttcttaagagagggcttctttggaaggtaggcaatgggaaaactattaaaacaattgatgatcgttggttgcctaattttgctcttaagaactctgatttgatagccactcttccttctccttctttgtcatattttatttctccttcaggtgcttgggacttgaataaactgagatgttattttcctgatttcatcattgatcatattttggatatacctatagcgggtcatatgtgttctgatgttctaatctgggggaaggataattctgggattttcaatgttaaatctgcatatcatcttgctattagctctaaagatatcccctcttcttcatctcctttgggaaataaatgtttttggtctaaactctggttctctcctattcctgataaggttaagcattgtgtttggcgtattcttcttaattctatccctgttgcttccaatctttatcataggcacattatccttgcacccttgtgtcccctctgtcatgtagcaccagaaacggtaacacatgctttccttgaatgttctagagttaaaactgcctggaaaaattcttccttttctactttttatgcagagcacaagtctttgaacacatatgcctatatttcgaaggcatttgagacttttgataagcaaatgctatgtattttcttttgttttctctggatggtgtggtcacaacggaacaattatttgcaccatcatagatgcttgtctccaatgttcata

SEQ ID NO: 363003 - DNA, 582 bp, Cannabis indica
ttcgaggaggttctagcactacggatgtctgcatcagaaattcatgagtgattttaatcacttcgccaaaatattatatttcaaaaaccaaaataaagaaaaaaaaacaaaaaataaagcatatataaaaaacacttttaaaaaaacaaaacctaaatctcatcagatccctcactctctatcgtattctctctcttacctcatccctctttgaagccgttgcccactgctcagagagtggacgacgatggtgatttgctgcctagcaatttgacgacgacggagacgacgacatcttctcccctactcgctgacaatgacggccatctcctccctaagttgccgacgacatcttcaccaacgacagaagcgacacagctcctccctccccaacgacgacacaactcctccctcccaaacagcaacaaatcaggtcgtttaactttcttttatttttcatttttcatagttaaacataacccaaaaaccagtgacttagtgcatgtttgacatcataactaaaaaactgttttttgtttttaaaaacagaaaattattttttgaaaataattaggcttgttt

SEQ ID NO: 363004 - DNA, 435 bp, Cannabis indica
tagaaaaaatctaactagtgatggacccacatagggtcgaccactaagtgtattttttgctattattttatcatttttattctaaataaatcaatcataaccttaagtgaattagtataaaaagaaaataatggtctcataatccaactaatgactcttgacctagttttctttttgtcaaacaactagagagtttgagacttcttcttcttttcttctctaattcgaaatccttagtgttcttcttaaaataaaattcagcatttagtgattgagtgcatgcccaaccatagcaagttagtccttaatcatagtgtgtaagattgtgaagaatccaaacaattgaaggagtgtcgggctcagtttttggtgatacttgttgagttttatgcccgaaataaaactccatttcaatgtaatccattttattcaaca

SEQ ID NO: 363005 - DNA, 534 bp, Cannabis indica
acggtgtaagaagtacttgaataagcactgttacatgctttgaatactcgcgggtattcggatgaacaattcgaatactcgcatatttgcgagatttacttacttctgattgttggttagatcttttaggattttatatactctgaatttagtcgcgaggacattaaccgagtttccaaatggtggatgtgtcacagtattctaatggtcatatacgcgggtatatgtcccttgacatactgtgatacacccagccatttgcgacatgcagtaaggttctaatgagcgtactctttggctggtagatattctcagaacggagggagtacctcagtaacttcagggtcatgcttgagaacgcatgccccttgagtcactgagttgctcccagccgtttctagaggtatatcgcttggccaaggatgcgtgacttattcgcacttttagtattatctctactcgcaaaataatggggtggtcagcattcgcaaggatgctgaccattcaatcaagtgtgaccttgtagtttaatgc

SEQ ID NO: 363006 - DNA, 525 bp, Cannabis indica
tttagaaattaacttctattttgtattataagtttttttttctattttcaattttattcatttgtttttatttttttagtagctagtaaatagttagttacaactacttaacaagttactaattttcattcatattcatgtatttttattactaactagttactcattagtaactagttagtaataaattaactagttagtaactatagttactcataaattatataactagtaagtagttaaataaagaaattggtaattttgtagtatttctttatgttgtaggttgtgaggtcaatttgcaaggatcccaagttatttggtgttgatcggtttctaggtagctcgaggtatacatttactaactttattataaattaattataaattcttagtagagtttgaatatcttaaatattcatctatagtgaagtaggttttacaagcgtcggattgacgggtggaataatatgcatattagatgaatttgaatatcttaaatattcatccgtagtgaagtaggtt

SEQ ID NO: 363007 - DNA, 714 bp, Cannabis indica
agaacctagatgaacaactaggttctcacataccaaagactctcttctcacaaataataaaaatgcaaaaatgaatactagaagagttgattcgaatggctgctctctaggttctatttatagaccataaaaaccctagagatagccacaagatcgaatctacagctgtacaaaactttcctaagataaacacgatatgcagcatcagaattggggtctgacgcaacaaatcagaccaaaaaaggaaactagctataatcgggtccaatcttctattaagtcttgattcctgccataaacagtttatatattctgattgtatcaagacacaatcgaattaaataaggaaaagacaataatcaaagtttgctttaaaaaccaacttttcataagagaatttcttctcttataagaagtttccatacacgaaaagttcagctgaaaaatgaatctttcctaacatagaaaagagcaataaagaaccgaatatacaaggtaagacaatcggatatgagtgcaaaaatattttaccatagaaaaaaaaattagcatctaacttgccaaaaaaaactttatacttttcttaatactttttcctatttatttcatttattatttaatattgtatcatgtttaattaattagtgaccttttatttttataattcactatttaataatgtagaaagttcaattagtgacctttcattttcat

SEQ ID NO: 363008 - DNA, 471 bp, Cannabis indica
gggataaacttagaaatatttagaatgccgaatttaagtgaggttatagttttggaccattttacccctaggcttataattgctattaatttagaagtcaaagggcattttgggtatttagcattagagggattaggactgaatattttgaccaagtttgacccggacccgaccaactcgcccggacccgacctggtcaacccgtaaaattaaaaaaattcgttctgttcgggcggctcgggtctaaccaagtacactttttgacgggttggcatgttaatttttaaggttaccgggttttaggttgaacttgaattcgcccgtaaactcggtcactttttatttttttttattttttatttttattacatagataaataaattcaaaaattaaaaaagaaaaaaaaaaactttaaaatctaagagcatgtttggtattgttttctgttttattttcaaaaaaattgtttt

SEQ ID NO: 363009 - DNA, 650 bp, Cannabis indica
cgaaccatgggatcataaaaagtgtctccgcagtggcgcatccccaagcaaatagtcaagttgaagtagtcaacaagacactcaaggaaaccctaaagaagaaacttgaagatgctaaaggaaactagttggaagaacatcctgaagttctatggtcataccgcacaactaagaaagcaacgaccagatagactccatttgccatgacatatggatatgtcgctatgctacccgtagaactcgaaccgccatcacacagaagattaacatgtagccaagaggccaatcatgtactccttgcaaaatcacttgatgaagttgaagagaaacgaaccgcaacaaacttaaaactgatagcccatcagcaaaaagtagcttagtattttaacaaacaagtgaaagcatggaaattcttcgtgggagatatggtcttaagaagagtatttttgaacaccaaagacagtacgacagatgtgctcggacaaaactgggaaggaccatattaggtggtcgaaattctagaatcgggggcatacaaattgggtaagtatgatgaaaagatgcaactcgttgtagtaccaaggtattggaacatggaacatttaagaaaatactaccaataaaagtaccaggtcggatgaccatatcaa

SEQ ID NO: 363010 - DNA, 509 bp, Cannabis indica
ggaacttgggactcggacccaacctagaccaagacccaggacgcgaatccaaacccgaagcctgatctggacctaaactgaaatctggacccgaacccaaactcagaccatgactcgaattccgaccggaactcaaacacaaactcgaactcagaatcgcaaatcgaactagaaccgaattatgactagaaccaggaccaggacctaaacccaaagttgaacccagatcaaaacctagagagagacctaaactcgaatcgagactaggactcgaacccgaacctagaccgggaccctaacccacacaataaccgggacctggacatagaatctggatagggacctatgaaactgaactaggaacggaacctagtacctgaaccaaacctgaacttgaacctaagacccagctcgtgaaccgcaccagaaatggaaccagactgggaccggagatcgggatccggatcatgacccagggcttggacaaaacctgtagtcggtgtctggat

SEQ ID NO: 363011 - DNA, 517 bp, Cannabis indica
tttgccaattcaaaatagattttgtcgaacgataatatacaactctttatcccaacccttgatagtatttcaaggtggcgattcgaggaccatgaaactataattctaagctctaataaactagattatttattgaatctcatcaatcaaataatatttgtttattaattccatgactatttcactaaaattatagaattatattattgaattttactccagtgtctattgatataataaattccagtgattagctctccttatgtcggttcgtaattacttttggtcaaattatcattttacatttctaattacttctttatcctttagtattgttaattcaccaataaaagtataatttggatttaatctaaatttgtgcacaatttgatctgttaggaaagttaggattccataattatagatcatgttcccagccatttacattattagattcccaaaacataagttgtaagaatcatcttttctaagaaactttaacgagtgaataaaaaaa

SEQ ID NO: 363012 - DNA, 1069 bp, Cannabis indica
gtctggattcagttctgggtctaagtccttggttcttatcctggtctgggttcgagtttgggtccgggtccagttctagctttatgtctgattctaggtgtgggtgtttgagttcgggtctgattctgtccgggttggggtccagatctggaccccgatctgggtgtaggttcgggactaggtccaagttcggttcccgagtgcgggtcaaagtttgggtctaggtcaggatctcggtcaagatctaggtcaagcatttcgatcctagtctttctcttggtccgagtctaggttcgtatccggatccttatcttaagtctgtgtttgggatcgggtcgcagatttaggtccaggtccgcgtctcagttccggtcttggtacacgaccgtgtcctggcccgagttttgttctcagtttgggtctgaggctaggttcgtgtttggttctaggtctgggtccgggtccctgtcacggtcctagtcttgttcaagggtcctggttggcgattcttgttcaagtgctaattttggttcccagctctaggtctgggttcgggtttggttcttcgtttgggtttctggtcctagtctgagtcgcagatctagacaccgactactctgttccaggcctcgttacccgaatcacgagtcaagctctggatcactgtcacgggtcacgctcaagttctagtttaggtcctaggtcccatttctcagtttgggttcgggatcgagactagggtgtggttctaggtcccgacccttgttctgtttcccttgtctggttccatgttttggtctgagctcaggttaaagttcggctccaaattcgggttgggatccaggtccggctccaaattcgggtctaggacttatttggagtccgggtcctggtctggtttcggttcttgatctaggtccaattttagttttgattccatgtccaagtgctagttctagtcgcggtcaacttctagttttggttcccattttgggtcacagggtacgggtttgggtccaattttgcgtttgggactgggttcatgtccgggtgtgggttcgggtccttg

SEQ ID NO: 363013 - DNA, 1273 bp, Cannabis indica
acggctgtaattattaatttttactgcatttatgataccacgtcaaaaaactcctcggttttcgtgtaggcgtggccattgttggccgttagattgggtgaccttaggcattctggttgccacgtgtcgtaatccaaattaatgagggatatgggtatttaaactccctgattcgaatcaaatccttcattttccctcttgttcttaacttccgtcttccctccttcacagagacttcaaagagattttctcactttacccagatttctacctttccttccaaaatttcctcaacctcaggagtgatcgagagcaatcacaagagcaacgtatcaaaactaaaggttagtttcgagtttcattgcatttttgttttctgtttggagaaaaaacgcttttttctgggttttggtattttgagggtttttaggaatgcatgtttgtaggaaatgcatataggaccatgttttttggtatggaactgggtaatcttagagaaaatgacctgaaatttgtataaccgtggactttaggaagaatgtttgaatagtcgcaactttatcttttgaatacacgcgggtattcggatgaacacttcgaatgctcgcatgtccgttcatcctaggtttcacagagactttatcatttctagtcgttgcttaaaactttaggattttgtactctgtatattttgttgtgggaacattggttaagtctttcaaatggtgggcgtgtcacagtattctaatgctcatatatgcgattatatgttccttgaagtactgtgatacgcccagccatttgcggcatgcgccaatgttctgataagcgcattctttggctggcagatttgctcgaaacggtgggggtatcccagtaacttcagggtcatgctcgggaacgcatgccccttgagtcactgggatacacccagccgtttttgaggtacatcgccagttggagacgcgtgacatactcgcaggttgtgattagttaggttcctcgaaacggtgggtgtttcccagtcacttcagggtcatgctcgaaaacgcatgtcgcttaggttactgggatacacccagccgttttttgagatatccttctactcgcacacctgacttttcgcgtcttggtgggatggttagttttcgcgagaattcaaatcatcctcctaagacgatttcatagtttatatgcaggtgaggtcacttactttgtcttttcgcacattcaccacgctgaaaagatcttctatctttcagatgagcgacct

SEQ ID NO: 363014 - DNA, 931 bp, Cannabis indica
cttgcaagaatctaagggtgcttggtgtcgggaggccaatactgattattggaagcggctttggtccttaaaaattcctcctaagatcagtaattttttatagcgagctgcttagcgtgtgcttccaacgtgttttcaactccaaaagcattatgttcctgtcaatgctgactgccctttgtgcaactctagtactgaaactattcaacatgcgttggtggaatgctcggttgcaaaggctgcttggcatcgcagcatagtggacatcggggctgggactgcaacgttcaacaactggttattgggaattttcaccaggggacacgaagttgaaatggaggaagcatcgatggtgagttgggctatttggcgtgcgcggaaagacattgtttggcaaaagaagagttagcttgcttcaaatattgtaacatcagctagaatcttgcttgatcaatacaaatttgttcaagaaaggaaggggctttcgttgtctcctttgaatgatggggggcgaaactgtgagcgttggattgcacctgtgttaaacaagattaaagttaatgttgatggggctttatttgaacaagagggctggtttggaatgggctgtgtagctcgagatcatcatggaaccatggtagaagcattcaaaaaaggaaaggttgggtatgtacaacccgaaattgctgagatcgtaggaatcaaagaagtgttgagttggattgcgactcatccctgggacaatgtagtgttagaaacggatagcttgatgtgtgtacaagcagtccaaagtaaagttttgtatgtcctcacagtttggtcttattgttcaagatgttaggaatttacttttgaatttatcttttcttgagttatgttttgttaaacgatctgcaaacaagttggctccttgcttggtgtcacgggctca

SEQ ID NO: 363015 - DNA, 795 bp, Cannabis indica
tttttttcaaattttttttcacattgttgattatatagttacaacatcatctctataaattttttaaaaattttcgaatagtttatagtgtcgaaaataggtttaaatttttttaaacaagcgtggtagagtaaaatatcaagaattctgtttttggtactacaagctatttagaatttttcagaaatttactgaaataatattgtaactataacgaacaccgctatcaaaatatttattttaaaaaatatttaaacacgtattttcgacacaaaacttacctaaaaagttgtaataagagattagaattagcaatcattattttttattgcttaacttttttcgactggtttaaggattgaattggattaaattatgatttgtttgattttagaatgattatattttgaaatattaaataaataaagataaattaaattaggtgttgtttggtaatacttttgtttcttaattttttaattacaaaaggaaagtaaattttttttgtaaattatgtttttcaaaaacaaaaaatgcattctgtaaccaattttattttttaattttaaaaacagaaaataaaagtgtgttctgtaaagttcattttgatttttattttttgattttatttaagtaggtttggggtcgaattcgaattcggatcagaagtcgggttcaatgccagggccgtgagggatttggatctaggtctagttggagtctaaaatattgattaagaaaaaaaactgtttaaaagaatactgaaagtgacttttttttgtttataaattttga

SEQ ID NO: 363016 - DNA, 699 bp, Cannabis indica
ttttttttgtttataaattttgattctcaatttaaaaagtaaaaagtaaaaatagatttatagaacatgtttttgaaaaaaaaaaatcacttttctaattataaaaataaaaaactgattaaaaaagtgtgaacaaacgccaccttaaaatatacttcattaattttctaatatatagaattttatttttctcgctatagtgagctggaatgctaggagtttgaatagtgatgaagcactgcgacatgcaaaattgctggtaaaacaacacaaaccagatgtgttcttttctatgaaaacaaaactaccggaatgtaaattagattttatcaacttctttgttttgagtttggttatgaagtaccaaacaattggtcttagtaggggtttaatgcatttataaaaagagacaatggaaatttttaatttaaatatgttggaatatattttattactaggatctagatttattatagatttattaacaagtatgtttattaacattttaaatatcaattttgaaaacaatagaatttaaacacatataaagtttgagcaatcttatattgattgcagcagaatataatgactcctcatactcaaatctctaatccttgttcctttctatcgtagagtattataaagatctgagcccgagtatcattcaggagtttggattcttcacagtcttacacacta

SEQ ID NO: 363017 - DNA, 649 bp, Cannabis indica
taaaaaaaaattattttgttttaattttttttaattatgaaattaggttattaaaattattggaatagtagatagattttaatttgcatatttttttgggttaaattctactctaaaattgaatactaaattatgttgaaaaattagattatgttaatatggggtacaaatgacaccatgaaggaaaaaagagatgattcaaaacaaagtcattcaacaagagaaattcgactttttattcatattgtagcttaaaaataaaaacttaaacataagttgctcaatattagtagtgtttaccgagatttttagaaactaaatatttaagatcttaagaaataataaaatgtagtaataaacgagatggagatttttacgtggtttaggtataataatataataaataaactagcaaactagtagaacttattcttgatcctatatgttccaatacatatgttacaattgtaaatcgataccactgtagtccctgggaatagaatcacagtaccttatcttagtgggagaattttaaaagtccaactcgttattatttggatgacaccattgatagcctactatgatatgttcaagaaggaactttaaataaaacaaagaaagttaatctaacattcatatggatagtaat

SEQ ID NO: 363018 - DNA, 642 bp, Cannabis indica
tccgaaacctcgagatcgataggttcggcaagtgacttcttcttatgagaggtggttttcctttgcctcttgggaggaaccacttcggcagcagtagggactccaaagttggatgtccttttcttccccttacggtcccagtgcgcatctatgtgacctgccctatcttccatagtaccgtattgctcggctataccgaaaaatgactcgggacagttaatctggacgtggaatctaggataccaactatcaaacttatgagcaatgcaatccacgagaagggaattccaagtataaaaattaatgtattacgctcagccctaagtatagtaggagaccagccacattaattacctcgggatgctccttcactgatttcctgaggggcatttctttgaaggtactgcgcttgggctaagtgatctcaggcctagtcctcgggtggaataattatctgctgccaagaagaatacttgggaaccttgtaatcacaagtatattctttatcagcgagaaggtccaccgattgctagttaacttcgctcaaaagaaagttgcatgatcggagaacgtaaggaagagttatcaggtgcttgtgcctactaaccatctcgggggtaggagtaggtctcgtcagaagag

SEQ ID NO: 363019 - DNA, 598 bp, Cannabis indica
ttggattttgagattgacatccaataaccgattcaatctaattagaatccaacttttagcatccaatccaatctaattgtaattggatatccaactttttgtaattggattggattcaatcgattcagtttaattggattgcattggatgatgcccacccctagttaagtataaagtaaattgctacatgacacttgctgattggtccaagtcattaatttttatttttttttaaaaaatagtttaaatataccaataaaaaaatgacacgtcgataatgatttaatatttaacggttagaacctacagagttccagaaatataacttaggtattattaccgtcaaaaattaaacttaagtatttatttgcaactgagagttaaacttaagtatttataccataaattactcttttctttttctatccaattcgagaattttagagtgaatatcaagccaaatagcagattcaaacaaaagctataactataataaaaaatgaaatatactacaaaaatttataataaagttaaggtggcgtttgataacacttttttaatcagttttctattttttaaaagtgaaaaagtgaaaata

SEQ ID NO: 363020 - DNA, 806 bp, Cannabis indica
gttttgctgatgaatacttcatggtggatcgcacgggcatcactggcactcagtttcggcaaattccgacatatcaccgccctgccctcactcttgctcttagggatagagctcaaaaactttcccgaatttcaggggaagaccagaatattattcggttgacctctgaggataattttgtgaggtacgggctctatcccaaggaccttaatcctaagtccgtgtcgtggaagaggaggaaatttggtgctggctggaccgaacgagctcatcaagagaatgaactcattcaacttaagcacgaggctaagttgaagggaggtgcaaggggcaagcagtatgctcatgagcccttagatcctgaagatgaggctgaggaagggcatgtgactccactaaaaaggaagaagaaactccaggccctgccctggcctgttgaacatgtgattcgcataagggagcccatttcacccgttcggccatcccctcccgtgttcggtaaagggaaagctgtaatgtttgaaataagatcgatgtcaagtgatgatggacttttgagtctttttcgggcagtcatcttgcatattactttgtcttgttttttagcttcttgatttttatgcctcatttttgtttcttctaatcatgttgtttttgttctgtacagacatgtctcggtagatgttcgaggctctgaagaagagaatgggtagaagctctagtgcctcttctccggccaagaagtataagggcggtgagaggtcctcttctaaggaaaacagccctgctggggaggtcattgatct

SEQ ID NO: 363021 - DNA, 800 bp, Cannabis indica
aaatctgtttaaacagacaatcagtctgttcaaacaaatacagaaaacctggacagtttttcaataaaatttctataaataaataaggtaactttgacaacattaaatcccataactgtacacggtttcttggtaagaaatcaaatcaaagaaatataaataagattaataatttccttaaaaagcaaagaacaaaatcgaatattatataaaaggaaaactaatatttaattcaccaaatcaaataagtataaagtctgatttttaaaactcttttcacacaagaaaaggaaattatattttggaaaataatgaataaccaaataagaacaatttcgaatattttcaaaaataccacaatattatttttgtctattttatcaaatatgccaataaaagattttacatatatagtactaaaagtgataattattcttgatttaagtttggttttttaagattaatgtagctgcaacactctttgatagcgacaataagtatagtttcaaaattgttgcccgaaactatcttggtcaccttgttgcagcacaggtcggttgccatggcggaagatatgcagctgaagtcgttgaagccatggggattaaagaagctctcagttgggtaaaaaccaataattggcaacatgttcgaattgagacggacagacttgtttcagtacgcgaagcaaccaagcaatgaggtccactttcggccttttaatcaagggaaatttacatggtatactaacttttgtcatttttttacaaaaatactgtcaggcggtattttttactttt

SEQ ID NO: 363022 - DNA, 751 bp, Cannabis indica
taaacaacaacaggattctcctccctatcatctcatcttgcttaaactttaactgtgttttgagttttctgaattactttaattctcttaaatcataattgttttcgatttgccaaatagaattataggtatagtttagtagtatttaatccaattccatgtggttcgacctcacctgtgtgagtttactacttgattgcgtatacttgcgtagtgtttataatttttagcaacactcatgacctagagcttactgttgtggtttttgctgtaaagatatggcggcattatctttatggtgaaaaatgtgagatttatactgaccataggagtctcaagtactttttcacccagaaagatatgaacatgaggcagaggaggtggctggaactggttaaggactacgattgtgagattttgtatcatcccgagaaagccaatgttgtggctgatgcattgagtagaagaggtcccgagcagatctccactgttatgatagcccctcaactagcttctgaaatggttaatgcaggggttgagtttgtggttggaaagttgcacaacttgacactgcaatctgatctgttggagagaattagaaaagcagaattagaagatcccgagctaatcaaggttcgagatgaggtgatggctggtcggcctaaagacttttcaatctcaaataatggaatgttgttgtataaagctcgagtgtgtgttcctagtgtcgatgagtttaaaaacgagatac

SEQ ID NO: 363023 - DNA, 508 bp, Cannabis indica
tcgtgtgtcgagtcacagttggttcctagatttaagtccgggtttggggtcaggtcttgggtccctgtcctagttctgttgccccggtccgtatctcgattcttggtctaagtcccggtttggctcccattctaggttcaggcatgggtcctagtcgaggttcaggtttgagtctcggtctgggtttttatttgggtttgggttcggttctgtgtcttagtcctggtcctggtcctagtcctagtccatttctagttccaattgcgtttcggagttcgagtttgggttcgagttcgggtcggggttcgagttctagttcgagtttgtgtttgggtccagatctcggtctaggttcgaataaggctctgggtgtgggttggggtcctgggtttaggtccaggttctggtccgagtcctatgttttgatctcaagctgagtctgaggttagttctgggtctatgtcctgggttctgatcctggtctgggttcgagtttgggtcctggttc

SEQ ID NO: 363024 - DNA, 710 bp, Cannabis indica
agaaatagaaggaacaagaggcaagaaagagtttcagcaactgctgaaacactagaaatcatggctgctaatgctaatgccgcgaataatggaggcaacaacggtaataatggaggtgccattaaagatcaagctaatggccgcaacttgagaaattatattctcccaactcttacgggggttcagtcatgcatcagacgaccaacaatggatgctaataactttgaaataaaacctcccatacttcaaatggtgtagtcttcagtccagtttggtggactcccttctgaagaccctaatttgcatttatcaaacttcatggagttatgtcagactttcaaagtcaatggagttagtgatgatgccatccgtttgagactgtttccattctcgctgagagaacgagccaagagttggttgatctccttgccaccaaattctatagccacatggaatgatttggcaacaatatttctgtgtaagttctttcctccagcaaagtctgctaagctgcgaggagaaattaacaatttttgttagctagagaatgaatctctccatgagtcttgggagaggttcaaagatatcatcagaaagtgccctcatcatggtattgagaagtgaatgctggttcacaatttttaccaacgggctggtgggtaacactagaacacttatagatgctgtagctggtggagcatttatgagga

SEQ ID NO: 363025 - DNA, 824 bp, Cannabis indica
acagcctttaagtcatgtaaggccggccagcctagcattacgttaaaaattgaaggaacatctaatatcaggaactctgccatgatagtcatgctcgtcggggcttgtccaacagtgaggggtagacgaatttgtcctagaggtgcaactccttgaccggagaaaccatagacaggatggagacatggggttagatccttgagctggagtcccatcttttcataagcaattttgaacaagatattggaagaggctccattatcaatcatggttctggccaccattttattggctatctggacttccacgaccagtgggtcgttgtgcgaaaatttaattttaacaacgtcttcatcgttgaaggttatggtaggccctcatgcccatggaatttcgggcttcctttcttccacagccaggataacttcttcttgctcgtgctgcgctgttcgagcatacctctcccaagcttcacccgaatatcaagcaatgtgcgggcctgcaacgataacttgcagatgcccatctactggtggaggtagtaggtcctggttattgtcgttcctctgaccttgatcggtcttgaaatacttttgcaggtgtgggttgtttttctttatcaggaattcaatttcccatttcaagttgttgcattcattagtgtcgtggccgtagtctccgtggaatcgacaaaactttgtcatgtccctcttgctgacatcttttttcatgggcccgggctttttatatggggccagcgactaagttgccatgtaaacaatttctatgtcttcggtcaagatagtgatgttgggttttatgcc

SEQ ID NO: 363026 - DNA, 804 bp, Cannabis indica
ttaatcacataatcttgattactttccactgtgctgaagacacaacaaacaagaatataaatgtaacatgggtttggatgaatttataaatcaaataaataagtaaatgataacatgtaccagatgacacataaataagtgatgaaaatacttctgtttctttattgatatttaaaagataaaaattacattgaaatagagttttatttagggcataaaacccaacaaactcccacttgcactaatataaaacaatcaatacatttcaattaaacctaaattctgacggtgcttttcaaatgatgttcctcccaagaccttggtgaatggatcagataggttgtcctctgtgtccactgtttccactagtacatcccctcttgccacatattatctgatgatgtgatacttcctttaaatatgcttgcttctcttgtggcttcgaggctccctactgttagctatggctccagtgttatcacaaagcaagaacaatagttttccattccaagtacgacatcgagtccagtgaagaactttctaagccagacaagttcttttggagcctctgcatcagctatgtattctgcctccatggtagagtctgaaatcgcggtttgtttagcacttctctaaaccactgctccaaccccaggagtaaataccatcccagatgtagatttcgtgtcatcaagacatgcctgtaaatctgaatcggtatagcctacggaatctaaaccacaacccttgtagactaacacaaattgccttgtactcttcaagtacttcaagatatgcttaaca

SEQ ID NO: 363027 - DNA, 627 bp, Cannabis indica
ctggagtttcttccttatcaaccaacctaatgattgcatcacttaggttgaatatgataatcccagtagctgttttaagatactcttcttgctgtaacttagttgttccttcagcccatttaatgggttcttcaaggaccctcaacagcttctgttgtgccagtagagatcttattttcctcctccatattctgtagtcacctgatccatcaaacttatcaacatcaactttaaaactactcatattgtatttgttaaaaatcaaattagataaaggtttagaatgtcccaaatctccaatatctaattcctcctcttgatttccatccttgtgttcttgattttcaatgtctttcaaactatcttcttgattgtattatttcgaatctctttgcggaaataacttggctctgataccactgttggaaattattgttctaaccaacacacttaaagaaacaattaatacaatagttgcaaattggtatttttgaaaaataacaattcaaacctttgttgcagcccaatgtgagagcccaataccaagtttacaatcaaaactatttatcactcaagtgaaccacttaatggttcggcccaagaatcaaaggcagccaagagaaactt

SEQ ID NO: 363028 - DNA, 990 bp, Cannabis indica
caaatagaatcataagtccaatttagtggtattcagttcaattccctgtggttcgacctcactcgtgggagtttactacttgattacgtgcacttgcgtattgttcataattttcgtaacaaatttttggcgtcgttgccgggaaattgtttaaaaattgatattacaaaaattagattaaattctactttggttaatttttcttgcttattgctaatctgtttcattaagattgtcttatttcaggcattgggggtgcatgcaaggtcaaggacaaagtgtaatactaccggttattcttgaaattgagaagacttgtagaagaaacagaagaaacaagaggcaagaaagagtttcagcaactgctgaaacacaagaaatcatggctgagaatgctaatggcggtaacaatggaggtaacaacggtaataatggaggtgccattgaagatcaagctaatggccgcagtcttagagactacattcttccaactcttacgggggtccagtcttgcataagaccacccgccgtagatgcaaacaactttgagataaagccagccatactccaaatggtgcaatcctcagttcagttcggtggactgccctctgaagaccccaatctgcacttgttaaatttcatggagttatgtcaaactttcaaagtcaatggagttagtgatgatgccatccgcttgagacttttcccattctcgctgagagagcgagctaagagttggttgatctccttgccacccaactccattgctacatggactgatttggcgacaaagttcttgtccaagtttttcctccagcaaaagctgccaagctgcgaggtgaaattaataattttgtcaactagacaatgaatctctctatgagactttggggagagggttcaagggatctcatcagggaaaatctccaacatcgatggggatcgaaaagtggatcgttggttcataatttctacaatgggctgattggt

SEQ ID NO: 363029 - DNA, 524 bp, Cannabis indica
tatgtttaaaaatgagtgactaggcaatacaaccagtcaaatatttagataataatttcaatgcaacccaatcttttctactctagcaaaatattattatttattgttacttgcttgacttgcaaagcttttgttaattaaacattaattgcttcttcaacaatttgtgctgagatcaagccttcctaatttctgtgatatcgaaatcccattattttataataaaacaattaaacattgctacgaaatataacatcatcatatattatatatttccataaaaaaaacaaaacaaaaatcatatataaggaatcctacactacactgtcatctagaggtgttcattcgatcacatctaatatttttaggtctatccagatccgatccaattatatattagattttagattttaccatccgatccgattcaattaattttgtcatccaacattgaatgttggattgaatcggtttcatccattggatgtatttcatatatatttatttgtttaatttgggtttat

SEQ ID NO: 363030 - DNA, 744 bp, Cannabis indica
tccactgtattgacgatactgtaactgtgaataactatatgttctggatttaactgattttgtgcatatatcaaatatatgtattaaaccataaacatgtaacatacatgtaaacatgtttcacttctaaattgataactaataagattgtaatgagttttatttagggcataaaacccaacacgtatcgtctcattttggaaatccctcaggcataaatggacaagctccctcacactccgctccaaccgcaagcctggcaggctcttcccagggctcaaggagtaaacggtcctccaaagacaacacccggacggaggagaaacgccaaaagagggggtacactccacagtacacccagtacacggagctgacggactcccaagggcgtgtgtactttgctactaggcaaaatacgcactaccagagaccacctcccttgtacaaagacagctcctggagggatcccaacaaaagatgcgagtaccacaacgacattgggcacaacaccgatgaatgcaaaaatctcaaggatgagattgaaaacctaatccgattggggcacctctacgagtggatcaagaatcggctgcctcaccttaatccgggtcaggcgacaggggttgtaccgtagggagcacaagggggtggagcaggagtgttggctccagttgctcctgctgaatatgcccagcacatccccggtctgccacccagacccaatgggagagtggccatgatctc

SEQ ID NO: 363031 - DNA, 616 bp, Cannabis indica
aagtcggtggctgcaagaagttaggctgttaagttagttaggcaataactaacttaaccaactctcctatgagtgagatctccacatcagcataagtaagagtgtatctggaaacatgtatgaaggcttttagaatcacggaccaaggcactcgctgaaggaacagttggagttgactatttgagagtctcttccaggagaaacaactagccatccggaacccctttgtggaggagggctagttttcctgaagtctacacccggagtggacatgatagtcatccgggaactaccttttgatgggaacaatcattccacgagacttcttccagatggacaagtaagttgtttgagaacatactttcgggagataaataactttccaagaataacttttggagaccttttttcatttggagggactataccacagagtcaaaccacatgtgtccagtgtgttgattggtgtgaagtgtggtcttttaagtttgtttggtgtttattctcttgaattcccattctcttggaacaacagttatttaagaaaaatcttgatagcgtttggtaacacttttatttttaaaattttttaatcacaaaaataaaagtagaattt

SEQ ID NO: 363032 - DNA, 761 bp, Cannabis indica
cgattacccacatcaaccagtttcctttgcagatcaaaacttatgtgggtttgaagctcaagattcaatggctggaggtatttcgatccttattcgtagtgtatatatgtttgatttaaactcgcattttatacataaatatatatatatttcagtttatacatataaatgtctaatagaaataatatatattatgataagtatatgttatatgagatgatagtaacatacataatatattaattaacattaaatttagagattataatttatgcatgtgagttatatatattattggtatataataatatatgagtaactaatcatatttagtgtatatgataataataatagtgatgatgatagaaaatatgtattcattattttttgagaagaaagagttttggaattaattttccataagtgataattatctcatgagataagaaaagtgaactatgatagttacacttatgagatttgtcttgtcatagcaagaacaaatggatcaaaaatggttccaaacttgtaacaatatgtaataaattggaagagcaattttattagactcaaatcaaagtgaatcatggtatattcaaaaattgtgaaaagataacaaagttggaaaaacaattttgaatcttaaataatcaaagcggtgaacacaattgatgagaattttgtcaattttggtataattttgggctaatctcaatgaggagataaccttaaaattaatgggtaaaaataatcacattatt

SEQ ID NO: 363033 - DNA, 532 bp, Cannabis indica
actacagtcaaatattagaagttgctcgaagtgaagaaagatcaatgcaaggagacttgataataggatgatcgctaggtcctctcaactcggtgatatcataaaggtcaaatacatttaagggagataacttccactcataagctcgccaatcataagtcccatattgataagcaatcccataaaataaactattacacgaggtttggacatgaaactcagggtaccaactatcaaacctatgggctattaagtcgacgcatttccaaacagaaaaattgtattgattattcctaaatttgactaaactcgttggctcggtcctaaggactgtaggaaaccagccatagaaataagaagttttaccttgggagcctcttctgtagtctcgaaggcttcccgagtagctaagctgttcagaaaatgggtatgacgtaattgcgatcttttaattcctcaggcattaggagttgttactgttggaaattattttaccaagatctatttactatcatgtatgttggattaacaa

SEQ ID NO: 363034 - DNA, 522 bp, Cannabis indica
gaaagatggcaaactagaaaagcaaactaaggtttgcatgttttttggaaattctaaggagactaggggtggaatattttatagtcgcaaggataataaagtgttcgtttccacaaatgccagtttccttgaagatgactatattaagaatttcaagccgcaaagcaaagtagtattggaggaaatgctttcagatataactccttctaatgctccatccgcttctactcaagtagaggaaaatcccacttccttggttgaacctttggaagttgatacaaccgagaaatttgccactaattttcctattcagaagatcacggctcctcgtcgtagtgggagggtttccacaaaaccatcttgttacggtttagatggtgaaatcaatacggtcgttggtgacggtattgatggcgatccattgacctataaacaggcaatggcaagttcgaaacagaaacaatggtcagccggcatggattccatgaaaaagaacaaagtctgggaatatgtagacgcacc

SEQ ID NO: 363035 - DNA, 644 bp, Cannabis indica
ccatgcatatgtctcaactcacctatcaacatgctgttctcatgaggtttgccctatccaattggtttccttgctccaatccgctaaatgtttcaaatgaacttgtcttctttttgtataaagtttcaattggtgctaaaattgatttggctgacatgatttgggagcaaattgtttctcttagaaagggcaagaaacctaggctcaatcttatctttcctcatttaatctataagattttatctgatcaagaggaattgattcttgagaatgaatcaattgagatgcctgctgttggaaccactttcaaaattcctgagaagcctcctcaaggaaaaactgctcagagaaaggctcggtctgcttcccctggtattacaaatgatcctgctgctgcatctgcttccacttctgctcctacagaaatggctgaattcaacttgcatttgggaagaatggagacaagtcaagccttgcttcttaggaagatggacagcatcatgaaatacttccgatccaatgatgatgaataagtggtccaattttttctcttgctttttatttatgtatgcttaaactattatgactttgttcatatttttttgttatctttggcttcttgatagacaaaaagggggagtagt

SEQ ID NO: 363036 - DNA, 1032 bp, Cannabis indica
tatatatatatatagtaatatacatacatacattcaacagtggcactaagcaatcgattgcccacataagcccaaccaagatacatcctaacaacagcaagagtaaccacaataagcccacttgacacaacgcagagcaaccgcttcactggttcggaattaggtccaacggcgccggaccaggcgacggggagtccgataaggagagcaaaagaggctcctgtgacagccaatcgagagcaatactcgacgaaatctccggaggcccatgagaaggggaaagaggtggatagggtttggtactcgtttatgggttgctgatctaatggaacaggacaattggtttcgcttccatttctggaataggagaagggtgttttggggagttgtaatcttgagttgccatggaaattggggttgagatatctagggttagggtttgtggagggaaatgtgaatttgggttttggaggtaagtgtaggagaagtgttgaggagatggctatggccatggctttgcttgacttggctttgcttgactcacttcaatttcaattttttaagattttattattattattattattattattattattattattattatatcaatttttaagattttattcttcttattattaaagtaaatatttttgggtgattcgacaatgcactcccttaaaagtgatgtattgattcacccttgacttgtttcggtattcaaaagaactttttagtctaattcttttttctacgttatagctatataagataacttacaaaattttgagaaattcaaaataatttacaatatagaaaataatattcaaacagtctattttacacgcgtataaaataaaatagtcacaggtgcaacacactgtttgaacgtaatttttggcgtgttaaacttttctaaatttgttaaaattttgcaggatgtcttaaataactataacgtacatgaccatgaaaaaaaaaaaacttgactaaaaaattatttcaggtactaaaacagataagggtgca

SEQ ID NO: 363037 - DNA, 962 bp, Cannabis indica
cgtttccaaactcaaccaaactttccagacctgctaattagaccccactaaacatttttaaagcaacaaaacaaagcttcctgcataaaatcaaaatccaccattaaagctccaagctttgagttcaaaactcaaacttggttaaatctaacaaacatgcatcaaaccttgcttgaatgtactcaaacaagcattatataacctctgaaaacaacaacaatcaacaacaacacgcatagcaacagatttcatcatttcaccattaaaatcaaggttttgagtcaaaattccaaacttgaacaaaagcaactaacatgcatcacaaccagctctatcctactcaattaaacatgtttaaacatctaaagacaacatcaacaattaacagcagcaacaacaatcaaaaactaagcatgcaactcacaaactttctgaaaaattcaagaaactttaaaagaaagctataacaatcttactaaccatttgagatcactaaatcttgttaaaatcaacttgaattaccaaggaaaagccaagtctttgctgcttaaaggggggccgaaaatagaaagagttgagagaaaaaatagaattttgctttttctttgattttttctattttttaactttgaataaaataaagagtaaatgcatataataaatccttatttcagccaacaagatgccacgtaatcacataacacattacactaagtccactaaagaacaaaacataaatcaggcaaaataaccattttgcccctccacactaaaataacataaagggcactaaagggtattttggaaaattctaaatttccgaccactctcgatattcccaatgtctaataaaccatcccaatatactaacatactaagttgtgattttactaagccaaacaccgagttccatgttgccgggcaccggaaatgcaaaattatgaaattcactatatgacata

SEQ ID NO: 363038 - DNA, 662 bp, Cannabis indica
aaatctatgttcatggtttgtacaggataaggttaatatgagagatatttatttagggaaagaattaattttttcaaaaattgttcttgagaaaaaactattttgaatagatttacttaattatgaattatgaattaaataatattatgagagattatgagagatgatattattttatcaaaaaataagatagtgagtaaatttaatcaattagtacttatttgagaataaatagtaaattttatttaagttaaaattaagaaatcaatttcacgacaatataatatgaaaaatttacgtcaagtattgtatttcacacttttattttatttctacagttgaacgctatttattacatttttgttgcctatattttatattgtgtactgactttttactaaaaaaatttgttgttccattttaattgatacatattaccccatggattatttgtattcattttttattattttactgagtgtaaaagttatgatatgattgattatgtcacatttgtgcccattttttttaaaaaaaaatgatgattaaatttgaacaaaccctcttttacacgtttacttttatgagtttttgtgactaaaccctctcaactatcatttcacttgcacttaacccttcaagtttaaattttagtggtaaaa

SEQ ID NO: 363039 - DNA, 1033 bp, Cannabis indica
catgagcaatgtcaggtcttgtgctaaccatgacatacatgagacaccctaaagccattgcatatggaatttctgccatctcttctttctcttctactgtcatagggctttcttccttgattaatacaatctgtccttcaagaggtactgaactgctcttagaatcttgcctcttgaactttgttaggatcttctcaatgtaattctttttcttcaaatgcatgactccatcactcttggatctatgaacttctaaaccaagtatcttctttactggtcccaattctttcatgtcaaattctgccttaagtttatctttaattactttgattactgccttgtctttgcccattattaacatatcatctacatagagtagaagacactcaactgttgactcttctaggtgctggaaatacaaacagtgatcaaacttttaccttgtgaaaccaatctcttaaacatagttgtcaattcatttcttccattatcgtggtgattgcttaaggccgcatagggacttgtccaacttacaaaccatctcttttccatcttgttcctcctaaaataaggtggttgctccatgtatatctcttcttctagataaccatttagaaacatagttttaacatcaagctgctccacttctaaaccttgttgtgttgccattgacaaagtaagtctaatggtcttatacttcaccataggtgagaacacttcggtgtaatctatcccttccacctgagcgaaaccttagtaaactaatcttgccttaaatcttactggctcatcttctttcaccccttcttcaagttttagaatccatttgcatgagatcaccttcttgtcctcgggtcttggaaccaatacccatgtcttgttctttcaaagcgagcttaattcatcatccacagcccgagaccactccttcttgtactttccatttaaagcctcttctatacttaatggttctggtatgtcacatgaatgatccatttacaaagcataggcaatcaaatcaacttctgcaaac

SEQ ID NO: 363040 - DNA, 516 bp, Cannabis indica
aaaaactcacacacaaaaattagttaaataaaataactcaaacaaaaatatccattcaacatgctccaacctactaaataattacacacatatcatatctagcttaaaaatattcattcactatgttatataaccggctctattttagttataaccagtttgagttaatccgtgtcatttatttttatttattgtaacactgttatagaatcaattctatttgaattataactggtttgagttattttgtgttatttatttttattccttatgttacagaactggttatatttcaattataacttatttgagttattttgtattatttgttctaattcattatgttatataaacgattcttttttttttttatatatatatagttatatctgagatatctacttttgattagggatgtgcagaaagtcatccaatccaattctaactgaccgatccaatcccaactgatccaatagaattggatatccaatcataattggatcggatcggatgcaa

SEQ ID NO: 363041 - DNA, 477 bp, Cannabis indica
attattttttaaattaaaaaattacaaaattaaaaaacacataaacctaaaatctgattaatattaaaaatcctacaaaactaaaatctcgttcttctcccccttctcttctgcgattcaagggtctcaatctgaagaatatgatttgccatgtttctaacaccaggactcgaagagttgggatgtagagagagaaggcgaagaagatgagagagaaaggcgatagtgaataagaagggagagcaaaatgaaacaaaggattttcattgaggagtaggaggggtttggtctttgactgttgattgggttttgatatcgaagattgtggagaaccacttaagacactacaacttggcttcgtttgggtttatctcaacgactggaatcctctcatctaacccaatgtcttctgggaacaagggatgcgaaccagggtcatccctcttcaccctcatcggcgtcgagtacctgcgaaca

SEQ ID NO: 363042 - DNA, 530 bp, Cannabis indica
atatatattcattatagaattttgatatttgcaatccttcttcaaagtgttttcttttcctgaaagaaattgagatttttttctaaaagaaacttgggcattactgatttgcagtcctccttcaaaattaaatgccaccataatttagcttaacctcttccaaagactccttcaaaaagcttatctggggaagaaaagttttcttttattattattattattattttggcaaccatgaaaagccaagtttggtcatatagattttgattgtaattagtataattttattttttaggagagatcaaataaaataaaatcaatatataattctatatgttcaatctctctctctctatattactctgtgaaaataaaagatcaggtctgaatgatatctcagatcctcttttggattggactgaaaactcgattatgaggtgagtttctttcttgtttttgaattaaatctttcattctttttagatattcatatgagttatgaattttataaatatcttttcgaactcaaa

SEQ ID NO: 363043 - DNA, 1165 bp, Cannabis indica
tttcatagattagtaaaattaccaaaatgcccctaggttattttacagattatttagctttgaggaatttaattattctttaaataaacattcttttattccttttattgttattttaggggctatgattttcagaaaagaaaagaaagaaaaaaagatgagaacttttactatataagtgacttggaagctaagtaacctcattattccattcctttccttctctctctcgtgcaaatttgaaccagccacttggggacttcttttcttcaggaaacctcccatttcagagctggacctaatccccaagccaacctagaatcttgaggtaagttcctccttatgtttttagtgaattcctaggtttctaaagctaggttttattagtttttgtaagttttcagggttgtaggcttagatgaggtctgtgtatgatatcttagttgaattaggtttgtttgtgtatgttttaattgatttcatggctgttgggattgttttgtgagtgaggaagctaagggaattgagtttccttcacttgagcatatgattttgagttagagattgaactactgtaacttgaagcttgggatatgttatatttatgttattatactgttctggaaagtttgattagctttggtgaagttttgggtcgaatttgaaggagagaacccaaggaaatctagtctgcgagaatcggtcgaccggttggttctggtgcaccagaatcggtcgaccagttgccttcaggggaaatttttgggttttcttcaagttcagtttttggcgcgggaagttgtgtatcatttgttttaggttgtatatgggatgtttgacctatttagaagttgttgggagttgggttatgcttggttttgagatagggtttttatttcagaattttggtttaaggtattcattgagtttcaattgtcatgacataggaccgggattgcctagctttttttccactcaggtcggctcgtacgcttgtgttctgaactaaggtaagaaaagtagtaagcaccgtatgttgctaaatattaatggttgaattgttatggccttgattattatcaagactttgattaaatgttttttgagcctaggttatgacctagggtgggaaacggttaataccgttatgagtaattactcttga

SEQ ID NO: 363044 - DNA, 712 bp, Cannabis indica
ccttccaatttcttcatcaagctatcttttaaacgcaagtaatcctccttctttcttctttaaaaacaaacgggttgcctagatgtctctcatctccacgcacttgatcaatattcaaattacccaagatctgctcctttctttgagacgacaaatttcttgaaaagagcacactcgactttggcttgctacatgattgacccgaccatttttcatacacagaaatacactccatcaacttcttagcctccttttcattggctcgggcaaagagtattgtgtcgtcagcaaacatgaggtgagacaccggaggggctgaatgagctattttaataccatggatagatcctctctcttccgccttgcaaataagtttggaaaggacctcctgacaaaggagaaacaggaatggagagatcgggtctccttggcgaagtcctctctgaggagagatctttttaagaggactaccatttaaaagaaccgagtatgagacacttgtaacacacgccatcagaagcttcctacaccggtcgttgaagccattcgcacagagtactttttcaagaaagctccattccattttgtcgtaagccttgtgcatgtctagcttcaaagccataagacctcccaaaccccttttgtgtcgaatctgtggattatttcttgtgtaaggatcgaagattctgcaatccaccttccacggaataaa

SEQ ID NO: 363045 - DNA, 597 bp, Cannabis indica
ttcttagcttgagatcactaccaggaagctgaaataaacaagaatttcaaagcaaaatcccagccctagcagccccaatcaaaaccgaaaagagagagagagagctcttgagagaaaatgcaaaagttgcttcttttctttgattttttcttatttttgcaaagtgaataataaaatggtttttacatacttttattcagcataaaataactattaaaatcagattataaactttaaataaaatttataaatgacaaggcacatatggcaaaatgacctttttgccctcacacaataaaatgacatgaaagggtactaaggggtattttgggaaaactctaaattcccgactaatcctgacattcccaatgtctaaataaaccgtcccactatactgaaatactaaattgtgattttactgagccatacaccgcgttccatgttgtcgggcaccgaaaatgcaaaattatgaaattcactatatgacataaaatgcatttcagaattcaataataacagcataaataattatttaaatatctataaataattttccataattaaacataattaactgctaatttcaaaattaaacta

SEQ ID NO: 363046 - DNA, 727 bp, Cannabis indica
gcacgtggattcctgctgcctccatgaactttttgcatggcaagcatcacctcttgcatctttttgttttgttctttttgggctgtgatttcagcttcgtgatcagcagccttttgtctcaagagcaataagtccggggaactgccttcgtcataggcgttgtactcgtcgaagtttccttcgtatttgtcgtcgtgggctccttctccttcctcagagcccacgttcactcttgaggccacctcctcatcgtcgggatcttgagcgtcttgaggaggatggggttgacgtgtgttgcgagtctccaccattgttgttttagtttatgaggttgttgtctatttgttgatgcttccttcagctctcaatgaaagcaccaaaatattgactgaggttttcggcaaccaatataataatatattagaaagctgtagaaagatttaagcacgagatttttacgtggttggggtgttaatgagccttagtccacgagtctttagcatttatgagagtatttattacagagaatgttcttggtagcttttttctctttggttcttatggaacccagaaatctcgacccttgccttaatgtgtttggggggtatttatagtgtttttgtggggtgatccctagattcgagctacatgtcattctgtatttttcaatagaggcacacattcacaacgagtgtaacataggaaatgcatggtctataccctaggt

SEQ ID NO: 363047 - DNA, 468 bp, Cannabis indica
taaaataatttccaacaattgttgcgagtggttcggcttcagtccacttagtaaagtaatcaatcgctaccactacatactgcactccacctttacctttggctaattatccgatcaggtcgatcccccaaatggcaaagggccacggactttgcatccgtgttaacaagttgtgtggagctcttggtatctttgaaaatctctatcatttgtcacacttcttaacataggcttttgaatcttcaatcattgttggccagaagtaaccttgccttagaattttcttggataagctctgtctggcagcatgatttccacagaatcagtcatgaacttcagataggagtcgtgcagcttcttcttgagtgacacatctgagcaatggcatcgagaatcctcttctgtacataactccctctagtatgatgtaccgtgcagctttccttctcatttttcgtgcttcatttc

SEQ ID NO: 363048 - DNA, 528 bp, Cannabis indica
atatgtttattatataatgatcagtaacgttgggtttgaatgtattaatctatatactgaccaagtgggaaaatgttagaatattttctatttatggaataaaattaagtaatttattttgagatatatgaatactttatattcattaaatctggataaaattaattacatgatattctatatatggtcagatttcaatattcattacttgatttggtttcttaaaaattgatgaaaatactcccttttgtagtagtgtattttcacaattaatgtagcgcaaatactatataaatatatatagggtttcagttcctgagctcttcactcattctgttcaaaacagtaaaattccatctagagagcgaggaagccttaattcccatactgaagttatcatagggattaaagctcaaacatcaataactggagatattttagtcatttcatcgcatatattattttgatatatctatagttattccacattacatatcgtttatacatactttattttcatattatatt

SEQ ID NO: 363049 - DNA, 616 bp, Cannabis indica
tgcctgcaaaaagaaataaatgttaatgatggctatcataaatgcagctcacgcgcccaaagcacgtgccatgtaatccatgagtcaaccggaaacatcaaacaagcctcgtttactctacaccaaacaaggcttgggggtatatgttacccttaattttgcccaaaatacattgaccggaataaagatgacacgtggagcttagaggttcagctcctaaggaaatcatccaagtcttggatgtaagaagagtgtctctggaaagatgactcccggagaagatatgagaatgacctctatgctccaagaggccagggccatattaaggcagctccgggaggtactgaaccctattgagcaatcacctcacatttaatgctgcatgggggagaacgtattggaaccatcataaacaatatgactgacggcgtaacccctcagttgcagctattacgctgtgattaatgaggctagtgacggctacttaatgaaggatcacatcaatcaagaagggataaaggattatatccacctaacccctaagatacctacggtataggtcatgtatttcctattttgtatctgctaggaatatgtgcccctattgaacctgcac

SEQ ID NO: 363050 - DNA, 947 bp, Cannabis indica
gggaatactatgtattccccaaaattaattgggaatactaagtattccccacaattataaactgttgccattctttgttagcttttaaaaaaattctatttagtattgcccacggttctccactgttggcattggtttttcccaatggtttctttgtttcgtttctaaacttttggaaaaaacctccacttactttttccaacgatttttatatttgaccctcttattaaccgttggaaaaagtcaattttgtagtagtgaaaattaaagatttttacctattttcaagcttcaaatttctctaatatcttaaattaatttaaaaaatactaattaatttaattttgataattagatttgaaatatgaaaataaaaatctaaatacaaaattatacaaaaaattcgaaattaattccatgaaaaatcatgaaaaaatgaagaaaattgaaagaattggatttgatgcggatggtatgcagtgtataccattcgcgtgcgcaggaatgggtgcatggtcgagaaacctcagccaaagaggatgccagcagcctcatctgcgcgcggaggtccaccattcagaaaaaaatggggcttcagaccgagaaaactcggacaaccccaagtccaagacgcgcgtgaccaagtgatcactcggatccgcgcgcgtatggggtgacaccacccctatcttttttcaaaacttcaaaaaatcataactcattcaaataaaattaaaattaagttctgtaaaaaactgaattgcttaatgttttccaaaatagccaacaaaaataattaagaataaaattcaaattatttttcttaaaaaatttacaaacatcaaacaatcatcaaaaatacacatagatcaacatgaatcacagccaaatcacacatatatcgttttaagttccaaatttcttgaaagtaaatcaattaccatggc

SEQ ID NO: 363051 - DNA, 515 bp, Cannabis indica
aggtgcggtcacaagggaaactatatgcgagagacaggtgaaaggttgtcacgaggaggtgacctttggttgtcccttcgagggtttcgaaaaatggcacccataattattacttttattgcatttatgataccacgtcagaaaactcctcggttttcgtgtaggcgtggccattgttggctgttggattggacgactttaggcattccggttgccacgtgttgtgatcccaattaatgagggatatgggtatttaaaccctttgattcgaatcaaaatcccccattttctctaatttccttaacttccttattccctctctctcagagacttcaacggagattttcatagtttgcccagattttcgcctttctttgtggaattttctcaatctcaagtgctgtcgagagcaatcgcaggaacaacttatcagaactaaaggttagttttcgaagttcactgcatttttgttttctgtttggagaaaaaacgctattttctgggttttaacatct

SEQ ID NO: 363052 - DNA, 730 bp, Cannabis indica
aaacaaccattagtcaagtacttaaaaaaaaggaagactgctgtaaataataaggaagagaacaatcacttacgaagtttgcgaaatgtggttgtgccaatgggggagagaccagacgtccagaagacgtcgtccttgaaggacaccttatttggcaagtctacgataatttttggctcactagcaagagtgagaagatagaaaaagccccttgcaacgttcttcctcgatggaaaggctttaattgagtaaagatactcaatctctaccggcgtgggacagccccaattcataattttttataagactttcaaactagcaagaatcctgttagaaatgggattcagctggaatggggcaaccccaatgtgatttatataatccttgaagtagtcccgaagagggaggatggcccctccacaaatatgctcaaggctctaagcacccgtactagttgaaccactagtactggtctcaccgctggttcctgagttactactggcaaagcgtgcagggggtagcaactgaattcaccctctcgtactgacctaacttggcatgattgcccaagtataattccaaaagtcttcagcatgtcgcctgtgtagcctgagatagattgcacctttgattctattaactcaacctcgaaggtgacgttgggatcttgaggagttttggatgtacgtggtttgggatgcataatctcgacatttaagtcacctagttc

SEQ ID NO: 363053 - DNA, 589 bp, Cannabis indica
atattaagtcaaagctcataaaagtaactgataaatgtatccttttaaattttcatcttcaacaaaataaaataaaacattgtcaataatattattttattttttaataaagtgttattttgttttattatttgtattgggctacttttaaaatgggcttgattagaatgagggtaggtttatgaattataattaagatattgagtgagggcttttgtggattgggctttaataaattgagtgaagtgaattaatatatgtatatatctacatgtgaaaaatttgatgtatatatttgagtgagggcttaagcctacatataggcataagtccctccgtccttgatgtcagcatttgaacggaataatgagatgaaacttaacagaatgactaaatttctgtaaatgtaaaagttcaagaaaattttttaacaaaccgtatattctagggacagaatcaaaagtattgtcaaaagctatgggacgaaattactaattattctatatatatataaataaattttctaaactatgagatttttttttactaatagtcaaataactaaatctttaaaaaaataaataaaaaa

SEQ ID NO: 363054 - DNA, 570 bp, Cannabis indica
accacaccttattcactacatctaggaaccaccaaaacgtatcaagatataaaaccctacttatgtggatgaaagagatgtggtagactacgtgtccaagtacttaacctgtcagtaaatcaaagctgaacatcaaaggccagcagtgttattgcaacctttggcccttcctgagtggaagtgggaggacattgcaatggatttcgtaactggtttgcctagaaccacacgaatgtatgattcattatgggtcatagtggacagatttacaaaatcagctcactttctgctagtgaaagttacttatgcagtggattagtacgctgaactatatatagctcctaaatccattgttttagacagagatccaaagcatacatcaaagtattgggtgagtctttagagagctatgggtacaaagctgaactttagcatagctttccaccctcagaccgatgggcaattagaaggaacaattcagatactagaagatttactgcgagcctgtgtcattgactttgagggttcatggagtaagtgttgggttttatgccctaaataaaactcttt

SEQ ID NO: 363055 - DNA, 504 bp, Cannabis indica
gtagaattcgtatcgaggtgcctaacctgtcagcagatcaaggctgaacatcagagaccggcagggttgttacagcctttaaccctacctgaatggaagttggaggacatcacgatggactttgtggttgggttacctagaaccacagggttgtttgattctatctgggttgtggtatatcgattcacgaagtctgctcatttcttaccagttaaaacaacctatttaatggatcagttagcagagttgtatgttaaagaaatagtaaggcttcatggggtaccaaaatccatagtttcggatagggatccgaagtttacctccaagttttggcaaagtttggaacaagccacgggtacgaaactaaaatttagtacaactttccatcctcaaacagatggacagtctgaaaggaagattcagatattggaagatatgttacgagcctgtgttatggacttcaaagggtcttggagtaagtatttgtaggaaattattttacca

SEQ ID NO: 363056 - DNA, 908 bp, Cannabis indica
ggcagttaagaagtacaagcagaggtaccctactcacgacttagaactcgcaacagtagattttgcgctaaagatttggcggcattacatatatggcaagaagtgtgagatatacactgatcataaaagtctgaaatacttctttacctagagagacctgaccgtgacacagagacgctagctggagttggtgaaagattatgattgtgagatcctttatcaccctggtaaggccaacattgttcccgattccttgagtagaaaaagaccaaagttagataaatacaatgaagcagatctcgcaacagttagcaaataaaatgactcgagctaaaataaaatgactcgagctaaaattgagctggttgtggggcagttgactaatattaccctgaaatctactcttttggagcaaatcaaagaagcacagtgcaagatccagagttagtgaaatcccgagataggatttcggctgggaagactaatgactttaaagtggatgaaacgggaatgttaccatttatgaatattgtttgtgtgcctatggatgatggtattaaaggagagattatgaatgattctcatacaactccttactcagtacatccagggtcaatgaagaagtatcaagacctcaaggccatattttggtggccaggcatgaagaatgatattgctgagtatgttgctaagtgtttaacttgtcagcaagtaaaagctgaacatcagaggccagcagggttgctgcagccactgaatatatcagagtggaaatgggaggatattgccatggacttcgtggttggattgcctaggatcagaggacaatatgtgtaacgtccccgcttcaagcctccattgggtccttacacccacggaataaatggctcttatacacgagtacgtca

SEQ ID NO: 363057 - DNA, 735 bp, Cannabis indica
accaggttcttgtttgatgttggccaaagtcatataaggcggcctataggtcaccgtagcctggaaatgtgtgaggaacaagtcgacgaaggtttcccttctcgatattgatgcctcaggcaattgggtaaaccaatcgtgggcgtcctgctcgagtgttgccgcaagaatgcggcattttgcaagttgtggtacctgatccacctccattatagtattgaatttttcaagataatctatagggttagaagtacctttatactttagggattcggatagacgaaaccccttcggaagttgggcttgtcgcacttctgtagtgaagggcgaggtaccatgcaacttgtatatggcctttcattgctgctcgagcattttcaaagcttgtagaagcatgctttggtcaattcctccagtcgcaggagtcggggctactgcgactgcgggagtcgcaactactgcggccagatttgctgggacattgatcccagtggtcgcgatcggcgcggtaggcgggttattgtaagtgttgacaccctgatcgtccgcatggggatcacggagtgtctccatatgatgaggggcgcgagaacacgctctaaaaactgcgttgaggtgatcacgcagatcacctcgatgtacctggtaatgtcctccctgttgcgtctgtacagagccggaccttgtatatctacttggtgtacaaccatgcgatgacgaagaggctgattctgc

SEQ ID NO: 363058 - DNA, 761 bp, Cannabis indica
ggcaacaactgcacagagcaatcgaattcggctttaaagcctcaagtaaggaggctgagtacgaagccctgatagttggcctcaggctggcgcacaaagtacgagctgatcacatagacatattcagcgattctcaactattgtgaatcaagtcttgggtgaatacacaactcaaggtgagaaaatggtggcctacttgagcaaaatcaaagacttgttaagtcagctcaaaggctactcaatcaagtagatcccaagtgaacaaaatgccacaggagatgcacttgcccgcctagtgaacagtaccatagctgacaaagcaaacctggtgcccatccagttcctagaagaacccagcattgtcatcctagaagagatcgacatgctagatagcacaccaacatggatgacacccattgagcttacctccaaactagtgccttgccaaaagacaaaaatgaggcaagcaaactaagaagaaaagctgctaggtacctgatcctagacgaaataatgtacgaatgcaatttctctatgcctctcatatggtgtgtcaccaaagccgaagctgaacgattaatgatagaagagcatgaaggcttttgcaacaatcatgccatggggcaaagcttgtccagaaagatactctgataggggcacttttggccaataatgatcgaatactcagtaaactatgtcaaaaaatgtgataagtaagttgggaatattttaccaggatctagatttctaacaagtatgtt

SEQ ID NO: 363059 - DNA, 776 bp, Cannabis indica
taatgagacagattgaacaagggactgatcctatgctatatatgtacaagtacaagcatggttgcaatgccatcatcaagccataataatccaactcatccaatgcttcattacatcaataatgagctgtgaagttgataaagatggttattacaaatcacaaatcagtaacaacgaattagttgcatttgaatgaaactaacaacacttgttatgttcatgtttagttagtagtcttcatagttttgattagttttgtataccaattcaaagtaaagttgggagttaatgtgatctctgatttggtaaagttgagaaatttcaatcaatggtggatgtgatctacaaaaaaaacattatatcgtgtcactataataaacataatattcttaaagagaccaaataaattcgatgcctcacccattatagcaagagaatttattcattaataccattttttatcactctaagcctctccaatctctaaagtttttatcattttttcaagtatatataaatatttgtaaaataattattaaatataaatttatgttttatttatagggtaaattattttagatcctatgttttacaaaagttactaattagaccctctgttttgttaaatgataaaatagatcatgtattttattaggggtgttcatccgatccaatccgcacttttttggtcaaacaatatccaatccgcactaagtgcggattttatattttggatccaatccaatctgcaatagtgcggattggatcggttattt

SEQ ID NO: 363060 - DNA, 1225 bp, Cannabis indica
tatatattcatccatagagaagtaggttttgagattttgtgtgttgcggtgataattgaaggttgataacttgcctattttagagaagtaggatctgtgaaatttatgtgctgcggtgatataaggatgaaaacttgtgtattatctgattgtttgtgactgaaattgacagatggttaggttaataaaataggggaaatgctgtccgatttttttaaaaatatatttatcatattttctaagtagttgtgtgcattgatagacatgagaatatgatgttattgtaggttgattaaagaataatgtctggtcaaatcggttctaattcggaggatgatgttgattttgtgccatcaactaatgttgaagaaatacaatctgttagtaatacattagatgaacatcagaatacagggagaaaaagaacttctcgtgcatgggatcattttactcgacaagaaattgatggtaaaattaaagcggtttgtaatcactgcgggcgtaagttggtgggaggaagtactgcggggactacgcatttaaatactcacgtgaagaggtgtccagttagaaaggcccaacttgctgctaatccaactacaagtccttcaattcctttcaattttgatcctgatttagcaaggatcaaattggctcaaatgatcgttaagcatgagtatccattgtccatggttgagcatagcgggttcatcgaatattcaagtactctatgtcctacatttcaaatggtgtcaaggaatacaattaggtctgacatcatgaaaatgtataaagctgagaaagaaaaatgtaggcaaagtttggaaaaaagtaggagtagaatagccataaccagtgacatgtggactgctaatcatcagaagaggggatatatggctgtaacagctcattttattgatgattcttggaacttgcacaatcagattctgagttttaagtatgttccatgccctcacgatgctccagcactacttgaggcactaagatcttgtcttaatgaatggaaaatagaagacaagatcagtacagtgactctcgataattgtagtgcaaatgatgctatgattgaccttttgaaaggacaatttgagactgacagttttagtttgaagggaaagttgctacatgtgcgttgttgtcaaggatggcttatctgtcattggtgatagtgttgacaaaattcgagacagtgttgcttattggt

SEQ ID NO: 363061 - DNA, 550 bp, Cannabis indica
acctagacccgtaccccaaaccagacccagatcaggacacgagacttgaactcgggagtcagacctagacccaaacctagcctcgaaatttggaactaaacttgaaaccccaatcggactcgaggtctagggtctgggtttaggtttgggccagggtccaactttgagtttcgggtcggggttcgggtttgggtccgagtcggggtttgagtctgattttcgggtttgggtaggggttagggtccgaactaggtccggggtctcggtctcgatctcgagtttggctcgaggttcgggttgggtttgggtccgggtccaattctaaggtccgatctggctctaggtcttgagttcgggtcagtcttttggtttgagtctagggttcaagtctgaggtttggggccagggttgacccagaccctttgtaaatatcataatacaagctaatacaaatcatttgttatgtattaaataatacgattcacattgtattaaaatataaagtcatgatgattaatacaatacaatactttatcaaaatatagtgtta

SEQ ID NO: 363062 - DNA, 776 bp, Cannabis indica
tgggaagcattcatcgttggatcctttctcgtttctccaaggggaatgacgtttggcgattgctgacctatagttcggtaggctcttcgtatcagcacgatggcttaccgactacgatcttcaatctctgcatgatgagcccttaatgcctcaatttctttatctctccctttggcgagcatacgggtttgttcgtcgaacgcgagattcaccgcagcatgcagttcgtcctgatcatgatgtagagtgttgttatgaccctgcacgagtctaagcgcgtcactgagattttgtaatttggtggcatctccgatcgttgtctgggagttggttctaggcgaaacagtcgtattatggatgcctggttgagtgcggaactgttattcccagtctcttgcacaccaggcgcaattccattaataggaactgtttcaccattccccacgcttgccggctgttcaggattaacagcaggcagaacccttgaactgcctgggttatgcgatgtaggatccaacgtctgtgaatttgctggatcagtcaggcctccacgagtttggaccatcgtataggcagtaggatattgaataaagagcgattcgtgatccttctctcaatgaaagcaccaaaatgttgacttcgcttttagccaacgacatgagtctatattatataagtgataaacgatagatagtaacagatatatgataaaagcaaataataagacacagggattttatagaggttcagacccgtagtagttcggtaatagccta

SEQ ID NO: 363063 - DNA, 693 bp, Cannabis indica
ttgtcgccgcaagaaaggttaatctggaggtcagcgccttgactaacatcaagcagttacctacgaagaccttaaagaactatataaagaggttccgggaggaagcctcgaagaccaagaaagttgatgacggccaacagcttgccctttttcaggcaggcttccgtaccgggactccattctggaatgagctacaacaggaaggagctgcaaaccttcaggatttccagaagcgagtccaaaaatacatcaatcttgaagaggcccaaatagtggcctatggaggatattaccccaccgggatatcagggtatgtgctcgaagcccagccgtcgggtactatcccgacagcaactccaccaatgagcggcatacaattctctgctactcccggatacagccaaggacaggccttggcccccgcatcgtcccattttggaaatccctcggggataaagggacaagccccctcgcactccgctccgactgccagcttggccggtccttcccaaggctcgaggagtaaaatgtcctccaagggcagcacccggacggaggaaaagagacaaaaaagggggtacactccccaatatacccaatacacggagttgacggactcccaagaacgtgtgtacttcgctactaggcaaaatacacactaccggagaccacctccttgttgggttttatgcc

SEQ ID NO: 363064 - DNA, 1410 bp, Cannabis indica
caatattcccgatttggggcagagttctaggggtaccaacggatttcttgactgaaaagaacactatgagactggcatcaatggcaggggcagtaatatcgatacagaattccgatgtgttccaagatggtgacgaacggattcttttgatttcaggtgtggatgtcaattaacaagccggtctgccctgggtatttgcttccgtgtgggggttcaaagatttgggtagcttgcaaatatgaagaacttccttttatgtgctttcgatgcgggaaaattagacacaatcaaaaagactgctccttggaatacacggaaattgttggggcagatggtgtgcgtgctaaggcttatggtgtgtggttgaaagtggacaacgagttaagggatgggtttcatgaaggcctaaaagaacccaggaaggaagtgcagaggattatgaaggaacaaccgcatataagtctaccaaaccaaggattgcaggtttcgaattcctttactcctctggttgatgaaatggagatagggaagtcagctttatatggaaaactcttgctaaacaatacagtgaaggatagtggtgataatagcaagataaatgggactaatggggcaccaaaaccgactgaagggactggacagataggagatcaggagagtgatgaagcacaacataaaggaaaaagaagaatggtagaaacacaagcagtaatgggggtatgggaaaactccaaaaaaatagatactccagctaatgattctcttgggcagccacaactattcgatgtcccaatcactttccctaaggaaggtgatgctttcaatggaggatcttccttcacctttggctcgggtaaacacaatctctcaaaggaacatcgaagaaaggtggctatgaaaaaggacggaaagaataggaagagcaaaagtggtactatatcggttgaagtttctcaggcaagagattcaacaactggacagaatgaggaagaggcgcactctgctgggcagggtcgcctacaaccatgaaactcttactttggaacgttcaaggtttggggaacccttggacggtccgtactttaaaatccctcgtgaatcggtggcctccgaatttggtgtttatttcggaatctaggttgaagaaagggaaagctaaggctttgagggtgtctttgggttttgttggttgttttgttgtggaagcccatggaaagagtgggaggctgattttactttggtccaacacggtggattgcaacatcatgtctttctcctctttccatattgattctttcattcggaaagaggaagggcaatggtggcgcttcacgggattttatggtgattcggatccaacacaaagaagtgaatcttggaaactcctcgcaagaataggaaggatgtatt

SEQ ID NO: 363065 - DNA, 650 bp, Cannabis indica
tataaactcgccttgagaaacacaacattaaaccaaaataaaaagctaactttaaccaaagattaatacaaacacaaacacaaaccttaactcccccagacagttgagtatacaatccaacccaaaatactcccctttttgtatatttataaaggccaaaaacaaaaagaaacaagatttctctaaaaaaaaaaataagatctgaaaaaaacaatcatgatcaacaattaaacaaaatacaaagaataagaaatcaaattttaagaggaaactcatcaaaaatttaccaaataaagcacatgttgatacttaccaaaagaaagacaaatgaccaatttttcttagcccataagtcaagtcacacgactctttttttttttaaaagattattttttttttcaaaataataaagaggcaagaaactaaaattttttatacaaaaatcaagttattctaatgcattcatctttctaagttttataaaaagatcaaataaccatgttatgcttttaaagatgataagaatttagtatctcaaatacaaactatacttaccagatgttgagaaaaaatagacaagttacataaaatgtgaaccaagaatttttttttattttagtagagaatacttacaaacttgtacacacttg

SEQ ID NO: 363066 - DNA, 684 bp, Cannabis indica
aggtaagggcaaagctaaggctaaacaacagtgactttgagcggatgaagattgtacatgtcagggtggttagacttggagcgtactatctttgggatagcaggctgtattttgattagtcgctaggcgacaacttttgtatcgaatattttgtattacagttgtaaatattttaaatacgggatcccagtttatttaaaagttatttactttcaaattaggggtaacaagtaaagttttattaatcacgacttttaactaatccgttgattagcaacgaactgcacggttaatataaaatcacgatgacacgcctaaagtagtagggtgttacattattattcatagctcacccttatcattaaaagaatgaatttgaatatttctaccacatgtattttctgaggcaagtttattgaatgtattaattgcttgataacacgagttggtttctctacacgtgttaatatcatattgttgctcaaaatataggtataacagagacataaaaaactaataatttattttattttattgttagtcatgtgaaaaagaattaaattttttaagtaatataatattaaaaaataatcaatctaaaataactaattcaatatgtacttttgcggattggattaaatttgagttattatggagattggattgaatccaaaaatataaaaa

SEQ ID NO: 363067 - DNA, 924 bp, Cannabis indica
aaaatattacaagaacaatatattaaataaagaattacattcccatagcataaaataacaaataaaagaaaagaagttgcaactcaaaactcaaagatagaagtaactataaactatataaaagtatatatatataatagtgaatatacatgatatagaatatatatataatagatgatatatcgtagagatataaagagtgtatatacaaagtgcatatatatagtatgtatatataatatatataatatatataatactatatagtcaagatatgaatatatatatatatatatgatagtatatatataggagtgtttatcggagaacaagagaacaatataaaattcaaaaaaagaaaagaagaacaaacacccaaagtggagatggagatcaccaaaagcttgaacaaagcttttacacctttgtccaagaagaatatttccccctctatgaaacacttagggctttgtggaaataattctagaaattattaagccttagaactctctagctttgtgtttgaaagatagaagagaagagtgtgtctcaaagggtgaaccaatgcctttatatataatgtttagaatcacaacctttaaaattcaaatatcccacacccaatggctgttaccatttcttaatggggtgtaaatgggattaaatgggtaatttggatgttatgggagttgttaaaagccatcccaatagtaaaaaatgttttactattaatgttgaaaaaaatagtaactagttactagttaccaaatttttcagcttttgcaaataacactccaacctatttcaaatcattcccactttattttatatcacttatatgttgggttttgtgccctaaataaaacacatttcaacataatcagatttactaattagtaaagatcagaaataacattttatgtt

SEQ ID NO: 363068 - DNA, 1143 bp, Cannabis indica
agtcttttgggcaagctttgtttagatcagtgaagtctatccaaactcgccaggtcccgttaggcttcgacactagcaccagattggctagccattccgggtagtaaacatcgcggatcatgccgcttgttaatagctggtccacctttttctctaaggcttcgaccttcagtaagtcgaggggacgtcatttctgctggactggtggcatgtctgggttgacattgaggacatgggtgatgacgtggggacttatgccagtcatatactcctggcaccacgcgaaaatgtcaatggaacccttcagtgtctttattattttttctttttcctccgggtctaggctctttcctagccggagtactttggtggagtcgatatcgcacactgatatctcctcgacatcctccattggttccacgatttttttggatcccaaacggggatctaactcgtcttcttcagcaatttctggctcaatagtttttcagaccatcagtatgggccggtgggtagcaatgttatagcattgcctcgcctccccttgattttctctcaccgtccctattccagcttcctgggttgggaatttcaagcacaagtgccgattgatgtgactgcgctaaagtctaccaaggccgatcggccgaggattgcgttgtaggctgtcgggcagtccaccaccacgaacgtgcagtacttgaaagtgctctggggcgtgtcagggtacaaggtgattggaagcctcactttccccattgggataagtgttgttccattaaaccacgtgagttgggaaccacttggtgagaggtctcggtccgtcaggcctattgcagtaaacgcctctttgaaaagcaaattcacggaactcccgttgtcgatcaggactctggccaccaccttattggcaatgggggtctctatgaccaacgggtcatggtgaggaaaacacactgtcttagcgtcttcttccgtgaatgtaatgggttgatccatcagccggggcctttgagctgggagttgagtaacttcccaaacctcatcgtgtttcacggcccccgcgtaccgcttcagctccttgcgggtagttcctccgatatggggtcctcccgcgatcatggcaactctcccgttaggtct

SEQ ID NO: 363069 - DNA, 622 bp, Cannabis indica
caaaaaaaaaaaaaataaaaataagctcatgagtgatgagtacaggtacttggaattgaagtcaattaattaatgattattatctttacaaattaatttgtggggtataattatatcattacaatttacaagtatatagacatagggcatatatattaaaatactaatgctaaagggcaccagtggtgcttagcaatatgtcgcgttgcggttggctagcaatactccttaaaaactattatattaaattatatgagacccgatacttagttggaccaatagcgatattgatcacataggagggtgctaggcaccactggtgccctttagcatctactaactattattattagagcattgctattaggcaccagtggtgcctagcaccttctcgacatatcacgttgcgattagctagcgatacttcctaaaagctattatattaaattatatgggacccgatacttagttggactaatagcaatattgacacataggaaggtgctaggcaccactgatgcccattagcatttctcttattattattatgagcattgctattaggcaccagtggtgcctagcaccttctcgacatgtcgcgttgcaattggctagcgatact

SEQ ID NO: 363070 - DNA, 979 bp, Cannabis indica
ctctctctctctctctcaagaaccaactgagggttgggatttcttctgcacaatttagggcaagtctagcataattttgtagttccaatcctaggtaagttttcaagctcctctcttgttggtttcttaagttcaaaattgggttaatgcatgtttttctataaattaggtattgtagagttgtttgtgtttggtttcagttttttgaggttatattatgattattccagctgatctaattggttgttatagcttcgtgtaatgtttgagcaaagttttagtttagaactcaatgcttttctcttcaatagtgtttttggattctgggttgaatgttgtgttttattgcttgattttagtctagtatggtgtaattaggtactttggaaagtttggttgcatttgggttcgaattgaggttgttgtggggctttaggtgtttcttacactgaaccggtcaatcggttcagtgggacctgtaggaaccggatcccgattggtccctaggaaaccccacataactgtcttccgattggggaaccggtttgccggttggggcagttttgagaaccctagttttttccatttttacgatatttagggtattgccaatgctatgttatccatcgatagggagacttttagtttcaattttaagtctccgaaaagtgatttagcgtgtcacttatcagttttttgaataatgtgatttaggggcctgtaaatcgtcgagcagctgttccactctggttggccggcacatctgaattcagaagtgaggtaagattagtataatgatatgcatatgtgattacatgtttagcgtgcatgtttatgaatgcctgttagataacatattataataacaatattagtgtacatagagatgcactgaatataaacaatatatgtttggctaagtactgagatgacgctatcacatcggtatgactagagtatgactagcataccgagtata

SEQ ID NO: 363071 - DNA, 450 bp, Cannabis indica
aaagtaatcaagattatgtgattaaatgtatcattatgatttatcagtacacagggtttaactgataggataatctacaatgtagcttacttgcaccttgaataagtgatatgtcctgtccggggtattggttaaagtgagcttgggttcgatatatagaatattcattgaaaaggacaaatattgaacctggagaagatataataaacttaccataatatctatctaattcaatatcacctagttgatcttagatcaaatgatctcaatcctgagatagttaggttctagttcagttgtattatttatgttcttcaatttgttcgttaaaatcgactaatggatcttctcgtgacatacagattaaggacatggtagttcaattgagtgggagcgctaatcatagatacgtaatctatagcttctatctagacatagaagtgaaatgat

SEQ ID NO: 363072 - DNA, 1089 bp, Cannabis indica
ccctgctatcccggtgggataagtaccccccgtaggccactatttgggcctcttccaggttgatatatttctggactcttttttggaaatcttgaaggttggaagctccttcttgctgtaattcgttccagaatggagtccctgtgcggatgcccgcttgaagaagagcgagttgttgtccgtcatcgactttcttggtttttgaggcttcttccttgaacctcttcatgaaattcttcaacgtctccgtaggcagctgcttgatgttagtcaaggcggtgacctccagattaactttccttgcggcgaaaaattgtctccggaagctagtttgcaacttattccagcaatccacggatcctggttccagtttcttgaaccactcttccgcggatccgcttagagtaagcgggaagcacaaacacttggcgtcattgctgactctcatgactgtcatgactcggttgaaccgtgacaggtgatcgcttgggtccgagttctcggtataagctgccatttcgggcatcttaaaatttttggggagctctgcctccaggatgtgcttggcacatggttcccggtcttcacagtcagagtcggagtcatcgcctttttgtctttgagagactcgggcgatgtattttcagagtatgacaagttctgccatgatcccttcatttaaggttcccgtggagaccgcgggtccgtacttcttttgatccagatgatcccgaagatcaccatggttcccgttaatctgatttctcagatcaaggggagggcatttctggccccttcttcctctccttccgggctcttggtgcatggaaatgatttttcggtcctctcgatcatgagggccaagactccctttttggagtttgcccctctgcggacctttccctttcgaggaatctgagcggacctttcgcggatcctgcacctttttctttttcccgggagtggaaatagggttcttcttttggttccctttggagggataccttatagggcaaggttccctagacttctgctttttggaacttggcgaggattcttctggttccttcccaagtccagcagggatgg

SEQ ID NO: 363073 - DNA, 966 bp, Cannabis indica
ttatttattctaattatgaatatactttagaaaacttcgtttaatttgtttgaagtattattttgaattaatataagggtagttttatttgcaccataaaattttatcattttaataacttttatatatcttcaatttatactaacattttaattattttttcttccttcttatattcttaaaaaaaatacatacaaaataaaaataaatataatttaaatatttaaaaaatatatatatatttgaaagttaaaataattctgaaaatcaacgtaaaataacatcaaaaataataaaagttatttttaaaatatattttatttttgatattggagtgtacttataattttatggaatgcaaaaaaaaaaacattcttttttcattaaaaaaataaaaatagtcttaaaaaaatgataaatactattttgaatcctatattttacaaaaattactgattgaactatttgttttgttaaataaaactttagaccctctataaacttattttcgacactcacaacattgtaactataacaaaaattatttaaatactgttttttatattataaattattaagtgtttgctctagtatatttattttatattaaagttcttaaaattaatttaaatttttaaatccaattatttgaatattaaaaactaataattaataataatactaaaaaaaaataaagatcaattttgatgggttaacttgaacaaactgacgaaattattgtgcgaatttaattttttttttaatttctaattgggtgagttacaattaaatatttgtaacccatcataaaaatatatgttataactcttccaaagtgattgaggtacacccttattttgtattattttgaaaaataaatagtttgaattaatgaaataaagaatataatcaataacttttataaaacatcgtatctaaaattatatttgagtttttttattttta

SEQ ID NO: 363074 - DNA, 1682 bp, Cannabis indica
gctctgcctgtaggaggttcaatattcaaagtactattccaaatgaaatttgattttagggttggaaagacatacgtagaaatacgttattagaataaagaaatcttttatatttgctaattaatttgtaggaaccacattacaatttttcacatcttcattagaataaagtattcaacattacaattttccaataataaaagtgaacaaccaactaccattacaaaattgcaactaggcataattaagtggaactcaaatgttatgaatccgtcttgcgtcccgattttgttggagggtttggcgcacccgtgttcggtccctcaaatctaacaacgctcatcccacgatggcgttgtggacagcgacaaggggagcttcggttggatgacagatttggctgttttggaagtagttccatccagccaactccacccattcgaagtccttgtccacatttcctgcattcacatatagtacatacataaaaatatttagaaagaaatactaatgatatagggtagaaataaatcgatgtaaggagtacagttattactcgaaattgttatgagatgatttattgaattgttaaaattccgttaatgtacctacaacacacggttgtagtacataccaatcctttttttacacatcttcattgcagtgcaacaacaatacatattttaatatcttatattttttacgctatacatatatctataaattttgtagggaagaaaaaaatgacttaacttgtgaacgagggaggataacctttatatagtacttgttgatttgatgtgtggcgttttcgatatggtaaaattaatattaaatatttaaatttaaaacctgatttgactagactatacaacctatcaatgaagatgattttgtcaatgcattggaaaaaggcatttggataaacccaaccaaatgggcggattattcaaatttgaaatgaaaaattaaaaaattaaacatgttcatttccatcatattactaattatttgatatttatatgtaattattttaataatattttaccatcaatccgtataaggtcacatcagtagggtgtacgatctactttcaaaaccctagctcataccatatcaaatattaaaacaacagcagaacacgcaaaaatatcccaataagatttttaaattgaaaatattttttcatttgttctcataaaacccaaatatgctccgcaggtcacgcattattgaaatttgaaagtgacgtactgtgtacagactttgacgtacgtattttaaaaactttaaacatattgaaatacgctgcgaatgtgaggacttacgtagaaatacgttattagaataaagaaatcatttatatttggtaattaatttgtaggaaccactttcgctatgaagatggaagttatttttgtgagtaatgaaaggtacaaagttaggtgatatgacatccacttattctattagggaattattttataaaatctgacattgcaattgttgttagtaacttattggaaatagtgaaactcaatggcacatattcggtcaacatagttccattccaaataaagtttaagtttatagttagaaagacatacccaatagaacacaatttgtacataacatagttctatcccaaattaaatttaattacactgtaaatatagattgta

SEQ ID NO: 363075 - DNA, 708 bp, Cannabis indica
attatatttagatgatggagagactaaagagcaaagacagtggcccaattgggcaacaacttcttatagaagttagtggttttgattgaacaatttatgggttaagatatatacttgtttttcctttatgttttctccactgaatatttaaaataccaattagataagcttttcaatttgtgcattatatactgttcttttcaactctctagctagtggcttaagatttgagtatcaagccagacaaactatatatattattaatactaattagttcaaatataatctagaccattgtattaaatttataattttttcatagcttaatttttgagtacttcacaattcacacccaaaaggtcaaacatttatatatcttttagttgtaatttttccactaattaaacactaaagtgatcattgagctttacctaaaatggtgtcttaataccttttcaaaaaaataaataaataaaaatggtgtcttaataccaatgaaaagataaaataattaattcaatattttgtatgttgatttgaggaatctaattaggcatggcaaaaagatccattcattcggatcggatcagtgatccgatccgacggatcattactgatccgaaacattcggatagttattggatcttggatcagatccgacccgccccgcttaatttttttacggatcggatctgacccgatccgttt

SEQ ID NO: 363076 - DNA, 778 bp, Cannabis indica
tcagctagtgattttagagaataggggctgttagggtttgattaggttttggttaagttgttatgttcaatttgagttgattctaggttttggtagctggttttattgctttgtgttggatttgcacaagttgaactttgaaactgaagtttaagtctttagtggcatgtttggtttcagtgagttttttttgggtttttctggttggaatatattgtgtatacactatttaggtactctggaaagtttggaggcaattggacaagttttgaaaaaattggaagttttttggggaggactagtaaaaaccagttatccgggataacccgttttctcaattctcatccatttcagtgccttagttgagtgtttccctatttcttgagatagtgttgtccctagagagtataacagagccttgagtgtagacttgggtatcccggattcagattttggacatatgatttacccagttttaatatgtgattagggcatccatccgcatgagctttctgttcaggtcggccaattcacttgaatcgggaaaggaggtaagaattgtatataatgtgtaatatgaatatgcgaatgtatgtatgtgttaatgtatatgcatgcttgttgtgatttatgcactaccaacacttgtatggtagcggtacagatgttaggttatatttagcctatgtttcaggtttgaaaagtaagcattttctcatctgttggtgtcttttggagcggttttacgctttattttcattatttcaggttcccgggg

SEQ ID NO: 363077 - DNA, 611 bp, Cannabis indica
caaagtgaatggaaaatatggcacttgaatttattaaagtctcactgatcatcatggccaattaaagggtggggcagccggacctagatcccaagcttcacaatttcgaaggtcccaaaaaattaaaattaatatatataaatataacatatatattggttcaataaatgttatacaagagttataatacaattggtaagagagagtgagtattctagtgttgggtgctgggtttgatttctagctctcttatttttttttttttggctattttaaaaatttaaggattatatatatatatatatatttattttttataaaagagtttgacgtataattacttagtaggatttatataagtgttggggtttttttcttaaaaatatatattatctaaaaaaagaatgaatattatgttatatatgtttgagtaggggtgtttatccgattcaatttgtacttttttggttaaacaacattcaatctgcactaagtgcggatttcatattttagatccaatatgatccgcataactgtttaaattcaatccaatccgcaatactgcggattgaatcggttattttcggttgtttttttaatgataaattatt

SEQ ID NO: 363078 - DNA, 593 bp, Cannabis indica
aaaatgtaaccattaaaacctcttcctatactatatatatgttaagaataaaaaagaaattatatatatctatatcggggtcggatatagtacggatagtattatctcccccccattcccacttcgggtattgaaattgtcccccaccaccgcctcatttaccaccaagacggagaatctccaccccattagaggcgggtccccgcgattactcatccccgcggtataaatttccatctctaatagaaaagggtatgtcaaaaaaaaagagtagaaaaggatttcgtcaaaagtagtttattggattctagacaaaacagattatatattttttaaaatattataaatagtaatctgaattaattttttatcaaaataaaatttaataataatctgtttacattttctatatttgttcgtgttaataattatctttaaattggttatataaagaaaaaaagttgtctaaaattaaattcagggtcttatttttatcattttaaaaaatataagattcattttatcatttaacaaaatataaggttcaattaataacttttgtaaaacacaaagtctaaaataatatttacttt

SEQ ID NO: 363079 - DNA, 602 bp, Cannabis indica
aagtttgatgggataaagggtcccccaaagaacatctggcgtactttgtctctgcatgtggtgaatctgctcagtcagatccattactcataagacaattagtacaatctcttaaaggggtggcattcacttggtatacacaattaccaccaggatcaataatcacatgggatgacatgcaaagagccttcattgctcagtttgtaagctcaataagggaagtcactcttagtgacttagctgaaactaagcaaagaccagatgaatctgtcaatgaatttattactagatggagaagtgttcaacttcaatgtctagaaaaattgtctgagctatctgtagttcaattgtatagacaaaatgtcattcccgagataacagtttacttattccaaagcaagtaatgttgaggtgcaaatagctcgtcaaaacgacatgtcacatgaatcaatggctacctttgtaaattatgacaaaggcaaagaaaaagttaaaatactaccaaaagagtttattataaaagagactatggagtattcgttcattgatgaagatgatgtcaaacaaatattagatggattattggctgcaaaagctataaa

SEQ ID NO: 363080 - DNA, 969 bp, Cannabis indica
attattattattaaattataaggttttttaatatggtgtgtcgtatttttcggacttgtcgtgtgtcgtgccttttgagctagtttatttgtgcttacgtgtcgtgcttttcttgcttctcgtgccgtgtcgtgcttaaagacatatttttcgtgtcgtgtcatgccaatttgtaacattgtgccgtgtcatgcccaagtctatattttttcgttgcctattcgtgctcgtgccgatttcgtgtcgtgtcaaaaaataccacccgtatttacagcactaattggagatgatctaaactactgtgataacaatataataataattagaattttactaaacaaaaaaaaaacacttgtataataaaatctatcaattttaacaacatgattttaatttgtaaaaaaaaataacataaaatatttttatttttgttaaaattaataaaaaaatttaattaacatataattttttaatattggagatgagagaaacctttttttacaaaaaaattaatcacattaaactatcatttatctaattagcaaaagcttaataaacttcataaatcactactcccactacacgagtgttgagtaatgccccaaaagaaaaactttcctaaaaaaatcttcaatcatcatgggaatttatatttttatatctacagaattgtgagcaataagtgcgattttcattttataaaaaatgaaagtcttattttaattttcttcactctagtctctagatctactcaaaccaaatagaaaactcatatatgattataatataatgaataatttacggcataaatacttaaatttaacttccagttaaaaataaatacttaagtttaatttttggtggtaatagtatctaagttataattttggaacttctgtaagtattcggttaaataaattgccacgtggcaattcctagttggtccaaagtcattaaatttttattatt

SEQ ID NO: 363081 - DNA, 1152 bp, Cannabis indica
gaaaggtccgctcagatttcccgaaagagaatgtccgcagaggggcaaaatccgaaaaggagtcttggccctcaggatcgagaggactgaaagagcgtttctgtgcatcaggaacctagggaaaaaggaagagggaaccgaagataccctaccattgatctaagaaatcagatcaacgatagacaaggtgatttgcgggatcacttggacaaaaagaaacacgtatcggcggtctccgtaggaacgctgaatgaaggaatcttggctgagctagccatactgcgcaaggacattgcccgagtctcccggagacaaaagggggacgactcggactctgactgtgaggaccgggggccatgcgccaggcacattctagaggcagagctccccaaaaaatattaagatgcctgaaatggcagcttacacggggactcagaccccagtgatcatttgtcttggtttaaccgagtaatgacggccatgagagttagcaatgacgccaactgcttatgctttccaatgacgttaagcggttccgtggaggagtggttcaaaaaattggaaccaggatctgtggattgctggaacaaattacaagtcagcttccggagacagttcgtcgccgcgaggaagattaatctcgaagttagcgcactgactaacatcaagcaattacccacataaacattgaaaaatttcataaagaggttcaaggaggaggcctcgaaaactaagcaagttgatgacgaacaacagcttgcacttctccaagctgggatccaaaccggaaccccgttctggaatgaagtacaacaagaaggagctgccgatttccaggatttccaaaagagggtccaaaagtatatcaacttagaagaagcccaaatagtggcttatgaaggatactacccggccggagtggcaggatatgtacccggagttcaactcttgaaaaccctacctttggttactccacaaatgagcggtatacaattctctgctcctccaggatacaatcagagccaagccttggctcccgcatcttcgcgctacgggaaccccctggggggtaagcggacaggtcccgtctcactccgctcgtgttgcaagcctaaccagaccttctcaaggctcccggagcaagaggtcctc

SEQ ID NO: 363082 - DNA, 955 bp, Cannabis indica
ctttatttttattcttgagcttcttgattttcatgccttgtgtttctgatggctgtcttctaaccatactgtttttgttctgtgcagacatgtctcggcagatgatctatgctctgaggaagagaatgggtggaagctctagcgcctctcctctggccaagaagtccaagggccgtgaggggtcctcttttacggaaaagagaccttctggagaggtcattgatctttccgaggacctgactgctgcaaacccctctacccccaagtctgccaagtccaaggagtctggaccaccaacggctgggtctgaactggtcaggagtaatcttgagcgggtgcaggcaccaactccacctttgtcagtgcttccagaggccaaaaagggcaaggagatgctggcccactatatgaaccggctggttcctgaggtcagtgagcaactggctggtgctgataatgactcatctctggatgtgttggtgggcggagtcttgaaggagttcaccagggtaagtcttttttgatacttccctttaactttccacacttagctccatatgctaaagtttttcctctgtgcaggccggtctgaagttggcctacacttactcccgagctaagtctgttgcttccaagagcgcggctctgtccgacaccttgaaggcggaggcggacttggccaagaaggaagctgaggaagccagggcggaagccagagctgttcggttggagttgggcgaggccaacaagaagctgttcgctgctgagaagaagatctccatgctgacaaaggatctcgaggctgctgaccgttttgaggagaccatcgagatcttatctgctgaggtaaacagtcttcaggatgagaggacttctctgcgagcagttcttcttcggatgaaggaggagaaggatgccaaggagggggagctttcggccgaggtggacaggttga

SEQ ID NO: 363083 - DNA, 535 bp, Cannabis indica
accatattttccaattcaatcatataaatgccaaaactatttatttaataattataattaattactaaataaaattatcatttatgtaatttattaattagaccatacaaagtctcttaattaacaaattgacctcaaaacctcttttcttcacaattaagcccttgcttagtgaaaattcataaataagacatagtctaattttagaattataattgattaattaaaatcaattaactgagtttgtaagcagtattattttattctatatggttttttaagtgtttgtatatattttttgattatgaatttatgcatatatatagggtaagactatggtaggacttagcaaaagtttcctacccgtagcgaactttctttttaccattaattttagatcttgtggttattatgatgtaggtgtatactcttactataagactgcttgtatacaattaaaactttatacatattataataatatttgatgatatatgtgttggaattattttaccaggatcttgatttactacca

SEQ ID NO: 363084 - DNA, 675 bp, Cannabis indica
tatctgaattctctctttttttctctatgaaattgcttgatgaaatcaactctcttctgctctttatataggcatttaggtcctaaaaatatgggaaaaccgcacatgtttaaattccattcagatttgaattttgggaaaccacacgccagatatttttcttctgctgagaaagaggcgggccgcggcatgctaaacccatgtcgcaggccgtgtggccaaaatgaggtttccttcaatttcttccatgtaggcgggccgtgccatgctaataccatgtcgcggcccatgtgatcctctgctccaaattctacatgtttttatcttttccgaatctgaatttgatattttccactgggatatttttatgcgatattttatcctttttttctggttgatatttcccaactcttcatctattttaaatctgcaaaattaaaagataaaaacgtaaaaattctccaaacatgatttaaactaaaagaaaaatgtgctaaaattaacctaattttaatactaaaaataacctaacaaaattccccaaactaagctttactcgtcctcgagtaaagtactaactaaacattaaataagtcaatatcccaaaacatgagtaattttaagtagcttcaataacatgatgatgaaaaatttcaacttgtgcatataatccag

SEQ ID NO: 363085 - DNA, 823 bp, Cannabis indica
aagaaaagcctgttaggaagcatgttagtagcctgatagtagaataggcgcatgcttataattttcatataagcggcattagtaagttctctttgatcatgatctgaccatgctagctcttggttacgcaagctgttcagactagatggacaccaagcgaaataccacgagccagggtaactcggttggatcaaatgaaagttagggagctcagtttcctccaaatgttcggggccgaggtagaggtcccaggggcagggcacgttgtcggggtgatgctaacccgccacaggctgccagggctgcccaagctactcaggaagctcagaattgggaaagtaggtttgtagaaatgtaagccagaattgaggaacaagataatgaaatccagcgattgagacagcagggtgctcctgcagtgcctgctccaaaaattccagtggcacctgcccctgctgaccaggccgaaccagtgattgcagtgaaccgtatggaaccactgtatgaaaggttccgtaagcaggcacctccagtctttctgggaggtccagatgttatgaaagccgagcaatggctaacaattattactagaattttaaatttcatgggcgtcacagggaacgatagagtggtatgtttcgcttttcaattccaaaaagatgccttagtttggtgggacatggtgtccatgatacatgacgttaccacaatgacctgggaaagttctaggaacttttcaatgccaagtattataatgaggcagtcacaagtgccaaaagaaaagagttcactcacttaacccagaaggaaacatgagtgttac

SEQ ID NO: 363086 - DNA, 633 bp, Cannabis indica
taattaaaactaaatttaaatagaaaataaaatcaaaagataaaaaaattaggtttggagtttgttagttgaacctacaattaataatattcaatattaattataaataaaaaaatatatattgattgtggtgtagttttcaagagttaatttgagccattggattaaatcaaaggctataaattattattcttattaataagtaaaatacccaattcctactataatagctccctttaaatatatgtatacatgtttaatttaaaaaaaaatatatatatatatatatatatgtatacacacaaacttatattcatatatacatataaatatatatacttactgttgaccgaggttttcggcaaccaataaaatattataagattcgagaactgtaagataactagagaaggatttttacgtggttggggcgttaatgagccttagtccacgagactgttttatatatggatgtatttaatacagagaatgttcttggtgagtatttactcttataaatacagagaatgttcttggtgagtatttactcttcttgctcttatgcaatccaaaattctcgaccccatttaatgagcttttagggggtatttatagtgtttttggtggggtaat

SEQ ID NO: 363087 - DNA, 505 bp, Cannabis indica
taaaaaatgaataaaattaaattatagataatttattgattattttaatttaatttttaaagtaatcaccatcgtttaataatgatcaacatttaaaataaatgtaacaatgtaaccataagaacctatataccttcaacattattatggtaaataatacctaaaagaaataaattaaacaaaaaacgtgtaaatttcccttttatttagggaaatttttattactatacgtaatatacataccaataacaaaaataacattgattactgtaataatcttttagtaacgtgacacgtcatcaattttaccgtaataccaaaaaaatcacatactagaatccaaaaagaaaacttgccatcttgctccataaaagcactacattattcctctaattacgagattgatgggtcctttgaacaacccatgaaacacaatacaaaaaacaaaacctttaaatttacttcctattttatagaattaaaatcacaactagaatcattctca

SEQ ID NO: 363088 - DNA, 645 bp, Cannabis indica
taaagagcatggggcagccacaagcccatttttgttttgtcaaagaaacaaataaataaataagaccagacttaattttattttgcagcttttatctatgttgttgggttgttttaatttatagatggacatccaatgaatacacccaattcattttcatcaagcaaataatccaatgaacgagtgttggataagattttgaggttaggggatatagttagttaatgagttgagataatttttggaacttgatgaatattaaaaatagattttttgtattactaggcaatcaagctgttcagaatcgaacccagcgaagaaatccacccaggagcaacgagaagatgagtgaaagagagagatattaattaatttattaaattattatttatttttaaaatattattaaaaaataagtttacacaaataatcagatgcattccaaatattaattgttgttgtatacctattaatttatcatcattagatatattatctatggttataaaaatatctctatcatagtgacaaaaatagtgtacctaccataggcatgtcctatatatatatctacggcaagactatggtaggacctagcaaaagttccctaccggtagggaacgtttttttttactattgatttta

SEQ ID NO: 363089 - DNA, 581 bp, Cannabis indica
atttaagcacgctgaaaacagggttcaaacagtctgttgcactcgagattcttttattttatacgcgtgtgaaatagattatttgaacactattttggacgtgacaaatttttttcaaatttctcaaaattttgtaagatgtcctaaataactacaacgtagacagctttaaaaaaaattagactaaaaaattctcctaaatgtcgaaacaaatagggagtacatcaatagaccccttttagatgggtgcattgtaaaatttttcgaaatagttaactatgctgaataagaaaattacaagactttattactattgaaaagtacttacaaacttagaacattttgtacaaatgactctaggacactctaaactttgacacactttggattctcttactcacacttgaactatctaacttcaacttgcatcctaagcacacaccttacttatatttataggttgcaaaggatgtatccaaatatttctagaattttccaatttactaactaattaattgcttcatactattttctaacaactctagaactatctaaacttagttcaagtgattctaagtttt

SEQ ID NO: 363090 - DNA, 1055 bp, Cannabis indica
gtggctcagcaacagggtcactaccataccctgataatttttcaccacctgtcattggtgttggaagagaattggcaaattccattttgcttctgcataatagatcagtgatgtatttcctttggcacatgtgaagcccactgtcaagatattgaatttgaatgccaaggaagtaatcaagaggaccaaggtcctttaatgcaaaagttgcattgagatccgaaatgagactagttattactgaattggaactgcctgtaaggatgatatcatcaacataaacaaagacaaaggttgtgtgagaggaagttattcgaaggaacaaagattggtcagcctttgccgaggcaaaaccaaagctttttggagcagtccttagtttatcaaaccaggctcttggagcctgttttaatccatacaatgctttattgagtttgcacacatagttagggtgatctttgtccagttgccttatttcccaacctctacagttagatcaccatttagaaaatattgttaacatccaattgccttatttcccaaccataagataaggcaattgttaagatgactcgaattgtggttggctttaccacagggatgaatgtctctataaaatcataaacatactgttgcagaaatccttttgcaacaagtcgagctttgaattgcacaacagagccatctttcccttctttgactcgatagacccatttgcaacctatagcctttcttccaagaggaagatgaacaacaatccaagttttatttctttttaaggctattatttcagttcccatagcattattccactcctttgattgcaatgcagcagctaaagtaagtggttccttggagatcaagaggacttttggtttgtatgtgcccactttagctctagtaatcatggggtggttgttgacagggacagtaggagtaactatggtagttggtgtaacgtccccgcttcaagcctccattgggcccttacaccaacggagtaatggctcttatacacaagtacgtcactctggctgcttcatggactgatgact

SEQ ID NO: 363091 - DNA, 843 bp, Cannabis indica
atttaaaaataagataaaataatcaaatttaaaaataagatataaaattaagcaaaaagatagatttttacctattttcaagttcaaattacactaatatcttaaattaattttaaaaaatccaattaatttatttctgataattagatttgaaataggaaaagtaaaaatcaaaatacaaaactacacaaaaaatcggaagttaattccatgaaacagcatgaaaaatcgaagaaaattgaaaaaaatagtgagctgtacggatggtatgcagttgcatacccatccgcgcgcgtcacttggtgaccagccgagaaacctcggcgccagggggcttctggaggatttccgcgcgcacaggatagggatgagacatccctgggcgtgttcctcggacagcgccttgtccgaacacgctcttggccatgtgaaggggccatccgcgtgcgtgggatgaggtgatcaccttatccttttttaaatcttcaaaaaatcataactaattcaaataaaatcgaaattgagttctataaaaaagtaaattgcttaatttttttcaaactatccaataaaattaattccagaaacgaaaattcaattattatttcacaaaatctcacaaacatcaatcaatcatcatataacacacagatcaacatgaaaccatccaaatcacacacaaatcgtattcagtccgaatttcttgaaagcaaatcaactccaatggctctgaggctagttgttggaattattttaccaggatcttagattttactaaaaagtatgttattttaacatcttagatttacagggggtgtacctcgatcctctagccacagggtg

SEQ ID NO: 363092 - DNA, 512 bp, Cannabis indica
atacttgtgagtagatctaagttcctggtaaaataacttccagcagagctttcaaccgaggtggcgaggcaaaaagagaaggttaatgctctagagacagtctgtcttgagctcttctatgacttttggaaggctaatcctcaggccaaccttgactacatgggtgacgctaaggacatgtaccttgagttctgcgcttcccaagtggtttatggtgaaatcgagatggctgcttctacctcaggccaaggtactgatgtacctcctattcaaacaacagatcctccacctcctactggcccacaagacccgaaccaagagcctcggactccagctgtttaaacacttctccttttatctttttattttttatatatcttattcagccaaaaggccttttctaagacatcataaccggccaagcggtctttaaacatggaattatttttcatttttcagacaacaggctgaccgtgcagcttttaatcccggtattatatgcttttgttatc

SEQ ID NO: 363093 - DNA, 635 bp, Cannabis indica
ttcttcctcaagatctccatgaagatttaattttttaatatcaagctgatgcaaaggccaatgatgagtagctgccatagaaattaaccgtcgaatagatgtgaatttagcgacaggataaaagtattacaatagtccactccataggtttgagcataacccatggcaacaagactataataccctaaagttcaataaccggattagcaaacctaactaaattaattaagtattgatgaggaattatattattatatgatttaatatgtggaattattatgatttattgcattttatgaccccgttggtgttttaagggcatttttgtaattttgacctaagaagggtaaaattgtaattttatggtatattgtgtttatggactatattactatatagtatgtttattatgtcttttcataggtgatttttgacaagtcggcatagtatagtcacaaccgggtattttgggccgaaccgggttcggggcccaaaatacatttttaggattttgttatggcttatatgtgtgtaaatgagataatatgatttatgtgatatatgtgtatgagttgaattgacaaacttaccccttttatgtatttatgcctatatgtgtgctttagggaaaattt

SEQ ID NO: 363094 - DNA, 540 bp, Cannabis indica
agatgattatactttcagtggatataggcatatagactctttgacaaagaatgatcttagtcaaaaccactaatgaaacaagatacaaatgccatatatttataaatatgtggttgtgatttttcgatgacttaggtttagttacaataaagagttcttagaatagtgcaagtagatcctggtcacagaatactaaactcatattccatacttaacatacagtttgaatccattgatagaaagtggatattaatcacttgtaaaagtgtaattgcattgtattctggaaatagaaatataagaaatttctatgtgaaatctgaaatttaaagtcaaggacttaaattacaccaaatacacatgagtattcttctctcttggaccaccactactaacctaactctaaggctaatttacctaaagtaagcatatacaagtaggagatttctaagattgaggatttatgtcattgcgggatagaatatcggtaatattaatcatgtgcgtcattcaatttcttaagagaaaatatagaatgac

SEQ ID NO: 363095 - DNA, 773 bp, Cannabis indica
tcaataattattgtattttagtggaaatagattgttttgtaatatcatatattttcaatatatatatggcttaagatagtatcatttagaattcgagctaaataaaattagtcatgacactactcaattttttataaatagaaattttaaatacttttattttcgtctatgtaattatttctttttatttttatcaattatatattttcaaagataaatattatttttgattatatattttacaaaagttatagattggattatttatattattaaataataaattaaatcttgtatttttcaaaatacaaaagacagagtctaatttatcatttacaaaacacaaagagtccattcaataatttttataaaatacaagtctaaaataatattaattttatttttaaatttatcctcacttatttttatctgaaacccataaaatttataatttttattaatttattaccttgtaaaacttatattttttgtcaataaaaatcaaactgccttacataattatttgatggataaacatctttatcatcataattggaagaaaagaatgatatgacaaatattagaagataaaataatatttatatgtggaagatgtaatctgttaataaaaaaaattaagtatatataaatatataaaagttaataattaaaataatgaaaaaaaaaatccgacctaccggattcgaaccagtgacctaaggatatctaatgggtttaaagccaactacagtcctccgctctgccaactgagc

SEQ ID NO: 363096 - DNA, 891 bp, Cannabis indica
tatggtggatatcaggtgcgactacctaggttttggatgtccgttttctagtggttggtattgagagctaggggtctagtggacgatgtgatatgcatttgacgtttgattttgtgattatttgtggtctctttactttgtttatatattttgatacgggtgatgagatattttatttttacaaagttaaccatacaagaattttactaaactaagggtcgtttaatattagttgttttcctactgggctttataagctcaacccctattttctcccattccaggaactcagtttgattctagtggatgaggatggtaccgctgaggaagaaagtcgttattactttagtcttattctactctttaatcttccaatgaaactgattttgtatttaagctgaaatggatggtctgaatgacttatattaactaagtgtcagtaagaaatgaagaatgatggatgctgctaagcaaaatttttacatttagaatataaaaataaatgcaaaacacaattttacctatgctaaatttatagcataagagtttattaatttaagttcgacccatccaagattataaaaaataatctcttaattacaatcctttcatataaaggaaataccctttgattccaattacgatgatattaaataattaaaataatttgggaaaaatttggggtgaatttagaattacaactgagctcaattaaattaattaatcgagctgcctacataccttcttggtgaaggatcaagccacttgtagttcagaatatggtaatttagaatttagatataaggattccggtagatgacccttttcaggaatcctttgctatttaaaaatttagaaaaaaatttctaggtggatgaccttttatggaat

SEQ ID NO: 363097 - DNA, 582 bp, Cannabis indica
aggaaaaacccctgtgaagctcttatcaaacatgtagaagcaatcaataaccgtgtgcccaagcttatgacaaagctggcactgcacacgatttgctagtgttgggaacctgccacctctgttgacagtagagacaccacgaccattagtaaaagtaggcaatccataattgttacctgtgaaagctccacgatttgagtatccacggcctccaccacgagatgtggatagaggagaaggagcacgattatagtttgagagtctggtgcttcgatttggatagttctggtaagcaacattgacctcagaagactgatcaagatcaaccgttgcaagattagcacttagatcaaaatctcgatcaagatctgtcttctctatccgagactcagaggcaagcaaatagggcttcgatttctgcaacagagtattcttcaattctagtgttagaagagatgatgaaagtgtcatactcactaggtaatcctttgaaaattgcagcaatatgattcctaggacttagaatttctccaacagacgcaagaagatcaacatgctgcttaactttcagaagatagtcat

SEQ ID NO: 363098 - DNA, 536 bp, Cannabis indica
actaaagtataagatacgaagaaaaacttacataaagcttgagaactgggcgttggtgttgatcgacggtaaagagtttattggcagcgaccaaggaaaagaagtaagaaatctatggtgtctgagggtttctgtttctctctggaaaacttgataaaatttaaagaaattttgaaagtaaccaaatgaagtgagaagggtggcttttataggccaaaacacatgtgaaacagctgtgatcagctaatatcgaacggctgggaaggtacacgattcgaattcccatgatccaacggttggattggatcgtcatcaagacggtggaaacgcttgagtgtttgtctgacacccattaatgcgtcgtatcaattaatggacaagaaacgaatcgacacctgcaaaaagtgaatcgctacagtaatggtgatcattaaatacaccctcacgctcccaaagcacgtgccaggaaaccgaggacgccaaccggaggcatctaagcaagccttgttctcttcacaattaaacaaggcttgggg

SEQ ID NO: 363099 - DNA, 855 bp, Cannabis indica
gagaaaacccaagttggtttacaaatctatctttacaaaaatgccactaggggcaaaccattaagtcatcttcctaaacaaagaatacaagaggggttgataaactcgagaaagaccgtctgcatgtagctcggagactaatcatttccacatagcttggagaaagaccagctatgcatagatcgagaaagactatctacacgtagaaggtctccacctctgcatagacctcattctcctcatcagaagatcccatttcttgcagccgagatctcattcccagcctcaagaaattacaaaggtcttcttgtgcaagcttaggtcttgggatggttgggttttatagtagaacccgaaaccacgccaactttcttctgggattcctcgtcagcctggaaagaacctctaagattgctcacaaaatctatgtccattgttgtggagacaaagataaaagatcaatggagcaacaaaaaaaaataatatgtattatccagttcaaaccaccagtcgcaaggaataatacttaacctcaaaaatcgcttgtgaggatcgcccataacgatcaacggggtttccctggtttggattggtcagaagctcctcagccctagaatccttcgtttccaattcgaattgatgtctgaagtccttgggaatgcataaataagaaaagtggttggtgcattctgatgttatgaatttggagggataaatttctgaactcaaatgagacattttagcaagagagagacaatccgatctcaagatggatctcaccaaaaaaccaaaagcttgtgaaatatggcaagcttaagccacccttttatacacaaagtccagtgacaagaaggc

SEQ ID NO: 363100 - DNA, 671 bp, Cannabis indica
gatatgggtctatattgctacaaagtaatgtcgtttggtctaaaaaatgctggagcaacataccaaagattggtaaacaaaatgtttaagaccagatcgggcgaaatatggaagtgtatgtggatgacatgctcgtcaaattcaggaaggctggggggcacatagatgaacaggacaaatgcttcaaggtcctcaaaaagtacaacatgaaactaaatcccttaaagtactcttttaaagtcagctcgggaaagtttctgggcttcattgtcaatgcccgaggaattgaagccaatccagaaaaaattcaagccctcctagatatgaagtgccaactaaaaccaaggaattgcaaattttgactggtcgaatcgccacactcagaagatttgtttcaaaatcaacagacaagtgtgtcccattctttaacatcctggaagggaacaagcaattcaagtggacggaggaatgtgaaaaagctttccaagaactaaaagcacaacttgcaaaaccttccgtactctcaaagcctctagacggagaagaacttggaatatacttagctgtcacggagcatgctgtgagtgtcgtgctaatcagagaagagaacaacatacaacacccggtctattacatcagtctaagactcattgaggccaaaggtcgatacc

SEQ ID NO: 363101 - DNA, 641 bp, Cannabis indica
gaaagtaatcatgtgaaccatgcaacataaataattttttattcttttattaattagtaaatctgattatattgaaataatttttattcaggatataaaattccaacaaactcccacttgcactaataaaaaacttaaagttaatttcaattaatctcaacacatcttgatgtcttgatcaagtatattatgtagtattatctttgtaataggatatgacaggttgtattcaatatcaatcttctccactattacttcttcataagtcataaaaaccttgacgttgtgaaattacattctatatgtttatgttatacccgaaattcggctagagaacacgtgtcaagatgaaggaaatgtgaatcagtgcaatatctttttatagaataactcattaattgcgtaagtatcagagtatatttgtaacccgctgactgtaaggtcttaggcgaggaatcaatgtaagaacttacacttagtgtattaacgagaaaccatatgtcgctgaaggagaatagcgaggcactggagaaaagtgacacatacctacacttgaaataagcaaactaagtgtaaaagtcgggtcggctcgaagaacaagaatgagagatgaccatctcactacgaggaaacttcctata

SEQ ID NO: 363102 - DNA, 1106 bp, Cannabis indica
aatgttcttggtgagtattttctcttcttgctcatatgcaacccaagattctcgaccccattaaatgagctttgagggggtatttatagtgttttggtggggtaatccctagaattgttcttacaaacgtatctgtaagtatccataaagttgggtattcccaatgaatataccatgggtgatgcatggtcaaatccctaggtgctgtagggtttttatgaggaatgtcctttttgccttgtgattgacgtgactcttcgcagagtagccgtcgctagacttaaatgatcattactgtggcgctgctgtttgggggttgtgccgtcagactttattgcgtgttacagtcccaacacgcttcctcccatgcggcattaaatgcgacttgattgctcaggagaggcctgacacatcccggagaggcttcatgctatgcgagcttccgggagtaccttgtactccgggtgcctcctccgggacctatgcccagggtgcttccttgtggcgtacaaagacttatcaaatatttacaagttatctgatccacgtgtcccctattcgactggtccacgtattttgggcgaattcagggggcaacaagtttaaacccttgagcacttttttttttcaagataatgtgagtatacagtgtgttatactctgtctgtccttccatctcttctccgggtcaaatttactcacaaagaggaagagacaagaccacctatcatccaggtgaagtctcccggaggtgaccaatgaagtggtttaatatggcacgtcacgtagtgtgggtcttaatgctatctgacttgttcatgaactatcacgtattttgagaaaaaaacaaagtaacaataattaattgcaaaaattaatgggatttttacattaatatacatagttttcaaattatttacattaataaccttacataaacaatcatcacaaactcacgttccacgtcagcaaaataacgtaccagagaaatttttgcctttatttttattttctttttaaaaatcaaacttttgactattatcacttattagtatttgaaagtcaaactttaagaaaacatgtacagtccttgcacattttttttt

SEQ ID NO: 363103 - DNA, 668 bp, Cannabis indica
ttaatgtaatgattaatgtttcttttgttttacagtttaagtcagacgctccttacagtaatgaggagagatcaatgaaatacgggatgagtgggccgaatttgtgaagcctttgattatagattaagtacaaagttactactcttgttataatacatgagtagcaagttttttatgatcgttgttaacttttgcattatgtaattagttaatagaatcgattactaattttatataagttctataaaattattctaaaatttgataatacatcctctgatagtagttcactcgccaatatccaatgcatactcctttcgacaaggactaagtttggtgcaccctttggggtgaggttcgcaaactaaccgtacccaacagcacttacagaacatgcttccactgaagccaagtccttccgaaacttcacatgccaactccttggcacaccatcctcctgacggcaatcgagcaagacactcctattgcatggtaaaatttgatgcgtcccacctggacgaggcttgcaagctaactgcacccaatgcagaaccaagtgcactcttgcacaaaatctcttcacaaagttctcaacattggccctctggccctaccgcacacccaggacttcatgcaaaaggctccttgacccactgcatacttgctcc

SEQ ID NO: 363104 - DNA, 528 bp, Cannabis indica
aagtgcacctgaaagtgatccacacatgcgagagagcttctactttgttttggctaagtatttggccagcatttttgagatcctgcacgatacatttctgaggactttgggctccacatatgacttgtgcatgggtgttgaaacatttacatgcttcaaacattgggccactcaaaattaattcacgagagatgaatttgggccataaacgttttatgtgtagtttgttttccacataaaaaatagataccaattgggcctgttatctctaagaagcctcaaggttcaaggctttagtagggttccctctttatcaattaaacgtctaccttttatatagcagaggcgccgacaacgttacaaataattaactttcaggtacatttcttcaaagataaaaattgatacgttttggcctttgggttcttcttagttaccccactctcctttaatgcaaaaattaatttttttttttcgcagttggacggttggcgtctccattgccgttgtatgtaactcgagatagcg

SEQ ID NO: 363105 - DNA, 1430 bp, Cannabis indica
tgtaataggttttatttagggcataaaatcccaacagctttaggcgcgtgggcttcatttatgatagtcatcattaaaatttattgccttttgcaggcaacgattcacttcctatccattaatgatccggtgcatttaatcggtgttagaaaagtactctagcatttttaaccaccctgatgagcatttatcccaaccgttggatctgcagaatgcgaatcgattgcgattcccaccgtacgatgacgcctgatcacagctgctttgcacccgttctggtctataaaagccagcctttctctttcatttggttactttcaccacttcaccatttctccacaagaacacctttgagaaaaaatttcagaaaccatagatttcctactgctattcctccgtcattgccaatccacattttactgccgatcaacaccaactccaagttttgaaccttcatgtaagtttcctggatattttgtctttactgttcatttgcatgctagggtagaactttttgggttaagtgtttgatttctaggaaatagctttggctaagtctgctatgtggtgtgtagactctcctttatttgtgtttcgttatttttcttccttctactttgcaatcgatccctttgtcgagagattttttaggatatggagcaatttttgttcccacattctgcattttccattttccatctgctttcgctgcctttgagatttttgcacccgatgtttgctaaggaaaatcttttggggtttccatctttgtcaaacatccggagggggcctctttccagcggttaggggatccccattccctcttttgacactagggtttggtttgggggctaactgctagattttttccttttacagaaccaaaatgtctactcctgcatccagaaccaaatcttctcgcaagggggcggttactctggcccccttggaagaagtaatgaagagccctgtaataccctagatttaagaaatggattagcaaaaccctaactagataattatgtataatcgaggaaattatattattatataatttaatatatgagaatttatatgatttatgctatgttaagaccccgttgctcagccaggggcattttggtaattttgacccgagaagggtaaaatagtgaaactaatttattaacatgcttatgggactatattattatatagtatgtgtgtgttgtctttttcaggtgtgttctgacaggttggcacggtatagtcacaactgggtatttcgggtcgaacccggttcgggcccgaaatgcaattttgggaattaaatattggcattttatttggtattggataatctgaatttttatttgaaaataaatgagtgtgaaatgacaattatgcccttgtatgttaaagtggatgttatttggccctaggggcatttt

SEQ ID NO: 363106 - DNA, 868 bp, Cannabis indica
taaatggggtgaagcacaagaggaggcatttcaactgcttaaacacaagcttactcgcgctgtggttcttgctttgcctaatttttctaacacgtttgaaattgaatgtgatgcttctggtatcggtattggtgttgttcttatgcatgaagggagaccccttacatactttagcgaaaagctaggtggggctgcccttaattagcccacctatgataaagagttgtatgcactggtgcgagctttagaaacatggcaacactatttgtggcccaaagattttttgattcataaagatcacgaatcccttaactatttgaaggggcaacacaagctcaacaggagacatgcacgatgagttgagtacattgagacatttccatatgtcattcggtataaacaaagtaaggagaatgtggttgttgatgccctttctcgtaggtatgccttaatctctactcttgatgctaagttacttggttttgaacacattaaggaactttatcctgttgaccatgactttggggggatctatggtgcttgtgaaaaatctggtgagggtaagttttataggaatgagggtttcttgtttagagagcataggttgtgtgtgcctaattgttctttacgagatttgttagttcgggaatcccgcagaggagggttgatgggacgttttggaattgttaagactttagttgtattacaagaacccttcatttggccccacatgaaaagagatgtggagcgaatttgtggtagatgtgtcacttgtagacaagctaaatcgagggttcagccaaatggtctttacacacccctacctattcctagttcaccatgggttgatatttaaatggattttttg

SEQ ID NO: 363107 - DNA, 560 bp, Cannabis indica
aaacttgtattgacttctctaatctgaataaggcatgctcaaaagacttttttccacttcccaagatcgaccaattagtggatgaaactactgggcacgagcttatgtcatttatggacgcatattctggatataactagatagaaatgtatgtcccagatcaagaacattcaagcttcgtaaccaacatgggactctgttgttataaagtcatgccgttccggcagaagaatgctggggcaacgtatcagtgactagtaaacgaaatattttcaaaccaaatagggtgcaacatggaggtttacgtcgacgatatgttggtgaaatcgataatgagtaaggaccatacctcagacctcgcagaatgttttaaaatgttaaaaaagtacagcatgaagctaaacccaaaaagatgttccttaggtgtctcctcggggaagtttttgggattcatagttaatgcggggggtattgagacaaatcctaaaaaaatcaaggcattaatagacatgccatcatcgacaaatcctaaggagctacaggccctgacaggaagaatg

SEQ ID NO: 363108 - DNA, 763 bp, Cannabis indica
ggtctggtggatgcattttgatttgattgtagcctgaataaacgtccatcaagcttaatatttcataccctgctgttgcatccatgagctgatcgatccttggaagtggaaaatagtctttggggcatgctttgttaaggtctgtgaaatcaatagagactcgccatttcttgttcagcttgggcaccaatacgggattcacgacccaagctgggtagaaagcttcaattataaaattgttgttgcgtagttgtctataaatggttgttcttatactgttttgttagactcgagagctactcactcttatgtgtcgagtagaataattgaaagtttccataaaccatgtgatatttatgcttcggggtttggtaccctgttaccttcaggagaccttatagtatccactaggtggattcagtctttgtcagtcaggactgacgattgtgaattgaccgccaatcaagtagaattgtaactatctgattttgatataatcctaggaaaggattttctatctaagatggggcaacgatcgactggaagtggaagatggtggtgtttgaacccgataatgctaacccagcggtgttcgtggataaagtttaggggacgcgcataccgagaataacacttttaaaagctaaggacctgatgagcagaggttgtctgagattcatagttactccagtggataccagccaacctgtgacatctggacctgggaataaaagattggtgtgcgagttccttgacatctttc

SEQ ID NO: 363109 - DNA, 713 bp, Cannabis indica
ctacagtctccaaccttgccaaaatggtagagtatgctggttcgcgagcctctgaggtgctgggaataaatgctaatggggcaagtggaggatcctttgatggtggagacggtgcaggtggtgtactatttctaaatattcaagctacatctgcctgctcttccaatgttgaggcaagctttctgggcttggctgcgcagagcatcttaagttggttgcccatcattgcccaacactagttcctccaagtcaataaataaaggcccctcaccaccggtgatagtcccacatagcatagagtacactctgaagtgaaaataaaatcaatatcttttttgtgcgtgcgtgttctctctagtttcttccatggcgaagaacgtcgagtgatccgaaagccagcaattcgtgctacgagtgtggaaccaggggcaaagagtgatgaggattttcgacctgagatggaatgtgttgtatctgagatagagcaggtgccagaggagaatgaggaaggaaattctgtgggtttggagacagacgaggctgctgtcgaaggagatacagtgtttcgagatgagctttcctgggcagcaatggtggaaaatgatcatcaagctcaatcgcagagtaaatggcgagattttaccactgggaaaccattggatctggatgttaggttgaaatttgaggagccggtggttaaggatggggtcaag

SEQ ID NO: 363110 - DNA, 692 bp, Cannabis indica
aaaataattaaaaaattcaaataaaaatataaaattattttagaaagaaaattataaattaaattaaaaaaaaatgttatggttacttaaacaaattaaaattttttgataaaaataaagtatactcaagtttgttcccgtaaaatttagtgttcacaaattaaatttttaatatatttttttaatatctaaatgaatcttataataaaaaataaataattttttatatcgcttaattatttttaaaatattaatttattttttaatttttttaatcattcaaaataatttttcttagatctaaattaatttttaagatttagtaaaaatatattgactcctttttttattattattttgaggggtacggtttgatagttgtcaaaatttaagggacaaaattactaattgacaaagacacatcattaattaaacgaaatatgtaaaagttcaagggagattcttaacaataggggtcttcacggattggtttggtctggattttcataaattttgaaccaaaccagtataacgattttttcaatattagaaaccaaaccagatcaaaaaatttctcaaaccaaaccaaaccaaaccattaagaacggtttggtttggttcgaaaccacggtttatgtggaattgataattattcatattttttttagtaattgtactatttttactaagtt

SEQ ID NO: 363111 - DNA, 550 bp, Cannabis indica
tttacaagtactggtaaaaccagttagccgatttatacaagctcacccaaaaatcccatattttgctcaaaactctaccaaatgcaatcaaaccttacagagtacgtaattgggatatacacaatatattccaaccaataaatcacagaaaaacacactaaattaagaaatgccattaaagacctaaacttgagttgcaaggttcaaacttccatagtttcatcacaacacaaccaaaccagctgctagaagctataatcaacccaaatcaaacttagaatttgaatcatacaacaatcaaaccctaacagctcctacttttcaaaaccataaactcaaaccaagtaaaagcttcaaaatacaacaaccatcggttctagggttacctcaacttcagtcccccttgaattccttgctgataacaccagaaatcagccaccaattccctggtttatagctggttcaaagagagagagaaggggaagagaggttctttggattttggtctgttttttccttattttcctttaattttctctaaatgaaaaat

SEQ ID NO: 363112 - DNA, 613 bp, Cannabis indica
gattatgatcttagttagagtaattaaggtaaatttattaaatgattaaatgaagcgtaatttattaattacggaaattattttgaaatatgtgggtatcgtggataccacttttgaattaaaatgttttcgggcccatcgattgtggaaagctccacggagtggttagaaatatcacgacaatataggatggattgatttagaaatattctacactagtttagaactttaagttgtcagtttggcgggattagttaaaatgaccaaaatatccctagggtttaatttgaattttagtgcttgagggggggcaaattggtaatttggtgggattgggttttgtctttggtggccttatgtttaggctgaaatttaatttatttattatatagttagttaattaagtaggaaaacaaaaagaaaaacaaaaacaatttcttaactctctctctcctctctttcggctcaaaggaaaccaggagaaaaccctaaggagctcagcctattttcttcatttctttgttaattcttcaactctagataccatccaaagtttgaggtaagctttcttgttgttcttgagggttttagggttttaaagttaagtttaaag

SEQ ID NO: 363113 - DNA, 508 bp, Cannabis indica
aaaaaacaaagaaattgaaattaagataaaaagacattatcatatcattttaggtaaattgaggcataaatacctcatgttttaaattttatacacttaaatacataatgtttatttttggaggcaaaaatacctaatgttacatttctcttacaccgttactaccacttccgttaactcataaatatggacacgtggagggttcagatattatttttattttatattaaaacttaacattttcaatatcagaaactaaatgcttaatctaatggttgatacttgctgactaggctaagttcactttttgacttttcaaacgtttggaagggcaacctgatggtgacctgctgacatggacctatatttaaaatttatttaataaattaaaaattaaactaataaagattcattcctagattctttttcattccctttccattctttatccattcattctcattccatatttattcctttgtgcattcactttttgacttttcaaacg

SEQ ID NO: 363114 - DNA, 518 bp, Cannabis indica
tttaaattaaaatttctttatataaaatatctatataattattatttttaaatatatataataatattataaaattaataaagaatattctgttagttaataagatattctgttaaagttagcgtaaaaatccaaaaagcatcattagaccaagaattacatatatataaatatatatttctataaaaaaatatatttttttttaatgaaacgtactctaagagatatctaggttgatgttacgtgcaatgcacgcataattagttttttttaattaggttcaattaggtgatgttaagtgcaatatatgtatgtttaattttttttttttaatttaagtaatatatattttttaattttttaaattagggtttggtagattttgtatcttcagaaaaaaatttaaagtctattgctacattggtagtgtcatttggtagtatgattatatatttgtattttaaattttttagttataggtaacgtatctgataatgcatatattataatttacttat

SEQ ID NO: 363115 - DNA, 527 bp, Cannabis indica
gggaaagaaattctaattaaagcggttatccaagctcttccttgttatgtaatgagctattttcgcatcgctgagggtatccttcatgatattggaagcttgattgctcgtttttggtggggatcaacttccaataaacataagatacattggggtaattggcggaagttgtgcaaactaaaggagcaaggaggtatgggattccgagacttagaagatttcaatcaatctcttttggctaaacaagggtggaaaatactaactaatcaagattgtcttcttacacgtgtgttgaaagccctttattttcctaacaaaaccttctttgaggccaaattgggtcattttgggtcctcggtttggaaagggcttctttggggccgtgagcttctagcaaaggggtatagatggtgtgttggagatgggcacaatattcgaattaatgaagatccatggcttcctcaacaaattccttttcagctacgaaccaagattcaaataccacaatgttggaattaattttacca

SEQ ID NO: 363116 - DNA, 709 bp, Cannabis indica
taatttattgatgaagacataaaataatacaattatttgttttaatttgttgctagttatgtgaaaaaaaaatattttttcataaatattaaataatttaatattaaaaagtaatcaatcaaaaataaccaatccaatccacacttttgcagattgcattggatttgagctattgtgcggattgaattagatccaaaaaacaaaaaatctgcacttagtgcgaatcgggtgaactatgagtaaaatagtgcgaattggattcgatgaacacccctacacattactatatctttcgtcaaaagtataccgcaaatttaatctctactagcttgtaattttaggaaggcttttcacgatacaatttattggtaatcttaagaacgtaatcaaatgttgatcatttatgtaaatcaatataaagtcataacttaagtggttaaatttttaaataatcagttcttcttaataaagtatgtatatctttagtatcttaaagatacttcatcactttgtatgaaaaagaaaatggtcttaacttcagttaatctgatactacttaacgatcctgaaacatatgcaatgcaaaatcttattcagacttgttgtcgagcaaatttcgacaacaccagttttgtgcgagtatccaagggttgcttggataccaaaaaatagatatgcgagtactcacttagaatggcgagtactcaaa

SEQ ID NO: 363117 - DNA, 721 bp, Cannabis indica
aaaggcctcttcacactctttgtccactcgaacttcttgttgcctcacagtatatataagaacggtatacacttatcagttgacttcgaaatgaatctgttaagtgccgccattcttcctgtcagggcctctacttccttaggctttgttgggaatggcatgtctattaatgccttaatttttttaggatttgcctcaatacccctcgcgttaactatgaatcccaaaaactttcccgaggagacttgaaaggaacatttttttgggtttagcttcatattatacttttttaatattttaaagcattccgcgaggtctgaggtatgatccttactctttgtcgatttcacctacatatcgtcaacataaacctccatgtttcgccctatctgatttgagaacatttcatttactagtcgctgatacgttgccccaccgttctttagtctgaacggcatgactttataacaatatagtcccatgttggttacgaagcttgtatgttcttgatctgggacatacatttttatctagttatatccagaatatgcatccataaaagatataagctcgtgcccagtagttgcatccactaactggttgatcctgggaagtcgaaaacaatccttggggcatgccttattcatatcaaagaaatcaatacaagttctccaagttctgttaggttttgggacgataacaggattggctatccacaagg

SEQ ID NO: 363118 - DNA, 566 bp, Cannabis indica
tcagcagtacaggcatcgtactggttaagagtgatataatggccaattatactttcgggtgctattgatgttatcatagcgacacgaacatagtgatgatcccacagtgcgatcatagtgctggtagttggtgatatcatggtcagtagcaccaactgttaaaaacgttcttaatcatttggtaagccttgtagataggtgtatgggcccctagacacaagtcgagtatatatgatttcttgtatacttttcttactgagtcttttagctcacagattctacttttatgtgtaggtaaaagaaaggcagatgctgaataggagtgagttccgagctcagatgatgattgtacatgtcaggatggcgcgacttggagtgttcgatttcgggacatcttggatagtattttgtagtcgttgtgcaacttgtatttaaaagtattttgaaaacatttgtaaaagtttaactcgggatcccaattgtgtaaatatatattgatttcatcatctaagccataacgagatggttttgtggaaactctcccactacaatgaggagccgtgatc

SEQ ID NO: 363119 - DNA, 917 bp, Cannabis indica
acttgtcagcagatcaaggctgaacatcagagaccggcagggttgttacagcctttaaccttacctgagtggaagtgggtggaaatcacaatggactttgtggttgggttacctagaaccacaggtttatttgattctatttgggttgtagtagatcgattcatgaagtctgcacattttctaccagttaaaacaacctattcattggatcagttagcagatttgtacgtcaaagaaatagtaagactgcatggtgtgccaaagtctatagtttcgaatagagatccaaagtttagctccaagttttggccgagtttggaacgggctatgggtacgaaattgaaatttagtaccctcagactgatggacagtctgaaaaaacaatatagatactggaagatatgttgcgagcctgtgttatttatttcgagggctcctaaagcaagtacctaccgttgatagggctctcttataataacagttatcagagtacaatagggatggctccctacgaactgttgtatggaagaaagtgtaggtctcccatccattaggatgagacaggggagaagaaatacctaggtccagaatcagtacagcggaccaatgatgcaattgagaagattaaagctcgaatgcttgcctctcagagtaggcaaaagagttatgcagatccgaagcacagaaatgttgagttccaagtaggagatcacgtgtttttacgagtaactccaatgaaggggatcaaacgtttcggaagaagaggcaagttatgccctagatatacaggacctttccagattctcgagaaggttaaacaagtggcgtatcgattagctttgcctccagctgtttcagcagttcataacgtatttcatgtctctatgttgagaaaatacatttcagaccctgctcat

SEQ ID NO: 363120 - DNA, 894 bp, Cannabis indica
aaatttgtattggtttagatttggaataggtggatatgtggttaatggtttgttgtggtaatgtattgaagtagtgatgttgatgagtagttgttgatttagtatatgaaattagtttggcctagaagagagggttgtttgagaaagtagtaaacttttattgatagtttgaaactttagtttttttggtgttggttacaatttgaaacccttgaaggggtatttataattgctcaccccatacactttatggttagaattatttcttctagatccttcttttactagaaagaattatatccaaataaatctaaaagtttctagagtagtacaacataactagtatattctagacttaatcaaaactagaattctcttaagttcttagataatttttctacaagtgtatagaaatttctagactaaattgtgtagaaatgtgtagcaaattctaatactcctccttggtacacatttctgtaactccaatcatgtctcgtaatagctcgaacttgcctcttggtagtacttttgtgaatatgtctgctacctgctcttcagtcttgcagtgcttgagctcaatttctttgtttgcttctgcgtccctgataaaatggtacttgatgcttatatgcttagttctattgtgaaatactagattttttttccattggtatagctgatttgctgtcgcaatagatgtttgtagcttcttcttgtaattctcccatgtcttcaaatattcttttgagccatatagcttggcttgtagtcattgctgctgcaatgtactctgcttctgctgatgattgcgcaagagttgcatgcttctttgatgcccatgaaaatattcctgatccaagttttgaaggcatatcctgacgtgctcttcat

SEQ ID NO: 363121 - DNA, 648 bp, Cannabis indica
atgaaataaaaaataaagtaatatacattactaaaattagtagaaattagatttttactttaatgaatgtaaagatacaatattttctccactaaaaacattgaccggaggtataaccaccacagcaactacctctaccttcggtttatcctaaaaaggagaaaaaaagtgatctttttaggtatatagttttaggtataaaaaatagaacatttagaaacaaaaatgagctaaaatagtaaaaaaaatacactacaagaagtactcgttttgccggcgcattattgcactggcaaaagtacagtatatgtgtcggcaaaaggtgtcagcgaatcttggttggtaaaggagtttttactgccgattaattgcgccgacaaaagttaaacgctggtgtaaacgaatacccttatcctacgtattacatcaatattattttaaaatcattctatcctacgtattacatcaatattattctaaaattattctaattatttaaggattgtcaaaatatatatatataaaaatattcttataaagtaggttaaagaaagcatacttataccaaaaatcatgtacttgacttccaataaagttacttctgataaaatcctaacaaccaagtttaagagaaacgaaaattaaata

SEQ ID NO: 363122 - DNA, 589 bp, Cannabis indica
aagaacataaataatataaataaattgaaattgaacctaaccatattaggattaaaatccataggcctaagatcaaccattgatattcacttagaaagatataacgataagtttatgaaatcttattcaagatcaatattggttcattccaatgtatactccatacatctgatactcataaactttgccaatgcattggaaaagacataacacttatccatggtgtaagtacaccttattgccgattatcatgtcagtctaaatccagtgaactgacaaatcattggaattaaacttttgaacatataatcatgattatatttcactgtgctaatgacactataatcatgaacaaatatatatttatatatattctggacttaatagaatttatacattaaacataatcatgaaataaattgtaaagatcgcttaagattagcactttggattattaaataattagggtttatgcatgagatttaattattattcaaaatatgcatattgtgaaaatttatttaatctagtatatgcttattatgctatttatgtaaatttctcaatttctgtgattgtgtttggaagc

SEQ ID NO: 363123 - DNA, 554 bp, Cannabis indica
tggtctcgcgtatggttttcaactgtgtattgaataattctgaagaggaataatcagttgtggtgaagaagcttctagaagacgagatcaaagtctcagtttcttcttcgtcgtttaattcgttattgtaatttattatttcatcgttgctgaaaattccactctcgaccgatgaagtgctgattctgaataatatattaatatattaatagcaaagcttattggtttattaatgtattaaaatttctttcatttgttattttacatagttttaaataagagtccatggagaagtgacaattatgtttatacacacttaaaataattcatttgcattatgatgaccaagtcatggtactgggccctaactcatctcaggctcatattttagtttcgaccaagtcttctcttaaagtcatagaccaagtcttttttgatctaaccgtttcatgtaagtatggattttctgaattattattatttaaatttaatatttgcaattactttattacaccatctttttttacttgtgtagattggattcttacaattga

SEQ ID NO: 363124 - DNA, 690 bp, Cannabis indica
aggctgatacaatcccctgctgctattttccttgcacaaataggcaccccaaggtaattgaaaggctcctcctgcctagaaaaaccagtcatatccaaaacacgtttaatctctttttcatccattccactgaagtatattgcagattttgcattatttggtgttaaacccgaagacttagagaataatttcagcccttgcatcaagagataaatgcttttaaagtcccctctacaaaatagaagcacatcatccgcaaagctcagatgattgagctgcatttcagcacacctttcatgaaaaccaaagtcctccttcttcccaattttgctcataatcctactaagatactccatccccagaacaaatagtaaaggggacataggatcaccttgtctcaaaccccttcttgcttcaaaaaaaccatgcatagaaccgttaaacatcaaggaaaatttaggagttctaatacatgtggagattaatcttataaatttctctgggaatttcaaatgactcaacatttcttccaggaaatcccaatccattgtgtcataagccttttgaagatcaagcttgatcatgcaattaggcttagaccctttcctacctaattcctaatgagatcttggcatatcatgatgttatgtgctatatatctaccttttataaatccaccctgatttagag

SEQ ID NO: 363125 - DNA, 907 bp, Cannabis indica
caaaaagccaacacttggctagaaaagacaacagagactactacaaacaagatgaaagctaaaaagttcctatccgaccagatgtttgaaaaaggacttgggggcaaatgttatcctaaattttgttaacttgatgtagcatgtccatgtaagccaaatacaaagagtacaggtggaatacagccttgccagtagcaagacaaggcctccatgcaagatatagcaaaactgtcaagcagcaaccaaatggagtgaagcgagccctcaaggagttgtacaaacatccttggccggccaagagaagcctataggccagccagagtgagcatataggccagctaagatctgagcacaagctggccagccaaaaagtgacttctggaccaagggaacctgacctctacaagaaaataatgtacaaagttttcctcaacttacaaaaggctagcctccatatccaaaggctcgcctcctcttggtaaagccataatggcctgtagggtcctcgcaagcacatgacctaccaagtcctagtaggaccatagccgacaaggattgacctggctggaccatggccagcgaaacctctcctataggtctatgggcagctaggattaacctgacacgactctttgtacaacccaaaacatggacaacaagctacctatgaattgggcccgtaatgacccaacagactgatggaaaatatctactttcaaggggtagtttagtcttttgtattcaaccaatttaatatgtaaatatctaagggtttcattgtaaattagggtcttaagcttcctatataaagaccttaactctaacctagaaaggctaagtcactaagcctaatccttagcctccaatttattctaggtcagaaaccctagcctctctttctctttct

SEQ ID NO: 363126 - DNA, 849 bp, Cannabis indica
aaatcaacctaaacctggaatgagaagaccacaaggcagacctcgtggctcacaaaccaggagacaagaaaaggcctgggaagaacgacccggggaaaatgagacacccccttagaatcaggatgaacagccaaatgggagacaacatgaaactgatgaatgagaaatccctcatgaaaatgaggaggatcttgggactcagccaagagaacggagatcacttgctagagatcaccaacgttcttcccaaatccattgagcgaggactcgtacatactctgacggggaaatacgacaaactgctctcgagaggagagaactgagcgtgacgaagcaagtgtgacttcgaggcgatcaagtacccatagtcgatcaacccgaagaggagaaagtactcaacgagctaatgaccgagaaagtatgggaactagtaaatctgcgagccactcaaagacaaggtcaatgagtaagacgcgatctatgagtaagacaagatctgccagcaattactcccagccggacctgcaagagcacttgaatcggaagaaacctgaacttcgccaaaaactggtccaaagcaagaggatccaatccaattacggataaacgagctggaggacaagttcaggagtatcaagtgggggaattagggaaactatctggatacgactttgacgaggagcttgagccgtatcacctagttattatgaataccccttttccttcgggattcaaaaacccacatgtctcgtcctatgacggaaccatagatccagtctcgcatttgaataactttaacacgataatgtgagcgagtaatgtgacgaacaatttacgctgtattttctt

SEQ ID NO: 363127 - DNA, 659 bp, Cannabis indica
aagtctacccccaagcaaagcaggtcaggatacttttacttctcttatccagacttcaagtgggtaacgagcaccgtggacagggatgtcagcaagattgagggttttgttgatgagtactacttcgtggaaggcatggattccacctatactcgattttaatagatcccgatatattaccgtccacccctcacattggcacttagagacaggacttagaggattgtccatctgtcggatgctgctcggaacatcactttgttgacctcggaggacaactttgtggagtacaagctttattcggtagactttataccccagcctgtgaaggggagaaagaagaagtccagtgttgaccgggctaaaggagctgagcaagagaaggagctcattcaacttaagcgtgaggctaagttgaagggtggggcaggagccaagcagtatgctcaagaatattatgggcaggagaaaaaggctcaagaatattcagagcaggagaggcccctcaagagaagaaaaccctcccgaccgggccgaggcccattgaacatactatctggatcagagagcctgatttacctgctcgaccatccacccctgtagaaggaaaggggaaagccgtcctggaggagcaggaagattcctcggatgatgatgcc

SEQ ID NO: 363128 - DNA, 784 bp, Cannabis indica
aaatagatagagatgtatcggtacatccttttaaagggtatattatagaattttcctaaaagttataagataatttacaatacacccgcttaaaaattattttagatactaaaacggatagagatgtatcggtatactccttttaatgaggtgcattatagaacttttcttaatctttctttttaatatgaatcattgtgataatgaataatgttttgacagctccattatagatagaaaaataaattgaacaaaagttattcagtagttattaaaatataggaaaattttatgggtgggataagggttgccaaaatgttcagttccgtaaaatttgttgagaatctacgacatgtcgtttgaaagtgaataaaaagaacaattaattttgtcgtttaggatttattctccgaactctttttacataatctttcccataaaacgactatattgataaaagccataattttgtataaattatgtaaaaactcataaaatatttagtgcatgtttgacatcataactaaaaaactattttttgtttttaaaaacagaaaattattttttgaaaacaatttagcttgtttggccttgtttttttaaaacagttttcagaaaacaaagttacaaaaaacaaaaattttgaaaacaacaaaatattgttttctgttttaaaaaccaattcacttttagtcaatattgtttttaaaaaacactaaccaaacatgacttgtttttaaaaacttcaaaaactttttttattttcatttctaaaaacaatttt

SEQ ID NO: 363129 - DNA, 858 bp, Cannabis indica
ctctctctctctctctcttcagaccacaaaagaagaacccataaattcaattaccgacgtaactctagcgaccactctccgaccccatgcactggaccattcaaatccctaggccccgacaatctcaatccccaagcggtgctgcccctttcgccacggttagcccgggatcgcaagtcaaagtttggaggtttaaactttgaacggattttcaagccacctctagtgtctgtttgacatgttgtcttcaccactagactcagctcctcgaggagaacaatctacactaagctatttttcccaacccgatactttttcagcaacatttttgtatctccgcccctttccagcaacttttttggcgatgtcatgtaccgtttggacaaatggttgtcatgggtgtggtctactcgttgaggtagtcattttgatatatactacccctatttttgatttcattttaagtacaccgcttcctacccctaccgatagttaatgtgcaccacttaggtgaggttttaaactccaaactttaaatataggcatattatatgtcgttggactcagttttgaatgtagaatgcaatgatgatagttatttagccatttgatggtataagtgagagtgatatctaagattggactaaacaattggagctcgggacttgagagcttaggatcgtctttttgaaaaaattttaacgacttgggagaggtagggactcaacttgattattggagttcactttaaatgtgttgaataacattagacacatttcaatttttatgatttacaaattgtaaaaaaaaaattgaaaacttaatctgcatatttttttggtattgttttggggcact

SEQ ID NO: 363130 - DNA, 729 bp, Cannabis indica
tcactcaagtacctacgcaacacaccaacaacaacaacaatatgagggcgtgtgcatacttgagcatacataaggctaccaaccagtgacgcataaggaacaactttcatttcatctctctctttatcattttgtggacattaggcttttgagaacttgtcacccttcactatcagtgccttcccagaagaacatgaacgcatgttgaatcttttcaagatctgatcaatgtaagttttctgagacaaacgaagaataccattggccctatcttgaaggatttgaatcccaagcacataagaagcattgccaaggtctttcatgtcaaaatggtcaaacaagagttgttttgtctcagccaacaggtcagaattattagatgcaagaaggatgtcatcaacacacagtaccaagaaaatgaaactgctcccactgaccttcatgtatatacattgatccaccatgttctcccactgacaatcatatcaaacttgagataccactgccttgatgcttgtttaagcccatatatctacttcttgagtttgcaaaccatgtgttcttcgccagacttctcaaaacctacaggttgagtcatgtacatcctcagataggtcaccattcaagaaggcagtcattacatccatttgtttgagttctagaacaaaatgggcaattatagccataatgattcgcagcgaatctttggtggaaacaggtgaaaaagtt

SEQ ID NO: 363131 - DNA, 699 bp, Cannabis indica
aaatattcattagctatatcagatagcctttcatagaattcagttagggtttcattatcagacatcctaagctcatcaaatttagtttgaagcataataaatctagagtgcttaacatcagatgttccttcaaactgagtttgaaggatctgccaagcttccttagcagattcacaagatgatataagtttaatataaccttcacctacaccattaaaaatagcatgcaatgctttactattgtaggcagaaagtttatcatcttcaatagaccattccagtttagattttattttagaattacctttgaaatctgtctcaactagagaagaccaacctgatagagccatcctctaagctttctcatcttgagatttgatgaaggccctcattctaacttttcaataaggataattagaatcattaagcaaaggtggtctagaaatcaaacttccttctgcaaaaaatgacattttacacaaaatcacacaaaatcattaaaaggaccacactaagagtttagtgtcccgttctgataccaattgaaaaactgaatttttgcaaatgtcaataatatatacaaaaatataaaacggtgtacgtctgcagaagcaaaatgtaattctattactatagagaccaattttgcagcgacaaaacagaacagacgtaatataaaaaataattacaaaaaattaa

SEQ ID NO: 363132 - DNA, 687 bp, Cannabis indica
cttgaagcagtcggggccctcgccttcctcctcgagttgattaggccgctgagtccagcccatttcaccaagattatctcttctttttttttcttttattacagctatttttcttttcttcaagacaatttttattatatagttgctttattttctaaggagaaatgattattatggcctgtcctcgggccctttgtattattatatttacttttttttacatgccctttgggccaggatattttatatatgatctctttgcatattctctttgacattgtttttacttttggcctgttttacatctatccgtgtggtatgccttagtaccccctgagtggcatgaaaactttgtttttaaggcactcagttttatttagaatttggaggttgcatacattttgacggtacaaattctttaaacaaagcctaagttaacatatttggactattggtagtacttccggagatgatcagcgttccaggcccttggcacaatggttccatccatccttttttagcttatagattccagagccgatctcatcctcgatttcatatggcccttcccaatttggcctaagtaccccccactccgggttcttgagtggctgggaagactcttcttaagaccatatccccaatagtgaattttctgtttttaactttggagttaaaatatttagt

SEQ ID NO: 363133 - DNA, 764 bp, Cannabis indica
caggacatttgggtcaatttctatcgcttctaattcttccaccggcccaacatttttgtttggttccctaagtcggggatccacatctttgtccccgccttgggcagttccctatttggtagtgcttttcccttgtcagtactctgacctgaggattcttcctttttggccttgattaggacaaggttgtaacattctcgtgcaacttgttggtttccttttaggcatcctactccattctttgttggaaacttgatgcacgaatggaaaatcgatgtaacatcttttaaattatataaggctggtgggcctaacatgacattaaaggctgatggaacatcaagtaccaagaattgtgccattacagttatgctcctcgaagcttgtccaacagtgagctgtaggcaaattcaccgtaaaagtgcaacactctgaccgaagaatccatatactggctggagacaggggattagatctttgagttggagtcccatcttctcgtatggtgttttgaacaaaatgtttgctgaggcttcattgtttatcatagtctgggccattgaaggctatagtgttgggttttgtaccctaaataaaacccattacaatctgattagttatcaatttagaattttgaagtgatttttatgtgaacatgtatttttcatgtttatggtttaatatatatacacaaaatcagttaagtccagaacatatattcattaacaattacagtattgtcaatacagtggaatgtgattgtg

SEQ ID NO: 363134 - DNA, 481 bp, Cannabis indica
tgacattattatggtaaggtatgatacagcgacaatgttgttgaatatatagacataccttactccatagcaatggtagggctaaatgtgcccaggttattgtagggttagttaagcccatgttgtgtatggagtggctatgacacgccacattatggtaaagacatgatatgattgaaataattattatatgttattgctatgattgtgctatgagtataatgtcagggttgtgatccctacatatatgtaatggtttcgtttagtaaaaatatatggtatatgatatagctttcaatatctagagttatttatgttaaaatgatgggctaaggtatataatattgttaagactggatacattaatattataaagaatcgtattaatgtgaattttaagatatgtttagtgtattgaatgctattgtgtgttaagcatttctttactgggctttttcctcacccccttactttcccccta

SEQ ID NO: 363135 - DNA, 1267 bp, Cannabis indica
gaacttggtggccacgtatagggcctaaatggataactttccttggcgcaatgacctctagcatccaatgcacactcgaaaattatatagggttataagtaagatagtacaaaaatagtttcaagttataatatagaaataaacaattagcactaaaaaattaagtagtgtttactcgatattccaagaaataaagaatatttggtggtagttattaatcaatgataaccaagtagccaatcgtcttgccgcattgtcaaaagactaactcttctcttcatcatttttaccattcactgcgagaggctgtgggtcgtaaaacttgaaattttttctcaaatcgtttatggtctcccagatgtgcctacattaaattgttaagtattagtatcttataataatttcactagaatttgatatataaggttaattagattaaggaagagtatacatcattccaaacaacatccctgattgccgatgaagtcacaaaatgcaacctgctgtaaattctctccagataacgtgatctaggtacgtggtgttatgaatccattaggcacaagaattgtgattatatcatgtttatctttgaggttcagaaattcaacaaccatccatttaagtgatttagggatcaagtccatgacctttcacgagaataattcatcttcttcatcatgaccgccttgtggagaaagcatgggagctttcccctttgaagcatcacgtcttgaggcggttgagtgagtggaccctatacaaaacacaccataatatatcaaatttgatcttaattctactaaaatttctgcagcataacggctgtaattgaatgccccaaaaatttttaaacatgcatgtataatgacaagtaacacagatataacagttgcttattcatccatcccactgcagcacatatattcgcagaaccaacttcactatggttgaatattgaagatattcaagctccactaatcattaattatatataatttataacaaaagttacctcgggtggtgcaattaggtatttaggccaaggaaggaacatgtttgtgttaggaatattttaccaggaactagatttactaacaagtatgttgattaacagcctaactatgaattctctaaaacaatgacataaagacataagggtttaagaaaaccttaacattgattgcagcggaaaataaagaacgccttcgttcaagatctctagcccttgatcctttctgtagcagcgcattatcaagatctgaac

SEQ ID NO: 363136 - DNA, 590 bp, Cannabis indica
ctaacaacaatgaaaaaaaataaaaaaataaagatcggtttaaagaggttaactcgatcaaactgacgaaaatcattggacgggttacaattagatatttgcaacccggcatttatattgggttggtaaaaatactttataacccgaccaaatcgaccgatgtacacccctattggactgtcgcgtccccgctttaagtctccattaggtccttacacccacggaatgatagctcttatacacgagtacgtcactctggcttcttcctggaatgactactgatcctataaaccaacacgagtgattctagtgtgctttgtccttacgcaggcttcttaggaaaacttttcaggaagtcacccattttgaaattatcctagatcaaggacacataactatggatttctttcattgaaggcttcacggttttgcgtgaggggtgtgtggattcggctatggccgaattggtaggagttaaggaggttttgagttggataaagaggaaacaatggggatcggttgtgcttgaaaccgattccttggttgttgttcaggcaatccaaagtatggtgaacattccttctcctttt

SEQ ID NO: 363137 - DNA, 1017 bp, Cannabis indica
gggtgtcgtccaccgagtcagtttctcccttctgcctcttcttcctcctcgcctgattcacgagctggggccgtccagtcgtcatccatctcctcgacctcgacgtcaggggcatgcctggagtgaataagataatcgcgggctgacaccgtagactcgctgtctcgaatatcaatggcccctggttcagcgagctcctgcaccattttctcgatgtccgcagaagacatcggacctaattctatacctacagtaggtgcgatctcctcttctgagatcgaagtcgggataaagctatcttcctcctggtcctcgtctccgtcgaatgcattgcctcccgagccgagcagctgactatccgacaggtcgctcatctgaaatatagaagatcttttcagcgtggtgaatgtgtgaaaacaaaataagtgatctcacccacatataaactataaagttgcatttaatagaatggtccgcattctcgcgaatactcaccaccccatcaatatgcaagaagagtgaatactaactatgcgaatagaaaagcatcccaataaatggttaggagtgtcctggtaacctcagcgacatgcgtcttccagcatgatcctgaggtgacgaggagacacccaccatttcaaggagtctaactaaagtcacaactcgtgaataagtcacgcatcctgggctaagcgatatacctctagaaacggctgggagaaactcagtgactcaaggggcatgcgttctcaagcatgaccctgaagttactgagatattcccaccgtttcgagaatatccaccaaccaaagagtacgctcattagaacattaacgcatgtcacaaatggctgggtgtatcacagtatctcaagggacatataaccacatatatgaccattagaatactgtgacacatccaccatttgaaagactcagttaatgttctcgcaaccaaattcacagaatacaaaatcctaaagatctagacgacaatcagaagtaattaagtctcgca

SEQ ID NO: 363138 - DNA, 606 bp, Cannabis indica
gtttgggttcgggatcgacactggggtgcggttctaggtccggaccctagttctgtgtccctagtctggttccatgtttgggtctgagttcaggtttgggttcgggtcctgagtctaggtttgggttcggatccgggtccggctcccaattcgggtctatgtctgatttggagtccgggacctggtccggttacggttctagatctaggtccaattttagttatggttcccagctgtaggtaaattaatatactaattactttgcatacaagatgtatataccaaatatattagcaaaaaaaactattatagtagtacatatgtgtatattatcagttgccttggtgtgttttggactttgtatattatattcttcatgtactaaagtacttttttacagtattggtatttatttatttatctttctttttttatattgtttccgttttacttaatgttgtaactttttatcactaactttggtttacactttgttatgtaggtttattatcttagaattaacattttaattatgacaatacctttgtgtaatcaagttactgtataactttatgtattaatgtaaagtttagctggttaattttt

SEQ ID NO: 363139 - DNA, 679 bp, Cannabis indica
tataaaaattataaaataaaatacaatttaaatatattttttaattagacccacaatgtatcttaattgaaaaatgaacccctatctttttaaatatgtcctttcttagtaaaattcacaaataagccataatcttactgaaaatcctaattgattaaataaatcaattaattgaaactacaaaataatattatctcagttagtgtgggaaccatgtgcctatgtaaccaagctcctaataagtatatttgaaatttaccaagtaaattttctagcttattaattcctcctgactctactatagattcagaattacaattctgattacatagaacgctctatatataaaatatagatacactatgaattatccattgtgataatctaaataatcaatgatcctctatagatggtttacattgagtatggataaattaatcgttttacccatcaatgtattttatccttaaaacacttagctacttgtaaatgatacttcgataaactaatataattactaaaataagcactatatcatttattgcgttaagccaattaagttcaaaggaaaccatcattttacttctaaatagttgtaaaagctatagattccatatctatgattaacgctcccactcaattgttgtaatatccagtttattttttattattattatta

SEQ ID NO: 363140 - DNA, 706 bp, Cannabis indica
gtagtattttcttaaatgtttcccattccaataccgtggtactagaacaagttgcattttttcatcatacttacctaatttgtatgctccggattcgagaacttcgaccactcgatatggtccctcccaattaggtatgagtacacctaccgtactgtctttggtgtttagaaatacccttcttaggaccatatctcctagaaagaatttccaagccttcacttgtttgttgaaataccgagctactttttattgatgggctattaactttaagtttgctattgttcacttctcttcgatttcattaagggattcgtccaggagtacgtgattggtatcttggttgtacgttaatctcttgtgggatggtggttcgagttctacaggcaacatagcttcatacccatacgccataacaaatggagtctatccggttgccattttctcagttgtctgatatgaccatagaacttcaggaagttcttccagccaatttcatttggcatcttgaagttttttctttagtgtatccttcaaggtcttgttgactgcttcaacttgaccattaaattgaggatgtgcaactgcggagaaacttttgatgataccatggttcacacaaaagtcagtgaaggattggctgttgatctagttgccgttatctgaaactattttgtacgacaatctgaaccgacagattatgttc

SEQ ID NO: 363141 - DNA, 749 bp, Cannabis indica
gtatactgctacctggtcatgccttttgggctaaagaacggtggtgcaacttatcagagaatggtgaatcggatgtttaaaggccttctgggacagaatatggaggtatacgtggacgacatgttggtcaagtcgaaggcatacacaagccatgcagatgacctagaagaatgcttcgaagtggtctggagatacggaatgaaacttaacccaaagaagtgcacttttggggtcaaatcgggaaagtttttgggcttcattgtcagtcagcgggagatagaggcaaaacccagataaaatccaagctctcctaagcatgccttcccccaagaaacacaaagatgtgtagagcttaaccaggaaggttgctgccctaagccattttatctcccgatccacagacaagtgcattcccttcttcaacatcttgaagaaatgcaaaatatttgaatggtctgacgagtgcgaggaggcattcaaaaaactaaaggagcacatggctaaacccccaatcctatcggaacccgttctcggagaggacttgttcctattcttggctgtctccgagaatgcggttagcgcggccttagtacgggaagataaaaaaaatttagcatcccatgtactatgtcagaaggcgcatgataggggcgcagacacgatactcgatgatcgagaaactagttttttgcctcctaatggccttgagaaagcggagaccttacttccaagctcacccaatcaaagtg

SEQ ID NO: 363142 - DNA, 705 bp, Cannabis indica
gtatgcctaatatctttatggaacttacagtatctggttggatcctttttacatctcgcatgcctcatgggctcaggtttactaaatgcaagcttgtgctcatgcgcgaggtagatattattctgagttccattaagcttggtatatgtagtgtaaactggcacgtacttgttgtgcttcttttgtttcttgctagcttgcattatagtgttcaaatgcgagactggatcagtggtttcgtcatatgacaagacgtgagggtttttaagtccctggggaaaaggagtattcatgatatctagatggtacgacttgagttcttcatctgaatcataccccttttttttccttgctccttgacttgatacctcctgaacctattctccaactcatctattcgcaattggatcagatcccctcgctttggaccaagttgttggggaagatcaggtatttctgggttcaagtgttctcgtagatcaggttgggtatgatggctggcggaattcgtcctactcatagactgtgtccttcttatggacctcttccctaagtgacttgcagccttactcgtacctatgcttcctcgatcattgttgcgacgattactttctcctcctcgtgctgatcgactgtgggttcttgtgtgccgcgaggtaacactcgtctcttcacaccttgttcttcctgttgggttttgtgccc

SEQ ID NO: 363143 - DNA, 591 bp, Cannabis indica
tttagtttttattgtatttattttatttaactgggttttgtgtgtgggtttttatcttagttactttacgtaaccttagtttttttttctacaaatttttaactatttgatgtatataactggtttttttatattattatttttagttattgtgtgttatttattttttttatggagctggttcttttcatatttatgcctcagtattttttcaaattgatccttaaccttttaaaaaaaaattataatcggttttatgaggtattatgtgttaagaggttttttagtgtagaactagtttatttttaatttatgtttcagtgtttttgtttgagttattttattaaactggtttttgtgtgtgagtttttatcttagttgctttacaaaaccagtttttttgtcccaaatttttaactagtggataaatataaccagttctattttagttataaccagtttgatttatttcgtgttatttatttttattcattataacaatgttatataactggttctactttaattataactgatttgagttattttatgttatttatatgtatttgttatgttacagaaccggttata

SEQ ID NO: 363144 - DNA, 640 bp, Cannabis indica
atttatttaagtcggatcaaggtccaaatatgagactgtggttgtagtctttgtctaggattggggctgaggatggaggccgagtcccaaggaccaaattggggtcggaatccaaaatattaattaagaaaaaaaaatctatttaaaaatttttcaaaagtgatttttttttgtttttaaaatttttaatattttgattcccaattaaaaaattaaaaagtgaactaaatatagttttacataaaaatattgcatataatataattcaatacactataatacaatacaatatgacctaagcgttacaaacgaacccatataattatctttgaacaatttaataaacatgtataccttttattattatataatattttaaagttaattataggttataaattaaattgattgatgaataaatcattctatttatttatttatttattgcaatgaatgattttattgaaaaaaaaatgttatacactttaaagtctaagtgcatgtttggcaataactaaaaactgttttttgtttttaaaacagaaaattgtttttaaaaacaatttgacttgtttggccttgtttttaaaacagttttcaaaaaacaaagttacaaaaacaagaattttgaaacaacaaa

SEQ ID NO: 363145 - DNA, 810 bp, Cannabis indica
aatataatatttcaaataaaaagataaggctatctatttaatttaaaatatgccgaatatcaaaatatctaatcttataatcacataatataaatattaaaaaattaacaaaattttaaaatctaacaataattttaaaaattaaaataatcaatttttaaatttaaacctcaaaatattaaaaattaatattagggtttgaaattggaaaaaattcaaaatttgttgtgttgctgcccagaaaggctgcacctgcagcccaagacaaactgcatgcaaccattacgcgcgcgagggagaaggatttatagccaccttgaccaagaaatctcggtcagctgcatacactccctcggtgcttgtctgaagggtttgcacacaaagccttcacacaggaattgtctaagcttcgcgtgcggacgagccttcttgttcgagcacctacacgcgcatggtgttactcgatgacacctaatggacccgaaacttcaaatcaccataactctctagctttttattggaattgagttccgtaaaaacaaaagttgcttaatttttaacaaggaatccaaataaattatttttagatcaaaattaaaattattttcatggaaaaatttcgtaaattacttacattcatcaaataacacataaaccaacatgaatacattcaaatcaacacaattaacatatttatccttttaaatccatattacatgaaagtaaattattaccatggctctgaggccagttgttgggaatattttactaggatatagatttactaacaagtatgttgaattaacatcc

SEQ ID NO: 363146 - DNA, 595 bp, Cannabis indica
tccaagtccaagtcctagttccagtcctggtcaacttccagttttggttccgatttttggtcacacgatacgggttcgagtccacttttgggtttgggactgggtttaggtctgggtgtcggttcgggtccttctcagggttcgggtccagggctgggtcttaaatccaaacactgactacaggttttgtccaagcccttggtccagatccggatcccaaaatcccggtcacgagctgagtccgaggatcaagttcgcatctgtgtcgggtactaggtcgggtcggagttcgagtcgttttctgagtttgggttcgtgtcacgatttcagtctaggtccagatcaggctttgggtgtgggtttgcgtcctctgtcttggtctaggttgggtccgagtccctagttccattcccgatttgagggtggaagcagttcgaggtctaagtccttggttctgatactggtgtgggttcgagtttgggtccaggtccgggtcttgctttgggtatgattctaggtgtgggtttgagttcgagtctgagtctgtgtccaagtttgtgtcccgctctggaccccgatctgggtctaggctcgg

SEQ ID NO: 363147 - DNA, 524 bp, Cannabis indica
agaagggtatttctaaacaccaaagacagtacgacatgtgtactcggaactaactgggaaggaccatatcaggtgttcgaagttctcaaatttggagcatacaaattaggtaaatatgatgaaaaaatgcaacttattctagtaccacggtattggaatggggaacatttaagaaaatacaaccaataaggtaccaggtcagacgacgatactaagtactgaaagaacatttacttttaaggggcctgctgggcggactacgctcaaaggtttcgacaaaaatgaaaaagtactcaggtcgcatgaccaccatttaaagtataatttctaatttctgcagtttgttttatttcatgttaagctaaaagatcagattagatcaaatagctctgatgtaagtgattacggtaacaaacacattttcgatcaataaatgaataaagatgtttatttcaaaattcaaattgagtcgaaattactaacatgttgctaatttaccatccagtgcgtacaaaaggtttggt

SEQ ID NO: 363148 - DNA, 619 bp, Cannabis indica
aagaagctgcacgactcctatccaaagtacacgacgaattctgtggaaatcatgccgccagacaaagcttatcaaagaaaattctaagacaaggttacttctggccgacaatgattgaagattcaaaagcctatgttaagaagtgtgacaaatgccagatattttcaaagataccaagagctccacccaacgagttaacacagatgcaaagtccgtggccctttgccatttgggggattaacctgatcagacaattacctaaaggtaaaggtggaatgcagtatgcagtggtagccgttgattactttactaagtggactgaggccgaaccactcgcaaccatcacattaaagaaagttcaagactttattgtgaacaagataatatgtcggttcggactaccgtacaaaatagtctcagataatggcaagaatttcgacagccaatcctctactgatgtcagtgcaaaccatggtatcatcaaaaatttctccgcagtggcgcatcctcaggaaaacggtcaaattgaggcagtcaacaaaaccttgaaggatacactaaagaaaaaacttgaagatgccaaaggaaactggccagaagagcttcctgaagtcctatg

SEQ ID NO: 363149 - DNA, 545 bp, Cannabis indica
tctggcttttgcaatatttggcgtaatggttggtcaatgtacacccgaacaggatgagcttgaaaataaggccttaactttcttgttgcttgaataaggcagtaagcgagtttctctatcaatgggtatcgactttcggcctcaatgagtcttttactgatgtaatagacttggtgttgtatgctgttctcttctctgattagcatggcactcacagcatggtccgtgacaactaagtatattccaagttcttctccgtccagaggttttgagagtacgagaggttttgcaagttgtgtttttacctcttggaaagctttttcacattcctccgtccactcgaattgcttgtttcctcgcaggatattgaagaatgggacactataaagaccacttagcataaatttggaaattagcagataattagggtttaataattgaaattatttattaattttaaattattaatttatggtgatttatttgaactcaggatgcattttatatgtcatacatagaaatttcataagttttgcatactcagt

SEQ ID NO: 363150 - DNA, 702 bp, Cannabis indica
ttcatatcatctatgtatttgtgggatggtagttaagtacattatatcaagtaccgtgtacattacttgtttttgcgtgatgtcacgtaccgagtacaaaatttcacgtaccaagtacgttcatttacgtttcgtagtatattgtttagaaaaatttgttttaagtcatgaaattatttgttgttgtacattgagttttaagttggtgtaatttttttattttaattatttcgtatattaaaaattaccacaaaaatatattttttcaccttataagattgagtttttttttcctaggcataatttagttgttcgtcaataataattttgagatttggtgaagatgagaaaattaccttaaacacgccaaacataacaagaagtatataaatctagaaattttgaagcaataaatagagtcacaaacgttaaagaagtacataaatctagaatttttgaagcaataattagagtcataaacgttaaaacaacaatggctaaaagtagctagttataagaatgaccatagtatgactcttgtgtagaggaaggcggttccgggaaatacgcgttggaagtggtcgattgaatgagtcagatgttggttgattgtttggaggttgttgcccctgagatccagtgttatgttgcgatttgggcaccgtcaataatcatggtctgatgagcgacaaatgcgacaat

SEQ ID NO: 363151 - DNA, 618 bp, Cannabis indica
caacagtggtttttgcgctaaagatttggcggcattacctatatggcgagaaatgtgagaatatacactgatcataagagtttaaaacacttctttacccataaagacctgaatatgagacagaggcattggctagagttggtgaaggattatgattgtgagatcctttatcaccctggtaaggccaacgtggttgttgatgccttaagtagaaagggttagagtcagttaaatacggtgaagcaaatctccgagcagctagcaaatgagatgactcgagctaagattaagttggttgtagggtaatttagctaatattaccctgcaatctactcttttggagcaaatcaaagaagcacaagtgcaagattcagaattagtaaaaactcgagttagggtttcggctgggaaggctagtgatttctcagtagatgaaacgggaatactgagattcgggaatagagtttgtatgcccatggatgagaacatcaagaaagagatcatggatgagtctcacacgactccttattcagttcgtccgggtcgacaaagatgtaccaagaactgaaagccatgttctggtggccaggcatgaagaatgacatcgctgagtatgtt

SEQ ID NO: 363152 - DNA, 1435 bp, Cannabis indica
tttacagggcgaccaccctgagctctgacacggccacgaccgcgaccacggggattctggggattttggcttccctgaccgcctccggtctcaaccatattaccctgacttcttgtatttcgctgggcgtccattttataggacttagcctgcgaacccataagccgacaggttagacagtgatcaaaaacttaataccactcttatggacttaaaggcaacacacttaaaataaatatttatattctaatatgcttcctagcatgctttaataatcatttaaaaatactaaacaagtatgggcttactgaactgtgaaccaagctttctctgatgaagattgtacatgtcttggcaagcttcggtagacaaacctggcggctctgatacagaaattgtaaccccctaatgctaaggcacgctacagtactttttcaactacggtgcaatctttgctaatcaaagagttttcttgaaaaacgtgtcaaattaaaacttttatattaaatatttaactttatgttatatcaaaatatttacaagtgtcgagatcccgatctcaaacttttaaaacataatattccaaaatacatattattcaggtcacacagcgactacaaaatacaattcccagatgtcccgagaccgaacactttaggtcgcgctgcttcgacatgtacaatctcatcctagctcaggttcactcctgttcagctttcgcctttccttgacctacacatggaagcagaactgtgagtcgacagactcactaagaaaagcatataacatatcatataattttcgacttgtatttaggcgcccatacacctatttacaaggctcaacagattagtaagaacgttccatactaggttatagccgctataccacatacactacgtacctcactgtacgagtgtggtacggtttgtttcataccctgagtaccactgagtgatataccacacacactcagtactttctcatacttgtgctggtatcactgtaatgtactctcaaataacatttactatatcaatgcactctatacctttactgttcaagtgatggtagtgcaactaacactttaagcatgcatatacacataacatatacatacactcagatattgatatcaaacattatatacagttcttaccttctttctagattcaagtgtgctggccgacctgaacggaaagtctcgtgctagatgatgccctaatcacattatgaaaccgggtaagttacatgatcaaaaccctaatcccggaaaacctgaatccataaccctaggttctgttatactccctagaggttactcaaactctggaatcagggaaacacccaaccacgacactaaaatggacgaaaattatgaaaatgaggtgtttggggatcctgctaaaaccgggggtctggtaaaactggctag

SEQ ID NO: 363153 - DNA, 889 bp, Cannabis indica
aacagttagcagacatatcattcaatgttcaaattgtgaacaaaagggaaattttaaatcaaaatgtcctagatttctaaacactaagaacaatggtaatgctttagtttttgaatcatgtgttttagaaaatgacaaatccatttggattgttgattttggatctactaaccatgtttgttgttcattgcaattgcttgaaaactggaattattcaaaatccagtgagttgaaacttaaagttggtaatggcaaaattgtatcggttagagctagaggaaaagcaaaactcaagtttcagaatagaattttgaatttagacaatgttgtgtcttttccaaatttcagtagaaacttgatttctgtttcatgtttatagttgccacaatataaattaacttttttgagttctggttttgtcatttcttgaaatgacattcaaatttgtgttgcatctatggaacaaggactttatatctatgacacttacgtcttggtcatataggctatgatagacttcacaggttaaccaaaggtggtgcattgaaaaatatcgccttaggtgaattaccagtttgtgaatcttgcctagaaggcaaaattaacaaaacattttttctctacaaagggagagcatgcgaaagaactactaggcatagtgcattcatatctttgtggaccactaaatgtcaaagctaaaggtcgttatgagtattttgtcacttttattgatgattactctagatatggtcatatttaccttatggataagaaatctgaaacgtttgagaagttttaggaatttctaacattggctcaaaatcaattgggtaaaactttaaagatcttacgaacggatatgggtggagaatatatggatatgcagttc

SEQ ID NO: 363154 - DNA, 679 bp, Cannabis indica
aaaattatagtctatttgcattttatttcatcaatattttggattttgaattccaccttgaacctagtcctagccccagccccaaacttggaccctggtcccagacccggactcggaccaagaccccaacccaagacccaaacataactaaaataaaaacaaaaaacaaaaataaaaatgaaaataaaatttacataatgcaattttgttttttcttttaaaatttaaaattaaaaaaataaaagtagttacataatacatttttgatttttaaaaaataaaaacaaaattctactttcacttttgtaaataaaatggccacatttctataaatgtaaaagttcaaaaaaaaaatttaacaaaccgtacatttcagaagacaaaattactaattattctatttgaaatattacaattattcattgcagtcatgacagtggtcttggcagggtaacctaattggatggaggtacattggaagtagtattaaaacactgaatatttgaatcgctgatagagaatttgatgaagtagcaacaggagtgaggtcggacaaaggctgagggagacaatggtcgaatttgtagagaccattcttaagttttccaaccaataaaatcttcatattgacctaatcttcgacaaattaatgattaagattgaattaaaaaaaaaaaaa

SEQ ID NO: 363155 - DNA, 631 bp, Cannabis indica
tacgggcattatacgtagtatccacactgtttgtcgtcgggttattcaggacagataggagtcatccactggataagtcgatcacgtcgtcgtatcatttggttatatatggtgaatgattgttaggttatttttagtattaattttagattgaatttagtatattttttattagttttaaatcgtgtttggagcatttttacacttgttattttttatttttgctataaaataaagaaaaattgtacaaaaaaataaagttgaaacttcaagcctgaattcgactatgttctaattagattttggaaaaataaaacataaaagttttagatctctctttcatctttccagaacatcttgaatcgtccaattccgagcaatatcgagagagttatggccaaaagataatcagtcgacgcagtagaaaactcactgccaaataaaaggggccgcgacccatgatttccatgcctaggcgcgccccccttgctgatgaatatattgatcttgatattgaagatgaagagggtcctactattgatgaacgacctattattgataagggacctatttgttggaatttattttaccaggatcttagatctacgaacaagtatgttgtttaacaccc

SEQ ID NO: 363156 - DNA, 547 bp, Cannabis indica
acacaaataacactcttgagattcaacctaagcatgtcaagattaagatcttttgatctaagatcacccagtgatattgacttagaaagatataacggtaagattataatatctttaccaagatcaatgttggtcctactccaatgtatactccatacatctgaaatttcgataagataaaacaagtgatgatgactttgatgatttctaatcgtcatttcatttcccattaatattataattcaagatttatgagttatgtgtgttataagataacagaatttggggttctagttctagaaacataattatctttattttagtttaagttttatgatacttttttggtatttttgaattttatgtgatattttattcatccttaggtattctaaaatattatttcaatataatttatgagacttagacatcaaatgcctcgagacttatcaaattcttaactagtaactaagtatagtatactaaattactaattagacctaattctaccaaaattttagcagcataatgactataattgaacgtt

SEQ ID NO: 363157 - DNA, 563 bp, Cannabis indica
gactaattctccgccaggcaataaggttccaaaccccgtttcatagctatcattcggtctatccaatttaccaaaaattctgaccgccacataggaatgagtggccccaaagtcaaaaaacacggatatataagagttattgaccgagagctgacctgttacaactgaggggctggcttctgcatcaacctgagttatcgtgaacacccttgctggagtgggtttcactgcagtcttcggtgcttcagtcctgagttggggacagtccctcttgtaatgccctgacataaaacactgaaagcacccctgccctttacactcccccatatgatgctttttacaactggggcactttgggtaagtgtatcgggtttcgatgacactctggcgatttcctcgaccctgtttcccttgaaaactcttgtttcgacccgagccactggttgcagtagatgcatgtcttttctgattagtggccgagccactacctcccctgctaaagcctaatgcaggaggggtaggagccccaccaacaatcggagtcccacgagactctaaggtgc

SEQ ID NO: 363158 - DNA, 506 bp, Cannabis indica
caagaaataaccgagggtaaacgccgttatctgcgagatgcagcatggcgtgaaccccaaacttcatcttctatttctttagcgagacctttgtttttaccttgagtcactgttgctttttcaccaggtgacttagatttcgaaatcatgaccactcaagcttgaaaatcaaagacccctcaagatcccacaattacttttaaggcagaatttattgaatccaaagttaaatccataggagcttatgttggtaatatattaaagtcttgcatcatcaaatacaagaaatgatgtcgtgttaggtctgtcactccaggggaatttaactgttttccccttgaaagagtgattcgagaagagtgtgatagcgctagtactagtggctcgtctagaataggtgtgacagtcagtagtcccgtgatccgtaaggggaaacaccgggtaagctgtgcaatctcacaccggcctggggaaggtcaagtgggaggattctgagactgtgtagg

SEQ ID NO: 363159 - DNA, 526 bp, Cannabis indica
gataatattattagtatttaaatctatttattaattcaaaatgtcattcaaattaatataatggaaggtagtgattcaatcctaccattttttaaagtatcaacattacccttctcaagtgtagttatattactaagggaataacattccaagactaaaccctcaaaacaaataaggtaatgtttcacattaccattcccttgttagcattaacccattccaaacaccctcttagggttgggctggcattgaggatctccaggaggtttatcgcagacggaaatagaggtatcaacgtcgcacatggattcgtcatggttagagatctcagcggtggtgtcgagagttacgtcgtcaaggaagcgaatctttgtgattgaggctattggggctgtgattctggtgccgtttcagcagctggtgttggctggtttgaattaggattagggtgcagtgagaagatgaagaagacgaagaagaagaaaagaaagaaaaagaaaaaaaaatatttttaaataatttattt

SEQ ID NO: 363160 - DNA, 945 bp, Cannabis indica
gtggctatggaggttcaggtgtagaaggaagaagaggaaggggagagagaagagaaagggtagggctgggaaagtctttagaagaagaagagaaagggtcgtggctattcaggcgtggcggaggtgctggtttggggttgggggttggttgtttctggaagtgagaagacgaagaagaagaaaagaaagaaaaagaaaaaaaattatttttaaataattgattttttaatttttaaaaattaaaataataatttagactaataatatttcgacacgtggtaattttaaaaaagtaaacgacacagttaaaattaggactaacggacagttaaaattaggactaacggacaaataaaaaacataaccttgagaactattgccgttaaatctaaaattggggactaatctgcataaaaataatcttttagagaatttttgcggcaaatttttctttattttattattaactccattatattggttgatatataggtaagcatttcctaaagttaacttctattttcctttagaaaaattctatttacaacaaaatgaggaatacatattaatatataaaaagttaagtacaaaataatttttaatttttaaaaattactgaaattcttttttttttttaatttcttttcactaagttaattttaataattattttaattttattttcataaatttttttaaattcatgtataatatattttttttaataaaatttcaaataattaattaattcagtgtaaaataatatataatgatttaaaaagataaggatgtagtactataaatgcatactattattgattaaaaccaggcaataagcctacaaatacacaattgtatcaaacaaaaaaacatgtaactaaacattaattgagaatgtttttctttttaaattattattttatataatcaacaaggtggggatag

SEQ ID NO: 363161 - DNA, 1229 bp, Cannabis indica
atatatatatatataaaaaaattaacgttgacttttatatatataaaaataatattattaataataatataataataatgtgacattaataaatattaataaaaattttattgttaataattattttattattttttaaccattagtatagaacgttcaaaacggacatccgagtggaaagttatgacaaaaatataatttttgatctcttaggaatttctaaaaaaggcaaaactcaaaaattccaattttgcatttaccaaaacactagcaaaacttatccaaatcactccaaatttcatagggcgcatatataccataaattttaccatccttatgtaacaaaaattaaaatcgagcccctaaatgaaaaatgcccttaaagttcggactaagctttaaaatgtcccaaattccatttctaactaaaaatcacctcaaattcaataactaagcatcgaaactattttcatagctaccaaagaataattctacgaagttagaatctctatagccactctaaataataaaacccctatataaaaccaatcttttttttaaacttaaaacgaaagtaaaacggaccataagctttccctcttcaaggatttgttattctgctactactggagcttagatcgctaagtttcaagataacattcgaagaaaatgaatatagagggagaaagttttgtcgaagagggagaacgagagttcgttcgttcgttcatttactgtttactgatataacttataatttatatgtatataaaaacttaacttaactttcatttgtataaaattattataataataataatatagcagtattaataataataatataatgttgataaaaaaaattattattaataattatcttatatatattttaaccactaagaaacttctacttctagggtatttggccaactttgagtacccaaaatatttcagtagttctaaaatcaacttatcccaataatctcataagtatttctaactaaaactgttgtaatatttttggccttcaatcaagtctctaaggttgccaaaattgaaaatatttttatttcataaataactcatattatatccacgtattttaaataaatttctgtaattaacaaattacgcttatttatccacttatcgggtcttcagggtcaccgaacctaaatattatttattcgatatatagcacctattacattcacacatgctatata

SEQ ID NO: 363162 - DNA, 703 bp, Cannabis indica
gtaattgccttgcagttttctttaggattaacttcagttgtactaggtaaatttccctgaggacgggttgctacctgagttgctagttgccccatttgagtctgcaaatctttaatggaagatctagtttcagtcataaattgtaacaataaatctatctgcaaaccagaatttccactagaactttgttgctgagtatacagttggttctgtgtctggttctgatttctctgttgatagaacccactgttccttcagttacctccttgattgaacccatagttgctgttgttctgagaataatttctaatggcttttgcttcatccattagcaaatcattcacatcatcctggcactaagaaaagtgatgagaacctcaacatagctcacagaccacttgagcttgttggcttgcacagcaatcagctttgttagggcctctacctgggctgtaagctttgtaatggcatccacctctagcacaccaactaccttcttagtttgacttctttcagttggccattagtgattgtttagggccatctcctccaacagatcataagcctcattcgcactcttcctcataaatgctccaccagctgcagcatctataagagttctagcgttaccaaccagcccgttgtagaagttatgaaccggcatccacttctcaataccatgatgagggcactttctgatgag

SEQ ID NO: 363163 - DNA, 779 bp, Cannabis indica
taagagccattcattccgtgggtgtaagggcccaatggaggcttgaagcggggacgttacacccactccccgacatcattataccctccaaagtttggaggtttggccacttcttccttctcgacctcggaagggctgccgggacagacatcgtcctgctcctcaatttcatggatctcaatgtccccctcgtgatctccctcctccatgatgggtagatcttgttcggcacttggtaatgtggcgagctgggccacatgaggatcagatacgttgaccttccgcatcgtctgcttcgctcgggccatcatcctccttcaggatggacactgatgttaatttcgagcaaccgtaacagcagatgcagcaattgggatgccaaagttacccgaacttggacggccaacaggaagagcgtcagcaacacctggctggacaatatatgtctagttggacgagatataacgcctctaacctttcttcaattcccaaaggaagtggtcatacccctctccggcgatctgctcagagtaataatggtgttgcactacgggttctggagtaggtgagagatcactactcacctcccaatcttcaaagctcgaattagaaagtctgtcactcaaagaggatgtaatggcccaaatacaaggttgatcctcgtacagaacttgaagcaagtcctggtcgattcggtgtttgcttccccaaaactcaccagggttcatctacaaaagacaacacacgagatgagtttttggtcgggatatcaaacatta

SEQ ID NO: 363164 - DNA, 1371 bp, Cannabis indica
ttatcttatttttaaaatttgaatattttatcttatttttaaatataaggaggtcagatattttatattttaaattaattaaataattttataaaatgaccttatttgaaatttaaaataagatatattttaataaaataatctagaaaattttgaaaatttaaccagataattttgtcaaattttaaatttttgttattttatttaaattaaattataaaattagataaatgatattaatttatcatttaattttattatcttttaaaaataacataaattttaagaagttagttgatatttaatagatatttaggtttgttaaaaacctaattttctaaatttataggtttaatttttaaattaattattcaacttaatttaattatttcggaaaataatattttattattttttttaaaataaatttaaattaaataaatcccatatctaactatcaaatttgttgcacgtgtgttttatatattatttattattaaaacttattttataaaacctattattgtatgatctaaattgttatagttaacttgttaagagattcaatgatcttattttaaccatagtccacttgtctaatgggtcaaattaaataatttgtaacaggtaaattttgtaatcttcatccatctatgtataaacctagtaacatgataggatccatccaaatcagtgtgtgcatgtgcctatatgtttgctttgggcctaggtgcatatagggagcctattttattttgataattaaaatctattaggttgctaaaataaaattgtcacatttgatagattttatttaggtccaattagtattgggcttattcaatgaatatcagttgtttaattaagggtcaaattcctctccttttggaccttgtgtgagagttaggagaccatagtagtgggtacgatatactgaacacaaccctccttcacatgaataaccctaaatgtgaaggcccatttgccttagttgaataattgtataggtcaattatactagtttaacctaataaaattgattagcaacataattaatttttaaaatatataaaatttatttttcatcagataattttgaaattaatttaagaaaaacacacttagtttaatgaaattaattcaagataactatatatatttttctgtatttaattaaataaaaaaagttataactaatcagatttttctagatacttaattatttaaattttcttaaaaaaaaatatttaagttgaaaattaattttaaattgattttggatcaacttaaattagaatatttttaaaattaataattaagtagatttttctaggaaattagttattcagatattctttaaaaaaaataatt

SEQ ID NO: 363165 - DNA, 544 bp, Cannabis indica
atagaaatagtttaacattcttaatgagtgtgatttgtctttaacaacaacaacaacaacaacaacaacaataataataataataataagagtattttacatttaacactttatttgacatttgatttttaaaaatgacttgagcatatctatttttaactttttttaatgtttaataacgtttggcatgttttaaatacagcatgtgtcctctttttatttccttccttttaacagatatgacacgtttattatacagtatttagaatcagaataaattaattaggaaatgtaacggaataaatgaaaaataaacggaatcaatatttttaatatgttgtttactaaaatattttagaaatggaatagttgtgatttatcttgtttactttattagaaaacgtaatcggaatgtttacattgactaaattactcttttgagttaaactatattatacggtagttattttgtaagatatattttaaaggataaaattttcattacatatttaatattaaaaaataaaataaaaataattaaatt

SEQ ID NO: 363166 - DNA, 697 bp, Cannabis indica
agagtttataaattggctcgactagatggctcgctaataagagctattggaaagtagaacatttgcgaccttactactaattaataaatgatgtaactcgattactaatgcaaactttaaagtttagttatgaataagagaatcatttatattaagtaattacaaagttttgttctttaaaaattacttaaggggaatttatgtatgattaaccggaattcatctgaaaatacattgtataatgcaaactcgtcatttcaatttttttttttaaattgtaaggttctcgactaaacctctttgatgaggagtcgaactgttataactccctgaccaaacttttttgatgagagaggggtcgaatcgttataacaccttgatcaaaccattttgacgaagaagggatcaaacaactataatttttaatttataacccatccgacgggaaaggaaaataaaatgttctaacctgcgtataaaactaaatactaatggttcttgcgagctaagaatgtacaaaatgaggtatcacaaccccttgataaaagtacttgaaccttgaaaatggatagataatataactattcatatgagcaaattaaaatatacaaagtgattgtaataccctagaattatgagattggattagcaaaatcctaactagatgattatgtataattgaggaaattatattatt

SEQ ID NO: 363167 - DNA, 389 bp, Cannabis indica
tcactgtaattgtaaatgactatatgttctggatttaacagactttgtatatacattaaaccttaaacatgaaaaccacatttgaacataaatgacttataatctcttattgataacaaaacagattagattgtaatggattttatttagggcaaaaaattccaacaaactcccacttgcactaacataaaataagttgtgcatttcaatcaatctattgtcttgatctttagatcaagcgtagtatacttgactcaactcaaatctctggaaccatgttcataaaacattatgcaacatcctttactatatgcattactcatcaagggttactgaaatccttactgcttattaagtacatctggataaagagaagacatatctctcat

SEQ ID NO: 363168 - DNA, 594 bp, Cannabis indica
aagaagctcaagaacaaaagaaagtaaaaggcaaggtgaccgcccgcacaagactcagaagtccatcatcacttgacatcgatcttatctcagctatgacagctttcccttttccgaaaaagggggagatggtcgaacaggttaaatgggctcccttatgcgaatttcatgttcaacaggcctaggtgaggccgggagtttcttcttcctcttcagtggagtcacctgctcatcctcgggctcatcttcaggattcaaaggcacttgagcatactgtttggccctcgaacctcctttcaacttagcttcacgcttctgttgaatcaactcattcttcggatgagctcgttcaggctgaccaacaacagatttcctcttcttccccgtcacggacttaggagaaaggtcctcgggatagagcccgtacttcacaagattatcattgaaggtcaattggataatattcctatcttccttggtgaccgggcaagtttctgagctctatccctaagggcaagagtgaggggaggacggtgatgttagatatattttaccaagatctagatttactaacaagtatgtttcattaacatc

SEQ ID NO: 363169 - DNA, 593 bp, Cannabis indica
catatatctagaatcctatttgattaaagttaagattataagattaattaatttgtgatttcttcctatacacataataataataatctcaccgaataactaataacattttttctttaatttttaattgtataactttcaaataacatagaaaaaattagcataaaatttagtatacgtgcctcgtacgtaacgtttttgctagtatatatatatatatatatatatttatgggttttttttaaacttgttgtgtagagcatgtctgatgctttgaaattcatgtatatactatatagtacaatctaacaccaaccgatcggccagactttataaggaaaagtattattgttgtctaacatgtcactattatttatttttctaataattattaaaataaaatatatcagatgtagtattaagttggccctgcataaaatatttatctagtgttagatttataataatatggacaatatggttgtctaatagagctaaaacaatatgtttccagtgtgatgaaaaattaaagcaacaattttgttaatatcaaagagtttgtaaaatccgaaagagtttgggcacaaaaaaat

SEQ ID NO: 363170 - DNA, 538 bp, Cannabis indica
ggtgttgtcatcagtggtgatcataaggtgatgtcttatctgcgaattcaatccatctaggtatttttctttcttattgaaattggttggcactattactgaggccagtcttgccaatcgatcaaactgagttgtgtattcagtaacactcacattttctttctgggtcagctcagtaaattctttttttttttgtacttctgactgcttcattatagtactttgcgtcctggaacttttcccaggtcatagtggtaacattacaagttagggacaccatgtcccaccaaactagagcatcttcttgaaactggaatgtggcacatgccaatctgtcattactggtgacacctctgaagttcaggattctagtaataacagtcagccactgctcgactttcattacatcgggacctcccagaaaaaacctagaggtgcctgcttacggaacctttcatatagtggttcccatacaggttcattgcaacacaggttctgcctccatcgtaggggcaggagctacctgcattttctggag

SEQ ID NO: 363171 - DNA, 561 bp, Cannabis indica
tgggatgaaagggatgaaagggaaacaaagaaaaaagagagagattgaaaaccctaaaaggagatgaaagggatgaatgggaaccggacctaatatcaactaagaggaaaatgaaaatggcggagtaatagggtacttattacatgtagaagatgaaaagacaagccttatttttttaaaaaaaatatttaaaaaagaaaaaaaatcacaataaatagttcactaaaactgctttaaaattccagtcttaccctttataaatgagttgaatgcacaaacttataatatgggctttcaatgttatttttacaaaaatgtggcaaagaaaataccatatataacttcaaatttaaataaatgccatataagggtggtacacttaaaacagccatatttttatcaaacttttttgtagaatctcatattttgtgtaattttcacataaatattgtccacaatctaaaagcaatgtaaaaataatacaaaaacatgcaaattaaacaaacatcaacacactgcgtaaactcaaaaaaaaaatacaaataatcacaaaaataaaaa

SEQ ID NO: 363172 - DNA, 934 bp, Cannabis indica
ctatgtcaacaaggtgcatcttgtttttcggtaggccatctcgaaagaactccacagttaagcgtgcttgacctggggcaatttcaagatgggtgacctcttggggagttttaccagaaagcgtgcgagtgaggacaaagcacgctggaaacactcgtgttggtctgtagggttagtcattaatccatgaagcagccagagtggtgtactcgtgtataagagccattatttcgtgggtgtaagggcccaatgaaggcttgaagcggggactttacactagctttgtcagaacttataaaaggactaagtggtgtcaaattatcacttaggcatctcaaaggacttccgttgattgtttttacatttatgcatcgtccaagtggacatcaaatgtcaacctgggcattggaacttgaactatcttcagtaaaatgaccataagtcacttaatttttatttgattgatgtgattcaacttgaattttgaagctatttaaattatatatcaagacatatctcacaccccaggcgtaattctgaagctatcatcgtcaaaattcaccctaaggaatttacgaaaaataagcttcgtgtaactcgcaacaggactctccaggaaccaaaaattggccttcaccacctgaagctaatttttaccgttagatcatcattaatggtgaaaaaaaaatggttggatttttctctcctatttttgtgggtctccttcacctataaaaggagagctctcttaactcatttttcacattcaaaaaactacccataaggtcagagcttctctctctagaattcgaagcttctgatacttaagcaattgttgtaattaccatctcgtgagaataaaaactcgaagagacgtaaccccaatactatcacgatatagggggtgagcgactataaattgatgtgtccctta

SEQ ID NO: 363173 - DNA, 517 bp, Cannabis indica
actactacaaaaagaggtatttttgtcagtttctaagtgacatataaagattttgcgtcggtgtacaaaatcgatgtataagctgtagacgcaaatagttttttatttgcgtcatttcaaaagagacgcaaaaaacaattttcgtcatttagaaactgacgtgaaatataaaatgttctttataacattatgcgtcggtttgaaagtgacgcaaaaagggttgtgccatttcaaaactgacacaaaaaacttatactgtcagttcttaaatgatgcataacttgctgcaaatatttttttcacctattgcgtcggttataaaatgaagcataagtgcaagtaagggaaaaatgcagatttccatccaatttaccctacctctattttcaaattttagaatcattatatataatagtaaatacattatactaaaaaaagttaaaataacgattataaaatatataaattttaataagtagtaatcaattctatgatcaataacgataaaactaactat

SEQ ID NO: 363174 - DNA, 807 bp, Cannabis indica
aattgtgaaggcccatttgcctgatttgaataactgtaatagattaattaaactagtttaacctaataaaattgattagcaactataattaatttcaaaatatatgaaattaattttttaatcagtattattttaaaattaatttaagaaaaacacacttagtttaatgaaatttaaattcaagataaactagatgtatttttctatatttaattaaataaaataagttataactaattagattcttctggaaacttaattatttgaattttcatagaaaatatatttaagttgaaagttagtttttcaaactaattttagatcaacttaaattagaatattttaaaattattaattaagtagaatcttctagaaaattagttattaagatattctttaaaatattttttaagttgaaaatttgttaattttggatcaacttaaatagcgatatttttcaaattgaggtgattagctcaagatgcttactttgatatttaattaaattttgaaaaattatttaagttgaaaatattgtcattttagaacaacttaaattagatattttttgagaaatttatattattatattttatataaaatttcgaaattttatattcaattataaatcgatttttgaaattattgtttgaaaattaaattaaagttgaaaattaattttggatctacttaaattaagtaattttcattattaaaatatatagattaaaataaatgattaattaaaaattcattttttttaaataatgagctttaatcaaaggatctccattgtttgtcttacaa

SEQ ID NO: 363175 - DNA, 718 bp, Cannabis indica
agtgatcacgaaccaaataacacattaaataagtaatgaaacaaatctatttctttattgataaatgaatataaaagattacatggaaatagagttttatttagggcataaaacccaacaaatcccacttacaataacataaaacaatcagtacatttcaattaatcctagattcagtctgtgcttttcaaatgcagttaaaggccaaattttggtgaatggattagctaagttgtcttcaccattaactttctccactagtatgtcccctcttgccacatattctctgatgatgtggtatttcctctcaatttgtttggttctctaatggcttcgaagctctttactgttagttatagcaccagtgttgtcacaaagtaaaactaatgggttttccattccaggaacaacaacaagttatgtgaagaaccttcttagccagactagttccttagcagcctcagcggcagctatgtatttgacttccatagtagactctgatgttgtggtttacttagcacttctccaaacaaattctccaccccaagagtaaataccatcccaaatgtagacttcctgtcatcaagacaagactggaaatatgagttagtatagcctacaagatttaaagcaccacccttgtagactaacacataatgccttgtatgttacaaatatttcataatatgcttaactacagtcaatgttcctctcctgg

SEQ ID NO: 363176 - DNA, 627 bp, Cannabis indica
tattgctacaaagtcatgttgttatatctaaaaaatgctggagctacgtaccaaagattcgtaaacaaaatgtttaaagactagatcgagcgaaatatggaagtgtacgtggatgacatgctcgtcaaatccagaaaagttggggggcacatagacgacctggacgaatacttcaaagtcgtcagaaaatacaacatgaagctaaatcccttaaagtgttcctttggagtcagctcgggaaagtttctaggcttcattgtcaatgcctgaggaatcgaagctaatctagaaaagcttcaagccctcctggatatgaactcgccaacaaaaaccaaagaagtgcaaagcttaactggtctgatcgctgccctcaacaaattcttgtcaaaatcaacagacaaatgtgtcccattcttcaacatcctgcgaggaaacaaacagttcgagtgtacaaaaaaatttgaaaaagttttccaagagctaaaagcacaacttgctaaacctctcgtactttcaaaacctctggacggcgaggagttgggaatatacttagctatcacggaacatgccgtgagtgccatgctgatcagagaagagaacagcgtacaacacccagtatattacatc

SEQ ID NO: 363177 - DNA, 361 bp, Cannabis indica
taaaataatttccaacaccaccctcaccaaaggcacaggcttggttggagtaagggtcttgggtgttagcgtcggaaggctgataagagactaatggcgcatggtgtcccgccaagaatatgggagggtcatagtacccctgttagaggtgttcgtggtgcgggtggtgcggtttttaactattttttcaaaccaacccgcgcatgcagttttttcaatttttcaaaccgcaccaaaaccatgatactataaaaccacaaaaactgcaccgcgaaaaatgatgcagtgcggtgtggtttctacagtttatacagtttgaactatcacaattttttttgaaatcatcataaaataattaaac

SEQ ID NO: 363178 - DNA, 1008 bp, Cannabis indica
ctcgtgattggctgaaaagacctcgaacacgggagccatgggttcttaaaagctctaacttgtgttccatctctaatagatctgcgaagaccgcacttaagcaaatccattccccagatcaaactcgaccaaagatgagacgaaccaactttttctgtggcctcaaggataaagcaatttggtaaatatttatgtttcaaaattcaaccaggcaatgaatcaggatataaaaataacctccatacttgcttggccaaaagagcttgattaaaaagttgaaaatctcaaaaaccaagcccacccatcgccttaggctgacatactatttcccttttcacccaaggaattatctttgtaagcccttaatattaattattagtttgtgaacatagcaaaataacatcaagggcatacaaacagtagtacttgaattttatattctcttcaaattattgaaaaaaaaatagaaaaaatgttagggttttatagtagttttcatgtttatgatttgatatacaatttctgttgaatcgagaacaaatagttatttacaattacagtaatgtcaacacagtggaaggtaattgtgattatatgcttcaaaagataatgtctcatgattcatcagtgcagtaaatttacactgatgtgatagtcaacaataaaacttacttatacctttgataagtgttatgttctctctaggatattggcaaagtatgctagtatcggatggagtatacattagactgagactgatattgatcttggtaaagatattataatattaccgttgtatatttctaagttaatatcactggttgatcttagatcaaaagatcttaatcctgatatggttaggttcgatctcaagagtgttatttatgttcttagagctgttagttaaagcctaccaattgtttcaggtcacacatacatcttgggaacatgataatacaattgagtgggagcgctaatcgtagatatggaatctatagtatctatctg

SEQ ID NO: 363179 - DNA, 990 bp, Cannabis indica
atttatggtgtttagcacatcccttagtatttttcttatcatctccaatagatggtgtatttgagctaaaaaaattggtcaatattatattttggtctaaattttataatagagcttcaatatttagggtaaaattaatctttttttgatagaaatgtgtaaaaaaaaatcaacaaagaacattacatttttattgaaattatataaaattctattaaatatataaataaattataaaaaataattaattacattaataagtggaaaaagaataaataaaaaaaattgatatttattgtggtgtaaattttggctcattctatattttgtgctaaatttggcacaacgtttagcatgtgctaaatttagacaacattacacaccactattggagttcaattttataaaaatgggctaatatatgcatcaactttggagttgcttgtcgttgatctccaaatcttataggagctatacatgtgtgttcttcttcataacttctaattatgaatgttttcgtgttttcattttttgaagcctttaaactctatttgtaatttgagtccaaacaaacaatattgtattgtttagagcaagatttaattaccttgtattgaaatattttcttgattgcaaagtagcataggacacttatcaatgtatctttatccttgtaaatctgtcatttttctattgtttcgtgttgtttatcagtgatgataaatgttgaccctaatttttcccaatatacgtggaccaaccaaacaaggacacgtggatcaagcaatgtacaatccaaaatatttgctaagtctttatgctgtaaggtggcttccaagacgtagctcccggagaaggcatatggaaccccatatgctcccggaagctcgaagtaacgttaaggcatctccacgacgtgtcaggtttctcctgagcaatcaagtcgcatttaatgtcgcatgggaggaagcgtgttgggactgctacacg

SEQ ID NO: 363180 - DNA, 553 bp, Cannabis indica
gggaaaaagaacataattatttcaagagaatgtgacaatcctattaaaaaacataagaaaacactactaaaacaacacaaaaaaataaagaacataaaaaataagcataaaaaactctggaatggtagtattccggtcgggtgtacttggattcccaatcctataaaaaaaacataagaaaacactactaaaacaaaacttaaacaaaataaataaataaataaagaacataaaaaacattaaaactaaaataatgaaatgacacacctcaacaacccttttcctaattatgccttcaaacagatcagttgattgaacaatcttcacttggtatttaccctttccctaagagttagcaaaataaaaccataacaacaacaagacacagagtcaaacaaacagaaagctataaaataactttggctcaaactcaaaatcagagtcggagttctccaacacagattgagagtatttttaattaagtgttctttgaagtaccaaaacttatatttgcaagaacagatctagaaaatcaaaataaaaaaagaaaaaa

SEQ ID NO: 363181 - DNA, 959 bp, Cannabis indica
ctctctctctcttcgtcccatattctctcaacccactcgcaccaccgaagctcccccaaaccaaattgcaccaccaaatcgcaccacccactcgaacaatgaatccaccaccgcacggagggaactcgccacaccacggaggaaacccgccaccccaaccgaacccaagaccccacggcccgaacccagaatacgcgagcaaggtaaaattccccctttcattttttattttcttatgttattgattagggttaaattgttgtttatttataggtttagggtgtgatatgattagatctagggttagaacatgtggatctaggttctgtgatgaatttgggtaagatttcaaaatttccaggtaggcccgatgcatcccgatgcaggtccgatgtaggtccgatgcatcgggatgattatgatggtatcatgttaaagatgaaggcccgataggggcccgatgctggccttttatttttgtaaaatgcatggcccgataggggcccgatatagggcccgatgctggccttttgatttttgtaacatgcatggcccgataggggcccgatagggcccgatgctggccttttatttttgtaaaatgcatggcccgataggggcccgatatagggcccgatgctgggccttttgattttagtaacatgcatggcccgatagggcccgatagggagctcgataggggcccgatgcatgcattttgacttttgaaaatgcctaaaatgtctgggcccgataggggcccgatgcatactttgcctggcccgatgcctttacaatattaaattttcataattattgcatatgatggcccgatgtaggggtccgatgggtccgataggggtccgatgcctccacttaatttaaaatgatggcccgattaaggggtctgatgggtccgatagggtcccgatgcctccacttaattttgtttttaattt

SEQ ID NO: 363182 - DNA, 767 bp, Cannabis indica
gacactttaatacccttttgatacccataacataattggtcacttaattttgtatcacactttataatagcatatacattatacatatagtgacccacataagatttttaatccaacaggagtttattgggattttatgtcctaaataaaactcattttaatattatcttatttgtaatcaatagaagattagaagtcatttaagtttcatgttattttcattgattgtggtttaatatataatctctcacaaatctagaacatatagttattcacaattatagtgacatcatcacagtggaaagtaattgtgattatatgcttcaaagttaagtctcatgatttatcagtgcactagatctacattgatgtgataatcagcgataaaggttacttacaccttggataagtggtatttcctttccaggatattagtacagtatgctattattgggtgtatgtagtatacatcggattggaccgatattgaatatggacatgatatcataaacttagcgttatatcttttaaagtcaatatcatttagttgatcttagctcaatagatcttaatcctgagatggttagcttaactgtgttatttatgttctttgacttgttcgtcaaagctgaccaaatggatcggtccaatacttacatcttgagaacatagtagtacaattgagtggtagcaccaatcatagatgctgaatctatagcttatatattgacatagaagtgaaataataattttcttcgagcttggct

SEQ ID NO: 363183 - DNA, 620 bp, Cannabis indica
atctgttgttgaaaaggttgagcttgctacgaaggctaaaggccgaccaaaaaaaacttcacgtaaagctaaagtgtgttttatgtttgtattgaaaccggtttttaataattgtgtttgttgttttttttttttttgttattatgaaactggttttattttttttttattaagatccttctgccgaagaagaaaaacctgttgaagttgaaacgaggaaatctccccgtaaatccaaagtatgctctatgtttttttttttttgtgaatatgtttttttgttgtttattcatctttttgtttattatattttttttttttgatgaaactgattttttggttgttttgtttaaggatgataatgttgtggaggatattcccttgaaagctccaacaagaagatctccccagaaacttaaagtatgtattaaattttattgaatccggttttgtcatttattttatgtttcattgttgtttggtaattttattgtggttaaaaatttccaagtatttgttcctccaaaattagtttttatcttttatatgttagttccttggatttgagtatgttatataaaaccggtttttttgtttgtttgtgttttttttaatttgtt

SEQ ID NO: 363184 - DNA, 843 bp, Cannabis indica
tgccaataccaattatatttatatgtttataatgtttgtatgtgtttgtgttttattattgatacaaagtctatggtatattcatctctgtaaagagataatgcaacataaacacttagaatttaaattcaatgtttatgaataattgttaattctgaaacaattattaagattttgtttaataaaaagatcttttgatctgataggggtggaagaagttaagaataatatatgcagttcaacgatcttttatatctattgaactctggattatattcataactccacatgatctctataacacttaggggtggataaagctattgacatatgtagttcattttgaactctagactatactcaatacaccacagtatctctatggcacacatattttgattaaacatggatgtaatataatgaacaaattagcaaattattagaacttattcttgatcctgtaatttttgttccaatttatatgttactgttgtaataaaatagataccaataaagttcttggacatagtatcacagtaccttatttgagtgggagaattttaaaattctaagcccatcttcatttggatgacacttgtgataggaactttagaattcaactgagaaagtaaatctaaccattcatatggatagaaataacttatcagaattttgagaataagatagtagaattttgcatagtctattcgaatgacttaggcaaaattcctaatcctcataaaaaatttatggtatcactaatgattacttaatcttaagcaagtattttacattaatgttaatactagattgctatgttgatgacttagtctagaagaaact

SEQ ID NO: 363185 - DNA, 584 bp, Cannabis indica
gttcatcaagattaacgaaatttctttgcaattgaatctcttcagaaacaagattgtcaatcatgaatgtttgatgacattcttcatcctcttgaagttgtttcccaatgtgaaaaattttgacctcaagtgtcatatttccaaatgatattttcattagaccattacgacaattaatcaaagcatttgcagtggcaaggaatggtcttccaaggatgataggaattttcgattccatgttgaccacagattgagtatcaagaacaaggaagtccacggggtaatagaatttctcaatttaaacaagaacatcctcaacgataccccgaggctttttgatagagcggtcagcaagttgtagcacaacaaatgttggcttcatttctacaagaccaagttgcgaatacacagagtaaggcatgagattcaaactcacgctaaggtcaagcaaagcttggttgacttcataagtcctaatttggcatgaaatggtgggaaaatcaggatcattgtattttggcggtgtcttttgtgttgggttttatgccctaaataaaactccatttcaatgtaatctattttat

SEQ ID NO: 363186 - DNA, 659 bp, Cannabis indica
tatataaaactttacacactacataactttttaggtaatgatttgataacaaaatggtaactcaaaaatgtgaggacaaaaacaaattaacaattgccctttaatataggttacaaaatatagagattatagataatgaatggccttaaaagtaaagaacaacaaatattcaatatgttttacaagtaagaaaacaatactacataaaatttcttctaaaacaatcaatattgagatcaacaaacaccactaaatcacaaataacaaaatctttaagaatggaaacaaaaaagaagggaaaattattacaaaaacatctactttcacctcctcatgttcgaacatctatattcccgatctgatcaaaaataggaccagtacttatttttgtttcacatttggctaacgaaaattttgtcggtttgtaaatattttgaatcataaaggagatctcgagagcagcagattatcagagcagtttttgctcacttgatttgacaatgagaatcgaatcgaacctctcaaccttggtagatcatcgaaaggatttcgttcttcatcgttgaaaaatgaatgtggttctttatcttgtattatgtttggaatttgtacctgtatctatttcatgaattccaatacgctctgtgtgatatcctcga

SEQ ID NO: 363187 - DNA, 1288 bp, Cannabis indica
attgaaaagtccttaggtcgacctgccaatacttcatctcaatttttttagctcaggatcttccaattgcgcccttctaattctttctaccaaatcagattgaagtgttaagttgtgcaactttccaactacaaactcaatttcagctttaaccatttctaagaccagttgaggagctatcatcacagtgatgaaaacctgtccgggacctcttctacttagtgcatctgccataacattggctttcccggggtgatacagaattttgcagtcataatctttgaccaattccagccatcgtctgtgcctcatatttaaatctttttgggtaaagaaatacttgagactcttatgatccgtgtaaatctcgcacttttcaccataaagatagtgtcaccatatttttagagcaaatactacagcaacaagctctaaatcatgcgttgggtagcgctactcataatccttcagttgacgagatacataggctataactctttcagcttgcatcagaacacatcccagacccggatgcatcacagtaaacaacaaacttttctcgatctgatggtaaagctagcactggtgctgttatcaattgctatttatactcctgaaaacttgcttcacacttatctgagcatatgaactgttgagtcttcttagttaactcggttagtggcatagagatcttagagaacccttcgacgaaacattgataataccctgctaaactgataaaaatttacagttccatcacagattttggcctcaaccaatttttcactgattcaatctttcccgtgtcaaccataattccattttttacgacaatatgcccaagaaaagatacctctgacaactagaattcacactttttgaatttcgcatacaacttatgatccttgagtcgctgtaataccattcggagatgatgcttatgctcctcttatgactgagagtatacgagaatgtcatcgataaatactatagtgcagttattgaggaaatccttgaatactctgttcatgagatccataaaggctgctggagcatttgtcaatccgaatgacattacaagaaactcatagtgctatctagtttgaaatgcagtgtttggtatatcttcttgccaaattctgagctgatgataaccgaatcgtaggttaatctttgaaaacacagtctttccctgaagctgatcaaacaaatcatcaattatgggtaacagatacttgttcttgatcgtcagcttgtttaattcccgataatcaatacacattctgag

SEQ ID NO: 363188 - DNA, 605 bp, Cannabis indica
tgctggaaggcttatgaataaacaaatttgttcatgtactaggcgacataccttcggcagtgtgtcctaatccacatcagcattgacttccatccaaacggtttaaatcacagctgtgtgattttcaaataataagtacatttattgacgtggagcataattaaagaacacaattttggcgaatattgttatgggatttgaacttaaatgaaattaactaccaacctatattactataaataggggcagattatacaaaaaggagacgaaaaaatctgatagagaaaaaaggaatacactgattagaaagaaccctagttttgtatcagaaaaatctaaaaaagattgactcgtggactatacagagttaactggaaaaccacgtaaaaccctgatgttatttttgtttctataatttttcttaaatctcttataatttttatgccaaatatattacgaaaataggctcataatcgttaatgaaaatttgccttagtagtttggtgctttcattgagagcttatgtgataaaagctctgaaaaatccctcctaaccaaagaaggaattttttcctccatggctgataatggggaaaacgacaaca

SEQ ID NO: 363189 - DNA, 1170 bp, Cannabis indica
aaatgatttatttctatttattggtatttgtagtgtcaaaatggattacccacaccccgaacctccttcctctcactttttacatgcctttgcaaatgaactacatcatgtgaagatgtctcctagaaaaagcatcaagtcacatataatggtgtttaacatgaaaatcctaaaagcaaaaatgctgggaatttctttgtcaaaacaacagcatgttcaattcttactcaatagtcttccacctgagtataatgcatttgttgtatcttatgatcaacaattttaactcatccgacatagctaggccagatgcaaaattgcatgcttacgagcgaactttgcctgcaaggaggcctccctctagatttgttgacaagaaaaggaagatagtaattgagtatgatgcttctgacattgctgcaaatattgaaacaatggatagtcgtactcttcaatgttcatattgtgaaaagaaggggcatcaagaagaacgatgtcccagacttctagacaattcgaacgaaggtaacgcttttgtttttgaatcacgtgtttcagaaaatgacaaatccttttggattgttgattccggatctaccaaccatgtttgttcttcattgcagcggcttgaaacttgggattatttaaatccaggggagttatagctcaaagttggaaatggcaaattagtatcggtccaagctaaaggaaaaggcccttttcagaagaaatttttagtttttccaaattttagtagaaacttaattagtgtttcatttttacagacacaattttattaattgaatttttcgagttctatttgcactatttcttgtaatggatttcaattatgtgttgcttacatggaacaagggctttatgttttgagaccggaaatacaaattgcgctgaataacaaacttttcaatgctgctaaacctagaaaccataaaaggaaagagatcgataataatgatgaaacatatctatggcatttacgattaggtcatataggctatgacagacttcataggttaaccaaagatggtccattgaaaaatatcgtcttgggtgaattacaagtttgtgaatcttgcctagaagggaaaatgactaagcgttctttctctgcaaagggagagcctagcaaagaacctctagggttagtgc

SEQ ID NO: 363190 - DNA, 531 bp, Cannabis indica
ttttaaatccatcatcccctgtaattgcacttttaattctttcagctctgcaagcgccatcctgtagggagctcttgacacaggctctgctcctggtattagatcaatctcaaaatcaatttcacgttttggtggcaaccctggtaactcttctgggaacacatccagaaattctcgaaccactgggacatgctccggtcccgctagtggttccctggtaatatccacaacacttgctaagaaaccaatgcacccttcacacaacaaatctcttgccttaagggctgaaattaagggaatccgagatccctgcatcttacccacaaatacaaaggggtcctcgccctcaggctgaaaagttaccatctttcttttacaatcaatggtggcgttgtatttagcaagccaatccatccccaaaataacatcaaaatcctccagattcaattctatcagatcaactgataactctcttccttccacaaatactggaagggatcgaacccacctgctggagataaccaactcccc

SEQ ID NO: 363191 - DNA, 1111 bp, Cannabis indica
atcacaggtaactgccacacaggctatgctaaactctaacctgaatccatcttctgttgatgcaggtcataccaccattcatactctaactcaggaggatttgattgaacgagcgatcgctcggaggttcgaagggatggaagcaatgatccaacgtatcccaggggttccaacaccaataaagaaaagtttgcctagcagttttgctgactcaccttttgttgacgccattgcattggtcgagatgccaaagaagtttgtgttcccattaatgaggatgtacgacggaacaagcgatccaaacgatcatatagccagttataaacaaaggatgttcactgccgccatccctcgcgagttgcgcgaggcatgcatgtgtaaggggtttgggtctagcttggctggcccagccctccaatggtacacgaatttacccaataattcgatctcttcttttgctcagttaacggatgtttttgtagaacaatttgcgagcagcaggaaattggagaaactctcagatgacctataccgcatcaaacaaaggaaggcgaatccttacgagactatgtggcaagattcaatgctgaaaaagtttccatcacagcatgcaacgtggacacagccattaccgccttccgtaaaggcctgcaggtagaatctgacctttacaaagaactcacaaaatatccatgcaggacaatggaggacgtgcttgccaaagcttgggcgcagatcaagtgggaggaagacgaatccaatagacaatcgacaacatcctactcttactctcgcgacagtagagtaccgaagagggtagagcgacgacagtcctaccattattcagaaccttatccaaccaacagatcacggtcatacagagatagcgagaactccacccaatcacacagaccaagagattacattgcaaagacaacactacctcggcggatgagggaatcagacaagggaccgattcctgaatacaacctgaacattagccctgtcgaaatagttgcagtaatgaaaggaatgggaaaccaagtcaagtggcctgaaagattaaaaaaccagcagcaatgcgcgacacgacaaagtggtgtgaatttca

SEQ ID NO: 363192 - DNA, 733 bp, Cannabis indica
gtggttccctataaatagatagtgatggtctcaaatcttaggatgatgaacacacttgctttcagtcaaaaatttgagccttcttcctatgctattcgaacctctcttctctctttctctcttcataatttcgaatcttatagtgatagagtaagtgcccacacacatccagtggtacttaatcatagtgtggaaggctctgaagaatccaaattcaagagaaggagatttgggctcagatcttggtgatactctgctacagacaggatacaagggttagagatctgagtggaaggagtcattttaattccgttgcacccaacgtaaggtttctcaaactttatatgtgtttaaattacattgttttagaaattcatatttaggatgttaaacaacaaacatggtagtaaatctagatcctggtaaaacatattccaatagtaggagctattggtatttctagagcagggattgtaggagcaccttgttgtctcaaatgctggatctcttcttcttgttcactaatcctggtttgcatttctacaaacctattttcccaatcttaggctgcctaggctgcttttgcagtctgtggcgggttaacatcgccttggccacgtgccctgcatctaggaccactacctcggccatgaatatttaagggaatctgaactccctgaccaccactggatcaaaccgagttaccttggctcctggtgtttcgtctggcgtc

SEQ ID NO: 363193 - DNA, 586 bp, Cannabis indica
ttaaaaaaaattatatacatattaaatgaaataaaaaattaattatttattattttctatcttcttccaaccatattatccttacaaattaactataattttttttaaggagattaactataaactttgattctcgatttaaatgttatttcttaatgctattttcataaattcaaaattctcattccataaactttctattaatattttttaattaatgaaacgaaaaggtaaactttaattcccgtatgaaaaattaaactctcaatcacaatattcaatagaaacaacatcaaattttaagttctcaaaatctatgaatataattaaaaaaaaatagatctcgcaaatacaaactcaaacattagaaccccactacgaaactaaaactcaaacattaaaaacacacacaataaaattcgaacccaaatcttaacacatctttcagaataaaaattaaatcataaatgaatcaaaccaaaactcaaatctctctcttcttattcttttgcttggtcttcatttaagaccactaaattaggtaccaataacactattaaatttagaaatttgaagatttatgcta

SEQ ID NO: 363194 - DNA, 526 bp, Cannabis indica
cattaatgtattattactttattatttatgtgtagtgctcttgagaggtactaccttgagaaaaaaaaccgacggttagtagcaataagcttcactgagtacagatgtccagagcaatattaaagtttttaagtcctttatattatttatgtgtagtgctcatgagattgattaaatcattcatgactgaaaataatcctacacgaaaattggaaacagaggtaaagacactaattattttcacaaatattaaagtttttaagcccttttattatgatctattaaatcaatgatttgtttcgtttgttgcagtttaaaaggaacatatcatcctcttacactaacaaagaaatcaatgaaatacgtgacgaatgggcaaagtatgtcatgcagatgatagcagcaggcaaatgactaataacatagagtatgatgaccaatgatcgctcatggacgatgcccatgtgatctaagaaaatgattgatagatttgacatcgatcttagttactattgtcttgcttttt

SEQ ID NO: 363195 - DNA, 517 bp, Cannabis indica
tggtttctctgattcggactgggcctcttgtcctactactcgtcgttccaccactggtttttgcatttttctcggagattgtttaatatcttggaaaactaagaaacagcccaccatctctcgaagctctgctaaagcagaatatcgcgctttagctgccacaggcagcgagattacttggctccaataccttctacaagatttccaaatccctcaaacacaacctgcatttattttctgtgataatcagttcgctatacacatcgccaacaatcccacttttcacgaaagaaccaagcatattgagctcgattgccacttcatccgtgacaagatcaatcgttctcaaatccggttaagccgtattaacagcaccttacaactagcagatatattcactaagcctcttgcttccacaaccttaaacaaaatgtctgtccacgatgtgtacagtccatcttgagaggagggaggggggggggggtatcaagaattaatttgtatttcctttctgtta

SEQ ID NO: 363196 - DNA, 506 bp, Cannabis indica
ataacccttaagcttaagatcaaatcctagggatattttagtaatttctaaccaatcccgccaaaccgacaacttaaaattctaatctagtctggtataaaatccaatttaattcatcttttattgtcgtgacatctctgacctctccgtctagttccacagttgtcaagcccgaaaatatttatttcaaaaaggatatccatgatacccacatattttgatataatctccgtaattaataaattacgctttatttattcttatctccctaatcaacccataattagtttaagtaggattataatcctaccctaatacccacataatcacatatttaataaaatatatccaattaaaatatcaatatatttttccgggatattacatagacccagatcggggaaaagaccttgacacaaactcggacacaggctcgcacccgaactcaaacaccgacacctagaatcagaacaaaagctagacccggacccggacccaaactcgaa

SEQ ID NO: 363197 - DNA, 929 bp, Cannabis indica
cacaccttctctttgggtataaccctttgacttctccaccaacacctattttcttcttgtagacccatttacatccaattgaatgatgatcatcaggtgcatctacatattcccagattttatttcttttcatggaatccatttctgaatctatgtcaggtgaccattatttccgttccggacttaccattgcctatttataggttaatggatcatcatcagtaccgtcaccaatggccatattgatttcatcatccaagccataacgggctagttttgtggaaaccctcccactacgacgaggagtcgtgaccttctgaacatgaatattagtggtagatttctcagttgtattaaatttcattggttcaactgagggagtgggattatcctctacttgagtagaagacgctagaacattatttggagttatatctgaaagcatttcctccaatactactttactttgcggcttcaagttcgtaatgtagtcttcctcaaggaatgtggcatttgtagaaataaatactttattatccttgtgactataaaatagtccactcctagtctctttagaatttctgataaacatgcaaacctcagttcgcgcttctagtttgccttctttctttcttaaaacatgagcagggcaatcccagattctataatggcgtaaactaggtatacgaccattccatagttctataggtgtcttggggtctgatttagatagaacaacatttagaatatcattttccatctgaataacatatccctcaaaggatgtttacaaagttgatagcttagcatagatctaactatttctaaaagtgtgcgatttcttctctctacaacttcattttgctgtggagtgccaggggcagtatattacgattcaattccaagttcaattaaatgatctttgaact

SEQ ID NO: 363198 - DNA, 816 bp, Cannabis indica
ttttgtagtaataattttaatattttctatatgttaattttaataatattaattagtaacaaaattgctaaatttgtgttatttatttcactacaaaaaatcttactatagatgatagagttttattttttctaaatattttacatttaataaataataatttttaaagaattaagttattgtagatatatattattatactgttagtttttaaatggtatattattatgaattcaaaatatatataattattgacaaatttattgaaaattcatcatatgattttaaaaatattatcattaccgtatctcacttgtaattgattttccgttcaaaatcgttgtcaacacattcaaattatgtgttttaaatattttcaaactgttatagtgagatttctctcacctagaaactcgagaccagactcctatttaaaggacacgtgtattcagatttccaatgaaagctgaaaggtccgtgagagactcctcgaagtttagacctcgctcaggataaaaccagcgagatactgcgagtacgacctaagtcgaaccatgtaaccgtaattcacattatgcagggtagatccaactcgcatgtgtcaggacatatgcgagtatcccctctatatttctgcgaaagcatagggaccaactctctatgatgcaatttggtcccaacgacccaatagccctaacgaaccgatataaattcgcatgtctaggttctaccagctcaacatgcgatgtctacaagaggcgattacctaagggcgcagacgttccaaacgtactgatgaccctgcgagctcaacaa

SEQ ID NO: 363199 - DNA, 578 bp, Cannabis indica
tattgtttgtgaagaagaaatacgaaaccctgcgaatgtgcatgaaaactgggagttgaacaagcttaccatcaagaacaaatatcctttacctcgaattgatgatctatttgatcaactgaaagggaagacggtcttctccaagatcgatcttcgctcaggctatcatcagttgagaatttgagaggaagatatcccaaaaactgcgtcccgtactcggtattaacattatgaattccttgtgatgtcttttggactcactaatgccccgagggcattcaaggatctaatgaattaggtgttcaaggactacctggatagatgtgtaattgtgtttatagatgacatcttgatgtactccgagtcagaagaagaggatgagttgcatctcagagcaattttgcaacggttacgagatcataagctatatgctaaattcaagaagtgtgaattctggttatcccgtgtctcattcctagggcacatagtggataaagatggtatcatggtggatccggccaaaattaaagttgttcgggattggccaacaccaaaatcagctactgaggtcagaagtt

SEQ ID NO: 363200 - DNA, 637 bp, Cannabis indica
tgctacaaaaaggatacaagggttagagatctgagcggacagagtcatttaattccgctgcaacaactttaaggtttctcaaaccttttatgtgtttattttcatcgttttagaaattcatattaacacgttaaaaatatacttgttagtaaatctagatcctggtaaaatatattccaacatcctaaccgtacatgaagctaactgaggagagatcattgtggtactaaaaaccttactgaaaccttttctagtcaaagaaaatgtactatattgtctttccctaggtgatacaaattctcaaactcatagtccttgatcagttccaaccacagcctttgtctcatgttctagtctttttgagtgaagaagtacttgagactttggtgattggtataaatctcacacttttctctataaaaatattgcctccaaatctttagggcaaatacaattgaaataagttccaaatcatttgtcgagtaacgttgctcatactcctttaactagcgtgaagcataagcaatgacactgtcgacttgcattagaatgttgggttttgagccctaaataaaactcatttcagtataatcatatttactaattaataaagatcagaaatcattttatgttgcat

SEQ ID NO: 363201 - DNA, 615 bp, Cannabis indica
tttttttcttgtgacaatatactttggaagttttgatttttaagcaacccaaaccgcccaaaaaaccgcataaaaccgccccctaaaaaccgcccaacccaaacttttattgggcgggtatgggttatgattttaaaaaaccgccaaataaaaaaaccgccaaaccgcccaaaaaccgcccaacccaacccatgtgcaggcctattccttacaatcacttgcctatacatgaaaaatgtgtaaattaagacatacatgaaaataaataaatttaattaatatacaaaataatcataacacttattgagtatcattggagttttaatatatatactgtaacatatctctgtccttatttcttagtgtattttctagtttaaatcttcgaagaaaatattatctcctttggaagtatttatgggagacacattatcttttgatgatgaattattttatgctattgcacacaattcttcctcatacttccaaccaatattcatccagtttatctttttatcatcaatatttcctgtaaatttatttctgcattcccttttgttggaatgggatacttttcaccagtgcacaatgcagaagatgatgagtgagttttat

SEQ ID NO: 363202 - DNA, 128 bp, Cannabis indica
gatccacgcagaataatggagccataccacctgtcaatcaagcgaatcaatcgctaaggcaaccaggttgttctgtgttcgataggttgggaacaacccatgacctaagggacgatctaaacagaaga

SEQ ID NO: 363203 - DNA, 776 bp, Cannabis indica
tcagggtaggactagttttattactttcttattgggcgcacaccatttttcatgattattttaacacttagctcatttctttgttgcagcagccaggcctatggaagatctcctagccactcttgccggggcatacagccccgacgcctctctgcctccggctccatcccagttggtgactcccgggaggtcctcctccagtgcccctttaggcacgatcatcttgatagacgaggagggggaggttgaggaaggtgaggtagaggatgcggccacgcttgagcgcaagcggaagggcaagatggttgtgactgagtcttctaagcagacttggaggggggacactccggcggtgagccacgactctgggattcattccgaggcggaggagtacacggtgccgcacgacattatgctgaccccgattcctgcggatgaggagaggcaaaatctccgagtggctaagcacaactacactcttcatgagtacagtcgggggcatgccgaggtggaggccttaaagaagattctgcgggaggagcagcagaacactcttcacgaggacgccttttgaaatttgtgggacctgaatatggacccgttgacggattggttcaaccactttgtcaggcccaccttagctccctttgccttggagatgaccagccagtttgtctcctacctgactcagtttccgcccaagagatacgcggcttgcgcttccttgaactccgtttaccaagtccaagcatcagctctgctatggccgcggtgag

SEQ ID NO: 363204 - DNA, 516 bp, Cannabis indica
aactagatttgatgaattgagaatgtcagaaactgaaactttaaatgatttttatgaaagattatctgatatttctaatgagttttttgccttgggagaaaaattagatgaatctgtcttggttcgaaagattgttcgagttcttcctgacaggtttgacacaaaattgcttgcaatggaagaggcaaaagactttggcaaaatgaaggttgaggaactcatggggtctttaagaacttttgagttgaatcaacagatcaagaaaaagagtaagcaaagtctctcgaatgagaaaatcaaaggtattgctttcaatgattctgaaaatattgtttctgatgatgaaaatgatgatgaaatggccttgttagcaaaaaatttccaaagatacatgaaatctgttggaaataaaatgaacttttcaaagaactcaaatggtaacatttcaggtaacaatccctctaaacctttttcatctaacaaagatattcgttgcagagagtgtgaagggtatgg

SEQ ID NO: 363205 - DNA, 1061 bp, Cannabis indica
gtagatacttactccaagagccttcaaaatccataacacaggctcgtaacatatcttccaatatctgaatcgtccttttggactgtccatcttcctgaggatggaaagctgtactaaacttcagtttcgtatccatagcccgttgcaaactctgccaaaacttagaggtaaacttcgaatctctatccgaaactatggactttggcacaccatgtagccttactatttctttgacatacaaatctgctaactgatccactgaataggttgttctaactggtagaaaatgtgcagacttcatgaatcgatctaccacaacccaaatagaatcaaataaacccgtggttctaggtaacccaaccacaaagtccattgtgatgtcctcccacttccactcaggtgaagttaaaggctccaacattcttgccggtctctgatgttcagccttgatcttctgacatgttaagcatctcgatacaaattctaccacatttttcttcatttcgctccaccagaagtaaggtttaagatcctgatacattttggtggtgcggggatgtaaggaatatggagtggtatgagcctcttcgagaatttcatttttaagttccatactattcggaacacgaaccctggctttaaacaataacatcccactgtctgacactataaaatctctggctttaccaactgaaacctcttctttgatctttgctaattctggatcagtcatctgagcgaccttaattcgttctagcagatcagagtgcagcatcaagttatgaagcttgcctacaacaaactcaatgctagaccttaccaattcctctgctaactgaggcgaaatctgaatcatactagctacctgcaagggacccttcctgctcggggcatcgaccaccacattggcctttccagggtggtaaaggatctcacaatcataatccttaattaactccaatcaatgcctttgtctcatattcaaatctttcagggtaaagaaatatttgagacttttatggtcggtataaatttcatatctgtctccatagagataacgc

SEQ ID NO: 363206 - DNA, 903 bp, Cannabis indica
actcgggcctcctgtatgatctcgcagaacccctcatggacttctagcatatttttcttagcttcagggtctgatacacaccttaggtacggcatgctgagtcctcttcgatagagaatgttatccatcatcacataacggtgcgcttggtactgtatccttctggatagtgccttttcttggggcaactcgcctttggttatgtattcgatgatggggatcatccagttgagctcttgttcaactgccgccacaatgcttttggctttaatgcttggttccgagaggcgttcaacgggcaccaccccagtttctcaatttcgctgtctgatgctaacttagccaaacagtctgcatgagcattcttttctctggggattctctccactttgtagtccgtgaactcatggagcaactcccggacgattgctacatacgcggccattttttctccacgcgtttgatattctcccgatacttggtttactaccagttgcgaatcactgaagacttctactcttctggcccccacaacttttgttaatctcagccccgcaatcagggcttcgtattcggcctcattgttagaggttgtgaattcgaacgtagggctgcctggagtcgaagtccgtttggggatatcattgctacccccgctccggatccattttcgttagaggcaccgtccacaaatactttccattatgggatttgaggtgtggtcacacttgcgttagcctctacctcatggcactccgttatgaagtctgctagcgcttgtccttttatggaggtgcgcagtatgtaatgtagatcaaactggcttaattccttatcccatttgagaagtctcccggacacctctggcttttgtaggacttgtcggagcggatggttggttaa

SEQ ID NO: 363207 - DNA, 533 bp, Cannabis indica
aggcggacttgcagtccaaggccaacttggccgtggagttgaaggagctcaaggacttaagagaccaggccttgaagaaggctaaaaaagatgagctcctgtcccctgtctcctgcaagcgctgcatcaagcgcttcgacgacagcgtctatatggcctgacagacaaacggccaaagcatcaagctcgacttctatcctaagcctgaggaggctattgccaaatttcgggagaagaagaagaaacttgatgcaatgcttgaggcgcgtttggggcctcgccttcctcctcgtattgactaggccgattgagtccaacccattttaccaagattatatctcttttttcttttttcttttttacagctatttttcttttattcaagacaattttaagtacgtagctgttttattaaggggagataattgcttatggcctgttccccgggcccgttcgtagttatattatattttttttttaatttctgtcccttacgggtccgacggagtattttattatatgtatcctttttt

SEQ ID NO: 363208 - DNA, 670 bp, Cannabis indica
caagtcagcttgtcttcgactgttgcttgggtgagggttttgcatcggctcggggttattttctagtatgctttctttttttcctgtgcattctaccacaaagtctgctagggcctgacctttgattcctgttcagggttggaaggtaatttcgtactgacccaactccactacccacttgagtaaccgttcagaggcgtctggcgtttgcaatatttggcataatggttggtcagtgtatacccaaacaggatgagcttgaaagtagggccttaactttcttgttgctagaatcaggcagtaagcgagtttctctatcaatgggtaccggccttcggcctcaacaagtctttactgatgtaatagataggtgttgtatgttgttttctctctgatcagcacgacactcacagcgtgctccgtgaaagccaagtatgtcgctagttcttctccatctagaggtgtcaaagtacgggaggctttgcgagttgcattttttactcctaaaagcttttctacattcctccatccattcgaatttctttttccttcgcaggtatgttgacgaatgggacacacttgtctgttgatttgaaacaaatcagttcagtgcggcgactcgaaccagataaactttgcacttccttggttcttgttggtagacttcata

SEQ ID NO: 363209 - DNA, 700 bp, Cannabis indica
ttctcaacagtttggagttggttgggtagcaagagatcatcggggcctattcatccatggccatacaaggttattcaatgttcaatctacaccagaactggcagaggctgtaggaattagggaggctttaagctggattaaagacagcggaatgcagcaagtggtgctcgagacggactgcttatcagttgttcaagccttaagaagttcaattgttatgatttccacgtttggtcaagtggttaatgagtgtaaggcgttgcttaatgttttaaaaaatgtttctatttattttattcgtcgatcagcaaatatggtggctcatgagttcgctcgagcctctgtatccttccctgattgtaatttcagtatggacactgttccaactgttttgttacctgttttggtaactgatatggttatctaataaagttaaatttccattcaaaaaaaaaaaacaccagaaataagtatttattaattcatacaatagacagacgaaacttcgggtaattaaacaaaaaataaacgaactattatttgtgtttatatacctaaatttctttttctaataacgagaaagtgagtgcacctaacttaatatatacaaatacatatatttatttgaggaatgctaatttcaaccttctattacaatcttttagtcaattttcactttcgaaatcacatgccgaaatat

SEQ ID NO: 363210 - DNA, 1113 bp, Cannabis indica
tgtacaaagacagctcccgaagggatcccaacaagagatgcgagtaccataacgacattgggcacagcaccaatgaatgcaaaaatctcaaagacgagatcgaaaacttaatccgattgggacacctctacgagttgatcatgaatcggttgcctcacctcaacccgggtcaggcggctggaactttgccacaagtagcaccagagggtgcagcaagagtattggctccagctgtcccccccggagatgctcagcatattcccggcctgccacctagacctaacgggagagtggctatgatctcgggaggaccccacatcggaggaaccacccgcaaggagctgaaacggtacgcaggggccgtgaaacacgatgaggtttgggaagttactcaactcccagctcaaaggccccggctaatggatcaacccattacattcacggaagaagacgcaaaaatagtgcgttttccccaccatgacccgttggtcatagagacccccattgccaataaggtggtggccagagtcctaatcgacaacgggagttccgtgaatttgctgttcaaagaggccttcactgcaataggcctgacggaccgagacctctcaccaagtggttcccaactcacggggttcaatggaacaacacttatcccaatgggaaaagtgaggcttccagtcaccttgtgcccggacacaccccagagcactttcaagtactgcacgttcgtggtggtggactgcccgacagcctacaacgcaatcctcggccgaccggccttggtggactttggcgcagtcacatcaatacggcacttgtgcctgaaattcccaacccaggaagctgggatagggacggtgaggggaaatcaaggggaggcgaggcaatgctataacgttgctacccacctaccgtgctgatggtccgagaaactattgagccagaaatggctgaagaagacgagttggatccccgtgtgggatccgaaaaaatcgtagaaccaatggaggacgtcgaggagatatcagtgtgcgacctcgactccaccaaagtactccggctaggaaagagcctagacccggaggaaaaagaaaaaataataaagacact

SEQ ID NO: 363211 - DNA, 828 bp, Cannabis indica
atggcaataccctaaatatctcaaaattgggaaaaactagggtcccaaaaattcccccaaccggcagaccggtcccaaccggaagtccaaaactgggacaccaaccggtcgaccagttggtacaggtcccccagaactggtcgaccggttctgtgctgggaacccaaaaaccagtccccttaactcaaaattccaccaaactctccagaacatctgcacaatacatttacaacgttttccaaccaacaaattcaaaaaataaccactaagtcaaaatatgccattaaagacctaagttaaggtttttatgctcaaattaacacaaaacctaaatcaaccaaccaaaccagctgctataacccttaattaacccaaactaattctagaatttgatcccgaagcatttcaaaccaaaacagccactattactcaaaaacacaagctcaaactaagaagaaaactttaaaaacatcctctagggttctagggttttaccttagcttcaagagtgcttgattccctagttgattgcagcaaaacaatgaagaagaactggatttccttctggtctaggctggccgaacaaagaaagagaggaaatagagtgaatttcctcaattttggcgttttctctaacttccttaattttctcaaatgaaaaggatttatctaatcctttgttgaactttaattatttttaagtattttccaagactaggggtaaaatggtcaaactccatatccccgctcaaccccgatattttattttctctaaaatatttcccactaagaaataaggttctaaacttacccatgtgatcaaactag

SEQ ID NO: 363212 - DNA, 584 bp, Cannabis indica
aggaatggggtaatacctggctttaaaaacccgcgccactaaggaactattatttgtcaaaagtctccgaccttgctttcctaacatagctaaattaaaatccctgagatttcgaaaccccaatcccccttggtgcttatgcaagcacaacttatcctaactcctccaatgaataccttggccttgcgacgacttcgtatgccaccaatatctacccataagccgatccacatctttacaaatctccaaggggatcaagaaaacactcatagcttaagtcggtaaagattgaataaccgacttcaaaagcacttccttccccgctctagaaaagagtttacgatcccacttgtgaattcttttcctcaccttctcttttagaaagtcgaaagtgacattcttatttcttcccaccctactaggcagcccaagataaaaactatgatcatcctccgccctcatatgaggggtagacaaaatagaatcacaagtcccgacattggtattcgaactgaagaaaacagaagacttattaaggttcaccttctggcccgacgcccgctcaaaagtgttaagcaactcca

SEQ ID NO: 363213 - DNA, 637 bp, Cannabis indica
tgacatactctcttgaagcgaaattcttgttgatttttgtttggaaagtgatttaggcaaattttttttggatcgattgagcctttcaagcttactcgaaaagttttatcctagtatacccaaagttgagccttagcctattctgaaaaaaacttttcaccacttaactaagctgaattcgttatccttaactcttttcaccttaaacataccttattatgccataagcctttaagcaagtttggggggataaattgttgtaagtgggggaataaattttgcagtaagagattgaaaagaaaaataataataataataaagttgttatgtgttgtgcctctattggaaaaagatagaagaagaaagaaaaacgaaacagaaaaaaaaaaaagtaaatgtgacaatttcttcttgagaatcaattgtgaacaatgaggtaggcacataggaaaaaatatgcaatctcttactgtcttctttgggataaaataatggataagtgtgggtgcttttttggtaaaattgtgcttatggtataatgtagcctaaatgacttctcatctacccgttgtacctaagccatgctattataaccaaaaaagacctattgatttcgagcaaaaattgtcaacattag

SEQ ID NO: 363214 - DNA, 845 bp, Cannabis indica
taatcaaataaataaaattgcttatgcttcagagatctaggaatgaagacttagtggatagtattacactatcaaattgcagcaattactacagatcaatgaggtacgcatatacctaattattacatattgttattttgttctatattatatacaaattgatcttagatttattattaatttttttaacatgtagtatcaaattgccttttgtatatgatttaggacctctaatttgtataattaatttgtatatgtatacgttaaattttaatagttacatattaatttcgtaataaaaatatgataaaatttccttattgaatcttaaaactttaggggttttattccccgttaaattctctttctgttgatatgttatatgtatgaaatcattgagtaaattatttgaattttaagtattagttttaggatttgtataattatattataaaattctttttgtattttttgattttattatttttgatctaaaattgattattatcaattatttatcaatgttcttgaacgctttattttgtgatttgatcgagatttgtatcgtaatcaagtttttttttttgatctttaatttttgaattgttttttacattagatctactctttttagccattaatacctaaaattaatagcgtagaaggaagcctctatctgggacttccaaacattattgggagaaacaaaaatgctatactaggatttttgaagaccacggtaattgcaagaattaatagttgggatgtaatcgctccccgcatatgctatgagtgtttctctccttccacttggtacatgtaatgaaattgaaaaacttatggcc

SEQ ID NO: 363215 - DNA, 609 bp, Cannabis indica
atccgagaggactatatagattttagaggatgtgctacgggcatgtgtgcttgactttgaaggatgatgggtaaagtaccctcccctgatcgagttctcttataacaacagctatcaggaaacaatcgggatggccccttatgagcccttatatggaagaaaatgtagatcacctattcactaggatgaagtgggtgaaagaaagttcttgggtcccgaggctattcaaagaacgagtgaggcagttgataaaatcagagcgtgaatgctcgcagctcagagtagacataagagttatgctgatccaaagcgtcgggatatggatttccaggtcggggacatggtatttctccgaatatcatcgatgaaaggtattaaatactttggtaagaaaggaaagcttagcccgaggttcattggaccttttgaaatcctcgagaggatagggcaagtagcgtacatgttagctatgccctcagtgttggcagctgtacatgatgtgctccatatttcaatgcttcagaagtatgtctcagactcgtcccatattctgagttatgaagcattgaaacttcaaccggatttgtcatatgaggaacaaccagtgca

SEQ ID NO: 363216 - DNA, 672 bp, Cannabis indica
acccctctcccatctcctagtaccgttaatattcatcacagctccgaccaagaatctccaccagaaccactcatctcagtcgtcatcgctgtaatgagataccgatctagcctgcaagtaaccgttcaagaggttgaatccgaaagcggtggcagctatcgtgaggggaaaatcgccggcggttttctggcgaaggatgcggagagggaacaatagggttcggttgaagtagtggaggaggaagaatgagatgaggaagatagatttgggattggatggatggagatgaaggtgggtggtccgatgagatagagagcaataagactatagggacaaaaaagagattaattaattagtggaggttaaaaaaaattaattatttatttaaataattattatttaattttaaaatattattaaaaaataattttagaaataatctaatacattgtaagtattatctatgtatatgcactcatcaatttatgaccattagattaaatatttatggctctaaaaatgtgtctaccatagagacaaaagcaaagttcttactataaacatgtcctatatatgctttgaactcattatatatatactaggtagatgttacgtgtcaaatccacgtattgttagttttatttgaagttttagattattttttatattttt

SEQ ID NO: 363217 - DNA, 720 bp, Cannabis indica
tcacaaccaaattcacagaatacgaaatcctaaagatctaggcgacgatcagaagtcattaagtctcgcaaatatgcgagtattcgaagtgtttgtctgaatacccacgagtattcaaaacataaagcagtgcctactcaagcattttctatacagtgtgcggttatgctagttttgaggtcattttttatgaaattacccagtttttacctaaaaaacgtagcctcatatatataccctacacacattcattcttaaactctctcatgcatatcaaaaacccagaaaaacggtgttcccaatttaacagaaaatgaaacacagtgaagattcgaaaactaaccttttacttctgctaaatctgttcccacgaatcgcccttgacagaactgtagaatcaagaaaaaaacttacgaagaaaggcaaaaattttggcaatttatggaagaattttttggtggtttctctaaaagtgaaggaacaaaggagttaaggaagttaaagaaaaatgagggaaaatggggatttttggttcgaatcagggggtttaaataccaaaatccctcagtaattgggatcacgacacgtggcaaatggaatgcctagagtcgcccaatccaatggccaaagatggccacgcctacacagaaaccgaagagttttgtgacgtggcaccataaatgcaataaaagtaatgattatagccgtcatttttcgaaa

SEQ ID NO: 363218 - DNA, 873 bp, Cannabis indica
gatatgaattcgccaaaaccaaagaagtgcaaagcttgactggtcggatcaccgcgctcagtagatttgtttcaaaatcaatagataagtgtgtcgcattcttcaacatcttgcgatgaaacaagcagttcgagtggacggaagaatgtgaaaaagctttccaagagctaaaagcacaactttcaaagcctcccgtactctcataacctctagaccgggaagaactaggaatataattagctgtcacagaacatgccgtgagtgtcgtgctaatcagagaggaaaacagcatacaccacccagtctattacatcagtaaaagactcattgaggccgagggccgatatccgttgatagaaaaactcgcttattgacttattctagcaacaagaaagttaaggccttatttcaaagctcatcctgctcgggtatacactgagcagccattacgccaaatactgcaaaagccagatgcttctggacagctactcaagtgggcggtagagttgggccagtatgaaatcactttccaaccccgagcagcaatcaaacaccaagccttaacagactttgtggtagaatgcacaggcaagaaagaaagcataccagatgccaccccgagccggtacaaacacctgagtcaagtaacaatgaagataagccgacctagaaactacatgtagatgggtcagctacagatcaactatctcgtgcaggaattgcccttgtcacgcctaggggtaacacctgcaggctgtagtcaagtttagattcaaagcatctaacaacgaagttgagtacgaagctctaattgctggctaagactagcccaggagatgaaggccaaacacattgaaatctgcagtgattcac

SEQ ID NO: 363219 - DNA, 536 bp, Cannabis indica
aattggtagttcgatgattttgttctatgttaatctaaattggaataactaatctatatcagcaaaaatgacttctgaattacccatttataactaaataatagtaaaaaaataaaaaaaaaaaaaaattaacaacttctgatatattttttttaagagattttatgttttttcatttccaattaattattttttattatgttttctttttttagtgtaatcatgtttcttcacaatttaatttttaattattaaatttcgtagactttgtttaaaaactaaactgtgttaattaacatttaattagtcaataatgtcatttttgtaatttagtataaaaacatatatatatatatatataaatcaatctggaattttatataattagcaaaatatattggattagttagttaatttagatagaaagatgaggaaattacattttatattctttttatattatctgcttttatttttaccttctttttaaaaatctatcatttttacttctttttttaaacatggtaccaattttg

SEQ ID NO: 363220 - DNA, 835 bp, Cannabis indica
cttaagactttttggaaatacttctgaaaattatcaagtcttataactctctagttttttgtttgcaagatagaagagaagagtatgtctcaaaaggatgaaccaatgtccatatttatagtgtttacgatcacacgctttggaattcaaacaccctacacccaatggcagttaccatctcttaattgggtataaatgagtgatttgaaggttatgggagttgttagaaagcatccacattgtcaaaaacgttgaaattataaagctaaaaaaagtaactagttactagtaaccaaatttttcagtttttgtaaataactcttcaaagcattccaaccatttcaactttattttatatcacttatacacatttaaattacaaaaataaattccaaatagctatatttttattatagctttgaatttcaaaggattaagttgtgtaacctctctttacacacttaattagtgacaatgtagaagttacaaaatgtaaataactctacctcttatgttaccatttatatgatgattacatgtatgtaactcccaatcaccttatatattatactcataataatatatatattatataacgtacttttaatcttaaatattatattatttaataaataatatatcatttctctactagattaaagtttgtgatacatcattgtaacacttatttaatcaatcaaacatatctcatatatatctcccactttgaataaatcaacactcttagagagactttgctcaagtgcataagataaagtgtctttcaacttgaactttatcatagtgtaatcatcacaaattttattaaaaattt

SEQ ID NO: 363221 - DNA, 1309 bp, Cannabis indica
gagagagttagggttttagactttgagcttgagagctcttggggaggtagggacttagtgacttagagaattagggttagactaatgctctttatatagtagagcttacatgaagattaaacactaacgtcccttaaaaataagaagataaagccttatttacataattaaataataaataataaataagataattatccctcaaatataggaaatttactgacatttccccctatttttgtgggttgtcaaggtccaaaccgcaacttagcttgctatccatgattgaaggctgcacaccaaaggcttgctaggaaatggttggctggccatgttccttctagggtttggccagccatgtgcctgccacagtctagccggccatgtgcttgccaaggtttgcaagttgcacatcaagtgtctgccagcctacaggctgcacatcaagtgcctgccagcctttgagacctggccggccctaggatttaatcatgggagttgttcagctttagggtttcaccctaggaagcaagccagttcatgcttgggtttggtgaccctggccaattcttagttgagtcatgggaccctggcgtaccctctcaaatcttgagaacccttactggcctaggccttgattccaagcgggtggccagttttctatcctattttgaccttagcaagaatcttgtcatgaccttgtaggcatatacaaccttagtccatacgtgatttccttagaaaatctatatgaaactcaatggagagtctattatagttgaatgctcaacttaagacttaatatttgtccaagttgttacacttgagactgtactttgctgatactcagccttgtacaatgacattatttggaaagtaccctggtacagttgcccagagttttatctatggctcagaacctacaaggaactctgccttttggcttgggaccttccatgaactctgccttgccttagagatttagcctggtacgtggttcctataggaactcagtctggttcttctctggctgtacagttctcgagtggcctcaactttatgcattttgaaatgcatagttcttgtgaggccttgaccttatgcatttgaattgattttttattcatattcggccttgaggctttcatgttcttgcttttggcctatagacactttatttttgaacactactattgtttagccttaaagcccttcactatggacgtatgactgctctgactatcttcttattgtcttgacatgtaagtatccaaatttacttttctttatgtcaagctaaagtatgcct

SEQ ID NO: 363222 - DNA, 505 bp, Cannabis indica
atgactaaaataacctacagaaactacaaacaatcaaatatgggctctttaaacatacattccaaatgtatgggctttaaaaacccataaaacatgcctaaagtttaaaaaaaccataaaaagtgtccaaactaaactatgccgtatttatcataaaacatttaaaaaaaccatactacacgtaatttccacaaaaaaattacaaaattactatgggccggcccattcaacatttatacagcccacatacaaatatttacaaaaataccacatgctctaaactttaagccgcacggactgaacgatgaagatgaacatacctcgatcgtttcaaaacagcaaaacaaccaaaatgaaactaaaatgagggaaataaaaccattaattctagcgaaatcaactggaaaagaagacctgcaatgatctaaatagaaatttacaaaaaaaaaaaaccagaaaaactgggaagaaactgaaattacacaattgttttcggttttattcg

SEQ ID NO: 363223 - DNA, 512 bp, Cannabis indica
tttgtttgatctaagtaattcaattatccatctttgaaagtaacaacaggtaatgtttaacaattactcaaatcacatgatttttcttcttcttcttttgggttgtaacaacttttactataacatattaattcattatgaacaactagtattgtgtaggattaattaactcttgttaagtttggaattttctagtggaggatttgtttcgtctttggtcagcaataatatccaaagggctttatatcagacactattacattgtctgtattatgtctagaggctttataccagtgtttgtttcttttgcagtgtccattcacaaatacaccactactgcaattaaagcatgttttgtgatatttctttggcagtatatatgcatttgaggttcaatgcagtataagtgttcaaacatgaattattggctccatttgattttactctgttttatattttttttattaggatttggcgttttgcaagtgtttgaaaagaatttgagtcaagtg

SEQ ID NO: 363224 - DNA, 956 bp, Cannabis indica
cgaacaaacacttttctgatgctcagattgacaggattaaatgggtttatggaattatgaaaggttacaatttgaatgtgggggatatcattcgagtgacatttgacataatggttgaggggtcttctggtggtggacttgggcttgctggaattatcaccgacctttgtgagaaacatggagtaccgcagtactcatatgataccaaggcgccgccacaacgcagtattaacttgtccactgttcttcgcctcaaacctcctcacccttatggtcaaccgccagctcagagagatcctcctgcaagagaacaagaggagcatgaggacattgaaccaccacgtcttgccgggcctctcgacccagccatgcagtacactcacgatcagctgaattatctgattcagcaaaacatgcacatgcagaattacatggcccaacggagtgtttttgatgagcagcaggtggcccaattgaacgcacttgtcacgaggatgaatgtcggtgtggacgatcctaattactttgcaatgccaccccgcttcaacccttatgaccagccaccgccgccaaaccccttctaaggggctcaggtaagtttctctcatcctggtttattttcacacattggggacaatgtgcatctttagtttggggggagagacttaaattttttcagtttatttgttttcgttaattagtttttagttttttttaagtcatgtgttgatagctaaattggaagattgattgaaccactgttattcacttgtgcaatggattaaaacataactgtgtgcttgatttgcaactgtttgaattaaggtggatgtgtgttaggaggttgttcatgtagatataaaacatttgtttttgacgcatatcacttctgttctatttggtttgtggaatgattgactgtacatgaaatagaatttgtttgacatactttcttg

SEQ ID NO: 363225 - DNA, 616 bp, Cannabis indica
tcgacccctgccttaatgagtttggggggtatttatagtgtttttgtggggtgatccctagaattgaggtacacgtctttctgtaattttcagtaaaggcacacattcccaatggatacatcataggaaatgcatggtctaatccctaggcattgtaggagtttaatggatgaagtcctttatccttcttgactgatgtgattcctcataaagtagtcgtcactaggcttactaatcatagcgtagtagctgcagaaagggggttatgttgtcagactttaagacatatggcagtttcaatacgccttctcctatgcggcattaaatgcgaggtgactgttcagataggatctgacacctcccagagatgctttgttgtagctttgctctccgggagtatgtgaaactcacatgccttctccgggaggcatgttagatgctgatccctttgactaaagagacttagctgaattatcccaacgttaaaccccttcagtctacgcgtctcaagccggttggtccacgtattttgggcaaaatcaggggcaatatttaccccccaagccttgtttagtgaaaaagtaaagaaggcttgcttagatgcctccggttgcct

SEQ ID NO: 363226 - DNA, 675 bp, Cannabis indica
cattcactttctctttctctcttcatcttattctttcttctcatctactttatataattttatattattttttaacacacacaaatttcttttgccttttaaattttttacataaaaaatacaaaaatactttttatttacataaatacatttatacttttaaaatcgatttaattgtcaaaatatattttggtcatacataagcatgcaagtgttgatgtcattgtttattatcacactcaaactcttttctctatattttctacacttcttcttcttttatttttattttttattctcgactaagtccccactatcaaaatcaattcactaccttaaaaattctacccacaatctcaaactttgattcatactccatcatttagcgatttattctccatcatcttaactccatgatttttttctgcttttttcttttataaatttttatataatggctatcacgtgttcttcatcttcttcttctcttactatgatcaaacccactcttaagaaaccattgttaaaagatttaaacctccagtaatacatgtgaagttgttggtgaaaaataggcaaaggaaaatggcctattgttgggatttatgccctaaaagtaagtaattaatggataatatattaaaagaatatgtgaaatacaattataagataaat

SEQ ID NO: 363227 - DNA, 571 bp, Cannabis indica
attcactgggcagggggatcgatcagtcgaaacgcagctaagctaagactatactactatctaagaattatatattcagagatactgttgtaagagctataagaaaaggaatcttcttccttgatcttaagtcaatacaaataacaaggcttaggctattaccgaactgttcagggttgaactctataaaattcttttgtcttattattgctttatcatacatctattagtacatatcgtttaccgcttataaaatagactcattgtcgttggctaaaagcaaagtcaacattttggtgctttctttgagagaaggatcataaatcgctctctattcgacattcaactgccaacacgatggtgcaaactcgtagaggtcagtctgacccagcaaattcatagatgctggatcctacattacaggacccagggatttcaagggttccgcctgctgttaatcctggacagacgggaagcgtggtgaatggtggaaaagctcctattattggaatcgcacctggtgtgcaagagactgggaataatagtttcgcacccaactagggcatccata

SEQ ID NO: 363228 - DNA, 711 bp, Cannabis indica
gatgctaatattatatcaattacaaactacactattaatcaaatgctacgtttgctaaggatagcatcgatgggtcctaacatgcttatagcattagcatcagtttatagcggagacactacatttaagtattttagaatttaattaaattttcaagtatttatttcgagaaaaacttgtattagaaaattattttaccaataacatttatacattttatcaatattcttgtcgttcttttaagttattgttagtctattatcaaagactaaaagaatcatacatattaatagattaaataaactttattttgtaaccatagctatgttagttaattggtaatttggtattttagtgttttatgtagtacaaatccacttgaaaaataattttgttttatctaagaccaaaatcatttggtcttttctatcttttatgccttctttgggattgatataacataacatgacatattttgttttctatctatattttagaaagggaatatacctaaaagaaaaaacaaaacaaaataaatcaataattcagaagaatcttttcttcaccatacaaaaattatttaacactcataataatttctaacagaggcacagataattatcacttttaagaatctattgctccctcaaatatcacatgatcatgaattttctcaacttacagtgacacctcatacaaatcaataaacac

SEQ ID NO: 363229 - DNA, 581 bp, Cannabis indica
cttttaattgaagcaatcgagcacgagattgactagcaaatctctgctccaaggcacgccaaacgagcgaaaggaattgtgatgattagccacagaagcaagaactccttcagtcatggaggactgaagccaagagagaagaagttgatcccgtttcttccattgctgatatgaggggttgagagtgccatcgatcaagatttgaggaggagaagcatcactgaaaagaatgtcatcaagatcgtgcccaatgactgtaggaactacttgagacttccaagaaaggaagtgtgtgcgatccaatttgatggtaagagatgtggatagaatgagtactacactgctatcaactctgccaacataggcttgtacaagactcaactcaaaaacacaaaaatggcaggttctttaaatgattatctgctgaaaatcaagtggatcattgatctttttgctacgattggctataagcaatctcctgaagatcacattaaagccatctttagtggcttatcatctgaatattgtaggaattttcttggtgaaattccaagattaccctacaccaactcaagtttaca

SEQ ID NO: 363230 - DNA, 725 bp, Cannabis indica
taatatctttagggtatagtctctactaaactgtttgcgaccccccttgcctagtgaacatgcatcactatttatagggctatgaacttggagaggaagtgtttcccctctcgttacaatggatataagcagaaagattgcacgatccatacagtatacattgatcgtgagatgtatgcggaatacattgatcgtgggataaatgcagaatacactgatcgtgggatcgtgggtataccatatctgtgtaatctgatccccaagttatagggatttcgttgatgactcacaatgcgaaagctgaattcgctaagtgttggttgccctacgcggattgttgattgctttgatctaggcatgccagcgaggcatcatgcttggattgtgccctccgaacagattctcaaagtggattccacatgtcaccattatgcgatgccacgtcagagtgcaaaaattgggataacatttgcccccaagtctgtaagggacttctgaagttgcgtgtagactttatccgagctgcttctgccttttgatggggacacgtgtcgagcgcgactgtccgagactcaatgtaaggctgactgggcgtcccttcagttttcggctagtaaatgctctgacaattaatatttcgaaatccgattttctctcaccacggctgacggctgcacttgacttattttgattttcccatatttgctttttaaggagggaaactg

SEQ ID NO: 363231 - DNA, 526 bp, Cannabis indica
gcagattttgctggaggaaagaacttagacagaaattttgttgccaagtcattccatgtggctatggagtttggaggcaaggagttcaaccaactcttggctccttctctcaacgagaatggaaacagtctcaaacggatggcatcatcactaactccattgactttgaaagcctcacataattccatgaagtttaacaagtgtagattggggtcttcaaaagggagtccaccaaactagattgaagactacaccatttgaagtatggcaggcttaatttcgaagttgttagcatccactactggtggtctgatgcatggctgaaccaccgtaagagctgggaggatataatctctcaagctgcggccatttgcttgatcttcaacaccacctccattattaccgttgttgcctccattatttgcaacattagcgttatcagccatgatttctggtgtttcagcatgtgctgaaactctctcgtgccttttcttccttctgtttctcctacaagtcttctcaattt

SEQ ID NO: 363232 - DNA, 1175 bp, Cannabis indica
gtggagggtaggccactactcagagcgatcgtggtgacagtaatggtacgaaatgtgagtccaggatggagagagttttcgtgaactatcctatggcctactggattaaaatcctaaggacgaccacgtcattctctctctcatgccacatgtcaaactaacagtcgatcacacagtaaatattgcacatgtccaactctgtaaatcgaggacccccaccaacaccctgagcccactattattacttgggaaagggaggcccaattaaggatgtggtagcccacctttttgactctacaacaccaacccaaactgatataatatcctaagattagcaacccaattaaaaatgtattagttataattgagtaattatattattatataattaattaaaatgtattagttataattatatgaaattatttgagaattattgtatttaagaccccatttatgaaatttggcgaaacatattaaagatctggaccctccaccaagtacatgtactcctgtaacctcgagggtaaggtttgactgcaactttcacagggtagggtagatgaaagtcgatggaagttaccgatgatgatgatttatcccttttagctttaaggagaccaatcaactcgtcttttgttacgaacactaaggaagatcgggcctcttcaccaatcctttcagtaatctcataagttttgattcctcgatcattatcatgtgttgcttgagtttgttgttcaacattatgtacttgccctataaaagattcatttatgtcacgttcttcatgtaagtctctcctttcaacatatgcttcttggtgtgtctgtgatagaagcgaactcagtaattgtatcatgccgtcttgggccttttgaatcctttctaatctggctaacacaacctcatatgtgttcttcggattagtattattgttattcttgttgttgctgttgttatcattttgcaagcttttcgttcggatccgactgtcttgctctcgagtatcagagatagacatttggacttagataaaagaacataatttcttttttttaagagaacgaatagagcgtttttctgagtatatacataagtatatacaaattattcaaagaaaacacttcccagttgagtcgccaatatgtttagggattctagctaaacattta

SEQ ID NO: 363233 - DNA, 826 bp, Cannabis indica
aaaaaaaaaataagaaaaaggaaaagtcaaaatgtggcagaaaaaaaaaaagatttaaatatgttaattgtgatgatatatatttttaaaaaaaaaaaaaaatcattttcaaaaatcttaattttaaaaaaaaaagttcaaaacgtgaccaaaaggtgatttgaatatgttaattgtgattgacgttcttttaaaaaatatcattcttaaaaatttaaatttcattcatttcaaaaaaaaaaaaaaattaaatttcaaaagaaaggtcaaaaggtggccaagtaatttagattttattagttaaaaatatatatttatatgaattaatatttatagaagttaataaaaataaaaaaaaaatagaagaaaaattaaagaaaggacaaataatgctaaatagagagatcatagagtgttatgttaccacattgtatttctcctttatatattgatttaaaatttatattacatttttgttaaattgtattataaatatatatatatattattattcttttgaaaaaaaaaaacaaaagattagctagaaaaaaaattgagagctacaataaaatatttatggtatatttttttattaatataaaaaatagaaagtgagataattaaaaagaaagtagattgggatatttgaagtaattttagactgtcacaataccgcctcatatttcaggtttatatatatactagcaaaaaaattacgtgcgaggcacgtatactaaattttatactaatttttttctatgttatttgaaagtgatacaattaaaaattaaagaaaaaatattattagttattaggtgagattatt

SEQ ID NO: 363234 - DNA, 870 bp, Cannabis indica
aaatttaacacgccagttaaatattaatgttaaaacataaggggttttgccacaaaaaaaaaagaggattaaatgtataaaaattaaaacataagggggttttgccaacaaaaaaagaaagataagatgtttaagtgtataaaaattaaaacacaaggaagtttcgccctgaattgctctttaatttaatacttatttgttttcccaaaaaacaaattagggatttttacacttgatgcccttttttaccatttttttacatttttatttattctagattatttaaacttttttacatttttatttttcaattttactttttcaaatgttcaataattacaaatatacatttatcatgcatatgtcatgttttatccattctaacaccccacctcctccataactgccatattcttctttttttttttttggaattttttttttctctgtttctctttcctccgttcttcaacctccatagcccatgatcacccagtcgaagcccttacccacgttttttctcaatctctcatctatgccactatctccattttgttcgataatctttataagttcttcctcccccattgtgttatcttcttctataaatgaccaccactagaagtggttcgaagtccccatctccaactaaggtgatgttccagagccatctggtactaagaaaagacccattccagataaggtcgagtctcgtaaggcaaagagagcaaaaccttcgaagtctacaaaggatgtaagtttggttttgttgtttttcagtttttgtttagttttttttctggttgttgtgttttttcgtattacattttgtgttttaaattttcccccccttcttgttctaggttatat

SEQ ID NO: 363235 - DNA, 507 bp, Cannabis indica
tgtgagaaaccttgtgacccaaaacgaagccttcttttaccattaaaaatggcatttctcccaattgagtaccaaatttgtttcttcacacctcttcaagactttctccaagttagctaaacaagtgccaaaagattccccaaatactgaaaaatcatccacgaagatctcaagaatgctttccgccatatttgaaaaaattgtcatcatgcacctttggacagtggcaggagcattgcatagccaaatggcatcctcctaaaggcaaagatgccatatggataagtgaaggttgttttatcttggtccttcgacgctataaaaatttgattgtagcccgaataaccattaagagatcaataaaactctttacccgccaaacgatccaacatttgaccaataaatggcagcgggaaatgatccttcctagtggcattatttagctttcgatagtccatgcacaccctccaaccagtcacggttctagtagggatcaattcattgttc

SEQ ID NO: 363236 - DNA, 675 bp, Cannabis indica
tacagtagaatatatatatatatacagaaatatatatatactagtaatatataaacaaataaaataataaatacccaaataaattatatatatacacaggaaatatatatacaaaatacaaataataaaataaccaaataaaatatatatatatatatacaaaaaataaaaaattaaatacccaaataatgtatatatatacacatattattatatatacacccaaatgcacaatatatatacagatctatcacaaaaacaaaaaaaaaatccgatctaaacataaatatacacccagatcataaatcaaaaatatacatacaacaataaaaactgaatatacaaatctaaaacctaaaattatataatatcaaatgtaaaattaaaaaaaaaaaacaaaacttactaaaaatggccggtggtacatcgggatggtgctggtggtgcgtcggggtggtggtgcgccggggtagtggtgcgccggggtgggggtgcttcagggtggtggtgcacgggggtgggggtgcttcggggtggtggtgggcagccaagagggggaaggttcgggctgatggggggaaaatgggttatgggattttttgaattttgaaaagaaaaggaaaattggagaagtggggctgatggggggtaattataaatggtgtagcggcggac

SEQ ID NO: 363237 - DNA, 670 bp, Cannabis indica
ttcatgattatatgtacattatgtatgaattcatctgaaacccttttcacatacttgatcctgtttattgtgatgtcaacacattggaaagtaaacatgactatgtttcttctcttaaagctcttacaatgaaatccttgagtattttctcttggatctctctcaagcaattctctcgatcccttttatagtgagaattgatcactatttatagggctaaatgcatgagggaaggtttctcttttgcttacaatatctataattggtaagaacatacattgcatattgagaatacataaaatgagggattcggacagcttgccatatccctttgatacgatcctatgattgtagggattgttcttgagcttcaccatatcaatcgtagaaagttaagtcctgatgcacagcttggagaaatgacttcatatgttgtttggatcatctgcccttgttctgttcagaacctttctccagccaagtgtagagaatagcggacacgtgtcaccagtatgcattacctcgtcatagtgcgaaaaatggaataacacaaaaatatcacataaaaatcctcaaaaaaaaaaaaaaccaataaacataaataatttaatttttgagttttgaaaggagaagaaagaagaaatttagctctgcattttagattgaacgg

SEQ ID NO: 363238 - DNA, 781 bp, Cannabis indica
ataaacttccatgtttttccctatttgatttgtgaacatttcatttactagtcgctgatatgttgcaccaacgttcttcagtccgaattgcatgactatataacaatagagtcccatgttaattacaaagcttgtatgttcttgatctgggacatacatttttatctagttatatccagaatatgcgtccataaaagacataagctcatgcccagcagttgcatccactaactggtcaatcttgggaagtggaaatcagtcttttgggcacgccttattcagatcaaagaaatcaatacaagttctccaagtttcgttaagttttgggacgagaacaggattggctatccgcgagggataaaagacctcgcatataaaatcgttgactaataacttgtgaacttcctattttagtgccccttgcctctcgaaattgaagggcctcctttttgtctcttcactgggtagttgggatcaacatttaagtgatggcagataatcttagggtcaatccctatcatatctccatgactctaggaaaattgatcctggtttgccttcaaaaagcttattaattaattgctatttgagtcgctcgtccaggttcttcccaatgtacacacatttggtgggatttccttggttgagaataacctcctccaattcttcaattggttttagtaggtttctttcatcttgaactcaaggatcaagatcttcttccttcttctcattttctcctaccaagattgtcatcagttgatgaccagccttcctatgc

SEQ ID NO: 363239 - DNA, 857 bp, Cannabis indica
gtaagatttctcttacttttatgtgtttaattatccatcgttttagaagttcttatttaggttgttaaatcaacatacttgtgagtagatctaagatcctggtaaaataattccaacacttgggtctcaagacttcaatctgtaccaaattcaacttgtcgagatcaaattgggatgctagctttgataatgcatccgcattagagttttgctctcttataatttgtttaattttaaaataatcaaaattttccaagttctttcgaaccttctcaaaatactttgccatttttaatccttttgcttggtattctcccaagactagatttacaatcagttgtgagtcactaaagcacgtaagatttttgacctttagtgtctcagctattctcaaacttgccaataaggccttatactctgcctcgttatttgaggtatcaaattggaatctcaacgcgtagcgggatttgaagttatcaggcgacatcattataactcctaccccctgagccattctcatttgaagtcccatctacatttaatttccatttttttgtttcacgttcaacaactgggtcttcttttgagtttatcccttaaattagaaactctgtcgaagctttccctttgattgatgttctcgggtggaaggtcacgtcaaatctccccaatttaatcgaccactttatcaatcttcttgaagtattaggttttgataaaacttgccttggtggttgatttgttaagactttaattggatgcactttgaaatatggtcgtaatttgcgagatgcacgaattaggcataatgaaagtttttcaaaagggagatatctcgactctgcccccagtaacct

SEQ ID NO: 363240 - DNA, 627 bp, Cannabis indica
ttgatgttgaataaaatagattacatttgaaatggagttttatttaggacataaaacctaacaactaggacccgacctcggtctcggaactggaatctaactaggaaccagaccaagacccggactgagatgccgacccgaatcaaaactcggatcacgactcacggcactaacccaaacccagacatggacttggacccagacccgaacgcatgacccggaccgggattggagactcagacctagacccaggtctctgacctagattgggcacccaaaccagaaattagaaccataaatagaatcaagacccaggactaggactgggacccaagacctgagctcggtctcgatcccagactcggacccagacacggacacggaccaagacccaagatccgaatcggacttgaacccaaacacggacctagacctagaccaagactcggacccaaacccacacccgaaccttaaatcgtaccttgtgaccccaaattggaaccagaactataagcggacccttaaaccctaaaccttaaaccctaaactctttacacttactcgtaaaccctaagccataaaccctaaactctaaatccctaaatactaaacccaaaaccctaaacc

SEQ ID NO: 363241 - DNA, 662 bp, Cannabis indica
gagtgggtcaggatccctccgtatgaacgaaccgcgcctactcagatctttcttcagtgggcacaggtcttcgcgacctacgacagggcggatctcgacgtcgggggcttggtcacgacggagaactgccggaaggccaatttaatcctgccgcaccagtcagtggaggactctaacctttctaaggttatctgcctgaacgcgagggtttcggccgcggagaagaccttccgcgatgagcttattgccaccgcggagaagaagtaccaggagtatctctaccggaaggcccaggagaaggcttataccaaggcccaggcggcttccgggaggccccttcgcgttgggagcccggtcgagaggagaggccaaatggttgccgggaaatcccttcgcattaggagcccagttgagaggagggctcccaggccaaagccttcgattcaggtgtcgaatacaggggctcctgacgccagtacttccggctccggtaagtcacctttagtaatacattacgtcccttctgttagcgaatatgctagccttaggatgccctcgacccggtggggagatcatgccaaggattattatttttccaacttaggagatttcctaggtcggtcccagatgggttctagtcctctggagcccgttcccttgga

SEQ ID NO: 363242 - DNA, 692 bp, Cannabis indica
cactaacggtaacacggcttacaaccctagcgagtcagaagaagtctttacaagtaagaaccttgatcgatgccagacctacatcgtcgacctcggaagaaagaatagccccagctcgctattgggatcgctgtaaccaagtttttgtcgagacatctctggatacaactattaaagatgtgtttaatacacgattgtcttgacccagtaaaagcgagaaaataccagctatacgatattcaaatcataaaccgcatttacagtacatgatatgtaattaaaatttcatgattttagggatgactgttgtaaacatatcctggtcaaatttgtaattaactatccactatgtaattataaatagtggtagacaagctcaaaggagggacgaaaaaatcttatgcaagagagaccctaaagaaaaaacacacttagaaatctgaataagattgactcgtggactatgcagaattttaactgcaaaaccacgtaaaaaaatcctgtgttcatatattatttttctatagcttttattttttctgtgtgaaattattatcgtaaggctcaaatttggttaacgaaaatctacgttaacaatttggtgctttcattgagagcctctgtgaaaaagctaaaaaaaaaaacctcctttcaaaaaaataaaaaaataacctccttcatggctgaaaatc

SEQ ID NO: 363243 - DNA, 651 bp, Cannabis indica
tctttacacttacccctaaatccctaaagactaaacccaaaaccctaaaccttaaaccctaacaatgacatgggcccagactcatatccatgccgagatcggaacctaagacccagacctagacccgaatctagacccgaacctagacccagacccaggacttgaacccgaacccaaacctagaccagaacctcgtccgggacctagaccttgactgggacccggatcgtgaccccgacccagacccgaacaggggcctggactcaaactggaactcggagccatactcaaacctgaacccgtactgggacgtagactaggacccaaacttgagatccaaacccgaacctaaactggaacctaaccgggacctaggatccatacctagatgggggacctgggccccaatccaaaacctagacccagacctgcacaaaggatgcagacctagatgggggacttggacctgaaactaggccccagaacctggaccgagacccaaaactcgactccagacacgagacacaggacccgaccctggacccagaacccaggacctggctaccggtacacaaccccgaacccatacccaaacccaaacataggacccgacccaagacccgagagccaaactggaacaagatcgagatc

SEQ ID NO: 363244 - DNA, 508 bp, Cannabis indica
taccaaatcatacccctcaaatttttatatatattaaatcatgcccctgaactttcatccatgttaaaaggataaaatttagaaggataaaattgttaatttgtaaaaaaaaaaaataataattagaggttgacgtaggattaaaaaaataaaaaaagtcaaattagtaaaccgcgtgttgtgggggtttcaatataagacaactcagctagtgtccgatgctgacgtcatcactttacaacaaacacaatattctcttttttctcttctcataagtatcttttcaacccaatttaacccaaaaaccatcatcaattcactcttgtttcttcactttcttttctttctcaaatctgggtgccatgtcagattccgggaaaatcctccaaatcccggaaaacccatcatcatcatcatcaacaacaaaaccctctttcttcaatcgttctctaaccatgtcatcatcaccatcatcatcttcaacaacagtccagcagaataataataa

SEQ ID NO: 363245 - DNA, 642 bp, Cannabis indica
gaggaggacgagattgacgtgtgttgcgagtctctaccattgttcttttgtaatattactgtctacttgcagaggctttcttcagctctcaatgaaagcactaaaatgttgaccgaggatttcggcaaccaatataataataatatattagaaagctgtaagaagttaatgcgcaagatttttacgtggttggggcattaatgagccttagtccacgagtctttgttatttatgagagtatttatcacagagaatgttcttggtggttttctctttcgttcttctgaaacccagaattctcgaccctgccttaatgagtttgggggggttcttataatgtttttgtggggtgaccctagaaccgaggtacatgtctttctgtattattcagtgaaagcacacattctcaacgagtgtatcataggaaatgcatggtctaatccctaggccttttaagggttaggtggatataatccattatcctttcttgactgatgtgatttctcataaagtagccgttactaggctcattaatcatagcgtagtagctgcagactttaatacttatggcagttccaatacatcttctcccatgcggcattaaatccgaggtgactgtacagataggatttgatacctccc

SEQ ID NO: 363246 - DNA, 644 bp, Cannabis indica
atacattaaacataatcatgaaataaatcatgtgtaccatgcaacataaaacgaattctgatctttattaactaataatctgattatattaaaattggttttatttagggcacaaaaccctacacgctaatcatagatacagaatctataggttctatctagacatagatgtgaaatgatgattttcttcgagcttgacttaagcgagataaatggaagagctcttattttagtaactatatgagtttattgaaatatcatttataggaagctgagtgttttaaggataaaatacattgaggagtagaacaataaatttatccctagtcgatgtaaatcatctatagaggatatttgattatttagattagaacgatggataattcatagtgtatgtacatcttggaacatatagagcgttttatataattaagagtgcaattcctaatttatagtagcataagaaggaattaataagttagtgaatttacttggtaaaatctagatctaagtattggaagcttgataatataagctcatggtccccgtactagttgagaaaattcggcttgtagactcggttaattggttttaattaatcaattaaaattctaaaattatactatgtcttatttataaatttt

SEQ ID NO: 363247 - DNA, 864 bp, Cannabis indica
caaaaaaaaaaacaaaactttattaaattatttgtttgaatatgtgtagtaaataattagttaaattaattacaacacatattttagtgaattttatgcatttattaaaatttatccttatctagcgaaatttcgacagcataacggctgtaatcgtatactacttcaaaaatttaaataatgaaaaaaataattaacaaacacatataacaatacaataataataaaataacattaacaatacaaaattatctacccatccgaccgtagtacatgtattcgcagaacctactttactacggataaatatttaaggtatttaaactcttttaacatgcatattccacccatccgaccgcagtataattaatcgcagaacctacttcactacggataaatatctaacatattcaaactccactaaataaagaatttcaaagttttagattatacatttttccaataaagatagctacaattgcccactcttcaattaacacaaaaaatccaaaacttataaaatatttcaaatataaaattaaaagcttactccaacaacatcaccctaatacctaaaaataattaaaattaagaaagtgaaaaacttcaatttttctaatattttcaaatattgaataaaaaagtttaaatagattaccaagtctaggaccatgcacaactttaaaatttaatttctagatgacgcactacataatcaagtcaaaattatggtgctttaataatcaagtcggatagaatgcccatagggggtcgcgaccatgcttgaaaattaatcaacatgtacaactccaaaagttttaagatcaagtatcaatatatttgtaattaaggaaatgtaatggt

SEQ ID NO: 363248 - DNA, 1203 bp, Cannabis indica
aaaaataataaatagcatccatgcaaatttttataatgacatcattttctctctaataatataacatcttaatatctctatggtataaagttatttttttatgcttttaaactgaaattattgtgagaagggtagtgaaagtgtgtttgtttgcttaattttaagtaatgttatttttattttctatttagtaagctaacttttaagtcttgtaaaaattattattttagctgtcttttttttttaaataattgttacttgattgttgtaagaaagaagaattaacttgctaggaaaaaagaaatgatgcaaaggcaaagtggaaggaaaagcttaaatttggcaagaaatgctgccataatgctataacattctaggcagtgacgtggaagaagtttgaaaaacaaatttcacctatccacatcagcaattatgtagcagtcactcaaagttatgcgttgtggaaggaggagacaatacctaatgcgccaagattataaataatttgggcttctatttttaaggtattaaattgtaaggagtgagcaaaagcaactaagtacactcttcttcttcaacatgatggcagctgccattttttgaggaaattaagtgcagaaagaaaaagtacaaaagaggaaggagaaaaatggggacccaagtgtaagaaaaagaaaaggacaaaagccctatttgtttgcatttctttttcttctatatttttgttttccttttctttcttgtcttaaatactagaaacttgataatttgtaaaaagggcagcggccatggatgaacaatttcgagtttgaattatattttttgatttaaacatgagctaattttcttaaggcttgaatggctatgaactcctatgttgggtatgattaatttttaagcatatttgtctttattcattcaagtaagcttgtcattttatttgattgttatgtcttagccatgagtaacaatttgttaagctatatcttgtttcgaaagggctagatctagtagtttaacttggatggagcatgagaaatcctagatttaggtttttcttagtaagtaaaataggaatatttcatttaccttgcataacttaagaaatgatgtttaattggtgttctgcaatctggtttgatataggaatatgtgaatctagatggtagaacttaaattgtgagttttgaaaaattctcataa

SEQ ID NO: 363249 - DNA, 519 bp, Cannabis indica
atgcagttcaacgatcttttatatctattgaagtctggattatatccataactccaaatgatttctatatcactaagggatggaccatgatctctatatcccttaggggtggatcatgatctctacatacttaggggtggactatactattgaattatatagttcattttgaactctagactatactcaatacaccacagtactctatggcacacatattttaaacatggatgtaatataataaattagccaattatcagaatatattcttgatcttaatttatgttccaattaataattaatgttgtaatagattttgataccaataaagttctttgatattgtatcacagtaccttatttgagtgggagaattttaaaattctaaacccatcttcatttggttgacacttgtgataggaactttagaacccaactgagaagtaaatcttaccattcatatggatagaaataacttatcaaaattttgagataagatagtagaattcttgcatagtct

SEQ ID NO: 363250 - DNA, 552 bp, Cannabis indica
aattacccataagttagtgtatgctcgtccaaaaatgagagaaattatgtggtgagcttgtggtgagccttctgcagtgtggtgctagtgtagtgaggatgagaatagaggagcaaaaattgactccctttgtgtagcttcgggcatgttagagaaaagaagagagagggaaagagagaagaagtgatagggggtgaaggaaaaaagagagggtattttgggcataatagaaaaaatggtcatatatttaaaatatggggtattatgagttttgaggacaaattttaattaaatgcaagcatacaaattcaaattaattactaagtatttgtttgatgttactattcaaacaaagaacttatgttattctttcttactcaattcatgactacaaaactataccaaatatatttatagtgccttctagattaaggaattttgctctctaacactatgttttgtagaaaggaaagaagagtggaaggagagcgtgtaacgtccccgcttcaagcctccatcgggtccttacacccacggaatgaatggctctta

SEQ ID NO: 363251 - DNA, 496 bp, Cannabis indica
ttcggggagttcttctggccagtttcctttggcatctttgagtttcttctttagtgtatccttcaaggttttgttgactccttcaacttgaccgtttgcttgaggatgtgccactgctgagaaacttttgatgataccatggttcacacagaaatcagtgaaagattggctgtcgaactgtttgccattgtccgagactgttttgtacggtattccgaaccggcatataatgttcttcactataaagtcttgaactttctttgatgtagtaattgcaagtggttcggcttcagtgcacttagtaaagtagtcgactgctacaactacgtaatgcagtccacctctacctttaggtaattgcccgattaggtcaattccccaaatggcaaagggccacagactttgcatctgtgtcagctcgttgggcgaagctcttgtatctttaaaaatttctggcacttgttgcacttcttaacataggctctcgaatcttcaa

SEQ ID NO: 363252 - DNA, 952 bp, Cannabis indica
ttgtactccccgtagtttgggggctcaacctccgcctcttcctccgcctcagaggaactgccagttcgtacatcatcctgctcctcgatctgctggacctgagcgtccccttcacgatccccttccatctggacggctagatcctattcagcgctgggaaaagtggcatgccgagccacttgagggtcagatgcgtcagccagacgcgtggttttctttgtgcgagtcatcattctatggctgggtacagggatttggagaatttccttcgctacaggaaggtgggcgaaaacgaagacgaggatgatcctcgtgcagaagttgaagcaggtcctggtcgatccgatgtccgttctccatagactcacctgagttcatctacaaaagacaacacaagatgagtgtttggtcagaatatcgaacgataaacaagcaaatatgacgaccaggagtactcaatagattaaagaatgagaagtcaaaactcaagaagtcaaaaaatttcacgagttagggcaaaaaagttcatgaagcttcgaataagcaagatgaaagacagacgttacatagtttagaaacaagcattatgactgtaaaatcgcatgaagacatgataaagaagaatcgtagaagtttctggatctagcgtttcctgcacattttctacagcagagtcgaaggtgcattcaaaatgtagacatgcaaagataaacataaaggaaatcaaaaacttactcgagattcagatttctgggttcgagcaacgtcaatccagcaaacagtttttctgaaggcacttcggcaactttgaagccaagaatctctcttttcgctctgaagcttacttagcaaagaagggtgatgaaaatgagtttatgtgccaatattgtttgatatttataggcaagtcacgaaaagaggtaatcatctcaaaggaacctcagacgcctca

SEQ ID NO: 363253 - DNA, 1680 bp, Cannabis indica
ggaggtgtgcagagcaaaacggaaccagggtttaggtagtttagccgccaaaaattcggtttttgtggttaagtgttacaaaccgtaaagttcaggtggtttagccgccaatatccctttattttatgtaaaataaaaatgattaaaatgttaatgcagattttcgttaactatatttgagcctaaatagtgatagatttgcacagaaaataaaagcagcaacattaagatacgaacacaaaggttttacgtggttttacagttaaaattctgcatagtctacgagtccatcttattagatttctgatacaattctcaagccctttttttacatgattttttcgtccttttttcagtgtaacttgcctctatttataattacatagtaaggcagttaattacatagttgactgatatcttacaataattatctcctgaaatcgtgaggtttgattacataccacgtaaaatagatgtagttaatatttaaaaatcacacaactgtgataggtccgcttttaccgggtcaaagtaaacgtgtattgaatatgttgtaaaccataacgttctgggatatctcggtgggaacacggtaacaataaccttggtagcgagctggaacttttcccatatctttccagagttaatgatgtaagcctcgtcgttcctgcgcttgaagacatagtgctctatctaaaaatagcagttcttggccacaaggtggacttcagcagtcaacatcatttgtatgtcaacttctatctgaaagagctgactcgacggaggtgtgatccccatttaaaggtgtctggagctgattaatgaaggtaccatgagtgtgccttcctatagggagatgggtgcctcgctattagttgtttggatttacccgactattatacttagtttgaataaggtgtattatacactaagtgtcttaccagtcaccatgtctcgtctcctaatgcatagtgagatttatcccttgctttgtacatctgaatttgtatggtttctcgttaatgtacgaatcgacagttggcatatctttatcttgcataagatcttccagtcagcaagttgtaaatatactctgtcaattccgcattaatgagttattctattttcaaatatacttaccgttccattcctagattcatattcttccaaatttgacacgtgtcctcctccaaaatgatagccaaattttggggattgcctcgcactacacccataccctccggtgtttgaaacttgagggataagtgcttgatcgaactagctgcccctagtccgatcaatgctggatgacccagtaatatattgtaagcggatggtaggctaacaactagaaagtcttgcgtaattgtggaggatagaggtgcctcacccaaggttaatgcgagctcgattataccttgactagcgatactgtcgccagtgaatctgcatagatttaccatgcaaggcctcaatttggccttttcgagctccatcttcttcattgtttccatataaaggttgttcattgaactcccattatctatcaacaccctctttatccttttattggctagttggatagtaatcaccaatggattgacgtgagggtacctcacgttcttctcatcttcctccgaaaatataattggaggttcttcagtttttaccttcttggaa

SEQ ID NO: 363254 - DNA, 613 bp, Cannabis indica
cccaagaagcaaaaggttggaagaattaagaacaaccgaactgcttgtaatggtgaaaggattatctaatcacgaaattgtagtaagtgcggtgccaagggacacaacagaagcacttgcacctaccgaggttaaagataaatttttagtttattcgtattgtgatgtgttggactattatgtattgttatttatatttgtggtgtaaaatatttttaatttgtggcatgaacatctgtgttgtactgttatgtatttcttagaaaattatttttgaactttgttaaacatctgaggcaaaaacaagttctactgataaaataaaataattttactgaaaagtagattgttcaaatcgaaaagcctaaaagtaaacattgttcaacaaatataataaataaaaaatccaaagttcatgaaaagttctggtagaataaatctactccccatctctggcgaaagagcgacatatggtcatcatgtactccatcgaatggtcgatccaataacttatgctcaatatgctctatgacgtacattccgcaatcgccactacaatagtagtgttgctccaaaattcgcccaaaatacgtggaccagtcaagaggggaca

SEQ ID NO: 363255 - DNA, 544 bp, Cannabis indica
gaacacaaggtttttaaaaaggttcggctccgtttagttcggtaatagcctactcccgttgatttgtattaactcaagaacaaagaacacagtgtttcctctcttgaagctctcacaatgaaatctctgagtatgctctcttagatttctctaaagtaattcttgtgacccccttacaagtgagaatggatcactatataaggctaaatgcttgaggaaagatttcccttttacttacaatgtctatagttggtaagaacatatattacatatttagaatacactgattgtgagatttggatagcttgccatatctttgtgatacgatcccagatttataggaattgcttttatgcttcacgatgcaagttttgaaattgctaagtcttgatgcgctgttcggattgtccactgcttggttggggagcattattcgcgcaggtgtatgttgtgccgtgttcggaacatctctttcagccagatatggggaatgaggtccacgtgtcaccagtcatgtgctaccacgtcataatgcaaaaaatgg

SEQ ID NO: 363256 - DNA, 437 bp, Cannabis indica
caactaactttaaaacacattaaatttaaacaataacaaaataaatatacataataaataaaaaaggtaatataaataaataaatgtatttataccgagcttggagagagagaaagagacggatgggagggggtggtggtccgacgtatgagacgaagatgagagggacaccgacgggaggtggtggtggtccgacgtatgcgacgaagagtagagggagacgttcgggaggaggggtaggtggagatcgatggacgagcgagacaagaagaaagggagatcgagagagggaggaagatggcgatagaggagggcgatggtgcggaggcgtgggtgtggtttttgagagttacgattttcgtgttagggtgtgggaaatggagaagatataggtggacatgtgggaaatagaaaaaaaaaagtaggtgggcaagtgg

SEQ ID NO: 363257 - DNA, 892 bp, Cannabis indica
gaaatattttctcctgttgtgaaaaagtcctctattagagttgttcttggtttagctgctcgcttgaatttagaagtagaacaacttgatgtgaaaactgcatttcttcatagtgacttggaagaagaaatttacatggagcagccagagggtttcaaagtcaagggaaaagagaatcttgtgtgcaagcttagaaaaagcttatatggactcaaacaggcacctagacagtggtacaagaagtttgattccttcatgttaagccatggatataccagtacttttgatcattgtgtgtttacaaagaagttttctgatgaaggctccaaacaatgtcctacaagtgagaaggataaacaagaaatggcttcaataccttactcatctgcagttgctactttgatgtatgttatggtttgtacgaggccagatattactcaggcagttggagttgttagtcgattcctctctaatcccggtaaggatcactgggaagcagtgaaatggatattgagatatctacgaggtacttccaggttgtgcttatgctttggcagtggtgaacctattcttgatgggtacacagatgcagacatggctggtgattgtgatttcaggaaatccacttcaggattcttgaatttgcagggggagctatttcatggcaatcgaggttacaaaagtgtgttgctttgtctactacagacgctgaatacatagttgtaactgaagcttgtaaagaaattttatggatgaaaaagttcctacaagagttaagcttgcaacaagaaagatacattgtctactgtgacagttagagtgccattcacctctctaagaattcaatattccattcaagatctaagcatattgatgttagatatcattggat

SEQ ID NO: 363258 - DNA, 603 bp, Cannabis indica
ataaataaattattaaaaaataactcaacatttaaacatacatcaaattattcaacttatatttaacattaaatatttttacgtgcttttcaaggtataatacctaacactaatataactaagataaatatcgatgctactactttgcacgataaggaaaatatagtttatctggggtgttaattcgcattgtgtgtctaacaagtatgaaaaggtaaatcctcaagtagcaaaagttttgtgtaataccctaaggtttaataaccagattagcaatcctaactaggttaattatgtattaatgaaaaattatattattatatgatttaaaatgtaaaactattatgatttattgcattttaagaccccgctggtgtgtcaggggcattttaaaaatttgacccgagaagggtaaaatagtaattttatggtatactatgcttatggactatattattatatagtatgtttattctgtcttactacaggtgttttactacaggtattttgggccaaactgggttcggggcccaaaatacatttctttagtaaatcccagtttagcgggattaacatatgtttagtcgcagttcgtggcattcc

SEQ ID NO: 363259 - DNA, 905 bp, Cannabis indica
tatataatttaaaatattttatatatccgccgcgaagcacgggatgtttactaataattaatgttttgccctttctacttgcgccttattctataagtcttgttaaaagtgtattaggagtaatatagtccatccgtctggttttgtttaaattaactgttaaattgatgatgtaacatcatgaatcatgatgtggtattattcatagatagtagttgaaaatttatggttaattaagatttttgctttttgaactttgacatataccaaatcctgtttcttcaacttttttagtcgttaaaaattcctgaactattgagattgttggatttaaggacttttttctaatttttgtaagaaaagtctaacatggataaaagttcatggggcttgatttggtacatgtcgaagttcgagggacatattttggtagatatcaaagtctagagagcatgatttagtacatggacaatcacaaaattagtaaaattgaatgaaattggacaaaagtccttaaatccaacaatctcaatagtttagagagaatttttaactggctaaaaaagtttagggacataatttggtacatgtagtcaaagttcagtaaacaaaaatcctaatcaaccaaaatttatatacccttcgaaaaaaaagagaataataacatgtttataaccgtaaataaaaaacttaaaaacaataaataaaaagtaaataataagaatctaaaattagatgaataaatttagattctcttgactttcaaaaaaaaaagaataaaagtaagatacaaccattaacaatactaccaacttatgaattggccgaaacgaagaagatttactatagaatcatattttttagtaactctacaccttctatttgtaactagcaaaaaaaaaaac

SEQ ID NO: 363260 - DNA, 657 bp, Cannabis indica
tttaactttgaactctagactatacttaatacaccacaatatctttgtgacacacatattttgattagacatggatataatataatgaacaaattagcaaattaatagagtttcttcttgatcctgtaattgttccaattaacatgttattgtaataatagaaattgataccaatgaagttcttggacatagtatcacagtaccttatctgagtgggagaattttaaaattctagtccatctttatttgaatgacactagtgatagattactatgttatgatcatgataggaactttaaataaaactaagaaagttaatctaaccattcatatggatagaaataacttatcagaattttgaggctaagataggagaattttgcaaagtttattcgaatgacttaggcaaattcttagtccttatgaaaagttttatggtatctcttttatgattacttaatcttaagtaagtattttacattaatgttaatactagaatgctatgttgatgacttagtctagaaggaacttatagtttcagactaagacaatatgtcataacaagatgtccctaagaaccactagtaagaggctaagtgtacacttgtgtacgaacttaaccagactcctactgttgagtgggagccatttaagatg

SEQ ID NO: 363261 - DNA, 541 bp, Cannabis indica
aaaaaaataaaaaatgcaatatacatgacaattctcttatttgagttgggctatttaagactattgtcaacaattatgacatatgcattgttataccttctgaacttttcagtctgttacaaacaaaatgataacattaggggcgttcaaaagaatttataaactgtcaaaaccaaataaacaacccaaactaaactgaataaatcgataaaaaatacaatctaaaataatacaaagaaatccaaaccgtccaatgaataaattgagcggtttgaaaattattttaaaccgcccaattaacacaaataaaccaatttataaatttttcaataaaattgtatataatatattatataaattatatttatgagttaaactattttgtatttaaagtttggtcgttatagtgtttaattgaaatttagactttagggtaaatggcggcaaagcccccaatactttcgttttggtttcattaaatcccacaacccaaatttctgcgggtaaacccccaatactcgggttctgttagcaatttaac

SEQ ID NO: 363262 - DNA, 718 bp, Cannabis indica
gatatggagtgcatatacatgaccatcttcttaggatagaacaaaaacattaggtggctatggaggtgaagtcttgagttgtggaaggtgtttgtcatcaattcaagtattggaactttgactagagacgaactgaagacactaatggatgcttggtgcaatatattatctaaattggtggactagtctggtttttatgacaccaattacatggtgatcggtccctcaaatgatagcctaccgaaaatcaggtcagaatattaaactgtgatctcatggaccatagaaagtgtacctcaaaaaaaattgaagtaattaagtgcagttttaagaatacatttactaattaaattttattattattctctatggtttactaaattttgcatttaactaataatgtagtggcgattacaaaatgtacttcatagagtatatcgagcataagctattggatccaccattcgttggagtagatgatgaacatatgtcactcttccgttagagatggggtgtagatgtactctaccagaacttgtcatgaactttggatgtttctttttaatatatcagttaaacaatacttacttttaggcttttttatttgaacaatctacttataactaaaatcatttaatttttaatggtgttttctatataacccgataggtccaatataggcttgatcgtctttaaatattttgttgggttttatgcc

SEQ ID NO: 363263 - DNA, 695 bp, Cannabis indica
ccacttaactatgaataaaatattcagaaacatattaaagttatgaaatctttaatcaatggttgctagtatacgattcattgatgcctattcttcggtgtaagtaatcttggttcggatacggatgtagtgtgacatcacagtgaggtgttgtatataatagagattatatatgacaatgactggtatgaataaagttatctttatcaacatgtcatttatcataaagacctaattgatatcataacgatgatcaatagtagatcgacctaaatcttgagttatcatgaactcatgttcatgttattagtttctttaattctctcgttaaagtttctcagagaagatgattcttacaacttctattatgggaatttaataacatggatggctgagaacatgatgtacaattatggaaccttgaattttctaacggatcaaatgttggttccctttatgtgttaattccagtactggaaagttacgcgcaaattcaaatgagatcttgaattatacttctacttgtgaattaatggaactaaaggataaagaagtaattagaaaagtaaaatagtattttgaccaaaactaaatacgaaccaacacgtgaagagctaatcactagaatgattatatcaatggacactgtagttcaactcagtaaatataattttataattactaagagtgcaatt

SEQ ID NO: 363264 - DNA, 745 bp, Cannabis indica
tgtacaggttaggtgccccccaagtgactgagcagacttatgactcttggtcacataattttttttttacgagtgtgctctattgtctgttcagggttttgggttcgaccaaacctttagtgtgcactggatggtaaattaacgacatgttagtaaattcgactcaatttgaattttaaaatatacatctttactcatttattgatcgaaaatgtgtttgttaccgtagtaacttacatcaaagctattaacttgatctaatctgatctttagcttaacatgaaataaaacaaattgcagaaattagaaattgtactttagatggtggtcacccgacctaagtactttataattttgtctgaacctttgggcgtagtctgcccagaaggtcattcacttaaaagtaaatgttcttttgtttagtacttgatatggtcatccaacctggtacttctattggtagtattttcttaaatgttctccattccaatacctttgtaccaaaacgagttgcatttttacatcatacttacccaatttgtatgctcctaattcaagaacttcgactacctgatatggtccttctcagttaggtccgagtacacctgtcgtactgtctttggtgtttagaaatactcttcttaggaccatatatcccacaaagaatgtttgagccttcacttttttgtgcattctaccacaaagtctgctaaggcctggcctttaattgctgtttggggttgga

SEQ ID NO: 363265 - DNA, 132 bp, Cannabis indica
tctttctaatatttgtcaaaattctaaaatcttaatagctttatctttttgagagatttgttgtcattctcttctcaagcgttaagcatactttttggtcagggtgatacatatattttgggaatatggtag

SEQ ID NO: 363266 - DNA, 550 bp, Cannabis indica
aactcagcatagacctaaccatttctaaaagagttggatttctcctttctgctactccatttttctgtggagtgctaggggcaatatattgagattcaattctagttcaattcaatgatctttgaactgcatattatactctctacccctatcagttcgcaagatctttaatgtcttacctaatttgttttaagccaaagcgtgaaatttctaaaactttttaaacatttaagatttcttttgcattaggtaaatgaaactgtatctagagaaatcgtcaataaaagtgacaaaatactcataaccacctcagttttttacatttaggggtttgtagagaactgaatgtactaacccaaggggttgtttggcacgctctccctttacagagaaagaacgtttggtcatttttccttctaggcaagattcacatacagctaattcacccaagacgacatttttcaatggaccgtctttggataacctatgaagtctatcatagcctatatgacctaatcgtaaatgccatagataagtttgatcatcatta

SEQ ID NO: 363267 - DNA, 584 bp, Cannabis indica
atattgtccatagacaattttaatcaactatccttacctttgtagatgtctttttttaattttctgggtttgcaacataatatttatttctagatgaactttagttaatatacacatatacatgcccctcaagtaattctaaagaatataaactttgtaattacttgaacaaactttaactttattaatattaagaatttacatattacagagataaatacgacatttatattttgcatttactggtaataaggccgcaaatattaactattccagtggttctttattagcgagccattaagctgagctaatttataaaccctggttcccactactactttggtaacatagggaccttcccagttttggttaagcactccagcagatggatctcatgtgcttgtaaataatcgtcttaacacaaaatctccaacattaaagattcttttcttaactcttttgttaaagtatctcgtgattcgatgttgataggctgcattagttatttgtgactcattacttctttcttcaagtaagtccaaggacaggttcacaagctcttggttttctacttgattatagaa

SEQ ID NO: 363268 - DNA, 586 bp, Cannabis indica
atttctagtatgagtaagtgtttgatgtagggatgcatagttttctcatggagatggagatggtgccccgtggggacccgctccattaggtgcggagatttcccatctaagtagagaacggaatgagaacggagatcaaattttgtctctgaatgttaaacgtggtggggacgagaatgacactccccacctcgacatggacacgtttaatttattaattattttttattaatattttatattttataaatgcgtttatattttttttagtatgttaatatcaattttacaatttttgaaattgtgctttttgcataataatcactatattgaatagtaaataatatgtaatatattatattttatgtaatttaataattttatacatttaattttttaaaataaattttatttttacagtaagggatttcccgtcccgtccccgatagagaataagtgaggatgggtaggaatggggattaaaatttttaacggggatgggggacggggagagcactccccgctaattccctgtcccgtgtgcatccctacactttgatgtgattaaatttatatatatatatat

SEQ ID NO: 363269 - DNA, 622 bp, Cannabis indica
tgtgtgcttattgggaaaaatctaaatgaaaaactaaaatagtagttaatgaacttttcgaaggcaaaccaggatcaatttgcctggaacaattcagatatggtagggattgaccctaaattgatttgccaccatttgaatatcgaccctaattacccagctaaaagacaaaaaaggcgacccttggattttgaaagacaaggggcacttaaggaagaagtggacaagttattaaccaacaatattatacgcgaggcgttctacccctcgtggatatcaaatcctatttttgtcctgaagccaaacggtacttggcaaacttgtattcacctttcagactaaaacaaatcatgtcaaaaagattgcgtgccattaccaaggatcaaccagttggtggatgcaactgctggacacgagctaatatgttcatggatgcatattctggatataaccagatcaagatgcatgttcctgatcaagagcatacaagtttcgtaaccaacatgtgactttattgttataaagtcatgccttttggcttgaagaatgctggggcaacatatcaacaactagtaaatggaatgttcaaaaaataaatagggacgaacatggaagtctatgt

SEQ ID NO: 363270 - DNA, 684 bp, Cannabis indica
ttcagggtccgatacacaccttaaataaggcatgctgagtcctcttcgatagaaaattttgtccatcatcacataacggtgcgcttgatattgtatccttctagatagtgccttctcttggggcaactcgccttttgttatgtattcgatgatggggaccatccaactgggctcttgctcaactgttgctatggcactttttactttgatgcttggctccgccaagcgttccacatgtaccacccccagtttctcaattttgctgtctgaagctaatttagcaaggtagtccgtgtgagcattcttttcccttgggattctttctactttatagtccatgaactcgtggagtagttcccggactatcccacgtatgcgaccattttttctccgcgcgtctgatattctcccgacacctggtttactaccagttgcgtatcgctgtagacttctactcttttagcccccacggtttttgctgatctcagccctgctatcagggcttcatattcggcctcattgttagaagctgagaattcgaaccgtagggctgcttggagtcgaagtccgttcagggatatcattacgacccccactccggattcgttctcgttggaggcgccatccatgaataccttccacgtcgggactggtggtgttggtatgttttgttgggttttatgc

SEQ ID NO: 363271 - DNA, 777 bp, Cannabis indica
ctcagggtggtcgccctgtaaatccactacaagctcctccggattaggagcaaagatttgcgaaaatgcaagatcgaatttgccaacaagatgaagagattcagagattgaggcagcagggtcctcctgccgtgcttcctcaagtttctcaggccgttgcagttccagcggtgacagcagaataacctgttgttggcaaccgtatggagccgttgtatgaaaggttccggaagcaggcacctccagtgtttttgggaggtcctgatgtaatgaaggctgagcagtggctcacagtgatcgagcgtatccttaactttatgggagtggttggtaatgatcgggtgacatgcgctactttccagttccaggaggacgccctcgtgtggtgggaattgataacgctcatccgggacatcacagttatgatctgggaagaattcaaggaattgtttaactccaaatattacaatgaggccgtccacagtgcaaagcagaaagaattcaccgaattggttcaaaccgaggcaatgtcggttactgagtatacgacaaagtttgaccgtctgcccaagctcgctgtgggaatcgtgccaactgacttcagcaagaaagagaagtatttggccggtttgagtgcgaaaattaggcacaatttggtgattgctactaccgacgcaaccacttatgcagaaatggttgaaaaggctttgagagccaaaggtgtagtgaaatttcttcaggagccgcgggtgactccgagtgttggtggaaccccca

SEQ ID NO: 363272 - DNA, 648 bp, Cannabis indica
tctttatgaatcacaaaatctttagccataaatagtgttgccatgttctaaagctcgcaccagtgcatacaactctttatcataggtgggctaattaagggcagccccacctagcttttcgctaaagtatgcaaggggtctcccttcctgcataagaacaatgccaatgccgataccagaagcatcacattatatttcaaacgtgttagaaaaattaggaaaagcaagtaccacaacgtgggtaagcttgtgtttaagcagtggaaattcctcctcttgtgcttcaccccatttaaatgcaacattctttttgataacttttgtaagcggtgagctatcgttgaaagggttggccactcttgaatgactttgatcttctcttcatcaacctgaatacctgtagcactcacaagaaatcctaggaaaataaggttatcggtgcagaaagtgcacttactaaggctaacatatagcatctgttatttaagcacatcccacactaattgcaaatgtgaagcatgatcatacaaactcttaatataaattagaatatcgtcaaaatacaaaacaacatattttccaatgaaagcacgcaaaacatgattcattaatcgcatgaagcaaacacatagaaaggaagtatcacat

SEQ ID NO: 363273 - DNA, 620 bp, Cannabis indica
catgatctcagaaacgatttgaatagaaggagaggagtagacgatcagattgacacgcagattgtgcagcgcggaactcgcgctcaaattctcgctcaaaaagatgctgatgtgactagattggccaagaggctgaacaagttagtccaaccgtacaggtacaactggacaaactaaagtatacgttccaaggcctggccagtcagaggaacaacgatctcgaattggatcgagaacgtggaacccctttctcccatgagatcaatatcctggagttgccccgcatgtttaagatgccaacctggaagatgtatactggaaaggaatatcccaaccgaggaaatgtatgttgcaaaatttttcctaccaccctctcagaatcgcccaacaatggtatttcaagttggcacttggaaagttcaacccatggaaggctttctcctcgaagttccatgcacaattttcctcctctctccaactttggttgcacctaggagatctggtcaaagtaaagcaaagaccaggcgagcctctctaagcctacatcaatagattcatgacggaggcgactaaggtttcacgggtaaatgaggacggaaagttgtctgcgatattggggg

SEQ ID NO: 363274 - DNA, 650 bp, Cannabis indica
caacacgtttcctcccatgcggcattaaatgcaaaatgactgctcaggggaagcctaacaccttgcggagatgctttaatgttacttacgcatccaggagcatagggggctacgcaagccttctccgggaggcatgtcccggatgctgccttatttcataaagacttagcaaataattcaagtattaagatgttttgatccacgtgtccctgtctggttggtccacgtatatttggcaaaatcaggggcaacagttagaaaccctaaaatttctattcaaacctaaattaacaaacttttccaaatttgatgttattttgccagaaattaatttttaattaaaaaaatatctaataagataaaatgttaaaactaacatttttcaaatcttataatttaatttaataagataaatatttcagaaataaaaaattttgaaaatctaatatggttagcaaatttttgaaatttaaactagattatttttaaaatttattaatattttaatatcaaaataagatcattcaaattttaataataaaataagtaatttctgatcttataattaaaataaataaaataatcaaaattttcaaaattaaccataaggctatttttgtggaaaaatcaaattttcaaattcaaaggct

SEQ ID NO: 363275 - DNA, 1131 bp, Cannabis indica
atgtctgcatccggttccaaatcttcaaagaaagggggggagcacctggctaccctggatgaagttataaagggtccggtggcccaagaagggcacaagtcccgtgccaacgggtgggaagcggctgagcttcactctaccttgacttgccctcaccagctggaacatatcgtggtggtggcaggtatcaagcctgcgacctccgggacctaccaccggccgccccgggatgcggagacgcccaaccataactacgggggcttcggagcctggagccagacgcacttgatggccggggccatgcttccccttcaagattactttattaattttcttgtatttgtcggccttgcgccataccaactcattcctcaagcttaccgcctgctttcaggcttatttattttttactctgcccggagctggggctctcccagtccggcagagattttgtatttttacgaactcgtttccatccctaaaaagggggataagtttaaggacggtttttacggtctccgggcccatcctttgaatgagggcccggtcccttttaatcatcagaagcatgtgaaggaataccgtcaccgcttcttcttctcctccgggttccaggctgtggagcatccggagcttctcacggagtgggttaggatccctccttatatgcggaccgagccgactcaacttttcctccaacgagccaagatcttcgccacgtatgacaaggaggaccttgatgtcggggagttggtcacgacggagcactgtcggaaggccaagctgattttggggcatcagtcggtggatgactccaacctttccaaggtcgcctgcccgaatgtgagggctccggccgcagagaaggtattccgggacgatatcatcgccacggcggaggataagtaccagaagtacctcttcaagaaggaacaggagcgggcttataataaggcccaggtgaccgccggaagagcccttcggattggggctccggtggagcggaggacccccagaccaaatcctgcgaccccagtaccgaatacgggggctcccgatgctagcaattcgggttctggtaagtcccctttaatgatacattatgttccttccgtctgtgagtatgctagc

SEQ ID NO: 363276 - DNA, 700 bp, Cannabis indica
ctttcttccacggccaggatgacttctcttgctcgtactgagctgtgcgggcatatcgttcccgagctttgcccgtgtctccagcgatgtgcgggcctccaatgatgacttgcaagtgtccatctattggcggaggcatcagatcctggttgttctgaccttggttggccttgacatacttctgtaggtgcgggttgttcttcttgatcagaagttctatctcccgcttcaggttgtagcattcgttggtgtcgtggccgtagtctccatggaactgacaaaattttgtcatgtccctcttgctggtatctttcttcatgggcccgggcttcttgtacggaattagcgactgagttgctatatacacactttctatatcctcagttaggatagtgaatgcagtgtgtttggcgcgatcacggggagtctgtccgggtttttcggtgaactttcccttcttcccgttcccttgcttgtggttgttgcctgaacgcttgccacttgagttgctggaatattggggaagctgggcggacgttccagtagaaggagccttcgttttgtttggcttttgctcaccttctgctcgctgaatggcttcttcaagcttgatgaaaccttcggcccggtcgaggaaatcactcattgagtcgaacgatccgttcttccttatgtccttcgatcgctcgccacggacttc

SEQ ID NO: 363277 - DNA, 547 bp, Cannabis indica
tttatatttattataagaaaaaaattataaatttatatttaaaagtattaccggcggattgatccgctgctaataatagtgtgagtttaatgatctgacactattattagcggcgggtgtgtcagtccgccactaataatagttattagcgaccaggtattaccagcggattattaccggcggaccccgccggtattactctttagcggcggaaaatgggattattaccagcggagtggtccgcctctaataatcataattgttgtagtgttctaatattatttctggaaagtttggcacgtttagtttagtctaatgagaattgtaatagaatcattattaccattacattgtttgtttttatattttaaacctttgtaatggctttacattgtaatggtcattacactatgtattgtaatcctcattacatcataaaatgtaatgatgattacattgttagaaaatatctcttttgccattttttattacttttttttttaaaaaaaaaataaatattaaaaataataaaattaagggtattttt

SEQ ID NO: 363278 - DNA, 791 bp, Cannabis indica
tgctttcattgagagctgaactcgaagatcgctctttattccgaattcaatcacaagtacgatggtggtacagactcgtagaggtgtggttgatccagcgaatccgcaggtggtggatcctgcactgcagaaccaaggaaacacaagggttctgccaacactaaatcccggacaccaatcaactacaggttacggtgtgacgactcctgtggatgatatcctgcctggtgtgcaagagactgggaataccagttcagtagccgaccaaggcattcatagcacagtcgttccgcccgctaccaatgttcaaataaccattggagatgacactgaaatccaaaacctccgttctgctcttggaatcatgcagggtcataccaacaccctacatcatgattaggaggaactccgtgccgcggtgaatctcgcgtttgaagagcagaggtgcatgtttgccgaatggagggatatggagatggaaacgttaagggctcagcaagcagtcattaacgatcacagtcggtaagctactgtgctgatacgaaaagtctatcaaattgccagacagcagcctgagaatgtcatttgtttaggcgagacatacaaagatccatccatgaatacctctcacactataaatggtcagtcgtcaaatccccagtcactggcagaccttgtctagtgttatagtgagatttctctcacctagaaactcgagaccagactcctattcaaaggacacgtgtattcagatttccaatgaaagctgaaatgtccgtgagagacttctc

SEQ ID NO: 363279 - DNA, 523 bp, Cannabis indica
tgtctagatctgggactcagactaggaccaaaacctagacgaataaccaaacccgaacccagacctagacctgggacacaaaattagaacctgaacaagtatcgtcgaaccaggaccctagaacaagactaggatcgtgaaacaggacccggacccagacctagaaccgaacatagacctagcctcagacccaaactgagattggaactcgcgccgagacacggtcgtgtaccccgactggaattgagacccggacctggacctaaatctttgacccgatcccaaacacagacttggacctagatagggatccggatacaaacctgaactcggaccaagacccagactgggatcgaaaagctggacctagatatcgaccgagatcctaacccacacccaaacatggacaaccactcgggacccgaacttggacctagacccgaacctagaccctgatcgggttctagacctaaacataaacccggacacacactcggacccgaactcaaacacccacacctag

SEQ ID NO: 363280 - DNA, 637 bp, Cannabis indica
gaagaaaacaatatccagcatccggtctattacatcagcaaaagattcgttgatgctaaaggacgatatccactgatagaaaagctcacttattgcctaatcttagcaacaagaaagctaaggccttactttaaggctcacccaattcaggtatacatagaccaaccattacgccaagtattacaaaaacctgacgcctctggacggttactcaaatgggcagtggagttgggccagtacgaaatgatgtttcaacctcgaacaacgattaaagggcaggccttagttgattttgtagttgagtgtacgggcaaagaagaaagcacttcaaaaaacaacccagagccagtacaagaaccccaaccgagcagcagcaaagacaaacccacctggaagttacatgtagatgggtcggctacagattaactgttcggtgcaggaattacccttgtcacacctgggggcaacatctacacagagcggtcaaatttgggtttagagcatccaacatgaagcagaatatgaagcccttattgtcgacctaaaacttgctcgagaacttcatgccgaacacattgagatttgtagcgactcacagttagtagtaaatcatgtattgttaggctaattttagtct

SEQ ID NO: 363281 - DNA, 795 bp, Cannabis indica
gcccggctgccgggggaagaccgaaatattatccagttgacctccgatgagaaacttgtgaggtacgggctctatcccgaggactttactcctaagtccgtggcggggaagaagaggaaatctgatgctggccggactcgaacgagctcataaggaggatgaactcattcaacttaagcgcgaggctaagttgaagggaggtgcaagggccaagcaatatgctcaggagcccttgaatcctgaagatgaagctgaggaagagcaggtgactccactgaagaggaagaagaaactcccggcctcgcccaggcctgttgaacatgaaattcgcataagggagcccatttcacctgctcggccatctcctcccgtgttcgaaaaagggaaagctgtcatgtctgagataagatcgatgtcaggtaatgatggacttctgagtcttgtgtgggcggtcaccttgcattttactttatcttgttcttgagcttcttgattttcatgccttgtgttcctgatggctttcttctaaccatactgtttttgttctgtgcaaacatgtctcagaagagaatgggcagaaggtctagcgcctctcctccggctaagaagcctaagggcggttaggggtcctgctcaaaggaaaggaggccttctggggaggtcattgatctttccgaggagctgacagctgcaaacccctctacccccaaagctgccaagtccaaggagtctggaccaccaacggttgggtctgaactggtcaggagtgatcctgaacgggtgcgggcaccaact

SEQ ID NO: 363282 - DNA, 381 bp, Cannabis indica
actatatatatatattcctattccactaaaatcacacacacatatatatgtatactaatttatcctaggggtagagtggacatagtttttgggtttaaaatgctagtggtggtggactataatttaatgggtcaatttatagtcatttgggtgcttctatgtgcctcaaatgcagataataaaaccgaccatcccattatggtcctaattgcataatcggcattataccatgcatatagttatccacatatattaatattgacactctatgagcaacacttatttatgtaagtccatataaaatattctaacaatttaagttaaatatattgtacgtatttaaaaccattttatgtagagttaatttttttttaaaaaaaa

SEQ ID NO: 363283 - DNA, 391 bp, Cannabis indica
agtcattagataagaaagtgtttgtttcaacaaataccacttttctgagaatatgactaagtctgaaaacaaagtagcaaagtagaggagatattttttttcttgattccaaaaagtgttctatcatcttattctatataagatgatcccactgcctctgttgtcttgacacaactgaagaggttaattccatttaggttcttagaaaaaaagtcactgtgccttgtcgtagttggagagtttcaaggaactcaccctgttattacttggaagacacttgtgataaaatccattgttagtttaaacaagtaatggatggtcagaataaggaactcaaaagttaagccaagagaactatgattaaaatcattcatatggagtaagcaaaaag

SEQ ID NO: 363284 - DNA, 547 bp, Cannabis indica
tatataaaaaaaattaattttataatgtatatataatcataaaaatacatctatatataaaatatatatatttaaatttcacgataaatcttttgttttaaaaataattaatgatattgttcaaaaaaaattgattaatgatatatatatatgtttctaataatttgtccattttattataaccacactctcctaactacaaattatatgaatgcatactatcattatttttttaaaatatatgtttggacataaaacataaaatgtattagtaaagtaattaattctctaatcaaacttaaattttgttaaaatattttccaatatattctacatatataaagatcaatataaaatacgtataacaataaagtttattattttattgtacatataaaatatgtatgtatataatcacatctaaagagcacactaatgtagccgcaatagctaaaaaaattattaaatattaaaatctcaaattctattttaaaaattaaaaaataaaatacattacctaattaaaaaaattgaacatacatgtatt

SEQ ID NO: 363285 - DNA, 515 bp, Cannabis indica
attattttaccaagtggacagaagtcgagccagtagcaaccatcacgtccaaaaaaagtgcaagacttcattgtaaagaacataatttctcagttcagattaccatacaagatagtttcggacaatggcaaacaatttgacagtcaatcattcactgatttctgtacgaaccatgggatcataaaaagtttctcagaaatggcacatccccaagcaaatggtcaagttgaagcagtcaacaagacactcaaggacaccctaaagaagaaacttgaggatgctaaaggaaactggtcggaggaacttcctgaagttttatggtcatatcgcacaaccgagaaaacaacgaccagactgactccatttgccatgacatatggatatgaagctatgtctgcccgtagaactcaaactgctgtcccacagaagactaacatataaccaggaggccaatcacgcactcctcgcacaatcgcttgatgaagttgaagaaaaacgaaccgcagcaaacttga

SEQ ID NO: 363286 - DNA, 834 bp, Cannabis indica
atgctctgctacagaaagtaatcaagggctagatatctgaacggaaggagtcattatgtttcgctgcacccaatgtaaggtttcctaaactttatatgtgtttatttcatcgttttagaaagttcttatttaggttgttaataaacatacttgtgagtagatctaagatcctggtaaaataatttccaacatggcctgctgactaccctgtatgggtaattttatattaaattttctacttctatattgagccatgggaacaaattaggggctagattagactagacctttgacatacccatgggtgaatttaatacatatttaatttgtaattaacccaataatatttcccgtgtgcagtatgagtttcgtgataaaattatggactttggtgactctcagtacactgaagtaaagattcttagtgaatttatgaacaatgatgcttatagaatggaagttaatcaaagacctctaatagcgatcacaaatgttgtgtcttggtgcagtgacggaataaaatacaagaaaaatgaagtatgtcttcttctcttcccccttccttaaaagagtgatttgttttttatactctggacccactggataaaagtacttatttaacaggttttcttagatgtggtggagagcgagaatatctttgtgttgacttcgcttttagccaacgacaataagtctttttgataagcgataaacgatgtgtcgtgaatacgtaataaagcaaataataataataataagacacaaaaattttatagaggttcagccccgagcagttcggtaatagcctaatcctcgttagttgtattgacttaa

SEQ ID NO: 363287 - DNA, 812 bp, Cannabis indica
gtcttattctgcacgactttggtttgacatctattgagcaagtagactgcagtgtttactgcctctgtctaaaatcgttttgggagacatttctctagtagcatggctcttgctgcctttataacagtcctgttttcctttcagatacgccattttgttctggtgcatatccaaccgtgagttggtgctccatccctttatcttcacagaacttgttgaattcattagaagtgtattatttgtctctatcacttctaattgtcttgatgtagtgtccgctttatttttcgacacgggatttgaaatttttgaaaatatcaaagacttggaacttttgttcataaaataaacccctgccattctagtaaagtcatcaatgaagagaatgaagtacctgttttaatcatttgatgaggtgcgtactgccccgcagacttctgtatggactagctctagtggcttttggctctccaaggtttgccgaatgggaaaggtttttcgatgttgtttcccgagcacgcatccttcgcaaactatgttgatctccttaattgctgagatgtctcgcatcatattcttctgcttgaggatttttatcccgtagaagttgaagtgaccgaaccttctatgccaaggccgtgattctctgtttgtgcttgcatcaccacactacttgcatatctctattgtataggaaagcatctgttttctctcatttctttctttgcaatttgaaaggatttatcttggttatcataaattgtgcaagaatctccttcaaaatgcaaagagtaccatttttcaatcatttg

SEQ ID NO: 363288 - DNA, 552 bp, Cannabis indica
tcaaatattagtttaaaaaaataaaaacatattatttacatttcaaactaaaaaaaatactatagtttaaattaattttaagaactttaatataagataaatataattgagtaaacataaaataattaaataaaataataaaaagagtaataatatggtatagattttagacttcaacttctatatccaaatataataaaaattattaactataaagtccaagttttaagttaaacactaaaatgtctaaactttaaatacaaaatagtttaactaataaatataatttatgtgatatgttatatacacttttattaaaaaatatataaatcggtttaattcgatttattcgggttaattaagcagtttagaataatttataaaccacccaatatatattgattaggcggtttggattttcattgtattattttgggttgtattttttattgatttattcgatttggtttaggcagttttattcgggttgagcagtttgtaaatttggttgaacacccctattagacattatatgccacaaatcataatcca

SEQ ID NO: 363289 - DNA, 749 bp, Cannabis indica
cggcccttcgcctatcggcttggagatatggaggccaaataattcgccaacaccataattttataaagaaatgtaccaaaataataatttttttaatatttttaataacataactattaataatttttttcaatatatttaataaaataattatttcctgcaaaaaaaaaaaataattataatagaaaataggtaacccatataaccttatagggaccggatttcgtcccgttactgtacggacacggatttcaatccgtgatgtactgtaaccgtcggatgggtagttaatttgatccaacggttggggttcatgtaggggttcatgtaggggtaattaggtatgaaaaaatggctaccggttactttttttgaaatttaaatttattaaaaatggaaaagtgaaaagtgacatccatccatcaatcaagtctaatcaaccgtcgtactcctccactcctccacttcttcactttcattttcttttattgttctatttatcattcgtttttccattttcgtctctgctagggcaaagttcttcctcttccattttcttttcattttccattttgtttttccattttctattttcgtttgaggtagtaaaacccatattgtacattgtggtgactgtggtgtacattactcgaagtgccattgttggagttgttagaggggggtgtcgacggtgagttatacattactccgttatactttacatacattttcttattgacagaaaaaaa

SEQ ID NO: 363290 - DNA, 628 bp, Cannabis indica
cgtactgagctgttcgggcatatttctatcgagctttgcccatatctccaacgatgtgcgggactccaataatgacttgcaagtgtccatctatcggttgaggtagcagatcctggttgttttgaccttggttggccttgacatacttctgcaagtgtgagttatttttcttgatcagatattctatttctcgcttcaaattataacattcgttggtgtcgtggctgtagtctccgtggaccgacaaaattttgtcatgttccttttgttggtatcattcttcatgggcccgggcttcttgtacggaattaacgactgagttgccatgtacacactctctatatcctcagttagaatagtgaatgcagtgtgttttgcatgatcacggggagtctgtccggatttatctgtgaacttttctttcttcctgtttccttgctttatggttgttgcttgaacgcttgccacttggattgctggaatagttgcgaagttgggcagatgttccagtggaaggagccttcgttttgcccggcttttgttcaccttctgctcgttgaatggcttcttcgagcttgatgaagccttcggctcggtcaaggaaatcactcattgagtcgaccgaccc

SEQ ID NO: 363291 - DNA, 568 bp, Cannabis indica
taggctattacctttccagcttgcataagcacacagccgagaccctgtctcgaggcatcacaataaactacaaacttttccttatctgaaggaagagttagtactggagcggtaatcaagcactgctttaactccaggaaacgtttctcacaccgatcagtccaaacaaactttaggttctttcgggtcaattccatcaagggtacaacaatctttgaaaaatccctcaacaaaccgacgataatactcagctaagtctataaagcttctaactttagtagctgactttggtgttggccaacctcgaacagcttcaattttggtcagatccaccatgatcccatctttatctactatgtcccctaagaaaaagacacaagataactagaagtcaccaagatgtcattgacaaacacgatcacacatctgtacaggtaatcctagaacacccgattcatataatccatatcaaatatagtatgcagccctggcccgtcattcaccctgatggcgttctgacatttaggacactcgggatatgatcagaatgaggacccacggccctgac

SEQ ID NO: 363292 - DNA, 842 bp, Cannabis indica
tatgcactttgcacagtgtagttgccttgatggtctgctgtccatgcccaactgtcgggtctagagttggtaccaagtggaatggctaagattagtccagcttcctcaggagaaaaaagatcacgaactgcctcaacatcccagcagtttgtatttgtttgaaggagagagtttacattgtgattgatgagtctaggatggttagaagtgacatacttgttgctggaagatggaagccaaggaaagcccagaatttttgtatcttttccatcacctataacacgagcagcccctaactgaaccaaatcctttgcaccccaaatactgcaccacacaaagcttgggttatttccaagttcggatgaaagaaaatcggtatttggaaagtattttgctttgtaaactataccagcaaaagattcaggcttacataataacctccatccttgtttggcaagcatggcaagattaaaatcacggagatgcctaaatcccataccaccttcttctttaggagttgctagacggtcccatgacatccatataataccatgcccattacttgattttgtcttccaccagaaactagccattagtttctcaatctcattacacgtaccaatcgggagaaggaatacactcatagcataagtgggcagggattgaaccactgtcttgagtaaaatttcttttcctgcacgagacaaaaatttaccatcccagctgttgatacgagagatgactttgttttttataaatccaagcacagcatttttattacggccaataatgtttggaaggcctaaataaaaactaccttcaagagcttctgacatgtgaag

SEQ ID NO: 363293 - DNA, 508 bp, Cannabis indica
gaactcgcgaagaaacatattgctcaacttcaagaagacattaagaagctgtagcaagatgcgctttcaaggacaaagagctcgaggaacttcgcaaggccaaggagcaagtcgagcttgaggccaagacaaaaatcgaagagatgtctcgcgacttggaaactgagaaggagaatggaaaaaaccagtatgaccaggtggtctcagactacatctatactaccctctccaagattccagactttgacttttcaatccttggagcagaagccgctgaaatggccgaggcttttcgtgcgatgtcgcccacgccacctcaaggtggtgggggaaatcttctcaaggagactgaggtcgcggaggtggaggaagtcgagaacgaggcggtcagctaagtcgcggatggatctattcattctgctcccaatgcttgacttttcctttaatatttgcttgtgttaaactctatttcttttctagttttttttttatgtggtacaggggtact

SEQ ID NO: 363294 - DNA, 774 bp, Cannabis indica
aataatctgcatgtgcaaaaatatgtataggtcaatcaaaatcaaaggggcgatattaaccaagatttactaccaccaccagtagatggacatctgcaagtcattattggaggtctgcacatagctagagattcgggcaaagcccgggaaaggtatgccagaacagtacggcatgagcaagaagaagtagtataggccgtcaaagaaaggaaaccaaaaataccacgggtaggggagcccaccataacattaagtgatgaagatgctatcacgattagtttcccgcacaacgacccgttggtcgtggaattccagatagccaacaagattgtggcatgaaccatgatagataatggagcctctacgaacatcttattcaagacaccgtatgaaaatatggggctccaactcaaagacttaattccctgtctccagccaaagtgttgcacctctagggcaaattcgcctacccctcactattgggcaagctccgaacatcataattataatggcacaatttttagtattagacgttccatcaatatttaatgtcatgttaggccgaccagttttatatgacttaaaggctgttacgtcgatattccattcatgccttaagtttccaaccaagaatggagtagggtacctgagaggaaattagcaagttgctcgggaatgttacaaccttgccttaaccaaggctaaaaaggaagtatcctttagccagagttcgaacaagggaaaaaatattgccaaatagggaaccgcccaagg

SEQ ID NO: 363295 - DNA, 543 bp, Cannabis indica
ctatgtgaattatgctatacggattttagttgcggtttaagttgctccgttaatataatagggatttttatatagaattccgtaaaaattaacataggaaacacaccatatatgtataacaaaagaaaaataaaaattagggttatatatagtcagttaatatatatcctaggctggagactgatgagtactagtctacatatgtaccctaaatacaactcattattatatattactttgtatatatatcatgaatttgaacctcatattcctcaaatccctttggcacatgccaattaagagcttctttgatatatatttacttttgcttcacaatcgtataaaaatttctccttaaaatcattaaaatgaaagtcatttgccgtaattctggtacttactaattaataatataattcataaattagctttgtagcttttaatttgcagaaaaatcaattattgtgtttaaaaaactaaaaattaaagtaataatcccataaatatacaacagaatttttagcagatgaatgaatgtaatta

SEQ ID NO: 363296 - DNA, 643 bp, Cannabis indica
attataaattattattattattagttatgactaaaaggtccgtggctggcaatgattgatacgtggtattggtctttggatctgcatggtgtttacactgtaagggaggcctatcgcttgctacatcaggctgatgtcactaacactagtgactttgagataaaaatttggaagatcgcttggaagcttcaagtccctccgaaagttcaccaacttatgtggcgtgctttgacaggctgtttggctactaaagttcaacttaataccaagcacatccctctggatcaaatatgtcccatgtgtcaccaagcgactgagacgatcatccatttattggttctatgtccctttgcaagatcatgttggcagaggtcgagtttaaatatggtctcggtgtcttggacatcattttgggattggtttagtcagatgatacttcagcactctactatggcacaggaggaattattaatggtgatttgggcaatttggcatgcccgaaatgagctagtttggcgggagaaatcattgtcagcggcggaggttattctattggcaagagtagtccttaatcaatggagaaatgctcaacaaaggagaatggggtctttatttgttcctcgggttcgaacatagacttgga

SEQ ID NO: 363297 - DNA, 1251 bp, Cannabis indica
aatttttgtcaaaatgatagtgagaaattataagttgtgtggcgtgatcttagacacacttgatggatgaaatttgttgattgtatggaggataacctctacaacggcctgatgaggattgaggaacttcatgttaaggattcttggagttggcatatggtcgaacaccactaaatctacctttgcaaaaggaaagattagcttgcatttttgacaacaagatttttcatagattaatgatgttcaagtctgctttcatgagagagaagtagagcttgaacatccttaatggtcaaggcatcacttcttgatgtgatacatgagacagcagagttaaattctggtcgaagaccattaaagagttctaaaatcaaatcttgatcgttaacaggggatctagaaacactcaatgcattagatatagattaaatcttatcaatattcttagagatagagagacttcccttttgaatgttggagaattggcccttgagttaaagacgatgtgccttagtttgactggaaaaattttgttccaaggcatgccaaacagcaaaaaggagctattgtagttggaaactgatggaagaatgctctctttcatggaaggagctgatccttcctccaccactaagcatactctagatttggtacgacactaataaggttctgaggtaggaaaactacggtgaataggatctcatcaagattgtgaccaatcacaattgaaacgacttcaaatttccaagagataaagttgagtcgatcgagtttgagaatgagagagaacgtaactgaattaggaaaggattccatgattaatttgaaggagcagcaaaagtggcggcatgggccattattttaggagtatgatcggtcattgaagagacatggacaatagtcaacactactacaaaattaggctttagaggcagtttttaaggcctttcagcgtcgtttttggtgaaattcgctactgacgctattctaggcgacactataggggtaaaaacaaccgacgttgtaaggaccctacggagtcggttattatgaaataaccgcctccgtagagtccctatgacacggttattatgaaataactgactccgtagggtccctatggcgtcagttattatgaaataactgactcattaggggcttcctagattttttttttcaacttcaaaattttatttttaacattattttttattttattaaaaatctaattttatttttttttcatatata

SEQ ID NO: 363298 - DNA, 713 bp, Cannabis indica
ctgtcacatcaatatggctagaaaatgactagaatattgagtataggatgacattatggtcgatattattgttttatgaacgttctagactcagtaccgtgtgggacacggggattagggttatgatcaggtgtatgggcgccaggttataactcaggttatttgtatgatatatgttatgcatttcttactgagtctgtcgactcacagtgctatttccatgtgtaggtaaggcaaagctaaagctgaggaatcgtgaggacgagcagatgaaggttgtacatgtcggggcggttaggcctggagcgtacgatcctcgggacatcaggacttttgttgtttagtcgctgggcgacaaatattttgtaaatgaatagcaaacttttgtaactgtattttgtaaacgggatcctggaatcttacaagtatatatgttatgttttaactaaaaagcaaaatttttattattcacgtttttccaataacctcgttaattagcaacgagatgcacagtacgttacaaatcacggtaacatgcctatgctcgttagggtgttacaaattgcgaggcagaatcaacagctgctcgaaaatcataaagtttggtggattactaactacttaagcaagaatattacgagcaatggacaaacccaaaagtgttgtatattcgatcaaaacatagttgtttacattgtgaataataacacaag

SEQ ID NO: 363299 - DNA, 342 bp, Cannabis indica
agttgttggtcaacgattttatacgcgaggtattttatccttcgtggatagccactcctgttgtcgtccgaaaacctaacggaacttggagaacttgtattgatttctctgatctggacaaggcgactgttttccacttcccaggatcgaccaattagtggatgcaactgctgggcacaagcttatgtcttttatggacgcagattctggatataatcagataaaaatgtacgtcccaaatcaagaacatgttggaaattattttttcttgctgaaagtctttcttcacgatctacctcactatgattgaggtatcatttgctgtgtgtgggcactactcta

SEQ ID NO: 363300 - DNA, 663 bp, Cannabis indica
gagaagcatcagcagcctggtcagaagcttagccggaagttgaagcagccacctctttcccaccataggcaacttgggtcgcgcaatactcaaggtacatgtccttagcgtcgcccaaatagtcgaaattggcctggggattagccttccagaaatcaaagaagagctcgaggccagcagtctccaaagcattgaccttctccttcaattggtctgcctcggtcaccttggcgtccctctcctcctttagccgaagaagaacttgccacagagaactcctctcatcctaaagattgtgaactttagtagataagatctcgatggtctcctcaaagcgatcagcagcctcgaggtcctttgtcagcacggagatcttcttctcggcagcaaacagcttcctgttggcttcaccctgctcatgccggacaacttcagtttctaccctggcctcctcagcttccttcttggccaagtccgcctccgccctcaaagtgtcagatagagccgcactcttggaagtagtagatttagcccgggagtaagtgtaagccaacttcaaagcggcatgcacaaagaaaaaagtcagcatatggagctaagtgtgaaaagttaaaagggaagtatcaaaaaatactaaccgtggtgagctccttcaagacacca

SEQ ID NO: 363301 - DNA, 875 bp, Cannabis indica
tgccaacaagaccttgcaaaagaacattgcaccaacaaatggaaaatggtctcaggcacctggttacacataggacaaacttggtctagaggaatatgtttggtagtaagttgaaccttagtagccaaacaaccagataaagcacgccacatgagttggtgcactttgggggggacatgaagcttccatgcaattttccatatcttaatctcaaaatcattagtattagtgacttccgaatggtgcatcaaccgataagcctccctcacaatatagaaaccacgaagatccttatgccaataccaagtgtctatcggagtctcctgatcaatgttggttcgtaggataatctctttatctcgatcattgaatatatccgaaaccacctatagatcccaagcccgttcacctaccaccatgagattattaaccgtccaagtctccataccattagctatataagtagcccacggttgagagtcatctacgagccacaaatcaaattgaacactaatgttcgtacctagaccaaccacccgacgagctccctccttaatcaatgcttacgtttcaaaaatactcttccatatgaagctagtattcggtccaagagaagcactcaagaaagaaccctgaggataatatcgggccttataaacccgactaataagagattgattatttgtaactaacctccaagcttgttttcccaacatggctaagttgaattcccttagatgtcgaaagccaagcccaccatgatgcttatggcggcacaacttcctccaactcacccaacttaccccacggttctgattggatcccgaactccaccaatatttgctcatcataccttctaacttattacaagtttc

SEQ ID NO: 363302 - DNA, 678 bp, Cannabis indica
atataaggttttcttaaaccttatgtgtttattttattgttttagagaattcatgtttaggatgttaattcaacatacttgttagtaaatctaaatcctggtaaaatattttcaacaactggcctcaaagtccatggtaatgatttactttcatgaaatatggatttaaaacgatgaatattgtttgtatgttgatttggatgtgttcatgttggtttatgtgttaattgatgaatgtttatgatttacgaaatttttccatgaaaataattttattttcattctgaaaatattttatttggataccttgtgaaaaattaagcaattttggttattacggaactcgattccgataaaaattgagagagttatgaatttttgaagattcaggttgaagttgtgtcgagatggtgcccatcgcaccagcatctcgaacaaggaggccacatacgcgcgcggatttagacaaattttgtctgaattctcgctcaagcaccctgccttcagacatgcacgtctccccaactgtgcacacgaaggctgcaagcagcctcctgcgcgcacggacgaggctgcacgcagcctgtgtgcactccaaacgtgttgtccacccaaaaatttgatttttttgggatttttcacccatttcggatttttcaattttcaaaccctaaattt

SEQ ID NO: 363303 - DNA, 580 bp, Cannabis indica
gaggttttccgttcaggtcggccaactcacttgaattcggaaacgaggtaagaatagcgtagaacatatgagatatatatatatatatgcgaatgtatgtatgtgtgatatatatgcatacttgttctggttagtacactaccaacacttgtacggaagtggtacaaagtgcattggtatagtgtacattgtttaaagagtacgttatggtgttaccaacacaagtacgggaaagtataggatgtgtgtggtacaacacttagtggtactcagggtacgaaacaaaccctaccaacactcgtacagtgtcggtacgtagtgtatgtggtacaaaggctgtaccctagtaaaggatgttcttactcatttgttaagccttgtaaataggtgtatgggtacctacatacaagtcgatataatatgatttgttatatgtttttgttaccgagtctgtcgactcacaattctactttcatgtgtaggtaagagaaagacgaaggccgaacaggagtgagcttcgagctaggatgatgttgtacatgtcatggcgacaggacctggagtgttcggtctcgggaca

SEQ ID NO: 363304 - DNA, 763 bp, Cannabis indica
ataaagtaagaaaatttaaagtttgattaaacaattcaatatcatcctatacatcaaataattattcactctaataaactaattcattcgaaacaacattaagtttataaatcaaacgcacatttgctggtaccaatgaggaagaacacattgggcgtgatgggactataaaacaaatcgaccacagaatgcgaatggccatggcaaacaagtggaacgaatccttattattcatatcgctcaaaactccaaatcagataaaaactcaaaaaacaaaaccaaaacaactaatccttcttgtgatctatattccaagggcaacgaaaaaaatcctaaaaccaacacacaaaaagtttttatttttactctcctaaacaatcaatctaaaaaggcaaaataggtaataaatagaaacaaaataattagctaaacggaataggaattacgttgataaatttgagattatacagaaaaatttcagtgcaaataaaaattggtagtatatttagacacaagtgggaaaacacaagttatttagagaaatttaagaaccgatccacacctcgtaacccttcacaatggctctgaaatctataaccaaattgcccagaaacaaattacaaagttctaaagaaaaaaaaataataagaaaaaaataatcaaccgattatgataaattcttatattatatcatcttatttttcaaacaaagtttgtgtttatattgttaaatgcaaaattatgtgacaaattaattttataa

SEQ ID NO: 363305 - DNA, 546 bp, Cannabis indica
ttttataaattactatcgtgtcattttcaagataagcgtgtcaatcgaaatgaccaatttaataagcggattagctgtgtcaatccaaaaatgacccaaactcatttaaaataaattcaaatccatttattttatacgaatttttaaggaattatttcacaaatacaccagaacaataaaaaaattacaaaaatacggttgtacagaattttaaatatctttacgatttttatgattttatttacaaaaaatacggtattttatattatacttttataaatttattattaattttttgtaatctatatggtattttttattgttatttttctgttacttttatattgtttttttttattattacttttgtaaaaaataatctttaaaaataatattttatgtaattatcttaattttgcatcagcatgtccaaccatattgcaaaccctacagtcgaagctaattgcctatatatatatatttttagggatacgattttgtcctgtgatgtactttcatggaatatatttcatggtacattagatg

SEQ ID NO: 363306 - DNA, 1111 bp, Cannabis indica
tgatgtcgtcgcattcttttttaaatttctctggccgctcactgagattgtttacattggtgagcagcttctccctggcttctttggcatatctctcttgcgacttgcgagagtctcctgcgatatggggccctccaatgatcgttaagatattgcgaggtgttctcgaaccactcgcgttttgattttcttctttgtcatccgctcggggatgaccttcctcattcttcttatatttgtcaaattttcctctctgaataagctccttgatttcgtcatgcaagacccaacattctaaagtggtatgaccaatatctttatggtacttacagaactttttggggtctcttctgccgcggtttcccctgatgggggacggcttcttgaagactccattcctctcttaaattgcataaatgtggtctcagggcaccgcgagtttggtatagttaacaaaacacggtccacccttcctcttcgacgaggactccttgttgggaggagatttggccaactttggactttgctgtctctgtgggctgcgtcttctcgggcttcggcctctagaattcttccctcggggactgcgagatcgtgatcgcggtactggtgatttactcttgtccttacccttttccaactctgccagagaattctcaattttcttatggggttcggccatagcgaagaactccactagcgattctagccttcgagcttgtaactctttctagaaatcagttctgcacgaaatacctgtaattagcatgtaaacaagcgaagactcgggagtcttctcgacttttgttacttccgcgttaaaccgtttaaaacaatcctgtaaagactcaccaggttcttgtttgatgttggccagagttgtataagggggcctataggtcatcctggcttgaaagtgcgtgacaaataaatcgacaaatgtctcccatgtcgatatcgaagcctcaggcaattgggtaaaccaatcgtgggtgttttcctcgagccttgccgcgagaatgcggcattttgcaagttgtggtacctgatccacttccattatagtattaaatttttcaagataatctataggattagaggtacctttata

SEQ ID NO: 363307 - DNA, 573 bp, Cannabis indica
tgtttgttattgttttcagaagctaaattatgtttttatggagtgttttgaacagattttgatagctagttagttggatgagcaagctttgagtttttgaactcaagcttgactcatcaattgtagttttgattattgtgtatgagtagttgttttatcagttggaaaatgtttattggggtttaatatgcaggtctggaaggtttggttgagtttggagacgttttggttaggagtttgagctttgtcagtttctgggtaaaaccggctaatcggttttacagtgcttgtaaaaccagttacccggattttgcaataggggtgaaaactagtttttcagtttgttgtttcgtgccagtttgaggtttctagaaagttgattccctgctagtttgggatattgctatattaagttgcagtagatagggttttgcttttaaaaccttagtcccggttgtgatttagtgagtcacttatgcgtgttacgattgatgtgatttaggagcctgtaattcgccgagcagatttttccactcagggttgaccggcacaccttaattcggaatcgaggta

SEQ ID NO: 363308 - DNA, 684 bp, Cannabis indica
ttagaagaaaattaaaagtattaacatgatagcatacaaaaactaacaaaaataaacatttttacacacacatttttgaattagttttataagaaaaccacatacctatagaagagggccactattgtgctaaaattagatatacgcaagtgcacgtagtcacaaacaagtaatacaatgataagtaaaagagtatcgtctccacagggattgattagaaattaattatgcaaaaatcaatactaaacaatttaggtaaaacaaacaagaagtgatgatgatttgaactaggctaaaaactaaacaagaaagtaagtaaaatgagaaaggaaaatgagcaaaatgatgagctagaacaatcaaatccacttagaatgcaaattcaatgtaaatgtcatagaggaatgcattagtaattaaattttgtcaaccggaaatataaatgaacatatgatttttccaaacctatatgttatgggctctcaagattaaattaacatattcctatgcaaatctagacctagagaacacaaattaagcaccaatttcccatgggtcatacaaggtaaatagcatattcctataccatctacaaatcacacttttccaaggtgataatcttgcatcaatcaagtatttccactaatcttattttttccaaaattaagattagctaacaaccta

SEQ ID NO: 363309 - DNA, 1180 bp, Cannabis indica
actagtgctataaatattttcaaaaatcatgttcaacattctagaacaaaacacattgatataacgcatcactttatcagggaacttgttgaaaataaatctttacagttaaaatatgctgattctgagaaccaattagctgatattttcaccaaggccctagactcaagtagctttgactccctctgaaaatcattgggagtttgcattgtctaatttttcttgttcttgtatttttacaatattgatgagttgttctttgcttccatctaatcgtgtttcattcttatttgacaaatcatgtttatgtttatgtttatttgacaaatcatgtttatgtttttagataataattagtttagtatcttgtacttatcatacttttgaggttgagttaaatgattcatgttactttttatgtgtgattgggattacataatgttcttatacagagctgagcgtttcttgttttagtttcttgtcaggccccttactcagatagagctacccatactgaggtgtgaaagtcatcttttgagtaagctagaacgttgtaattaattgttatgatgaggatgcaataccatagaaaagggctaccttaagtatggtgttatagcatcccgttgtgggatccatttgaaataggcgaaaaataaaaatcttgccaaggacaatgatcttattttcactgcacacactcatgtctgacaagtgaattcaagtgtgtaagtctcctctactcaactaaaaattatcctgattcacattatttgtaacatgtctattttttctcaacatctattaagtatggttcgtttttgagatactaattggttattctcttttgaaagcatacaatgtatatttatcagttgttataaaacttgattagttgcttgctctagaataccttatatttattgtacatattttgtttttttcggttattcaaaaataaaaataaaataaaataaaaattcaaggagggagacgtttgtgacttgacttctgggttaagaaattttgtgctttgtttggtaagtaccaacatttattctaaactaatttatttttataagttacctttttaaagtttgatttcatattcattgttttatgtcatggatcttgaaggattttcttaaattgcctatttttagaaagtatcttggttatt

SEQ ID NO: 363310 - DNA, 639 bp, Cannabis indica
ggggacaaacttaaggatggtttttacgggttccgggcccaccctgccaatgaaggggtggtcccgtataataggcaaactcatgttaaggagtatcgccatcgttttttcttctcctccgggttccgggcagtggaccatccggagctcctcactgagtgggttaggattcccccttacgaacggactgcacctactcaggtctttcttcggagagcccaggcctttgcctcttatgaccgggctgatcttgacgtcgggggcctggtcactacggagaactgcaggaaggcaaaactcatccttccgcaccaatctgtggaggactctaacctttcccgggttatctgtcccaacgtgagggcgccggtcgcggagaagaccttccgggatgagatcatcgccactgccgagaagaagtaccaggagtatctctaccggaaggctcaggagaaggcatactctaaggcccaggcggcttccgggaggtcacttcgcgtggggagcccggttgagagaaggagccaggcgatcgccgggaagccccttcacattggggactcagcggagagaagggctcccaggccacagccttcggctcaggagccgaacactggggcctcctggtgccagcacttc

SEQ ID NO: 363311 - DNA, 781 bp, Cannabis indica
ttattttaattagaagttaaaattagtaagatcctttttatttcatatgttgttgttatattttttggtggcttgacttgtattgcgaccgctaatatatctgcattttgaatgttcaaatattttttgatttaataagaaatttgcatagaacgaaaatattataaatatattaatattacattaccaatttcttctttagaagacatgtaggggtccaagtcattaaaattaactattttgtaccaaaagttattggtttttgtcttcattttttgtcagttcttctatttttgttgtagaggtaagtatccattgatatggatgatttttaaaattaatggtcatgtgctttagtaacacattacttatgtaataccattgatacatatttaatatatatttctaagtgtatatatcagattaaaaaattgtagtttctactttatctccagtaaataattatataattgtagttaataaatttagcaaatgaaataaataatattttatgtttaattgagtattaaaataaataatttacatttgtattaataagagttagttttttatatgtttttacaataacttatagtcaattatcatctttgctgttgagtcacttgttgttgaatcgatattgttgattgtggtcttgtttaattttatgatttttatgattaataaatttaaaaagtatattgttaaaaatagaaaaatttataaaaagagtataatttaaatataataaatgtaaatattataattgttttaaaaaaaa

SEQ ID NO: 363312 - DNA, 528 bp, Cannabis indica
gacatccaagggggagtgttataaaatattatttatggatgtccaaatcaccaaattaattatcaccattattgcttggttgtattttctataattacattgatttagtttcacattcttttactcatatttttgttaaaataggggttcacaccattggaataaacaactgaaaatttttcattcagtttctctttctctctttatcttctacttcttttcttcatatatattttatattattctacattattttataacacataaagtttttctaaaaaaaatatataaagtctataatttatgattattaaaaaaatcttcaaaaatatcaagtaataaaaacaacaaatttcaatttgtatccgtacgttcaaaaaataaaaataattaataaaataaaaaataactaattaacccaattataaaaagctaaaatcatagatattaattaattataaggtgccaatatatattactaatatttgcggcataaataccatacgtttttaattttatacacttaaa

SEQ ID NO: 363313 - DNA, 702 bp, Cannabis indica
atcttgattaatcttcgtttattttctctttaatttctgagttatttacttttaaaattgcacacttattattttaccaaatagaatcataagtatagtttagtagtacttaatccaattccctgtggttcaacctcacttgcgtgagatactacttgatacgtacacttgcgtaataaacagaaaaatcgtaacacaaagctagagaaagatatgctttgaccctgcaacatgaatagaaagatgaagttttggccattgaagaaagaaagcctaaatagtcgcgcattggagaaacagtcatatccttcagtgaagaagactctgaccacgttatctatccacacaatgatcctttggttgttgatgtccatattgaaaataaaatggtggctcagaccatggttgacaatggggcctcttcaaatattttgttcaaaactgttggaattttttttaccaggatcttaaatctactcataggtatgttgtttaacatcttaaatatgaactttctaaaacaataaataaacacatataaagttaagaaaaccttacattgatgcagcgggataatgtctccttccactcagatctctatcccttgtatcttttctgtcgcagagtattatcaagatctgagcccgaatatccttctctttgtgtgtgatccttcacagtcttccaatctatgattgaggt

SEQ ID NO: 363314 - DNA, 581 bp, Cannabis indica
aaataagccccacaaaataaaaaatttgggtccgtcactgctagttactcattagtaactaagtagtaataaattaactagttacccataaattatataactaataagtagttaaataaataaatttttaattttattgtatttctttatattgtaagttgtgagattaatttgtaaggattcggcttatttggtgttgatcggtttctagctagctcgaggtatacatttactataacttttattattaattaatcatgaatgcttagtagatgttgaatatcttaaatattcatccatagtgaagtaggttctatgatatattgtactacggtgagatgggtagaataatatgcatgttaaataagtttgaatatcttaaatatttatccgtagtgaagtaggttctgcaaatacatatacttcggtcagataagtagtaaatttttgtattgctaaatgttgttgctattattttatattttggattgtgttttgttattattaatagatttaaatttttggggaacattcaattataattggtaggggtgttcatcaaaccgcccaaaccgctcaaa

SEQ ID NO: 363315 - DNA, 558 bp, Cannabis indica
aaaaaatctgcaacatctaagtgcgtaatatccaaaggctctttgagaaaaccatcatcttgataggcaaaatttgcttctattttctcctttcctttcacagatgcttgataaagatcagcaaggtgttttgccgtacgacaggcacgtgcccagtgtccttttattccacatctggaacataaattttcagaatttctatgattattattttgaggaccttttcccttgttctcagtagttgtgcttttcattggagtatatgaatttttattttgaccattacgatgccaaacattgcttcgaccgcgatcgcgaccacgaccgcgactttgattatggtcacgaccacgtctattacttcgattatgatcacgactacgactatgattatgattgtcagcaattgtagcattcacttcagggaatggagcagacccagttgggcgagattcatgatttttcatcaaaagttcattattctgctcagctactagaagacatgaaatcaattctgaatattttttaaaatttcgctctctatattgctgctgcagg

SEQ ID NO: 363316 - DNA, 832 bp, Cannabis indica
ttttttaaaaataaaataaataaaaaatgtatttttaatgagatagtgaagcagagaaaaatgcgaacacgtgtatagttaagagtaatacacacaaagtcatccttgtatgtatattatagttcagagacatgaaatgtcagaagggaaatgttatgtcccccacaccaatacaatggaatggaatagtgaattaggtggtgtttagttggaggtaatgaaatggaatgaaatagaaagaaaataattttattttatttttttgtttggttacatttaaaattactatcattttagtagaataagtattctaaattaaaatggaaagaaagatcattttaattagggatgtaaacggggcgggtgcgggtgtcgctcccccacccctatacccgtttcttaaattcagttcccgtcccaatacctgtttaaattaaagtaggggaggagtggggaatacccgacgagagaaggattcccattgcgtacccattacatatatatttttgaaaaaaaatgatgtctcaaagagaattaaaaaaaaataatcataaaaacttaataaaacagtaaacttaagtggaatagtatgtattctaaaaaaaaaagagtgtaatcaatgaaaaacctaaagcatgaatttattttaattgtaacaattatgattttaaaacttaaacatatacatatatcatatcggggggtatctattcccctacccccgcttcgtttccgactcgggtatgaacctttaaacccatactcacctccgctcccgaaagtcaacccccgtacctgccccattaagggcgggtacctgaacccgcaggta

SEQ ID NO: 363317 - DNA, 830 bp, Cannabis indica
ttttagcttcatgttatacttttttaatattttaaagcattccgcgaggtctgaggtatgatccttactttttatcgattttaccaacatatcatcaacgtaaacctccacgtttcgccctattttgtttgcaaacatttcgtttaccagtcactcataccttgccccagcgctcttcagtccgaacggtgtgactttataacaatagagtcccatgtttgttacgaagcttgtatgttcttgatatggaacgtacatttttatctggttatatccagaatatgcgtcgataaatgacataagctcgtgcctagcaattgcatccactaactggtcaatcttgggaagtgggaaataatctcttggacaccccttcttctgatcggagaagtcgataaagttctccaagttttgttaggctttttgacgagaacaggattggctatctacgggggataaaaaaccttgtgtataaagtcgttgactaacaacttgtccacttcctgttttagggccccttacctctcggaatccaagggtctccctttctgtcgcttcgctgggtagtttagatcaacatttaagtgatggtagataatattagggtcgatccctatcatatctccatggctctaggcgaactgatcctagttcgccttcaaaaagcttattagctgctatttaagctgctcgtccaggttcttcccaatgtatacacattttgtgggatttcctagctcgagaataacctcttccaattctttgattggttttagcaggtttgtttcatcttgaacttgaggatcaagatcttcatctttcttctcatt

SEQ ID NO: 363318 - DNA, 469 bp, Cannabis indica
cgttggtgtcgtggccgcagtctccatggaactgacaaaattttgtcatgtcccttttgctggtatcctttttcatgggcccgggcttcttgtacggaattaacgactgagttgctatgtacacactttctatatcttcagttaagatagtgaatgcagtgtgtttagcgcgatcacagggagtctgtccgggtttttcggtgaactttctcttcttcccgtttccttgcttgtgcttgtttcccgaacgcttgccactggaattgctggaataatggggaagttgggcggacgttccagtagaaggaatcttcgtttcgctcagcttttgctcaccttctgctcgctgaatggcttcttcgagcttgataaaaccttcggcccggtcaaggaaatcactcattgagtcgaacggtccgtttttccttatatccttccacagttcgccaaggacttcaatgtcccccag

SEQ ID NO: 363319 - DNA, 491 bp, Cannabis indica
ttttagcaacaacctctaaaccagccaacacaacttggtcatcatcaatctcaagctggcttaaaccattgaaaaaatcatctccttttacaccagattctttgcccttgacattttcaacatccttggacttatcttcactgcctgcaacaacctcagtttgaatcacatcaacagtaggaatatcaccactaaccttgtcaacaccaaaaccatcaccaccatctttacccaactcatcaccattatcagaatcaatttcaatattctctggatcaggtaatcctttgtcatcattatcatcatcattctcatcctcctcctcatcatcagaatcttgggtaacaaattcttcagatgacttaacctggttgaaaatagtattgcaactgatataaaacaggaaaaaaaactaacaataacagaaaaaaaaatatatgaaataaaaaactgtgaaaataaatacctgaacagaaggtcgatcataaatg

SEQ ID NO: 363320 - DNA, 1509 bp, Cannabis indica
cgattaagaatataataaaaataaagcaaaaactaataagtgataaaaaacaccagattttaaagaggttcgacccctttagtacggtaatagcctactccccttagattgtattaactcgagaacaaagaacacagtgttttctctctaagctcttacaatgaaatctctgagttatttctcttagatctcttttcaatagcaattctttcgattccctttttctcagtgaagctagatcacttatttatagggccttcatgcatgagggaagattctccttttacttacaatgtcgataataggaaggaacattcattacataaatagaatacacaaaataggggattgagaaagcctaccgtatccctttaattcaatcccatgattgtagggattgtcttcgtgcttggactccacgatatcattagtctagtcttggtaagtagttcggaaagccaaacatgcccctgctcgggtagtctgccatttaccctgctcgagcaagtagatgttatatgagcaaatgtgctacttgaagtcggttcaggatattcatctccacccagatgctaggaatgtaggacacgtgtcacttatatattttgccatgtcagaatgcaagaaatgggataacattttcccccaagtctacgtgggacctttagggtcgcacgtagacttcactcagtttgaatccttatctaaacgggtggcacatgtttgaagtgtctgttgacaatccaatgtgactctgaccaagggtctcttcaatttttggctcattaatgctgactacttgtgcatcgaagcacgcctaaaaattagcacattttgacggttaccattcaggtaattgagtgctcaacgtacacttttagggggaaattgaggtattcaaattttgaaatgattattttgcctcactaattagcttataaataaggttgaaatccctaatcaaccacttttagacattttcattcttaacaaatcctttgaagaatcaccaagaaacatcgaatagcgtcatctgagtaactctaaagcttcgaacagtgagtaagttcttcatctttttcctcttttatgcttgaatatttgattttctgggtttctactgtataacttggtagttcttgaacttgttatagggaaaccatagaaaatttaggtttaggaatgtgaaatcttgactattcttaaccatgttgcttgattacaattgcattttaattttgattccacgatattcagtttcacttgtccattcggggcttagtgaaaattaacccttaattcaaaattttgaaattcaggattgtaaacctcaatatcatgcaaaatttctatttttgattccttgatcagacctggtcggtataaccaatctgtatctgttcgttatcccggccaaaatactcatcttgtgtcctaccttttgtagatgaaccctggtgagttttggggaagctaacattgtatcgaccatgtgttgggttttatgcc

SEQ ID NO: 363321 - DNA, 560 bp, Cannabis indica
aaaaaaaagattagggtttgagtttagggttctttttgaaaaccctatttgaagtgtgaatctattctcactgcccactccggagggttgctcaaccgccgatctaccaaaccctgaagtccagtcaccgaaatcctcacgcgtggggctcactcaccacctgaaggttctgtgtagtttcccacgcgccgatgcgtggaggcgcatgtgacagcattttcaacagcgttcttctgtcggttgtttaatcggttcttctaagcccacttgcatctgtctaagagataagatcaaattcaaaattaatcattatttctaatgtggttcccgtgatgtctaaaattacggactataaattgatttgtttgaattatttgaaatggagtaagacgattcgactgtatttgaggagtattgataaagatgatcacttaactaacgatcctcctaaagaaaaagacgattcaagaaaaatatggattcgtgaggatgcttgcctgttccttcaaatttgaaattctatcgataatgaggtcattagtttgattaatcattgtgaa

SEQ ID NO: 363322 - DNA, 746 bp, Cannabis indica
tagaggttctactgtaataagttatgattatgagatttagagcaaaaattatatgcaaaaactcaaatcacatattttggcaaaatatataaattagggagagaagcattgcttactatccttattagtttaaaattgattatatcacattaaagtttttctagccatgatcaaattgccatatattttacatacacacaaaattacatacttgcatcaattcaaagatatatatttatgattaatatataagaatatatatgacaaaagatatgataaaagaaaataataaaatataaaactatattataattgttatatatttattatttaacaaatatataatgaagattaaaatgtggtatattatatattaatatgagattaatatatattatgtgttggaggttatattatatcatatataataatacacataaaattgtaatatacgaggagttacaaatatgaaaatagattgtaacttagggatcaaaattgataaatatgtaattatgtaagttgttacacatgagagttgtggaattaataggataagtttctagcggttaaaaactgttacaatactcaattatatcattgattaattggatattgggacgttgggaaaagatttaactcggagaggagttacattttgagttctctggaaacaattgtttaatatttatttttatgttgtttcatggttgttttacagacacctggaacaagtttttgaaaac

SEQ ID NO: 363323 - DNA, 697 bp, Cannabis indica
taattcattgggagaagtcatacccaataactccaaccaagttcgtggtgcggtcagctaattgaccaaaccaaccagtcactgggatagccaggtgtttgcgtatttgataggttggggacgactcatgatctcagaaatgatctcaataggaggagaggagtagacgatcagcttgaaatgccgatcgtgcaacccagaacccgtgctcaaaatctcgcttagaaagatgctgatgtgactcagatcggccaagaagccgaacaagttagtccagccgtgcaggcacagttggacaaactaaaaagtatgttccaaggcatggctgatcagaggaacaatgatctcgagttggaccgagcatgaggaacccctttctcccccaagttcaatatcctagagttgccccacaagtttaagatgccaacctagaagatctacactgagaaggaagatccattatcccacattatgtatttcgagatgcaaatggatctgtaaggagtatgaggagatgtataatgaaaaaaatttcctgccaccctctcagaagccgcctagcaatggtatattaggttggctcccagaaagttcatgtaacgtccccgcctcaagcctccattgggtccttacacccacggactaatggctcttatacacgagtacgccactctggctgcttcatggactgatgact

SEQ ID NO: 363324 - DNA, 1108 bp, Cannabis indica
atagcttcaatatcatggacaattttctgaggcaaaatcattacctgagaccaatatgcatggatggataagagaactgagtttatcaagatgactcgggctgcaaacgacaagtttctcggtctccaagtttggattcttgctgtcattttctccacaagtgcagagcaatcattctttgatatctttttggcacaaatacgtactcccaaataatggaaaggcatctgtttttgactgaagcctgatgcatcaagaatcctaattacttcagagctagccatattgctacaatatatagctgattcttacgggttaggttgaagacccgatgtttggctgaatagctttaagccttgcaaaagataatacacactcttgaaatccccattactgaagagaaggacatcatctgcaaaagcaagatgatttattttaagctccgagcatctcaaatgtaaatgaaaatcctcctttttgccaataactttcaggattctaaaaaggtactccattccaattacaaagaggagaggagacattggatccccttgcctcagacccctcttagattcaaagaaaccatgtactgagccattgaacattagggaaaatcttggagttctcacacagttcataatcaacttaatgaaagactgtggaaaattgagtgccttcaacatttcttccacaaaatcccactctatggtatcataagctttctgtaaatccagcttgatcaaataattagcctttttagttttcattccatagtgcttcaccagatcctgacaaatcattatgttgtggccaatgaatctctcttggatgaatcctccttggttttgagagatcaatctagggagaataagtttgattctagaacacaaaagctttgttgcaactttgtatattacattgcaacaagcaattggtctgaaatccttggccgaagaagggcatttaactttaggaaccattgtcagaatagtggaattaatctccttgaggatcttccctgattctatgaaagaggtaactgctttgtatacatcatctcccacaaggtcccagttattctaggagctttatgttgggttttatgccc

SEQ ID NO: 363325 - DNA, 725 bp, Cannabis indica
agtagaagtagggtttctcttttggttcccttcagcgggataccttatagggcttggttctctagatttctgcttttgggtacttggcgaggattcctctggttcctttccaagcccagcaaagatgactttaggatacacgtggattcctgctgcctccatggctttttgcatgactagcattacctcttgcatcttttggttttgcactttttgggctgcgatttcagcttcatgatcgacagccttttgccttaagagtaccgattctgagtagctgccttcgtcataggcgtactcatcgaggtttccttcgtagtcatcattagggattccttcttcttcctcggaacccacggttgctcttgaggccacgtcctcgtcatttggatcttgagcatcttgaagagggcgaggttgacgtgtgcttcggttctccaccattattgtgttgttgtaatgcaatgtgtgcttacagatgctttcttcagctctcaatgaaagcaccaaaatgttgaccgaggtttttggcaaccaataaaataataataatttggagagctgtaagaaattaagagagagatttttacgtggttggggcgttaatgagccttagtccacgagtctgtgtatttatgatggtatttaatatagagaatgttcttggtgagttcttactcttctagttcttaagaaacccagaattcttgacccctctttaatga

SEQ ID NO: 363326 - DNA, 718 bp, Cannabis indica
agtgttatccttgctaatcaaagttttttcctcgaaaaacatgtcaaattaaaacttttataataaatattaaactttataatttacaaaactatttaaaagtgtcgggatcccgttttttaaacttttatacaaaatatatcaaaatacataaccggtcgcacaaacaactacaaaataatactcccagatgtcctgagaccgaacactccaagtcacgttgccacgacatgtacaatcccatcctagccaggctcactcctgttcagctttttcctttcctttacctacacatggaagcagaactgtgagtcaacagactcagtaagaaaaacatataacatatcacataatactgacttgtatctaggcgcctatacacctatctacaaggcttaacagatgagtaaaaacgtttcataccagggtacaaccactataccacatacactacatacgtcactgtacgagtgttggtagggtttgtttcgtaccccgagtaccactgagtgatatactacagacaccctgtactttcccgtacttgtgcaagtatcagtgtaatgtactcttacacaatattcactatacctctaacgtcctaaataattaggcacgctacccaagatacttaggaaatcctaatcccctaatcaagattactagtaaaacaagcgcggaaattaaaatttaatcataaacggaatgaaaataaaac

SEQ ID NO: 363327 - DNA, 608 bp, Cannabis indica
gacaccaacgaatgctacaacttgaagcgggaaatagaacttctcatcaagaaaaacaacccacacttacagaagtacgtcaaggccaaccaaggtcagaataaccaggatctgatgccttcgccaatagatggacacttgcaagtcatcattagaggcccgcacatcactagagacacaggcaaagctcgagaacgatatgcccgcacagttcaatacgagcaggaagaagtcatcctggccgtggaagaaaggcaacccaaagttccacgcgcaggagagccaaccataacattcaacgacgaagatgctgtctagataagatttccgcacaacaacccgctagtcgtggaagtccagatagcaaacaaaatggtgtccagaaccaagatcgataatgcggcttctgcaaatattttgtttaagactgcttacgagaagatggggctccagctcaaggatgtaactccatgccttcagcctgtatttggtttctccggccaagaattatgcctctgggacaaatctggctacctttcacagttggacaagctccaacgagcataactatcctggcacaattgctgatattggatgttccatcagtc

SEQ ID NO: 363328 - DNA, 686 bp, Cannabis indica
acaatggtttgccccttgtggcacattttgtaaagacaactttgtgaggttggatggaaaactttgattttattttatcttttaatgcctcgtactattatgtttgaacttcaatatgtagttgtttgcttgcgtttcattgacaatttaaacaatcatattttgatcatgcacaaagtattttaggggtttccaccgcttgtatatctcttcggtgttaagtagttaatagcctactttatacgcgagcagtttatcatttgccctgcactcgatttgcgagcagtcattgattctgcctcgcgataatcagttacaatctgttacaagcaatcttgaatatattcttaatagccttgtcactttgtatatatgttttattgcttttcatgagtagttagatcttctacccatgtgttaggtttaagtactttttccaagacatcttgatgtctcgtttaatactttcctttagtgtgagccgttattattcagctttatacgagagttatgagttatatctcatttataatttttgattttcctttctcgtcagataggtttttaatcaaaaattatagtcgtttgatccctttctcgtcggaaaggtttgatcaagaagttataacgattcgacccctctctcgtcaaaaagatttggtcaggaagttataacagttcgaccc

SEQ ID NO: 363329 - DNA, 819 bp, Cannabis indica
gataagtaggccgcatgatccaaaggaataggcgccggaggttcagaacccatccggggccgacctaaataatggcctaagtgggaaaaagtaatactccttggcatgatttccccaccgggaagaaggcattctaaacctacggagacgctcatcgaaccctataggcctaagacgggtatactcacggacgggaggagcataatgtattgataaaggggacttaccagaacccatagtgctggcatcgagagctccagtatttgggaccgcgaccacaggcttgggcctacgggtcctctgctgcggcagagcttccaggcgcagagtcctcccagtggccacctgggccttgatataggccagctcttgttccctcttgaagatgtacttctggtacttgtcctccgccatggcaataatgttgtcccggagcacgttttctgctgccggagtccttgcgttcggatagatgactttggagagattgaagtcatcaaacgactgatgcccccaaaatcaacttggccttccgacagttctctgtcgtgaccaactccccgacatcgagggccttcttgtcgtacgtggcaaaggtcttggcccgttggagaaatatttgggtaggctcggtccgcatataaggagggatcctaacccactccgtgagaagctccgggcggtccatggcctggaaatcggaggagaagaagaagcggtgacgatactccttcacgtgcttttgctggttgaaagggactgggccctcattcaaaggatgggccgaaggccataaaaaccgtccttaagtttatctcc

SEQ ID NO: 363330 - DNA, 641 bp, Cannabis indica
ccactcctttgacatttacaggtttgacttccatttaggaattcatcaatgctgggaggtgttatcatcaaaactctccacaacttcatatctatcattgcagctcattgacttctcaacaggttcagaatggtcattgttagttacaaagttctcaacaccttcagatgatagcatgaacacttctctctccaaattttgaatcatccttagtagcctaggaatcacatccttcgatcgttgacaaatgggtgggtcataccacatccaaaagccacacccatctacttcctacaacaactatgaacaattgtgaacagaaggaaaataaaaattagggcaaaaaaaaatctcacatcatggcatgggcatctaatgaacctttgtccaggattcctatttgtccaggatgttgtcatctgtgcaactcgagggggacgacatttgcagtagtgaggccccgcagatatttttttgctggtttgtggtcttcagcttcgacaatggaggacaaatacaggtacccaatacttttacttttctttctcttgtcttcgacttcgaccggtgggtgaaaatggggtctgaggattttccctcctttgcaaaccgagatcttcgtgactgagaatatagatctg

SEQ ID NO: 363331 - DNA, 954 bp, Cannabis indica
attgagagcagaatcaagaatcgatcttcattctaaatttaatcacaagtacaatagtggtacagactcgtaggggcgtagttgatccagaaaatccacaagcggtggatcctgcattgcagaacccgagaaatacaagtgtttcgccaactgttaatcccacacaaccgtcaaacggaggtcacgatgtgaccactcttgtggatgaaattgcgcctggtgtgcaggagactgagaatacaagtttagcagccaaccaaggcattcataacacaaccgttacgcccactatcaatgttcaaacaaccattggagatgacactgagatccaaaacctccgtgctaatcttggactcatgcagggtcatactaacaccctacatcatgatcaggaggaactctgcgctgcagtaaatctcacgttcaaagagtagaggcgcatgtttgccgaatggagggacaaagagatggaagcgttaagggctcatcatgcagagattgacaatcatagtcggcaagccactgtgctgatacgaagagcctatcaatctgtcgggcaacaacccccgaatgtcatccccctgggtgaaacagatgaagatcaagcgatgaatacttctcagactataaatggtcagccaccaaatctccggtcacaggttcaacctatgggccaagcagttgtgggcagaccttatctagtaattcattgggagaagtcatacccgctaattccaaccaggttaatggtgccggtcagcaaattagccaaaccaaccaatcattgagacagctaggtgcgtcaatatttgatagtttggggacgactcatgatctcagaaatgatttgaataggagaagaggagtagacgatcagcttgacatgccgatcgtgcaggccgaaacccgtgctaattcatgcttcgaaagatactggcatgtctcatatcagcc

SEQ ID NO: 363332 - DNA, 530 bp, Cannabis indica
agagatgtaggaatgttactaggagatgattccttcattggctgcttgcctttggcagcagcagaagccttggctgctgaagaggatcgtgctgcagttgaagcagatttggtcaaatgaggctctggctcgagatcaatttcctcactgtctgaggaaactccaatgtcttctggaatctccttcttagaatggagagacacggatttgtccgaggaatcaacagatggatcctccacgggttcttcttcttcagaactcaaagaaatcgaagggggatttacctttgtttcttggcacgaggaactgacttgtcaagacttcgagatgatcaaagtttcttctcgacagaagcttgctgggcacgagtgcgagtggaaggactagttggagtagaagcagcaacttcctttactgatgcagcaggaggagaaactgcagcaggtggaagagattcctgttggaaattattttaccaggatctagatttactaaaaagtatgtttgattaacaccctaatatgaatact

SEQ ID NO: 363333 - DNA, 519 bp, Cannabis indica
gcattttctattgcccaaatcaataaactatttaaactcaaaatcataatactaattaaacatatgcacttttgataggagagaaagatacagacaacataaaacaagaaggagagagacaaccttgaagtgttgtgttttgctgaagatgatgacgtggccttggtcgaaaggagaagagggagatgcgagagagggaaagtgagacgaagctttggttcgtcgggctgttggtttcaacgatctgcgactggatgtggatactccgacgatctattagttcgtcgggcagagggaggcgctggataataagaggcgatggaatttttttaaaggaaaatattcaactttaacataccctataagaactgcttaaagaagattgagacacttaatattactgtgaagactttgaaactaaaattctcaaaagttgctaaaatgtttgaaagcttaataataatacaaacaatgaaataactgtaactctttctgaacctaaaggtttgtatgtctagt

SEQ ID NO: 363334 - DNA, 415 bp, Cannabis indica
atcattcgatttatattctttcactaaatcatagcacaacattctaattcgcttaacttcattttgatattcaccaacataaattttaggaaagtaatactcaatcaatttcatcttgaaccttggatccaaaacagttgctatggctaatatgccatgaatggaagtccaatactgctcaaatttatccatcatatttaatgccataatcctaatctcatcatagaaagatttaagacactccttaagcaacaaccaaatttcacaaatcttagagaagaaatgattagcagtaggatatttagttccagaaaacatcacagttacattgtaaaacaacttcaatttttcacacataacttttgccaaaagccaatctcgctcactaggttcttttttgtaatttttctcagta

SEQ ID NO: 363335 - DNA, 920 bp, Cannabis indica
ttttataaaaaaaattatttataaattaatttttaaattaaatttaaattaaaaatcgaaataatactaaatatattatcaaatatattataaaaccgacattgataatgttattacaaaactatatatgtattaaacgtcataaactaagtaaaagtattctgaattcataaacagtaatatctacactgtaaagtcaaaaaaactacaaatcaacagcatcatcttcgtcatcagcgggaggggcagcttgtgaggaggaaccagctgcatggccaaaaggcagaatcggtggaatcggtggaatcggaggcagatctagcatgttaaaccctggaacaacgctgggccattggatcatttgttgttggaatgcactcatgatctaattttgagtcatcatcatctgctgttgccactggttccatgcctcttgttcttccacccttcgctttagtgcctcatattcctcttgaatgacactggcatgcccagattcacctggcctgggagttgctcttttcccccccgccttaagtcttggtaacggtccgactcctctcaagtggcgtgactgctcacccaatacctgtgtcataatatgcgtatctgctagaaattgggtcgacactgtactggcgggggcatcagctggcgttggttgagtgtcacgaatctcaaccattttggcctgcaaaaaatttcataatgaaactgttagagttaaagaaattgaaattataaaactaatttactaaaaatataatgttacttacatgcagttgttgtgtgtgctcgtcgcgccacttattgttcttgcagtggaactttgcaaatgtatccacagcactgggaagctcccctgtctgcggatcagcctaatttttacaaaattagaattagaacaatattattaaaaa

SEQ ID NO: 363336 - DNA, 874 bp, Cannabis indica
cccttaaacagccctcagactgtaccttagcacaacgagtctaactggccaacgcatctgtaaaacagttaagaaaacaagaaattaactttcctatttatattgttgattgatgattggtaattgttgattgattattattaattgtatgtatacagagagatcatattgtatttacaacttcacttcagcacgcaccatctccaattagtagtggatgatcaacagaaaggtcaatatgaaattaaaagtatttgagagatatgctcatgctaactaaaatgcaacattcgttggaggtaggagccgacaacatattaattagttatatatttatgaaaaagtagtatacacattaggtatttatgtactatcttatattccaattacagtagtggatttttcctagattaaatagtgagtagtggaacagaagcataataattatttataaattttggaataatataaaactgtaataatatgtttttttttttagtatcgtattgtattaaattataataaataataataaaaataataaatattatattattatagagcatggtagtagcttcatcccaaattctaatgtgttagtattaatcttctttggtgtctttatttttctgtattatttttactgttttgtgctttttcatcccaaattctaatgtgatttctgtattaatcttctttgttaatttaattttagtcttgtctcatgacatggttttgagtagttttttaatttttttgttttctttctctagtataattttgtctggctctggtgtggaatatggcaagttcagtggggtaactgtggggtcaatgaggatgtctacagtttttcagttgaaagagatgactt

SEQ ID NO: 363337 - DNA, 558 bp, Cannabis indica
aaaaaaatttaaatgtatttttggcactgtaaactattcaaatttttttaaaaaattagagggatgatgttgtaagcataacaaacacctccgtgaaaaaaaaaagttgaaaacttgtattttcaagcgtagaggttgactaagagattgaaacagaaaaataatggtagcacttctaaaaagagattaactaagaggttattattattattattattattattattattattattattattattattattattattattattattattctggcataaataccactataattttcgtctacaagtatgtatttatataattatacatttaacaactgtatcaaatgtatatataatcatacatcatatatgagtgcttgatttttatttctaacaatttaagattattgactatagatattattataattgttattgtgctacaacatttttcataagtaggaaaattatcctcttcaatattttctttttctttaaattagagttacacattaggacaactctacacttttttcttctatattttctaacttaaatt

SEQ ID NO: 363338 - DNA, 686 bp, Cannabis indica
tacacatggtcgttcttaattgtaattttgaaaactgagttatgttagcgatgcatattggtcattgtagtgtcgaatatctatatggtctgtaatttgaatttattgatgactttattgttcctgtattcaattgtagatgtttgtgccggtgttgacgctagaaggtgcaccacattggtttggtgccgaacttaatatgaagtccaaggttgtctcatttctggactcggtacacaccgctatggatgagaactatcgtgttgacgctacgaaagaaatggtaaagttgcaaagtgtcattgtttgatgtgaactcattcttcattgaatctaagtaattgtatatgtttgcagctgtcgacgttggaccttttgtttgatgagaataagtcaaagaatgtgagttttgtggatttcagaattgatagtaaagatcgcgggcttcctcaacaagacaatgaccgagattgcggtgtatacgtgatgaagtacatggaggctgtggctaatgaggaagaagtagttgatcaggtataccactttagttagttcagaatgtactacccaagtttgattgagattaacgttgtctaatttaaatttaattcggtgttctactgtcaacttgattggagttaattacattttctaagtttttgtttttgtttctgtattgtcccaca

SEQ ID NO: 363339 - DNA, 636 bp, Cannabis indica
agaatttacctatgatgtgttggcaaaagggggttggcaaatcaatgttggtattagaacttttgccagcacaaaatgaaaagcgctggcaaaaaaaacttttcccaacgtgtaaatgtgctggtaaaagttagattttagccactgcaagtgtacgctggtaaaactttgatctctttgccagcgcagtttgcgaaatgcgctggtaaaagttacttttaccagcgcagtagcaaactgtgctggtaaaagtgacatttcttgtagtgcccacacagcctcagaatcatcacacttgaccttccttaggcgatgtgggattgcacagcttacccggtattcccccttacagatcctgggactactgactgtcacaatcacatcccttacggggtccgacgtcctcgtcaaccacactttcggctgggtcaaggctctgataccaaactgtaacgctcgtatttgaaaatttactaaacccaaaagctaattttattatattataattatataagcttataagtcgggatataattatataagcttataagtcgggatctcgagatttaaacatagttacaaattacatttaccatataaagttaagtaatattttttttttacaaaacatagggc

SEQ ID NO: 363340 - DNA, 565 bp, Cannabis indica
taagagtacaaaattgtattgctgtacagttgaaagatattttatagtattgactttcattttatatttattttccgtaaaaaagttttatcttttatttcaaataaaacatttaattattattaaaaaaaaagtaagaaaaattaattgactccaatcctatctctctgtaatattaataggattaattatacaaaaatttatatttatattttaattagtacttgaggttcatattaagatattttattgtattgatcattttttattttatatttacttttggtaaaaatatttatcttttaatttcatttacatttttcaaataataaaacatttaattattattttttaaaaaaaagtaagaaaaattagacgtagaaaatgcatgatgattattatttttcttggacatatatatagctagaatatttgattgttcttgtaatcgttgcaggttacttctttctggttggctttgttgattgagactatatatgtgcatgaatcatgatcatgtgtcgttcaaaaaacaaaaaataaatgaaatttgcatcttatatat

SEQ ID NO: 363341 - DNA, 531 bp, Cannabis indica
ttaatttctataaaaaaaaataatatctatagttgagataattttttatttattttagtgttttatttttttaaaaaaagaaaaaataaataaaaagaaacactaatttaaagttctttatggcattcctcatgactttttcctatatttgtaagttttttttaaaaaaataccatatatcaaaacttatctttatttttccatatttttgtaaatagtcctttgttttattttgttttgttaattttttttgagagagaagaaatggtcatttacattttatagtgcattctctctttttttttttaaatggacattttttatcctgcatttcttttttttctttttttgaaagattttatccttcatttctattcctacgtattacgttttttacaaattaatttatttaggtgccgtttggtaacatttttgttttttaattttttaatcacaaaatgaaagtaaaatttttgcttttaaaaaattttgtttttgaaaaacaaaaatgcgttctgcaaccacttttgt

SEQ ID NO: 363342 - DNA, 764 bp, Cannabis indica
tggcccaatgaacctagggcttaacttgcccctctttccaatgcgcctaatgcccttcactggagaaactcgcagaaaaacatgctcccttgcgtgaaatgtaatgtatatgcacttcggatcaacataacttttctgtctgctttgcgaagcatgcattcgaaccttgatcttttctatagcttcattggtcccttgaactaattccagacccaagtatttcctttctcgagtttcgtcccaatgaattggggaacaacacttcctaccatacaacatctcataaggagtcattctcatcgtactctggtagttgtttttgtaggagaattctattaaaggcaagtacttactccatgaacccctcaaagtgttgggttttgtgccctaaataaaatctatttcaatataatcatacttactatttaataaagatcagaaatcgcattttatattgcatggttcacatgatttatttcatgattatgtttaatgtaaaaaatctatttagtccagaacgtatgtatttgttcatgattatagtgtcattagcacagtggaatataatcatgattatatgttcaaaagtttaattccctgattcgtcagttcactagatttagaatggcatgataatcagcaataggtgtacttacaccttggataagtgttatgtccttttgtagggcattggcaaagtttaccagtatcagatgtatagagtatacattggaagggactgatattgatcttggataagatat

SEQ ID NO: 363343 - DNA, 809 bp, Cannabis indica
  modified_base (23)..(23): a, c, t, g, unknown or other
tatattctaacacttttttttanactaaaaaattctaacgctttgtttttatgatatttggattttttttttcacatacttggcaaaaaactacataaaaaatatgaaaataattaagagaaatgctaaagggcactagtggtgcttaacactctcttatgtgttaatatcactattggtctaactaaatattagatcccatataatttaatataataattttttaaaaagatcgctagccaatcgcaacgtgacatgtcgagaaagtactagtcactaatagtacctaatagcaatgctcaataattaattagtgaagaaagtgacaggggaaatagaggagaaagtgtgtgtgtggaagaagggtttcctttccttttatctaatttattaattaatgctttaaaatgataacaacacatataagaaagaatcttaggaccaatagtatgtggtcactactcactacactaccattattacttcacaatataatactatatatttaacctacgtcatcatatgacatatttgatgatataatcaactcttacatttaactttctttttttttactcaatttttgttaattttattttccaatacataagaagaaattttaaatgaaagactataatcaaaatcaaaatcaaaatatacgaggggtgctataaaataaagcaaccatcttacataaatggataatttcataaatacacaaaaataataataaaaaaaatatatgaaatacacttatacttaatttttttaagattttatttacaaaaaatataattttttgatgtatt

SEQ ID NO: 363344 - DNA, 519 bp, Cannabis indica
cataggcaacttgggccgcacaatactcgaggtacatgccttagcgtcgcccaagtagtcgaagttggcctggagattagccttccaaaaatcaaagaagagctcgaggccggcagtctccaaagcatttgaccttctccttacaaacggtccgcctcggccacctgagtgtccttatcttcctttaggcgatgaaggacctgctgtagagaactcctttcatcatgaagacgatcaacttcagcagataaggtctcgatggtttccttaaagtgatcagcatcctcgaggtcctttgttagcacggtgatcttcttctcggcggaaaacagcttcttgttggcctcacccaactcatgatgaacagcaacagactctgccctggcctcctcagcttccttcttggccaagtcagcctccgccctcaaggtgtcggacagagccgcactcttggaagtagtagatttagcacgggagtaggtgtaagccaacttcaaaccggcttgcataaaggaaaaa

SEQ ID NO: 363345 - DNA, 943 bp, Cannabis indica
aatcgagcctatagtgaaagagtgagtgcccacacacatcaagtagtactcaatcatagtgtgtaaggctgtgaagaatccagtttcaagcgaaggagattcagactcagatcttggtgatactctgctacagaaaggatacatgggttagagatttgagtggaaggagacattatattccgctgcaaccactgtaaggtttcttatactttatatgtgcttatttcatatcgttttagaagttcatatttaggatgttaataatatacatgttagtaaatctaagatcctggtaaaataattccaacaaatatacggtaaaccttatcccatagggatgtcttcgctgagaatggagccaagttaactttgatggcgagaagtttcttgtcatctaacttcccgagactaatattgttttaactctgataagtatattttctggtgtcgagatagtctttcttgcatgcacgccatcttctagcgagataaacgcctcgctatatattatcttgactcgtcaaactttatacactaagcttgtatatcgtgtaatatacgctaagtgtttttagtgttatcatttctcttccacgcagcgagattgaggcctcgtcatgcacacatgcacccacatggtttctcgtcaatacataaattaacagttcgtacgtttctgtctcgcaaagggctattcagccagctgagttataaacatactctacgaattatgtttccaacaagttgtttgcgtggtttcgtttgcgtgtttgagttcttcgttcttcctagctcgacatgtgtcttcctctgatgtgcttactgaatttcgggtataacatattccattgtgctgacgatactataatcatgaacaaatatatatatatatattttatatacgttctgtacttaatagaatttatacattaaacataatcat

SEQ ID NO: 363346 - DNA, 511 bp, Cannabis indica
gccttagcaagggcctcccgccgcgcaacctcctcttgcaacgcccgcttttcagcagacaggtcctgcagggtcttcacgacttcgtccatgtccccgaattcggacaagacgaagccgtgattgaccaggttcttggaaaagcgaccggcctctacagcaagctggaaaaggatgcaagagtgagtaaagtccttaagaaaaataatgagggaaaaagtaaactacggaatacttaccacggtcaaggagtggctaagatcctgaacttgaaagacggagttcaaggatgcacaagcagcgaaccgtttaggagcgcaccgggttagctgggagaaaaactcgccggtcatctccgcggcaaaaggagccaaggtaggcccgagaaaacgattgaaccagtccgtcagggggtccatatttagatcccacgggttcttgtaattttgatcgttaagggtattttgcatttcaactcgcaaaaccctcctcaaggcctccacctcagcat

SEQ ID NO: 363347 - DNA, 813 bp, Cannabis indica
tttggtttttaaagactttatctaatttttttatttaatctctgcaatatttaattttcatgttttagcatttggatgcttgatttcatttgatgaggaggtgacaacacttttatccggaggtgtacccaaatagatgtgtcattatgcctcatattttcccatgaggagttattggtcggtggcaagctgcgggtgatgaccacactaaatttcaatgggatgatggcatattggatttgatttgagggaataatgtccagtacttgcacagttagaagaataaagagagaatatatatggccctcttcttcgataatgaaaagcattgggtgacattagaagcagaccttgatcgttaaatgttgagcatatttgactcgagcctcggattgatttccccagatgaattgaagagtcacttggcattgtgggaagagttattcccaactttgatgctgcagtctggcctattagagaatcatgaaatgatcatcattcctcaactgaccgtctcagagaggcaagatagaacttttagttcaaaagtcatcaacgggagcattgtacgacatacataatcaatgtaacttaattacaattgattttttattatttaacttgaatttaatttgcatacttttatttatttactttttattgtctcatacagcggtgatagcgggatgtatgtgatagagcacatcgagcatagtatgctagatcttacgtttaataatgtgaacgatgacaatatgaagaaatttagagagcagtggtgtgtagatttgtttatcagaatttatcatgaac

SEQ ID NO: 363348 - DNA, 658 bp, Cannabis indica
ctaaaaaaatactacaacaacactaaaaaaattaaagaataacaaaaacaagcataaaaaaaatagaacaaaaataaatgaaatcacacacctctacaacccttttcccaattatttcctcaaccacatttgttgattgcacaatctttactggggattaccctttccctaaaatttaacaaaacaaaaccaaaacaacaacaatacacaacatgaaaaaacagaaaatcatagaataaaagaaacaaaaaaatcaacatgcaaaatgagaaccccaaataatttacagagaaatgaacaatacaatgaaaatgtaaaaaaaaccctaaaacaacacaagatcaatacgaaaataccttcacagatttaggagacttcacaaactcagtctccaactcaaaatcagagtccgagttctccacaacagttcaaggacgttttcctcgagtgttcttggaagttctagcaggtagttttcttttaggggcaacatgagaagtagagctaggatgattatctttcaaatatttcttacctattgttggtttgggtttcattttctggggttgttttgggaaatttttagcaacaggggatgatgaggatgaacgtgtaactgccatttagatcgaggaggagtagtatttatagagaaaaa

SEQ ID NO: 363349 - DNA, 859 bp, Cannabis indica
cctggctctcatattttgaattaatcgaaatttagtcaatgtagggaacaggtatgaatataccaagatggaatttatctgctcctgtctcgttcctttttgtaccacaggtacacctggcaaaaatctcctccaaatacaattacctttccaccaaatggtaaggttgtatcgttaatgtcttgtagcattttatctaacgcttatatgtgctgctttcgggtcattggggcctcatcccatataattaattttgctgcacaaagtagtttggccagtgcactctgtttgctgacacagcatgtgctttttccatcgacatcgaggggaagcttgaaacgtgagtgagctgtacgacctcccggaagaatagatgctgccacacctgatgaagcagttgcgagtgccacgacaccattagatcgtacggctgcaagtaacgccttgtataggtatgttttacctgtcccaccgggcccgtccacgaagaatgcattgcttttttttatgaaatactatccattactgcattgtacacttgttgttgctcagtattaagtctttctgacgctgtaacatcttcctctggaatttctacattcaattcatcgttaatttctctggattgaaattcgtcattatcaaagatgatgtcttcgtcaagcagttggtatgaattaatgtcttttcccatagactcaattgtcgaagatatcgaccgcaatacttgatatcttacgttttgtgtatcattttctgtttttttgatatcgagtgacatttgttcctcaaaatgttcccaaagttctctgggattgttcggattacagtagactaatattgttgcaaacaatcgcct

SEQ ID NO: 363350 - DNA, 1085 bp, Cannabis indica
tctgacacctcccggagatgcttcgttgtagccttgctctccgggagcatgtgagacttacatgccttctccgggaggcacatctaaggttaatcctgcgcttaaggagacttagctgatttattcaaacgctaaacccttcccatctacgtgtcatcctccagttggtccacgtattttgggcaaaattaggggcaacatttaccccccaagccttgtttagtaatgaagggaacaaggcttgtttagatgcttccggttgccttatcaacttccttgcacgtgctttgggcacgtgttggtgtattaatgaccattattactgcagttattcgctttttgcaggcatcgattcgtttcttgtccatttattgatacggcgcattaaatgggtgtcacacgggtactcaaacgttttctaccgccttgatgacgattcaatccaaccgttggatctatagaattcgaatcgatcgtcatcctaaccgttcgatgatggctgatcacagctgtctcacgcaggttctggcctataaaagccagccttctttcttcatttggttacttccagcatttcaccaaatttcttcaaagtttttcagagagaaaagaaatttcagacaccattgatttcttgctcttattccttcgacgctgccagtctactttttaccggcgatcaacaccaactcccagccttcaaactccatgtaagttcttcatgtctagtactcttgcttactgtttgtttacatagcacattttatgatttctgggttggatgtttgaacttctgggaatatttttgtttgagttcctgtatgttggattcctctcttttgtttttagattacttcttttcactatgtttttatcgaggaaccatcttcgtcccatgtaatgacactttagggtttagagtagacctcgtcttttcgattttacccttttttccttttctctcttcattttttttttgcattgtcactatctgtgggattcttgcacccgactcttgtcaaggaaaaccttttgaggctttcttttttggcaagtgtccgaagggggtctctttccagcggtta

SEQ ID NO: 363351 - DNA, 741 bp, Cannabis indica
tgttcatgggggtgccccccaaggattcttcctagagttggaggtgcctatgaagggtcatcacttggagacaggggccgagtattaagatccgccggtatgcttgtataatcctcagttggccaaattcgtagtctttggtatggcggcaggattgaccacatttgtggtgttcatgggaattccagtagtggctgcagcatgaacatcgcaatctacagtctgtgggtctcgagggagaccaaagatgtagatgttgcaactggtgttcttctcgtgttaaccatggcatttgatcagatacgatatccacgctctcaaggaaagcgccgaactgttaatctcaaaaactgatcaattgacagtggggtcgtatagatatgatgtttgccacgtgttacacaaatataatgaaaaagtataaaacacacagatttgttatagaggttcggcccccttgtgatagcgggtaatgacctactccccttttggttgtattaatacgtagagataatactattcagattgctataggtgcgatctgatatagctctctataaggatacaaaacataaatcagcaggtagatctctaatgagagactgatgttgccttagaggcgtgtgagagagaaaaagagatagagagccttaggggcaagtagcagagagagagaaagagaaattggggtttttgactaagagttatttagaggcttagtgacttaggttttctaggtta

SEQ ID NO: 363352 - DNA, 668 bp, Cannabis indica
tattgatgttccttcagcctttaacgtaatgcttggccgacgagccctgtatgacttaaaagctgtcacatcaatatttcactcgtgcctgaagttcccaaccaagaatggggtagggtgtcttagagggaaccagcaatctgctcgggaatgttacaacctagtagtgccaaggctaagaaggaaatatcctccagccagagcccagacaagggaaaaaacattcccaagtagtaaacttcccaatgcgaggatgaagatgtggatcctcgacttggggacccaagcagcaatgttagacctgtggaagagttagaagagatcgagatcaacccaactatcccggccagaaagctaaaaattggaaagggtttgttgctcgaagtaaaatcagaattgataaaatttctgaaagcaaacctagatatttttgcctggtcacatgcggatatggtcggaatcgacccttctattatttcccacgtcctgaatatcgatcctaacatccggccagttcagcaaaaataaagattgctagataaagaacgagcagtagccctgaaagatgaagttgaaaagctgcgcaacaacaacgtcataattgaagctttcacccggcttgggtcgcgaaccccgtactcgtgcccaagccgaataagaaatggcga

SEQ ID NO: 363353 - DNA, 599 bp, Cannabis indica
aaaaatgctatttatttttataaagggtccaaaaaaattatttttttctactatccaaattaactaaggattggccttactttacctcattgtgccttacttaagtcatcgatacttacacatcatgagagttccaatcccaaagatagcccgccacacaacaaggccttcaagagtcaaacataatccttcataattgaggagtcaggtgagagtcgaaccctacccaaacaagaaaggaagctagctttcctactactacatcacacaacaagtagtaataaggaaaactttaaagaaatactaaaagactttagtttaatattattattagtcaattttttttaaaaaaaaaatattattattagtctaactaaatattaaatcttatataatttaatataataacttttaaggaaattatcccaaatgctatttttttaatttttatttcaaatttacggtttgagtttctaaagtggttgcaacactagttgcaataggtatttctatacgcttttttgttacaatttaggttacaacgctagttgtaataggagtttctatgtaaaattctgtgaaaaaaaaaaaaaaaaaaa

SEQ ID NO: 363354 - DNA, 462 bp, Cannabis indica
ctggggcattagtagtctgaaagacatttaccaaaaactcatagtgtccatatcgtgtctgaatgctgcttggatatgcttcttccagaccttcagctggtgatacccagatcttagatctatctttcagaaaacagccgagccttgcaatcgatcaaagagatcgtcaatccttgataaaggatacttattattaattgtcaccttgttgagctcacggtattttatgcatatcctcatgcttccatcttgatgaagagtattggagcaccccaaggtgagtaacttggtcgaatgatccctttgtctaggagctcttacagctatactttgggtttccacagctcgtaaatcgccattttgtatggagccttcaaaattgaagcactcatggagctaacactctacatcactgtctgagggtatcccggtatatcttttagaaagaccttttggaattca

SEQ ID NO: 363355 - DNA, 657 bp, Cannabis indica
cagagtgccctagttgtaaaaagtaccatctgggggagtgtaaagggcaggggtgctttcagtgtggcatgctagggcattacaagagggactgtccccacctcaggaccgaaacaccaaagactgcagcgaaacccactccagccagggtgttcgcaataactcatgttgatgcagaagccagcccttctgtggtaacaggtcagctctcggttaacaactcttatttctctgtgttgtttgactctgggcccactcattcttatgtggcgaccaaaatttttagtaaattggatggaccgcatgatagttatgaaacagggctcggaaccctactgcctagcaaagagttagttatctccaaaaggtagattaggtatatgccgataagaatagaagatagagagttgagtgctgatttgagagagatgagtttagtggatttggatattatactgggaatggatttcttgtccaaggactcaactagtattgactgtaaaaggaagatggtaatcttccaaccagaaggtgaagaaccatttgtttttgtcggttcggttcagggatctcggatctcggtaatttctgtactaatagctaaagaactattacgtgatggatgtctaggtttttggccgtggtattagataccac

SEQ ID NO: 363356 - DNA, 681 bp, Cannabis indica
gtaattacaaaactacataaaacgtcgtaaactaaataaaagtatttttaattcataaacagtaatattatgtacactgcagactaagaaaaactacaaatcgatagcagcatcgtcgtcatcaccaggatgggtagtctgtgaggaagacctagcaacatggctaggagactgaaatggtagaatcgaaggcatctcgggcctgttaaatcctggaacagtgttgtccaattggatcatttgttgttcgaacacactcatgatttgattcttagtcatcatcatttgttgttgccactcatttcgtgattcctgctcttccacccttcacttcagtgcctgatattcctcttgagtgacagtgggttgtccgaagggatttgccttgggagttgctctttttgcccctgtcttaagtctcggcaactggcctagtcctctgttggattattgttttaccaggatctagatttactaccatgtatgttatttaacatcctaaatatgaatttctaaaacaatgtataaagtttaagaaatcttacattggttgcagcgaaattaaatgactccttccgcttagatctctaacccttgtatcctttctgtagcaaagtatcaccaagatctgagcccgattctccttcacttgaattggattcttcacagtcttacacacta

SEQ ID NO: 363357 - DNA, 855 bp, Cannabis indica
ggagattttgtagttcagtggcatctccgatggtcgtctgggcgttggttcctagcggaacagttgtattatggatgccctggttgggtgcagaactgttattcccaatctcttgcacaccaggcacaattctagtaattggaactatttcaccattccccacgcttctcgtctgtccgggattaacagcaggcggaacccttgaacttcctgggttctgtgatgtaggatccagcgtgtgtgaatttgctaggttagattgacctctacgagtttgcaccatcgtgttggcggttggatgtcgaataaagagcgatttgtgatccttctctcaaagaaagcaccaaaatattgacttcgcttttagccaatgacaatgagtctattttataagcgataaacgatatgcagtaacagatatgtgataaagcaataataagacacaggaattttatagaggtcctgttgaaattattttaccaggatcttagatctactcacaagtatgttgattaacatcctaaatatgaacttctaaaacgattataagtaaacacatataaaatatgagaaaccttacattgggtgcagcgaaataataagtctccttccactcagatctctaacccttgtatcctttatgtagcagagtattatcaagatctgagcccgaatgtccttctttgttgaatctggattcttcacgatcaaccaaagaagaaggaggaaagagaggtggcagctaggtttagaaatatggctcaggtttttctctgaaaggaataagatgcatgtcattatttcctaagccatcactatctatttatagtaagccacatagggttaggtttgaat

SEQ ID NO: 363358 - DNA, 650 bp, Cannabis indica
tattgacctaagggtggtgccgccctaaatgagaagtaggaagtatattttctcaaaaggtcaattaatggaatgtgcacatggccattaacgatgcaaagcgagacatgaggtcttgggtgaaccttgcaaaagtgtgtgtgccatcaccgttttattgtaaagaaaagttggttcaatgttttgtcaaccaaattttcaataaaatttgtgatgattacactatagtaaagttcaagttgaaagacactttactttatgcacttgagcaaagtctctatggatggtgttgatttagtcaatcaaagtgggggatatatgagatattttgattgattaaataaagtgttacaatgagatgtcacaaattttaatctagtgggggaatgttatatatttgttatttaacaaatctataatgaagattaaaatgtggcatattatattaatatgagattaatatatattatgtgttggaggttatattatatcattatagtataataatacacataaattgtaacaagtgaggagttacaaatctgaaatagattgtaacctaaggatcaaaaattgataaatatgtaattatgtgagctgttacatatgggagttatggaattaatgggataagtttctagctgttagaa

SEQ ID NO: 363359 - DNA, 1262 bp, Cannabis indica
ctttccaagagccaacttgaaataccattgctgtgcggcttccgacagagtggcagggaagattctgcagcatacgtcccctcgtatccttgtaaatccatttgcatctcaaagtacttgagatgggaaagaggatcttctctcccagtatacatcttccacgttggcattttgaacttgtgaggcagtggcaggagattgatctctggtgagaaaggagttccgcgagcacggtctaactcaagatcattgttacgctgtccggccatgccatgaaacatattcttcaactcgttaagctgggcctgtacagctgggctgacttgctcggcattttggtcgatttggattacgtcaacgtcattctgagcggggatttgagtatgggctccgtcctgcacgatcgttgtagtattccgctcctctattccccttcttctgcttagatcgttccttaggtcatgggttgttcccaacctatcgaacacagaagagcctggctgccttagcgattgattcgcttggttgacaggtggaataacaccattattctggttggatccgtcaggtatggctcctcctgatgaattcccaaacaaggtctgcctgcctacctcttggaccacgagtggaactcgtaaccaaggattggacggctgaccattggttgtctgggaggtattcatcttcaggtcatcctccgtttctcccaggggaatgacgttcggcgttttctaacctacagtctggtaggctcttcgtattagcacggtagcttgccgactacgatcttcgatctctgcatggtgagcccttaatgcctaaatctctttgtctctccattcagcgaacatacgcctctgttcgtcaaacgcgagacttactgcggcacgcagttcatcctgatcatgatgcagagtgttgctatgactccgcatgagtctgaacacagcatggagatttggcaattcggttgcgtctccaatggtcgtctgggcattggttcctggcagaacagtcgtgttatgaatgctctggttgtgtgcagaactgttattcctagtctcttgcacaccaggcgcagttttagtaacaggagctgtttcaccattcacaacgcttcctgtctgtctaggatttacagcaggtggaacccttgaactccatgggtcctgcgtctgtaaatttgctgggtcagacaggcctctacgagtttgctgttgggttttgtgccctaaatataactcatttcaatataatca

SEQ ID NO: 363360 - DNA, 557 bp, Cannabis indica
agttggtttggttgttttattactgtttggaggtttggtagcgtggatgcacaagtttgagttggaaaactcaagcttggttcatccttggcatattttgagtttgtgtgtttttatgggttcttttgattagaaatgattgtgtaagctcattataggtgttctggaaagtttggtggcaattagaaatgctttgaataggttgtgaaatgtttagggaaatctggtgcaaaccagttaactggtttgtcaggacctacaaacttggttaatcggttttggcagattctccgaacaacacatttcctcgatttgtttccgttttagtcccttggttgggttatttcctctttcctagggtattgtggttccatttagtattagcaaaaccttaagttgtaggttccggttttcaggtgtgacttacccagttttaatatgtgattagggcatctatctagcatgagactttctgttcaggtcggccaactcacttgaattcggaaaagaggtaagagcagcgtataatatgtgatatatatgcgaatgtatgtatg

SEQ ID NO: 363361 - DNA, 689 bp, Cannabis indica
catgaaaacttttgtattcagtgcctcgctacacgatggtagaagggaaattgaatcgaaggggctactcaatgcctcttttacggtgtgtccttcctgcagaagccaacgagatcatcaaggaaatccacgagggcttttgtggagatcatgcaggttggcaaagctagttgaagaagataacttgacaaggatattactggccaaccataaacaaagacacatacgaatttgtcaagaaatgtgataagtgtcaaagattttcacaaatacctcgcataccaccaactgaactgaggccattgagaggattcgagctcatatgcttgcctcatagagtagatagaagagctacgctgatatgaagcgtagagatattgaattctaggttggggattttgttttctttccggtgtgtccaatgaagggaattcagaggtttggaaagaagggaaagttgagtcccaaatttattggcccatttgaaattttagaaagggttggacaggtagcctatcagctagccctaccccatgctttatatggagtctgtaatatgttccacatctcgatgctttgaaagtacgtgtctaatacgactcatatcctataaagataccgagctccaaatgatctgtaatcgaagacaaccagtccagatcctggataggaaacgaggaaaacgttgt

SEQ ID NO: 363362 - DNA, 614 bp, Cannabis indica
ataaccgatcgaattccagagtatactcggccacagacatttttctttgagccaacttcacaaaatcttcctgatgtgaagtccttacagcaacaatatagaacttttcttcaaacagattcttgaattcttcccaggtcatcacactgatgtctcgggtctgacctactatgtcccaccagacgtgggcatggtcttgtaacatgaaggccgcacaattaactctctcagttcccatcacccccatattgtcgaggatacaggtaacagtgctcatccactgctcagcctttataatgtcaatacctcccaaaaaaagtcggaggttgcagcttcacaaatcgctcgaacacggaatctcggtgcggcataataaatccctggttaaccaccactggcacaggtgctggtggtaacccttgatcaactggggcagccggttgccttaaacgttgcaactcttcttcttaaccaagtatgatacttcgcaattcttggaacatctgctgccagtcagtaggaggattagcattaccaacccccgcattatcccttggattctgcggaggtgcaggcagtgccggtggatcagttcgggcagccccgggctctac

SEQ ID NO: 363363 - DNA, 689 bp, Cannabis indica
ttggaattaagaaataaaatagaacgggaagaaaaaaacttttatttattttttgtttttatttattagaatgttattcttattctagttatgtttttattcttagtatttattacctgagtttgagttggatagagtacaattgaagggaatagactaaaaaacaagtacatataaatatatataggctaattagtaatttttcctcccgatctttgacatgtactaaatcataccccttaaacttttttggtcgttaaaaattctccctaagttattaaaatggttagatttaaggaattttgtctaattttagtaaaaaatttctaacatggatgaaaatttagggggcatgatttagtacatatcaaagtttgagggacatgattttgtagatatcaaagtctggggagcatggtttagtacataaacaatcactgaaacagtataattgaatgaaattagacaaaagtccttaaatctaacaatttcaatagttcatgagaattattaacggcaaaaaaagttaggaacatgatttggtatttgtcaaagttccgagggaaaaattactaattaaccatatatatatatatatagatagtcgtcaatatatttttgtggacgtggctgcttgaatggtcagttgcattatagtgtagtttgagaggtacggctgttcttgttct

SEQ ID NO: 363364 - DNA, 856 bp, Cannabis indica
cgagatggctaaatagagaaatagcgtttctccagtgatgggttttgccaaaattggaggcgtcgctagatgcctttttatgttctgaaaggccttttcgcactcttttgtccactcaaactttttgttacctcacaatatattgaagattgttacacacttatcagttgacttcgaaatgaatctgttaagtgcagccattctacctgtcatggcttatacttccttaggctttgtcggtgatggcatgtctatttaatgccttaattttttcgggattttcttcaatacccctcatattaactatgagtcccaaaaaaatttctgaggaaactccaaaggaacattttttcgggtttagcttcatgttatacttcattaatatcttaaagcattccggcaggtctaaggtatgatccctactctttattgattttaccaatatatcaccgacgtaaacctccatgttccaccctagttggtttgcgaacatttcgtttaccaatcactgatacgttgccccaacgttcttaagtccgaacggcatgactttataacaatagagtcccatgttggtgacgaagcttgtatgttcttgatccaggacatacatttttatctggttatatcaagaatatgtgtccataaatgacataagctcgtgcccagcagttgcatccactaaccggtcgatcatgggaagtggaaaacaatcttttgggcacgccttattaagatcagagaaatcaatacaagttctccaagttccattaggcttcgggacgagaataggattggctatccacgagggataaaacaccctgcgtataaagtcgttgactaacaacttgtcaac

SEQ ID NO: 363365 - DNA, 543 bp, Cannabis indica
ttgctgcctttgcacccgtactttaggaatgtggcagacttcttccgcctctgtctgacccaatttactcccaagggcattaagtatctgtgcgccctcttcgttctctatgcctcctagaggtgggatatgtcctctccccatgaggtaagctggttttttgattttaagtccatccctaaacaaggtaggtcggggtaattctatttctctcaaccagacttcaagtggttgacgggcactggggacaaggccgttagtaaaaatgggcattttgtcgacgagtacttcatggtggaaggcatgggcaccacccatactcgatttcagcagatcctcacatatcaccgctctctcttcactctttctcttagagatagagctcaaaggcttgctcaactatcgagggatgactggaatatcattcagttgacctccgaggacaactttgtgaagtacgggctctatctgaaggattttattcctaagcctgtgaaggagaagaaggggaaatctggtgctggtcgggctgagggagctcat

SEQ ID NO: 363366 - DNA, 769 bp, Cannabis indica
gatgcgatctttaagagagttgaaagaagaactcttggatctaccaaaacactgaggcaaaccaaggtatttgtcaagttggtttgtcatagggatctgcatatagtcttgaataagggtttgatatgtgagacttgtgtttggggagaaaaacagagaagatttttggaaatttacttgctggccagagatgttttggtactgatcaagggcatctttaatggcattgcacgcttgaatgtttgacctacagaataaaatgctgtcatccgcaaataggagatgagagatctttggggctgaacgtgcaattttgataccaaaagcctcttcctgactctcagcacgcttaaggatggatgagaggccctcagcacacatgagaaagagatatgaggagaggggatcaccttgcctgatcccccgagaaggggtaacaagccccaaagcttggccattaatgttgaatttgaaagtggctgtggtgatgcaagccatgatcagcttgataaaccgagtgggaaactgaaatttttccataattttatgtagaaatttccactccactcgatcaaaagccttggccatgtcaagcttgacagccatccagcttactctaccttgctttttatttttgatggaatgcaagatttcctgagccataagaaatgttatcagagatgaggcgggccttttgaggaaaagcgcttttgatttaggggtaaaatcaaaggactgaggacaagcttaagcctattagcaggaattt

SEQ ID NO: 363367 - DNA, 796 bp, Cannabis indica
atgtatattatatgttatttttaaaaaattaatctataaaatttagtaactagtaacttgttacattttttaatataactagtaagtaattaaacaattaaaattctaattttgctgtattgcattatatggtaggttatgagctcattaatgaggttcgacatattttggtattgatcgaattttaacttgctatatgtatatacattcactaactttttatttttataattaattatcaatgtatacttagtggagtttgaatgtcttaaatattcatctgtactgaagtaggttctgcgaatacatgtactgcggtcggatgggtggataaattttatattgtttatgttattttgtttgttctaaattgttatattcattttgtttgttactttaggcatttataaattttttgggaacgtccagttacagctgttatgctgccaaaatttcagtagaattaaaataaatttactaaaaaaatatataaatattaaagaaaaagtacataacacaaataactagtcaattactcgccagttgtaagaaattaggtgacataacacatttatataaacttttctgttataaatgacaaaccaaacaaatgaatgggttcactttaggaaaagtcattctaattctaccaacattccaatcagctaaacactaccctagttagttaattactacttttacaacttatacaacttaataacatgaaccaaactaaaacaagaatttagtaatatataaattaaaaaagaatcaattgtgagaaacatagttagtt

SEQ ID NO: 363368 - DNA, 754 bp, Cannabis indica
tggctgggatagggactgtgaggggaaatcaaggagaggctaggcagtgctataacgttcctgcccacctacccgtgttgatggtccgcgaaattattgagccagaaatggctggagaagatgagttagatccccgtgtgggatccgaaaaaattgtagaaccaatggaggacgtcgaggaactgtcgatgtgcgacctcgactccaccaaagtactccggctaggaaagagcctagaaccggaggaaaaagaaagaatgataaagatgttgaggggtgccgttgacgttttcgcatggtgccaagaagacatggctggcataagtccccacgtcatcacccatatcctcaatgtcaacccggacatgccgccggtatagcagaaacaacgtcccctagactaaataaaggtcgaggccttagaaaaagaggtggacaaagtattaacgagtggcatgattcaagatgtctactatccggaatggctagccaattcggtccttgtgccaaagcctaacgggacttggcgagtttgtatagacttcacagatctaaacaaagctagcccaaaggattgtttccctctgcccaggatcgaccagatggtagacgccacctccggattcaaactactgtccttcatggacgcatacgccagttacaaccaaatcaaaatgcacgtggcggatcaagagtgcactagcttcaggaccgataatggggtatactgttacctagtcatgcctttcggact

SEQ ID NO: 363369 - DNA, 574 bp, Cannabis indica
tgtgtttatttgtattgttttagatattcatatttaggatgttacataacatacatgctagtatatctagatccttgtaaaatatattccaccaactagtctcagagccatggtaatgatttactttcatgaaatatgaattaaaacgatgttttgtgttgatttggattgtttcatgatgttttatgtgcttatttgatgatagtttggaaatcgctgtatatgttgtaattttttttttcgatttgaaaatatttttaatagaaagtacacgaaaaattaataaatttaggcttttacagaacctaatttggattttttatgaattagttatgatattttgaatttagatgaaaatatttgagcatgttgcgcactcacgcgcacgcgcctagggacagtcgtcatttcccacacgtcttcggacaacctgaccgaggaaactcagacacgggctgtctgaagccatgtcccgccgagctccctcggtcaagtaggcagcatgcagccttgtcacttggccattccctcaattccgcgcgcggaggggtatgcattgcatacccttgtgcac

SEQ ID NO: 363370 - DNA, 720 bp, Cannabis indica
ttttccattatctgagatcaacttgtaaggtatgccaaatctgcagatgatggaattgtacacaaattctcacaatttaacagttgtaatagtcgcaagggcttttgcctcagcccagttggtgaaataatcgactgcgactacggcgtacttgactccgcccttccctttaggtaattctccaattaatctatgccccagattgcaaaaggccagggactcgttatggagttcaattaatatggtgcttggttggcatatgtggctatccgttgacatttgtcgcacattttagcaaagtttgaggcgtctactcgcagtgtcgaccaataatacccttgtcgcattatttttaaagcaaggaaattacccccggcgtggttgccacagatgccaccatgcacttcgcagagtatgtagtcgcactcagccctatcgatacatttgagcaacggttggctgaaacatctgcgataaagcctgccatcataaatgacatatcgagcagctcaataccgcagttttctagcccctattttatcttcagggaggatttctttttccaagaaatccattattggagtcatccatgtgacttctctgactgtatctacctcaattacttcattctgactgatcgttggatgagttaggacatcaataggaattacatcgagtaactcgacttcccctattgaggccaaacgggccaaagcgtct

SEQ ID NO: 363371 - DNA, 765 bp, Cannabis indica
gtcacaaaaaattgtaatttttgtgactgttagaatttgagataaggtgaatgaggttccatcaaaatcaattggcaacgggaggagtagtccattccttttatatattctattatattttcacacattagcaatgtgacactctttaacatcccccctcaagatggtggctattttatatgctcaccatcttagacaactcgatcataagcggctcttttttggctcactatccctgatcacaagtgactctttactctacttttggatcggtatttttgaattttggtggctctcttttttttcgctcactattcccgaatcacaagtggcatttttttttgactttttggctcttggatcagtttttattttttttttattttggtggctctactttgatcggttttttatgggtcggttagtcgctagagatttttttttgttgtattttttttgctctgacaccatgtaagaatttgagataaggtgaatggggttccatctcaaaaccaattggcaatgagaggagtagtccattcctcttatatattttattatctttccacacattagcaatgcgggattctctgactaatacctttagccacagactttttagtcaaaacataggaataatattttattattagtcacaattttttcacttttaatcacaagttttgttgtgactaaaagtaagattttttgtagtgatcactaactaactctagcaccctcctcaagttcatgagcaagcactct

SEQ ID NO: 363372 - DNA, 583 bp, Cannabis indica
gtactgaaataattctctctctctctctctctctctctctctctctctctctctatgatctgattgttttatctgattgttttttctttcttctacgatcaaccttgctaaacaaattctcacaccatcttttcatgagctcaatgatatttagagctggttttactggatgttcttagtataataaggttaaatattttagtttgtttaatatctatttctgtttttatttgttcgtatgaaattcttattttatagtgcttcatagtgtctgataaaattcctcattgaacattgtaataatttggtaatttttaaatggctggttgattttgtgcttttatgatttatgtcaaagcacaatagtaatagggtgaagtagagaatagcaaataaaatggctaatggcatattgtatgtgggtgtcatgtcttgagttcgttattgatgtgttcttatttcttgtgtattgttctattgccatttgtctcttggtttggttttctaatttaggagaggatcaggtgacattaatttcatgattttatttttgtatatatgataatgatgattttacaatgtt

SEQ ID NO: 363373 - DNA, 545 bp, Cannabis indica
aaaaaagaagaacacaaagagaaattattcaagatcaaataaaacactcaagattattcaatctgtttttctcacttttgttccttatctcttgactggttttcataccagtattgctgcaacattgatacagcattgttgctgttagttccgttgtttctggtattggttcttattgttcaatctcgattgcaaggtgatcatcgatcacaacagtacgcatttaatcttgattcatactgctctcaaactattcaattttttttaattaaattacatgtatatgtttatccaattgagatatcttcttttaaaattgaaacgaaataaggacccttctgtctggttggttctcctattcattgttttaggggtgagtggttgctttaccaatcacgctttctctgaaactattgtagttaatggagcatgatcgggacctttttggtttcaagcaaataaatttaaattaaatttctcgttattatgttcataaaagctagacaatatatatagttggttttcacccattattattaatggtg

SEQ ID NO: 363374 - DNA, 1338 bp, Cannabis indica
gagagagccggtgtacaaggagccttttgagaagcaacaagagcaaatagataaacgcctctctaagcaaacttctcgaccatcattaggtagcatatcgcatgtataaactagtgtgttagaatctcattcttattggcactaatcattattttttgttgttgttgtcgcagaaatgactttcttgaagtccgcacccatccttaaccgcaagccaaaatctggaacaacggcaacttcccttatcgttcctcaaaagaggaagagcgatgtggtggttacccctgtcgcggattcttcgaagaggccaactaagggcacacatgacaaagggaagaaagtcgtgattgacccagctatccgagcccgcaacatactgactctccaagagaagttcatgggcgatgaattccagtcaaagatcgacaagactcctgctgaggagctatttcctcgctctacggagttagctttcgcagttcattgccatgttctcaaaggcctttgttactggatccaaggaggtcaaactcgtgaagagacagaaagttcagcttcaggaggacattaagaagctgaaacaagatgcgacttccaaggataaagagctcgaggaacttcgcaaggccaaggagcaagtcgagctcgaggctaagagtgctcagacaaaaatcgaggagatgtctcgcgatttggagatcgagaaggagaatgggaagaagcagtatgaccaggcggtctcggactacatatacaccactctctccaagattccagacttcgatttttcaatccttggagcagaagccgcagaaatggctgaggctttttgcgccatgtcgcccacgcagacccaaggcggtggagggaatctgtttcccgaggaggctgaggctgcggatgtagaggaagtcgagaacgaagccgtcagcaaagtcgcgaatggatctgcccctactgctcccaatgcttgacttttcctttaatatttgcttgcgttaaactctatcattctcttcttttttttatatatatgtttatgcggtacaagggtactcgcgccttgtacttagacaaatttatattttcttttgaacgactttatatcctctcagggatacctatttacaatattttcacagttgcgttttttgtcatttattatattttgatcgcgactttaattacaacttggtgtattaaagtagaaaatttcagaaacttgataaatttcaactttgaaaaaacttccatagttttcataaataatcaatagtacataatggtatataccccctatacttagtttttttattaaaaatgactaagtataaatac

SEQ ID NO: 363375 - DNA, 730 bp, Cannabis indica
agtgattttaatcactttgtcaaaaaaaaaaaaaaaaatattatatattactctcatgtattaaataactcttaaattttatgctaattaatatattatatatgtcactacagaaaacagctatttttagtgataattttttagtcacaacataaatttttttgtgacaaaatgtgacttttggtcacagcaaaaaactacttgtgactaaaacatagtattcagacacaaattgtcactaatttacttttagttacaacaagtattgtgactaaaaccacattttgtcaccacaaattgtaatttttgtgactaatacatttaactacggacttttgagtcacaacataggaatgataattaataattattcacaacttttttacttttagtcacaaattttgttgtaacgaaaagtaagattttttgtagtatgttactatcatttcacatataacatacatataatatatatgtatatatatattaattaattacataactatacatacctctcacttataatatatatacactttaatatacatatataatatatattatatatacatgtcatctaaacacataaaaataattatttttacatatttaattatttactaatatatattatatatacatgtctgttgggttttatgccctaaataaaactcatttcaatataatcagatttacatattaatatagatcagaaataacatttaatgtt

SEQ ID NO: 363376 - DNA, 799 bp, Cannabis indica
tattgatgtgacaacatcgattaatatttcagccaacatacatttaccaataatcagtacaattctaagtatacacttactgctatcaatgtattctaacaagcatagatagcatgtatgataaacatgtaataacataagcatgatattatactaatctttccttaattctgaattcaggtgtgtcgaccaacctgagtggaacaactgcttgacgaattataggccctttaatcacatcgatcacaacatggataagtgacaaactaaaatacaacagggaacttaggttttaaaccaaaaaaacctatctattgtaacctaacatggaaataccctaaactagtagggaattgaccaaccaaatctctaatactaacacaaatcgaaaccacgaatttttcggggaacccaacaacaaatacgggtaactagttttacaggtcttgtaaaatcggttagccagtttacaccagaaaacccaagaaattctaaaaactaaccaaatcgattccaatccttaccaaaccttccacacctgcatattataccacaatagacatattccaagcaataaatcaactacagaaactcaaaatcaattttcaccattaaagagtcaagcttaagttctaaaactcaaagcttgctcaaatctaataacagcccacaaaacaagcttaattaacatatcaacatattttaacttcagaaacacaaatcaaacacccagaacaacaaaaacagtagaaaaaaccacaaaacatgcaaaatccataacttgaaactcaagaaaact

SEQ ID NO: 363377 - DNA, 695 bp, Cannabis indica
cttatccgaatctaatgtcgtttcgactgtccatctagttttttcacaaatacaatgatatatgaagttacagaaatcaaattcacaactttgcatttctcatttctagcactcccagaaatgaagagttttgagtctcccatttttgcaaaatagcaacatctccgagaactagttaccagcttcgccggaacatataaatggactaagtggtgtcaaactatcacttaagcatcttaaaggacatccattggacattttttacacttacccaacatccaacttaatgttagatgtcaacttgggcgttgggatgtcaacctgggcgttgggatgtcaacctgggcgttggatgtcaatctgggcgttgagatctgaactaggttcagtaaaactaccataactcactcaatttttatccaactgatttgattcaacttgagttttgaatctatataaattatctatcaagtcatgtctcacaccctagacgtaattctaaagctatcaccgtcaaaattcacctccaagagagttatgaaaataaactctgggtaacccgcagtaggacccgccaggcaccaaaaagggccttcaccaccagaagctaattttcactattagatcatcatcaacagtggaaaacaagctatttgtattttgctcctatttttgtgggcctccttcacctataa

SEQ ID NO: 363378 - DNA, 495 bp, Cannabis indica
tttcattattcgcatttaattaatcatttaattaaataattaaactggaaatattaaaatacggaatttcactcctcttcaaccccacaaatcgagcaaagagtgaaattcagttgaatgttcaaatgagccaagtggtcctgagtgagtaacttaacatttgccacctgccacattataaatttttgcttggcaacgctcaccctattccacacaaagtgctagtattttaccttctcaagttgtattaagcttctatacaacataccaacactaaatttgccctgatgacgcacactttctatatcttcttgtgagaaggtgtctctaatgcaacacaacttataataccagctatcatctttaagttgatacctctagaagtcttgtcccttcaaataagtattgttgatccacttgacctaaagagagttttattttttagggtaaataccattttggaccttgtgttttgcaaaagttatagattggacc

SEQ ID NO: 363379 - DNA, 624 bp, Cannabis indica
gttgggtgattattttaggttgaacattatttatttgaattagactctcacggttttgtttttgggacctttctcgtactaaaagagtaggtggaacatttatatccaagacaattcttgcctattattccaatatggaacttaggttgatacctcaacaatccttccctcaaactaaagatcacatactcgtagcctcctacaaaactcactgcctgaccatcacatttgttgggaagactttcgacacaggtcctaacaccaatctctatcttgtactactgtaatcatcaacaagacacgccgcctgaccaccacaatatcagatagactttcaatacaaggcactatatagattttcaatcagaggtcatcacattgagggcttctcccacacatcactaatacaactcactatcttagtgctcttgaacctttggcttgataccacttgttaggtccctcaccttgactctcacattagtatgatattatccgctttgggactagattctcacgattttattttttggatatcttcccaaaataacctcataccattagggtaagtgaaacacttatctaatacaactcttgcctatccttcttccaacgtgcgacttg

SEQ ID NO: 363380 - DNA, 632 bp, Cannabis indica
tacattttttatgtgtctaaattctaaataagagtaaaaattatttcaggtaactgaactgaagtgtggtgggatagtggtagcatgcacattcgaccaccgcatagttgatgcatattcggctaacatgttcttcatttcatgggttcaaatggctcaatccaaacgattatctcttcgaccctctttccgccgatctctcctcaacccccgtcgccaccaaattacccccacaacgactcctccattgacgacatgtacgttcctgtaactgctctccctccgccatccccatccaccgctttcgtcgccgaccacctcatcagcaggatcatcggacctccacgaatcggaccatcggacccatgcaacttgaccatcggacccaacccgtcggaccaatcggatctatcggatccatgcatcgggaccatcggacccaacccgtcggaccatcggaccccatgcaacgtgaccattggacccaacccgtcggaccccatcggaccctcttcttccccaataatttctcagatccgatcttcttcatcatcatatttgatctgcaaaagtatatatatatatatgaataattatatatatataacgtacaaaagtatatctatatatat

SEQ ID NO: 363381 - DNA, 648 bp, Cannabis indica
aaactagaaactaaaagtttccctatcgataaaaagcatggcaataccccaaataacatagaaacgagaaaaactagggttcctaaaaatttcccaaccgacagaccggttgcacaaccggaattctggttctgggaattcctgaaccccatccggaattccggttgcacatccagaatttcgattcctcgcaggaatctttcaaaaattcacaactctttcaaatcaaacccaatttaaaccaaaccttccagacctgttctaaataccccaaagaacaattctaaagcgtcaacacagcccagaaaacacagaatcaaaaatcaccattaaagctccaagctttgagttcaaaactcaaacttggttaaatctaactaatatgcatcaaacttgccttaatccatcataaacaaccaaaatatagctccagaaaacaaaattaagcaccattaagaatcacagcaactattgcacattttcactttgaaaaacatagcttttgaaccaaaactctaaactaatttaaaaccaaccaaacatgcatcaaaacagtttcaaaccactcaatccaacatgcttaaacctctaaaaacaatcttaaaaacacagcaacaacaatccactcaaaactaagcatgcaaccta

SEQ ID NO: 363382 - DNA, 869 bp, Cannabis indica
atgaggtttggcagccttaccctgaatgcccaaaatgcaagagacatcacttgggtgaatgccggtctagagtttgctaccaatgtggagtagcaggtcatttcaagaacaactgtccacagctacaaaagcccgaggctaagaaagaaagtcctgtggttcctgctagggtgtttgctttgacccaagcagatgctgaagctggcccttcgactgttacaggtgagatatctattggtggtattatgtttactattttgattgattctggtgccacacattcatatatttctagtagaatcattgagaaattgagtaggccatgtgatatcatgtctagtggatttggtaccttgttacctactggagaagtggtaatctccaggaggtgggtaaggtctctcccagtgttagtagaagggagagaattgtcagtggatctgattgaattagacttagaagattttgatgcaatcctgggaatggattggttgactaagtacaatgctactatagattgtaagagaaaaatggtgacttttgaaccagagggtgagattccatttgtttttatgggaaaggtgcagggatctcggattcctttgatatcggcacttaggaccagggaattattacgagaaggatgtatgggatacctggctagtgtgttggataccacaaaagatacacctgaggggtcggaaaaggttcgagtagtatgtgaatttccagatgtattcccggaagagttaccgggattaccaccaaagagagagattgacttcgaaattgaattagtaactggggctgagccagtttctaaggctccatatagaatggcaccgacagaattgaaagaattgaaagtc

SEQ ID NO: 363383 - DNA, 672 bp, Cannabis indica
ggttcccaaaattgccccaaccgcggaagcccagtttccaatcagaattctggttctgaggggtttcctgggaccaaccgaaattccggttcgtactggcccatctgaaccggaattccggttcagtgctgaaatgactaaaaattccataacttcaccaattcaaccccaaactcaaagaaaccttccaaacctgctatttaccccagatacaacatatctaaagcaacaaaacaaccccccatgctcagaaacaaaaaccaccattaaagctccaagtttgagttcaaaactcaaaacttggttaaatctaaccaacaaccactaaaacctgcttgaatccatatatctaaacataattaagcttcagaaaacaaaactaaacactaacagcagccacagcaacaaaaaccacaaagcatgcataaatttctttccttacacttcaagaaaacaaagaggaggttgcaagaactataccttggcttggattcacttgaaactagctaaaaatcccctagagctgctgaagaaaacccaaccctagctggttctatgggtttcgaaaatgagagagagaattaagagaaaatgagattttcctttactttgatttttcttgaaaatgagataataccctttttttttaattcaactaatatcagccttaaa

SEQ ID NO: 363384 - DNA, 870 bp, Cannabis indica
taacaacctagagggcattctataaatagaaagtaatggcttcaggaaacaacacacaattgcatctcattcttttcagagtgaattcctgagccaccactttcctctctcttttcttctcttcaaaatttcgaaattcccttgagtgatagagtagtgcccacacacatcaagtggtacctcaatcatagtatgtaagactgtggaaaatcagcatcaaagaaggagagaaagagatccagattcagatcttgataatgctctgctacagaaaggaatcaagggctagagatctgaatggaaggagtcattatattccgctgcacccaatgtaaggttttctaaactttatatgtgtttattttcattgttttagaattcatattaggatgttaatcaaacatacttggtagtaaatctagatcctggtaaaataaatttccaacaaatataggataaaattacccttaaaaatttagacaataaagttataactttttaaaacaatacactagaaaagctagaacattagcttgtaacactaaaaaaaatatagaaacatatgagataagatggaaaaaaaaacataactaagacaattacaactctatacaaaaagttataaggactaaaaaagattaaataaagtgttacaatccaaaacacaaaaataaaataaagagaagaaaagagatgagtactagagttacaattcaaaacatgaacatacaaataaatgtaaagtaatatgacaacatggaagaggtttcaatggttacatttttattgtaaccatcatggttacattttttttaagccattggattactattaaatggttgagattaatttgaaaattaaataaaaata

SEQ ID NO: 363385 - DNA, 701 bp, Cannabis indica
agaaatattgaaagtgattttttttgtttttaaaattttgattctcaattaaaaaattgaaaagcaaaaatagttttatagaacatgtttttaaaaaatattttcacttttctaattttaaaaacaaaaaactgattaaaaaagtgttattaaacgccacctaaatgtataaagagtaatttatgacgcaaatgcttaagtctaactcgcagttgtacattaatacctaagtttaatttttaacggtaataatacttaagttatatttctaaaatttttataagtatctgaccataaagtgtcaagtccacgtgacagtctttggttggtccacgtcattaaattttaatttttatttaaaaattaatttaaatatatcaataaaaaaataacatatgtataatgacttgactctgtgcctacacaaattctagaaatataatttaggtactattaccgtaaattattaaacttaaatatttatctacaaccgaaaattaaacttaaatattaagaattttaccatcaataatacttaaggtttatttggtatgtcgtattataccatattgtattgtatagtattatattaaattgtattttatgtaatatttttatgtaaaactatatgtggtgttaacttttatgagcacttcaatatataattttttaatataaattaaagtttaacatagtattat

SEQ ID NO: 363386 - DNA, 558 bp, Cannabis indica
tcaacaatattgctcaatacaatatcccaatcccagctccctctctctcagatatctctctcaatttcttattctaagaactctctctactatgttgtgtctctcttattcttgcccttatccttatttctattcccttatgaaatgagatgagtagttctctttatataggccaaaggacccaatatgcaagttgtcatatttgacaattaaattagttaaaggataactaactaaccgaatgttggttgggggtttaaggaagaataccacacactacttagcatgtcgaaataagatacgataattaccgttgttaagaaagagttattactctctttggaaattgttgttaagtttcttacttatcggttgtttaattaaacaacggtagtgacataagaaacttgttgttaacgagagttaaagatgctttataaagtatcaaattctgttagtcttataaggcaattaatggaatattatcatttgataacgctttgaataattgctttatgtgatgatgtatgatgtgcattttggaaattattttaccag

SEQ ID NO: 363387 - DNA, 610 bp, Cannabis indica
atatatttttcagtataactaatttaaattttgtcatgaacagataaaaaaaataatcaattttgtcataaagcttctagatcgagttattattaaattttattttgacaaaaaactattttaaggtactatatttattaggtactatttgaaaaataaaaggtctaatttattattgaacaaaataaatgtagttcaatttacaatttttataaatacaagatttaaattaatatttatccaaaaatcaaatcaaactatagattctaaataataatattatagcaagagcacgtgcattcacgtgctaataattcccactagtatatatatataataaacactactacaaaatttactattcacgtctgtttttaagtgacacttaaagaatttacgtcagttttctaaaccgacgtatataccgtagtcgcaaatagtttttattagcgtcattttcaaaacgacgcaaaaaacaattttcgacatttataaaccgacgctaaataattacttttctattttattttaagcgtcggttaaaaaatgacgctaaatgtttcatggcattttaaaactgtcacaaaaaacttattccgtcggtttaaaa

SEQ ID NO: 363388 - DNA, 503 bp, Cannabis indica
ttttggaaggctaaccctcaggaaaactttgattacttgggtgaagccaaaggcatgtatctcgagttttgcgcttcccaagtggcttatgatgagcctgatgtgactgcttcttccttcggccaaaatgctgatgtacctcatgttcaaacaacagatcctccagctcctaccggcgcagaagatccgaaccgaaagcctgggactccagctgtttaagtacttcttattttatccttccttttttttatatatcttattccgcctaaggcctttttttaagacatcatgaccagccaagcggtctttaaacttggaagtatatttcattttacagacaacaggctgactgggcagcttgtaatcctggtattacgtgattttgttatctttaatggatttcattctctgtttataatcatcgtgcaattgtggttgttttatctttatcgaatgctttgtacaggtataggtgcccctcaagtgaccgagcagacttatga

SEQ ID NO: 363389 - DNA, 538 bp, Cannabis indica
tttttaattttaggtaaaattaccattttaggattttttgtgaggttaatgacctctttgaaatttggtgaggtaaataacctctttaatattccaagattaattttagtgagctcatttggaattttgtgccattttgtatggctttataattttaccacttttagtgataaattgagtcttaaaatttctttattgtcattttaaaaaaataaagaaattatttgactgatacttttaattatttattccaaaatttagggaataataatttatcttttattaaatactatctcaaaattaaatttaaattgcccaattaaaattaaagatagtatctaatatatttattttataattcaactcctatttgaattatataatagacacatgatatatatagcctcttgactgtttattttacgattgaaatacttgtaaaatatattgatatatcatcctcaatcgctgttaacagttcataattgtgaaactattctgcatatacaattcggcgtacacagtaagtcactctatc

SEQ ID NO: 363390 - DNA, 628 bp, Cannabis indica
tatttatactttatttattctttattatttctatgttaaatttattacaaaaaggcttattattggttaacaaaaattcgcgttaacactttggaatgcattagaccagacacctgcttttgagtgggtgtattgagtaggtatcagattaatccaagaaagaaacattgaaagataatcaagtaaatcttaagataaaaaagaggacctatatgttagttgatgagggtagtattttaatgctcttagactacaccaaatcaggtttctagacttgtgttaaggctagaaagtctactgataagatggtgattactcttggggtggagcagtgatttttgaaaagtgtaaaaacctatccagagcctctaactctaccactgagattgaatgttaaagttgcaggaaggatgttcgcggtgcgggtggtgcggtttttaaccattttttcaaaccaaccctcacatgcagtttttccaattttcgaaaccgcacccgcaccgtgatactaaaaaattagcaaaaaccgtattgcaaaaaaatgatgtggtgcggtgcggtttctacggttaaagcggtttgaactatcacaatttttttttttgaaatcatcataaaataattaaac

SEQ ID NO: 363391 - DNA, 691 bp, Cannabis indica
taactcgcactacgtgactaattgttagaacttaacttctactaaaatttattcatcattccttccaacttatatagtgtttgcagtcatcatatatttttatctactttcaataacatcatttaaatgtactaccaaaaaaaattacatttggtgacaactttttaatcacaatataaatttttcgtgactaaatatgattttcagttacaacaaaaagctactcgtgactaaaagtatttagatacaagttgtcactaatttagttttagtcacaataagtattgtgactaaaaatatatttagttgcaacaaattgtaatttttgtgactaataccttgagccacagattttttaatcacaacataagaatgatgatttataattagttacaattttttcactttaaacaacaactcctaatttaaatttgcacaagcttctttttctatctctcttacaatattatttaaatactgtacacaaagtgtgttacacttgaacaaaattacctaccttataattatatgtaatggacctgcttcatatgtgtagtcacatacctacacagtatacacaagtacgtaactttggtcaattacttacagaaataacaactgaccctgcaaaccaacacaagtatttttgacgtgctttgccctcactcgcacgcaccctgaaaaaactttc

SEQ ID NO: 363392 - DNA, 807 bp, Cannabis indica
ccttagaaataggttctgccccaggtgacaaatcaattacaaagtctatctctcaatgtggcgccaatcttggtaactccttgggaaatacatcaagaaactttcttacaactctgacatcatcaggcccaaatgtttcaagtcttctgaagtcaattacaactgctaaaaatcctacacatccattgtgttgtaaatctttagcccttaaaactgaaataatcgagattcaagaaccttgaacagatccaacataaataaatggttcttctccctcaggctggaaagttaccatcttccgtttacagtcaatactggttgaatacttggatagaaagtccatcccaagtataatatcaaactatgttagttctagctctactaggtcaacactcaactccctattttcaatactaacttgcatagacctaatcaacattttggagataactaattccctgctaggcagtagggttcaaatcctatctcaataaaatcacaaggtctacccaattgattaatcactctcaaatccacatatgaatgtgctacccaagagtcaaatagtatagtaaaataggagttgttgacaagatgctgaccagtgaccacagaagggtttgctgcaacatcaacttgagtaatagcaaacacctgagcaagtacaggctttgcctcttgcttttgttcttctttatttgtctaagggaaatctttcttaaaatgcccaaccatacctgatgcgtgtcgtaagccacaacaattactatttttttaattccaatacttccaattattttagtataa

SEQ ID NO: 363393 - DNA, 646 bp, Cannabis indica
ggtttcattacataggaataggtgtaacattacttggaaagtgatcaaggaatgataatctatctaggatagcaacattaccgtgtttggttgactttggaatggaatgtgattaacttttttgtacaataattattttttttttgttaaaatactaatgactcaataattatttttttttctttctaagtgtttaaaattaatttttatttattatttttcatataatttaataaaaaaaaaattatataactataagaaaaataaagctagtttaaataaataaaaaaaaaattaataagaaaaaatatgttatttaaaataaaaacttaacatatatagaattaaattaccataaaaaatattaaaattctcttcatatatatattttttaaaaaaataaaacaaatgaaactacagtgattgccggagttgtcggcggtgccaaaaaaggcgtcggagtatgctgttggcgccgggaaaatcatcggagtaactgtaagcgctgggaaagtcgtcggagttgctgtcggtgctggaaaagtaatcagaatcggcattgtcgctagaaaaattaccggaaaaatgaccaagaaacttttttttcatcaagaaagaaattgatttcttgatgaagaaactagtt

SEQ ID NO: 363394 - DNA, 506 bp, Cannabis indica
ggttcaggtccgggtgtgagttcgggtccttgtcagggttcgggtgcagggctgggtcccaatcttgttccatttctattgccgggtcacgagctgggccctaggttcacgtttgggtctttgtcgagtactaggtctcggtacaagttctgtttcccaaatccctatcctgatttttggtccatgtcctagttattgtgtgggtttgggttccgatcttggttcgggttcgagtcctagtctcggttcgggtttagctatctatatgggttttgatctgagtttgtgttcgggtttaggtccttgtcttggtcttagtccttgttccatttgcgattattatttcgagtttgggtttgagttcgggtcggagttcgcgtcattgtctgagtttgggttcgggtcttggtttcagtctaggtccagataaggctccgcgtgtgggttcgcgccctgggtcttggtctagatgtggtacgagtcccaagttccaatcccgatctgag

SEQ ID NO: 363395 - DNA, 1250 bp, Cannabis indica
gatcccaacttccggccagttaaacaaaaacgaaggctgttgaacaaagaacgagcagtacccctgaaggatgaagttgaaaagctgtgcaacaacttcataattgaagctttttacccagcttgggtcgcgaatcccgtactagtgcccaagccgaacaagaaatgacgagtctgtaatgatttcatagacctcaacaaggtgtgttctaaagactattttcaacttacaaaaatcgatcagcttgtagatgcaacagccgggcatgaaatattaagattcatcgacacttactcaggctacaatcaaatcaaaatgtatccaccagaccaagaacatacaagtttacgagtagatatgggtctctattgctacaaagtcatgtcgtttggtctaaaaaacactggggctacgtaccaaagattggtaaacaaaatgtttaaagatcagatcgggcgaaatattgaagtatacgtggaggatatgctcgtaaaatctagaaaggctagggggcacatacacgacctggatgagtgcttcaaagtccttaggaaatacaacatgaaactaaatcccttaaagtgttccttcagagtcagctcaggagagtttctattcttcatcgtcaatgcccgaggaattgaaggtaatccagaaaagattcaagccctcctggatatgaactcgccaacaaaaacgaaagaagtgcaaagcttaactggtcggatcgccgcactcagcagattcgtttcaaaatcaacagacaagtgtgtctcattcttcaacatcctacgaggaaacaagcagtttgagtggacagacgagtgtgaaaaagctttccaagggctaaaggcacaacttgcaaaacctcccgtactctcaaaacctctggacgacgaggaactgggaatatacttagctattaaggaacatgtcgtgagcgctgtgctaattagagaagagaatgatatacaacacccagtctattacatcagtaaaagactccttgaggccgagggccgatatccgttaatagaaaaacttgcttactgcctcattctagcaacaaggaagttgaggtcttatttacaagctcatcctatttgggtgtatactaaccaacaactacgccaaatgctgcaaaaactagatgcttctggacggctactcaagtgggcgatagagttgggccagtacgaaatcaatttccaaccccaaacagtaatcaaaggccaagccatggcagactt

SEQ ID NO: 363396 - DNA, 819 bp, Cannabis indica
aatttttagatccataaaagacagatctcaaaaagttgaattggagttcccaaacaatccaactcaagtataatccaaaaaatacatcaatactatagtaaaatatttatcctggtgtattttgttgttttccaattttctaatggtgaatttgttcatattaaattataaaaagacatgtagatagagttatgtacatgaaaatattgttctgatttttaatgtttcacaagagttgcataaacattttactaacaattatttcgtctgatttaaatcttcgtttgatgcaaccttcggccaaccacccagaaactttcgtctgatgcaaccttcggccaaccacctagcaaccatcgtctaattgaaaccttcgtctgatgcaactaccacgcaatcacgcagccaccactctgcaaccatcgtctgattgtgtaaatgatgatagtgtaagttgtattttagtaattaaaattacataaaaagtataaatgttgactttatcttatgaaggtatttttataaataaaatgtctatttatattttgtatgtaattattcctatatttattataattgtatatataacgtggtaatatgtgtaaaataaatatataatatatgactaaatgattgaaattttcttaaattgtattatatacacacgataaccggtaacgtgtaactaattacttaattgatggaaatgtgataagtgcaatttttgtgtgtttagtaaatattactcaaattatatatacatatgaaaaatggaataattagagtataaatattttctttcctacaaaaaaaaaaaaa

SEQ ID NO: 363397 - DNA, 626 bp, Cannabis indica
gcactttggttgtcacagtggactgtcatgtcttcagagctgaacccaagttcctttgagagaccttttaaccataatgcttcttttattgcctcggttgtagccatgtactcggcctctgtggatgacagggctagaaccttttggagattcgacttccagctaatgcatccacccagagcagtgaatatgtagcctgtcaatgatcttcaagtgtctatgcagcctgcatagtttgagtcaacgaatccttcaacctcacatccacctttttcagttgttttgtagatcaaacccatgtttagagaccctttaacatacatcataacccatttgactgcatcccagtgtagttgtccagggtcagcaacaaatcgactcacaatgctcatggcataggctaagtcaggccttgtgcacaccatggcatacatcaaacatcctacacaattagcatatggtatggcatccatgtttcttctttcttctttagtctgaggggcatgttctttagtgagtttgaagtgttgagccaatggtgtcatcacaggtttggcatcattcatgttgaacttcattagaactttcttcaagtatccatgttgtgttaacatgatgaagccagg

SEQ ID NO: 363398 - DNA, 770 bp, Cannabis indica
taaataaattgctaccattagattcaaaatcagaggatataaaaatgtcctcgtttgtgaacaaaagtgatgctctaacttaacgaatatcctatatatatatataatacatatatagtattgtaagatatattttgacaaaaactaatgaaataaatctggtgttacatgatacatcgatccgtatattaaaaaattgtatatgcattattttagttaattataatatttatttataataaaagataatatttatagaaataatattaattttagtgtaatgactaaattaaattgtatatatgatagaaattagagtttaaattccactatatgaatcttattttttaataagtttatttttgttcccgccataaaaaaaattaagttctcactctttaaattctgggcctgtcacctagtatgcacgtgtaattatttgatatatatactagtggaagtcatgctgaaagcatcgactcgcttgcttataaagaactacgcataaacacgtttgtacaaaagcttaattacaaaagcttgtatttaagggtgtgcataaattgatctaattcaatgaaaaccacaaccgatgcaattacaatcgaccgccaaacattgaatgtccaattgtgataggatcgaatttgacgttatttttgaatattcaattgaatcaaatcggatgttgcatggggtgtccaaaaatctaatacatccaacatccaatcgaattaattaatattttcatttagtttgaatgagtaatt

SEQ ID NO: 363399 - DNA, 583 bp, Cannabis indica
gtccgccgctaatacattttcatacaaaaaaataatatttaatagcagaagttcgatattagtcccattagtagcggtcggtatttactccgctgctattaactaaaattcttgtagtgtttgtataatatatttttaataaatgtcagattacaggattaaatataataaagtaatatatttcagtatatcctgtagaaactctaaaatataattaagtaaattaataaagtagtgtacaaataagtaaagataaagaaaaagagaggcatttggaaattaatgaaaatactagacgaattcatataggcggggtatgtatatagtcgatcttaattgtaataattagataagacactatattttgtaaaaatatttacatttttaaatgtttttttttaacattttatggtttttctaaaaaataacacgaaaacaacataaaatacaataagaaaactacataaaaataacaatcaaaacaacaacaaaaaataacatacatgtaacaaaaaatcaacaaaaaattaacaagattacaacataaaaagactgtattttctgtaaataaaaaaaaaaaaat

SEQ ID NO: 363400 - DNA, 557 bp, Cannabis indica
aatcaaaaaataaaaattaaaatgaactttatagaatactacttttattttttgtttttaaaattagaaaaataaaagtggttacagaacgctatttttgtttttacaaaaataaatttttttaaaaacaaaaattttactttcattttgtgattaaaaatttaaaaaacaaaaatgttatcaaacgacaccaaattaaaaatactttatttaaaaagttctcattttttttcttttaataaaatacgtaaaatcaagtttatatgaagaataataaaaagtaactatattttttcaataataaaataagaggaaggtaacaggatatgtccatatgatcataatgagtcaaactgagggttaagtacctaaaaatatacacatgtataacataatttgaataaatatacttactaatacctataattttttccctgaatccaaaattattaaaattggttatgtatgaccacttttctaattttcctaaactacccccctcatttgaatcagcctctctcttcctctctcttcatctctctcagccgaaccccctc

SEQ ID NO: 363401 - DNA, 736 bp, Cannabis indica
tgtagagagccttgatctctgcacgagaccccattctcatcatcagaagatcccatttcttacagtcgagacctcatttctagcctcaagaaatttctcgataccgagagagaggttgcaacgacgtgtcttctgttgtaggttcaggtcttgggttggttggattctcagatagaaaccacgccaacttccctcctgaattcatccgaagttgtgccaactttattttgaattccttgtcagcctgaggaggacctttaagatcgctcacgagatttatgtctattcctgtggagcaagaaaaaaaatataaataatatgtatgatctgactcatatcaccatttactagggataatactcaccctcaagaatcacttggtttggattggtcggaagctcgtcagccttggaatccatcgttttttattccaattgaggtttgaagtccttggaatgaatggagaagaaagatggttggtgtatcctgaagtcatgaatttgggggctgaacctctgaactcagaggggaaattctagcaagaaagagatgatcccttctcaagatggatctcaccaaaaagccagaagtttgtggaaaatgacaagcttaagtcacccttttatacacaaactccagttacaagaaagctaaggattgcgaaatctaatggttgggagtagggcagaatatgaagagacaattcataatggccctcgaaactgtacaaccgcca

SEQ ID NO: 363402 - DNA, 575 bp, Cannabis indica
tctcgggtcaaaattactaaaatggccctggctcacctacggggtcttaacatgtcatatctcatattcattcacatataataaattatgtaattactcaattaaccagctagggtttttgctaatccattttcttaattccagggtattacaggagaggtcgaggaggaggaggaagagggtgagatcttggccaccttggaccgaaaacgcaagggcaaaatggttgaggctgagtcttccaaaaagactaagagggtgaacactccggccgtcagctctgacttggggattccgccagaagtggaggagtatactatgcctcccagcatcattcttaaccccgttccagcggatgaggagaggcaacagctccggatagccaagcacaattatgctatggctgagtataaaagagggaacgccgaggtagaggctttggaaaaggtcttccgggaggcccagcaaaattccttgcgcgaggaggctttcaagaacgcctaggacctgaatatggatcctctgacagactggttcaattgctttgtcgggcctactcttactcccttcgcctc

SEQ ID NO: 363403 - DNA, 623 bp, Cannabis indica
aaagaaacctatcaaaaacttgtgacaagtgaatgaaataaataccagggcaatgattggcgtcaaaagtcgtaatcgtgaatgaatcgattgccccaccgatcgatttccacgaacagagaatgatcaagctgcaaaaagcagagaagaaattgaaattaaaaggcgaaaagagagggagagtaaattaggaatgggaagaaggagaaaaccttgagaaatggttgaaggaggagggctttagtgagagaggtagagtaaattgggaaggagaagtgagcggtgattccaatggagtggtctttacgggcatgtgtcaagaaatggtatatcttcatcttcgaacattcactccatgtatccactgagaattataacagtacttgtgttaccagatgtgatagtcttcagatgctttgccagagagatgattggccggaagccattttcaaccggagtagatgatcggagtcagaggaaatgaaccgcggcagagtacaatcaacggaaatagaagaatgggtgagaaagctgtggatagtaaatactgaaataatttcacacatactgaaacaagtttacagtaaataccttggatcgccgttcaccggaggagaccaaga

SEQ ID NO: 363404 - DNA, 634 bp, Cannabis indica
gttaaattgttaacgtaaaattttagtaaaaataataaaaaataaaaaaaaaaaacttactataatatattgggcataaaatagattaaatgaagtaattactaattagtggcaaaactcatttttagtaaaaactcttacattttattttatttttaagaaaatctctcaaattattatgattctgctaacaaatactgtctaatcctcttttgttagttatacatcattgtcatctaaaattattattgttatattttatttttttaaataactggatatgctattttgttaaaaataacattacctcatattttataaaatggaacataataataaatttaattttagtcaaactactgcataataatgcattggtgttttgatcactaggttagttacattgtttgcacctttttgttgttaaaaattagttttatattggttatataatcatgttaaaaaaaaaacatttagctaaaattaatcttggagtattattaagagtgaaatttgattttctatacttaaaaaatcttaatattttattcttaaaccagtacattttaaactaaaaaattatgacactttttttaaaacctcaaaaatagccctctcataactcaaacccttt

SEQ ID NO: 363405 - DNA, 762 bp, Cannabis indica
caaaaagagatgagcttctttctcatgtctcctgcagccggtgcgccaagcgttttgatgatggcgtcttcatggcctggtctacaaatgaccagaacatcaagcttaccttctaccccaaacccgaggagatgatcgcaaagttccgggagaagaagaaaaagcttgatgccatggtggaggcacgcatcggacctcgccttcctcctcgcattgattaggccgcttcgagtttgacccagtacaaccaggatttcactctacttctctctttcttttttatttacatctatttttttgtatttaagacaatatttacatagctattttttcttttttatttaaaggggagacaatatttaaggcctgtccccgggccatttgtatatattttgacctgcccttagggctaggatttttatatttatatatgatctcttttgatgcacatatctttctttttggacctgtcctttggatcaggatgtttatacttatgcttttcattttttcttttttgtgcatactcttttttgacctgccctttgggtcaggatattttacttagtttgttttttgtctgtccgtgtggtataccttagtacccccctgagtgcatgaaactttgtttctaaggcactcagtttttttattcatgtggaggctgtatacatttagacggtacaaactctttaaacaaaatctaagttacattttcagctattggtatattttctgaggtgatcggcattccaggctctt

SEQ ID NO: 363406 - DNA, 590 bp, Cannabis indica
catccaactatccagctaacctcttgatattagaaatctaaaactaagctttatatattttaactcatattgtcttgccagctggcatggttaaagtctctctctaagtttcgaaggtgtttctgcgactgcgactggggtgcgcctaggttgttttctgttccgattattgcatcgttattggtggagcacgtacggcgtcaagaaggttctggttgtttgcatcgtcatcagtggaccacggtgtcaagaaggctacaattgttgcgactggtccgattgttgcgactggtttgggcttgcgactgggttacgtctggttttttctgttctgattggtgcgactgggtcgagcgtacgggttccctcatcgatttcacagggccacgaaaattcaggtttgtgtttctgggcttggttttctcggtttctatcgtgggttttttggttttgatggcttcaacgagcacagccatggatgacatggagtttcagtatgggcatatagagttggatgatgaggaagaatgtggtttcgagattgaggacgacgtggaggaggcggtcttggtggatgatcgttggtgttt

SEQ ID NO: 363407 - DNA, 513 bp, Cannabis indica
aaaaaaaaaaaaaacagaactttgagcacaaataggaatgtacaacgaaaatttttattttaaaatttatgtattttaaaacgataaatatctctatattttgtttaataatacttaactcatgaaaatatatcaaagttcaaattttggtattttttattttaataatgtgagtaataatttattatttttgatcaatttatttattataaatatatatatatatatgtaaagaccgcatatgattaataccttaaattattaaataattagggttcatgtatgagattatattattattaataaataatacgattatgggaatttatttgagttcatatatatttattatgttatttatgtaatttcttaatttctgtgattgtgttcggaagctgtggaagcgacgttgggcctatagagagtcgcattttatatggtttagaatatttttcgggatatcattgttaagttttagcggtgttggtattttcggggtttggaaaatgacta

SEQ ID NO: 363408 - DNA, 743 bp, Cannabis indica
cagcgtgatggatgtgtgaaaaataaagtaagtgatctcacccgcagtagattataaagtcgcactcgacagaatggtcagcctccttgcgaatactgaccatcccatcaatgtgcgagaagagataaaactatcttgggcaagtaattcacgcatcctcggctaagcggtatacctccagaaacggctgggagtttcccagtgactcaaggggtatgcattttcgagcataaccctgaagttactgggagacccccaccgttccgagactacctatcaaccaaagagtacgctcatttgaatattaacgcatgtcacaaatggctgggtgtatctcagtatctcaaggggcatataaccgcgtatatggccattagaatactgtgacacacccaccatttggaatagcgattaataccctcgcaactcagcccgcgacatataaaaatcctaaaagatctagctaacagtcaaatggaaataaatcttggaaatatgcgagtattcaagctgttcatctgaacacccgcgaacattcaagttgttcatccgaatatccgcgagtattcaagacgtgaaacagtgcctatgaattgtgtgcggttatgtcagtttacaggtcatattctatgaatttacccaggtttacttacctaaaacacatagcctcataaacacccactagcatacattcctaaaaagcctttaaaatacccaaacccagaaaataaagcatattttct

SEQ ID NO: 363409 - DNA, 617 bp, Cannabis indica
atgatgatcattagtagatcatcttgaatcatgagtatgcatgaactcttatttgggttcattgagttctttgattcactcattaaagtttctcagagaagatgattcttgcaacttctattttgagagaataatatgagtggctgagaacatgttatacaataatagaaaccatgcttttcgaaagaatcaaatattagttcctttatagtgttaattctgggagtgctaacagttggattcaaatctatacttagattatagattaactattcacattgaatcaatgccacataaggaatcaagagataattagaaggataacgataattttgaccaactctaattttgaactaataattagaggacgaactacttatattgattatatcaatggattataagtaagaattctataaatataattttatattgtcaaaagtgaaattttcatatttatattggagtattaatagaattaataaacctaattattctattgaagagttcaataataatcaagtgttttgttgacatcgcttttagccaacgacaatgagtcttttttataagcgataaacgatatgttgtaacgaatatataataaaacaataata

SEQ ID NO: 363410 - DNA, 643 bp, Cannabis indica
caaataattaaactatcacaaatataataaagcttgagcaacacttgtcaaaaataccataagatttgaaaataaatatgaaaaaaaaggtttcaagtttcaacaatataacaattagtgggcttgggttgggccttcacatattggacctaaataaatataaaaattagtatttttataatatacagtgcggtgcggtttgaactgcatagtaacaaccaaaccgcaccgcaccacgcggtttagaaaaaattcaaaccgcaaaccgcgatcgcaccacaaagaatttcaaattgtattttctgcggggtggtgcggtgcgggcagtttgaacagtttgagcagtttgataaacacccctagttgacaaccccaaaagttatcctacataccactatttaaatgattaaattttattaaatactataaaataataccataaagtaatttttttgaaataaaaaagaaaaataataaacaatggtattgataaaattgtattaaacatgataaccacaatgcatatgtgttaaaaataactccatgagtaaaccccattgaagatggggataagttgaaaattacccatttttattacacattaattaaatataatcaaagtactaaatataacctcacataa

SEQ ID NO: 363411 - DNA, 1064 bp, Cannabis indica
atcccaattttcgcactctgactaagcatcacatgaatggtgacacgtgcaatccacttggaacatctgctcaagaagcatagtccaagcaggacacctcgctggcatgcctagagcaaagtactcagcaatccgcacagagcaaccaacacttagcgaattcagctttcgcctcgtgagtcatcacacaatccctataactcagggagaaatttacgtggatatggtatacacacgatcccactatcagtgtattcagcctcaatctcacgatccttgtattcggcattgatcccacgatctttctgtttatacgcattgtaacgagaggagaaactcttcctctccaagtttactagccctataagtagtgatgcatattcactgggcaagaggtcgaaaagcagttgagctaagactataccctaaagtattatctaagaattatatattcagagatattgttgtaagagctataagaaaatgaatctttctccttgatcttaagtcaatacaaataacgaggattagtctattaccgaactgctcggggctgaagctctataaaattcatgtgtctttacattgctttattatatattgattgctataaatcacttatcgcttattaaaatagacacgttgtcgtttgctaaaagcgaggtcaacattttggtgctctcattgagagaagaatcaagaaatcgctctctattcaaaatcttatacgatggtgcaaactcatagaggcctaaccgatctagcaaattcacaggcggtggatcctgcattgtagaacctaggaaacacaggggttcagccagctgttaatcctggacagccggcaaacacgggcaatggtgtaacacctcctttagatgcaaccgcgcctggtgtgcaagagattgggaacaacagttctgcacccaaccagggcgttcataacacgactattcagcctggaaccagcgcccagactaccattggagatgctactgagttacaaaatttctgcgacgcacttggactcatgcagaatcataataactgttggaatttatttt

SEQ ID NO: 363412 - DNA, 539 bp, Cannabis indica
tagatttgattcgaggggatgaaagtcaattcttggccagttggaagaataatgagagaatatatatggccctctacttcgatagtgcaagtcattgggtgacgctagaagtagatctggatcattgttgttgaacatatttgactcgagcctcggatcgatttcccctaatgaattcgagagtcacttggcaatgtgggaaaaattactaccaactttgatgctgcatgctggcatattcgagactcatgacatgatcctcgtgcttcaattgaccgccttagagagccaggttagaagttttacttcaaaagtcatggaccggagcattgttcgacagatagctccagaactagtgtagaactggaggaagagaaagcagcctaggtggtttgatgagtacactgaaatgaataagatgtctagggcttcgaagacacttgtgaatgctgacccacatagagtggttgatcggaagctgctcagaacttttcacagttgggtacttggccagattgggaacaagtacccgagagagt

SEQ ID NO: 363413 - DNA, 687 bp, Cannabis indica
catgtatcatcaaaagtttctccgcagtggcacatcctcaagcgaatggtcaagttaaagcagtcaacaagaccttgaaagatactttgaagaaaaaactcgaagatgccaaaggaaattggccagaagaacttcttgaagttctatggtcatattagacaacttagaaaacagcaaccggacatactccattagctatggcatatggatatgaagctatgctgcctgcagaactcaagccaccatgccacaggagattgatatacaaccaagataccaatcacgtaatcctggtcgaatcacttgatgaaattgaagagaagcgagccacaacaaacttaaagttgatagcccatcaataaaaagtagctcggtatttcaacaaacaaatgaaggcttagaaattcttcatgggaaatatggtcctaagaaggatatttctaaacaccaaagacagtacgacaggtgtactcagacctagctgggaaggaccatatcaaatggtcaaagttctcgaatccggagcatacaaattaggtaagtatgatgaaaaaatgcaacttgttcaagtaccacggtattggaatggggaacatttaagaaaatactactaataaagtaccaggtcggacgaccacactaagtactgaaacaacatttacttttaagtgaatggcctactgggcg

SEQ ID NO: 363414 - DNA, 532 bp, Cannabis indica
gatcttggtaaaataaattccaatagaagcctcacttttcccatcgggataagtgttgttccattaaaccctgtgggttgggaaccacttggtgaaaggtctcggtccgttaggcctattgcagtgaaggcctctttcaatataaatttacagaacttccgttgtcgatcaagactctggccacgatcttattagcaatgggagtctctatgaccaaggtgtcatggtgaggaaaaagcattgtcttagcgttttcttctgtgaatgtaatgggctggtccattagctagggcctttgagctgggagctgagtaacctcccaaacctcatcgtgttttacggcccctacgtatcgtttgagctccttacgggtggttcctctgatgtggggtcctcccgagatcatggccactctcccgttgggtcttggtggcaggcgcgggaatatgctgggcatctccggggggagaaactggaaccaatgctcctgctacaccccctggcgctccttgaggcaaagctccagccgcct

SEQ ID NO: 363415 - DNA, 680 bp, Cannabis indica
aagttgaaaataagttggaagcatcccgaaagctcgccataaaaaattactgaccttagaaggaatttttaatgaccaaagctgcttccaaaaatcagtattggcatctcaggaccaagcaaccttggattcttgcaagaatttacaggcacttttaaccgaataattctcacaagtctcaagtctcaagtctccaactccaaccatcattagcggctgaatcactaagatgaatggacaaaataagatcttgatcgcgtgaaacaaacagatctcgcacaacatcctcatcccaaacgcgagtatcgacttgaaagaggcagctaaccgacttattcacaagagcaggggtgagacaacatagttgttagagttatgaggaagccaatgataattaagaatggagacattttccccattagcaatagttctttgagcacaagcatggattagatatttagcttcaagaatactacaccatataaaactaggtttgtctcccgattcagcagaaaacagattaccactagcataatattttgccttataaagcctactaaccaaagaatcatcattaaccaacaaacgccaatattgtttccccaaaagagccaaattaaagtctcccaaacttcagaagcccaatcccactacatgtttatggcgatacaaccgctccc

SEQ ID NO: 363416 - DNA, 700 bp, Cannabis indica
aagcaattttagtttttacggaacttgattccgataaaatttgaaagagatataaactttgaaaatagggtgcaggtggtgtcgagaaggtgctcacgcacaccaagaactcgaacaagaagccttgtctgcacgcggagctcaaacaaatcttgtctgaaggctcagagtgcactcggttcagacacgccagacgttgttccgcacgcatggacaccctacagctgaccgagttttctcgactggggaggctgcaaacccttgctccgcgcacggatcatggttgcttgcagcctggttgtgggcaacaggtgcatcttcacccaaaattcaaatttttaggatttttccacaaattttgaatttttccaatttcaaatccaaatatcaaaataaaaatattgttttttaacatttaaacttaaatatcaattttttcaaattaataatattatttcaaatttcatgacttaacttagtgtgtcgcctaagggtcgatatcacactaaaattcatcacttcctcttatcttagtcaagagatcaatcttgagcaacaatatagacacataccttccttaaggggacaaaaataaaatcatctcgaggccagtctatactccctcagtattgaccaataatagaggtcgtagattatattgacatgtactctttctcccactcactattttaagttaatg

SEQ ID NO: 363417 - DNA, 754 bp, Cannabis indica
gggccggagtgtccaccctacggggccgcttagaagggtcctcctctactatcttgccctttcgcttgcgctcaagggcgaccgggtccttttctccaccttcttcaacttcctcaactccctcctcctcgtccaccaagacgatggtgcctcaaggggcattggaggaggacctcccgggaatgaccaactgagaagcagccggaggtgggaaagcatcaggactgtaggctccagcaagagttgccaagagttcgtccatggacctggttgctgcaacaaagaaaataagtaaagtgttagcacattcacgagacagcatacacttagcagaaaaacaataaactagtcctacccgactctctaattcgaccctaacaaagtctcgaatcatggggctggcctcatcatccccgagataactgtccgaggaaagaaaccagttggaagatacgtaggctgaatgatccaaaggaataggcaccgaaggtccggaacccatccgggatcgacctaaataatggcctaagtgggaaaagtagtactccttggcatgatctccccaccgggtagaaggcattctaaacctacagagatgctcatcgaaccctatgggcctaagacgggaatactcacgaacgtgaggaacataatgtattgtgaaaggggacttaccggaacccgaagtgctggcatcgggagccccagtatttgggactgagaccacgggcttgggcctacgggtcctctgctc

SEQ ID NO: 363418 - DNA, 711 bp, Cannabis indica
ttttcaaccaattttattttcaaaatttctcaaaaaccaccaacgatttatttactttttgcgcttaaagttctactaatcactttttgataagatatctctctgtggatacgaccgcccatactacactacaacaactgctttgtgaagacaagtttgggcgtaatcagtaagcttttagattaaaaaattgtatgttgcacaacaacaacacatatgtaagaccaattaatgaataaaaatattttttcagttcaaaattctgtcaaacaatttgctaataggttaacttcttaaagttaatctttattttttagttccacatgcgtacaaacaagtcccttcaagaaaatacacaggaaaaggtctatagtacttggtggattgcaagtgaccaagagaccataagtctgctcgatcacttggggcacccacaacgtataacatcaaacaaggacaactaaacttaagcaaaatttaaagctttgttaagaaaaaaattgaaatctatctaagtgcgagtgacatacttcagattagacataaagagcataagttcagacagctacatgtctaacaaaagaagttaaagctaggattaaagatcgtcttgttggtcatctgttcaaaagtaaaaggccctaaggccatacatgaacattgttaaaaaataaagggcctataggccataaaagaacaaaaaaaaaaaaa

SEQ ID NO: 363419 - DNA, 657 bp, Cannabis indica
cgatgaaacaatctcagcccatatgatataaaaaatgagagattttttttaattagataaaaaaaaattaagcataaaaactcaaaattttctaattttacctcatgggtaatacccattaagagtgcacccatgtatgtatatataaattttttgaaagtttatgtatataatttactaaatagtaactagttacttttttttttcattcatgttcatatatttttattactaactagttactgatataattagtaagtcgttaaataattaaaattttaattttattgtattttattatattgtaggttgtgagctatttttgaaggttctaaataatttggagttgattggattctagcttgctatacaggtatatacattaactaactttttgttataattaattatcaatgcttagtggagtttgaatattcatccacagtgaagtaggttctgtgatatattgtactacagtcggatgggtaaaaaattatgcatgttagttgagtttgaatatcttaaatattcaaccatagtgaagtaggttttacaaatacatgtactgcggtcggatgggtggataaatattgtattgttaatgttatattgtaggttgtgagctattttatcattctatttttttttttttaattt

SEQ ID NO: 363420 - DNA, 643 bp, Cannabis indica
aaaaattatttattttttattagaaaattcatttagatattaaaaattgtatttgtaaaaatataataaatactaaatcttagaggaagaaacttgaatatattttacttttatcaaaaaattagattgattaagtaaacataacattttttagtttaatctataactttcttttcaaaataatttcatatttttattgaattttcaattattttttttttatttgctaaggtatgattttataaatataaataagtttgagtttttttcaaaaaatcttagttcatttaaattatttatttgattatcaataattttggtttgactttttaagatacgtgttgctaaataaaataaagtttaaaaatatttttaagtaaaattaataaattttatccaattttttaataatttttattattattattttaaattaatagaatattataattgatttaaaaaagatagaatattataattttaaaattaaaatttttttttataaaagggagaaaatttttgtattggtcaaagatcaagaggtaaaaatgctaatttttaattgtaaagaaccggaacctaatagaaagggcataattatgtaactgttatattttagagagaatttttaacaagccgtata

SEQ ID NO: 363421 - DNA, 1131 bp, Cannabis indica
gtaaaataatttctaacagaataagatatatatcattataagatgtgcctgagaaccaatagtaagaggttaagtgtacacttgtgtattactttaaccagactcctactgttgagtgggagtcatctaagatgtaatcaaacaaagaacattaggagacaatcaagaaaatatctaagaaagtgacctatatgttagatgataagagtgtatattagaattcttatatctaaaccaactcagtactcatattaaagattgtagttactccacgggtggagaaattattctagaaggatgtaaaaacctatctgtaataatttagttccatcagtaaagctaaataacttagttgtttttgaaaagcactagaaaagttattcaaactgaagaaagttcttaactggtgttatctctattccatttttggatagaattagagttttttcttctgtatatacagatacacttaataagcagtaaagaattcagtatccctagaggagtaatacatatagaaaagtgatgttgcataatattttatgaacacgaagaaagtaatggtggagaaagttgttgcataccatagccttacagttcctgttatttaggtttagtcaaacacactacacttgatatggatatcaagacaatagattgattgaaatgcacttctagttttatgttagtgcaagtgggagtttgttgggattttatgccctaaataaaacccatttcaatataatcttatttgttatcaatagaagattagaagtcatttaagttaacatgttattttcatgattatggtttaatatacaatttctgataaatccagaacatattgttattcacaattatagtgatgtcatcacaatggaaggtaattgtgattatatttcaaagcttaagtctcatgatttatcagtgcactgatttacatcgacgtgataatcaataataaagttcacttacaccttggataagtgttatgtccttttcaagatattggtaaagtatgctagtatcagatgtatggagtatacattgaattggaccgatattgaacttggtaaatatatcataaacttactgttacatctttctaagtcaatataacttagttgatct

SEQ ID NO: 363422 - DNA, 626 bp, Cannabis indica
aaaaatatttaaaattttatgaatccgtatttctgtaaattttttgctatttttatgtatttgtgaaataattcaaaaatttgattgcctatcactcatttcaactcaggtccaaccctagtaaaaacgtaataaattttaaacacgtgaaaaaaaaatcaaatacctaagaattggccctcttcttctccgatcgaatatatctctccaattaaatgtcattatgttgttgcatgtctgtccttttttttttcttatacgtagccactactacaaaaatgggtttttctgacgtttttaaacagtcgtttaaagtatactcgtcagtttctataaccgtcacctatacgaccgttgtaaaacgggcagaataagtaacagttcaaaaccgtcgctaatgtgagtttcccgacggtttaaaatcgtcgcctataacttggtataggcaatgattttaaaccatgccttatagtctggctccgttttgttaattttttttagcgacacgctcttttttttttcagtcattacatttgaaaaatagggaaaaacagattttctgtaatttttttcatgcattaatttttaaattttgtacaaatctgcataatcacaacaattaaact

SEQ ID NO: 363423 - DNA, 820 bp, Cannabis indica
tgttaggaagcatgttagtagcctgatagtagaataggcgcatgtttttaatttccaaattagcggcattagtaagtttttctttgaccacgatctgaccagactagctctttgttacgtaggctgttcaaattagtatggacgccaggcgaaacaccaggagccagggtaattcggttggatcaagtggtggtcagggagctcaaatttcccttaatatctgtggctgaggtagaggtcccagaggtagggcacgtggccgaggtgatgctaacccgctacaggctgcccaagttgcccaaaaatgagaaaacaggtttgcagaaatgcaagctagaattaatgaacaagatgaagagattcggcggttgagacaacagggtgttcctgcgatcccttctccaaaaataccagtacctcctgcccctgctttgcaggccaaacctgtagttgtggtgaaccggatggaacccctgtatgaaaggtttcgtaagcaggcaccttcagttttcctgggaggtcccaatgtaatgaaagtcgagcaatggctaaatgtgatcaccagaatcttgaattttatgggcgtcaccgataatgatagagtgctctgtgcaacttttcaatttcaagaagatgctttagtttggtgggatatggtgtccatgattcacgatgttacgacaatgacctaggaaaagttccaggaactgttcaatgccaagtattacaacgaggcagtcaaacgtgctaaaagaaaagaattcacacagttgacttagaaggagaacatgagtgttactgaatacacgactcagtttga

SEQ ID NO: 363424 - DNA, 569 bp, Cannabis indica
gttacaaattatttatatgatctgttgacctcgcttctagccaacgacagtgagtcaagataaaacgattaaataaaaccacaatacttttggtagttcctccggccagttcccttacgcttcttcaagccgctttttcatggtgccttttgagtgtcttattgattgcctcaacttgcccatttgtgtaaggatgtgctactgcggagaaactcttaaaaaaaatccaagggcccgaatagaaatttgtgaacatctagctatcaaactgcttgccattatccgagaaaatcttgtgtagaagtccaaactgacatatgatatttttttactacaaaatccagtattttcttagatgttatggctaccaggggctcagcttctatccactttgtgaagtaatccactgcaaccattgcacattgtactccgcccttccccttggggaactgtctgatcaggtctattccccatatggaaaagggccatggactttgtatctaaattagctcattaggggggtgcacgggggtatcgtttgaaaatctttggcatttgtcacacttctt

SEQ ID NO: 363425 - DNA, 669 bp, Cannabis indica
acacaagctaattggtgaagaagccagttataagcctcctagcaatgcaagctaaagaaacaaccttccaaaatagatcaaaatattgcaactaatcaaaaagtaaaacataaattgccaaaagacaaccagtaaatataaaagctaacaacatttcataatttacactccaaagaattatttattacaccaatgaaaaaggttagaaacttatcacaataaattaaaacaaattttactaatacaaatttcttttttttattcgtcagatatatattactatatatattatcattatatttgacaaacagtttaatttcatggtagacaaataatccaaatgttagttaagtttcgtatcatgattatatataaaattaagagaaatacaaacttttttgggtattatttatttattttttttttgagtgtttttcgggttagaacaaaaaaggaaagaaggaaaatacttagaacctttagaaaaatcatagaacctttagaaaatttcacccctaataataataataataatctatatatataaagcagaagtatgagagggtgatgtggcagtctaaaaatgttttaaagtactcatcctttttctcaattttttctactttttattaagtatttattcttctttctctattttttattttttta

SEQ ID NO: 363426 - DNA, 667 bp, Cannabis indica
agtaatggagacatggggtccccttacctgagccctcacttcccttcaaagtacccatgcattgagccattgaacattagagagtatctcggagtgcgaacacaaatcataatcaactggacaaatctatctggaaattggaaagcatgaagcatttcttccaaaaaatcccaatccaaagtgtcatatgctttttgtaaatcccgtttaatcatacatcctgcctttgaattttttcttccataatgcctgattaaatcctgacagatcataattttatgagaaataaatcagccagagataaaccctccctggttctgtgctataagctctagcaatataactttcaacctggtgcaaattagcttagtagcaactttgtagataacgttacaacatgcaataggtctgaagtcactaactgaattaggacacttacatttgggaataagtgttaaaacagtagtgttaatttctttaaagatctgacatgtatgcaagaaagagaggatagcctctgaaatgtcatttacaatcaactcccaattgtcttggaagaagcaactagtgtagccatctggaccaggagcctgttgaaattattttaccaagatcttagatctactcacaagtatgttgtttaacaacctaaatatgaacttctaaa

SEQ ID NO: 363427 - DNA, 734 bp, Cannabis indica
tacttagaacctttagaaaaatcatagaacctttagaaaatttcaccctaataataataataataatctatatatataaagcagaagtatgagagggtgatgtggcagtctaaaaatgtttaaagtactcatccctttttctctaattttttcttactttttattaagtatttattcttctttctcttattttttattttttattatttttaatatgttttatttattttttattttttttaaaaatgatgtttaaagttatcatcacgtgtttgtttttaatttatttttttaaaatgatatttaaaaatatcacaacgtttattggttcttttgtgttttttttttaattttttttttaaataatatttaaaaataccatcacaactctcaattgaaaaaagaatatcctaaataatatcatagacacgtgttgttctattttcctatattttattattatttttttcaaatcatatttaaaaaatatcatcacaacttcaaattgaaaaaatattttttactttattttttataattttttttctattctctatatatattctaatttatttttcctaatttcatatttcttaccttttatcttcttctcttatattctctcttcttctctcatgatggaatgttcttttcttgatttctaatgcatgcaacaatacgaaaaaaaattgggttttaaagtttaagaagctattgagtgaatgttctttgta

SEQ ID NO: 363428 - DNA, 760 bp, Cannabis indica
tccaggaggacgctctcgtgtggtgggagttgataaccctcactcgagacgtcacagttatgacctgggaagaattcgaggaattgtttaactctaaatattacaatgaagctgtctgcagtgctaagcggaaagagttcactgaattggttcaagccgaggggatgtcggttacggagtatactaccaagtttgaccatctggcccagctcgccgtgggaatcgtgccaaccgactttagcaagaaagagaaatatttggccggtttgagtgtgaagattaggcacgatttggtgattactaccactgaagcaacctcatatgctgaaatggttgaaaaggctttgagagccgagggtgcggtgaaattccttcaggagccccgagtgactccaagcgttggtggaacccccactttttctactcctgtacatggtagggatggtggtgactccaccactgatcagaagaggaaggttactccggcatctggtggttcagggcaaagcaagcggttctgtgggaaccaaggcagaggtggacgccagggttattcatatcctgagtgtcctcgttgcaagaaacatcatccgggacagtgtaaccggaagacatgctttttgtgcggcatggtggagcatttcaagaaggatttccctcaagcaaagaaagaggagccgaaagttgaggtgaaactgattcctgctcgagtgttcgctatcacccaagctgatgctgcagccagtccttctgttgtgac

SEQ ID NO: 363429 - DNA, 1314 bp, Cannabis indica
taattactcataacggtaataaccatatcttttacttgatcataatcgagtcacagcgataataatcaatccatatcatttgcctcgatcataatcgagtcacaatgataataatcgtttcatatcattttcctcgatcataatgagtcacaacaaacacatattggaatctcaatcataattgagactatcacaattataatcgttaaccataaacggtacataatacttttcttacctcagtccagagattaagcgtgcatgccagtctaagtgaaaaacaaaacttgacgatcccgggtcctatgtcacgacaacaacattatataaataccttaatcaataatttcaggaataaccctaattcccataaccggtaaaccttagcttctattagctccaaaataggttttatcacttttaaacaatctacactagccacagaaatcatcccgaaccctaaaacctggccttgaagaaaacaagaaattacccctgcaagcaaactggtcgactagttctgctgcaccagaaccacacaggtcgaccggttctgcaaagttgaaatcttgagttttctcctccaaactcgaaccaaaactcaaccacacctgaccaaccactccagataaaactaatatcatatacacaacacatcctaagcattaatacacaacaattcatcaatttaatcaatatagcataaagtagaatttaagcttagaaatcctaaattcctctaactcaaccctaactgagctgattataaccaagtcaatcttaaataaactctaattcaagcctagaaacttattctaacttcagtttaataccccaatcccggaaccaaaaccgtaacttatatctaacttgaaacttgaataaaactaggagaacagggtgaaaaacttaccttcaagcttgaacaaaccctagaacttgttaattatgccaagaaattgaagaaaaggttataaaaatccattcagtgcagctggtctcctaggctcgtgcaagagggtagaagagaaggaacttgtgttgactttttcttaagttttctaagttgtatcttcatttatcaacacataagacttaaaataaactataaacctactattagtaatatctcagcctagaaaaaggcactaaaagacaaaagcttcactttacaaaaaaactattctaccccttcccttaacacttaacctttagaaaatcctaggtgtattttagtcattccctaattaatccaccaaactgataacttaaaattctaaactagaccggtataaaaattcaattcaattcatc

SEQ ID NO: 363430 - DNA, 524 bp, Cannabis indica
tgttaggaagcatgttagtagcctgatagtagaataggcgcgtgtttttaatttccaaattaagcggcattagtaagctctcgctgatcatgacctgatgtgccaactctcagcttcgaggctgttctgactagatggacgccaggagaaataccaggagtcagggaaactcggtcgggtcaaatcaaggtcaaggagctcagtttccctcagatgttaggggccgaggtagaggttcgaggggcagggctcgtggtcgggatgatgttaacccgtcacaggaagcccagaattgggagattaggtttgctaaaatgcaagccagaatagaggagcaagataatgagattcagagattaagacagcagggtgctcctgcagtgcctgtgccagaagttccagtggcacctgctcctgttgtccaggccgaaccaatagtagcggcgaatagaatggaacccctgtatgaaaggttccgtaagctggcacctctggtgtttctgggtggtccggatgtcatgaaa

SEQ ID NO: 363431 - DNA, 1119 bp, Cannabis indica
ttataaagtacccctttaccactcgttaataacaagctgaatatgtcactatcgttacccgataaagcgaatgataagtaagaaacctaaccgctgtttcaagactaattactcgtaatggtaataaccattcctaatccctaggttataacctaggctcaactacttttaatcaggatcttgataataatcaagatataatcattcaactgtcagcaaataaacacatatggtgcttaccacttttcttaccttagttcagaactcaaccgtacgggctgacctgagtggaaaacaagctaagcaatccctggtcgtatgtcacgacaaagaaatttgataaacaacttatccatattccaaacaaaccctagctccataatcagacaaatttccaactctccactagtttaaaatagcttaaacatcactaacataacctattctatgttctgaaaaacaccccgagcgaaaccggtttcgaagccaaaactagggttttcccccattgctgccaaaactggttgactggtttcactatgcctgtgaaatcggttaaccggtttcccctgctacaggaaatggaaactcaggtttttagctccaaaaccaatcaaatcttctccaaacatgtccaaaccttccagaacagtataacaaccataatacaacatatcttaagcttcaaaacaccacaattcaatctctaactcaaaatcagatgttcaagtgaagaaaacttgattttagcttcatccaacacaactcaagtcaaccagccatggaaacttctcaaacaatctctaacatactcaaaaacctagcctaagcacaatccaaactcagtttaattctcacagcaactaaagagcaaaaccctacctcaaaaccaacttagaaccttgagttttcaatccaaaaatgttaagaacttaccttcaagctcttctaggttgagttggggcaagaacctgcttcgaaatgaaggtagaggctgaaggaaaatcttcaaagtgggctgttttggttgcacaaaggagaagaagaggaggagaagctttgttgttttatttttttccttgcattgtaagctatttcccttaaatagggtttttcttt

SEQ ID NO: 363432 - DNA, 924 bp, Cannabis indica
aattcccgaccactcccgacattcccaatgtctaaataaccgtcccctaatactaacatactaagttgtgattttaatgagccaaacaccgcgttccatgttaccgggcaccggaaatgcaaaattatgaatttcactatatgacataaaatgcatttcagaattcaataataacagtataaacaattatttaaatatctataaataatttccataattaacataattaactactaatttccaaattaaactaagcggtctttacaggaatcaagcttttcaggaaaagaggcaagttatgccctagatttgcaggacctttcgagattctcgagaaggttggacaagtggcatatcgtttagctttgcctccagctctttcagcagttcacacaacgtatttcatgtctcgatgttgagaaaatacgttttagaccgaactcatgtacttagttatgagaatcttgagctgcaaccagatatgtcctatgaggaacaaccagttcagatccttgacagaaaggataaggttcttcaaaataagaccacaattttggtcaaagtactctgggaaaatagaaaggtggaggaagccacctgggaattagaatcggacatgaaagctcaatatccagagttgttcaggttagatttcgaggacgaaatccttttaagggagggataattgtaaagaccgcttagctttaatttggaaattagcagataataagggctttattatgaaagttaattattaatattgaattaattatttatgatgatttatttgaattcagaatgcatttttatgtcacatatagaaatttcataattttgcatattttggtgcccggcaacattggaacgcggtgtatggcttcttgaatcacatcttagtatttttagtatagcgggacaatagtt

SEQ ID NO: 363433 - DNA, 869 bp, Cannabis indica
agaaaagattattatattaacttgaaaataaattacatatatataatatcaattttagttaaattgcatacataatttttttatataaaatttttttaaaaaaaataaataaccgcacgcaaagcctattcctacattgatcacatgcgtcattgctgatctcatttgttttgaatgttactaaatttgttgaggagaaaaagggagggaaaagaaaagagacaaaaaaaaaattagttgttgggttggaaataaatgatagtgagagaaaaatatctaaattaaaactgcttagtttattcctgattcaatttctatttatacttttcaaataatcaaataaaaattagacaatatcttatattaaattagatatgttatagattttgagccttattttagaagttttattagatttgataatcttattaattatttattaatttatatgcacataatgtattttataaagatatttcaatttggtggtttgaaacaacatttattaagtcgattaattaattacgtgattttattaataattttatactttactatattattattatatttattttctttccttttagttttaaattaagttataatagtctatatatttatttctattattatttttttgtaagcaattattattagtcaaatagttagtaaattaatattttattcattgtgaagatttgttgcgccacaattttgttggctttgatgcctttcaaggcttttgcccttatttttataggttgagcctaattatttagggtaacatgattaagttttccatgttttcatgagaaataaaagtttttaaaggaaattttttgcggtattgagcaccacgagcttag

SEQ ID NO: 363434 - DNA, 1062 bp, Cannabis indica
tacaaaacaaacacatcttaaatcatttctaaggtttttcaactacatgatatatagtgtcccggtaggtgagagtcaaagacatcattagttgaatagaggtcttagctcatctaaatggagaccattttaacaacctttatttgatcaaaataagaatccaacattgtcccggtaggtgagagtcaagcttattcttattttatgagcttcttccattgttttatacttgtaaatttatttctaagtagtcaccataggggagagtctaataaaaagaaaacttaaaaaataacttatctttcgagatctttacggtgttaaatgttcagtgtaagaccattcataaggggggcgaagtctagcgtctcaaggtctcattgaaatattaatcatgtaagaccaacaatggagattcaataccataaatttaaagctcattattttaaaaggttgtatttcaatttgatgtatattcattcaattaaaattactaatttagataactctaaataaaaaatttaatttaatatttataaaattatatacatacttggatagatctagaaaaataaaaattctattttttcatccttgctattaattttctaataaatattacgaaaattacttaacttgagttggtccaaaattaattaaaattaaattttcaactcaaattaaattttctataaatacatgtatgactaaatttgaattcattgtattaaaaataaataaaagaaaataaacatgaaaaaatattctaatttatgtttgtaaaaaaataattaattaattttcaacacagatataattttcctatttaatgaaatctcctatgaaaaatattaaatatgtaagtgtcttgaacaaatcaacctaaatattaattttaatttaattaaatacgtctagaaaaatatcaaaaagtctacttagaaaataatgatctagatgtttcataaattaattatttattttctaattaaaatataatatattttagcctatttatttttaaaaaataatttatgaaaaattacttgatttaagttgatc

SEQ ID NO: 363435 - DNA, 664 bp, Cannabis indica
tcctttcccccttcctagcattgaccaacttgttgatgccactgcaggtcatgaacttctgagcttcatggacgcatactcgggatataatcaaatcccgatgtatgagcccgaccaggagcatacctcgttcattactgatcgaggattatactgttacaaagtaatgccttttggtttgataaacgcaggtgcgacttatcagagacttgtaaacatgatgttcgcagatcttattgggaacaccatggaagtatatgttgatgatatgctcgtgaaatctcaacacgcgagggatcacatcgcccatttacaggcaatgttcgatatattgcgtcgatataagacgcgactaaaccctctaaagtgcgtctttagagttggttccgggaaattccttggattcatggttaatcaacgaggaatagaggccaaccccacaaagatcagggctttggtggaaatgccatcaccaactaagccaaaagaggtccaaagcctcacaggtaaagtcgctgccttaaatcgctttatatcacgatcttctgataagtgcaaagagttttttcagattttaaaaggtaataagaagttccaatggattgacagatgcgaggaggcctttcaagccttaaaaacgcatttggggcaaccttcaatctta

SEQ ID NO: 363436 - DNA, 971 bp, Cannabis indica
agggttcagatatccaagaagccaaggagatcgttcatgcaacagaaagagaagaagaaaaattattactgattttaagagagaaaaacagagagaaaaagaggaagaaaaaactgtaactattttcggattaccaaaatattacctgtgtgttttggaatcccacccattgtaatctctaatctttgaagatccatagtggaacgaggcgagctcgaagaggacgtacccagcacaatattttggggaacttctataaaatctggcgttttcttctctatttttcttttttgaattttcattgctgtgtttatttgattgttgtttgtgtatatgacttctgggttttaattcgatttgggaaggaactaatttttggggtttgtatctggttattgggggttgactttgtgttcttcagagaagaacaacgaaggagaaaaagggggctctgctagggtttgtgccgtgtgtgtatatgaatcataaatgatatataagtatctaggttatttagggtttcttaggtgtgtgttaaacgacttgtagcttataggaagggggttatcgtttgggttttcatttctggagtcaacagtgggtttggctgcggtaaaaggtcgaaattgaccttggtatattgattaacctatttctgtgtgtagggtaaatgtggaataaaattccaactctaagcattgtcatagttttacttaagacaacttaattagaggaattgatatttaaatagtatgaaacgaaaaaaaaaacctttatagtagatcattatttgtgaatatatgcctccaccacacgcgtcatggtcaacggccttgttcattagggcgaaagaaaaaataattagagatggcatatatggtctaattgttgggttttatgccgtaaataaaactcatttcaatacaatcagatttacttattaatatagatcagaaataacatttaatgtt

SEQ ID NO: 363437 - DNA, 792 bp, Cannabis indica
ctctcctctcaactctctcccttcatttttctccatttaatcattcctctttcctaccaaacatagtgttaatacttatgatgttggaatttttttttttatttttttgaatttgggtcttaggtacgtttctttgaaagaaacttaactaaattaattaatatatattgtttactaaaaaaattagtttgatggcgtggatactgtttttaatacgtcacacagaagaaacaattatgggaccccacattccaggatatggcagtattacttgcacactaaggccaactaggtaagcagcaagatccaacaaaatcgtttctgagtactatgattcaacaaataggtcacaatgaccacaaaacgattaactgtgaaactgaggatgccacctagacatcccagagctcaaccagggcccaagttaagtactaggtgcgtaggttgataacccgtatgctggcttgcatcagttttaattcccaacaacttcgtatgtgcaattttgcttagccattgcactagaatacatgagagacacctcaaccaagtttcaaaccttagagataagtctggacaaaactctacctagagacactaggtgcacacagagcgcccagttcgacatttagtcaccctgggcggcatgacgactagggtttagatttttgggaacttttttgaactccaattcctcaaacccaacaaggtacaatgctaggtgtgacagtcagtagtcccgtgatccgtaagggaaaataccgggtaagctgtgcaatcccacatcgcctg

SEQ ID NO: 363438 - DNA, 884 bp, Cannabis indica
taatttaataaaaaaaatattttgatcggataggggtggaagaagttattgaactatgcaattcaaagatcttttacattgaactctatactatatatattcataactccacagaatctctataacacataggggtggaagaagttattgatatatattcaaacatcttttacattaaactccagattatattcataacaccacgaaatctctatatcacacatattttgattggacatggatataatataataaactaactagtaaactaatagaacttattcttgatcctgtaagttttccaataaacatgttactatcgtaatagtaattaaatagatgtcagtaaagttcatttggacatagaatcacaataccttatattagtgggaggattttaaaattttagtctatcattatttggaagacactagtgataaacctattatgatatgtttaagaaaggaattttaaaatataactaagaaaaaataatcgaaccatttccatggatagtaataacatttcctttgcccgtatgagaagaaaagggcatcaagtcgagtacgataaacttcaatgtcaaaatccataggaacatcttttccatggatgaagaactcgacaaatgcagccacaaatgctccgcaatcactaataaccagacaaggaaaaaaacagttaaacaactaaaaaacaacataaaataaacttaaaaacaacaactcactttttctgttgagatggaaaaccggcaatctccacaactcttagaggagctttagggtcagaacataaatcaggaacatgggacctattcttccaaaatccaaggagatcaaaaaacaaagggagtaacatataataagccttcattgcattcc

SEQ ID NO: 363439 - DNA, 1068 bp, Cannabis indica
cgcggtagctggttgctgattagaaaactggtaggccctccatatcagtatggtagcctaccttgtgcggtcatcgatggctgcttgctaagccttcaatgtttccatctccctatccctccactcaatgagttggtgtcgctgctcatcgaacacagggtttatagaagcatagagatcctcctgatcatgatgcaaggcgttattatggacttgcatgagtccaaggacaacacggaggtcttagatctcagtatcatcccccaccgcctctagcattggtggtggacgggactctagtattgggagtggtttggtcagctgcagaactggtattcccaatctcttgcacacctggtgtgatcccaaccaaaggggaagtcacaccatggcccacagtaggtggctgtgtgttggcctgctcgggatcggtccttggtggtaccctcgtgttcccatgggtttgtacagcagaatctatcaccattgggtcaccctgatcgacaaggcctctgtgagtttgcaccatcattctctatgcctattaagacttaagacaaagaacaaacttgggtttttgctctcaatgaaagcaccaaaatgttgacctcacttttagtcaacgatagtgagtcaatcattaagccagtaagaatacaataaaaataaaacaaaaaccaataaatgataaagaacactagattttgaagaggttcggccctatagtacagtaatagcctactccccacagattgtatccactagagaacaagaacacagtgtttctctctctaagctcttgaaatctctgagtatttctcttagatctctctctaaagcaattctttcgatcccttttacagtgacactatatcactatttatagggctttaatgcatgaaggaaggtttcccttttgcttacaatgtctataataggaaggaacattcattacaaaaatagaatacacaaaataggggattgagatagcttgttgtgtccctctaattcaatcccatgattgtagggattgcctttgtgcttcgactccacgatatcattctgaag

SEQ ID NO: 363440 - DNA, 733 bp, Cannabis indica
tttcaacaatggcatgagcaccagtgtactgagcaaattttagaactgctctttgacaataaggacttgcagactggacaatcatgtcttgggggttctcaatagcaacaataaccctggcagcgagctggagtttaccaagagtatgccttcctatagcgagatgggtgtcttgctatcattatccatgtcattcaagatattacacttagttagtataatgtatattatacgctgtgttctgacaaccaattcgccttgtcgacgcctctctacacataacgaggtaagtgcctcgctatgtattatagatgtcattcttgcgattatgtcctgtgacgcgaaatagtttctcatcaatatgtgaatcatagtttgtaaatttttgtctcgcttaagactatacagtcagcgagttatagatatgctctattaactctgtatttaatgagttattccatttgatgatttttaatataattgtcattatatttgttgattcgtattccccaaagttgacacgtgtcatcctctgaagtaccagccgaattttaagtataacaattgctccttaaaaagtccttttcagtaaaaagtactttttaaatgattattgagtgtatttttgtcataatccattttaaaaaaattcatgccttttattttggcggttttgtggtttcgaggcacatcatgtgtaacactctaactagcataggcgtattacgtgatt

SEQ ID NO: 363441 - DNA, 728 bp, Cannabis indica
gttttatttattgtttattcaaactattttctaaaacttattattatttgatctaaattgctatggttaacttgttgatagatccaatgatctaaccatagtttaattgtcaattgatcattaaataatttgtaataggtaaattttgtaatcttctttcatctgtgtacaaacatagtaacatgataggatccatccaaatcattgtgtttacttgagcctatatgtttgcttttggaccagatgcatatcaggagtccatttgattttgataattaaatggactagattgttaaaataaaatatcactttaatagtttttaattagacccaattagtattgaacttattcaattaataacaattgtttaattaaggttaaatttatctcttttgggccttgtgtgagagttagggggtcattggtagtgggtacgacatattgaacccaacccttccttgcatgaacaaccctaactatgaagacccatttgccttatttaaatgattgtattagcccaattatattagtttaacctaattaaaattgattggaaacataattaatttttaaaatatatgaagattattttgaaattgatttaagagaaactcactgaatttgatgaaattaattcaagataagctatatgtatttatctaatatttaattaaataaagaagttatagctaattaaatttttcttgatacttaattatttgaattt

SEQ ID NO: 363442 - DNA, 801 bp, Cannabis indica
aaccctcctttcttttgaagaaaaaactatctccttcatggctaaaagcctagaaaatgtaaatactccacatgaggaaactcatcaccgttatgggaaagagcccatgggctccagaaggtcatctaacccacagcccagacggaccacccgctccaggaggactcaacctgaaggtggccccagcattcggaccacacgctcttggaggacccaacccgacattggtcccagtacacgaataacatgctcgaggaggactcagcgtgggaatgatcggaatcctggcataggggatgaggagcctaaccgtggaggtactcaacctatgggagaagacacttatgagaccgaaaaccgccgccttagacgctgcctggaggaggcacagcggcggaacgctgaactagagcgtgatgcagccgtagctagggcggggcaggggactagcactcaaaatcaacctgatttggagtgagaagaccacgaggcaaccaggagacgggagaatccccaggacgaacaacctagggaaaatgaggttccccctgaaaattagaatgatcgaccagaaccctctcacagaaatgagaatgggaggcaaccaggaactgatgaacaagaaattcctcatgaaaatgaggaatgttttgtgactcaacctggaggacgtaggtcacctgtaagaaatcgccagcgttcttcccgaacccatagagggagggctcgtacagaccctaatgggggaaatgcgacaaaccacattcagggggaaagaacatagcgtgaagaagcaagtgt

SEQ ID NO: 363443 - DNA, 501 bp, Cannabis indica
tggtatgtactccagtttttgagaccaaacggcatgaccttatcgcaatacagacccatatctgtgcggaaacttatatattcttggtctggtggatgcattttgatttgattatactcagaataggcatccataatgcttaatatttcgtacccttctgttgcgtccacaagctgatctattcttggaagtggaaaacagccattagggcatgccttgttgaggttggtgaaatcactacagactcgccatttcttgtttggcttgggtactagtacatgattagcaacccaagccgagtagaaagcttcaattatgaaagtgttgttccgtagcttttctacctcttctttgagagctagggctcgctccttgtccaacagtctgcgcttttgttgcactagccagaagtatggatcaatatttacgacatgtgaaattacagaaggatcaattctgaccatatcctcatgcgactaggacaaaaatgtctaggtttgc

SEQ ID NO: 363444 - DNA, 857 bp, Cannabis indica
ttgcctcactagtgctaggtgaatttccttgaacttgttttgccacttgagtagccaattgttccatctgagtttctagagtttcaatagaggctctagtctccatcaagaattggagcaataagtcagcttggatatttaagcctccactaggattttgttgttgcggctgttgttggttttgttggggttgatttctatgctagtagaacccctgttgcttgtgcccataattattattttgagaataattcccaatggcttttgcttcatccattggcagactattcacatgtaccaggcattcctcataggggtgagggcctccacaaagctcacaaactacttgagcctgttttgcctgcacagctatcagtttcgtaagggcctttacctgggctgtcagttttgtaatagcatctacctcatgcataccagctaccttcttcgtttgacttctttcagttggccattgctgattattcatggccatctcttctagcaaatcatatgcctcgtttgcacttttcctcataaatgccccgccagctgcggcatctataagtgttctagtattaccaatcagcccgttgtagaagttgtggaccagcatccacttctcaataccatgatgcggacacttcctgatgagatccttgaacctctcccaagcctcatggagagattcattgttcagctgacagaaattattaatttctcctcgcagcttagcagactttgctggaggaaagaacttagacagaaacttcgttgccaaatcagtccatgttgctatagaattctgtggcaaggagatcaaccaactcttggctcgctctctcagcgagaatggaaaa

SEQ ID NO: 363445 - DNA, 844 bp, Cannabis indica
caaaattagagactacgcgatctaatgggtaaggaccaacaaacgacttcatacttgaaaatactttcaagatgagaggggtgaattgtgccgttactttgcccgatcaccaatagtatgagtacttccctcgagtacatggagaggagttgaaactgagcaactagttcaattctcttcatacttgtgatccaaaaaagactacttttagggaagtagccactacaatgctctaaatgaaaactcccacaacaaatcatcccgagatgatctaaatttcattttggagacttcaccagtgttgccttcacaaccccatgatcaagagacaacaataagacccaagtcaactggagtccaagatcgactcgaaagaccaagagacctgcgtgacctcttgaccaagaaaaggatggtggaaatgggagcttttagaggagaccccactcgggtaatagaagctccaactgtgatgcagaacaccacacatggggtcaaccaggcagaattcgacaccttggtagctttagtgaaaggcatcacgactcctaagttgtctgaattcaaacttgatagagagcgatgctcaccgctctctgaacgaatcaaagctctttctatccctccaaagtttaagaaccctttctagaatcaatacaatgggcaaaaagacctgctatctcacatccactacttcaaagtgcagaccgatctacaaggtgtgagagatgatgtcaagtgcagaatcttccctgccacactaacaagcttggctcaacagttgttgttggaatatttattttaccaggatcttagatctactcacaagtatgttgtttaaaca

SEQ ID NO: 363446 - DNA, 513 bp, Cannabis indica
attgtggtataaaacgtagttgtgatgatataagctaactaatattgtattatgataattaacataggttgagtcacaagttgttcatcctaatgagtactttcagtatttcttgaaacttaaaaagcaatgcggaaataagtcgtgcacatatgatgaaagaaatttcgattggtacatcaattcttcttattatttgggaagtcattgatcaagaagttgagattatttttaaaataaggatgaagaaaaacaagaagaaaactcgaatcaaaagaagctagctaagaggcctaattaattaaactttgtttgcatgtaattaaatattattagtactttttttagggtgcgtttggcaataatttttttaatcagttttctattttttttaattagaaaagtaaaaatattttccaaaaacacgttatttaaaactgttttcatttcaattttttaattaagaatcaaaattaaaaataaaagttatagaacatacttttgttttttgtt

SEQ ID NO: 363447 - DNA, 623 bp, Cannabis indica
ctatccggagctcctgtctcgcctcatctccaggaaccggagtcagcacaatgttgggaggggcagtgtgttcctccatgggagagaccccgccatcaagaccgtgggccggagtatcagctctccgtggccgtttgggctcctcctgggcaaccattttgcctttgcgtttgcgaatcagagcaatttcttgctcttcttcaccttcttcaacttcctcaggaagagcccggtgccctccttcaccttcttcaacttcctcagaaaagccccattgcttttcttgaccttctcccgggagcacctcatcatccactaagtcaatagtgtctggaggagcactggaagaaatctttagagggggggccatctgggaagaagtaaagggaggaggagcctcaggagtgtgaaccccggcaagttcggccaaaatggcgtccatggaagcacctgctacaacaaaagaaagaaagcaagtgttagaacatccgtgggaaaccaccaacactcagatatgacaagcaagctagtcctaccctgactctctaattcggccctagcaaagttccgaattttgatgctggcagcatcatctccgagatagctgtccgaaggccggaacc

SEQ ID NO: 363448 - DNA, 525 bp, Cannabis indica
ccaagtaccatttgcaactaaaacattcaactcttctatcattgcagcaagccaaccaggatgagatattgcttcacgaacagttttaggaatagtcatagaatcaagagaagcaataaaagagcaagaagaagaggaaaaatgattataagaaacaaaagaagaaaaggaaaagtacattggcgtttacctttacgtagtgcaatgggaagatcatctttgatttctgaatctaatgacgaagatgcaggtgcaggacatgaaacagaaggtggaggaggggggcacctggggacactataggagatcgagggagtggtagatgtggtggaggtgtagacattgtgggagttatgaccaaggcaggtaaaggaacaagagactcgtcagaacatgtatcaagtccagaggatgtgacagaatataccaccaaatcatcatcttccccctgacgagtaggggtagttgaagatgaaaaataaggtgtattttctacaaaagttacatcaatagaaacaagatatt

SEQ ID NO: 363449 - DNA, 820 bp, Cannabis indica
aatcacgtaatacgcctatgttagttagggtgttacaatccaagcatatgtgaagaggaagaaatcgagatgatagatacttcaccaacatggatgacactaattgtcaagtatctagtggagaacttcctatagacaaaaccaaggcacacaaactcttatactcgatacctcgctacacaatggtcgaggggagattatacaggaggggttattccatgcctttcttacgatgcgtgttaccaatagaagcaaatgaaataatcaaagagattcatgagagcttctgtggagatcatgcgagttggcagagcctatccaagaagattatctgtcaagaatattattggccaacaatcaataaagacacacatgatttcgttaagagatgcgataaatgtcaaaggatttcacatatacctcgcgtaccacctactgagttgagaatgatgatcttgttatacccattagtaatatgggggattgatccaattggggcattacccacagggcgaggaggagcaaagtatgcagttgtggcagtcgacttcttcacaaagtggatagaggtcgaacctctagtttccataacctacaaaaaagttctcgattttgttatcaaaaacatcaattgcctgtttggcattccaattaaaatagtatctgacaatggaactcagtttgatggtgaattatttactgagtgttgtgaaaggaataaaattattaagtgcttctcatcagtgttgagacctcagaaaaatggacaagtaaaatttgttaataaaaccttaaaagatactattaagaagaagttaga

SEQ ID NO: 363450 - DNA, 927 bp, Cannabis indica
ctcttgctgcctggaactgtttcatgaagtccttagataaattttcctaataggtgattgaatgatgggtaaatttgttgaaccagttgctcgctgccgcaactagcaaggtagggaataaaatacaccgtaagttattcgttacattgctggctcgcattatcatgttgaaatttttaaggtgagcgaccggatccgtagtcccatcgtatgatgagacaagggggtttctaaatccctgggggaaatcaacgctcataatgtcagggtgaaaaggcttagactcctcgtctgagtcgtaagcaggcagtttcccgaattccctatcttggtatctcctgaacttgtcctccaactcgatgattcgcaattggataagatcctctagcttttgatctagttgttggcgtaagttaggtttcttctaatttatttgattacgaagatccgaccgttgtggatcatagttacttacagacctcgtccttgagtaactttcagttctagttgtgcccgtactctctcgatcagtacagtgacgagttctatcccctcattttgtagatcaactatgagttcttgtacgtcccgagctagaacttgcctcgtcacgtaccggccttctcctttgggaacagattgatacatgccctctactaggatttgtatgcagcccttccctatctgtacgagaaggatgttgacggtgtctcgatggcaacccacctatcctaggttgagtcctaggatctctctctttaccatgagggatctcctgttacctagtccagggttgcctcctactcgcattcctgcgagaggattctggtaaatcactgattccattaccctaggttgtaaatccctgaggtctctgaggcacttcttgatgatgtgcctgttgggctttgtgccccaaataaaact

SEQ ID NO: 363451 - DNA, 701 bp, Cannabis indica
caattccaagatctatagtggttcaatgaggaattaataagtaggaaatttacttggtaaattctagatctacttattggaagctcagttatataggcccatggtcccctcactatttgagataatactgcttgcagactcagtcaattgattttagttaatcaattataattttaaaattagactatgtcttatttaagaattttcactaagcaagggcttaattgtgaagaaaagaggttttggggtcaatttgataattaagagattttgtatggtctaattaataaattacataaatggcaattttatttagtaattaattataattattaaataaatagttttggcatttataggtttgaattggaaaatatggtattattgaaaagaagaataagtggttgaaataaagtggcaaaaatctaactagaaagaggtcccattaagtgtacgaccaagtgtggatttttgcccaatattttattcttttttaatccatataatttaaccctaagccctacttgaaacactataaaaggaacatgatactctcatctcatccacttgacactttgtcaaattaatgtcaacctgactattcaaccaaacctagatgagagagttccttttatagagatttcacctccttaattgttcttcatcattcgaaccttgagtgaatgagtgccatgcccaca

SEQ ID NO: 363452 - DNA, 505 bp, Cannabis indica
gttctgtgtccctagtctggttccatgtttgggtttgagttcaggtttgggttcaggtccggagtccaggtttggtttgggatccgggtccggctcctaattcgggtctaggtctgatttgcagtctgggtcctggtcctgttaccgttatggatctagatccagtcccggtccactaccaattttggtttgaattttgggtcacaaagtagtggttcgggttcacttttgggtttaggactcagttcaggtccgagtgtgggttcgactccttgtcagggttcgggtccagggctgggtgccaaatcaaaacaccgactacttgttttgtccaagcactgggtccagatccggatcccctctcgggtccctgtttggttccaattctggtgccgggtcacgagctgggtgtgaggttcaagttcgggtctaggtcaggtactaggtcccagtcctagttctgtttcccaagtccctatcatgattctgggtccaggtcccggtt

SEQ ID NO: 363453 - DNA, 614 bp, Cannabis indica
ttttttaaatacaacattaataatgacgacattgtcgtcgataatgggagcggattattaaaaaaatgacgataatgttgtcattgatatttaatattgccaacgacttaaaatgtcgttgttgataatctttttttgccgacgaacttttcctaacaactttttaccaacgaaatgtcaccattgataggcattactaacgaaaaggggcatttcactcacgaaatttgtcctcactgatgcccatgattcttgtagtaccattacagaacacttaaaacttgtaaaaccagattcaaacttgtgaaacccttaaaacaagtttcgaacctataaactctgtgaaaccagtttcgaccctattaaaaatcataacaaaatctgtgatgaaccataacaaaacttgtgaactattacaaaatcataacaaaacctttaaaattagtttcgaccatataaaaagggaaatttgaatttctatgcatgcattaggggataattttttccctaaactaatagttttctatattgaaaatatatgatcacttttccaaaaccctaaaaatacccctctcaaaaactcaagcccttctctctccttccctcaaactctc

SEQ ID NO: 363454 - DNA, 859 bp, Cannabis indica
tccacattactagagcggtcattacaataaatttcaaaatattatagttagaatatctataagaaaatatctaggttaattttaaatttattaattatttaattcatccgataagattattttagtataatatttcaaattgaaaagataatgctatctttgaaatttaaaatatactcaatattataatatctaaccttataattaaataataataaatattaaaaaaattaaaaccaaaccataacttaaaatataaaataatcaatttttaaatttaaacctcaaaatagcaaaattaataataatctattaaaattaaatattattaatttacaaaattgatatttatgtttaagtatattaaaaataatattttattttgaaattagggtttgaaaaattcgaaaaatctaaaatttgttgaaaaaattcacaaaaatcgaatctttggtgttggacccaggaaggctgcatgtgtagctcaagaaaggctgtaagcagccacggatgcacgcgcataggggctcctgggaacaaattcgcgtgcgcataggggctcatgggaaaaaaattccacatggatgaccctgctattagggtgttacgtatgcatcatcgtgtctaaattggggtggcacgccgagttcagacaaaaaatgtctggtgcatccacgcgtgtctggcttccttgttcgaagcctggtgcgtgcgattgatcaccatgtgcatcccattttcaaaactttttcaatttttatcggaatcgtgttccgtaaatatcaaagttgcttaatttttcacaaggaatccaattaaattatttttagaatacaaataaaataattttcatggaaaa

SEQ ID NO: 363455 - DNA, 868 bp, Cannabis indica
ctggtctttgtgatctgaattccatttctaaactctatatcctagagtataggtccaattctcttttctttcttcttcttttttgacaaacacttgagctctttcatcgaattcactatgttttttacagggcgaccctgcaagtcatcccacagctcgcctccagctctcgagagatcagtcgtaatccccgcttgagagcagtaagttgtatactgtcggttcaagtttcttgcagcaactatactgaaacgacttaagtaggccttaagtgtctcgccatgttgctagctgctttatgttagtaagagaagacgcttcaggtcaccggtctcttgctccctgagactgtttcttgaaatctttagacaactgttcccaagaagtaattgagtaatgggtgaatttattgaaccagctgatcgctgccccagtcaacgaggtgggaaataaaatataacgtaagttgtttgtaatattgctggctcgcattattgtgttgaagttgttgaggtgagtgaccggatttgtagtcccatcgtatgacaagacgtgagggtttttaaatccataggggaattcagcgctcataatgtctagatggaaaggctcgggttcttcgtatgagtcataaccaagctgtttccgatattccctatcttggtatctcttgaatttatcttccaactcaatgattcgcaattggaaaacaacacacaaaaccaaccaggaggcaggagacagctcatgaagacccccaaaacactcaggaggagcaacctgggaaaactggggatgttcctgaagatgaacaaccaagtgatcaggcacctcgtcaagaagtgcctcagagaccccggggatttac

SEQ ID NO: 363456 - DNA, 580 bp, Cannabis indica
aatttggtttttacggaactcaattttgataaaaattgagaatgttatggaagtttgaaaatttgggtgccatgggtgtcgaagcttggtgcacacacgcaccaggagcttcggacaagacacctacacacgcgcatgtctgggatgcatcgtgtctgaagacacggaatgcacgcctttagacacgcttgaggctgcattcacgctgagaggaccctgcatccacccacgtttcatgcacaagggatgctgcaactgctcccgtccacgcgcgcccaaggctatttgcagcctatctgggctgcacgtgcagcctcctgtgcagccaactccaaaatgcgattttcatgggatttctttcccaatttcgaatttttgcatttttcaaaccctaaaattaaagtaaaatattatttttaatatatttaaacttaaatatcaattttaaattattaataatatctattttttaatagattataattaatctttgatattttgaggtttaaatttaaaaattgattattttattttttaaattattgtcagatttgaaaatttgttaatttctttaatattt

SEQ ID NO: 363457 - DNA, 273 bp, Cannabis indica
aagcccacctagctaaggaatgagcaactctattgctatctctactaacatatctaatctcaatacagtcatctaacaagtaagaacagagtatatccttcaattgcaccccccaatccgttcgagaagccttcctggaaagcagatggttgagagcagttagattgtcagatgtgaggtaaaatggatttgtgttcatcttgtggctcagataaaggcccaatctgagagccatacatttagccataagaactgtgttgggttttatgccct

SEQ ID NO: 363458 - DNA, 875 bp, Cannabis indica
cgagcatttgcaagtcatcattgcgagcccgcatatagttggagatttgggcaaagctcagaagaggtatgctcgaaccttacagcacgagcaaaaagaagtggtcctggccgtagaagaaaggcaaccaaaaataccacgagtaggggaacccactataacattcaatgaagaagatgttgtaaaggttcgttccgcaatgatccattagttgtggaagtgcagatagctaacgaaatagtggcgcgaactatgatagacaatggagcctcagtaaatatcctgctcaaaacaccatatgaaaaaatggggctccaactcaaagatctgatgccctgcctccagcccgtatacggttttttcggccagagtgttgcacctttagggcaaattcgcctacccctcactgttgggcaagctccaaaatgcataactgtgatggcacaatttttggtactggatattccattagcctttaatgtcacgttgggccggccaaccttatatgacttaaaagctgttacatcgatattccattcgtacgtcaagttcccaacaacgaatgaggtaagatgcctgagagggaatctgttgggattttatgccctaaaataaaacccatttcaatctaatctgatttgttatcaatagaagattagaagtcatttatgtttacatgtagttttcatgtttatggtttaatgtgtacaaaatctgttaaatctagaacatatagttattcacaattacagtgttgtcaacacagtggaaggtaattgtgattatatgcttcaaaagataatgtcccttatttcatcagtgcactagatttacactgatgtgatagtcagagataaagtatacttacaccttgg

SEQ ID NO: 363459 - DNA, 693 bp, Cannabis indica
aaatttatactatggaaaataaattttattcttcagatcttcctaaagtataattttataggcaaaagggtaactgtacataaaggaaccttagacgcctcggcttctcgccttaaaagcgaatataggaaatcaaaagtaatcgagtgcaaccgtcatccatggagagagaaatttggaatttcagaatactaattgtcagagcattaattagccgaaaatcgaagggacccccaatcagcttcacatcgagtctcgaacgatcatgctcgacacgtgtccccatccaaaggcagagcgagcacggaacctcaacctcagaaggtcccgagcagacttgggggccaaatgttatccaaaatttggcactttgatgtggcatcacgagaatggtgacgcgtggagtccacttggagcatctgctcggaacgataagctgagtaggacgcctccctggcacattcagaatgaaatattcaacaagccgtgcagggcgaccaattaatagttagcgaattcagcttgacacatcacgagtcatcagctcaatccccacaactcaaggatcaacttacatggatgtagcacacacacgatcctactataagtgtattcagtctcaatcccacgatccttgcattcagcattgatcacgcgatctttctgtttatgcacattgtaacgagagaggaa

SEQ ID NO: 363460 - DNA, 511 bp, Cannabis indica
agtgtcgtactgattagagaggaaaacaacatcacgtctattacatcagtaaaagacccattgaggcttaaggtcgatatccactgatagaaaagctcacttactgcccgattctagcaacaagaaagttgaggccctattttcaagctcatcctgttcgggtatacactgaccaaccgctgcgccagatattgcaaaaactggacacctctagacggttactcaagtgggcggtagagttgggttagtatgagattatctttcaaccccaaatagcaattaaaggtcaggctttagcggattttgtagttgaatgtacgggtaaagaagagagcgttctagaaaactatcccgagccagtataaataccccaaccaagtaacagttaagacaagccgacttggaaactacatgtggacaggtcggctacagatcaactatccggtccaggaattgcccttgtaacacctggggggcaacacatgcatcctgtagtcaaatttggatttaa

SEQ ID NO: 363461 - DNA, 602 bp, Cannabis indica
tgatgagctaccaactttaagtttgcaattgctcgtttttcttcgatttcatcaagtgattctgcaaggagtatgtgattggtaccttggttgtacgtcaaccttctgtgggatggtggctcgagttcgacgggcagcatagcttcataaccgtacgccattgagaatggtgtctgaccgattgctattttttctgttgtacggtatgaccatagaacttcggggagttcttccggccaatttcttttggcatctttaagtttcttctttagtgtttccttcaaggtcttgttgactgcttcaacttgaccatttgcttggggatgggccactgcggagaagcttttgatgatgccatggttcgtgcagaaatcagtgaaagattgactgtcgaactgcttgccattgtccgaaactattttgtacggtagtccgaaccggcatatgatgttcttcactataaagtcttgaaccttctttgatgtgatagttgcgagtggttcggcttcagtccatttagtaaagtagtcgactgctaccactgcgtactgcactccgcctttacctttaggtaattgtctgattaggtcaattccctagat

SEQ ID NO: 363462 - DNA, 1316 bp, Cannabis indica
atttttcaaatttatatttatattttaatgtcaaataagtccaattttatataattaaataaataaataaataaaaatataaaatatctaaaccttataagtttaaatagaataataaataattaaatttaaaaaatccataaagcaaatttgtagaagattattaattttcaaattaaagtcttttaaatatctaaaattaattaaattaaaaataattaatttatctgataattagttttgaaattttaaaataaaaaatctaacacaaaatctacaaaaaatcaaaattttaattccatgaaaaaatgacaaaatttgaaaaattgaaaaaaatggtggaaatcaaacagtgcattgcataatgtccacgcgcgcttgaggggggactgctgaggaattaggctacttgcagcctcatttggagcgcaggggctcgttcagacagcatgttgtccgagaaaactcggacatgtgtgtctaaaatggggattttgtctgagccagatgcgtgagcgtttgattccgcgcgtgcatgaagggtgaatcctagccaaaattttcaaatcttcaaaatatcataactttttcaattttaatcaaaatttagttatgtaaaaggttaatttgcttaatttttaaccaattatccaaataaaataatatcatatcaaaatatcaaattattttttttatagaaaatgtcgtaataacacaatcaatcattaaaatcacataaactaacatgaacacatcaaaatcaactaaatatcgttttaaaagtcatatttcatgaaaataaattattaccatagctctaaggccagttgttgaaaatattttataaggatctagatttaatatgttggattataattctataatctaacatcctaaatatgaatgtcctaaaaataatgaattaaacacattaagttatagaaaatattacattaatggcagcagaataatatgactccttcctttcagatctctaacccttgatccattctgttgcagagtatgatcaagatctgaacctaatttctcattcaagtgagaaaagactacataatctttcacactatcttagtattttcttgaattgtgtggataattactcattcactatagagttcgaaatattcaagaagaagaggaagagaattcgaataataaagagatttgtttattttctatttgtctaacaaaaggagccaaaataatacttttgaaatatgagttataatattctatttatatggtagcttttagggttaggtttttaaattaaaatagaataaaaaagataaaaa

SEQ ID NO: 363463 - DNA, 996 bp, Cannabis indica
ctatgggctcaagtaggctccaaggtagtgaaatctcaggtttgattcctacatgatcaagataggattcatcaaaagtaagtatgatccctgtgtctatttcaatgatcacatttacttattgccatatgtagatgatattctaatggttggaaaggaaaaatcaaggttgaatgatctcaaggtaaagttgaatgaagagtttgaaatgaaagaccttggaaatgccaaaagaattctgggaattgatatacacaggcctactcaaaattgtatcactctgtcacaaagcaactacctgcaaaaggtcctgcacatgtttggtatggataaatgcaagccagttcctaccccttttgctcaacattttaaactatcagcatctcagtctccaaacagtgaaactgggagaatcaagatgatcagaatcccatatgccagctatgttgggagcgtaatatactcaatggtatgcaccaaaccagatctagcacatgccatgattgttgttagcaggtatatctctgatccgggtacagaacattgggaagcattaaaatggattatgaggtatgtgaagggcacactaaacactagtattgtgttcaattgtgaatacaaatacaaagaagaggtcgctggctatattgactcagactttgctgtaaatatagacactagaaaaagctgcacaggttttgtgttcactgtgttgggaagttgtgtaagttagaagtctaatctgtagaaagttgttgcaatgtcatccatagaggctgaatatatgactgctactgaggcaattaaggaggctatctagttgaagggattaacaggtgatttgggattcaactcagaggatattgttgtccattgtgacaactgttgtcgagtgaatttcgcaacaccaaaaggtactatttaattgatataaaagataatttttagggaaatgacaagtgcgagtattcaacctagaatggcgagtactcgact

SEQ ID NO: 363464 - DNA, 592 bp, Cannabis indica
tttcatcacttccctgccagttaccataatctaacccactctctcgatattatcattatattttgaatttcaatcacttcacttcctcttcttcatttttctgatcatcgagttcttactcttttcttttctgttttttttttctgcttgttgtttctgcgatttttttttattgtttttgagtaatggttgttactcgatctcgttcgagttcattgtccccttctcctaagaaagccaaaaaaaagtctattaaagaatctaaacccaaatcagttgctcaaacttcttcaaaaccccctaaccagaaattcaaagttgtggttgttgttggtgagccttcatctggtgatgctaggaaagctaagaggaagaggattgataatgatgatgattttgtttctgttcgtcctagaaaggtatttttgaattttttatttttgtatttttcttgttgatctgctgttttcatgttgttgatcattttttatttgaatgttattttgtttgtttattatttgtttatttctttaattttttgggtttagggttttttctatgttgtttttatgttgtgggtttcaatctgatt

SEQ ID NO: 363465 - DNA, 799 bp, Cannabis indica
aaattgtttctattttcaatgtgagttgttcttatttttttttataatagttgtttccatttcacatatatgatgttaaatgctagttgtttctattttacaaactatagttttcatttcgtgattaaattgtttctattttttgaggttaaatgctagttgtttccatttaataaactatagtttttatttcaagattaaatgccagttgttttcatctaacataaatgagattaaatgctagttgtttccgtttcagaaactattgttttcattttgatgaggttatattgtttccatttttcgagattaaattctttctaatttcaatgttagttgtttctattttttatgacatttgttttaatttcaaatatacgaggttaaattctagttgttttcattttctgttatatttatttccatttcacatatatgatgttacatgctagttgtttccatttgacatatatgatgttacatgctagttgtttccatttcgaggttaaatggtttctatttttcgagattaaattgttttcatttttgaggttaaattgtttctataatttcaatgtgagttgtttctattttttttataatagttgtttccatttcacatatatgaggttaaatactagttgtttctattttacaaactatagtttctatttcgtgattaaattgtttccagtttttgagattaaatgctagttgtttccattatacaaattatagtttgtatttcaaagttaaatgatttctattttttgagattaaatgctagttgtttctattt

SEQ ID NO: 363466 - DNA, 514 bp, Cannabis indica
ttttctaacttatatccttaatatagggtgagctcgtttcagcttatgaaaaaagagccagtactcctgacgctggacctgttgaggagattaaagtgagagtactcactaatgtacttagtgaaaggcgtggtataaatcgaggagtggggagaaaaataaggggataatcttcgtcgcggcgcacacaacctactcccactcaagatatgcctatggatccaacattgagcgtcaacttgaaaaattgaaaagaacaatgttgtggatgtctcaaaggttgggacctgatttttgtctacctactgaggaggagttgttcccaatgccaatgcctccaacacagatgttccaacctcaaatgtctggaggtgggtctacttcatcttcacagcccgggacttcccaatctcatcaagcgcagcagagtcctattccatttatgtattcttcgtcatcacctcagcaaatgtccccgtttccttggttgtcctcgccaatgtcgcagctgcaa

SEQ ID NO: 363467 - DNA, 1309 bp, Cannabis indica
taaggatgtatgttccgctgacccacagatggtcgatgttcaaaaaaaaaaaatccaatagttaaggctaatgatctaatagaggcattggaaggaatgcgaagatgaccgagatgatttttttttaaagagttttcataggctctgcgccagagatcaccaacactagtagtgcaacttaaggcacataataaaatgtatcaatatctaactaaatactgatgcatagaattgtacctgtctataaatggttaaagaagcagtctgcacacctagttatgaatggaagccaaacctataggaagtaggtaatggcttaggatagttgatgctatactagactgggacaacgcatttcacaaaactcgcttaataagaatgataaaagaatagatctttaaagtactatcctgatggatgttctataagttacacactcctaaggtagaggggaactatgtatgtgaaggctttagatatgaatctgttatagaaatgcgtgccgaatagaatccaagataagaagttaggaagagatctgctaaaattgttgggggtaatagcttatgaaggtatcttgaattcaaagagataaacagagcatcaacaaatattagattaccgaaggaaagttgtaaactttaatctcaaggtcatctacttggtggaggagacaatagagtaaaatgtgcaaggtttcgaaagagacattttcaaaggagaaagacaaagaaggtccaggcacagctagcaatttgggtacaacatgaatgagagactattagagggcaactactcggagtggatcactaatacacaactaagagattgtggatgcagctttgtggtgggtgtacaacaaaataactacagagagtgtattgcgagttcaaaactcgaggaagaggagaaattaacgctcaaaggtgacatccctagattccaaatactcaacgatacaacaacaacggtgtggggtatagctcaatgagaaaggttaggaaagcctcgctcagagacaggagaaaagtgagacgcaattaggaccaaagtaacatatattgaagagttttatggcatggcaggactatacaagttcgtgataagtgttgggattagaaaatgtccatgcaacataagagaattcaaggcacaacataagcaaatggtactacaatccaattatgacttacattatggacaatagtataagtatgttggagtgttatcgtgtaacgccccaatatttttccttattttacaaaatactagttttgatgcattaattaaaaagattcaaagctgtttg

SEQ ID NO: 363468 - DNA, 526 bp, Cannabis indica
tacgtgatatgtaatcaaacctcttgattttaggttatgatcgttgtaaatagattacggtcaactttgtaattaactgcccactatgtaattataaataggggcaaacaagatcaaaaaaggggacgaaaaaactcatacaaaagaggccctgaaaaaccatcagaaatttgaataagagtgactcgtggactatgcagaattctaactgcaaaaccacgtaaaaaaccctgtgttcatatttttacttttatagcttttatttttctatgtgaaatcattacagtgaggctcaaatttggttaacaaaaatctgcattaacagatactatagggtccaacttactcaattgttctagatcaagacctaatcaatgcaatgtgcaataaatcttgtacacctctccctattaggtggtattctggaatgatcctaaagttttattaggaaattaaaacttgctacaagttggattgctcaaatatatattgttcgctacggcactattgttggaattattttacc

SEQ ID NO: 363469 - DNA, 733 bp, Cannabis indica
attaagtagtattttgggataaacacttattggtttaccgttgtagtgacatagggccaagatcatcgggtatagttctccaattggattggttgacatgtatcaacctggattaaaggtaaaaaaattatattgtactgcatagcacgttgtatgtaataccattaatattgttatgaattgatttatattaagatatagttaatattgttatataatgaaaagattgattgcttgagtatcgataatgtgatgatattatgcatgtgatatatgcgctcacctgattaggtgatgcaattttcttagaaatgtacagtgcataggtacaggtgtcaatatcaagggtagatatgggctcacctgattaggtgatgtgattttcctggcgacgtaccggccgtaggtacatgcatcagtgatatatgatgggtaccgagcattggtaggagctcacatgattagctgatacaattttcctagcgacgtactgggagtaggtatatgtgtcagtgacatatgattagtaccaagcgtaggtacgggctcacctgattaggtgatgcaatttttctagcgacatatcgagcgtaggtacgggcgtcagtgatatgaaaatgcctggttatggcctagatcgaaacctttattgggtttcttcctggcaacctatcaggcgtaggtacaggcatcagtgacatatgataagtaccgggcgtaggtacgagctcgt

SEQ ID NO: 363470 - DNA, 647 bp, Cannabis indica
tagtttgcggcatgttatgggcatgttttgtgtttatggggacattggtgttgtatgggacactgtaagccaaatggtccagagagcatatgccaatgggagatagcgaattgggatgacttcaagccttaagagtaagactttgtgttatcaagtttgtcaaatgttagcgagtcatcagaggatgcagtgtttattttgggagatagacttgtgacatagttttgagagccaacacaagcaggagcctgagggctaatttgtggttttgggtgattgttagatcattaaccacatgaaagtagctcagaggagcgagtatgcagtgggtcagtgggaccttttgcataaagtcgtgggtgtgcggtagggccaaagggccaatgacaagaacttcacggagaaatgttgtgcaagagtgcacttggtgctgcattgggtgcagttggcttgcgagcctcatctaggtgggacgcaccaaattttatcctacaatgagaatgtcttgctcgttttccatcaggaggatggtgcgccatagagttggcgtgtgaatttcccagagggaattggtttcagtgaaagcgtgttctgtaggtgtcattgggtacggttggtttgcgaacctcaccccaaagggtgcacca

SEQ ID NO: 363471 - DNA, 532 bp, Cannabis indica
agcatggttagcagattcattgcagaccctggtaaggaacattggtctgctgtgaaatggatactcagatacttgaagggatctatggatattggacttgtttatcacaacaagttcaaagaagaaattgaagtgaatggatatgttgactctgattatgcaggaaacatagacacaagaagatctataactggttatgcattcacagtcctaggtggatgcatcagttggaaatcgaatctacaaaaggtagtggctttgtcatcgactgaagcagaatacatggctgctactgaagccattaaggaagcagtctggctcaagggattcacaaggaattgggattcaaatcagaaagcataacagtgcactgtgataatcaaagtgcactacatttaatgaagaaccccatgttccaggagagatcaaaacacatagatatcaagctacatttcatcaaagatatcattgctgaaaagaaggttagtgcgaagaaaattggaacaaaagagaaccctgcagacatgatgac

SEQ ID NO: 363472 - DNA, 824 bp, Cannabis indica
aaattaaaaaattgtgactaattataaaatatcattcttatgttgtgactaaaaggtccgtggctaaaagtatagtcacaaaaattacaaattgttgtaactaaatgcgtttttagtcacaatacttataaattagtgacaacttgtaactaaatgttatgttttagtcacaagtacgtaatattttgttatgactaaaagtcacatttagtcataaaaaatttatgttgtgactaaaagtagctatttttttgtagaattgagatcaaattgatctaaaatcaactaaatgatattgacttagaaaacatataaagtaagtttatgatattttttccactatcaatattagtccagcccaatgtaaattctatacacccgataaaagtttactttgctaatgacctagaaaagacattctacttatgtaaatgtaagtaaatcacatcgatgattatcacatcagtgtaatccacactactaaaaacatgggctttagagtgggttgtcaaggcctttcagcgtcagttttagtaaaattcgctatcgacactgatccaggcaacgctatatgattaaaaacaactgacgctaaagtgtaccctatgacgttagttatttcataataatcgatgccatatatactctatggcgtcaattatatacaaataaccgacgccatatgcactaataaccgacgttgaaaccttaaaaactgacgccaaacccgtaataattaatttttttcagtttaaaatctatcattatttcataaatttaatttatttgattatatatttattaattcataataaatattattt

SEQ ID NO: 363473 - DNA, 516 bp, Cannabis indica
gcatgactaatccatatatctttagtaaaaataatgacaaagagatagagatagagatgaaggtgatagtgaagaaaataaacattaatattacttttattaatttttacacatagggagagcatgactaaacctatatatcatttaacaaaaagtaaataaaaatgaacataaaagataaaaatgagcaatactaccattactataatcactaaataaaaatatatagaaagagcatgactaagtctatatatatatatactagatgaagattacgtggcgagccacgtaaatattagttttatttaagttctagtggtttttgtttaagaattcggtaactaattgtaatttttaaacgatttgttttaattataaaaataaatttgctaagaatggcataattgtgtgtataaatctatgatatacacattgttattaataataaacagtaagtttatctcaatttatttatactcatatagtaattatccttactgtgatgaaataatttat

SEQ ID NO: 363474 - DNA, 560 bp, Cannabis indica
ataaatttaaaataaaggcaatccactaatattatattgcattcatctgctctgcttctcattaatccagataattccaacttcaataatattgccaattctagcatgttataatcaaaagtaattagaacatatattcaaatcatacccaaatccaagtcgaagcattgaatcaaaagccaataataaaataaagtcaaataattcatgcattcacaattttcatcaacttaagtttaaccattcgagaacccttacatcaaaacaaactatagtccagaacccaaatcaaatccaaatgccaaaaatcaaactcaataaattcaacaattctaaaactattccaaaatccatattctcaaatcaatctaacaacaaaactcacaaattattacagatttgaagccaagagcaaacacttcaataaaaacacaaatctaaatccaatgtgatgagtgaaaccaaaaaaaaaaaacaaaatcgtctcccatgaaaacttaaatctagaagaggaataatcgagaaagaataggaagaaaaaaaggaaaataagtcttata

SEQ ID NO: 363475 - DNA, 912 bp, Cannabis indica
tataaaatacaaattattgctctaaacatattttattaacttgagattttaattttacttttatatgtggatatgtgtaaagattaatattatatgtttgaaatgaataaaatacattaaaatttgaaaaaaagtagaattttagtgatgtattttaaaaaaaatagtgtatggtgtaatgtaaagtttgaggtaaaataaagaaaatataatttggtgatgtattttgaaaaatagagtagaaaagcttatgagagtgctcttaggtctattttttaagggttttggtttgtatgaagatgtgggcaagataatcatttgcggggaatatgaaatacaaataataggattgtttggaaacttataactgtgtttggttggttagggtgtatggtattatacaatgatgtaggttcgagtcccacgatactcttttttatatttttcccatatactcttaaggccagcctgacaaaagggagaagggaagatagaatattgacggtggggggcttttttccttcaaatacacaatttctaatccctccaaaaatgagagaattgaaaaaaaaaaaaaaaaacgacaaaaaaactatataaaatgactttttatccttcaaaataaaatatatatactatattaaaataataaaataataattttaatatttattttactacctcatccttccaactttatttctaataccaattctttaaaaacttttcttcctttcactttctactcttttttttctttccttaccaaacatagtccttacgtgcattaaaaaaggtccggcctttcgccgtgcctgaccaaccgttatgattttctttatttcaagttgatagtgataatactacttattatttattgaattgaaatctatatatatatatatatatata

SEQ ID NO: 363476 - DNA, 608 bp, Cannabis indica
gatcaaaattcgatggtttgatatttttaaaattaatatttatagttaaatttgtttagtaaccgttcatgggtaatacccattaaaaagtgttctatatatatatattaaataaatacatacaatatgtaaatatctgaccttctaattaaaattaataaataattaaagtttgaaaataaccataatgtcaaattttttgaaaaattaattttcaaatttaaaatctcctaacatttaaaattaattttaattaataataaaattaataaaaattaattttaatctgataattagatttaaaattttaaaataagaatctacataaaaatctaccaaaattcaaattttatttcattgaaaatgattattaaaacttgaaaaaaaaatttaaaaaaggcgaaatcggacagtatgcattgcatagtgtccgcgtgcacaaggatggggggtgtttcttgaacatgccttgtctggatggcgtgtaatccgtgcatcagccccatgaaatacagatccgcacgcacgcatgtaggatttaaaccctagccaaattttaaatcttcaaaaaatcatatctttttcaattttaatccaaattcaattct

SEQ ID NO: 363477 - DNA, 610 bp, Cannabis indica
gtgctctaaaaaaagggacgtattttcttttttggtaagaaaggggaggagtgctttttttatacattatataattatatgtttaaaaaattattaaaaatggatataaatttatatttttaatagtgttaaatataatttaaataacaataaattgtttggcattatttttttttttgaatggaaaattaagttttattaaccatcaaactccgttaccaaacaaggtaacaactcgattggaacattctccaaatcgaagatacaaccagaatgaaaatgagaagctctagcgaagctatgatgtaaagaccgcctatgaataatactttatattattaattatttaaggtttatgtatcaataattaaggaatgcatattttagaaatatattttatatatcatatatatttttatgctgttttatatttaattacctaatttctgtgattgtgttcggaagctgtggaagcgacgttgggcctttagagagtcgcattttatatggtttagaatattttcgggatatcattgttaagttttagcggtattggtattttcggggtttagtaaatgaccaatttacccttgggatgtttttattattt

SEQ ID NO: 363478 - DNA, 567 bp, Cannabis indica
tattaaataaatatataaaatattcataaaaaaatattatttaaacataattatatgattttaaaagctaaaattaaataatgtgtctagctttttattttcacacaagactatcgagattgtgtgggcttttaaaaagattaaaaatgattagatattttatttaaaatatatgtgttatttttgaatatctcaataaatttatcagctaattagtgaaaatcttaactttttcaaataatttgtcaagattggccttgtcaaacaatttgtgagctaactagtgaaaatcttaacttttccaccagaaaactagtactcccatgggcaaagtcacgtagagctaaagtaggacggtcggttcttctaaaattcgactcggttctaaattatttgagacttatacttaaataattattcaattatattatagggcccgtttggtatgcagaactggattgaattagacaggctaatttgtccaatccagtgtttgggcatgtctgggattatttatcccatccagcagggtgggataaataatcccatgcaggtgagttttttttt

SEQ ID NO: 363479 - DNA, 785 bp, Cannabis indica
ttggaatttgcttgagagcatagcttttgaactgtgcgagtagatcgtgtattttgctcagataaactatcatcttttcctcccgagccttgtactcttcggatacatgatttaccaccagctgtgaatcgctgttgatctcaatgtgctcggccttcatctcctgggctagttttaggccggtgatcaaaacttcatattcgacctcattattagatgttttgaatccaaatttgactacaacgtacaagtgttgccccctatgcgtgaaaagggcgattcctgcacccgatagttgatctatagctgacccgtccacatgtagctttcaagtcggcttgtcttcactaatactcgactgaagcatttgtaatggctctaggttactttttcaaatgctctcttctttacccgtacattaaactataaaatctaccaaggcctgacccttaattgttgttcgtgttgaaaaataatctcatactggcccaactccaccacccatttgagcaactgtccagaggcgttcggtttttgcaatatttggcgtaatggttggtcaatgtatacccgaacaggatgagcttgaaagtagagtctttgctttctcgttgctaggattaggcaataagtgagtttttctatcaatggataccgcctttctgcctcaatgagtcttttactgatgtaatagacctggtgttggatattgttttcttctctgatcaatacgacacttacaacatgttctgtgacagccaggtgtattccaagttcttctccgt

SEQ ID NO: 363480 - DNA, 615 bp, Cannabis indica
tgtgagatttactacttgattgcgtatacttgtgtagtgtttaaaattatagcaacaaaggcactccatgtagtcgaactatattgtctacataaagtcgagctagcctagtaagcttgcaatccttttttattggaaaaaaaaaagagcagacttagtcaaacgatcaacaatcacccaaacagggtcatgctttaaaggtgtcaatggcaacccagtaacaaagtccattttaatcttatcctacttccattttggtataggtaaatgttgaagtaaacctgaaggtctctgatgctcaacctttacttgctgacaaactatacacttagctacaaagctagccacatctcttttcatacctttccaccaatattatctcttcaaatcttagtacatctttgtacttccaggatagacagcaaacttggatctatgggcctcaatcaaaatggactccttaagatcagggatatctgcaacacctagtcttcccatatggtatatgtaccctttacaattaactgtctacccatctagttgctcaccatcctggattcggttccaaataatcttagcttttcatcttgccactgacgttgcttaacttgttga

SEQ ID NO: 363481 - DNA, 517 bp, Cannabis indica
tgtagctggccctaagcactgtgggtgaccgaccacattgattaccttgggatggtccttcttcggcttcccgaggggcgttgttctaaagataatgcacccgagccacacaatcttgagcttcctcgttggctgggtcgggaaccaattgccaagaagaatacttgggatatttataatcactagtaaactccttatcagttaggagatccacagaccttaagttgacctcattcaaaataaactcagatgatagaagaccaaattgaagacctagtaggagcttgcgtcgctcggccatctcaggagtcagaattggtctatcaaaaacaaaggcaaaattaagatcaagaaaagtagagaaaaaagatatggaataatttcaccaagtcatacacaaaaattacttacgtattatgcaaaaggtggttgtgtcgattggggaaagaccagtcatcctgaagaattcgtctttaaagggagttttatttggtaaatccacaatgatcttacgatc

SEQ ID NO: 363482 - DNA, 821 bp, Cannabis indica
gaaacacttagaagaatacaaaatagtttaatttaatccggttattaaataaataattctgaaaattttatgatttaagttaggggttttttttatttttacacttcaaaactagtttttttttttttttttgttatttttacgaaattctacatagaaactcctattgcaactagcgctgcaacctaaattgcaacaaaaaatcgtatagaaacccctattgcaactagcgctgcaaccactttaaaaacccaaaccgtaaatttgaaaaaaaaaaagttaaaaaaatagtatatggggtaattcccctttaagttaatctaaaattaaataaaattaatttaacttcaattaatttttctatatttagtaaaaattcgaaataaagttaaatatcttaaaattttaatctaatttatggtgttctaaaattaataaagaattaattttcatcataattaaatgtctaaaaaaatatctaatatttaagtatcttgagttttagttaagcttaaatatcaattttttttatcttttttatttaattaaactattttaaatacaaattagtttaactctgaaacaaattatctagaaatatttcatttaactaaatatagatttttgtaaattaattaaaataatctattgaaaaaattaatttcaaatatttttttgaattaattatgttgctactcaattttttaattagattaaactaatataattagtctaatacaattatttaaacaaggcaaatgtgtctttcataattgggattgttcatgtgaaggatgattgtgttcagtatgttgtaccca

SEQ ID NO: 363483 - DNA, 505 bp, Cannabis indica
aagattgaagcggtacgagactgacctcgacctaagttagcaactgaagttagaagttttctggggttggcaaggtattatagaaggtttgttgagggttttgcaaagatttctacacccttaacagagttgactcgaaagaactgcaagttcatttggaatgataagtgtgaaagcagtttccaggaactgaagcaaaggttaattaccactcctgtgctaactttaccggttagtgatgaaaagtttgtgatttattgtgatgtgtccaaacaagggctaggttgtgttcttatgaattcagggaaagtgattgcttatgcatccaggcaatttaaagagtatgaacaacggtatcctacccatgatattgaactggcagcaactgtttttgcattaaaactctggcttcattatctttatggtaaaaagtgtgagatctacaccgatcataaaagcctcaagtactttttcactcagaaggatttaaatatgaggcaacgac

SEQ ID NO: 363484 - DNA, 619 bp, Cannabis indica
tccagctcgcccaggtacccgtcctggtcaagagttcgaaggcgcacctccgtaattttgaacggaggatttacccacctggcgcccaaggcaccctacctcctatgaggaaccgccgcagtaagctcctcactgacgtagtcaacgccctccaccaagacgtctccatcactatcgactggctgcccagcctcgttgtacttcccgtaatttgggggttcaacctcttcctctcccttcgcctcggaaggactgcccaggtgcgcatcgtccagttcctcaacctcctggacctcagtgtccccctcacgatcctcctccatcgggacagccgaatcctgttcggcactggggagagtggcaagccagccacttgaggatcagtagcgtcagtcagacgcgtggttttctttgtacgagccatcatcctatggctaggtacaaggtaagaagaatttccttcactagaaggaggacaagaacaaagacgagggtgatcctcgtgcaaaagttgaagcgaatcctggtcgatctcatgtccaagttcccaagactcacctgagttcatctacaaaagacaacacacgagatgagtgttggacggaatatcgaacgataa

SEQ ID NO: 363485 - DNA, 629 bp, Cannabis indica
acccttcttcccgaagcgcctaatacctttcattggtgaaattcgtaggaaaacgtgttcccctgcctgaaatatgacatctctacgcttcggatcatcataacttttctgcctacattgagaagtaagcatccgagccttggtcttttcaatagcttcattggtcctctgaactaattctagacccaagtacttcctttcttcagtttcgtcccaatgaataggggagcgacatttcctaccatatagcatttcatagggaaccatacctattgtactctggtagcaatttttgtaggagaactcaattagaggcaagtacttactccacgaaccctcgcaataaatcttcaagtatctgaattgttctttctaactgaccatcagtctaagggtgaaaggttgtgctaaattttaacttggtacctgtagccttctaaagactcatccaaaactttgatgtgaactttggatccctgtctgaaacaatagatttaggagctccatggagacgaactctctcctttacataaagttcagcatattgatcaactgaatatataacttttagtggcacaaagtgagctgattttgtaaacctgtcctttatgacccataccgaatcatac

SEQ ID NO: 363486 - DNA, 509 bp, Cannabis indica
caaaatttgagatcgagctttttgaaggaagaataatttcagtttatggcagggtgcagtgaaagatgtgttggtacaacaagggctcctaaaggcactgcaaggaaagaaacttgagagtatgactgatgaagattgggaagagttacaggcaaaagcggtaagcgctattcgtttaagtttggctcctcaattaaagtattgtgtattgaatggaacatgtctgtctgagttatggaaaaacttaaaaaagctttatatgtcaaaattcctaacaaatagattatatttgaagaagtagttatatgaattaaaattggttgaaggagaagatgttaggaatcatataaatagatttaataagtgcataactcaattgttaagtgtagaggtcgaaattgatgaagaggatcaagctattattttgttggcatcattaccaaaatcatatgagacattagtaactcaacttttggttaaaagactactttcactgtagatgaggtgtc

SEQ ID NO: 363487 - DNA, 579 bp, Cannabis indica
taatttcgaaccctatagtgatagagtacatgcccacgcatagcaagttggtactcaatcatagtgtgtaagactgtaaagaattcaattaattgaaggagaatggggctcagatcttggtgatactctgctacagaaaggatacaagggttagagatctgagtggaaggagtcatttaattccactacaactaatgtaaagtttcttgaactttatatgtgtttaaattctattattttagagattcatatttaggatgttaaataacatacatggttataaatctagatcctggtaaaataatccccaacaactagtatcagaaccatgttaatgatttactttcatgaaatatggatttaaaacgatatttgtgttcatttggatatgttcatgttagtttatgtgcatatttgatgattgtatagaaatcacaatttttgatcataattttttttatttcattcaaaaattatttttcttgaaaagtagaggaaaaattaataaatttaagctttcacggaacttaatttggaatttttatgaattagtatgattttttaaagtttgaaaacaaa

SEQ ID NO: 363488 - DNA, 939 bp, Cannabis indica
aattaatcaagattaactgctaatttccaaattaaactaagcgggctttacaattcgagtaacaatgggctcattttcgcacgaccgtgtggctcatgcacactttcgtctctcaaacaactcccgccgagtcatgctcgcaagcatccatgagtgcatccatgcatcaaggctctctagccaagatactcgcactgtccataggttcccactatgataaggcaaatcccaacaccgacgctcaccttgtcacacgtgaccaaggtagcatgtgtggaaagatgccaacactaagccaacgtgcccacgcttctatcatgccccattcgatactgtctgaacagtctccctagttgcccaaggacttccattcatccatggaccaatcctcaaggcgccatgactccacgcatgttagcaggccctcgagacaagccacaaaactagtagcatacgctagacctctgtccctttccaacatggggcattcgtcccatgcacgtatacaaactagcccacgagtgactacccatgtcatctcgtgttgagactcgtggccaaggcgcaccacaatgtctcttggaagtttacgccatgtcccgtgcaagcggcataccggtaagccaatggaaacgtacctgttagcctctggcagcttcttaaacgcactaccgggtcggctagataatgtccatgagtactcaaactcatggagacatatgagtcccctcgtggtcctcatatgcctgtcctactagccccgcttactagcagtatctcacttagcaccaaggtgcaaggggtgttggagagctgacaccagagtacccccttaaagtgttagaaatttattttacgaggatcttagatctactcacaagtatgttgttcaacaccctaaatatgaactttctaaaatgataaattaaacacatataa

SEQ ID NO: 363489 - DNA, 621 bp, Cannabis indica
agagtatttgaaaaaataaatgttttgtaaggatgtaaaagtagtgaaaggatagggtaaaaataaaataggaatatttatttaggtgaaataaattgggagaataaaattgatatttaagtgtaagttgtgggagaaaatgaaaattttggctttctgtatggtaatgtatttggctgagatgtaacaaatttaaacagccattttttccctttttgttttttcttctgcaggtacacttggcgtggcttgaatggaggaggggctgacggagagcttgcgtggcgagagctggttcgctgggcgctgacgggctgggaacccacgcgtgcaggctggagagaagaggattccaggtgtcacttgcgcctgcctggggtgagttgcactcgcccatctgggcagttggatcagagcacggacggctcagatcgggtcaaaagtatgaccgaaaatgggccttctaatgggctgatttgattttgcttttaaaattgcattttgaccttaaattcttcacatgttcttcaaattaatatactttttccaccaaatacacctaaaaatttataaaattaattaaaaaactaaaataaaattaaaaataaataccacataaca

SEQ ID NO: 363490 - DNA, 1078 bp, Cannabis indica
tgggtgagtcctctgtccaagatcactgaggcacgcatgatggatttggaccagtctggttatctaggcaaacttgaatgttacatccctgcttcaaatcaccgagccacaaacccgcagaaagggatgtgtgcttggttgggtgctcacaccagacaagggacaatgctgcctttgtacccgtacttcaggaaggtggcagattatttctgcctttgtcgaaccaagttcactgccaagggcattaagtatatgtctgcccttttcatcctctacgccatccagaagtggggtgtgctttctccgcatgaggtcagttggttttttgactagaagtctacccccaagaaaagtaggtcggggtacttctacttctctcagccagatttaaagtggttgacaggcaccgtggacaaggtcgtgagaaaacttgggggttttgttgactagtattattttgtggaaggcatggacgccacttatactcaatttcagcagatctcgatatattaccgtccaccctttacactggctcttagggacagagctcagaggattgttcaactgtcggatgttgttcaaaatatcaccttgttaacctcggaggcgaactttgtggggtacgggctttatccagcatactttatacctcaccctgtgaaggggaggaagaagaagtctagtgttggttgggctaagagagctgagcaggagaaggagctcattcaattgaagcgtgaggctaagttgaagggaggtgcaagggccaagcagtttgatgaggagtattcttagcaggagaaggagcttattcaacttaagcgcgaggctaagttgaagggaggcgccaaagtcgaacaatatgctcaagaacattctgagcaggaggatgaggctgaggaagagtaggaaaggccgctcaagaggaagaagactctcccgtccagacaaaggcccatcaaacatacaatctagatcagggagcccgacctacctgctcggccatccacccctgtagaaggagaggggaaagccatcgttgaggtgcaagaagactcgtcggatgacgatgccccat

SEQ ID NO: 363491 - DNA, 1337 bp, Cannabis indica
ctgggtccaggactgggtctgaacctgagttctgggctaggttcggtctagttttgagtccgagtcaaggtccaagtcacggtcgcggtccttttccatggtcctgatcacgttctttttcaagtttaggttttgggtcctaggtttgggtcagggtctaggtccttttccaacttcgggtccttgtccgagtccatgatcaagacatcgactatgggtcgtgtccaagccccggttctctaatcattggacaagatctgcatcccaatcacgggtcctagtcttttttcaattcatgtcctaggtcagggtctaggtttgggtctagctccaggaccgagactggggtccagttctgggtcccgagtcatgttcaatgttctggtctgaattcaagtctaggttcgtgtcttgagtcccagtttgggtttggatttagattttggacccaatcccagagtcggtctttgaccgagtctgggtccaggtccggttacagttttggctctatgttcatgtccttgtcatggtcttgttcttgggtcctgatctgcttctagtttcgattccagttttaagtcacggggtacgggttttggtcgagtttggatctgagtctgggttcgggtcgtgatttgggtctgaggcaaggtttaggttaaggtttcggtctcaggtagggttcgaggctgggtctgggcccaggtcccggtcccgttcaaagatcttggtccctttctaattcatgtttcgatttttgttcctgagtgtgggtctgggtcttcgtatgtgtccaggtcttagtttgagtttgagtttgggttcgagttctagtctatatccttgatccagacactgagtactggtcgggtccaagcatcgagtcccggatcccaggttccgaggtgggtcctatgtccaggtttgggtctggggtcgagtccttgatcccgatccaagttctgagaccaatttctggtcctagttttggggcccaattcccaggtctgggtcccccatctatgttcaggtcctaggtttcggtccgaatccaagttcgtgttcaggttcgggttcgggttcggtccgagtttaggtcgcgatttgggttagggtccgagtatgggtcacagtcccattctaggtctgggcttcgagtcccaagtctcagtctggttcttgggtccggagtttggccccgttgtccaggttcgggtctgagtaccgtgttccaattttggtctgggttccgtggcttaagtccaggtcccccatctaggtttgagtcctaggatccggtttgggtcctgtcccagtttcaatttcgattcagtgtc

SEQ ID NO: 363492 - DNA, 589 bp, Cannabis indica
agtgaccgagcagacgtatgactcttggtcacttgtcttttacaaatatatcgtttatctatttggtattttgggtttgaccaaaccttttgtacgcactgtatggtaaattagaaacatgctgataatttcgactcaatctgaattttgaaataactatctttattcatttattgatcgaaaagtgtatttgttaccgtagtaacttacatcagagctatttgatccaatctgatcttttagcttaacatgagataaaacaaattgcagacataagaaactgtactttaaaatggtcacctgacctgagtactttgtttcttttatcaaaacctttgagcgtagtccgcccagcaggccatttacctaaaagtaaatgttcattcagtacttaaagtggtcatccaacttggtactttactggtagtattttcttaaatgttccacattccaatactgttgtactagaatgagttgtattatacttacctaatttgtatgctccggagtcgagaacttcgaccacttgatatggtcattcccagttaggtcaaagtacacctgctgtactgtcttttgtgtttaggaa

SEQ ID NO: 363493 - DNA, 808 bp, Cannabis indica
aaacaatcattataaaaaaaattatacattcttcaacatacttgtccattacatctataaatataccaaaaccaacaacaaagcaaccacagagattaaagagacaccaaataactagtattattacataatgtatccataaacaaacgtatgtatcataacatatgatacaattttattttttcactcaaatcaaagaagtattattacgtagtattagtaactaaataaaattataatatggagagtaaaacatatgttatatatatacactattacagtagcaaattacattagtcaaaatttatattcaaacaacagtagttaagaattagtttatattcaaatttatttttatttaaattataatcaacatactattcaaagatcatagcaaaaacttacagtaaaaaaaataactaaataatatataaaaaaaaataaataaatatgtaaacagtaggaaaataaaaactaaaactttatatacacaaaaaaatattatatttatcagaacaaatattatatttatcagaaaaaataaggatgagatatgaagaaaatggcaaagtccaaagaaatgaagagctcactttggggatttctcgatgaaatccataagaacctgagacactcaatattaaaacataaatacatacatttctaaacttatgcagttgggcctacgaaggctagcctgagtagaaaggagacaccacaataaagatggagcccataagagaacatacatacatacatacatgaactagaacacattcacagaaaaaaaaattgatttcatgttctt

SEQ ID NO: 363494 - DNA, 599 bp, Cannabis indica
gaaaagtactataaataaaattgaaaattaaattaggcgttttcctgaaaaattaccagtcatgatatatttaagagtattgctattaggcacgtatttagcattttttcgacaagttttgttgtgattggctagcaatattttttaaaagttattatattaaattatatgagacccgatacttaattagaccgatagcgatattaacacataagaaaatgttaagcattattagtatcctttaaaatttctcgatatttaattatactaatttatgttatgtacaaatttatataaaataagcttaaacgtacgttgagatggaacgttttaaaagagttgtaccacaagcatgtcaatatatcatcagaaaattttggctcaaataaaaataataataataatacattatacacgtgtctggttacaatttaaagtatatgttagactttttatttgggcttacattaagttttattggttttattaaaacttgggttgattggatagttctttgctgtattagctcatgttgttggtgatcaattgttaatgggcttagcatctgtgagtaaagtctaggtgaagcagaagtgtgg

SEQ ID NO: 363495 - DNA, 892 bp, Cannabis indica
tctctaaagtccttcagctccttcaactccacagccaagttggccttggactgcaagtccacctggtgcaactcctctagggacttcaccttggcagccatttcgtccatggcctccttagcctcccgaagctcacgcctggccttggcgacgacctcaccctccgccttcaacccctctcgatgcctcgccaccagctcagcctcccttcgttggacctcctctcggagcttcgcctccgcctgggcttccctctgtttagcctcctcctcgagcttcgccttagcaagggcctcccttcgctcagcctcctcctggatcgcttgcctttcagcggacaggtcccacaggatcctcacgacctcatctatgcccccgaattcagacatgatgaagccatgattgactatggtcttggaaaggcggctggtctccgcagtaatctgaaaagggagatgagagtgagatcaaatgccttagacaaaatatcgaggaaaaaaataaaccacaagtacttaccgtagccatggcgttggtgatgtcttgaacctgctagacggagttccaggaggcacaagcggcgtaccgtgtgggcgggaattgagttagatgggagacatactcgttggtcatctttgaggcaaaaggagccaaggtgggcccaaggaaacgttggaaccagtccgtcagcgggtccatgttcaggtcccacgaattctggaaggcctccttgttgagagtgttttgttgttcctctcgtaagaccctcttcaaggcctccacctcagcatgcccccggatgtactcgtcgaggccgtagttgtatttggctatccgaagattctgcctctcctcgtcaccagggaccggagtcaacactatgtcgtgaggc

SEQ ID NO: 363496 - DNA, 1639 bp, Cannabis indica
tggatgccacctccgagattcaagctatagtccttcatggacgcatacgccggttacaaccagatcaagatgcacatcgcggatcaagagtgcactagcttcaggaccgataagggggtatactgctacctggtcatgccttttggactaaagaatgctggtgcaacttaacagagaatggtgaaccggatgtttaaaggccttctgggacgaaatatggaggtatacgtggacgacatgctggtcaagttaaaggcatacgcaagccacgcggatgacctagaagaatgcttcgaagtggtccggagatacggaatgaaacttaacccgaagaagtgcactttcggggtcaaatcgggaaagtttctgggcttcattgtcagtcagcgggggatagaggcaaatccagagaaaatccaagctctcctaagcatgccttcccccaagaaacacaaagatgtgcagagcttaaccggaaaggtggctgccatgagccgttttatctcccgatccacagataagtgcattcccttcttcaacatcttgaaaaaatgccagaaatttgaatggtccgacgagagcaaggaggcattcaaaaaactaaaggagcacatggccaaacctccaatcctatcgaaacccgttctcggagaggacttgttcctatacttggctgtctccaagaatgcgattagcgcggccttagtactgtaagaggaaaaaactcaacatctcgtgtactatgtcagcaagcgcatgataggggcagagacacgatactcggtgatcgagaaattagttttttgcatcctaatggcctcgagaaagctgagaccttacttccaagctcacccaatcaaagtattaaccaaccacccacttcgacaagtcctacaaaagccagaggcgtctgggagacttctcaaatgggccatggagctaagccaatttgatctgcactacatcccccgcacttccataaaagggcaggcgctagcagacttcatcacggagtgccacgaagaagaagctaacgctaacatacccacaccgccagtcgtcccggcatggaaagtagtttgtagatggcgcctccaacgagaatgggtctggagcaggggttgcgatgatatccccgaacggacttcgactccaagcagccctacggtttgaattcacagcctctaacaatgaggccgaatacgaagccctgatagtaagactaagattggcaaaaaccgtgggggccaaaagagtagaagtctacagcgattcgcaactggtagtaaaccaggtgtttgggagaatatcagacacgcggagaaaagatggctgcatatgtggcaatagtccgggaactgctccacgagttcacggactataaagtagaaagaatccccagggaaaagaatgctcacacagactgtttggctaagttagcttcagacagtaaaattgagaaactgcacgcggtacatgtggaacgcctggcggagccaagcatcaaagtcagaaataccatagcaacaattgagcaagagcccagctggatggtccccatcatcgaatacatagagaaaggcgagttgccccaagaaaaggcactatccagacgaatacaatatcaagcgcaccgtta

SEQ ID NO: 363497 - DNA, 542 bp, Cannabis indica
cttcactaaatggacgaaggccgagcccctcatctccataaccagcaagaaagtccttaactttgtcgtcaagaacattatttgtaggtttgaaattcccatgaagatagtatccgataatggaacccaatttgatggcgacttggtcactaaattctgcgagaggactaaaattatcaaaagcttctcgtcagtatccaggcctttggcaaatgtaatagtggaagccgctaataaaaccataaaggatactatcaagaagaagctagacattgccaaaggcagatgggttgacgacctacctcaagtgctctggggccacagaactaccgagaagagagctacgggacacactcctttctctctagcatttggctcggaagcaatgctgccagtggaagtgaatatatcaactcacagaagagagttttataatcaagaagaaaaccatgaacttttaaaattgtccttggatctacttgagaaaaaacaaactgagtcacaaatcaccaacgcagcataccgacactgagttacaagat

SEQ ID NO: 363498 - DNA, 651 bp, Cannabis indica
gacttggcagattaaggagtagaaggatttgcagcagctagatcctcagaaaggtcaatgacctctccaaaagcctccgctcatcctcttccttaaggcgtccgtcatctgccgagacatgtctgcacaaagcaaaaatagcatggttagcaaaaaccaacaaaaaaatacaaagtatggaagccaagaagctgaaaaaagaagcaaagcgcagagtgactgttcgccctgaaagtcaaaactccatcatcacctgacatcgactttatctcagccataacgaccttcccttttccaacataaggatgggatagccgaacaggtgaaatgggctcccttatgcgaatgccgtgttccacgagcctgggcgtagccgggagtttctcttcctcctcaaggagcaacctgctcagcctcagcctcagcctcgacctcatcttcaggattcatggactcctgagcatgcagctctacccgagcacctcccttcaacttagcctcccgcttaagttgaatcagatcattctccttatgagctcgttcaggtcgagcagcagcagacttcctcttcttccctgttccggacttagaagaaaagtcctcagggtagagcccgtactgcaccagatttgcatcggaggtcaactggat

SEQ ID NO: 363499 - DNA, 641 bp, Cannabis indica
gtttgggtcttctgttggcagcctcccaaactagactgaggattggaccatctgcagtatggtctgcttgatctcaaaattttgggcatgaaccaaaggtggccttatataggatctggcccttgtcattttggttacggccattaacctggtcttaacagcacctccacttttaccattgttgtcgacgttgacgttgtcaaccataactacttcttgttcaatctctatggtagctttttccaatcttttccttcttttattctgtctgcaagtattctcaatttcaggattaataggcaatctgatagtttctccttgacgtctcataaactagttgttccagagaaaagagagaaatttgaaacaaacagaattagtactaaaattgaaaagaaaaaaactaaattagaacaaaatttagtttttaataatattacctaacaatccccggcaacggcgccaaacacttattgtggtattttggacatgcaagtatacatatagttaacaagtaatagactcacaaagagtgaggtcgatcccacaaggattgtagttaagtactttaaaattaaacatttacttctttttggctatgtcaaaattaagagaaaattaaatttagaaaacaataaaga

SEQ ID NO: 363500 - DNA, 1378 bp, Cannabis indica
tttaattctctcaatttttaattttttttgaaaaaataaaattcatcatctttattaattgcaatccacattgattacatgattaaaatatggagtaacatcactactcctgataacacgatcggatcaacaactaaataggatgctcgagcatagaaatgagcaacactatttgtagaacgtctaataaaattgacataaacatctcgcaagtcatttaacaacatcttacaatctaaaataatactcccaaagtatgaaaccataggaatagagctacgtaacgattgcaccacagtaagactatcagtttcaatgacaaccttcctccaatctttctttttaacccaactcaatgcctccttaacacccaaagcttccaccatttcgggttgcaacacccctgaccgacaacaggtaaaagcttccaccaatgcaccagtttcatccctaatcacccctacaaagctataagttgcagttcccgaaaaaatggcagcatctacataatcttcaaggtgttttctgctagtttggcccaagtttcagcaccatcgacatcagtaaggaatgcagccgtaggattaaatgttgaatcttgagttcgagtccaatctgggagtaaagcttgagctaagtgaccaacactcgcaacagtaggggacttatcagaccatattacctcatttcgatgtttccaaattgcccaacatgtcattgcgatcaacctccttttctccccatttgcctgctgtagaactgtagcaaaccagttggaaaaagaaccaactgccgtcaaattaacacaagcagccaactgttgccgacacgctttggcaaaagagcaatccaccaagcaatggtagatggtttcatcagttactttgcacacagggcagatgtatcaataggcacatgtttagaacgaagtttggacttcgtaggcagacagtaagtagcagcacgccatgacaagtctttcactttcagaggaacacttagctcccaaagagtattccaaaagacggaattatcatcatgtgcacccaacattttcctcaattgtaagaacttataaatcgattttactaagaaatggcccgagctctcccaactccaataccaaaacatcacataaacgacttgaagacaaggaaatactaagaattaagttagcatccctttcattaaacatatcatgcaccaagtcaacatcccaagccaacatatcagtttccataagtgctttaacattttgatcaataagagcaggattattcgaagttacccttggattatcttcattcggtagccacggatccaacactatattaattcgagaaccatcaccaacactgcatctcgccccttttcaaac

SEQ ID NO: 363501 - DNA, 555 bp, Cannabis indica
tttttttaatttaataattataggccaaaatagtagaaaaaccctccacaaacttagataaatttagtaagagtgattatattgtagctataaatatttttttatgataaataagcccccacaaagtaaaaatcttgggtccgtcactggtgacagaccctgctgtgcaaatccttgggaataaaagggtcccaccaagaaccactcccgagcagcctaacacacagccactactgtgggcaaaggtgtgacttcccctctagctaagatcacaccaggtgtgcaagagactaggaataccagttctgcagctgatcaaagcactcccaacactggaatcccatccacaaccattgcttagaggacggtgggggatgacactgagatttgaaacctccgtgacccccttggactcatggaaggtcatactaatgccttatatcatgaaaagatcatcaattaaaagaaactttgctatagtttatttttcgtaaacattagtaaaaaaaatcttcatttatttctttatttttggctctaggtactgtaataaaa

SEQ ID NO: 363502 - DNA, 857 bp, Cannabis indica
gttgccttatttcttggaattcctcaacttttatgcatcaaggccggatcttagcatgaaagctggtcaatattctgtaggaattaggaagcctcttaattataccttcattacggggctgcctacttaaaagaagaggttaatttgctaactataatagaaattggttttattaatactgtttattaatatttctttgattttttattataaccatttttataatatatttttcatgtttgttatttttatatttttgtttgttaaacttttattaaatgcagtgattgtggagtttttgtgattaagtttgctgatttgttcaccaatgggaagataaatgagattccacgaaatatggctgataagattgcaacttacagagacgatatgactgttagtttatttactcatgcttggagaaaacagattggtgggtatcagactgaagatgatgtttgagtcagaaaggaaaagtcaacgaaactaaaggagaagggaaatgctaaaggcaaaggaaaagaagtttgagaagaggatgtggatcttctggagcagtctttttgtttattttttttttcttttagataactagttttattaatgaatatgatacttaacgatttaaatgtttttgtttcacttttgttattttagatgtgttatttcaaacacactatgttacagttattaatgaaaattgatgttatatcctaaaattagttttatagagtagttttgtgttaaatttttcatattttaaaacctatttttgtaggtaatttattttttaggtaaaactaagtttataatgttgtttattactttattagaaatttgtgtaaagtagttttttt

SEQ ID NO: 363503 - DNA, 652 bp, Cannabis indica
agtagatctaaaatcctggttaaataaattccaacagcgatcacatctttgaacaaaatcatgggcatccttgaatattgagggctaataataacccgactgaaatactttggcagtcgtgtgttgtccaccaaaatggccaccatatggggctgaatgacaatgctccaagatgcttctaacttcatttgcaggcacacatcttcgcattatacgatccagacattgtttgtacaagtatggctcattctaaaaataaaacctactatcatgaatgaactttttgagctgctgtttggtaaaattaggtgggtgggcacctccaactaagtagtttacaatatccacataccatggtacctgtgcttgctccaccaccagcagttgttcgtctgggaatgagtcttgaatttgtaattctccctctcaatggctattgtgagtgttggtttccaacctggatagatggtcccccactttgttttctgtcccttttttgtctcggagttccaaactgaactcttgtagcaacaaaacccaacgtatgagcctcaatttagaatctttcttggctatcaaatacttgatttctgagtggtcagtatacacaatgaccttggtccccacaagatacgatctgaatttttcaaag

SEQ ID NO: 363504 - DNA, 646 bp, Cannabis indica
agaagggaggaggagagatagattagtatattagtggagtccattgcattgaatgaaattaaataatgaattaataaaaaaaataattatacaaaattggttaaatgatacactatatgatggacacgtgacacttggatcgagagaaaattcaggccacgtggctcgagttttatagcatttctcaatcaaaaagcaaatgtcagaaaatagagctgaataaaaaaatattttaatcaatcctagtttaaatatattgcattcaagactacggtattacaatgtatttacttaattagaacaagctattaaatgccctacaaatagggtatttagaaaatttctcacggtaaaagagtcctatatatattagctcattttcataaaagcaaactttaatagtggcatataaagtaattcaaatttaacacatgttaaaaattgtgtcaaatttgacataaaatatatataatattagtcaaattttacactacaataaatataattttttttatttaccttttttgtcacttattaatgtaattaataattttttaacattttatttgtatatttaataaaaaaaaattatatattttcaataaaaatttaatgtttttgttgattgtttttatttctatcaaat

SEQ ID NO: 363505 - DNA, 718 bp, Cannabis indica
ggcattcaaaaagttgaaagaacacatggccaagcctccaatcctgttaaaacccgttcttggagaggacctgttcctatatttggccgtctccgagcacgcggtcagcgctgccctagtccgggaagaagagaaaactcaacatcccgtgtactacgtcagcaagcgcatgataggggcggagacgcggtaccccatcatcgaaaaattagttttctgcctcctgatggcctcaagaaaattaaggccgtacttccaagcacacccaatcaaagtattgaccaatcacccgctccggcaagtcctgcaaaagccagaggcgtccggaaggctcctcaaatgggcaatggagttaagtcaatttgacttacactacataccccgcatctccataaaagggcaagccttggcagacttcatcaccgaatgtaatgaagccgaggcaaccgcgaatgcgccgataccatcggtccccacatggagagtatttgtggacggagcctccaatgaaaacggatccggagcgggggttgcgatgatatccccgaccggacttcgactccaggcagccctacggttcgacttctcagcttcaaacaacgaagccgaatatgaagccttgatagcaggactgagattagcaaaggccgtgggggccaaaagagtagaagtctacagcgactcccaactggttgtaaaccagatatcgggagagtat

SEQ ID NO: 363506 - DNA, 608 bp, Cannabis indica
attttgttaatttttttataaaaaaagacatttattaacttaattattagatttaaggctattttacatcatgatgttttagagtaatgggttccatatttctcctaaaagtgtcgttgaagcttatgtacatagtaatacaatatacaaatcatttataatatgtaggaatttattttaaagaaaaaataagtaaaaattaataagttattaataataaccaaatttaatgtggttgttgtagtcttgtagacataaattcatgtatatgtcaaaatggaatcttgagttaaatataccccataaaaggaaaaaacaactaatttattagtggataaataataagtgctatatgtataatataactatattcatgtgcatgggaagagtatactacacataatgaatctattattcccacatatattataaactaggtgattgttacgtgccaagccacgtagtgttagttttatttaatattttagtttttatttgaattaataattaaaatagtataattatttgaacgatttgttttataaaaataaaatatgtgtgagtatatttagtaagtaaaatatagttgtgttataataatgtatgtt

SEQ ID NO: 363507 - DNA, 759 bp, Cannabis indica
attgttgatcatataaggtacaacaaatgtataatactcaggtggaagactattgagtaggaattgaacatattgttgttttgataaagaaattcccagcatttttgctttctggattttcagatcaaacaaaatcatatgtgacttaatgctctttctaggagacatcttcacatgatgaagttcatttgcaaaggcatgtaaaaagtgagaagagggaggagggtagttcattttgacaccacaaatatcaataaacagaaataaattatttggttcactcaaattcatacacaagttcagaaaataacaattaagtaaacatgcttgcaaaaataccaaaataaaacgtattctattactttccaaggtttccaacaaactgatacaatgtcccgtttaggcgagagtcaaagatgtcattattgaatacagtagtcaactcatctaaaatgaaaaacattctagcaacctttaattcgatcgaaaagagaatctaacgttgtccagtttaggcgagagtcaaggtcattcttatttcctgagcttctaccattgtttcatacttttgtaagtcttactcttagcagccactattgggttggacattactaagaataaaatacttacaaataatacatatctttcaagattctacgaagttcaattgctaatgaacgttcatccattagggatgattacttcacaaaaacaaaaactatgtagaaccaacaatggagattgaatatctttttgatt

SEQ ID NO: 363508 - DNA, 576 bp, Cannabis indica
aataatttccaacattcataacatcaggaccccccaagaaaattggagctactattgtttcaagagcacggaatgcaggagcaccctgctgtcttaaccaccgaatcacttcatcttgttcatttattctggcttgcatttctacaaacatgttttcccaattctgggcatcctgagcagcttggcaggcttgggcaacctgtggcgggttaacattaccccgaccacgtgccctgcccaagaggcctctacctcggccacgcacatgtgggggaatctgagctccttgaccttccttggatccaactgagttgctttggctcctggtgtttcgcctggcgtccatactaattagaacagcctacgtaaccaagagctagtctggtcagatcgtgataaaaaaaaacttaccaatgccgcttatttggaaattaaaacatgcgcatattctactatcaaaactactaacatgcttcctaacaagcttttcttatatcatactattaaaataaactactaaaccaataacagcttactgaacaatggaacgagctaactgctgatgatgattgtaca

SEQ ID NO: 363509 - DNA, 727 bp, Cannabis indica
tgccgtgcctcctcagcaagctgatcaggccgttgcaggtcctgatgtgatgaaggatgagcagtggctcacagtgattgagcatattctaaactttatgggggtagttggtaatgatcgggtgacctgcgccactttccagttctaagaggacactctcatgtggtgggagttgataaccctcactcgggatgtcatagttatgacctgggaagaattttgggagttgtttaactctaaatattataatgaagctatccgcagtgctaaggggaaagagttcactgagttagtgcaaaccgaggggatgtcggttactgagtatactacaaagtttgaacgtttggccaagctcgccgtgggtatcttgccaactgactttagtaagagagagaagtacttggccggtttgaatgtgaagatcagggatgacctggtgagcactactaatgaagcaacatcctatgctgaaatggttgagaaagccttgcaggctgagggtgctgtgaagttccttcaggaggcccgtgtgactccgaatgttggtgtaatccccacttttcctactcatgcctatggtagggatggcggtgattccaccactgatcagaagagcaaagttaccacagcacctggtggttcggggcaaagcaagcggttccgtgggaaccaaggcagaggtggacgccagggttattcttaccctgagtgccctcgttgtaagaaa

SEQ ID NO: 363510 - DNA, 877 bp, Cannabis indica
gaagggtaagatggttgaggccgagtcctccaaacggtccaggaggagggacactccggctgttagcaccgactccgggattccttctgaagcggaggaacacactgtgccgcatggtattgttctcactccagtccccgcagacaaggaaaggcaaatgctccgcatccccaaacataactatgccctagacgagttcagccggggacatgctgaggtggaggccttgaagaaggtcttgcgggaggagcaacaaaacaccttgcgtgaggacgccttcaggaatctctgggacctgaacatggatcccctgacggactggttcaaccactttgttggtcctaccctcgcccctttcgcctccgagatgaccagccagtttgtctcccatcagactcaattcccacccaagagatacgcagcttgtgcctcaacgaactttgtttatcaggttcaggacatcagcgctgctctggctgcggtgagttcttacgattcgttcctttctttttgcttatattttgtcttgaagcatctgatttcattcttatttcttttttcagatcactgcggagaccggtcgcctctcaaagaccctgattgatcatgggtacgtcatgtccgaattcaggggcatggacgagagcgtgaagagtcggcgggacttgtcagctgagaggagggcattccgagaggaggcccagtagagggaggctcaggcgaaggcaaagcactgggaggagctgagggcggagggtgaggctacaaccaaggctaagcgcgagctaggggaagccagggaggccatggatgaaatggtcactaagttaaagtccttggaggagctgcaccatgtggacttggagtcgacggccaa

SEQ ID NO: 363511 - DNA, 502 bp, Cannabis indica
gtttggtgtgcatggaggcgatttagacctagtgggagacaagtgaggttccactattggcaagggtgacgacgaaccatcaccagacaatgcagacgttttgacaagacgcccagcctttttgcccattgtttcactgtaagcacaatacacagagggataccacgaagaagatgaccttggcttaagaagatggatagtttgattgacaaggtgggtgaaatcaaattatggtaaaaagatatttattaccaattagtgaaaaagacgaaaacacccttagagctatatttcatgaaacccaagcccattaacaatagtaaaaacacaacaacccaaacccgagatagacaatacgaaaagaaacgaatgggaactaaaaattggaaaattaccacatggaatacatacaatactgaagcagaaatactaaaccaaaagtatttacataatttgccacacaaagacatgacacttacaatatctaatcaaagttcaatat

SEQ ID NO: 363512 - DNA, 485 bp, Cannabis indica
ccacgtctctctatttgctatagcaatgtcgcttctgtcttcaatgagtgctacctcggtgctgggaaattcaagtataaaatctgccaaggcttgccccttgatcgcagttcttggtttatacttgatgtcgaactgactcaactccattgcccatttcaacaatctccccgatgcttctggtttcgccagaacttgtcttaaggggtagttcgtcaaaacttcaatactgtgagcctggaaataaggtcgcaattttcttgatgatattatcaaggcaaatgccaacttctccatttggggataacgtgtctcggcatccagtaatcgcttactgacataatacaccgggtattgacgtccttggtcctcgcgtattagtaccgaactaatcgcatattccgacacggctaaatagatggataggacttcaccggtcaatggctttgacaagatcggaggttgccccaagtgtatttttaaag

SEQ ID NO: 363513 - DNA, 572 bp, Cannabis indica
ttcttatatacaactgacatttgcaaaaacacggtttttcaggatcttcctgatacttacggattaagaacatggtagtttaattgagtgggagtgctaatcatagatacaaaatctatagcttctttaaatgcatagaagtgaaatgatgatttccttcgagcttgacttaatggagataaatagtagagtactcattttagtaattatattactttacagaaatgtcatttataggtagctaagtattttaagaataaaatacattgaaaggtagaatggtaaatttattcctactcgatgtagatcacctacaaagaatcataaattatttggattataacaatggataattaataatgtgtctatatcatagaatatataaagcgttctatataattaagagtgcaattccaaatctatagtggagcaatgacgaattaataagttagaaaattaattggtaaattctaaaactgcttattggaagcttgattatatagggacatggtgcccacactagttgagataatacttcttgtagactcgattaattggttttaattaatcaa

SEQ ID NO: 363514 - DNA, 878 bp, Cannabis indica
tcctagtcctagtttcgattttgatttagtgtctgggttcgggtttgggtctgagtctaggtcggggtttgagtcctggtccgagtctagatttaggtccagatctcagtttgggtctatgttcgggtccaggtccgagttcgggtcccaggtgcgggtccaggactgggtctgggtcacggtctgggtctggatctaggtcccgagttttgatcccggtctgggtgtgggtcacggttcgagtctaggttcgtatccaaatccctatctaggtctgagtcttggtctgggatcaggtcctaggtctaggtctgggtcaaggtctcagtcccgatctgggtacacgaccgtgtctaggttagggtccaagtccgagtgcaggtttcggtgcgtgtttggtactggtccttgtctccagtcttggcctagtctgggtctgggtcacagttaggttttcaggtcctatgtctcagtgtcgggtcccgatcccagtcccagtctgagttttagtcctagtctaggttcaggcctcgatcctagtctgggtctaggtcctagtcctgatctaggttcgtgtccgacttcgagtatgagtctgggtgtgggtgtgggtgtgggtttgggtctgggtctgggtttcagtccgtgtctaggtctgggtcttggtctgtgtctgggtctaggtttaggtccgggttctggtacaagtttgggttctggtcaaggttccaggtcatgggtcctgggtcgtaggtactggcacaagtctgggtccgggttcgggtatgggttcgagtttcgatcacgatctgggtttgggtccgtgttcggtttcgcgtctgatccagttttggctccaggtccaattcctattccaa

SEQ ID NO: 363515 - DNA, 555 bp, Cannabis indica
aagcaaatactactgcggcaagttccaggtcatgactcgggtaccgctgttcataatctctcaactgacgagaagcataggcaataacctgatcagcttgcatcagtacgcaccctagaccctgtctggatgcatcacaatacaccacgaatttcttcttatcaaatggtagggctaacactggagctgtaattaatctctacttcagctcttggaagctaccctcacacttatctgagcacacaaaatgctgactcttcttagtaagctcggttaagggtattgaaatttttaagaacccttccacaaaccgatgataataaccagccagacccaagaagcttctgacttctgtcactgttttcggtcttggccaatccctgacagattctatttttcccgggtccaccttgatcccatctttgctaacaatgtgcccaaggaaggacacctgagatagccaaaattcacacttcttgaacttggcataaagcttgtgttcccgaagccgttgcagaaccattcgaagatgttgctcatgctcctcttttgatt

SEQ ID NO: 363516 - DNA, 623 bp, Cannabis indica
tacgaaattactttccaaccccgaacagcaatcaaaggccaagccttagcagactttagggtagaatgcataggcaaggaagaaagcataccagaaagcaaccctgagccagtacaaacacctcagccaagtaacagtgaagataagctgacttggaaactacatgtagacgggtcggctacagatcagctatctggtgcaggaattgccattgtcactcctgttgggcaacacctacatgctgcagtcaagtttggatttaaagcatctaataacgaagccgagtatgaagctctaatccctggcctaaagctagcccgggagatgaaacccgaacacattgaaatctgtagtgattcacaactagtggtaattcatgtatccggagaatacgagtctcggagagaaaggattatagcgtatctgagaaaaatacatgacttgctcgcacaattcaaaagctacggtctcagaaaaattccaagggaagaaaacacaactgcagacgcgttagctcgaatggcaagcagtaatgtaagtgataaggcgaacttggttcctgtccagttcctcaaagagcctagcatcactggaacagaagagatcaaaatgattgatacttc

SEQ ID NO: 363517 - DNA, 632 bp, Cannabis indica
ttaactgagtctacatatagtattatctcaactactgaggagaccatgggcttatataatcgagcattcaataagtagatctataatttactaagtaaattctctaacttaataatttcgccttgcgccactatagatttggaattgaataacactctcaattacatagaatgcctatatgtacaacgatatagagacgttatgattatccattgttacaatcctaatagtcaaagatcctctatagatgatctacatcgtataggaacaattttaccgttctacccttcaatgtattttatccttaaaacacttagctacctataaatgatattccagtaaaccaatataagcattgaaatgaggcctcaatcatttatttctattcagccaagcttgaatgagatcataatttcatttctaaatacttatagaagctatagattccatatctatgattagcactcccacttaattgaactaccatgttcccaagatgtaaatatcagccataaccattagttagcttccacgaacaacttgaagaacataaataatataactaagttgaacctaaccatatcagaattaagatctatagacctaaaccaaccattgatgttgacttagaa

SEQ ID NO: 363518 - DNA, 862 bp, Cannabis indica
gagctaagcccatcaagacagtataattatcaataatcataattaacacatcacataaatattaacggcatttcatatttgcctagatgacacaaacccgcgtgttacactcacacgcttatttatgtctatataacatagacctacgtgttacgctcacacgtctatttacaataaggccttacaacggttcatctcggttctagttaccgagtctaactccattatgcattgaacacataacccttatttcaatatacatctatataatgcatggcataacaattacatataaacaatacacttgggtaataaccttaagccaataaaccgctcactttagagtaataactctaatcccggtttctagtttctcatgtaaatcacattccatataagtgccattgtgcatatctctacgtgctaaacaatgtcttacctgatgtcctgcaaatattgagattccaaatcccctagtgctcctgactaagtgccggtaatcttagtcacaaacccagaatacacaagtatagggttaacccctaaattcaattaaaaatttggcatttaaattccatatattcacatagagctcggaaagagctttccaattatataaagaacatcccaaacggagtcccgagtagaaagttataaccaaaaccaaaacccaaaaaaaacacaacttgctgctataaaaaggcagcggctactgggtttaaagacccaagaaaccaagttttccagccatgaaaatgcatccaaaaatgccaattttcatgctatatcaatccacaatcataccaaactttcacctaacataaatcaagtaattaaagaggaattacacctaattcactct

SEQ ID NO: 363519 - DNA, 998 bp, Cannabis indica
tcgtgtatttttctcagatatgctatcatattttctccctgagctttgtattctccagatacatgatttaccaccaactatgaatcactgcagatctcaagatgttcggccttcatttcccgggctagttttagatcggcagtcagatcttcatattcggcctcattattggatgctttaaatccaaacttgactgcagcgtgcaggtgttgcccccaggtgtaacaagggcaattcctgcaacagatagttgatctgtagccgacccgtccacatgtagtttctaagtcgacttgtcttcattgttactaggctgaggtattagttcaggctcggggttgttttctgacacgctttcttccttgcccgtgcattctactacaaagtccgccagggcctgaactttaattattgttcggggttgaaaggtaatttcatactgacccaattctaccacccacttgagtaaccgtccagaggcattcggtttttgtaatatttggcgtaatggttggttggtgtatacccgaataggctgagcttgagaataaggccttagctttgttgttgctaaaatcaagcagtaagtgattttctctatcaatgggtattggcctttggcctcaatgagtcttttactgatgaatacaccggatgttgaatgttgttttcctctctgatcaatacagcacttacagcatgctccgtgacagccaagtatgtcccaagttcttctccatccagaggtttcgagagtacaagaggttttgcgagttgcgtttttagctcttaaaaagctttttcacattcctccgtccactcaaattatttatttcctcgtaggatgttgaagaatggaacacacttgtctgttgattttgaaacaaatctactgaatgcggcaatctgaccagccaaactttgaacttccttggtttttattggcaatttaatatccaggagagcttgaatcttttctggattggcttcaattcctc

SEQ ID NO: 363520 - DNA, 557 bp, Cannabis indica
acacactttgagccaaaatttgtttttattaatcatgagtgtgctttgcttttcactccaggttttcattgtatcatcatatttctagagtaattttgcttgtaatatcaaacacattttcatattgtgaatgaggtgaggttggcaccggtattgtaaacaatccagttatagtgaaattggcacttcaacaatccaagaaagatgttaatagtcctcgagggtgagaaactattgtaagaggtttggaaataccttggtgaaaatttcccagttgtaagggttagtcaagcctgttaacttgtctcgatattgaaactcaaagctaggtccatagctttgaagaccaaggacgtggtggcatagttctaccgaaccttataaaaatcaagagtttgcattttctaatccttaaactccttactttacaagtttgaatatttgttataatatattgcttgccttattacttgcttttatttaataaaatggtcaattgcttaattttgtgttaaaagttttaatttaccgaaattagtttaaatttccaatttcac

SEQ ID NO: 363521 - DNA, 1657 bp, Cannabis indica
tcagatgaccaccatttaaagtacaatttcttatttctgcaatttgttttatttcatgttaagctaaaagatcagattagatcaaatacgtctgatgtaagttactacggtaacaaacacattttcgatcaatatatgaattaagatgtttatttcaaaattcaaattgagtcgaaattatcatcatgtttctaagttaccatacttgtgataaacaagtgaccaagagtcaagtctgctcggtcacttagggggaacctatacctatacaaagcattttgtaaagataaaacaaccacaattgcacgatgattataaacagagaatgaaattcattaaagataacaaaagcacgtaataccaagattaaagaacgcttggccggtcatgatgtgttaaaaaaggccttgtgggcaaataagatatataaaaaacagaaggataaaagaagaagtatttaaatagctggaatcccaggctctcggttcagatcttctgggctggtagaagctagaggatctattgtttgaacgggaagtacatcagcattttggccggaggaagaagcaatcgcatcaggctcaccataagccacttcggaagcgcagaactcgagatacattcctttggcttcacccaagtaatcaaagtttgcctgagagttagccttccgaaagtcataaaagagctcaaggccggctgtctctaaggcatggaccttttctcccagcctctccacctcgcctgtaagctcctcctccttagacttcttctcctcttccacccgatggaggacaactcgaagagacgtcctttcaccatgaaggctattcacctctgcagataaggtttcgatggtctcctcaagtcggttagaagcctcgagatccttagtcaactcggttatttcttctgagtagtaaaaagcttcttgttgacttcacccagctccatcggaatagctccaatccaccctagcatcatcagcgtctttcctggccaagtccacctccgccctcatagtgttggacagagccacattcttggaagcagcagacttaacccggtagtatgcgtaagccaacttcagaccaacctatgcagagaaaaaactttataatctgatctaagtaaagaggattaaaggaaaccgtcaagaaaagcttaccctggtgaattccttcaagactcaggaaccaacccgttcatgtagtgggcgagcatctctttgcctttcttggcctgtggaggcactggcaaaggaggagtaggagcccgcatcacctcggatctacatttggattgctcaggcatgtccgaacttcctcctcgataatccttggacttagcaacttttagagtagaggggtttccaacagttagttcgtcagaaaggtcaataacctctccgtaatgcgaattgcatgttgaataggcctgggcggggctggaagtttcttcctcctcttcagcggagtcacctgctcttcctcagcttcatcttcaggattcaagggctcctgagcatattgcttggcccctgcacctcctttaaccttagcctcgcgcttcagttgaattagctcattctccgaataagctcgttcagcccgtctagcatcaaatttcgtcttcctccccttcactggcttaggaa

SEQ ID NO: 363522 - DNA, 929 bp, Cannabis indica
aaacagagaattcattgtggaaaatgttattattaatttgtgaaattaatttgatcaaatcctaaaatgagcccttgaaacttgaaatagagagtgtattattagttgtatacgtaggcagtaataatatttgagtttgtgaaagaggaaaaggggcatatttatagagaactaatctactgatagtttcttattccttttaggattaggatttataatacgttacgttggcgccaagaaaaaagcaggcctaactgatttattttaaattaaatttgaaaaaaaaatgatattaattaatatacatatatctgacactattttagttgtcttttatttttaagcagacactattttagttaaaatcattcaaaataaacaaaaaatcttaaaaaaattcgaaaatgactacatattgtcaatacattttcattatttatttatatagaaaataacaagcccctcgattaaaaaaaaaaagaaaatttttagtaagatattgtttcttatatttaaatcaatatatatattttttttctatatatttctttttgttgttttatttttgtaataacgtcttctctgttttatttttgtatttttttaattgtttttttgttaaagataacaagagaataaacagggtaaaaccaagttacaaagatttagttagaatttaaaacacaattgtttcaaagtaactattcatcaattcctaatgcttgttgagcaaaacatttaagcttttagggatgaaacatattgttacaccaagaaagtgtgataaacagaggagataatcttccagactttatcaaaaagggtcgaaagatccctatgcttcttgagaatctttgagatgagcacttgacagtctgaagaaacattttcaattagaaatttgattgcctggcactagattaaagctc

SEQ ID NO: 363523 - DNA, 519 bp, Cannabis indica
taaatcttattatgagatgtgcggcatcctcaactctcacttttaaaatcaatggtgcagttaaaggctcaattgtacattatagaggcctttgtcaaggtgatctaatgtcaccttacttattcttaattttttctgaggtactctcatctttattaagacaagtcgaaaatgttagaaaactcaaatggttagcgatatccaggggtgctctgtcagtgtctcatttattatttgcatatgatagcctccttttctaccatgctaatgaaacctctgttgggattttatgccctaagtaaaactcgttacaatgtaatctgatttgtcaacaataaaaagattagaaatcatttatgcttacatgttgtattcatgtttatggtttaatttatatatatatatatacacaaaatctgttaaatccagaacatatagtcatacacaattacagtgatgtcaacacagtggaatgtgattgtaattatatgtttcgaaagactaaagtccctgtttcat

SEQ ID NO: 363524 - DNA, 763 bp, Cannabis indica
ttatattaaaggatattaaaatggaataacttattaaatacggagttgataaagtatatctataacgcgccgactgtaaagtcttaagcgagataaggatgtacaaactatagattcatgcattgacgagaaactattttgcgtcagaagacacaatcgcaagaatggcatcaataatataaagcgaggcaccaacctcgctattaaaaagcaattacgagacatgttgattgttagaacacttagtatacaatatgcattgtactaactaagcatcacagctggaagaacctaagtgacggatagcgaggcatccatctcgccgtaggaaggcatactcatggtaccgtcactaatcagttccagacatctttcaatgagatccaatgctccgtcgagtcagctctctcagatagaagttgacaatcaaatgatgttgactactaagtttcaccttgtcaccaagaactgcgattgtctgatggagaattatgtcttcaatcgcaaaaatgatgagatttacattatcaatcttgaaaagacatgggaaaagctccagctcactgccaggattattgttgctattcaagttcccagcgagatgccccaacgagatacactttgcagtgtatctaattccacgtcagcatagtaaaagcggataaatcacaactgtatgattttcaattaataaccgtatttatttacgtggtgcgtaaataaagcccacaatttcggggaaatattattgtgggatttgtat

SEQ ID NO: 363525 - DNA, 664 bp, Cannabis indica
gggggatcgtttggtggagagaggtgtcgtgcgcatccatgttggcacagagaatatcagagaatatggtgttggataaaaatacagtttccttttgctgcgagtactcctcaggcctgacgttggggacacacctctgacttggtaggatcctgtgtctagatgccatgtaggatgatttccagacgcttctagatgtctcttcactcgcccgtttggattgccttatgaggatatctagatacgtcttgatgggtccttcatcttttgggcaagatagtctttcccgaactaaagtagttaagccttgtttggccttatcgttcgtgcaatttggactggcgtctggacccaaagtcgtagcctgaacctattatgggttgagttattaacttgattaggcccataaatgagcccgtcttggctaatgttaagtgtttctagttcacgtgccattaatcacaaaacacaaataacaaaataaaaataccaatacatggttaaattaaaattttggtgcatgtgtttataaaagaagaaatagtcaacatatgaatattgtatggacttcgaaaatgataagaaaaggatgtggtcattatgatttttttttaataaaaaggatgcattaaaaattaaatcatatcgtttcaaattacatcca

SEQ ID NO: 363526 - DNA, 731 bp, Cannabis indica
tatgctaaagtttttctttttgtacaggccagtgtgaagttggcctacacttactcccgggctaagtctgttgctttcaagaacgcgactctgtccgacaccctaagggcggaggcggacttggccaggaaggatgatgaggaagccagggcagaagtcggagctgtgggttggagctgggtgaagccaacaaggagttgtttgctgctcgaaagaaaatcactgtgctgactaaggatctcgaggctgctgaccattttgaggagactatcgagaccttatctgctgaggtgaaccgtcttcaggacgagaggacttctcttcgagcagttcttcatcggatgaaggaggaaatggaagccaaggagggggagatttcggccgaggtggacaggttgaaggagaaggtcaatgccttggagacagttggtctcgagctcttctttgatttttggaaggctaatcctcgggccaacttcgactacttgggtgatgctaaggcatgtaccttgagtactgcgtgtcccaagtggcttatggtggaactgaggcggctgcttcaacctccggtcaggccgctgatgcacctcatgttcaaacaacagatcctcctgctctagttggcccagaagaccgaaccacgaacctgggactccataaacacttctgttttttatctttttatttgatatatcttattcgtcctcagggccttttttaaagcatcatga

SEQ ID NO: 363527 - DNA, 509 bp, Cannabis indica
tcaaaaccaattggtaatgagtggagtagcccatgttcttatataattctctaccatttattctatgtgggacaatttccacaatattccccctcaagatggtggctattttttgctcaccaatcttgaactgtatcagagtggacatggtcactatttgcataggtgcgaatctgataggattacttgcccgcaagggatatgactctgatactatgttgagaatcatggagttccatctcaaaaccaattgataatgaatgagacaatatccacaataccccggaccccaaacgtgggacccaagacctaggactcatcaaacacgaacccggacccgtagttggtgttgaggtcgagtgtattgaaaatatattataactttacacaatatctattaatacaagtcaatactaaacatagtattatattaaataatactaatataatacaatctaatacaatataatataatataatacaatgtgacgtaccaaacgagccctaaa

SEQ ID NO: 363528 - DNA, 793 bp, Cannabis indica
gggtctttaactccacagcacttgatggacttcggttatcaaataagctgctgtgagtactgcctccccccaaaatccagtagctaaccctgcttggaacaacatgcacttggctttatttaaaacagtcctattcatcctctcagctactccgttttgttgtgggtttaatcttacagtcctatgcctttgaatgccattattcctgcaatacatgttaaacgaattgttgcaaactctagacctttattggtcctaagagccttaactcttttgttagtcaagttttttctattaaaattttccattcttgaaatttagcaaagacatcatttttatgtttcaaaagaaaaacccatactttcctagagtagtcatccacaattgatagaaaataactactccccccatgtgtagctgtattttctggaccccataaaccaacatgtatatattctaaaatttctttagaattatgtgtcccaattttaaatttaagccactgatgcttacctaatgtgcaatgctcacaaaaatcaactttacttactttatctttgcataaaagattttgttcactcatgatttgcaagcctttctcacttatgtgtccaagccttctatgccataagattgccttagaatctttaggagtttctattgttgtgttgtgacaatgtgaaactagttctccttttaggtagtatagacctccttccttgtagacttttattatggtcattgaacctttgcttagttttaaccatttgttaatttcaactataatcaataa

SEQ ID NO: 363529 - DNA, 930 bp, Cannabis indica
accacaagtacgattgtggtacacactcgtaggggcctggtggatcaagcaaatcagcaggcggtggatcctgcattgcagaacccaggaaacacaagggttctgtcagctgttaatcctgaacagccggcaaacgtaggtcgtggtgtaacaactcctgtagatgaaatcacatctggtgtgcaagagactgggaataacagtttagtacccaatagggcactcataacacagtcgtttcgcctgctaccaacactcaaacaaccattggagatgatactgagatccaaaatctctgtgcttctctcggactcatgcagggtcataccaacaccctacatcatgattaggaagaactccgcactgcggtaaatttcgcgttcgagcaacgaagacgcatgtttaccgagtggagagacaaagagatggaagtgttaagggctcatcatacaaagattgaaaatcgtagtcggcaagcaactttgcttatacgaaaagcctaccaaattgttgggcagcaacccccgagtgtcatctccctgggtgagacggacgaagatccagcgatgagtacttcccagactataaatggtcattcaccaaatccccggtcacaagtttcgcttgtaggcctagtggtaggcaggcagaccttgtctagtaattcatgaggagaagtcatacctgatagttccaaccaggctatcggtgccattccacccgtcaaccaagaaaatcaatcgctaaggcagccaggcacttctgtattcgaaaggttaggggcgacccatgacctaaggaatgatctgaactgaaggaggggagtagacgattagaatgttacgacaatcttgtagcccaaaacccgtacataaattcccgctctgaaagatgctgatgttattcaaattgaccagaataccgagcagg

SEQ ID NO: 363530 - DNA, 530 bp, Cannabis indica
tagatttataaaatatgtgttgtggtctcttgatgacttacgtttagttactattaaagaattcttagaatagtgtaagttgatcctggtcacaaaatactaaactcatattccatactatcaaaatcgggaagttatatgacgagccccagcttgccatcaaagttaactcggctccattcccagtgaggcatccctatgagataaggcttaccgtatatctttaatatgcgttcatcttggcccaatgaaagtgggatattcacaactgtgtgattctaaataaaaactaaatttacttagcgtgatttgtaatcgaatcccatgattcgagggaatagttgttgtaaagattacagtcaactttgtaattaactgctcactatattattacaaatagtgccaattaagatgagaggggggacgaaaagactcatccaaaagatgatgggttttctgccctaaataaaactcatttcagtataatcagatttacttattaataaagatcagaaataacattttatgtt

SEQ ID NO: 363531 - DNA, 623 bp, Cannabis indica
gtagtgcaacactatcattactccgagcagatcgctggagagggacacgaccccttcatttgggaatggaagaaaggttggaggcgttatctgctgtccaactaaacatacattgtctggtcaggtgttgctgacactcttcctgttggccgtccaagttcgaggaacttcagcatttcaattgttattcctgctgttaccaggaacttctaaaattgtccttggatctacttgatgaaaaacgagctcagtcgcaaaccaccaacgcagcatattaacaccaaattacaagatactttaacaaaagagtcaagaaaacactattcaatgttggagacttggtgctaagacgagtatttgcaaatatgagagatgcatttgtaagagtgttcaacccgaattgggagggtccatatgtcatcgaagaagtagttagaattggactttataaattggctcgactcaatggctcactaataaagaactactggaacgtggaacatttgtgaccctactaccaataaataaatgatgtatctcacattattgatgtaaaatttaaacttcagttatgaataaagaaaatcatttatattaagtaattacaaagttttattctttaa

SEQ ID NO: 363532 - DNA, 604 bp, Cannabis indica
catgtgttaattttgaaaagaatgttgagaaaagctccattgtccaccatgtaccttactacagttatatttccaatctatgcagtaatgaccagggggtagttgtgcaggaaattctcttgggcaggatctcctttttaagaaagagatcgtgggctctcaaagctttggttaattagagcctcgtcctttgcctggcaggaagtagcttttgggctcgtgacggagtgtttgagcatagcgctctctggctttattggtcttgcctgcaatatggggtctgccaatgtcgacccctaagtgtcctaccatagatttataaaatatggttgtggtacctacctgtacgtctggccaaagatggagactaaccttcggagatggaggctagccttcggaggtggaggccagactttggagatggaggccagccttctgggacagatgccagcctttggaggcaggggccagacttcgaagatggaggccaaccttctgggatggaggccagccttctgactgcctgttgctaactcgccctgctgggacgtctagtcatgcctcgctttaatagaagagttaagcatacacacttctcctcctt

SEQ ID NO: 363533 - DNA, 727 bp, Cannabis indica
tctatttctttattgatattgaaaagataaagattacattgaaattgagttttatttacggcataaaatccaacactatagacgtgtaaaatgagaagtagagtgtgaaaaattggttctcaactcacttatttatagttgagtttaatttcataatcctaatgctaatgtgagtcttttaaatttaatattttctaaagaagaggtaaatgataagtgaaatatataattatatctttttccttgtcgtttttaaagagaatttcgaaattcttatacaactaggtataggaatataaatttaaaaggtaacaataattcctaatgctattaagattaaggaaaaattatagaattaaaagaaaaagataatgataagcaaaatgccaaaagtcttttcttttcttcttttctctctctaatttcgaatggcgccaccaaataggattatgatttcaatccaattaatcctaaagccataacaaaaaataagaattttttgagcacctggggccttaagcacctaacgcctaggttgacaatctgtcaatctaggagccttccaagtgtctgatcgtagatatgacttttgcatcttctttgacttcatcaaaaacaaggaaataggtccttttagagaaaaaaataataattcctgggtacaaataacagggactaatacccaagttgacattttgtaaacttaggccatttaaaatggagtttt

SEQ ID NO: 363534 - DNA, 785 bp, Cannabis indica
ttggggttgggtttctggcatgagaagaagaagataaagaagaagacgaagaagaaagaaaaagaaacaaaaaagaaaaagaaaaaaaattatttataaattatttatttatttttaaaattaaaataataacaaccaatgatatttcgacacgtggcatttaaattgagtttaacagatctgttaacttggagaccaacagacaaataaaaagtgtgaccttgaggactattgccactatttttggagcttggggactaatctgcatcaacgtgaactttttggggacttttaccgcaaatttccctaaaaaaattagtttcatgaaaagtgacttttcatgtttgtccatgttattgaaagtttgtaactaattttgaattaaattaattaatcctcatgaatagattattatgggtaggagatgaattaagaaaaataattagaaatgataaataataaattgaaataatgagaaaatagaaaatttagtttcttgaaaagttagagtgtcacgtcagtcattacctatcctaataataaaattataaatatttttatttttatatataaaatgtggtaatttaatgatttttattgatttaataaaatatttttaaaatataaaaatattctattaaatttaacgatgttaataaagttagttttataaatatatataaatattagtattatttatttttaattaatttgaatacataaatataaatattatttattttagattaatcgaatactaattttaaattaatttaaatatgtat

SEQ ID NO: 363535 - DNA, 534 bp, Cannabis indica
gagcttacctgattggatcacctattacgatcttcaccgatcactccgcccttaagtacctcctttccaaaaaggatgctaaggcacgcttaataaggtggatccttctcttgcaagaatttgacataacaatcaaagacaagaaaggtgttgaaaatgtagtcgcggatcacttgtcccgacttgaatttagtgatcccgctgatggcccacctattcatgatgatttccccgatgaacaattattcgttgttactaagttaccgtggtatgcgcacattgttaactacttagtaactggtgagctcccttctgagtggagttcacaagacaaacgcaaattcttggtcgaggtgcgaaatttcttttgggatgatccatacttattcaagtattgtcccgaccagattatgcgaaaatgcattcccgatgatgaggtgtctagtgtgctaaatttttgccacaatgatgcttgtggtggtcacttttctgtgaagaaaaccgctgcaaaaatcttacaatgcggtctttact

SEQ ID NO: 363536 - DNA, 524 bp, Cannabis indica
atctccttgtcccaagcacggttgtctctcttaaaaaggatgctaagatattggttttgaagagcaggttgagttgaagagacaaaactactggtggagtgaggaagccaagggtcccttaatattgagatttgatcccccgtaccaatggttcgagtgacacctgcttgtaacagccccttagcttcaaaaatactcctccatatgaagcttgggctatctcccaactcaaccgaaaagaaagaaccatgagcataatatcttgctttgaaactttactcaccaaggagcgatcattgactagcaaacgccaacattgctttccaagaacagccaagttaaaatctcgcaagcttcggaagccaaggcctccagcatgtttatgatggctcaatcggtcccaaatcatccaactaacgcctgctatccgaatagaaacattttgccaccaaaaatttgccataagacgctccaattccttgcaagtatccaaagggtaacaaaaaaacactcatcgcatagct

SEQ ID NO: 363537 - DNA, 632 bp, Cannabis indica
acacccataaagttcaaaattcttgtaatcaccgtcagccactgttcggctttcatgacatccggacctcccagaaaaaccggaagtgcctgcttccggaacctttcatacaagggttccattctgttcgccgctaccactatctcggcttgagcaacaggggcaggtgccactggaacttctggcaccggcactgcaggagcaccctgctgcctcaatctctgaatctcctgatcttgctcctctattctggcttgcatttcagcaaacctagtttcccaattttgggcttcctgattggcttgagcagcctgggcagcctgtggcgggttatcatcaccccgaccacgggccctgcccctgggacctctaccacggcccctaacattcgggggaaactgagctccttgaccctgatttgacccgaccgagttgccctgactcctggtgttccgcctggcgtccatctagtctgaacagcctgcgaaaccaagagttggcacatcaggtcatgatcaacgagagcttactaatgccgcttaatttggaaattaaaaacatgcgcctattctactattaggctactaacatgcttccttttaggcttttcttatttcataataattaaataa

SEQ ID NO: 363538 - DNA, 579 bp, Cannabis indica
taatttttatttttaactgtttgtttgtaaactcaggatccttttttcgggggagttgtgtttggtatttgtgaacttttttggattaaaatttagcatagcatgttttttgttgttttttatttttgattgtattacacagggggagttgttatttgttcttgctaactttaatttgtaggtacttatgtgttaaaaaatatgttgttcatctaaagtgccaaagggggagattgtaaagtccttttttggcaagttagttgacaagctatttttcttttatggtaagattgttttgcattcataccctatttctcaccttatatattcggtgtttaattgctcttttctatgttaggaaaattgcacttttcagctgcactttcctttgtttggaaacttcttgtaagagaagcaattctcttatagaaagttggatttttaaggaaactttgattattgcctttttcttattgaattcgattgtatcttgatacaatcagattatataatctgtttatgacaggaatcaagacttaatagaggatcggacccgattatagcaagtttcctttttct

SEQ ID NO: 363539 - DNA, 541 bp, Cannabis indica
gtatatgtatatgtgttgtgtgtgtgagtatgtatatatgtatgtgtgtatgtgtgtgtgagtatatatataaggggttgtacatttgtctgtatttttgaggcgatcagtgaaccaagattgcagtgtcaacttgataaattcaaccaaagtagttattggatatttcctaaactcttctgtcacactgttgaagctttcagcatgttgctggtcatgatgttgtatcgatcacccaaacaataagggtgagcccacttctcaaaatctacactctccacatatgtagcaatggtaggattcacctttctaagcttctcaaaatttctatcacattcagtttttgaccatgagtaagcaacattatatatttggttgtaaaagcatcaaccttgaacttagagttcacgttcataacaatgtagtgataacatgcacaatggactacttcggggaaaacaagttcaacagtatgataaatgctttgatacctatctgacataatgtaacaccctaactagcataggcgtattacgtgatt

SEQ ID NO: 363540 - DNA, 801 bp, Cannabis indica
ctgagatcctgagcttgaagaggtcaaggatgcacaagcagtgtaccacttaggcgcgcaccgggttagctgggagacgtactcgccaatcatctccgcggcaaaaggagccaaggtaggcccgaggaaacaattgaaccagtccgtcagggggtccaggtttagatcccacgggttctggtagttctcctcgttaagggaattttgcacctcctctcgcaaaaccctcgtcaaggcctccacctcagcatacccctgggagtactcatcaagggtgtaattgtacttggatatccgaagctcctgcctcgcctcatctccgggaaccggagtcagcacaatgctaggaggcactgtaaattcctttgcttcgggagggatctcggaatcatggctcggggccggagtgtccaccctccgcggccgtttaggtgtctcctcagctaccatcttgtctttgtgcttgtgcaccagagcaacctcttgctcttcttcaccttcttcaacttccccaggaagagctcattgctcttcttgaccttctttagcttccttaggaagtacctcctcctcatccactaagtcaatagtgtttggaggggcactggaagaagcttccacgggggtgccatctgggaagaagttggagaaagagaagcatcaggactgtgggctccggcaagggtggccaagatcgcctccatgggattagctgctgcaactagagaaaagagttaagtgttagaatatctgtgaaagtgtaaacgcttaaaaaagcaatcaagctagtcctaccccgac

SEQ ID NO: 363541 - DNA, 925 bp, Cannabis indica
acttaattaagagagaataattaataattatgagaaagaaagagtatactcacggagcttctttggttgaagatggtgaaaattagatttgagagtgagagcagagattgggagaggttgttgtgtgttactattaccccaaaatgggtttgacaaaagagatgaagtggccactgttgtgttcaagctcgccatagctatatagtacctactatatttatatagcatatatgcaaaagatatatatttatatatacacactactagagtctacaagagagaaagagagagaggaggtaggtatccgacaggccatgtaattaatggtcaggataagagacaagacaactactgttaattcattcatttttgttaagaccaaagttctgacatttatataaataaagtaattaaaaataataaaatttttaaaactttttttacttaaagctttttaccattctagataggaaaatttctacaaaaaattcatatagataacgttcccaattttcaaaaatagcggtaataatcctcaatgtcatattttttatttgtcagttagtcctaattttaactgagccgtttatttttttaaaattgacacgtgttgaaatattattggtctaaattattattttaattttaaaaaataaataattttaaaataatttctttttttctttttcttttctttattttttccttttctttcttttcttctttcttcttcgtcttcttcttcttctcgtgccagaaacccaactccaaaccagcaccaccaccaccaccaacccccttcgaccaccatctacggtcccctgccattcaacctagctcttcgactagttcccaatcgacctagagcccttcaattcttcttcctcttcttcgtcttttttttcttcttcttcacacgaaaccc

SEQ ID NO: 363542 - DNA, 526 bp, Cannabis indica
catataatttattaaaattaattctcttatctaaacattttgtatagaaatattctatcactaatagttttatataaatctcgcaattttaaactttttaaaaaagataatgttacgaaaatcccttttatagttgtcatactacatttatttttgtagagaaggtattttaacggcaccataaaataaaatgtaaaaacttttataaataataattaaatacacacattaataaaatattatattttagatatatcactcaatataagtataataaatatatatatatacaaataaagattataaaagttaaacaacaccgcgcgaagcgcggcttagttacctagtttaatcatataatataatcaattgatgctaattaccttactaatctttattctaagtatacggtcattacaatatttgtacatgaaggtacatattaccaaagactttgaggataattgttggaactaggggtgagcataaaatcgaaaaactgaaaaaatcgttcaaaccgacctac

SEQ ID NO: 363543 - DNA, 506 bp, Cannabis indica
tttttttttacccacttttatagttaatgttcctataataccttttcttcaatccaaaacagaaagacttaattttcaatctttaatgttaatgtgggggtatattaggcaatctccttataaaagtggatataatttaaatgaatatagtttgctggtagttttgattgactaacacaaaaacaggtattcttgaagttatcccctgcttatatatatacttttgtatacatgatacgtttacaggctcggccctgggcataggcgggctaggcctgtgcttagggcccacccagcccaggggcccaatttttttttcctcttttaaaattatatttttttttattgattttgaaaaataccaaattttttctaacataagggcccaaatttttttttccctgtggcccactttgtttcagggtcggctctgtacgtttatattactacatctaatattattatttcaaaattataaaaattaaataaaataaaatatttaaaaa

SEQ ID NO: 363544 - DNA, 829 bp, Cannabis indica
aattttttttttaaatgtcgaaatatataagagtgcatcaatacaccccttttaatggtgtggaatatattttattgttcttttttataagaaattaaaattttaaaatttgattgagcattgttattcttttttaatgagtgattccgaatggttagcatttttttttggtagtaattgttaaattataatatatttgacacaatattattaaagtaattagaaattttaacatcaaaaatacaaaatgttaaatttattaacaaaataccactacacggttacccaaacatttatacccttttcttttaattttttacatttgtaccacatgcacacacaataaatgctttgttgacacgtgagtgattgatgtattacatcaatctttctatatagcatttccctctttttttttctcttcttttttccttttttttttcatttatttttcagttttttttttaaaaaaatattaacctccatagctaaatacttccccctccacgatcccaactcgatttccctcttctttttgttcttcaatttttttttcaactcccattaccgaatcctataactgttttccctctttttatttttctcttaatccatatataaatatggctgtaactcgtccttcccctgttcaaaagaaaaattctaaaatggagttgaggaagatgactctaattttgctcctccatcgtcgaaacgtgggtgagctcctccaaagaagaaatcaaaggtggttgcccaggaaaaaattcatcaagatgatgctcaaaaaatgattaagatggagctggtcttcgatctcaggtttgtt

SEQ ID NO: 363545 - DNA, 572 bp, Cannabis indica
atagttagttagttaaagactaactaactaactgaatcgtagttgggagtttaaggaataataccacaaattctaccttatttcttcaagccccaacaagcaaagcatatctgtccaatggaggtggtaaggctttcatgtgtagctacttagcaactaaagttgagtaagtccaagcaatgcttgaacttcctaataggtaacaccttagtgctaatatcagcagggttctcttctgacttcactttctccaacttgattacttcttcttctatcttctaccttatccaaaacaaacgaatatcaatgtgttttgtcttctcgtggtacattggattcttgcacaaatgaattgaggattggttgttagaatatgcccttgcctttccaactagaagcttcaactcctttataattccttgtaggcatattgcttctttgaatgcctttgtggtcaccatgaattttgcctctattgttgaaaatgctactacggattggagctgtgatttccaactaatacaatctccattagtttgaaacacataggaggtagtagaccttctagtatc

SEQ ID NO: 363546 - DNA, 823 bp, Cannabis indica
agatttacaggacctttcgagattctcgagaaggttggacaagtggcgtatcgattaactttgcctccagctctttcggcagttcacaatttatttcatgtctctatgctcatatacttagttatgagaaccttgagctgcaaccagatatgtcttctgaagaacaggaagttccgatccttgatagaaaagataaagtccttcggaataagaccatagctttggtcaaagtactctcgagaaacagcaaggtggaggaagccacctaggagttagaatcagacatgagggcccaatatcaagagttattcaggttagatttcgagtatgatatccttttaagaggggatagttgtaaagaccgcttagcttaaatttggaaattagcagataattagggcttaattataaaaattatttattaactctaaattattaatttatagtgatttatttgaattcagaatgcattttatatgtcatatagagaaatttcatatttttgcatatttggtgcccgaaaacattcgaacgcggtgtatggcctagtagaatcacatcttagtattttagtttagcggggcaatatattttgacattgggaatatcgagtttagtcgggaatttggaatttctcaaaatacccttagtgccttttaagtagttttggtagggaaggacaaaatagtctttttgccattagtaatttgtcctttagtggacttagttttattaattaattggatttcttttatgagttataagctgatattaatatgataaaaaaagattaatctattcattttacaagaaaaataagaaa

SEQ ID NO: 363547 - DNA, 773 bp, Cannabis indica
atttagttctactcttgtttggagaaattttatgctttttatcttttattttttagattttaaaatagaagaagattagaaaatatcaaaggaataagatggaaaaaagataaaaagatctcacaaaaagatgaattatgaaaaagagaaaattgtgcaaaaaaataaagctgaaacttcaagcctaaatttaactaggatttgataatattttggaggatgtcaaaacataaaagttctatatctcttttttatccttccggaacatcttgaatcgtccaattttgagtaatatcgatagagttatgaccaaaatactatcattggacgcagtagaaaactcactgccccttctaatcctaagcagaatagatcctaagcagaataggtttttcagttttttattttttattttttatcatttttgtggctataaaagaagtggacttcaatagttttcaaagggcaattcagaagaaaataaacagcagaatacggagtacgaatttcagagatcaactgcaatactggaggcattcttcagagggttttcagcattcttttcttctctattctcttctattttcttaagttaatatgtgtgattttgcttccataaacatgagtagataaacacttaattaaggtttagatggatattgttgacatggttttatagttttaatatgatcttattttctctcagtttgtatgtattctatttcattcgtacttaattacttttaattacctgatcaccaattaactgtcta

SEQ ID NO: 363548 - DNA, 803 bp, Cannabis indica
cccctttttggtcttacctgcctactatttataaccacatagtaggcagttaattataaagttgactgtaatctgtacaacgattatcccctcaaatcatgggatctgattacatattacgttaagtaaatgcagtttttatctgaatttcacacaactgtgaatatcccgcttttattgggccaaaatgaatgtgtattaaagatatatggtaagccttatcgtattggaatgcctcgctgggaatagagttgagttaatcttgatggcgagatggatctcttcatatgtctttccaaggttgataatgcttttactttaattctgacaactgcattttctagtgacgagatgatcttttttgcgtgcatgccctcctacggcgaggtagacgtcttgctatctctcgctttggttcacccatctattatacttagtttgtataccatacattatactctaagtatctccattgttattatatctcctccacatgatgaggttagtgcctcgtcttgtacatctgaagttacatggtttctcatcgaggcacaaggcaacagtttgtacattttcatctcgcataagactgtttagttagtcgagttgtaaacatactctgttaattatgcttttaacgagttattccatttcaagtgtaattatagttacgtgtttgagttctttattctttccagcttgacacatgtcttcctctggtgtgctagccgaattttgagtgtagcaattgccccttaaaaagttcttttttaataaaaatgctttttaatgattacaagggt

SEQ ID NO: 363549 - DNA, 705 bp, Cannabis indica
gtttaactctgtaattgaaaaaatataaaaatgttgttccaacagtttattgacatatataatattaggctatatgaaatgaaataaattgttgttccaatatacgaaaaaaaaaaaaatttgtttcaacatgccaaaataaaccaatagatttattagcatatacgatggtaggctataagaaaaatgtaaacaaagaataaaaatttgtttcaatatgccaaaataaactaatccgtttatttggcatatatgagtgtaggcatatttgattataggatttttggtatgatcatctttttattttaaaattgatgattttatcaaaagtaactaattagtatcttatcgaaatcataattaatttgtccaaaaaatgtgtcttattagtaatgatttaaaagttactgtaatttcattttttatttaactaatcaaaatgcatgtattaatttatatttaaaaaaaaatgtgggtgacttaaacatttatgatatatattttttaaaaatacagtttactaaaatgatagcttactggatgacaactcattatttttgaaaataaacttgaaagttactcaaatgtattaatataacttaaatagttaattgattattaaagtgtatacatgtaagttatagtaacacattagtatatcttattgtaacacattagttttttaaatagtatggaaggtaacat

SEQ ID NO: 363550 - DNA, 659 bp, Cannabis indica
ttttttagagagaaactcttcttttcttctgatgttttttatgtgtcctctcaaccttccttttataggagttgagtacataacctaccctgcatacaacctacttgcactaaccttattctttaataaacttgttggtcgataaggttgtatctctttcgtaattaactacttcacccaagggtttttattaaagacaataacccttcctattatatccttttatttatcaacagctctcattagagatctcaatgaaactgctaatattatctctagtgagaagctgttcattcactaattgccaactaataaacctgtgctttgtcaatatcaatctattccatatgttctttgtataatcaacaatcggtacttgaacaaaggaaacatagaacagtttagagtggaatttgttggaatatgttttaccaggatctagatttactaccatgtatgttatttaacatcctaatatgaatttctaaaagaatgaaaataaacacatataaagttgcagaaaaccttacattgggtgcagcgaaataataatgtctccttgcactcagatctctaacctttgtatcctgtctgtcgtagagtatcaccaacatctgagcccgaatgtcctctcttgattctggattcttcacagcctt

SEQ ID NO: 363551 - DNA, 904 bp, Cannabis indica
ttttaactccctaatgtttgctaccagctctattttgtaatttggaagttttggttaagttttagagtgaattggggtgtgttttcttgctgaaattcgagtttcaagttgctggtttctgggtttggaacccaggtgacgcatcatggtctttagcatgtcgcaacccgccccttttgtggaacctgggaattggtcccaggtgccgcagcatggcttttgcatgccgcgacccgtcctcaatttttgggcagattcaagtgcaaattttgaaaatgcataactttgtgatccgaactccattttggaagttctgtatatcgttggaaagcccgttccgagatctatatgattatctgaattttaaatgacatgtgaatattttatgaatgtgaaattaggggttaaccctatttgtgaaaatcccgcaattgtgactaggattaccggcaccaggtcaggagcacacagggatttggaatctctactattgtgggacatcaggtaagacagtagttagcacgtagagttatgcgcggtggcgcttatattggaaatgatatatatgagtaattagaaactgggattagggttattaccctaacatgagcggtttaatagcctagggttattacccgagtgatatatgttgtgtaaatgctatgccatgttacatatatgaatatattgagagttaaggttatgtgttcaaggcataaccagggtggactcggtaactagaatcgagatgaaccgttctaaggccttattgtatttagacgtgtgagcgcaacacgtaggtctacgccacgtagacataaatagacatgtgagcgtaacatgcgggtctgtgtcatacatgcatatgagaatggcattattatttatatagtatgataaacat

SEQ ID NO: 363552 - DNA, 751 bp, Cannabis indica
ttactcttcttcttcttcttcttcttcatcttcttcttcacagtaaatagatgataattcagtttaagaaagaaagagagaaaaaaagaatgtaaatttcatccaagccataaaaaagaaaaagaaaaaaaactttaccagggaaccaagcgctatacggtacccttccaaagaaaaccaggggaaaaaccccacttccaaaaaggtgcaggatctgcgaaaggtccgctcagatttcccggaaagggaaaggcccgcaggaggggcaagctacccaaaagcaagtcttggccctcaggatcaagaggaacgaaagagcgtatcgtgcaccaagagcctcgggaaagaggaaggagaaaccggaggtaccctacagttgacttaagaataaaaaatcaatgaaaaacacggtgatctacgagatcacctagataagaagaaacatgtagcagtggtctccggcggggacactaaatgaagaaattctggcagagttagcaacactacgcaaagacattgctcggatctcttggaggcaaaaaggggaccactcaaattccaattgtgaggatcgagagccatgcgcccggaacatattggaggtagagctcctcaagaattttaacatgcccgagatggcagcgtatactggagactcggaccccagcgatcatttatccagtttcaaccaggtaatgatggttatgagggtctgtaacgatgccaaatgtctatgctttctgctaaaatt

SEQ ID NO: 363553 - DNA, 1008 bp, Cannabis indica
caagctgatcctggggcatcagtaggtggacgactctaatctctacaaagtcgtctccccgaatgtgagggcgccagccgcggagaaggtattccaggacgacatcatcgccacggcggaggataagtactagaagtacctcttcaagaaggaacaagagcgggcttataataaggtccaggtgaccgccggaagggcccttcgtatcggggctccggtggagcgaaggacccccagaccaaatcctgtgaccccagtaccgaatacgagggctcctgatgccagcacttcgggttctggtaagtcccctttcatgatacattatgtcccttccgtccgtgagtatgctagccttaggcctataggttacgatgaacgtctccataggtttaggatgccttctactcggtgggggaatcatgacaagcagtattatttctcccacttaggcaattatttaggtcggtcccggatgggttctggacctacggtgccaattctcttggacccttcagcctatttgtcttctacttggttccatccctcagacagctatctcggggatgatgaagccagtgctatgattcgggactttgctagggccgaattagagagtcagggtaggactagcttgattgcttttttgttaagtgtatgctgctttcacagatgttctaacacaaactattttcttattgcagcagctagacccatggacgaaatcttggccacccttgctggagcccatagccctgatgcttccccacctcctacttcttctcaattggtcactcccgggagggcttcctccagcgccccttcgggcactattgtcttggtggacgaggaggaggtgcttcttgaggaagctgaagaaggtgaagaagcgcaagaggttgccctcgtgcgcaagcacaagggcaagatggtggaagaggagccttctaagcgcccttggagggtggacactccggccccgagccatgactccgggattccctccgaggc

SEQ ID NO: 363554 - DNA, 835 bp, Cannabis indica
gggcttggctcacaggtgctgtattcagggaaagggtaaatctatctctgatcagccatgagagcaagagcttagcgatgcttgtacatgttcaggccacactacaccaagcaggttggggtctaccagcgatgtacttttgtaactctgattttgctgcttaggacggctagtgaaaagacttgtaatattttgtaaaatatttttgggatcccgaattatgtcacttttgattgtaaagtctaaagttattaaaaattttattttcattctattttaaataaaattttaaatttcccgcgcttatctttctagtaatctcgaattaaggggattagggttttttaatcagttggcatagcgtgcctaattgttagggcgttatagtttggtatcaaagcgccaaggtttttaaacttcctgtagaccagccgaacatgtacaatcatcgtcagagataagctcggctcgtggtgcaataagtgttgagagtaaacgctttactgcttatatgattatttatttatcgctttccattttatacagtatgtgagcatctagagtatttatgtgatatataatgccatacttagaatgttatatgataaatatttatttaattggaatgaaataattgagttaggatttaaggcaattagtgcataagtgtggtattggtgcttaactcagggttgttgattataggggtacttgtaaaaatggacccttcgcaatcatctagaccacagggcgagcaaatagagcctggtgcagaccagacaatccaccaggagcgcctgcgcctctacagaatctaagggataatgcgggggtt

SEQ ID NO: 363555 - DNA, 1068 bp, Cannabis indica
gtaaggatcatacctcagacctcacagaatgctttaaaatattaaaaaaagtataagatgaagctaaacccaaaagaaaatgttccttaggagtcttgtggggaaagtttttgggattcataattaacgcgaggggtattgaggccaatctcgataaatcaaggcattaatagacatgccatccccaacaaagcccaaggaagtacaagcgctaacaggaagaatggcggcacttaacagattcatttcgatgtgaactgataagtgtgtaccgttcttcaacatattgcgaggcaacaaaaagttcgagtggacaaaagagtgcgaagaggcctttcagagcataaaaaggcatcttgcaatgcctctaattttgacaaaaccaataactagagagacattatttctttatttatccatctcggaagatgcaattagtgcagctttagtgcgagaagagggtaagccccagcaacgtatttactacgtaaataaaaggttactacgggcagaatccaggtatcccctctagaaaaactcacgttatgcctagtccatgtgtctttcaaactactgccctatttccaggctcaccccataaaagtgcaaaccgatcagcctgtgagacaagttttatcaaaactagatgcttctggaagattgataaaatggtcgattgaactagggcagttcgatttaacataccatcctcgaacgtccattaaggggtatgctttgggtgacttctttatagaaggtataactccagaagaaatcccacttgatcagcaagatgcagaaacctggaagttatatgtggatggcgcatccaacgaacagggttcgggtgcaggggtaatattaatattgtcggaaggctttaagtttcactatgctctgagattcaaatttgacgcatcaaataacgaggctgagtatgaagccttgatcaccggcttaaagatagcagaggccttgaaagtcaaaaatctcatttgtcatagtattcgcagctgatcgtgaaccaggttctcggggaataccaggccaaaggcttgaaaatggcaa

SEQ ID NO: 363556 - DNA, 745 bp, Cannabis indica
attacttcactaagtggacagaagccgaaccactcgcaaccattacatcaaagaaagttcaagactttattgtgaagaacataatctgtcagttcggattgccgtacaaaatagtttcagataatggcaagcagttcgacagccaatccttcactgacttttgtgcgaaccacggtatcatcaaaagtttctccgcagtggcacatcctcaagcaaatggccaagttgaagcagttaacaagaccttcaaggatacactgaagaaaaaactcgaaaatgccaaaggaaattggccagaagaacttcctgaagttctatggtcatatcggacaactgagaaaatggcaaccggacaaactccatttgctatggcgtatggatatgaagctatgctacctgtagaactcgagccaccatcccacagaagattgacgtacaaccaagataccaatcacatactcctggctgaatcacttgatgaaatcgaagagaaacgagccacaacaaacctaaagttgatagcccatcaacaaaaagtagctcgatatttcaataaacaagtgaaggctcgaaaaattcttcatgggagatatggtcctaagaagggtatttctaaacaccaaagacagcacgacaggtgtactcggacctaactgggagggaccatatcaagtggttgaagttcttgaatctggagcatacaaattaggtaagtatgatgaaaaagtgcaactcgttctagtac

SEQ ID NO: 363557 - DNA, 589 bp, Cannabis indica
tttattatttctattgaagcacaacatattgaaatgagagaaatcaatatatgtgccaatacaattgtagtatattgaaatttattattttatataataataatatatattaacatatatttctttgtagagatataaattttaatatgttaatatatatatataagttatatttatgtatatataatttaggggtgttcataaaatagccgatccaatccaatctgcacggtccaatccaattcaatccataaagtacggatatctgcacttgtgtggattgaattggattggaaaatttcaaaattcgcacttgtgcggattgaatgttgattgacatgtaaaaataaccgatcaaatccaatccatacatatttataaaaaaaattaaaaaaattatatatataattaacattttaatataaaaaaaataatgatttaaaagtataatacacataatacaattatatttcaaaacttattaatagatcaaatgtatattttattcttatatatagttttttttctacatacaatttaaaacaaaattaaacatttctttatacatatatattttttctttttaaat

SEQ ID NO: 363558 - DNA, 371 bp, Cannabis indica
cgtatcagcacgatggcttgccgactacgatcttcgatctctgcacggtgagcccttaatgcctccatctctttatctctccattcagcgaacatacgcctttgttcgtgaaacacgagatttactgcagcacgcagttcatcctgatcatgatgtagagtgttgctatgactctccatgagtccgagcgcggcacggagatattgtaattcagttgcatctccaatggttgtttgggcgttggttcaaagcagaacagtcgtattatgagagcaccaaaatgttgacttcgcttttagccaacgacaatgagtttattttataagcgataaacgatatgtcgtaacaaatatataataaagcaataataa

SEQ ID NO: 363559 - DNA, 677 bp, Cannabis indica
atttaattaaatataattagaaaaatacttcaagcaaacagaaaataactatctagattttcactaacaaatctatttattttctaactaaaatataatatattttagtctatttattttaattaaccattaatgaaaaatttaaatgacctttaagttgatctaaaattaattaaaataattaattttcaactttaatctatttttcaaaaaattatctccatttaataaatgcaatttcgaaatttggtgggaaaaatgattaataaaataaaataaaatatattttgaaattttttctaatttaagttgttctgaaattaaaatttccaatttaaatattattttctatttaattaaatattctgaaaaataactaatatttaagtgtctagaataaaaccaacttaaatattaaaattttaatttaattaaatgtattaaatgaaaaaaaataattaagtataaaatcaacttaactattaattctaatttaatactaagaaaaatattctaatttaagttggtccaaaattaattaataaataattaattttcaacttaaaatattttcctaattttagaaaatataattaattactagaaataactatctagaatatatctcattaactaagtgtttttctaaaattaactttaaaatattcaatgaaaaa

SEQ ID NO: 363560 - DNA, 547 bp, Cannabis indica
tttttaaattaattttagatcaacttaaatcgagtaatttttcattaatgactcatatataataagtagactaaaatatatttaatattttaattagaaaattgataattagtttatgaaatatatagatagttattttctaagtagacttttgatattttttctatatatatttaattaaatagaaaattaatatttaagttgatttgttcaaaatacttaaatattggacatttttcaagaaatttaattaaatagaaaaattttatttgtgttaaacattaattaattaattttagatcaacataaattaaaaaatttcaagatttattttattttattttaattaatttgaaaatatatttaattaaatacattggattttgaatttaattatatagatatatatatatatagttatagaaaattagatttgtagttaaaattaattttaattaattttggaccaactcaagttaagtgattttcataatatttattaaaaattaatactaaagatgaaaaataaattttatttttagatcta

SEQ ID NO: 363561 - DNA, 818 bp, Cannabis indica
gcatacgacagaagaatgtcgtcaattgaaggacgagatagaaagtcctatctcgcgaggttattacatccagcagtatgtgaaaagacaaggcgatggacataaccagccaaatctacccaataacccaagcaaccagggactacaacctcctcctcttgaaggagaagacattctggttatctcgggagggtcacatcttgatggagaaagtaacaatgcccaaaaaagataggtaaaggaagttaaaaacgagcagtctatttttgctccagaatcttccaagaaaactaagagtgaggaacctccgattgtgttcttggaggaagatgtgaagcatgtgagatatcctcatgtcgacccactagtgattaccatccagcttgccaacaaaaggataaaaagggtgttggtggataacgaaagttcattaaatatcctttataaggatacactgaagaaaatggggctagaaagagcaaaattaacaccttgcatggtaaatctatgtagacagtgggcaaggaataattgagctcccattaaccatggacaaagcacctttatccactaccataatgcaatactttttagttgtcgacctgccatcagcctacaacatattgttgggtcgaccaacgttaattggactaggggtaattagttcaattaagcacctatccttgaagtttcagacactaacaggtgtaggagtggtgcgagatgaccaactactagctcgcgaatgctaccgcatagagctgcagaatagaaagaccggtcatcaactaatggcagtcacgactgaagaaggcgag

SEQ ID NO: 363562 - DNA, 514 bp, Cannabis indica
aataaaacttaatgtaagcccaaataaaaagtctaacatattaaactctttatctttctaattttattcataattaatatttaacaacacaaaagataacaaatatcctctctattttttctattaattcctcattttttctaaattttctatctatccatccatcttactttctttttttcctaccaaacataacctaaactagataaagagtgtacctaaatacttattttataatatgcattgctattaggcactagtaatgtataatattttctataagtaatattttacgattaattaacgatattaagcactaggaagtgtaattttaacaattctctttgggaaatttacatgatatatgtcacagtcagtagtcccgtgatcagtaaggggaaatcgggtaagctgtgcaatcccacatcgcctggggaaggtcaagtgggatgattctgagactgtgtaggtatgggactgcagagttgaagagagtttaaatggattgattggt

SEQ ID NO: 363563 - DNA, 559 bp, Cannabis indica
taacaaaagaaaaataaaaaaataacgtaaaaatttaaaataactgaataatttaatatgaagtaaaaataaacacatagatatcaaattatcaaaaaggtatacaaaataattggtatataaaagtggtagtttattatattacataacaactcattagttttaataaactttaaggttaccaaaatatattttaaataataagatactataatataacataaaaataattaattgattattaagatgtttataaataaattttggagatgaacaaattgtatctcaaattatatgatataaaaatgaagttttttttatataaaattaactaattagtttcttatcaacatcataactaagtagccatataattacttttgaaaacgcaggtaaattaaaaataaaaaagtagaatttgagattaatttcatttcaggcatattaattttgaattaaggtattttttgaagatgtagcaaggtattattgtaaatgatatttgttaaggtatttttgtaattagtttgtattttaagtatattattgaaataatccc

SEQ ID NO: 363564 - DNA, 864 bp, Cannabis indica
cttgcttgtgcatttagtgcttatctctcttcctccacaattcagtcaattcaaggtcagttacaactgccaaagggagaaatggactcttaatgagctcatttcattttgtgttcaagaggaagaaagattgaagcaagagaagactgaaagtgctcatttggcaagcacctctaaagataagggcaagaaaagaaagaatgaggctgctaaggataaaggtcctgcacataagaaacaaactcaaaccaacagtgatgatggttgtttcttttgcaacatgaaaggacacatgaagaaggaatgtgctaagtatattgcatggcgagcaaagaaaggtacatttcttactttggtctgttctgaggtaaatttagcttcagtaccaagaaacacttggtggttagattccggtgctactactaacatcagtgtttctatgcagggttgcctgagttaccgaaagccaaatgatgctgaaagaagcatttatgtgggagatggcaagtcggtaaatgtggaagcaatagggcattttaggttgttgttaagtactggttactatttggacttaatagatacttttgttgtaccgtcttttagacggaatttggtttctgtttcttgtttggacaaattgggttattgttgttcatttggaaacaattactttagtttatctattaattcaaatattgttggaactgattcacttatggtttatgacaacttatatttgcttgacactgatgcttcttataatgaaaccttgaatgtgatattacgtggtactaagcataaaatggataatgaaaaatcaagttccttatggcacaaacagttaggtcacatctctagaaatag

SEQ ID NO: 363565 - DNA, 690 bp, Cannabis indica
gcatgcttcaccaaagatccaacatcaaaagctcaagcattaaccataaatccaaacttcaaacaatagccaaaatcactaatataaacccataaattacatcaaaaacatacaagaaaagcatcctacaccaattcctactcaaacatgcatgaattaacaaaatcacacccaaatcaaattcaagcatattaagagcatccaaagcttaaaactcacaaattcttttcaatttcagcaagaattcaaagcttaaagcagtaagaatactacctcaagtccttgcacgcacactagcaccaagaatcgaagcttcctaggcaaaatcccaagcaacttttcttcaattcaagttgaaactcaaaaagggctaaagagagagaggggttcgggtttgagagagagagagttcagaattttcatttgtttttcctcaaaaaatcaactttgtcaaagtaaatcaaataaggtcaaaagaccattttacccctaggcccatataacatgcataacactctcaagggcataattgtcatttcatacacatttaatttcaattaaattttagattatcaccactatcaaattaaatgccaaataaacaatccaatttgcatttcgggcccgaacccggttgggcccgaactacccggttgtgactataccgcgccaacctgtcagaacacacct

SEQ ID NO: 363566 - DNA, 869 bp, Cannabis indica
tttgtaaacgggatcccggatttttacatgtatggtattttatgttttaattaattaagtaaaattttaattaatcagaattttcaataaactcgttgattagcaacgtactgcacagttaagtttaaaattacgttagcatgcctaaaatagttagggtgttatagttgggttttgatccataaataaaactcatttcaatataataagatttactaattaataaaagatcaaaaatcattttatgttgcatggtttacatgatttatttcatgattatatgtttaatgtataaattctattaaattcagaacatatagttattcatgattgtagtgttgtgagcacagtggaatataattatgattatatgttcaaaagtttaagtctcatgatttatcagtacactagatttaaattgacataataatcatcgataaagtatacttacaccttatataagtgttatgtcctttctagagcattggcaaagtatgctagtatcggatgtatggagtatatatatcatattggaccaatattgaacttggttaagatatcataaacttatcgttttatctttctaagtcaatgccacaagttgatcttaggtcaatagatcttaatcctgagatggttaggtttgatctcaattgtattatttatgttcttagagttgttcgtgaaagctaaccaatggttcgggcaaattcttacatcttggaaacatgatagtgcaattgagtgggagcgctaatcatagatatggaatctatagcttctttaagtatttagaagtgaaacgatgatttccttcaagcttggcttaataaagataaatgattgagatctcatttcagtaattatat

SEQ ID NO: 363567 - DNA, 614 bp, Cannabis indica
ttttagggagaatttttaacaagaagtatattttaagggcaaaatcaagtagtgccaaaaatttagaaagcaaaaatactaattattatcttactccgaatccaaattatctacaaaattgatttaatttaaaattcttatgtttatacctaccaaaaaaaaaaaaacaactctaatgtcaataatccaaaagaaattgatgaaaagttttagagtaatttacagcataaatacttaagtttaactaccagttgtaaataaatacttagtttaatttttggcagcaacaatacttaagttatatttttgaaactcttgtaagtatgattgttaaatattaagtaaattgacatgtgacaattcttaattggtgaaatttatgaatttttatttttataaataatttatatgtactaataagaaaatgacatgtggatgataatttgacatttaatattgagtctaaaatataatttaagtattattattaccaaaaattaaatttagatatttcgcagttaaagtattttaaattgttctattttctgtccctcttcttttttgacggtttgtttctctaatttttaatttttttttttttttgtttgtagaaa

SEQ ID NO: 363568 - DNA, 382 bp, Cannabis indica
tataggattgaaattaaaaaatatgacatttgtgaaataatagataatcggttaaaaatatggcaaaaatataattagtgtagggcccacatatggttggccacttaccttttattttagctattattttataattttttattccatataactcaattctaacactaagtgaattagtataaaaagaaaagaatagtctcattatccaactaatgcttttgaaccaagttttcattatgtcagacaactagtattttgagacttcttcttcttcttcttctttctctcttctaatttttgaatcctagagtgttcttcacaaatatttcgagccttagtgattgagtgcatgcccacccataacaagttagtcctcaatcat

SEQ ID NO: 363569 - DNA, 496 bp, Cannabis indica
agctggcttgtaaaattttgcatcagcgtaattcacttgttccccgtaaaagtgatttgggtctgcattgacacttttaacttcgccttccttgcaaaacttaaagcattggtgaagtgttgaaggaatgactccatgttcatgaaaccacggtcgccctaacaacacagagtaggatgtatctgaatagatgtcatgaaataaggcttcagaatttaattgcatatttcaattttcagtgtgatacttccccttactttttctccagcttagttaaaaccttgaattgtcaatgatgatggagacaattgacgtgggtgtagaccaacatatctcaaggattttaaggggagtacattcacaactgatccacaatccaacatgatgcggcttatgcgaatatcagcaaccatacccgtcacatagagaggccgattatgtaaggaagctcccaactgatgatctttatcatcaaaagttatgcatgccatacaag

SEQ ID NO: 363570 - DNA, 564 bp, Cannabis indica
gtaaaatatttccaacaccttgtacctgttaaccgaatcaacatcccttctatttttcaaaagcttcaagattttatgacaactacttattcactgcttgaaattaccagtgatatccttcccccattcggctaaagcagtactacaacatttgatttttgagctcaaagaattcgactcatgaacatcccaattatcatgcacaatttggtgacacataggctcacgcacccaagcattttcaaaccgaaatttctttaaaataaccacttttctaaataaattaagattcaacaaaataggacaatgatcagaagcagaaatttctaaattttgtaaccttgcatccagaaaaagatcattccaaccatgcgtgacgagagctctattcaaacggacttcaatccatgcctccgtacccctcattttctcacaagtgaaaggatagcccaccaactccatatcaataagaccgcaatcttaaatcacatcttgaaatccctgaattaaagagcttggataaggtcgaccgcctctcttgtcactatgatgaaggacattatt

SEQ ID NO: 363571 - DNA, 1109 bp, Cannabis indica
aatttttgtcaaaatgatagtgacaaattatgagttgtggggcctgatcttagacacacttgatggatgacatttgttgattgtatcgaggataacctctacaacaacctgatgaggattgaggaacttcatgttgaggattcttggagtttgcatatggtcgaacaccactaaatctacctttgcaaaagtaaagattagcttgcattttttacagcaagatttttcatagattaatgatgttcaagtctgcttcatgagaaagaagtagagcttgaacatccttaatggtcaaggcatcacttcttgatgtgatacatgagacaacagagttaaattcttgtcgaagaccattaaagagttctaaaattaaatcttgatcggtaacaggggatccagaaacactcaatgcattagaaatagattaaatgttatcaatattcttagagatagagagacttcccttttgaatgttggagaattgacccttgagttaaatacgatgtgccttagtttgactggcaaactttgttccagggcatgccaaacagcaaaaaggagctattgtagttggcaactaatgcaagaatgctctctgtcattgaaggagctgatccttcctccaccactataagcatactctagatttggtacgacactaataaggttctgaggtagggaaactacggtgaatagaatctcctcaagattgtgaccaatcacagttgaaacgacttcaaatttccaagagataaaattgagtcaatcgagtttgagaatgagagagaacgtaagtcaattagcgaaaagattccatgattaatttgaaggagcaacagaagtggtggcatgggccattattttaggagtatgatcaatcattgaagagacatggacaatagtcaacactactacaaaattaggctttagaggcagtttttaaggcctttcagcgtcggttttagtgaaattcgctaacgacgctgttccaggcgccactataggggtaaaaacaaccgacgttgtaaggaccctacggagtcgattattataaaatatccgcctccgtagggtccctacgacgtccgttattatgaaataacacactc

SEQ ID NO: 363572 - DNA, 420 bp, Cannabis indica
taaaataatttccaacaactcaaccatagagttccttcatggtgggctaccaaaacacaagatgcttcttgctaacataggtagtcccacgcctacataatctccaaaattactacacaattgttaccttcaattcacctaagattccagccaatactcataaattttcccacctttgcttatgttagatcgatcctaagcaaaatattttgttatttgaatcaattagacctatgcctccactaactacttacggcctatattccacttgggaataccagcaaatttaactcatattgtcatttttctaatctgtccaccctgtcagatgaacaaccactaaataacatacggacacaatccatttagatctttagatgtccccccattgagagtacaatatttcataccaatataaat

SEQ ID NO: 363573 - DNA, 510 bp, Cannabis indica
gatggtggtggttggttgattcgaccgaacaattagaaggagagagagattaagtagtgtatggtgtaggtgtaattgttactaataacttaatacatatagtttcttttattttattgttatgtaataaatgatgacatatatatgttgaatctaagtgagtcacgtgtggatgtgtcaagtggggaaaatacaattaatttctataattattccattaatattaacccttagccttattttagaatctcacattaaaaaaagtcaacttagttaggtgaaagactattttaccctttacttagcttataagtaacttctaaagctaggggtaatttggtcaactttgagtatcccaaaatatctcggtaattctaaaatcacttatcataatattcccattaattctatcaattaagtctgttatgacatttctagcccccaatcgagtatctaaggtcgccaaacctgaaaatattttcattccacatatagttcatattacattca

SEQ ID NO: 363574 - DNA, 551 bp, Cannabis indica
ttttcgtccatacagcatctcatatggtgccattttgattgtggcttgatagctattattgtaagagaactccattagaggtaaatacttgctccacaaaccagtgaagtctagtgcacacgctcgaagcatatcctcgagtatttggatggtgcgttcagattgtccatctgtttggggatgaaatgctgtacttaatttcaatcgcgtccccattgccttatgtagactctcccagaacttggaggtgaatactgaacctctatcagagactatcgtctttggaactccatgcagcctcaatatctcttgcacgtacaggtcagcatactgctctgcgttgtaagtagactttactggaacaaagtgtgctgacttggtgagtctgtctataattacccaaactgagtcgtgttgcttggttgttcggggtagtcctgtcacaaaatccatggctatatcttcccacttccattctgggatttccaagggttgcaacatccctgctggtctctgatgttcagccttaacttgttgacaagtgaggcatc

SEQ ID NO: 363575 - DNA, 619 bp, Cannabis indica
atgaataatgaatataatggcaattatattaaaggatattaaaatggaataactcattaaatgcggagctaatagaatatatttaaaactcgctgcctgcaaagtcttaagcaatataaggatatacaaactattgcctcatgtgttgacgagaaactattctgtcatacaaagtgaggcatcaacttcgctacgtataaagagatgaagatgagacatgttgactgttagaacacttagtgtaatgccctaaaaaaataggcacgctacccaattcatttatgaaaccctaatcccctaatcaggattactaatcaaaatagcgcagaatttaaacttttatattaaacagaatgaaaataaaaattgcaataaatttaaacttttaaacagttgggatcccaaaaatatttacaaactttattacaagtcttttccttttagccgacctaagcggcaaaatagaacttcaaaagttcaacactagttgacccttaacccgcatggtctgatatggctcgagcatgtacattctttgctcaactcctgcaactcatggctgatcagctaatgcattactctttcctgcacagtagagcaccagtgagccaagcccagc

SEQ ID NO: 363576 - DNA, 490 bp, Cannabis indica
ttttcagctccaaaaacgtcatgttcctgtcaatgctgactgtccgctgtgtaacgctcatgaagaaaccgttcaacatgcgttggtggagtgtgagtttgctaaagctgcttggaatcgcagcatggttgacgtcgaggctggggctgccacatttagcagctggctgttggagatcttcggcagagggcacgaaggtgaaatggaggaagtagttgtggtgagttggactatttggcgcacgcggaatgaatttgtttggcaaaagaagagttggtctgcatcaaatattgttgcatcagctaggaacatgcttgatcagtataaatttgctcaaggaaggaagggccattcgttgtctccgctgcaagatggggggcgaaatcttgagcgttggattgcacctgagttaaacaagatcaaagttaatgttgatgggggtttatttgaacaagaggggcgctttggcatgggttgtgtagctcggaat

SEQ ID NO: 363577 - DNA, 480 bp, Cannabis indica
tagttttttttttttttattaatcttattagtaatggtgtactgatatggcgaatatatatatattctgaaaatgattactttaaaatatagattaaagtaaatagagactcacaataaaatatgctaaaaaaaagagtcaaatagttaaaaaaaaataaaataaaataaaagaagattaagagagtagagagtctcggtacacgcattctaaaataataaaaacaaatggttatgatatattaaaatattagagcgtattcatgtaaatttatttaaaaatatgtatctacagttaatttttttttagtttattttgtcatttaaattttaggatttttttccaatttgaaaatttaactaccaaacacaactttttttttctcaaacaatatattataaataattttcttttctttctttcttcttctctctctctctcatttcttctttttttttctttttcttaattttacttact

SEQ ID NO: 363578 - DNA, 765 bp, Cannabis indica
ttttcatttttatagcttttatttttttttctatgtgaaatcaatattgtgaggctcaaatttagttaacgaaaatctacgttaacagtttgatgctttcattgagagcctctttgaaaagctcagaaaaaatcctcccttcttttgaagaaaaacaacatccttcatggctgaaaatccaaaaaatgttaacaccccacatgaggaaacaatcattgttctgggaaagagcccatgggctccaaaagatctaccaacccgcagtccagaaggaccactcgttccaggagggctcaacctgagggtggccccagtgcgcggaccacacattcccggagaatcgacccgatattggcccttgtacgtggacaacacgctcgaggagaactcaacgtgggaatggtcagaaccctggggcgagggatgaagagctcaatcgtggaggttcccaatctgtgggagaaggaacttatgaaatggaaaaccgccgtctgagacgccgtttggaagaggcacggcgttaaaacactaagttagagcgtgatgcagcctcgactagagcggcacaggggacgaatgctcaaaatcaacctgaacctggagtgagaagaccacgaggcagacctcgtggctcacggaccaagagacaggaaaaggcccaagaagaacaacccagggaaaatgagacaccccttgaaaatcagaatgaacagccagatgggagacaaccggaaactcatgaacgagaaatccctcatgagaatg

SEQ ID NO: 363579 - DNA, 534 bp, Cannabis indica
gcgtatgttccacaaccatatgctcgtgaggatgagggtccaccacaatcctatgctgaggagtttgtttccctcaacgagccagctctcctgtacaatttgaatgaccattcgacccttgatcaacaagtttatctctactctgacaacatcgacaacattgtggcctgagcgtatctgtacgagcatgatggtgacatcactgttcactacaagccatacaatgattcacatgccgggttttgatttcaaaaatgctgcaagaggatgctgaaatcccaatctcaattgaagggtgcagatatgttagagaagtaccaaacatgttccttccttggcctaaacacttaattgtaacatccaaggtaacttctcttataaattaattattaatgattagttgagtttgattatcttcaatattcaaccatagtgaagtaggttctgtgaatatatgtgacgtggtgggatggatgaataaactattgttatatctgtgttatttgtcattatacatgcatgttgaaaattttt

SEQ ID NO: 363580 - DNA, 606 bp, Cannabis indica
tttaattgtgtaacaatgtattcttcactatttttcaacttctttattatccttattaatcatcttttataaattcatgtctcacttttttaaaaaatttaataataaaattcttttcgtagttaaatattaacaagtgtcaaaactatcataaaactattttgcaactattagcaaactatttaaaatttgcctaataatatcagtctatcaaatataacatatcatcctgtgtgaattctcatagagaattaaacaattcaaataattcagctgtatctattttattgcttgattgttgcatgtctttcggttgtgtccgtgttgaccacatttgctgcacctgttcttttttttgtatcccaatcagctataaatcttcttttcctttatcttccagatcttattttttggtttggtggcagaacaatgataattttatgttttgtggtacatcccatgttgtgtgattgtgtacccaatatgttgagccgctgtatgtttcaagccatgttcttgtcgtgtaataacttgaacagtagttgtaaacattcaagttcatctcttttatcacagcaagcgcatgagcacacggtaatttgtcaa

SEQ ID NO: 363581 - DNA, 551 bp, Cannabis indica
atactgagtccaatgtccctagttttagagtctaaaagttgtgttttctcactgtccttcagctgtttcaacagctgcccaatcttgtaatcctactgctattaataaaaatgagataaattccgatgcccccctttgtcttttacaccagttctaatgtgaatactgatgttaatatatggcactccaaattatgtcacccagcacctaaaaatttttggccaaaatcttgtctaaaataaatatctcccacaaccttaaaactcttagattctgtgaggcatgcaaaatgggaaaaagtcataagttaccctattctcagtccaattctcgagcctctcaaccacttgagttgctccatactgatctttggggcccctctcatgttacttctcttgaagaatacaagtattacatcatctttgttgatgatttgagtaggtttacctggatctttcccttaacagtcaaatctcaggccttttctctattcctagagtttaaaaagcttattgaaaacaagtttgaactccccataaaactagtccaat

SEQ ID NO: 363582 - DNA, 524 bp, Cannabis indica
aaacctacttaaacatgcatattataacctctgaaaactacaacaaacatcaacaaaacaacagcaacagatttcaacaatttctctttgaaaaccaaagttttgagtaaaagttccaagcttgaaacaaagctacaatcatgcatcaaactagctctaatctactcaaataatcaaaattaaactacagaaaacaacatcaaaacccagcagcaactaagaatcaaactaagcatgcaaaccattttctttcataaaatttccaagaaacaagaaaagaagctagaacaaggtttacctctactagaatcactttgaacttgctgaaaatcacttgaatcaagcaagaaaacccagccctagcaactcccaagcttggccgaaaagagagagagaaagagttcttgaaaattctaatttttctatgtttgaaatttttgaataatgagaaaataaaatgcttattttaactctttacttcagccaaaagaaatgccacataatcacatattttcaccatataa

SEQ ID NO: 363583 - DNA, 972 bp, Cannabis indica
tatgcatgtgttgtctttcaggtgtgttctaacaggttggcgcggtatagtcacaaccgggtatttcgggccgaatcgggttcgagcccgaaatgcaatttgaattgaaatattgggcatttttatttaatggtgatatctgaaatttaattgagtttgagatatatatgaaatgacatgtttacccttatgtgtatgtgagttgatttttagccctagggcaaaatgatcttttgacctatattttcatatttatcaaaagaagttgattttggaaaaagaaataaaaattctggtgtttatccctctctctcacccgatccctctctctctctaactctctttggattttcaagatttcaattggtgaattgcttgggtttagcttgaaattgaagtaaagtgttggtgaattgttgtgctagccttaaagtgattcttgaggtagtttttataactctaattcctactaggtagccttaaagtgattaggttgttgatgaagatgatatttatgtgttgcatgaagtgatgttcctttgggaatatatgtgtgttttgcttgaattcttggtgtggtggttgtttgagctttagatggtattctagggtttctttaatatcttaaattcaagttaattgatgatgttgttgctggaaaaatagttgggtatgttgaattaagttcaagttcttgagcttggattttatgagtttgagcatgatttttgagttaattgtgcaatctaattttcagggaaaattgtgaatgttaatgcatgttgtatgtattttaatattctatctttgagcttgataagttgtgatcatgttttgagagtttggttgagttttggattgatttggtatggttttgggggctgaaaatcgtgttgcaggtggctgatttctaggttttcaacccaggtgtcaagcatgccgcgaccctccccttgttggtggaacctgggt

SEQ ID NO: 363584 - DNA, 746 bp, Cannabis indica
catttttagtgtattaccttttaatataataaaaaatatctagcataaaatttagtatacgtgcctcgcacgtaactttttactagtatatatatatgcatatagagcactaacgtcacaaaagacgttgctcttactttgagaataaaatggatcaagagctagataataggattttgagaaaataatggatacgtggctaattaataggaataccatacaaattaattatattaccaagtgaaaccacgatacttacttttgaaatatatatataaatatattcaattattataatttataacataaatttatatatttatatattaaaagtacctatttaactgcatttcttggtttaacagaatatactttacaaataaaagactgttaaatttaacccaaaaaaccatccaccattttttttaagttttcttttaactccgttaaccatccctttctttacacgattcttttcaaatggccctaaagctagccagaatcacactctcaatcccaatcccaaacaacttttacccattccacatcaattgatataccctttcaacactccctacaacagaaattccaatcgtagaaatttgaagatattgatcggaggtaaaaattccccaacgattcatgagatcgatgtagtatgtattgtcgaagatgttaggtgttcggagatcttagaaggtgaaggcgtcgaagtctttcgttgggcatatggatttgagattctt

SEQ ID NO: 363585 - DNA, 1311 bp, Cannabis indica
atgttcagtgcccgacaacattggaacgcggtgtttggctatttgaatcacatcttagtattttttgtatagcgggggaattatagttagacattggaaatgtcgaggatagtagggaattgagaattttccccaaaatacccttagtacccttttatgttgttttactgtgggagggcaaaatggtcattatgcccctatgtattttgtcctttagttgacttagttacatttagtaatcagaattttatttaattcttggctgattattttagataaaaccaaccttttgttaattcattttatgaaaaatcaaaatttggaagaaaaatttacatttcctctcaaactttctctctttcgaatccaccaagaggcagctatggtttgtcaattttcttcttcatttcaagcttaattcagcaaggtgttggtggtttcgagctttgggtaagcttctagtaactccctcatagttttcttcagtttgaagttttgaattttgcatgtttttaggaattgagttatgtagctgctgtttgtgtgtgggtttgttttcagaagcttgtttatgtttggttatgttgatttgagcatgttttagtgattgttgagtagtttaaccaagttttgagtttagaactaaaacttggagctttaatggcaagttttaattctgagcttgtaagggtgttttaatgttttaaatatgttgtttattatctaaatagcaggtcttgagtgtttggtagatattggggctgatttgaatgagttacaaaatttttggtcattcctgcactgaactggaattccggttcagatgggcctgcaggaatcgaaatttcggatcgctcccagaaaatgccacaaaatcggaattctagataggaagcggtctaccggttggggcaattttgggaatcctagtttttcccatttttgtgttgtttagggtatttccatgttatttatcgatagggaaacttttagtttcaagtttaagtcctcggaaagtaatttagcgtgtcacttactagtgctatgattgatgtgatttaggagcctgtaattcgcagagcagttgttccactcagattggctggcacacctgaattcaaaatcaaggtaagattagtataatgtcatgcatatgtttatacatgtttagcgtgcatgttagttgccgtcagaatgacatatcagatatatgtgaggcaaatctatagccgtcagattaacatatcagggcaacagtgcgtgtacatagagttgcaccgagatgccttcagatatatgctaggctatcag

SEQ ID NO: 363586 - DNA, 747 bp, Cannabis indica
attctccttatgagctcgttcaacccgtccaacaccagatttcctcttcctctccctcactggcttaggaatgaaatccttcggatagagcccgtacctcacaaagttatcctcggaggtcaactggatgatattccgtcttcccccaacagtcgagcaagtttttgagctctattcctaaccacaagagtgagaggagggcggtgatatgttggaatctattggaaccgagtacaggtgatgcccgcaccatccaccaagaagtactcatcaacaaaatgcctaattttgctgatggccgaatccttggtgcccgtcagcaacatgaagtctggttgagagaaatggaagtaccccaacctgccttgcttagtggtggacttcaaatcaaagaaccaactaacctcgtggggagaaggcatatcccatttttgggaggcataaaggacgaagagggcagacagatacttaatgcccttaggagtgaactgggccagacagaggccaaagaagtctgccacattcttaaagtattggtggaaaggcatcaatgccccttgctgggcatgagcgccgaccagcgcagtcccctttttagggtttgtggcatgattattgtgggcgggaatgtagcagtccaattcgcccaggtagccaccctggtcgggagtctgcaggcacgcctcagtaaccctggacataggactcacccacctggcacccaaggcaccttgccttctgtgagga

SEQ ID NO: 363587 - DNA, 455 bp, Cannabis indica
ctccactatagtgtccacgagatccacaaagaaacatttatcacttgcctttagaaaagtcattgtcttaagaacattgaagaccacttcttcgcttgcactcccagcttcaattcaccattctgaacatcaaccaatgcttggcctgttgccaagaatggtctcccatgaataattggaacattgctgtcgtcttccatttctagaactataaaatctattgggaagataaatttatccactttgactagaacatcttcgatgacccccgttggatgagccaacaactgatgagccaattacaaggtcactgtagtaggctttgcttctcccaactgtaattttctaaaaactgacagaggcatcgaattgatgcttgctcccaaatcacacaatgcatttatcccctctattctcttgatagtacaaggtatggtgaaactgttggaaattat

SEQ ID NO: 363588 - DNA, 1035 bp, Cannabis indica
ggagtattcgtccatggcatagttatgcttggctatccggagctcttgcctcacctcatccccaggaactggagtcagcacaatgttgggaggagcaggatgttcttccatgggggagaccccaccgtcgagaccatgggcaggagtgtcagctctccgaggccgcttgggctcgtcctgggcaaccatcttgcccttgcgcttgcgaatcagagcaacctcaggctcttcttcaccttcttcagcgtccccaggaagagcccggagctctcccgcaccttctgcgacttcctcagaaaagccccattgcttttcttgaccttctcccggtagcacctcctcgtcatccactaagtcaatagtgtcagggggagcgctggaagaggcctttagggcaggggctattggggaagaagtaaaggccggaggagcctcaggagtatgaactccggcaagctggtccaagatggcgtccatggaggtacctgtttaacaaaaataggcaagtgttagacatccgtgggaaaccacttacacaagatatggcaaataagctactcctacccggacttcctaattcggccctagcaaagtcctgaactttaatgctggcagcatcatctccgagatagctgtccgaaggccggaaccagctggatgtaatgtaagctgaaggacctaagggaacaggttccggaggaccagaacccatccgggaccgacctagaaaatctcctaagtttgaaaaataaaattccttcaaacgatccccccaccgggtcgagggcatcctaaacctatatagacgctcgtcgaaccctacgggcctacgactggcatattcgccaacggaaggaacataatgaattatcaaaggagacttaccgccggcaccggaagtgctggcaccaggagcccctgagtttggctctggaaccgaaggctgtggcctgggagcccttctctccgaagaatcctcaatgcgaaggggcctcccggcgggacgatctccaatctcttcttgaagaatcttgt

SEQ ID NO: 363589 - DNA, 763 bp, Cannabis indica
tcaatatcaccagttgatcttaggtctatagatcttaatactgatatggtaaggttcaatcttaattgtattatttatgttctgagaattgtctgttaaagtctagtcggttgatcacttacatcttgggaacatggcagttcaattgagtgggagcgctaatcatagatatagaatctatatcttctataaatatttagaagtgaaatgatgattttctttgaacttggcttgatagagataaatgattgatgcctcatttcagtaattatattagtttactgaaatatcatttataggtagctaagtgttttaaggataagatacattgaaggatacaacggtaaatttatccctattcgatgtagatcatccatagaggatctttgactattaagattgtaacaatggataatcataacatatctatatcttggtacatatagagcgttctatataattgagagtgtaattctgaatctatagtgacacaaggaggaattaataagttagagaatttacttagtaaattctaattctatttattggaagctcggttatataggcccatggccccctcattagtttagataatactgcttccaaactcagtcaattggtttaatcaatcaattataattctaaaattagattatgccttatttatgaattttcactaagcaatgacttaattgtgaagaaagaagttttaaattaatttattaattaagagactttgcatagtctaattaataaataatat

SEQ ID NO: 363590 - DNA, 667 bp, Cannabis indica
ccatcacaaaagtttgtcaaggctagaggcaggccaccattggcatgtgaaggattcccaagagatgtatcaatagttggacttggatacatgaatccgaaatagattagagatattgagttaacaagcaaaagaaagtggttattctgtcggtgccaattaacggcttttattaaatgttattaggttaaataaaattttcattgttgttgaattaaactaagcgcctgtagctcagtggatagagcgtctgtttcctaagcagaaggtcgtaggttcgacccctatctggcgcgtcaattattttttaacccaaatcatgtacattatacatcttttgacttttcagcgtgatttttttttttgaaaaaaatcaataataataagttagtatattcctttcaatagaaaaaaggatattaattagaatgttttatttaaaaaagaagaataacactaactttttttttattttattttaataaaaaattacattaatgagaatattcagagtacaaaagagtaagaagctccattggagtacaattttttttaacttttttaaacagtcgtttaaagtattcatgtcggtttctataaccgtcgcctatacgactgtcgtaaaatggcaaaataggcgacggtttttcgtcgctaatatggactt

SEQ ID NO: 363591 - DNA, 695 bp, Cannabis indica
tcattcacagtcatatcccctgtctgagaccatcaaatactccaataagagccctcctgtgagatggactaaaatattgttccctaaaaacttcctcaaaatctctccaagtcatcccatcagtttccattgtcctagacaaggtctcccaccaatctgctgcaccaccctctaacttggacacagcaaaagtaacttgatattcctcaggtgttcctattgtgttgaaatttttctttatctgcctcaaccacctttcagctacgatgggatcttgtccaccctcaaactcaggcagctggatccgatgaaagacttgaaaatgatgactctgtcgagcggcaagatccatctattaagcgagaactgctcttaaggcttcgagaagggcgttcatagggaattcagcttgtggaggttggacattatcttgaggggcatcttctctaaccgttcttcttatcttccttcctttcggaggtattttcttacgtctgagaaccaaaagctaatcagatagcaaggattggatgctaataatataaatatgtcttatacatataaataccaagatacttattactattattatttaaaataaatctaaactatttggtgacacactccgatgtaattaaacccagtgctctgataccatttttctgtcacgacccgagccctaggccgtggcagat

SEQ ID NO: 363592 - DNA, 634 bp, Cannabis indica
cccatacacctatttacaagcttaatagattagtacgaacgttccatactagggtatagccactataccacatacactacgtacctcgatgtacgaatgttggtagggtttgtttcataccctgcgtaccactgaatgatataccacgcactcccagtacctttccgtacttatgctggtatcacggtactctcagataatattccctgtaccaatgcactctataccataactgtataagtgttggtagtgcaactaacattttaagcatgcatatacacataacatatacatacactcagatatctatatcacacattatatacagttctttccttcttttcgaattcaagtgtgctggccgacctgaacagaaagtctcgtgctagatggatgccctaatcacattaacaataatataggtgagtgacacgctaaacaacttccggagacttacacttgaaactaaaagttcccctatcaataaataacatggtaatgccctaaatatctcaaaaatgggaaaaactaggtttccaaaaattgccccaattggtagaccgattcccaaccggaagtccggttcctgggaccaaccggtcgaccggttgctacaggtcccccagaaccggaa

SEQ ID NO: 363593 - DNA, 599 bp, Cannabis indica
gagttagaaaaattatgaaaatgaaatcaaaataagtatgaaattaacataaaataatgtgagaaaaaatttcaaaaaaatattaagagaaatttttaaaaattatttaagtttatatatttttttttaattatgggtgtatttatcattttatggggtgcaaatagaactcccctacaataaatactatgtttttaccattatgtcatttttaatattttattattaaactttaactaacatactattttatattaaatgacttgtattattattattattattaaattttatatttaattttgtattattattattttaaatttttttaataaattattaaatgagcattaaataatatattaaatcttgtatcacgatttataattatggcagccgattttgtgcccaaatgtacaaaacacgaattggaatccgtgtacggcaggtaggtctcacgttagaatagttataatttttaattatttaattaagttggcaaccggttattctaggtttggtaaccggttgtaaatttgaatttttaattaaaaaataaaaaggtacaattttattactgttcacgtcagttaaagtaa

SEQ ID NO: 363594 - DNA, 699 bp, Cannabis indica
gtttctactttttaaccctaattactcttagatcaatctcagccgtcaaatcaaataactcccttatctgacggctgccgtacatcacggattacaatccgtgaaagacaataacgggacaaaatcatatccctatatatatatattaggttgattgttacgtgcgatgcgcgtataattaggttcaattaggtggtgttaagtataagatccatgtatgtaagtatgtttaatttttttaattaggtaatgtaatttttttaatttttaaaatggagtttgaaattttgatcttaaaaaaagctattgctacattattgtgttgtgattaatgtacatacatattttttaaatttttaattttttttaattaggtaacgtatctgataatgtgtatattgtaatttattatattcttaaccaaaactcacacaaccaaatttgagtatgtctatatgtatgttggattcgtaaatttgatataaaaaatttttataactaaattttacgaaaaatatagtgtgtgaatcagtttaccataattaaaatagaaagcaatcaattccttattacaactattttaatttaaaatataaaataaataataataaagttaaaaatatttataatattataaatttaaatttctttatataaaatatctacatagtttttctttttattttaattcaaagttaa

SEQ ID NO: 363595 - DNA, 687 bp, Cannabis indica
agcacgaaattttctattccggtcggccaactcacttgaatttagaaatgaggtaagaatagcatagaacatattatatatgtgaatgtatgtatgtgtgatatatatgcatgcttgttgtgattcgtacactaccaacactagtacggtagtggtattgagtgcattggtatagtgtacgatatgtaaagtgtacattacggtgttaccagcactagtacggacagttacggagtgtgtgtggtacaacacttagtggtactaggatacgaaacaaaccctaccaacactcgtacagtatcagtacgtagtgcatgtggtataatggtcgtacttaacattcttacttatctgttaagccttatagataggtgtatgagtgcctacatacaagtcggtattatattatttgttatatgcttttcttactaagtctgttgactcatagttgctacttccatgtgtaggtaaaagaaaggtaaaggctgaacaggagtgaactccaggcttggatggtggttgtacatgttgaggcaacgcgacctggagtgtttggtctcaagacatctgggatgtatttgtagtcactgttcgactagattataaatgtattttgataatatatgtaaaaaaagtttaaatacgggatcttggcttatgtaaaataaatatatgaaagtttataaa

SEQ ID NO: 363596 - DNA, 578 bp, Cannabis indica
aaattattaagtttttattacttctaaacgctaataaaattatcatagcgatttgaataaatttatttttagtcgagtttattatgagatcatgagaattaggttaggattaaactaatatttattatgtatgttggattataaagtttaacaaactaagatatatatatatatatatatatatatttctttttaatgaaattaatttaaatggtagctaaaatagattggatggatccaatctaatccaataaaaaactaatcaatgcatccaatggttgggatgcattggattagatcggatgactcaattcgattggattggataagatgataaaattcaatatccaataaataattggattggtgatccaataaacacctaagttcccatatgataatctctactaaaaaatggcgaatcaattgcattagactactaatataataactctactaatcatatacatattgatattataaatttccttgaacattaacctaaataaaagtgaaaattacatcaaatatgggatttcataaaaaagttagaaaaatatggcatttataggtttgcc

SEQ ID NO: 363597 - DNA, 515 bp, Cannabis indica
aataaaacaacccagcatgcacagaatcaaaaaccaccattaaagctccaagctttgagttcaaaactcaagcttggctaaatctactaacacgcatcaaacctgccttaaaccaatcaatttaaacataaatcaactagagaaaacaaatccaagcacaaataacaatcacagcaactaattcctcattttaccataaaaatcatagttatgagtttcaaaaggttcgaaatttgttaatccaactagcatgcaacaaacctactccaattcactcaattaaacacatttgaactacagaacacaacatataattacagcagcaacaacaaccaaaaactaagcatgcaaattatcatatttcaccttaaaattcaagaacacatcaagaaagctaatagaacttataccttagcttgaattacatttagggttactgaaattacaagaattgcaaagaaaaaaatccagccttagcagcccatgcaaaaccgaaaggagagagagagagagag

SEQ ID NO: 363598 - DNA, 652 bp, Cannabis indica
gagcctcacgattatgattcaacgcagataataaaagttatagaataacaaaataagaacactgggtttttttacgtggttttgcagttcaaattttgcatagtccacgagtcaatcttatttagatttctgagtgtatttttttagggcctcttgtataagagttttctcctctcctttttgagattgtctacaactatttataattgtatagtagcagttaattacaaggctggccaaaatgtaattacagttattatcccttaaatcatgggatctgattacatattacaaaatgtaatcgcggtgcatgattttgaaagtcatacaactatgattttcccacttatatatggtcaaaaatatcgtgtattaaacacgtctttaattattgattttagagatgtctcaacagaaacttgattgtagtgatcccaatggagagctggaaccactcttccttttgagatcggcaagatgtgtcttgcatcgattgtggatataaggaaatttgctgacttaccagggttggatgaaccaataggaagtttcctcgtagcgagacggtcgtcttgcattcttgtatttcgagccggtttgacttttatacttagtctgcttattgcatgctgaggtatgtgttactcttctc

SEQ ID NO: 363599 - DNA, 565 bp, Cannabis indica
cactcactctttattttatcactagacacctttactacacacttgtgtataactcacacttttgaaagattttagggacactttagaacacactctcactcttttgaacacactttgaacactcttgttggatgcacaacttgaagacccatgacccctatatatactactcaaaagaaaccaactataatattctagataattctaactaattgtgttactaaaatattcttgaaacttctaatgactactactctctatgattctagaaaattctataatattaccaaaatgatagaaagttctagatacttgtagagtaggtgttgatctttaacagtaattgcatacacagtaaacttgtacatattgcagaagggatttgcaaaataattaattacctacacatatgatataggtatctaatctatccttcatttcttgtattgcgtagcataaacttgttcagtggttgcatctctttgtattctgcaatatcatgaaaaacattataagctctgattttaatttcatttgaaaataaaagcaaacattagacattgac

SEQ ID NO: 363600 - DNA, 805 bp, Cannabis indica
aaaaaatgattaaaaaaatattatcataggcaccctaagatttccgaaaatatttagttatgtgaattattgagaaaaatactaattaatctttctcttacggaggaaaaaaatactaatattttcattttgaaaaaaaaatacttgtttttatatgataattaacatgttctcttcaaggtaaaataaatctcctagaatgaattaaaatttattttctcattttattaatccttatataattacatatttatagattatcacatactactaataaattcatatagcttttttatacaaaataaacattgcgacatataggatttctatttgcacctataaaattattaatacaccctattattaaaaaaaatataacttaaataatttttaaaagttactcttaatatttttttaaaaaaaattgcctcacactattttatgttaatttcaatatttattttgatttcatttttataattttttctaactcatgtatatatatttttattttttttaagaatatgaatttgaagaaaaaagttaaaaaaaaccttaatacaattaaagatataaattttatataaaataaaaattaataaaatggaatgtctttaaaaaaaaactaggggtaaaaataaaattggagaattacctcatatactgtttttttaactttttttttttaaattttacggtttgggtttctaaagtggttgcatcgtagttgcaatagaagtttctatactattttttgttgcaatttagattacagcgctagttgcaatagagatttccatgtaga

SEQ ID NO: 363601 - DNA, 593 bp, Cannabis indica
ttatcatgccaaactcgaatggttctaccattcccaactctccaacgggctccttcgttgataatctcccttccccacacaattcctttccatatgcaagaggcattcgggggccaatttgcattaagaaaggaagagttaggatagtaactatttttcaaaactctggctaataaggagtgaggcttatgtatgaagcaccacccttgtttggccaaaagagcttggttgaactctgagagactacggaatcccaaacctccctcttcctttggtttacacagcttgtcccaagtgctccaatggagttttttattctcctttgtatcaccccaccaaaaattggctgccaaagagtggagatttttgatcaatttctttgaagacgaaagcaactcatgaaatagctaggaatagcctggatcaccgcttttataagaatttctttccctgcttgggagaacatggatgctttccagctcttgagtttattccaaactttatctttgatgacctcaaaaacctctttctttttcctccctataaagcttggcagccccagatatatgacatgattagtaaccaaccgaacc

SEQ ID NO: 363602 - DNA, 926 bp, Cannabis indica
gagtcattactgttggacttttttcatttcataactatcgtttcttatttgtccacaatctatatacccatagcagccataacaattgacatatactttattgtcaaaaatctacttaatcttggctgagtatcacttgatcaactgaggattgaatgagcttgtgtgccattgcagccaactttaacctccaaaaagaaacttaggaactacactgacagtcaaagaataaatcctcagtagtttctattaaaaatttataatgaataataataaaacgtttatagactgtgtataaaatgcagaattaaatcacatatatgcgatataactaaaagatacgaaatacctccaaccattgattctttgagcttcaattccacacgatcttggatctgacaaaaaaaataaaaaaaaaaaaaaaacctaagttagtgtgggtattttggcttccgagctctctctactctcttaagatgaaacttgttgttttaacagaatgagtgagaagtttggggatcggtcctatatttataggtaggatactttatcagtatctgtgccatattaattgtaaaaatattttaacaattaattcgagaaattaaatcagaaaacaaaatattgggtaaatcaaaatctgaccataattaaaatatttaattaattatcatataattaataaaatataatattactaagtatatttgatcgtattcatctaaaatcaattgtgatagatttttttttactttattcagaatgttctaatattcgtccacttagtcagcatttagatttacctctcaaatccaatattcatcactacataataaacatgaatcatagcgatatgtcctcattatatgtcgagtattatcttccatgtattacaatatatgcattatataacaatgtattttatg

SEQ ID NO: 363603 - DNA, 529 bp, Cannabis indica
attgtgatatttttgagagtattaatattatatttttctctttaaaaggatttcattatgaattgcttttatgaaattgagctttatattccataacttgtatgccaataacgtattatatttatatgtttatcatgattttatgtgttttgtatttattattgatacaaaatctatggcatactaatctctgcaaaagataataccacataaataattagaatttaaatttaatatttaggaataattgtcatttcttaagcaattattaagatttaatttaataaaaaaaatattttgatcggataggggtggaagaagttattgaactatgcaattcaaagatcttttacattgaactctatactatatatattcataactccacagaatctctataacacataggggtggaagaagttattgatatatattcaaacatcttttacattaaactccagattatattcataacaccacgaaatctctatatcacacatattttgattggacatggatataatataat

SEQ ID NO: 363604 - DNA, 660 bp, Cannabis indica
tgtactgatgaaactgaaagaaagttatagttttataaaaattgagtacttatgccgctaaaaaaatcattagttttatgtcacttacaaactcaaaattttaggtacttctgtctctatttaaccttattattattattattattattattattattattattattattatttctcttttccaatttttctttttgaggaataaactatttgtttattgcattaaaggccctcatcactatattattagctaaaaaggatgatcacatcaaaccacttgtgaaacttaccaatattgttgttgatgaattcaaattggctttggattttaggtgtaacttcattagcatattgcactttaacgtatgaaacattataagaggtggcctttaatgaataattagtattttttttatatatttattaaattaaaatactaacctaatattaaaagagaaatttataaaaatactaaaatttgaattaacttttacaaaaatactgtcacacggaaatcttttcaaaaatactgtgtttttataaaacaccagtaaaacacaaagcagaacaactcaaaataacagtagaacacctaaaaaacaccagtagataccagtgaaaactttacacagtatagtgtagtatgaaacttataaaaaa

SEQ ID NO: 363605 - DNA, 858 bp, Cannabis indica
tttttttttcctaatagtaggtgaaagaatactttttatatcctgaacacaaaattattaatatatataaatataaagtaaataaaaggaaaactaaatattaataataaataagattttaacctttgaatcacctaaagcctctactacaccactgtaagaaggacttttcttacacttccaagttgtcctccattggcaaattctcggcactgaattgttaatgtgatctctaagctctacatacttgttcgccactgctgggatacattcatacactaaaatctacacacacaaataagagaaattattaataaggtatttcaatattcttgtactttacttagggaaatttacttactgctaatggaagagggaagcctgaataggtgaacgtggacatcgtctgtgctttctcatgcactgatattgctttttattttagtggctttcggagttgctttaacgtatactcataagaatgagtctcccaagggaatttgttgaacatttccaaatcatcaaccaatcccaataattttggatcgatgttagcttgttttttgtctccatgcattaagactccagagacgaacaagagtgaagccatctttaatatttcattgttaacttcattcttcttccatgattttttcttttggttttgtcagacaattgttttaattggtctttaagtcgtcaatggtgatgcatgaaggtctttcacgaaagtgtctatctttgaatgattttgactcagcttgagattcccaacctttagggtactttgagcatttcagtccagatattaatgcatactccatcaatgagaatcggattggtatcccattcacaaca

SEQ ID NO: 363606 - DNA, 838 bp, Cannabis indica
gctttggccttgcccttacctacacataaagatagcactgtgagtcgacagactcagtatgaaaagcataacataaacatacaaataacccgggttataacctggcgcccatacacccgatcataaccctaatcctcgtgtctcacacggtactgagtctagaacgttcataagacaatactatcgaccataatgtcagcctatactcaatatgttagtcgtactcaagccatattgatgtgacaggatcgatgagtattttagccgacatacaattatcagtaatcagcacaactctatgtatactattactgctatcaatgtaatctaacaggcaataacagcatgtacactaaacatgtaataacatatgcatgatattatattaatcttaattctgaattcaggtgtgtcggtcaacctgagtggaacaatggctcggcgaattataggctcctagatcacatcgacaacaacacgcataagtgactcgctaaattacaaccgggacttaggttttaaaccaaaaacctatctactgcaacttaatatggaaataccctaaactagcagggaatcaaccaactagaaacgtgaaactgacgcaaaatgacaagctgaatttttgggtttccctgctgcaaaattcgggtaaccggttttataatagttagccaattttacccaaaaaaaccaaaaagctccaaattttaaccaaatcatttctaaacccaaccaaagtttccagacctgcatattataccccaataaaccatttccaagcaacaaaacaacaatcaaagcttagaattgaatttcaccattaaagcttcaagtt

SEQ ID NO: 363607 - DNA, 788 bp, Cannabis indica
acatgggacttattgctataaagtcatgtcgttcggattgaagaacggtggggcagcgtatcagcgatctataaatgaaatgtttgcaaaccaaatagggcggaacatggaagcttacatcgatgatatgttggtaaagtcaataaagagtagggatcatacctcagacctcgcaaaatgctttaagatattaaagaagtataacattaagctaaacccaaaaaacatgttcctttggagtttcctcaagaaattttttgggattcatagttaacgcgaggggtattgaagcaaatcccaaaaaaatcaaggcattaatagacatgccatcaccgacaaagcctaaggaagtacaagccctgataggaagaatggctacacttagtagattcatttcaaagtcaattgataagagtgtgtcgttcttcaatatattgcgaggcaacaaaaagtttgagtggacaaaagagtgcgaagaggccttcagaacataaaaaagcatctagcgacgcctctagtttttgcgaaacccataactagagacacactgtttctttatttagccatctcgaaagatgcaattagtgcagctatagtgcgagaagagggcaagccccagcaacctatttactatgtaagtaaaaggttactaggggtagaatccagatgtccccctctagaaaaactcgcgttatgcctagtccatgcgtctcgtaaactacaaccatacttccaggctcaccccataaatgtgttaaccgatcagcccttgagacaagttttatcaa

SEQ ID NO: 363608 - DNA, 522 bp, Cannabis indica
ttaattatctgctaatttccatgacttaactatgcgatcattacaatcgatcttcgctcaggttatcatcaattaagaatctaggaagaggatgttctgaagactgtgttttgtactcagtatggacattatgagtttctggtgatgtctttcgaactcactaatgccccggctgcatttatggatcttatgaaccaggtatttaaggataacctagacaagtttgtgatagtgttcattgatgacattctggtttattctgaatcagagaaagaacacgaattacatctcagatcagtactccaacaattacgggatcacaagatttatgctaaattaaagaagtttgagttctggttgtaatgcccgtatttgaaaatttactaattcaaatttaaacttatcgtgttatatttataaaactcataggtcgggatcccaagtttaaaacaacgactggaaatacatgttctatacatatatagttacatattattattattattattataattataatta

SEQ ID NO: 363609 - DNA, 674 bp, Cannabis indica
gtccacttagtgaagtaatgaaccgctacaactgcgtactacactcctcccttgcctttgggtaattgtccgatcaggtaaattccctaaatggtgaaaggccatggactttgcatctgagttaactcgttgggcggagcttgatgtatcttcgaaaatctctggcatttgtcacatttcttaacataggcctttgaatctccaatcattgtcggccaaaaataccgttgccttagaattttcttagataaactttgcccgacgacatgatttccacaaaaatccaatacgtgcacctcagatagaagtcgtgcagcttcttcttgagtaacacatctgagcaatggcatggagaatcctcgtctgtacataattccctctactatgatgtaccatgcaaccttccttctcatctttcgagcctcatttcgattatctaggagttccccagtgttgaggtaggttgctattggcctcatccagtttggggatgtatcaatcatttcaatctcttctgtgccagtgatgctaggttcttcgagaaactgaataggaatcacatttgctttctcatttacattactactcgcaagtcgggccaatgcatcagtagtcgtattttcttcccttggaatttgcctcagagcatagcttttgaactgtgcaagcacgtc

SEQ ID NO: 363610 - DNA, 537 bp, Cannabis indica
cctagatctggaccgagatcctgacccagacccaaacttggacacgcactcgggacccgaacttgaacctagacccgaaccaagacccagatcggggtccagacatggacacaaactcggacacagactcgcacccgaactgaaacacccacacctagaataacaccaaaaactagacccggacccggacccagacccaactagaacccagaccaagatcagaaccaaggacttagaccaagaattgaatccagactcagatcagcattggaacttgggactcggacccaacctagacaaagacccaggaagcgaacccacacccaaaccctgatctagacctagactaaaattaggaccttaacccgaactcagaccaggactcgagctccgactcgaactcaaacccaaactcgaactgagaatcgcaaatggaactagaactgaactaggactaggacctggaccaggacctaaacccaaagctgaaccctgttaaaaacccaaacagggacctaaacccgaaccgagactagg

SEQ ID NO: 363611 - DNA, 531 bp, Cannabis indica
catagctttcaagtagttctgcagcttatagcatctgggtcgaatatgacccctcctgttacagaagtgacacactgggatgaatctctccatctgagatatattctccggggcaattcttcttccttctaacttcaccttggtaggtccagatggaacatggaattttccagtggggtctgaggactgaggtgtcgagggaaatgatgattgcttgtcatcctttttgtctaggttgatcactggtgtaatggactcttctacccccaagttatctccttgcttatacaacatcttgtatccgatagaggttcgatcaccataaggtttttgaagttgaagagtttgattgatggcagccgttcctggagggataaactctaaagcctgtttagctcttatgagttcagctgaaagcttgtagatctcattgtccttctcatcaagaagtttgttgagattcttaacagtgtcctccagcttgactttttcagactctatctgctccttggcactattcagacctctaat

SEQ ID NO: 363612 - DNA, 781 bp, Cannabis indica
cttctctctctatttttcggcccctttgagcagctgggatttgctccttcttccttgagatttcaagtgttgttgtgttcaattcaagctaggttagctctttctcttcctctctttaaaattcttgaaaattatgaaatgttggtagttgcatgtttaactttaaagatgttgttgctgctgtagttctaggttgtttctgtgtttttatgcttgaattgaatggattaatgtaggtttcatgcatgcttgttacccttgttctagtttgagaattttttggttcaaaagctatagtttttcaaagtgaaattgggagttttgttgctgtgtttgttggggtcgatttcctgtgttttcataagttattatatgtatgattgagtagatttaaactggttttgatgcttgtgggtgagctttagccaagtttgagttttgaactcaaagcttggagctcacatggcatttttagtatctgtgtgttctgggttgttttgatgctttggttatgttctttggggtatatagaacaggtctggaaggtttggtttggtttgggtttgatttgattgagttgtggaatttttggtgattcttgcaattcaggatgtgcaaccgaaattctggatgggattcaggaattcccagaaccggaattccggttgtgcaaccggtctgtcggttggaggattttcaggaaccctagtttttctcgtttctgtgttatttggggtattgccatgctttttatcgatagggaaacttttagtttctagtt

SEQ ID NO: 363613 - DNA, 572 bp, Cannabis indica
ccacctccttttattacaaaatcctcgtgattcttatttttcaatttactaaattaattataatactagaatttgaatactaaattccaaacactttccttttatactaaaattcctaaaaatataaaccaatacatagctaatagacattatcgtttaaagttactctcttaccttaaccaaataacccttttattctaactaataaaatttgtaaagagcataacttattaactttaaaatattattgtaccaaaattttctggaaaacgtaaaaatttaaacaaactaccctaaaaaaattaggggccaaccatataaaaggtgctaaagccttgtaaggcgcccaagccataaataatggcgcaaatagattaaaatcaatataaaacaaacctataacaaaattacattataacccattatattagatcacccaaaaaccaaatgaataacaaacaacaagatgagaacaactcactaccttttcagccttcaacccaataccacactagccgaaactcccaggctcaaaactaaaataaaaaattaactcaaaattcatcacacta

SEQ ID NO: 363614 - DNA, 633 bp, Cannabis indica
tcacatggagagtatcttgaagtgacaggggcaaaattgatacaatgtttaaaaaaagaggtaaaaatgataaactttaaaaaagagggtaaaaataaaagaggacaatataaaaagggtatagagtgtaatttcctcaaacaggattgcctttgagtttattggatcaatagtgtgtatttaaagaaccatgatttctagacctatcccggaggagataccagttggtacttcaagaaactgataagattgaggaataccattgacaaagaagagttgttggctgccagttttgtgggatagttcaaagcaaaataattttacctatctctaataactgctgaaaatgtgagttatcacaaaattgtgtggcacaagcttattgtcccgaagcatcgtttgattttgtggcaggctatcaacgagcaccttctcacccgtgatctcattgctagaatcttgaaggtggagtcctctaattgtccgatttgtgatcttgaacctgagtctcactttcatctcttttttaaatgccatttctcaaagttgattgtaacaccctaactattatgggcgtgttagcgtgattttttaacgtactgtgcagctcgttgctaatcaacaagattattg

SEQ ID NO: 363615 - DNA, 1046 bp, Cannabis indica
tgttcctgaacaccaaagatccaacaacatgagtgtttggacccaattgggaaggcccctaccaagttatagagataacaagcaagggagcctacaagctagggagatacaataagaacatggagctggttctcctaccaagatattggaatggggagcacctctgcaagtactaccaatgaccagtgttatacccgaaatttggctggaggacacgtgtaaagataaagggaatgtgaatcgatgcaatagcttttcatggaataactcattaattacgtaagtatcggagtatatacgtaacccgctgactgtaaggtcttaggtaaggaatcaatgtacaaactggcacttagtgtattagcaagaaaccatatgttgctaaatatgaatagcgaggcacgggagaaagtgacacgtatcaaccatgaaagtctttagcatgcaatgaacaaactaagtataaaagtcagatcggctcaagagcaagtaagcgaggtgacagtctcgctatgggaagacttcttgtagctctatccaactagcgataacacgacttacaaccctagcgagtcagaagaagtcttttcaagtaagaaccgcgattgacaccagacctacattgttgacctcagaagaaagaatgggcctagcttgctattgggatcgctgtaaccaagtttctgtcgagacatctctagacacaacaagtaaagacgtatttaatacacgattgtcttgacccagtaatagcgggaaaatcacagctatacgattttcaaatcataaactgcatttacactacgtgatatgtaattcaaatctcatgatcttagggatgattgttgtaaacatattctggttaactttgtaattaactgtccactatgtaattataaatagtggcagacaagctcaaaaaggggacgaaaaatcttctacaagaaaggccctaaaaaaacacacaatcagaaatctgaataagattgacacgtggactatgcagaattttaactgcaaaagcacgtaaaaaaaaccctgtgttc

SEQ ID NO: 363616 - DNA, 798 bp, Cannabis indica
aatgattctcttcattcataacttaagtttaaagtttacataagtaatttgagctacgtcatttatttattggtagtagggttgcaaatgttctacgttccagtagttcttcattagcgagccatcaagtcgagccaatttatagactccgactccaactactgcttcgatgacatatggaccctcccaattcgggttaaacactcctgctaatgcatctctggtatttgcaaagactcgtcttagcaccaagtctccaacattgaatagtcttttcttgacttttttgttgaagtatcttgtaactcggtgttggtatgttgtgttggtgatttgcgacttagcttgtttttcgtcaagtagatccaaggaaaattttaaaagttcctggttttattcttgattataaaactctcttcggtgagtcgatatgttcacttcaacaagcagcatggcttccgagccaaatgctagcgagaaaggagtgtgccctataactatcatctcggtagttctgtgggcctagagtacctgaggtagctcgtcaacccatctgcctttggcagcgtctagcttctttttgattgtatcctttagggttttattaatggcttccacttgtccatttgcctgaggcctggatactgacgaaaagcttttgataattttattcctctcatagaattcaatgaacaagtcgccatcaaattgggctccatcatcgaatactatctttatgggaattccaaacctacagataatgttcttgacgacaaagtcaaggactttcttggaggt

SEQ ID NO: 363617 - DNA, 688 bp, Cannabis indica
  modified_base (658)..(658): a, c, t, g, unknown or other
ctgtattgacaatactgtaattgtgaatgaatatatgttatggatttaactgattttgtgcatatattaaatatgtattttaaaccataaacatgtaaaatacatgtaaacataaatcacttcaaaattctaaattgataactaatcagatcgtaaagggtttaatttagggcacaaaacccaacactttattggtattatttctttaaatgttgtccattccagtaccgtggtattagaacgagttgcatttttcgtcatacttagctaatttgtatgctccggagtggagaacttcgaccacttgatatggtccttcccagttaggtcctagtacacctgtcgtgttgtctttgatgtttaggaataaccttctcaggaccatatctcccacaaagaatttctaagctttcacttgtttgttgaaataccgagccactttttgttgatgggccatcaactttaagtttgcagttgctcatttttctacgatttcatcaagtgattctgcaatgagtatgtgattggtaccttgattgtacgtcaatcttctgtgggaatgtggatcgagttcgacgagcagcatagcttcataaccgtacgcctttgcaaatggtgtctgaccggttgctgttttttccgttgtcggtatgccacngaacttcgagaagttctctggccagtttcc

SEQ ID NO: 363618 - DNA, 1222 bp, Cannabis indica
ccatttagaagtctcccagacgcctctggtttttgtaagacttgtcggagcaggtggttggttactattttgattgggtgagcttggaaataaggtctcagctttctcgaggccattagaaggcaaaaaactagtttctcgattaccgggtatcgtgtctccgcccctatcatgcgcttgctgacatagtacacgggatactaaggccgcactaactgcattgtgctcctttagttttttgaatgcctcctcgcactcgttgaaacattcaaatttctggcattttttcaaaatgttgaagaagggaatgcacttgtctgtggatcgggagataaaacggctcagggtagccacctttccgattaagctctgcacatctttgtgtttcttgggggaaggcatgcttaggagagcttcgattttctctaggtttgcctctatccctcgtgacaatgaagcccaaaaaatttcctgatttgaccccaaaagtgcacttctttgggttaagtttcattccgtatctctggaccacttcaaagcattcttctaggtcatccacatgacttgcgtgtgcctttgacttgactaacatgtcatccacctatacctccatgtttcgtcccagcaggcctttaaacatccggttcaccattctctgataagttgcaccagcgttctttagcccaaaaggcatgaccaggtagtagtatacccccttatcggtcctgaagctagtgcactcttgatccgcgatgtgcatcttgatctggttgtagccggcgtatgcgtccatgaaggacaatagcttgaatgcggaggtggcatccaccatttggtcgattcatggcaagggaaaatagtcttttgggcaggctttgtttagatcggtaaaatctatacaaacccgccatgtcccgtttggttttggtaccagcaccggattagccagccattctgggtaatacacgtctcggatcatgccaatggttagtaatttgtccacctccttctctagggcttctgcctttaccgagttgaaggggcgtcttttctgttggaccggtggcatgtccgagttgacgttaaggacgtgggtatgacgtgggggcttatgccggtcatgtcctcttgacaccacgcaaaaacatccgtggcagcccttagtgtcttaatattttttctttttcctccggctctgtactttttcctagccggaggacct

SEQ ID NO: 363619 - DNA, 601 bp, Cannabis indica
aaaaagagggtaaaaatgaaagaggacaatataaaaagggtataagagtgtaatttcctctaagaaaaataaggtactttaattattggcagttggtagtttcataaaaaatattatttttttaaaaaaaaaaaaaaactactagaaaatatgatatttttcgtttttttttattaattatttgccaaaataaattaaatagtagactcccaataagctagtgtgtgcatgtgtttgatttttgttttctatattcaatgattatgattgatactgatagattgagatttggatcttaattaaatagtaattcttttcttataataatatcaataataaaagtaaacgtaaaggaaaataaaataaaataaaaagaagattcttaatatatagtgattgcatgtgttataacatttttatatattagtatttggttagtattttctcaagttattttaataatctttttgtcttcatataaagacttaattatctttttcctttgttttctaactttcaaattctattttttacacctaactcttttaattaattttccatttgtgtttttatttctttcttaaagtacattaaaaaactc

SEQ ID NO: 363620 - DNA, 506 bp, Cannabis indica
atgaatttttaatttctatgatttatgttaatttcttagtttccattatattgagttgcttctattcttctatatatttaatgtcatgataattgttttaatcttgtttagataatcactaaattaggttttactttaatctattttcatcttaggattactattcacctaatagtctaggattctgttgtgatattttgcacacgcaagtgcacgtatcgtttacaagtaataaactcatcaagagtgaggtcgatctcacgaagattgtagttaagtacattaaaattaaacttttacttctatttgattaaataaaaattaagaatacgttaaaactagaaaataataaaaacagtgataggagaaacaatttaagaaaattaacagtaaataaaaataagggcttcaatttcaattgtatctattgaatatggattaatatgattatcttcctattatcaatttctatgcaatagcaggtttactaaggtaatttatagtct

SEQ ID NO: 363621 - DNA, 512 bp, Cannabis indica
tactatttaaatactccaaattaggtaattaaaacaaacacaataatttatgaaccttaattagaatgatgtcaaatcctatagctatattaatatttttgaagcatgatttgttttaagggataattagatgaagtacttttttttttaaaaaaaaaattatacttttacgtttaaagattttatatatataatatatatttataatattttataaaacaacataaaaataacaaaaaaatacataaaataatagaagagtaatatcaaaataacaaaaaaaaaataacatacaaataagggggagagatagaaggcctctacttcttaaccttagattctttcttttgaatttcgccaaaaaaaaaaaaaaaaaaactaacaagagctcgatcaatataaaaatacaataaaagactgtattttttgtaaataatactacaaaaaataattatttttagtgacaatttttagttataatataaatttttatgactaaatatgactttaag

SEQ ID NO: 363622 - DNA, 565 bp, Cannabis indica
ttattttagttattaatatattatgtttttttttacgaaaactggccagttgtgaacattttcaagtattaaataaaaatgcgacattacgattttccgcgtttaacgcttgtaaataaaattaatatttttataaaagtacgggcgttacagtttggtatcagagccacagttatatcggtccagaacgttctcacgagttacacgtacacatcggctaaaaagtctccgcttgctaccatgtaagtctcatattatatgtttcattattatttgtacttgtgtaattttaaaattgcatttactacagagatcttagtaccaataacgaagtttaggtactacccatgcatatgaaatcaaatattttttttttaatatatatgtataaatatatttcaagatattttatttatttatttatttattttttttaaaaaaaaatcattactagaaagcctagagattttcttttcttcaagtaaaaaaaaaaaaaacggtttaattattttattttattgtattatttattgttatttagttatttatcttagaataaatagaa

SEQ ID NO: 363623 - DNA, 552 bp, Cannabis indica
tcaagcaacaaaaggatggcatattcataagtcaaaccaagtacatcaaagatctacttcaaaagtttgacttgataaatgcaaagtctatgaaaacccccatgagcacatctataaagatggacaaagatgaaaatggtaagaatgtggacatcgccaagtatcgaggtatggttggttctttattatatttaaccgctagtagccaaatattttgtttagtgctggtctttgtgctaggtaccaatcatgtcccaaagaatcccatttgagtgtcattaagagaatctttagatacttgataggcacaatgaatctaggactttggtatccaaagaactcaaactttgaaatagtaagctacttggatgtcgaatttaccagttgtatgacggataggaaaagtactagtggaacatatcactttctaggaaattacctagtgtcatggtttagcaagaaacaaaactcggtagccctatccacagccgaagtcgaatatatagtcacgggtagttgttatgcacaaatactttggatgaaacaaactct

SEQ ID NO: 363624 - DNA, 540 bp, Cannabis indica
attcccgagaccacaactctttccttccacaatagcattaatccccctcccatacctactctaggcacttcataaacgtttttaaaagataattgtctttttatttctaggctcttacctttgactaatcttgtttccatcaagaaaagaacatttggcttgaactctcaaataagtagcttaacatgtcgtattgcatcctttccattcaaacctctaacattccaactaacgatagtcattcctcgtataaacttactagcactcgcaatagactatatagcttttatgatatcttgatgatacttctttataaacttactaacactcacaatataatattatatagaataaagtctcttcacattggactttccttctaaatccatcaaacttaattaacttgttatgatgctcctttattttccttaattactatatatattatgattatctttgtaataataacgttccataactttattaccaatctttatatatgtataactaaattccaaaatatcattaaattatacttaa

SEQ ID NO: 363625 - DNA, 630 bp, Cannabis indica
ctggtcgctgttttacttcgaccgaatctctagatgcaataggagctggcgtgaggaagagaattgtgcatggaattccgaagagaaggtttttcatgaactaaactttccaggagccaacttgaaataccattgttgtacggcttccgcagagtggcggggaagattctgcaacatacgtcccctcgcactccttgtaaatccatttgcatctcaaaatatttaagatgggagagaggatattcttttcaagtgtacattttccacattggcatcttgaacttgtggggtagtggcaggagattgatttctggtgagaaaggagttccgcgtgcacggtctaactcaagatcgttattacgctgcccggccatgccatgaaacatattcttcagttcatcgagctgggcctgtactgctgggctgacttgattggcattttggtcgggttggattacgtcagcatctttctgagcggggatttgagtatgggctccgggctgtacgttcgttgtagtattctgctcgtctgttcgccttcttcttttagatcgtcccttggtcatgggtcgttcccaacctattgaacacaaaagaacctggctgcctgagcgattggttcgcttggtt

SEQ ID NO: 363626 - DNA, 972 bp, Cannabis indica
agtagatctaagatcctggaaaataatttccaacagcattttccccaccatgactcgttggtcatagagcccccattgccaataaagtggtggccagagtcctgatcgacaacggaagttccgtgaatttgcttttcaaagaggcctttactgcaataggcctgacggaccgagacctctcaccaagtgattctcaactcacggggtttaacggaacaacacttatcccaatggggaaggtgagacttctggtcaccttgtgcccggacacaccccagagcactttcaagtactttactttcgtggtggtggactgcccgacagtatacaacgcaatcctcggcccaaccggccttggtagactttggtacagtcacatcaatacggcacttgtgcctgaagttcccaacccaggaagctgggatagggacggtgagagaaaatcaaggggaggcgaggtaatgctacaacgttgccacccacctacccgtgttgatggtccggcaaactattgagccagaaatcgcggaagaagacgagctggatccccgcgtggagtctgaaaaaattgtagaaccaatggaggatgtcaaggagatatcagtgtgtgacctcgactccaccaaagtactccggctaggaaagagcctagacctggaggagaaggaaaaaataataaagacactgaagggtgccattgtcgtttttgtgtggtgccaggaggacatgactggcataagtccccacgtcatcacccatgtcctcaacgtcaaacccggacatgccgccggtccaacaaaagcgacgtcccctcgactcagtaaaggccgaagccttagagaaggaggtggataagctctaacaaacgcatgatccgcgacgtttatacccgtaatggctagccaatccggtcctggtgtcgaaagcctaaacggaacctggcgagtttgtatagacttcactgatctaaac

SEQ ID NO: 363627 - DNA, 558 bp, Cannabis indica
attcttcttattatggtgtaaatttgattcttgatttagaaagcattttatgttttttatattgaatcggtcaaccagttcaaagggacctataagaaccagccaactggttggtccccaggaaaccctacagaatcaaaactctagttagggaactagtctaccggttggggcattttagggatccccagtttttcccattttttcaatatttagggtattgtcatgttattcattgataggaacacttttagtttagtttaagtccccaaaaagtgacttagcgtgtcactcactagttttacaaataatgtgatttagggggctgtaaatcatcgatcagctattccactcaggttggcggcacacttgaattcagaaacaaggtatgattagtataatgatatgcatatgtgtttacatgtttagcgtacatgttagttaagcctgttaggttacattataatagtcgtatcattatatttagtattatattggatatcgataaatatatgttgtcttatgtactactcgatagtatcacatcggtacgactag

SEQ ID NO: 363628 - DNA, 933 bp, Cannabis indica
gcaacgtattgggcgtaggtacatactcagtaattatatgagtatcgagcgtaggtacgagctcacctaattaggtgatgtgattttcctagcgatgtaccaggcgtatgtaaatgcgtcagtgatatatgttgagtaccgagcataggtaaggcctcacctgattaggtgatgcaatttttctggcaacgtatcgagcgtagatatgagcatcactgatatgaaaatgcctagttttggcctagatcgaaaccattgttgggtttcttcttggcgacgtatcaggcataggtaagggcatcagtaacatatgataagtaccgggcacaggtacaagctcgtctgattagacgatgcgatatattgttgtcatgttatggcacggactcacctgattaggtgatgcagttatgtgatatatgggtgtaggtttttggcacaatctcacctgattaggtgatgtaattatgcgatatatggttccaggcaatggcacaggcttgcctgattaggcaatgcaatacaagattattagattaaagtattgactttcctaattcggcgacgtgatgtaatgaagatggttactttataaggtaaaacgtatatatataatttatatgattaaatgaatatgaattctattattggtataatggttttctattatcaaatagttgtatactgatgtttattcatggtaaataaaagtagtaatttggatttcagcttatgagcaattcgtggttgtttgattctgattgtgtataaattggacggtcttctttagcaatgtgcatattgacctcgccggcctgcgtgctgggttgccaggagttgttttgggttgtattcatggtgtattttagttttatgtttttgaggtattgtcgtatatagttcttttattaaactttttataacaggaattcc

SEQ ID NO: 363629 - DNA, 994 bp, Cannabis indica
gaagaaacccataaaaaattgcttgaccatattgatgatatcatttttaacaatcggccaacacttctgaaaaagctaggggtcataccgttgggccctggggatttatccggatgcatttggaacaaagctttgcgaacctcctcacctaaaaccggtagcaccaacttggcattctgctgtgaagatacacgagtttgcacacagtttgtgacttctctccaatcagtttgagaagataaaaaaagttcgttaaaataagaaaccataagttggtccaaaccactatcccagtcaacccacgcaccagaacgatctttaagttttgccacaaaattatttcttcgtcttgtagttgcagaagcatgaaaatatttgctattattgtctccttcttgcaaccataattgcttcgatcttttacgctagaaaacttccctttgcacataatcttcggccaaatttctctttgcttgtttataattggcaacgaagacttcatcacgacccaatttccacctttggatctcatttttacacttgtttaatctttctttaaagttcccagtaacctccttaccccaatcgaccagctttttcccacaaaactgaattttattcataacttcatcagccccacgaatctcccaactatctttaacaatctgataacaaagaggttccctcaaccatgcatttcaaactgaaaccacttcacaaaattatggccagcagcaggaaccatgaccataagaatcggagcatggtctgaagttgaaatttcaagattatggagcttagtagaagtgaacatgttcaaccaagcaagattagctagccccctatccaagcgcacttcgatccaatgattagtaccccgcccacgctcccaagtaaacaaataaccacataactccatgtcttgaagtccactatcaaccaaagactattgaaaaccttaaattaaaaaatcagggtacctattaccgcccct

SEQ ID NO: 363630 - DNA, 500 bp, Cannabis indica
aatatgttgaagaaagacacacacttattagttgacttcaaaatgaatctgttaagtgcagccattcttcctgtcagggcttgtacttccttaggctttgtcggtgatggcatgtctattaatgccttgattttttttagatttgctttgataccccttgcattaactatgaatcccaaaaactttcttgaggaaactctaaaggaacattttttcgggtttagcttcatgttatacttcattaatatcttgaagcattccgcgaggtctgtggtatgatccctactttttcttgattttaccaacatatcatggacgtaaacttccatgttccccccaattttatttgcgaacattttgtttacaaatcgctaatatgttgccccagcattcttcagttcaaatagcatgactttataacaatacactcccatgttggttacgaagcttgtatgttcttgatctgggacatacatttttatctagttatatccagaata

SEQ ID NO: 363631 - DNA, 460 bp, Cannabis indica
caacaatacgtatattatatgtatgagttcaaaacaagaaattgcaaagtatgatagtagtggcagagaaggcatagatgatgcaagttgttatgacgagagtggtgactgaggcgaagaaagccgtgacagcaaacaagagtcctagatgttctaacatacgagctattatgggaaacttggaggcaatgcatttgcttatcaacactaaagcaaatgagagtaagatggtcattgaaattaaatcatttatattgtacttaaatttgagttaatttgggaccagagacttgctatctgtagtactaagctatgtagtcaaacgcaacgacacaacttcagaatctcacacaatgaacaaaaaagaatccataaaaagcaaatattcatctctaaaatcaaaataattaacaactcaaactgaaaaactggaaagtgagataagaggagattgaacctc

SEQ ID NO: 363632 - DNA, 722 bp, Cannabis indica
ttcataatctttattattgttgtgtgacgaaactagttccttgatgaagaaaccactttcttggtgaagaaactggtttcttgattaagaaaccactttcttagtgatttttccggtatttttgcattagtaaccggtctagattgccacattgagtttgatatttttcagtacaagcaggataagaatatgcttgtacaagtgtttaaagggcaacaaaaagattaccaagaatgctatctaagttgtctttattgctaacaattatagggataatgatgatcaagtagtcaagttggttgtattgtattttgtttagtgttacttgctagggggtcctccaggtaaggttatttctattgaggaacttgacattgtgaatattgaccgttacaacgagtatgggtggggcaaagagtgcttttagatgactattaaatcttttaagggtaagatcgatgtcgatattatgacagttaagaagaagtaaaaggatggtgcttttataggttgttaggttttccgtatgcattgcaaatttaattttttgagtgttgtccctatgttgttgggaaactatctttgtatgcaaacattggcattctaaggcttcttagctagcctaaaatgccaaagcttaaagtatctcagttgaaaatggacaacatcaattaacaacatcatcttcaatcaacctttaaaggaggcatatgtgttgtttt

SEQ ID NO: 363633 - DNA, 624 bp, Cannabis indica
aaaattatttgcacaaatatcgttgtaccacattaacatacataccacaaattaataaaacttattaaaaaaactgataaaaaaattaattttacttaaaaacctaaattattcctaaaaaatatttccaaactttattttatttataaacacgtatcttaaaaaatcaaaccaaaattatcaaaaatcaaatacataatttaaacaaactaagattttttgaaaaaaaaaaatcaaacatatttataattataaactcatatcttaacaaataaagagaaataatcaaaaattcaataaaaatataaaattattttgaaaaaaagttggaaattaaactaaaaaatgttatgtttactaaatatacattttttgagaaaaaataaaatagactcaagtttgttcctgtaaaatttagtttttacaaaattaattttttaatatttttttaatatctaaatgaattttttagtaaaaaataaataattttttttaatcagttaattagttttaaaattttaatttcttttttaattatcttagtcattcaaaattattttttttaaggatctaaattaatattttaagatttactaaaaaagatattgaatctttctctttttt

SEQ ID NO: 363634 - DNA, 1169 bp, Cannabis indica
ctttcaaatcccacaaccacatcatgctttcctttattgtgacaaccattcagcaattcatattgccaaaaacccaacatttcacgaaagaacgaaacacatcgaattggactgccattttgtacgagacaaaatcaaaaattcaaccattcgcctcgttcctatctcgggttcacatcaactagcagacgtctttacgaaacctttatcctccaccatcctcacaaatcatatttccaagatgtccacatatgatatctatgccccatcttgaggggggggggcggggtattagaatttgtgaacctattctagtgtctgttagtctgttagttagttgactgttattacaggtttttactgttctttctttctttggtttatatcagttaagttcttaactaactctgtactggtttgtatcatagtcggttgtatggttgtatataaaggcctgttctgcctttgtgtaaaagaattcattcattcagattaataaaacactttttattttcttttcgtaacatggtatcagagcaggaaagattagcctttcctgtccgatcctcttccccagctgaatcgtgttcttcatctccgattgagctgtgtttccttccgctgatctctctctttttcttgcttaatctcaatcgtttcttcttcgattgattttctgcaatgtcttctgataatcgaacgattcaaggtactcaagatgagtccacgatccaaactgccattggagatgttcaaagtccttctctgcaaatttctgcttcaagaaatcctcttgaagatccagcaaacccctactatcttcaccatggagacaatccaggacacacattggtctcacaacctctcacgggacaggacaattatgtggcttggagcagggctatgcagctcgcaatttcagtcaagaacaagatcggcttcttggacggttcaatccctaaaccttcaccttctgatctaattctttacaatgcttggataagaaacaataatattattatatcatggattttgaattctgtttctaaggaaatttcatctactatcctctatgatgaatcggcatctgctatttggaatgatcttaagatccgtttccatcaaagaaatggacctcatgtatacaatcttagaaaagatttaatgga

SEQ ID NO: 363635 - DNA, 915 bp, Cannabis indica
ttccgaagatcgtcacgacatgtacaatcatcatcagcgatcagcttgtttcacggttcaataagcttttattgctttagtagtttattttaatagtatgatttaagaaaagcatgttaggaagcatgttagtaacctgatagtagaataggtgcatgttttaaatttccaaataagcagcaattaataagttttacttgatcacgatctgaccagactagctcttggatacgcaggttgttctaatactatggatgccacgtgaaacacctggagccagggtaacgcggttggatccagtggtggtcagggagtttaggttcccctaaatattggtggttgaggtagaggtcctagaggcagggcatgtggccggggtgatgttaactcgccacaggctgcctaagattggaaaaataggtttgcagacatgcaagctaggattaatgaacaagatgaagagatttggtgcttgagacagcaggctgctcctgcaatccatgtttcagaaatactggtagctcctacccctgttgtgcagtcaggaccagttgctgcagtaaaccgaatggaaccgctgtatgaaaggttccgcaagcaggcacctccagttttcctgagaggtcctgatgttatgaaagccgagcagtggctaacagtgattaccagaattctgaactttataggcatcaccgacaatgatagagtggcatgtgccacattccaattccaagaagatgctctagtgtggtgggacatggtttccctgactcatgatgttacaataacgacttgggaaaagttccaggaattattcaatgtaaaatattacaatgaggcagtcagaagcacgaaaaggaaagaattcactcagctaactcagaaagaaaatatgagtgttactgaatacacgac

SEQ ID NO: 363636 - DNA, 744 bp, Cannabis indica
tttatatgtgtttatttatattgttttagagattcatatttaggatgttaaacaacatacgtggtagtaaatctagatcctggtaaaataattccaacaataacccctatggtttccccatgtcttctggtcctcaagcctctaggtcttccccgaggtcgtcaggtggatgtgttaggttggttaggaggggcatcattacgtgcaacccttgtagtcgctgccttacgctccaattcagtgtctctccaatttgacttaaccaatcattgtcggagttgtctattttctaattccattaatagaacgtatcgagtgggatcatagtcatcctcacttcatctttttgggattccaccccaagactattcaaattctccactatttcctcctctagagcgaggagtcttagttgtatttgtcatatgggaattctgatgttccttccctggacgttgagttatttctcctagttgattatctttgttttgaggtgtgacagtcagtagtcccatgatccgtaaggggaaatactaggtaagttgtgcaatcccacacctcctggaaaaggtcaagtgggacgattctatgactatgtagatatgagactacacagttgaagaaggcttaaatagattgattggtactacctatatcaacaaggtgcatcttatttttgatagcccatcacgaaaaaactccacggttaagcgtgcttacttgggaaaatttcaggatgggtga

SEQ ID NO: 363637 - DNA, 594 bp, Cannabis indica
caatacgacctaatacggcattccaaacgagcccttagtgaataattaattgagtgcttatgtactcacttatcgtgtgtctaaccatgtcaatttcgttaatcataaattgtgagaattgtgacaaattattgataattcatttaatatcatacaagaccatttttatatgattatctttccatagttttgttatgtatatgccttttgtgattttgagatttttctttttatgaattttattgttattattatgaaattcttttggggcatatactgtggaaaatctgtaataaaacattgatcatgatttgcgcatttaccatacaaattattgtcaatatttaattgatatttttcggtaataaaattgctagaaattcaaaatgcgcatttggtattagatagttatgagattgaaattattcattgaatgtgttaagcttacctatcgtaagttttcacatgtcaattatcgaaaattatgattcatgttaacacttttcccccgtatcaatcataattattactaagatccatacatgtaatttagtcatcctgtcaatgattttatgatgaaggaaacacattaga

SEQ ID NO: 363638 - DNA, 735 bp, Cannabis indica
tttccagccctataaatagtgaggaatgttcactgggcaaagggaccgaaaaattataagccgaaacacagtaagctaaggctatctaagaattatatattcagagatactattgtaagagttataagaaaaggaaacttcttccttgttcttaagtcaatacaaataacgaggattaggctattaccgaactgctcggggatgaacctctataaaatttctgtgtcttgttattgctttattatatattctcattacgacatatcgtttatcgcttataaaaaagactcattgtcgttggctaaaagcgaagtcaacaaagtgatgattcaatacaaattttcatagcaaatataaatttttttttcaaacattttgcttagctttattttttccaacaaaattttaaagtgagtaaaataaaaagtgatatataatcattggtatattttaatgtcacattctacaaattttgattaaataaataaaatgaaaaataaatttcaaaattaaatctatatatataaagaagaagtatgaggcggtgacgtggcggtctaaaatctctcgaaagctattttttttctccttaattctcttaattttttaatattttattaaaacataaatttacaaattaatattttactactattttaatagattttctataaaaatatctatcttaaattaattatttttttaaaaaacacataatgttgcccctgattttgc

SEQ ID NO: 363639 - DNA, 516 bp, Cannabis indica
ctaaggatatttttgattggagtgttgcatattttttttttcaatatttggatgtgctgcaaagtcaggtgccaagatcttgtccagctagtaatacaacaccaacacgagttcaaccatctatttcaagtactttcaaaattttcacagatgcaaccactaattctcatagaaggaaacatagtataggagtggttcttttggatggttgcaaccgggttaaggtaggtttctctactccttttcttggcttgttcctcctgctgttgctgaagccaaagctgttcatcaggctatccaatgggctcaattgcttcgtttactggtggatgtgttgatgactgattgtaaatcaatagtagataaacttcaatcttgcaaatggaataacaatgttttagatgatgtaatttgtagcattaagaacttagtatcgtttagtccgggcctaactgtttgtcatgttggtaggaattttaatctcttagcgcataaagttgttggaaatttatttta

SEQ ID NO: 363640 - DNA, 502 bp, Cannabis indica
aaatatttaaataaataaattataaaataaataatatttaaatcttttattttttaaaaaatatttaatatttcattttcaatattaacaaaccacgtcaatttacagttcattatatatttgagtttttaatttattttttaaagtgataaaaatataatttaaaaatactataaatatttttatcaaatgtaaataaatttagatacttggaaaaaataattaaaattttattgaaaataaaaattttatataggataagtatttttttaaaaaaaaaaatgtgatctggatcacattaaaacattccggagaagacttcaacaatcggtgtctgttgcccctgattttgcccaatatacgtggaccaaccagacaaggacacgtggacacaaaggctttagtgctcaaaataatagctaagtctttataaagaaaggcctaatttgggacctgcctcccggagaaggcatacgaagtcctctatgctcccggatggcaa

SEQ ID NO: 363641 - DNA, 620 bp, Cannabis indica
tttatagtggaaatgtgggggtgtgccacaaacttaatcaaaatgtgatgagatattgttaattagttatttgattttgagctcaaattctaaatcaattttggctatgtgcatatgcgaaaattttgacatattttggtgtcaaatttagtgaaaagagaaattatagagacaaagaggtcttctatattttaaaatcaagatattatcttgatagtgaaatgtgagaaagtgtgggggtgatatccaatatttatcaagcaatttggtagaagaatggatgatatgtgaaatttaggcatgcttggtgcctaagacttgagtataacttagacatgtttggtgtctaaagttagtgtataaattttgatatgcttggtatcaaaatttgtgagaaatagagaaagtgtgaaaatttatcttctatgattaagttttcaaagcttaagtatacttaaggagaaaagtggtcatgtaataatggacattaattgtaaagcccgcttagttaatttggaaattagcagctgtttatgtttaattatgaaattatttatagctatttaaataatttattactgttatttacggaattcagaaatgcatgatcatgtcatcag

SEQ ID NO: 363642 - DNA, 536 bp, Cannabis indica
ttactttttgaaaactacttctctgttagtcaggaagtaacactagtagttaatgaattatttgtacactaacaaaaactatgtaaaacttttcatagactaaataagtatcttgactgcaattttagcatttagtctcactggtaaagttagagattttgaatcagttttacacttctccaaaatcactgctccacccttagagtaatcatcatctcatcagtacactttctagcactaatccaagtctagaaacctgatttggtgtagtctaagagtaataccacccttatcgactaacatatagttcctcttcttgatcttaagattcacttgattgtcttctaatgttcctttcatggattaatctgataccaactcatttctcccactcaacaacaggtgtttggtctaatgcatataagagcatatctgagacctctcactattgatcttaaggaattattttatggcttttatcttttctagaatagttgaaactgttccttatataaataaaatctatgtctagaagt

SEQ ID NO: 363643 - DNA, 694 bp, Cannabis indica
agcgagtaatgtgatgaacaatttacgctgtattttgttccccacctcgcttgttggagtagcaagtagcttgtttaacaaatttactcataattcaataatttcctgggagcagctgtctagggatttcaagaagcaattttaagccgctagggataggcaacctgaagcggcctcactaaccaatataaagcagcagcccgtcgagacacttaaggcgtacttaagtcattttagcatggctgtcgctagggtttgaaatttggatgatagcacgcatcttaaaaccattcaggcggggatctctactgatccattaactgcaggggtgagttgtgggatgacttacaaggacgtctggtgagaagtgtcactgagttcaacgaaagggccaggtgtttgtccaaaaggaagaagcccgaaaggagatgaacttgttgaaaacaagctcgggaaacaaacccagcagtgtttcaacatgtacggcttgcacgagaattgataacttgggggcttcttgtctgaagagaaaggatggaattaaggaaccgctgaaggaaagaaataaacaaaagaggcatgacaaatacatgccagtgtatactatttataccatgcttaatgaaactcgggagaatatttaccttgcacatgagcagaggtagccttcggcaaacctgagcctatgaggaat

SEQ ID NO: 363644 - DNA, 553 bp, Cannabis indica
ttaaactataaatgagaatttatgttactattttttgaatttcgatatttattagcaacaaattttattttaattatttatatcattaatttttttaataataaaattaaaattttaatataattttattaagtatttattattaattaaaatatataatttattttttatatataatttaaaataatagaacaaaacttgatacaaaatataaaaataatttacggtataaatacttaagtttaactctcagttacaaataaatacttaaatttaatttttaactttcataatatttaagttataattttaaaacttctataagtacctgattaaataaattgatatgtgacaattttaattcgtctaaattattaaatttttattattttaaaaataaattaattcaaatataccaataaaaaaaattaaattaccaataaaaatataacttaaatattccaaaattttaaaaatattacttaaatattattacctagggttaaactagccatttatccgagtaatgtataataacaactccttaaaaaaa

SEQ ID NO: 363645 - DNA, 1062 bp, Cannabis indica
gaccgagaccttgacccgaacccagaccaggtcctaaacgtgagacccgatcccaaacccagactcggacctagatagggatctcgacacgaacttggactcaaacccaaacaagccctagaccgagattgaaactcgagaccttgattttgaccgagaccctgacccagacaaagacctggacccgcacccaggacccgaacttggacctaacctgaacccagacccagaccgggatctagaactgcaccaaaacccagacctagactcggaccaggattcataccccaacccagacccagaccgaaatcttaacctagacactaaatcgaaattgaaactgggagaaggacccacacctgaatggacccagatcaggacgtaggacctggacctacatttgggacctagacttgggcctcgaaacctagacccagatcagaactcgggactcggacccgagcctggaccgagaataaaacctagatctggatacatactgacatcaaaacccaaacccaaacacggaccaggacttgaaccccgactgggtcccgaactcggacttggatgggggacctccacccgtgacatgggcataaaaattgggacagagaccccacctcagattcggaccctaacctaggacccggacaaggacctgagacccaaagtcgaactagactgggaccctgacctcatggcttggaaccgacccgtagtcagtctttggatctgggacccatacccggactcaaaccgagacccggactcagaccctgaccaaaacccacacccgtaccccagacttgggtccgagtcaaagactgggtttgagtctaggaactagaatctgactaggacccagacctagaaccggacgagatgccgacctgaattacaacttgaatcaggattcaggacacgaacccaaacccagacatgggcttggaccaagagccggacccaggacctggacctggattggaaactcagacctggacccaggacccagacctagattggggtcccaaactaaaaattagaacaagaatcgagacc

SEQ ID NO: 363646 - DNA, 568 bp, Cannabis indica
gcagagatgactttcttgaagtcggcacccattcttaatcgcaagccaaaatctggaacagcggcaacttcccctatcgttcctcagaagaggaagagcgatgtggtggttacccatgtcgcggattcttccaagaggccagcgaagggcatacaagagaaagggaagaaggtcgtgattgacccagctgtccgagcctgcaacatactgactctccaaaagaagttcgtaggcgatgaattccaatcgaagatcgacaagactcctgctgcagagctgttacctcgctctgtggagttagcttcgcagttcattgccatgttctcgaaggcctttgttactggaggacatgaagaagttgaaacaagatgcgacttccaaggataaagagacagaacgttcagcttcaggaggacatgaagaagttgaaacatgatgcgacttccaaggataaagagctcgaggaactttgcaaggccaaggagcaagtcgagctcgaggctaagagtgctcagatgaaaatcgaggagatgtctcgcaatttggaggccgagaaggagaatgggaa

SEQ ID NO: 363647 - DNA, 974 bp, Cannabis indica
tttatcataaagacataattcatttcataacgataatcaacagtagatcagcctaaatattgagtaatcatgaactcttgttcatgttaatagtttctttgatttactcattaaaatttctcagagaagatgattcttacaaattttattttggaaatctaatagtgtggatagttgggaacatgatttacaattatggaatcttaactttcttagcggatcgaatgttagttccctttaagtgttaattctagaattgttaagttgtgcacaaatttagatgggatctaataatacttccactagtgaattaatggtaccaaaggataaagaaagtaatttgaccaaaactaattacgaaccaacacatagtggacttgattatatcaatggaaactgtaataaaacttagtaaatataattctacaattactaagagttcaattctatatttttagtggacaatcataaaattaataaacaaagattatttggctgatgagactcaataaataatctagtttattggagcttagaattataggtctatggtccttaaatcgccaccttgaaacactatcaagggtaggaataaatagtagtataatattgttcaaaaaaatctattttgaattggaaaaatagtaattatttatttttgtaataaataaataattttgtcaaactaattaaatagggaaaagacaaaaattgtcaaggcaagatttgttgagataaaagttgtcaggacaaaagatactaaacttatcctaaatagacaagggtaggtacctagcatatagcctgtccctataaagtttatctttttgggttaattaattatttaattaataaattagataaatattagaatttaaaaagtggtcttagatatgtcaaagtggttgagagatttctgttggaaatattttaccgggatctagatttactaacaagtatgtttcattaacatc

SEQ ID NO: 363648 - DNA, 710 bp, Cannabis indica
ttttatactatcttacttatatcaatataattttctagtacgcattggatgctagaggtcgttgcgccaaagaaaattattaatttagtccctatacgtgaccaccaagttcccgaacaaattacttaaatgttgggaaggtaataacttaataattatttatgtaataaattatttaattaactaatgaattgaaatgctaatataatttttcaagcagagcatatgcatatatagggacatcaaataagtatcttggcctgtgaccaagaatttctttagcaaattgtccaagacaacctaaaaactaagaatgtggtttttatgttttgaaatacatgactgacatcgtcgcacgtgcaaaccctaaccgttacatacaagatcaaaaagctgcaagttttaattattgattatagtatttattataataacaaataataatatatataaactaatataaatttttactttttttttaacagtttggagataagcagcaatacaatctaaaaattgaattgttaccaatatatcgacagtggatagaacggttgatgacaatgattcacgatggcttggacgattgaggctgaaaggcctaagaatttttcttccctagcttttttttttttagattaactagtagttagatttattaacttgtaattaatactttgactaatttttacaatatttgtgtaatattt

SEQ ID NO: 363649 - DNA, 657 bp, Cannabis indica
ttctttgcataaggtaaaatctagagtaatcgtcttaagaattttacgataactcatatccacccttgaatctacatccatatgctttaaatatagatgatcctactttcaagtaaaaatatacatattttctctctgcagagaatgatcttgtcaaaactactaagattaagatgcaaataacatagataaataatgtggttgtggtctttcaatgacttaggtctagttaccataaagagttcttaaaatagtccaagtggattctggtcacagaatacaaaactcattatccatacattaacatacaatttggatccattgatagttaatggatattaataacttgtgaaagtcatactgtattgtcgaatgtattctaggaaactgaaatttaaaatttctatttagaatctaaaattttaagtcaaagacttaaatttataccaaatatacacgagtaattattccagcttggacaaccactactaatataactctaagtctaagttgtcttaagtaagcatatacaagtaggagattttaagattgaggatttatatcatttcgggatagaatgtcgagaatatattcatatgcaccattcaatttcataagagaaaaatagaaatgacatcataagcatatgatttataa

SEQ ID NO: 363650 - DNA, 559 bp, Cannabis indica
aaatattgctaaccaatcgtgggacgccacctataaaaagtactggacaaaagtggtgcccaatagcaatgttgtttctacaatatgcctatagccgttctctttccttcacttctcacacgaaataaaagtccaataaatcatcaattgtttttccttaatttaggtaaatagaagaaattttaatatttttatgcaatattcaaataataaaaaggtaaacatcatgccttaatttaggtaaacagcgtgtctaaataaggcatgttgtttactttaaattaacacacgttgtttaccttattttaaggcatgtttacctaaattaacacatgttgtttatctaatgaaatattgtttaccttattttaaggcacgttgtttacctaaattaacacatgttgtttatctaatgaaatattgtttaccttattttaaggcacgttgtttaaaattttgaataaattattatttgttattttaaatgacattgcaaattgttgataatgtaataattatgaacatcaaagtgccaagaaacaaagattttttttttttt

SEQ ID NO: 363651 - DNA, 569 bp, Cannabis indica
agagatatcattgctgaaaaggaggttagtgtgaagaaaattggaacaaaagagaaccctgcagacatgatgacaaagtatgtaagtttagccaagtttaggctttgcctagacttgctaaacatcctcaattgctaaatgaggattcaagaccagttcagcccttatcatcatacatttcctctattaatgaccaaggtggataattgttatgattggtcactaatagaggaataatcaacatcggctaagacaagttttaactaccctaacggttttacctaactgtcagttatgacaattaggatcgggtctctaaactaaggctataaatagccaattgctgcagcattctggtagcaattctaagagagatgttcgagtgctagtttagtgaaacagagagtgattctgagagagagagttgtttatgtaattgaagctttgcttcatgagtgaatgtgtcaaagaacactttgtaatcaactttgtaatcctctctattctagcatcaataaagactaaagccatttgggctgttcttgtaacgcccgtattttataataata

SEQ ID NO: 363652 - DNA, 530 bp, Cannabis indica
aatttgatcgtttatccaagtttgctggcgatctagtgccaacggacttcactaagaaacataaatatgtaaggggactaaatgccactatcaatcaggacttaaaaactaccaccaatcacgatacattatacaagaaagtggtcgagttagcgttaattgctgaagaggcagaacaacatgtgatcaaagaacatgctgttaaggatgtcgtcacagcatcaagtcagtaaggggactgacagtagcaactcagaccataagtggaagggtgaagcttctaaaacatcaggaagtaatagaaacttttgtcggaacaaaggtggtcgtcaaggtcgtgggtcttcatttagaacttacctggagtgtcccaaatgcaaaaagcaccattagggtgagtgtcgagccaaagcatgtttccagtgtagtatggtgggccattttatcagagactgtccacaatccaagaaagaaaaatcaaagaagaacaacaatcagaacccaaggtgttaggctattcttggcctagg

SEQ ID NO: 363653 - DNA, 660 bp, Cannabis indica
cagacctcgtggctcacgaactaggagaaagaaaaaggcccgagaagaacaacccaggaaaaatgagataccccctgagaatcaggatgaacagccagaaaggagacaaccggaaactgatgaacgagaaatctctcatgaaaatgaggaggatgttggaactcagccaggagaacagagatcacttgctaggaatcaccagcgttcttcctaaacccatagagcaaggactcgtacgtaccctgatggaggaaatacgacaaactgctctcgggaggaagaatagagcgtgaacaggcaagtgtgacttcgaggcaattaagaactcatagccgatcaactcgaagaggagaaagtactcaacaagctaatgatcgggagagtatgggaacaagtaaattcgcgagccacttaaaaaacaaagtctataagtagcacgcggtcaatgagtaagatgagatctgccagctattactcccaaccagatttgcgagagcacttgaatcgaaagaaacctgaccttcaccaacagcttggtccaaagcaagaggatccaatccaattacggataaacgagctggaggacaagtttaggagatatcaaggtgggggaaaatagggaaatcatctggatacaactctgacgaggagcttgagccg

SEQ ID NO: 363654 - DNA, 587 bp, Cannabis indica
tattaaaatttatattttatatttattatctaataatttttatttaaataggaggaactgttgaaggagcttgataggaaaagacttgaacgacaatcccagagcgatacatctggtactgaatctgatactggttatcagtttgacgttttggaaacagttctaggcgaaagatctgactatcaaagaggcgtgggtaaaaggctcaagggcaaaggaaagaagtcattcactcaaagtcaatcgacggtgcctcctccaccaactactgaaatgatgagcactgtggcagaaatattctcaactatgcgtgccacttggggggtaatttgacgcctgaacaacgtgctcatttatataacccacgatttgagaactttattcaaacgtatagtcagtcgcagtcgcctggtggttcgtcttctcagagttatgccgctcctccacaacagcaacaacaacctcctcaaccacaacagtcgtcttcgcaacaacaattccaaaatttatcacagcagcaatttgaaatttttttgcagcagcaactccgatcttttactcagcagtaaccccaatcttttccccag

SEQ ID NO: 363655 - DNA, 755 bp, Cannabis indica
tttacaaatactcgccttagcactaagtctccaacgttgaatagctttttcttgactcttttgccgaagtatcttgtaagtcggtgttgataagctgcattagtgacttgtgacttagttcattttttatcaagtagatccaaagataactttaggagtacttggttttcttcttgattataaaactctcacctatgagtcgatatgttcacttcaataggtagcattgcttccgagtcaaatgccaacgagaagggagtgtgtctcgttgttgttttttcagtagttttgtgagcccacagtacttgagatagctcgtcagcccacctgcccttggcaacatctagcttcttcttgatagtatccttcaaggttttattaacagcttccacttgtccatttgcttgaggtctggatactcacgagaagctcttaattattttgttcctttcgcagagctcagtgaacaagtcgccattaaactaggttccgttgtcagatactatcttcatgggaattccaaacctatagacaatgttcttgacaacaaagttaaggactttcttgtaggttatggaaacaagaggctcgacctcagtccatttagtgaagaaatcaactgctagcactgcatacttggctcctcctcgccctgtgggtaatgccccaattagatcaatcccccatatagcaaatgggtaaggcgaggtcatcatccttagttctattggcggtatgcgaggtatatatgaaaa

SEQ ID NO: 363656 - DNA, 711 bp, Cannabis indica
tatatcataattctattttttttgtaaaaatatatatatctataattaataaaaaaaataaaacaaccctatcacttttacaaaccctatcagcttactaagtaaataataaaatagtaaaataataaaataattaagaatccaaatgagtaataaaatacagctgtattctttattgtttattcatttcaataataataataataataataatttatttctctcttggttacttaaaactacgtaaccctaactctttctttctctaaccctgtcacattttctttctctaaccattaactctttctttctttctctgacggtggaaacacatcccagaagcgaactgacggcggaagcacctcccagccagcgaacgacttcccgacctgacggtcgaagcacctcccagccccagcgaacgacttcccgacctgacggcagaagctccatgcgacaccggcagctgaagattcgagtcccaacccccaaacctaaggtcgatttgttttctcattcatttctcagtctctctttctctctctccgtctctcatctgtgcaggatctcgatgtttgtcgttcgagttcgtggttgatggagtttgatactcgttgtggaccatggtttttatggtgtttgggttcgagaatcaaggaagttcgtggatgacggagcttcagagcttcgagtatcaagactattcatcga

SEQ ID NO: 363657 - DNA, 423 bp, Cannabis indica
attagttttggcatttaaatggttagaattgaaaaagtggcatttttgagaaaataaaagaaattttgtcaaaagtggaaaaattccaaagtggggtcggccactatgttggtattttccacttaatattttcattattttaatgcctaataattcctaacctaaacctagtgttacctataaatagatagtgatggctcaaacttaaactggatgaaaaaatttcttgtcttcagaaaaattgagcctcctattctatacctatagccgaacctatacctctctcttttcttcttaaaattttcatatccttgagtgatagagtgagtgcccacacacatcaagtggtatctcaattataatgtggaagattttgaagaatccaaattgaagagaaggacattcgggctcagatcttggtga

SEQ ID NO: 363658 - DNA, 913 bp, Cannabis indica
ataaatatcaaatagcattggcacataaactaattttcatcaaccttctttgctaagtaagcttcagagcgaaaagagagattcttggcttcaaagttgccgaagcgccttcatacaaactgcttgttggattgacattgcttgaacctagacatctgactctcgagtaagtttctggtttcctttatgcttatctttgcatgtttatatgtcaaatgcaccttctactttgttgtagaaaatgtttaggaaaccctaggtccaaaatcctctgcgattcttctttatcatgtcttcgtgcaattttacagtcataatacttgtttctgaattgcgtaacgtctatcttccatcttgcttattctaagcttcatgaacttttttgccctaacttgagaaatttttttgcccaaacttgagttttcttcaaacataaccgttttttaatctgttgagtactcctggtcagcatatttgcttgtttagcattcgatattctgaccaaacactcatcttgtgtgttgtcttttgtagatgaactcaagtgagtcttgggagaacagacatcaaatcgatcaggacctgcttcaacttctgcacgagcatcatccctgtcttcgttctagcccaccttcctctagcaaaggacataattaaaaccatgtacccagccatagaatgatggctcgtacaaagaaaaccacgcatctggctgacacatctaatcctcgagtgactcggcacgccactttgcccaacgccgaacaggatccagctgcccaggtggagggggatcacgaaggggacgctgaggtccaagagattgaggggcagcatgatgtatgtcctggcagttcctcctccgaggaggaagaggcagaggttgaacccccaaattatggggagtacaacg

SEQ ID NO: 363659 - DNA, 721 bp, Cannabis indica
ctttatatgtttttattttatcgttttaggaaaatcatatttagggtgttagattatagttaataaccaaatatacatgttagtaaatctagattttggtaaaataatttcaaacacccaccccacacgccacaatctagagtgggcattgatggctggcttcatcttcaacctccagctgggttagtggcgagttgcgcgatccaattcggtgccagtcgagtctggatgattttcggccaaaaatgcgatgaaaataatagaagttcgaggggttttgttcggaattggatttataatagattttggtatcattttcggttataaatggctaaaacaaggtaaatctgattgatccaacccaaaaatatgaagaacaaaaaaacattggaatcaatcagtataaacaaatttaattcaaaattttatgttgtatgatatcttaaaataattgagaagttttatacacaatcaattaaaaattattaacagcaaaattgaaaaaccaaaaaattaatttcaaaattcaatcacataaaccctaaatctttaaacttaaaattttctcaatttactcaatgatttcatacatataataaatcaacaaaaaaaagaatttaatgaggactaaaacccttttaagattaaataatgaaaaattcaacataaaataataacaaaattaatatataattaggggtaattaatatatatatatata

SEQ ID NO: 363660 - DNA, 650 bp, Cannabis indica
taataaattactaatttttcaatttacatattcagtacaattaatgggaacaagaatctcagccgacagtccccaaagtgctctctctctctaattggtttttttttttggtatgcaagacacacaagtattcattaacatctttagacaaaaaaaaaaaagtattcattacgattttcttacttttggcatcattagtttaagaaggttttgctctcaagtgaattcgggtcgggtcgttctctaaagaatggctgttcgccttgattgcatgcagagccgataatttctctgtcgtcacggcacatcgatgtcctctctctttcaaaaggattttcttacttgtagtacaaggttcagattttttttttttcaactcgagatagtgaatttcagagagtttttaactttttattatttattttattttttacttttttttttttgttagtagtaattttttcttattttttgttcgagtgaaattaacccactcggctcccataaatttgattttggtaaaaaataatataaaatagaaaaaaaaaaaaataagagaacaaagaaaagaacataatgagagagtgaatgtagattttttttcagtagtttattctgatgggataaactcttatttatacaaaatatag

SEQ ID NO: 363661 - DNA, 652 bp, Cannabis indica
ctacaactcctcaaggaaaaataacccctatttcatctcaatctagtgagataatatgttttaaatgtcagaagcgaggacacatagttagccaatgtccaaataagagagttatgtgattcgggaaaatggtgaagtagattctgaagatgaagaagagcttgctgatataccaccattagaagatgcttctatagaagatgaagagtatgggacagaatacggtgacatgcttgcactagtcaccagacgggcatgtgaccccttgatgagggcacgagccaagagattcaaagaagaactcaacaacttagtcaacagagtttaaaacaagaggagaccgcagtcaacactgaaggagaacaaagatttgtgcttctcatcaaagtagactcaatttagacccaaattgagttgatcgtgtttttcaaggcatttgacagctttccttttgaatcttgtttcctttattctatctttgttttatttagaaaattttctttcttttagtttccttttttcttagttgtaagttggctatataaagccttgttaacactttggcaaattagattatttttgaattttttttgagaggttttcttcttgagttcttgagagaattattcgaacttatcaaggagtattcctt

SEQ ID NO: 363662 - DNA, 671 bp, Cannabis indica
gcatgcaggtggcatgctgatgcttagtttgtatgcagtggcattttcgtaaatatcttcaatattgtccggatcgggacgggacttggtattcgccatttatttgggtctacaaatagaatggtgcaatcggtttggcgaaactaggtgatttggtatatggtgcttcccatatgtctacagagcaaaaatcatctatgttcctggtagaaggctaaaagctcagaatgctctttaagggggtaccctggtgtcagctctccaccaccccttgcaccttggtgctaagtgagctactactagccagtggggactagtagggcgggcatatgaggaccacgaggggctcatatgtctccatgagttggagtactcatggacattatcgggccgacccggtagtgcgtcgaagaatgccgccagaggttcaatggtacgtttcccttggcttgccggtatgccgcttgcacgagacgtggcctagatcctccaagagacgtcgtggtgcgcctaggccacgagtctcaacacgagatgacacgggtagtcattcgtgggctagtttgcatacgcgcatgggacggatgcaccatgttggaaagggacagaggtctaatgtatgcaactggtttggtggcttgtcttgagggcctgccaacatgcgtggaggc

SEQ ID NO: 363663 - DNA, 1319 bp, Cannabis indica
agctttttgaaggcaaaccaggatcaattcgcctagagtcatggggatatgatagggatcaaccctaagattatctatcatcacttaaatgttgatccaaactacccggcaaagagacaaaggaggcccttggattccgagaggcaaggggcactataacaggaagtttacaagctattagtcaacgattttatacgcgaggtattttatccctcgggatagccaatcttgttctcgtcctaaaacctaacggaacttggagaacttgtattgatttctcagatctgaataaggcatgcccaaaagattgttttccacttcctaggatcgacgagttagtgggtgcaactgctgggcacgagcttacatcttttatggacacatattctggatataaccagctaaaaatgtatgtcccagatcaagaacatacaagcttcgtaactaataatggactctattgttataaagtcatgtcgttcggactgaagaacgctggggcaacgtatcagcaactagtaaacgaaatgttcgcaaatcaagtagggcgaaacatggaggtttacgtcgacgatatgttggtgaaatcgataaagagtaaggatcatgcctcagacctcgcagaatgctttaaaatattaaaaaagtataacatgaagctaaacccaaaaaaacgttcctttggagtttcctcgggaaagtttttgggattcatagttaacgcgaggggtattgaggcaaatcctgaaaaaatcaaggcattaatagacatgccatccccgacaaagcctaatgaagtacaggccctgacaggaagaatggcggcacttaacagattcattttgatgtcaactgataagtgtgtaccgttcttcaatatattgagaggcaacaaaaagttcaagtggacaaaagagtgcaaagaggcctttcaaagcataaaaaggcatctcgcaacgcctccatttttggcaaaaccaataactggagagacgttatttctttatttagccatcttggaagatgtgattagtacagctatagtgtgagaagaaggcaagcaccaacaacctatttactacgtaagtaaaaggttactaggggcagaatccaggtatccccctctagaaaaactcgcgttatgcctagtccatgcgtctcgcaaactgcggccatacttccaggctcaccccataaaagtgttaaccgatcagcccttgagacaagttttatcaaaaccagatgcttctggaagattgataaaatggtcaattgaactggggtagttcgacatggcataccatcctcgaacatctatc

SEQ ID NO: 363664 - DNA, 967 bp, Cannabis indica
tgttaaaggctcagcaagcagtcattgacgaccttagtcggtaggctacaagttgatacggaaagcttatcagactgccgggcaacagcctgtaaccgtcatccccttgggcaaaacagacgaagatccaacgatgaatacctcttagactataaatagtcagccctcaaatccccggtcacaggttccacctgtgggccaagtggtaggcgggcagaccttgtctagtttttcatcaggagaagtcatacccaataattcaaaccaagttaatggtgtcggtcagtaatttggccaaatcaatcagtcgctgaggcagccaggcgtttccgtatttgatagactcgggacgactcatgatctgaggaacgatctgaacagcaggagaggagcggacggtcagcttgacacgccaatcatgcaacccagaacctgtgctcaaaaagatgttgatgtgactcaggtcagccaagaggccgaacaggttagtccagccatgcaggcacagctggatgaactaaaaaatatatttcaaggtctggctggtcagaggaacaatgatctcgagttggagcgagcgcgtggaacccctttctctcctgagaataatatcctgggatcgccccataaatttaagatgccatgctagaagatggatactgggaaggaagatcccttatcccacctcaagtattttgaaatgcaaatggacctgcaaggagtacgaggagacgtatgttgtagggtttttcctgccaccctctcaaaaggcgcccaacaatggtatttaaagttggggcctggaaagttcaactcatggaaggccttctcctcagagttcaatgcacaattctcctcctctcgccaacttctgttacacctaggagatctgttcgaagtaaagcaaagaccaggagagcctctcctagcctacatcagcagattcatgacagaggcaactaaggtt

SEQ ID NO: 363665 - DNA, 618 bp, Cannabis indica
gtcatccccttgggcgaaacagatgaagatccagcgatgaatacctctcagacaataaatggtcagccgtcaaatccccggtcacaggttccacttgtgggccaagttgtaggcgggcagaccttgtctagtaattcatgaggagaagtcatacccaatacttccaaccaagttaatggtgccggtcagcaaattggacaaaccaatcagtcactggggcagccaggcatttccgtatttgacatgttggggacggctcatgatctcaaaaacaatctgaacaggaggggaagggtggacgatctgcttgatgcaccaatcgtgcaacccggaacccgtgcttaaaatcccgctgaaagagatgctgatgtaactcaagtcggccaagaggccgaataggttggtccagccgtgcaggcatagttggacgaactaaaaaatatgttccaaggccttgtcggtcagagaaacaacgatctcgagttggaccaagcacgtggaacccctttctccaccgagattaacatcctagagttgccccacaagtttaagatgccaaccttgaagatgtatactcggaaggaagatcccttatcccaccttaagtattttgagatg

SEQ ID NO: 363666 - DNA, 605 bp, Cannabis indica
gtacgggttcgggtccacttttgggtttaggactaagtttaggtccgggtgttggtttgggtccttgttagggttcggctgcagggcttggtcccaaatccagacaccgactatgggttttgtccaagccctgggtcaaggtccagaccccaatctcgtgtcctagtctggttccattactggtgccgggtcacgagttgggacctaagttcaagttcgaggctgggtcgagtactagggcccagtcctagttctgtttcccatgtccttatcctggttcttggttcaggtcccggttattgcgtgggtttgggtcacagtctaggttcaggttctagccgtaacctcggttctggtttcggtctatatctgggttttgatctggttcgggtttgggtttaggtcctggttcggtcctagtcctagttcggttcaagttccatttgcgattctaagttcgagtttaggtttgagttcgggtcggagttcgagtcctggtctgagtttgggttttggtcttgatttcagtctaggtccagatcaggctttggatgtcagttcgcgtcctatgtctttgtctaggttgggtccgagtcccaagttcc

SEQ ID NO: 363667 - DNA, 525 bp, Cannabis indica
tttgttaaaaaaaaaatttgaataaataattaaataaaacaaacacaatatccatgtaatatattatgaataagatattaatagaatttaattattattttaactaaccaactaaattttgaaaatttagggttgttgaaacaacctaaaatatctcttaaaaattaaaatttaaactaattttaaaatatctaggtttatttgaattattttatcaaattaaattaaatatctaagttgtgtgtgcctaattgttctttacgagatttgttagtttgggagtcgcatggaggagggcttatgggacattttgaagttgctaaaaccttagttatattacaagaacacttcttttggccacacatgaaaagagatgttgagcgcatttgtggtagatgtgtcacttgtaagcaagctaaatcgagggtcaaatggtctttacacacccctacctattcctagttcaccatgggttgatattttaatggattttatgttgggtttacctaggagtaaacgtgggag

SEQ ID NO: 363668 - DNA, 703 bp, Cannabis indica
tttttacggaactcgattatgataaaaatgaataagatatgaaggtttgaaattcgggtgcaaatatggtcaatcgcacgcacaccagtcactcggacaaggtgatgtgcgcgcgcgtgcctaggacaaaccttgtctgagcacgctgaagcttgcccacgtgaccctacatacgctcgtccctgatgctgtagacgccgagggagatgttgcaggcgccgagggagatgctgcagctgaccgagaaaactcgatcaaggaggttgcaagcctctcgtgcgcgcatatgggttgctagcagcctttctgggctgcacgtgcaacctcctaagcagccacctagtttcagcccaaaaattgatttttgggtgattttttatcttcaaattcataaaaatcaaaataaaatattattttagtatatttaaacttaaatatcaattttgtaaattaataatatttaattttaatagattattattaatttctgatattttgaggtttaaattaaaaaattgattattttatttttatttatggtgagattttaatttttttaatatttatattttatttaattataaggttagatattttaatattaggtatattttaaattaaatgatagccttatcttttaatttgaaatattatattaaaattgcattatatgataaattaaataattaataaatttgaaatt

SEQ ID NO: 363669 - DNA, 1046 bp, Cannabis indica
tgttacagaaaggaatcaagggctagatatctgaacggatggagtcattatattccgctgcactcaatgtaaggtttctcatactttatatgtgtttatctcataatcgttttagaagttcatatttaggatgttaatcaacatacttgtgagtagatctaagatcctggtaaaataatttccaacagcttcttcacgctctgttctttccccccgagagcaatttgccgtatttcccccaataacatctgtacgagtcctcgctctatgggtttgggaagaacgttggtgatttcttgcaggtgacctctgttctcccgattgagtcccaagatcctcctcattgtcatgagggtttctcattaacaagtttttggttgtctcccatctggctgttcattctcatttttcagggggtgtctcattttccctaggttgttcctccaaggcattttcttgtctcctggtttgtgagccacgaggtctgcctcgtggtcttctcactcgaggttcaggttgagtttgagcatttgtctcctgtgcagcccttgccgaggctgcatcacgttctaactcagtgtttcgacgctacgcctcttccagacggcgtctcaggcagcggttttctgtttcataagtaccttcccccgtagactgggcacctccacgattgagttcttcatccctcgtcctggggttctaaccactcctacgcttagtttttctcgagcgtgttgtctgcgtactaggaccaacgtcgggttgggttcaccaggaacgtgtggtccatgcactagggccaccctaaggttgagtcctcctggaacgggtggtccgtctggatcgcgggttggtagacctcctggagcctatgggatctttcccaggacgatgattagtttcctcatgtggggtgttaacagcttttggattttcaaccatgaaggagatggtttttcttcaaaagaagggagggtttttcggagctttttcacagaggctctcaatgaaagcaccaaactgctaacggagatttttgttaacta

SEQ ID NO: 363670 - DNA, 765 bp, Cannabis indica
attgcatagaaactaagcacactttgtagtgtttctttgtccttgtatatttgtgcttcttctatttccggatgttgcggatccatgattagtagtttgtcataatctttgatttctgtctctttgttttggttgttttctagttgctcaactatttcctctgccacaagttttgcatagtgcatgaagtcaaaaaaaatttcaccatcttccagcattgtcccttgcattgtatgttgttgagttgttgattcttctgttgttggtgcattgtcttccattggttctattgcatttgtttatgcaactaatgtgttactcatttccaagaacgatggattgatggttgttgttgtgctgttgatcacgttcacacacaatggatatattgtgaagtcaggttccttcagttttagttgtatgtagaaatgtaggctttgatcatcatttatcctcaacggttgatatccttctttcacttaatatttcagttgcaagacagtgttttcttggttgcattgaaggacttctttcatcttgtgtattagttcatcatatttacaatcgattgaaatgtattgtccactagcttcataatttttatagttcattcgatcatcaaattgtccattgcaaaagactaggaatggaatgtcgtctttttcctgtgaatatgaaattattattagtgtaagtcaactaatttgaaactatattaaatctataaatgcttttgttattaatgtttccgaacatttttgatac

SEQ ID NO: 363671 - DNA, 605 bp, Cannabis indica
aataaagaaaccaaacacttgattgagctttcttaaggaatagcaagtccattccaatgctcattcatgtgaaccaaacaccaccttataaatcatttgttaagcccaattagattgtattatattttatagatcattcgtcgcaaattgtgcatgcttaatatataaacgcttaagtaaaaaaaaattgtattatattttatattattatattacatatatttatattttttgtatagtataaagaaatttcgatttatatcaaaattaagtaatatagtcgcttttcgtgtaattaatttaatttttttagtatcataataaagaaaactaatataattatatattaatatattattaattaaatttattaaaaataaaattttatataaaaaaaattatgtctattcataatagtattaattagattcatttgtagtataaatacttaagcttaactcccagttacaaattaatatctaagtttaatttttagtagttataatacctaagttataattttagaacttaagtaggtacctgacttttaagtgttaaagtaaattgcgacgtgacaatccatgattggtccaagtcatttaaat

SEQ ID NO: 363672 - DNA, 688 bp, Cannabis indica
gcacagatcttggtgatactctgtgacagaaaggatacaagggttagagatctgagtcgaaggagacatattattccgctgcaaacaatgtaaggttttctaaaactttatatgtgtttaatttcattgttttagaaattcatatttggatgttaatgaaacatactggttagtaaatctagattctggtaaaacataattccaacagttgcagcctttaaaactatctgagtggaagtgggaagatatcacgatggacttcgtggttagattacccagaaccacgggtttatttgattcaatttgggttgtggttgatcaactcacagagtctgcacattttctaccagttaagacaaccttttcagtggatcactatgcgaatttgtacgttaaagagatagtaagattgcatggtgtgccaaagttcatagtttcagatagagatctgaagtttacctctaaattctagcagagtttgcaacgcgctaagggtaccaaactgaaattcagtacagcttttcatcctctaaatgatggacagtctgaaaggacaattcagatactggaagatatgttatgagtctgtattatggatttcgaaggctcctagagtaagtacctaccgttgatagagttctcgtaatagttatcaaagtacgatagggatggcttcctatgaactgtt

SEQ ID NO: 363673 - DNA, 660 bp, Cannabis indica
ttcaggttctaatttttttcccagttctagatctgggttcgggtttctttcttcgtctgggttctggtcctagtgtgagtcccagatctagacaccgactactctgtcttattctggttaaggtcctagatcccaattctgagtttgggttcgggatcgagattggggtgcggttctatgtcccaacccttgtatcgtgtccctagtcttgttccatgttttggtctgagttcaggttcggggttgagtttcgagtccaggtttgtgttgggatccggctcctaattcaagtttaggtttgatttggagtgtgggtcctcgtcctgttacggttctgtatctaggtccaattttagttatggttcaggtttgggttcgggtccttatcagggtttgggtcaaggatgggcccaaaatccagacactgaatacaggttttgtccaagccctgggtcgagatccggatccctatctcgggtcccagtctggttccatttctggtgtcgggtcacgagctgggtcctaagttcaagttcgggtctgggtcggttactaggtcccggtcctagttctgtttcccaggtcactatcctgattttgggtccagctgcttattattgtgtgggtttgggtcccagtccatgttcgggtttgagtcct

SEQ ID NO: 363674 - DNA, 574 bp, Cannabis indica
ttgtatttccagttctgaaccctaatttttgtcattttttgttttattgctgttattaaactatgaaaaaactgaaataaaactattacggaatgtttaaatttattacacaaactaacaatttgttcaagtgttttctctttttctactgtccaaaataaattcatgcaatattgaataaaactattatgaaatgatgatgcaattgtaaataaacttgaaaaaatatgaaacttaactccaattaacatagttgttgcttgattttattttaaaatcataaaaaaacgattatacaactgaatataacttatatgtattggttatacttgatttggattgattgggagctcctaatcttttcgttatttcaggtcagttcttactaattatgaaccctgtgcttttcatcagttttatttgaatcagatcatttttccacctattataaaactaatatgcaactatttgcataaaacttaccatgtataacagttatttgttggtactcgtcaactgaaattcctgcataatatataaattattataaaacgataatgcaactataaggcaa

SEQ ID NO: 363675 - DNA, 675 bp, Cannabis indica
ggttcgagtttttaaagaaacacaataaattttgagttttaatctgaaatccgaaaaataaaattagaaacattttttaattatcattattacatttacttactgtacagaactaaaaactaaaaagcaaaaactctaaaaagtgaatatctcattttttatcatctccaatattcaatcgtattttcccaaaagtttaatcctcctaaaagtcatctcatctctggcgccgatcatctcatctctactattcaatgtgcaaatcaattcaattcaggctcaaaaaaaaatattaaaaaattataaaaaaaaaaaaaaaagatggtatttttaaaaacaaaatatcatttaggtccaaaaatatttcattcggacctggccattaaacccgaacccgaccacacaaaactctccatacccgacccgaaacccgccacacctaaccacccaaaaattgggttcggttgcaccttcaaaacacctgaaattcaaaaacccaaacccgaccatccgaaaactcaaaaattcgacccatgtgaagccctagtttaaagtagggttgagcattggtcggtttggtcggtttttttctatataaaaatctagaattcagttttcggtctggattggtgcaatcgaaaaaccgaccgaccaatcgtaaaaccgaccgttttg

SEQ ID NO: 363676 - DNA, 618 bp, Cannabis indica
agttcgtttggatttgccgacgaactttcccttcttcccattcccttgcctgtggttgttgctggaacgtttaccacttgagtttgaattatttgggtaatgagggagttgggcggatgttccagtagaaggagctttcgacttgccaggcttttgctcaccttctgctcgttgaatggcttcttcgagcttgatgaagccttcggcacggtcaagaaaatcactcattgagtctaccggcccgttcttccttatatccttccaaagttcaccgaggacttcaatgccccccagtatcgcagataactttccatcttcagttacccgtgaaactttggtcgcctccgtcatgaatctactgatgtatgctcggagaggttcgcctggtctttgcttgacttcaaccaggtctcccagatgcaacggaagttggcgtgaggaggagaattgtgcatggaattccgaagaaaaggctttccatgaactgaactttccaggggccaacttgaaataccattgctgggcggctttcgacatggtagcaggaaagattctgcaacgcatgtcccctcgcaccccttgcaaatccatttgcatttcgaaatacttgaggtggga

SEQ ID NO: 363677 - DNA, 813 bp, Cannabis indica
aagtgaattattttgttataaattaattaagtaaatcattgccgtaattcacctgtagtcattattaatattcttcctagtaggtttttttgtacataaaataaattaaacgatgatcgatatgtactcacttttatacataagctaattaatcattttgttataaattaattaagtgaatctagttatcatatacggttatttagtttatatatttttaaatttttaattaacactacaaaaaattttattttagctccaacaaaagttgtgattaaaaataaaaatgttatgactaattataaatcgccattcttatgttgtgactgaaaagttcgtggataaatgtattagtcacaaaaataacaatttgttatgattaaatatatttttagtcacaatatttgttgtgactaaagttaaattagtgacaacttgtatttacacactgtgttttagtcataactaattttttgttgtgactaaaagttatatttagtcacaaaaaatttatattatgactaaaagcttgtcacttatttcatctaaaaaaagcttgtcattgaatataccttttttttttttattaaaattaataatctctaattaaataaagtaaaataaaaaaaagaaaaaaaaaaagaagaattttttttttagtaaaggtaatttatttaagaaataagcttcagccattacaatgttcttctagaaaagaaggaagcgattcagctcatcaaacaaacaaacctgacaagaacaagaactccgagcaagacaatggcagcctattagcagatcgataacaaaaag

SEQ ID NO: 363678 - DNA, 705 bp, Cannabis indica
ctcgtggttaacgagtggtaagaatactttataaagtaccaaaattgtgtagttacgatgttgtgaaatggatcaagagtgttattatgtgataagttgtaattgagtacatttttggtatagtatgattaaatgaatgttatattgcttatgaagttgatcacttttcttgcagtctcagtggcttagagatgtaagaatacatgtttataatgatgcctgattagagtgctttatgaagcactgtaattatgtggatgtgctaatgtgtgaactagagtgttttatgaagcattgaaagtaagtgtttataaaattgtatgattagggtgttttatgaaacactgaggttgttgattatgtatagctacaaatacttttaattttgtaataagtttgctcgtattgatgttgaattgcatatgtacgttgaaagagtatgacctattggtatgtataatctgttgtaatgaaatctgctatcactttccatgattttctttatctagtagcttttcttgcttagtcactatgactcactggtgctttgtggtgcatgtaagaagaatagcaaatgtgttcaaccatgagccagaggtcatccagcagtgtgcatatctgttggaaattatttaaccaggatcttagatctactcacaagtatgttgattaacaccctaaatttgaactttctaaaacgatgaa

SEQ ID NO: 363679 - DNA, 1120 bp, Cannabis indica
attcagttcttacctgctttccagattcaagtgtgttagccgaccggaacggaaagtctcgtgctagatggatgccctaattacattataaaaccgggtaagttacatgaccaaaaccctaatcctgggaaacccgaacccataaccttaggttctgttatactccctagaggttacccaaactctggaattagggaaaaacccaactacggtactgaaattgacgaaaactgagaaaatgaagtgtttgggaatcctgccaaaaccggctagccggtttgcactagttctccccaaacccttcacctcttgctcaattttccaccaaatgctaccaaactttccagagtacctaaacaatgcatatacaacatattccagccagtatttcacagtgtaaacaaatatgccattagagatcaaagctttgaactcaaagctcaaacttgcacaaaacctaatccaaccaataataccagctgctaggacctaaaaccaactcaaattaagcttagaattcaaacctaagcatcccaagccctaacagacactaactcttgaaatcacaacagaaaaccaattaaaaccttaagaaaacttagttaaaagtgtctagggttaccttagcttcaagggttcttgattccttagcttcaatcgagcaaaataccaagttttgagggtgattccctctggttttgtcccagccgaaagagggagggagagagcttcaagaggttttcctaatttaatcttttttccttgatttttgattttcttcaaatgaaaaaggattaatctaagctgaatgctttgagtggccagctgccaacaccaaactcaactacctaatcccttaactaaaaagactaaaatgcccttaaggttaaaacttaagtgtttctcaaaactaggggtaaaatggtcaaattccataatcccacttaaccccgatattttattttctctaaaatatttcccactaagaaataaggttctaaacttacccatgtgatcaaactagcgatccattgctttttccgttgtcaccgagcaaaaattacaaaaataacatatttcacatataagccaaataatacccctagagtttaataaaatc

SEQ ID NO: 363680 - DNA, 733 bp, Cannabis indica
taaattctacctttttttatttagtatagtgtcattaattattatgatttattggcttttacataactttatcttctttatttactatattactattatttaagcaataaaataatacaaaataatgatatttatatatttcattataatattaaatgataattaataataataattattaattttttacatctttataaatatagtaaaaatttaatagtctaaagtgtccaacaatactatatattaatattagtgcaaataaatatatgaattttaatttgtgaaataagtaattaattacaaatgctaaataaaagattttaggtggaactacatgatataatgtgcagaaaaacattaatctcaattcataagtagtttaattagaatataattagtggggtgggtttgcgcaataagtgcatattgcatactaatccttttaattaaatcatgatttgttgcaactaattaattaagctaaattactttacattaattctatgtgtgagtgagtctaacaaattccactatataattatcatgtaattaactaaatatcttagaaaaaaaatcaagtgaatatgacgaaaatctgacctaattacatgactatcaaatgttcaaccaattcaactattaacaaattcttcttctttattaataatattattattttttttaaaaaaaaatgtatattactaattatataatgaaatttttacaccaa

SEQ ID NO: 363681 - DNA, 517 bp, Cannabis indica
cctagttcggttctagttccatttgctattctgagttcgagtttgggtttgagttcaggtcgaagtttgagtcctatactgagtttggattcgggtccgaatttcagtctaagtcgagatcaggctccgggtgtgggttcgcgtccttggtcttggtctaggttgggtcagagtcccaagttccaattcccatcttagtctggattcaattctgggtctaagtccttggttctgatcctggtttaggttcgagtttgggtccgggttcgggttcagcattgggtctgagtctgagtttgcgttttagttcgggtccgagtttgtgtccgggtttgtgtccatgtatgcaccctaatctgggtctttgttcgggtccaggtccaagtttgggtctcgagtgcgggtccaagtttggctctgggtcaagatctcggtccaggtctacgtccagcatttcgatccaagtctgggtcttggtccgagtccaggttcgtatccggatccctatctaggtcca

SEQ ID NO: 363682 - DNA, 482 bp, Cannabis indica
gattggatggatccagtccaatccaatatatactggacttaaaatattggatggatccgatccgatccaaaaaatactaggtctaaaatattaaataaactcaaattcaacccataaatatatatgaaatacatccaatggatataaccgacccaatccaacatccaatggatgttggatcgattggatgaccgaaattaatcgaatcaaatcggatggtaaaatctaacatccaatatatgattggatcggatctgaatatgcctaaaaacattgaacatgattcaataaacacccctaattaagggtgcacccttcatatataaatatatatatataagaaatttaaatttagtaaattaatttctcttagtatattaatatatttggtatttattatatatataactactaaaatgacaatttcttccaaatttaagagctgccaaaaaaacttgaaatatatagaggtttacgtcaag

SEQ ID NO: 363683 - DNA, 608 bp, Cannabis indica
ttctttcggtcaactccgttaagggtacagtgatctttgagaaaccctcaacaaatcgacaataatacccagctaagcccaaaaagcttctgacttcagtagccgattttggtattggccaatcccgaacaacttcaatcttgcccaggtccaccattatcccatctttatctactatgtgccccaagaaagagacacgagataaccagaattcacactttttgaatttagcatacagcttgtggtctcgtaaccgttgcaatacagatctaagatgcaactcatgttcctcttccgattcagaataaaccaagatgtcatcaataaacatgagcacacatctatccaggtaatccttgaatacccaatttataagatccatgaatgtcatcggggcattggtgagtccaaaagatatcactagaaattcataatgtccataccgagtacggaaagtagtttttgagacattttcctcttgaattctcagctgatgatagcttgagcgaagatcgatcttggagaagaccatcttccctttcagttgatcaaaaagatcatgaattcgaggtaaaggatatttgttcttgatggtaagcttattcaac

SEQ ID NO: 363684 - DNA, 636 bp, Cannabis indica
gctgaggagaagctcatcaaagatccaagagtccgaaagtggtttgatgatctcaaggatgcgatttatgatgcagatgacttggtttacaagatagacacttaagcatggcgaaaccaacaagaaggtggtggtcttgatgaatctcatagtggctgcacctgtactagtagtaaggtactcatgaaactcatctcatcaactacattaacctcttttgataagtattagaatttgttacacatttctacacaatttagtctaaaaatttctatacacttgtagaaaaattatctaagaacttaagagaattctagattagattaagtctagaatatactagttatgttgtattctagaaacatttagatttgttttgatataattccttctagtaaaagaaggatctagaagaaataattctagccataaatgataaagtgtaaggggtgagcaactataaataccccttcaagggttccaagttgtaaccaacaaaaaacaaccaacaccaaaaaaaccaaagttccaaactatcaataaaagtttactactttctcaaacaaccctctcttctaagccaaactacttttatatactaaatctacaactactcatcaacatcactacttcact

SEQ ID NO: 363685 - DNA, 601 bp, Cannabis indica
ttgatcatgatgtagggtattattatgaccatgcatgagtccgagcgctgcacagagattttttaattcagtggcatctccgatagtcatctaggcgttggttccaggagaaacagttgtgttatgtacgccctggttgagtgcggaactgttattcccagtctcttacacaccaggcgcaatttcacctataagaactgcttcaccattcgccatgcttggcaattgtctatgattaacagcaggcggaaccctcgtgtttcctgtgaatttgttggatcagtcaggcctctacgagtttgcaccatcgtattggcgatcggatgttgaataaagagcaatttgtgatcctgctctcaatgaaagcacaaaaatgttgacctcacttttagccaatgacaacgagtctattttataagcgataaatgatttataataacaaatatgtgataaagaaataaaaagacataggaattttatagaggttcaaccctcatccgttcggtaatagcctaatcctcgttgcttgtattgacttaagatcaaggagaaagattccttttcttatagctcttacaacagtatctctgaatatataatt

SEQ ID NO: 363686 - DNA, 459 bp, Cannabis indica
aaaatatagaatccattttgtcatttaacaaaatagagggtccaatcagtaacttttacaaaacacagggtccaaatggtatttttcctttagtatttaatataactattttgtatttttgttaaaaaaaatggtagaaagattgaattttaagtattttgtagtagtatacacttaattttttttttttacctaaaactacttatggtatgtttactaataaataatgagaatcaatggtaaggtaaccattcccttacatttgtttacttacattattaaaattaagaaagggaaaatttgattaaataagagagaaaagaaaggtagaacttcccccaccaattttataaggaatgtcattaagcgtaatgaatttcaattatttttattttatattttaatattaaatatataatgacaattttgtcctttaaaatatatcttacaaaataacta

SEQ ID NO: 363687 - DNA, 1026 bp, Cannabis indica
tattatagagcattgatgagaagaccatagagaagtgggagacaatataattatgatcatattcatattaattaagccattcattagtattatctcttcagatctggtcctcgtcagtgttccttttgcttgggttcacttgttttcagatgattgaggccatatatataagttttctaaaaatgtcgaataaatcatttgtctttgcacatatataattattatatatgagaagaagtggaaggaaaaaggtcgaaacagtaaaacctaataaattatctgccatacgtaggacccttgataacatgaagatagtaattaaccctatagctagctgtgtgatatatggtggacccataatattcatgcaaaaaaaattaaaaaataaaaaaccggttaagctagctatatatatatatgtatgcctgactttttcatccacaacaaaagattccaatgtcaaaatgtattgttacacaaagccaaacaaaataaagcaaataggaaacatacaagagatttagaattgatggttggggtccgttttggagtagattatacatacatattattattactgttaatacatattattattattatacatattaatacattgataatattacaaacgttttacgaacttattattattactgttagaatagagatgttatttacaattaatgaaataaatgcccaagaaaatataactctattacaataaagtataaagtccaacatatatattgaataaatattaaatgaagatgaagagtatgttacaacaaattagtaataacataaaaaataaagaacacaaataaatagaagatgaaagaaataacatactattgttatagctaagtttgttacatttctgttattgtacacatagatatttattgttatattattttataatataataagtgtagattaaaatgtagtaatatatattattatgtgaataatatgtattaggtgtttggtaaataaattgtgtaacatataatttatttaacc

SEQ ID NO: 363688 - DNA, 808 bp, Cannabis indica
ctaggactaggaccaggaccaggacaaggacccagacccgacccaaacccaaataaaaaccaagaccgagacccaaacccgaaccgcgactaggacccaaacccgaacctagaccgcgatacaaaaacaaaaaccaaaacctagaatcaggataaggacctgggcaacgaaactaggaacgagacgtaagacccgactctagacccaaacatcaacctaggacccagcttgtgacccaacacccgaaatggaaccaaatcggcactcgagatcgggatccggatctggacctagggcttggactaaacccgtagtcagtgtctagatctgggacccagccccagacccgaacccagacccggacctgaacctagtcctacacacaaacctagacaagaacccgtaccctgtgacctaaaattggaatcaaaatctgatgtagatcaggacttggaaacgggtaagaaacaaagacttggacctggacctcgaaccataactagacctggacctagacccggaactgtaactagaccaggacccgtactcccaacccaaacctggactcgggacaggaacttggacccaaactcagacctaaacatggaaccagactcaagacacaaaactgggacggggacctagaactgcaccccaatctcggtcttgaacccaaacttgaacttgggacccgagatctaaaccagaaccagatcgggacacgtgacagggatccagatctgtgactcaaaccaggacccgaactcggaccaagacccaaatcggaccctgacccaaacccggaccc

SEQ ID NO: 363689 - DNA, 579 bp, Cannabis indica
ttttggataacttttctgtgatatttttgttctaaattttaatgtatgtgacaagttcaactatgggagcatttataatgtataatggtgtttgggagcttgaaggtaaagattgcgtttatgaacgggctgaaaatttgacatttgacattgatcccaacgtaagctactcaggtttggttgtcttttgtatgaagaactagatgctgacaaaatggagtatgacttgaaattagaagtaaattacaagtacatgaaaggctacacatatcgccctgaagttattggaaatgataagcgtgcaaggtactttttgtctacacttgcgaagaagtcagatgaatttactcccttatttgtgactttgttaaagaagaatgtttgtatcgatcctagtcccataccaagttctattaaggacaatcgtagcgaggttgggagttttgttccagaaaaaaatccagaggtgttggttgccgatgtattacctgaattaaatattatgatgccgagagctgatattgtagcacaaatgcccttcattgatggttttttgatggtctagaccttgaatgttat

SEQ ID NO: 363690 - DNA, 918 bp, Cannabis indica
ggactttgcatttgtattagctcattagggggtgcgagggggatctttgaaaatctcttgcacttatcacacttctttaaatattcttaccttagaattttcttcgataaactttgccccacagcatgattaccacataatccttcgtgtactttagataggattcgtgcaacttattcttttgttacacaccttagcagtggcatgaagaagcctattctatacattacatcttctactataatgtaccgtgtagcttttctcatcatcttctaagcctaatttatattgtttggaagttctcgagtgttaagataagctgctatgggtgtcatccaggtcagcaccgtgtctatcattttgacttcttctgcctaggtgatgttgggttcctccaagaattagattgggactaagttagccttattgtcatcctgtttctcgtaagctgtgccaaggcatcaatagttgtgttttcttcccttggaatttgcttgagggtgtaacccttaaattgtgtgagcaggtcctggatcttgttaagataagccatcatctcttctccacgacctatgttgtaacgccctaatctatagggacgccacgtgtgtgattttataaactcgtttaatactaatagaataattaattattaaaaaccgtgataatattaaaaacttgatcaaaataaaacactaaaaacggacattataatgacataaaaaagtgtgttccgggaatccctattatagaaagttttgctaaagaaatatatacaacaaccatttaaacataaaatcaaaatacacagcagatacagccagtccaaaataattcctggtaactcggcacgcaggccagtgagatcaatatgtacattgctggagaagactgtcacctcatggttgatctagattt

SEQ ID NO: 363691 - DNA, 854 bp, Cannabis indica
agactctcgattattaagtaagtacgcaaagataaaaaataaaagatccataacacagtccaagtcactcacatctgctttaggtttctctttgtgtgcatcagcataagcatagaaattggcttggctgcatcaattaaataaaggaatggaattataaatattattttcaaaaccaaaaaatattaccactaaaataactgccacaaataactcactagtacttcgcccaagcttccttcggatccttcttctttatctctgctgcatcctttttgtctgcagcagcccccctcttccgtttatataccattttataaacctattacacaagacaaaataacttaaattaacaaacattcaaaacactaaaatattggaagacaaagactttgaataattcatgcaattgtctaacatttcagtgtattcatgacatcccgacacttaattttctatatgtgtacaataacaggtaagcatctcttcccatataacataatttcataatatgtattacatggaaactgttaagtacaatgtaccaatatgcctaaataatggattctgtaaattgttagttttgttataattctaatttcccaaaaggaaaattcaaataagattaaaattcaattaaaagcaatgtcaatttcccaaaatcgagtgggttgtaccaaaccaacaactccagttactgattggaacaaaaaaaccgcaaagtacagcagttcacaaacaattaataaaataaacaagtaataataacaataaaaatcactcatcttgttgcaaaatagtctccctttgcttccaagttatcatattttcctaagataatttactattacaat

SEQ ID NO: 363692 - DNA, 642 bp, Cannabis indica
ataataataataaattatttatttatttatttttgtagggataagtttaataaattatttattatcttttttaaagatgaatgtatagtgtaaggatgattattggatttaaattttaaatcaatgatctaaatttattgaattactgatcttgggtgaaaggtaaaaaatgaccttgatatactgatacgagtgttttgatggtgtgggttagagtctgtctaattgagtgtcaaaaaaagtgatatattaccatattttatttttagcacacttaaaattttttttgctaatattttacaaattgtgttaaatttgacacatcataaacgttgtgttaaatttgatacacgagataatattgtactaaatttagcctacaataaatattattttttcatttaattttttttttcttatttttacacttcaaaacaagttcttttgcatttatacgaaattccacatagaaaatcttattgcaactaatggaacaacctaagtcgcaaataaaattcgtataacaactcacatagaagccaccaaagaaaccaccttagaaactcaaaccgtaaattcgaaaaaaaaaaattaaaaaatagtatataaggtaatttccctactaattattataatttatta

SEQ ID NO: 363693 - DNA, 895 bp, Cannabis indica
ttttttataggttgagaggtttggcatatgtttttcaagtttggttcaatgaatgttgtccttacattgatggcattcattgttctaaattgcatgatcgtattcctagaattcttaactggtccaatgattctgctccttctgttaaagagttcaagaattcaatcttcaatgtatctctttctaaggtatttagttttaagagtttgatttcaatgttaatggtatgtttattttatgtgtttttaatgttttatttcatgttttatgtttgttgcagcttaaggtcaagaatttgctcccaactgaggaggaatcattgaggttacatttagatggattctttgtggataagaatatagatggcatggggaaagggaaatctgttcagattgatgatgttggtagtcaaggttctgttgacgaaaatagttcatcttttaaattttctgattttcataggagattggcagatatttctgccaagcatgaagcattctctgctgaatttgtcattttaaaagaagattttaagagtatgatgcattctttggaatctgtacataaaaaaattgacaagttgttgtcaagacctcctcccaaggtttgtttgtaatttgttattatactgttaattattgtttaattatcaatatttattttttatatttctttttttatgtgaaggattctcctgatgttgaggaatacgataatgatgaagatgctgagattgaggaggcttctcatgaggatgaggatgaattggaagatgatgatggtgatagtgaagagagtgagactgatgagggtgcgaatgaggatgaagagggtgataacggaaaggatgtgaatgaagagaaggaagggggtgtggatgaggatgtttctcagg

SEQ ID NO: 363694 - DNA, 184 bp, Cannabis indica
aaactgcttatttggaaagttgtgctcccccttctccctatataaagcaacccttgttctcttctcttgtatgcttgataacccacgaaaataagagagaaaagaagagagaaaatttcaaattccttgtgagagagaagtgcccacacacatcactcagtacctcaatcatagtttggaagac

SEQ ID NO: 363695 - DNA, 972 bp, Cannabis indica
tactattttgttctgtgcagacatgtctcggtagatgctcgatgctctaaggaagagaatgggcagaagctctagcgcctctcctccagccaagaagtccaaaggcggtgagtggtcctctttaaaggaaaagagaccttctggagaggtcattgatctttccgaggagctgactgctgcaaagccctctacccccaagtctgccaagttcaaggagtctggaccaccaacggctgggtctaaattggtaaggagcgatcctgaacgggtgcaggcaccaactccacctttgccagtgcttccagaggccaaaaagggcaaggagatgctggcccactatatgaacagtttggttcctggggacagcgagcaattggctggtgctgataatgactcatctctggacgtgttggtgggcggagtcttgaaggagttcagcagggtaactcttttatgatacttccctttaactttctacacttagctccatatggtaaagtttttcctttgtgtaggtcggtctgaagttggcctacacttactcccgggctaagtctgttgcttctaagagcgcgactctgtccgacaccttgaaggcggaggggacttggccaagaaggaagctgaagaagccaggccggaagctggagttgttcggttggagttgggcgagggcaacaagaagctgttcgctgctgagaagaagatctccgtgctgacaaaggatctcgaggctgctaaccgcttcaagatcttatctacaaaggtaaacagtcttcaggatgagaggacttctctacgagcagttcttcttcggatgaaggagcagaaggatgccaaggagggggagctttcggccaaggtggacaggttgaaggagaaggtcaatcccttggagacagccggtctcaagctcttctttgatttcttgaaggctaatccccgggccaactttgactacttgggtgacgc

SEQ ID NO: 363696 - DNA, 1367 bp, Cannabis indica
atttgtctagcttcagggtccgatacacaccttaagtacgacatgctgagtcctctttggtagagaatattatccatcatcacatattgatgtgcttgatattgtagccttctggataggaccctttcttgaggcaactcaccttttgttgtatatctgatgatggggtccatccaacttagctcttgctcaatggcgaccaccgtatctttaattctgatacttggctccacgaggtgttcaacggtcattacccccagtctttctatctcgttgtctgacgctaacttggccaagcagtctgcattagcgttcttctctcggggaattctttccaccttgtattccgtgaactcatggagcagttcccaaacaatagctacatacactatctttttttctctatgcgtttgatattctcccgagacttgattaaccaccagctgcgaatcactgaagatttctaccttggcggcccccacggcttttgctaactttaaacctgcaatcaaggcttcatattcagcttcgttgttagaggctgagaatgaaaaatgtagggccacttggagccggagtccgtctagcgatatcattgctattccagcactggatctgttttcgtttgatgccccgtcaacgaacactttccacgctggggttcacggtactggcacgcttgaactggcttctgcttcattacactctgttatgaagtctgctaaggcatgtccttttatggaaatgcgtggtacgtagtgtatatcaaactggctcaattccatggcccatttgaggagccttcctgacgcttccggcttctgcaagacttgtcgaagcgggtggtttgttagtaccttgatggggtgagcttggaagtagggtctcaactttcttgaagccatcaggaggcagaaaactaacttctcaatcaaccgataccgtatctcagcccctatcatgcgcttgctaacgtagtacacaggatgttggactttgtcctcttcctggactagggctacactgacagcgttatcgaagacggctaagtacaataacaagtcttctctgtgaaccgactttgatagaattggcggtttagccatgtgctctttcaatttttctaaatgcctcctcgcattcttcagtccattcaaatttttggtatttctttaagatgttgaaaaaagggatgcacttgtcagttgatcaggaaatgaatcggcttagggcagtaacctttccggtcaagctttgcacatctttgtgcttcttgggggaaggcatgtttaataaagcttgaattttttcggggttttcctctatcccctttggttgacgatgaatcccaaaaatttccctgactt

SEQ ID NO: 363697 - DNA, 1053 bp, Cannabis indica
acccaaattacggaatgtaagtttgtggtaagctactgctttcttcaccttacttcctttggttcattaaacattatgcaacattataaactatatgcattactgatctagggatactaaattctttactgcttgtgaagtgcatctgaatatacagaagacagatttctaattctatccaaaatagaatatagataacacagtgtagaactttcttcagttgaataactttcaggtgttttcgaaacaacaaagttatttatcttcactgatggagcttaaattattatagatgggtttttacatccttctagaataatttctccacccccagagtaactaccgtctcgaattgattatgagttggtgtagatatgaggattctaatatacacccctatcatctaacatgtaggtcactttcagagatttctttactgtctcctaatgttcctttgtttgattacatcttagatagctcccactcaatagtaggagtctggttaaattcatagatagaagtacatttaacctcttactattatttttcaaggatatcttgttgtgacatattatcttagtctgaaactgtaagttccttctagactaagtcatcaacatagcagtctagtattaacatcaatgtaaaatacttgcttaagattaagtaatcattagaaataccataaaatatttcatgaggattaggaatttagcctaagtcattcgaatagacttgcaaattctcctatcttatcctcaaaattctgataagttatttctatccatatgaatggttagatttactttctcagttgaattctaaaagtcctttcatgatcataacatagtaatatcacaagtgtcatccaaatgaagatgggcttagaattttaagaggcgtttggttgggatgaatgaaatataggaatgggaatggaaatggaatggaataaattaaaatgacataaaaaaattgataaaaaaatcaattaattttactttcttgttacattggaatggtcattctttttttaaaaaaaaaaactggtaa

SEQ ID NO: 363698 - DNA, 714 bp, Cannabis indica
gcaatgtgtttgttcggtctcgtatactatcttgcatggtgggaaggagttgggacctattgttgctcaacggggtttgcgttaaggtgattcgttatcgccttacctctttattttatgtgttgaaggtttctctagtttgctgcgaagttatgagcaaagtggtttgctcacgggttgtaagattgctcgaggtgcgccggtcatttcttatatgttttttgcggatgataattatatttattgtaaagctactgaggaagaagcgcacaatgttaaggagcttttgcacacttatgaggtggcttcgggtcaaagaattaattttgctaagtcctctgagttcttcagcaacaatacaaattgtgatcttcgggatgctagttgtgcttcgttggaaatctatgaagctgatgaaaatgggtagtatctgggccttccatgttcggttgggaggaacaagaatgctatccttggatttcttaaggacaagcttcgtaggattcaaggttgggagggtcatatattgtctcgtgcagggaaggaggtcttgttgaaatctgtagttcaggccttgctaaattatgccatgaatgtttttctttttcctttggaaacttgtaaggagttagaaagacttatgactaagttttggtggtgtgacagtcagtagtcccgtgatccgtaaggggaaataccgggtaagctgtgcaa

SEQ ID NO: 363699 - DNA, 1250 bp, Cannabis indica
gtgtatttaagagtccttactgactcaacctctctaaaggggtctaagaaaaaatgtgcgtgtgaaataaattatcactgcgtgataatacaaataaaattgttctatcctatctttggtttataactaaagaaatcaattttggataagaatttcattttatgctatattaaaatgtcttatggtatcttataatgtcgtatgttattttatgtgccacctatatacttttattgttaatttaatattttgcaaatagttttcatgaataatttcatcacatttaaattttaatttatattttattaaaattaatacatatttttaatttcaaagtttccactctattaaacgttgaatgttatttttaatttaaaattttttcaattattaaattatgaactttttaatttatcaaaacttaatttaatcaatttaacctattagtgataaacataatttttttttgtaacatttataattatcttttgaattttcttatttgtttaaataaacaatttgtttagcattttaaagtttctaattatattttaaaataaacaaattaatttttagcattataaaagttaccaattaacttatttaaatgaattttttcaaataaattatgaactttttaatttatgaatttttaatttaattaagtttctaattattatatatcaacaagtaaatttgtaacattttaaaatgaccaacttaattaaatttatttgtgttataattaataaagtcttaactaattttttaaatttaacttattattataactatgatattaatgatgtactcgaattattttttaaatgtaacctattattgaaactgttatgctaccgaaaattcgacagcataacattttacaattgattactcctaaatttttaacacctacataaaaatcacaaacacaataccaaaacagtttacatattaatttttgccacccattcgaccgcagcatattttttatagaacctacttcactatggatgaatatataagatattcaaactctactaatatgcattttcaagtaaactttattttaatattataaaacatataatataagcatactaaccttccaatataacgaagagtgatttttgccaaacaccgtgcaaaaggacaccaaaaatctatttatatataaatatatatgtatttatatgtatatatatacatgtatactacgtgtatatatattatatatataatatatatgt

SEQ ID NO: 363700 - DNA, 623 bp, Cannabis indica
ttttgtctaaagctggcaaagaagttttgatcaagtcagtagctcaggctttacctaattatgcaatgagtgtttttcttttgactcatgaaatctggtcgagccttgaagggataatggcgaagttttggtggaaatcccaatcgagttcttctagtaagggagtgagttgggttagttggaagaagctttgtcaacataaaaatgttggtggtcttggctttcgcgaccttcgtgattataatctttcttttttgggaaaacaaggttggcgactgcttactatggaggacacacttgtggcaaaaatctataaagcaaggtattatccgcatggttcatttcttaatgtcgagctaggacaaaacccaagtttcatttggaggagcatttgggctgctcaagatcttgtaaaaaatggtgctagaagatccattgctaatggttcttcggttagcattttacacgatccttggttacccaatgattctaatccgtttgttttgtccaataatacgggccttgttgatcaatatgtttctagtttgatggtagttggggagaggtcttgggatgttgaacttctctgtaaagtcttttttggcaagttaggtgacaaaata

SEQ ID NO: 363701 - DNA, 679 bp, Cannabis indica
gtgatttttctacaaaagtaacatcaatagaaacaagatatttgttaggatcaagacaataacacctataccctttttaaagacaagaataaccaagaaagacacactttaatgacttaggatctaatttggtattggtaacatgtggacgaacatctcgagcaaaataaatactgccaaatatctgaggagcacctagaagtaatgactattgggaaaaataattttaaatggaatatcaccattaagtacagaagatggtatacaatttttgtaaaaattgtatcgacccaaaaatatttaggaacttgcatttgaaataagaaggcataggcagtttcaaaaagatatctacttttacgttttgctataccatttagcgtggagtatcaatgcaagaagttccatgaagcatgccattagaggtcatataagattgaaaatgagtagatgtatatttttttggcattatcactttgcaaagtatgaagaaacacaataaattaattttgaatctcaacacaaaaagatcaaaatatagaaaacagctcggaatgattttttattaaatataaccaagttacatgagaatactcatccacaaaattacaaaatacttgaatccaggtttagacgaaataggagaaggacctcaaacatcagaatgaactaactcaaa

SEQ ID NO: 363702 - DNA, 717 bp, Cannabis indica
gcatcacaattgataaatatgtaatatgtgagttattacatatggaagttatgaaattaatggaataagtttctagctgttagaaactgttacaatactcaattatatcattgaaatgggtattgggatgttgggaaagatttaactcggagaggagttacattttgagttttctagaaatagttgtttaattgttgtttttatgttgttttatggttttttttacgaacacctagaacaagtttttaaaaacatccataaacatacatgaattgattgagcatgtttcaacaaagttttaaaaaaaatccataaacatacatgaattgattgagcacataaatagaggtcttgggttcactttgtaagagaacaagtttctatcaagagagcacattgctataaacactatagccatgaaagatatatattttcattctttattttcttttctctaagtgcttgtggtagggggaaataagcttttggacaaaggtgtaaaccttgttcaagttttgtgattcccctattatacacttgtggtgtacatagtgtggagattgctctcacatctcttatacatatatatatgataattatatattgtgttttatgcgtagctttgctttgagttgtaattcttctcttctctccatattctctatattttatgtgtatattttgttttgtattgtaacattatttaatctatatttt

SEQ ID NO: 363703 - DNA, 1261 bp, Cannabis indica
tctacaaaaatatctaagttatttaaatttttaaaataccatttataaatttctgataagtaaatgatatactatagccataaatttctaacttataatttataaataataaaatatttaataaaataatcaatttatgaatttcaaaatattatggttagaataaaaaaatatctaggttaatttccaatttattaattatttaattcatcttatacggtaattttaatataatatttcaaattaaaaagataatgctatctttaatttaaaatatactcaatattaaaatatataaccttataattaaataatatataaatattaaagaatttaacaaaattttaaaatttgaccataatttaaaaaataaaataatcaatttttaaatataaacctcaaaatataaaaaattaataataatctattaaataaattaaatataattaatttaaaattgacatttaagtttaaatgataaaataaaattttgaattttagggtttgaaattggaaaaaatcaaaaattgtggaaaagtccccccaaaaaaaactcaagttttggtgttgctgcccacgaggaggctgcatgcagcctcgtctgcgggtgcaggaggttgcattgcagccctcgtgtgcgtgcagcaaggtgcatgggcagcgcttcagacaacacgcgagtcttcagacacgcacggacaggcaccttgtccaaattcctacgtgtgcattgtgccatctcgacaccatatgcacccgaaacttcaaaacaccataacttcttcgtttttcatcgaaattgagttccgtaaaaataaaagttgtttcatttttcacaaggaatctaaataaattattttaagaatgaaaataaatttattttcatgaaaagttttgtaattcacatacattcatcgaataacacataaaccaacatgcacacatctaaatcaacacaataaataatattcatcattttaaatccatattacatgaaagtaaatcattaccatggctctgaggccagttgatgggaatattttactaggatctagatttactaacaagtatgttgattaacatcctaaatatgaatatctctaaaatattgaaattaaacatataagagtttagaaaaccttacattggttgcatcggaatataatgactccttctgctcagatctctaacccttgttcttttctgtcatagagtattatcaagatcttagcctggatctctttctctccttcgggtttgg

SEQ ID NO: 363704 - DNA, 690 bp, Cannabis indica
actttcttcacccacttcattccagtgaatgggtgatctggatttccttccatataaaagctcataaggggccattccgattgttgcctgatagttgttgttataagagaactcgatcaggggaaggtactttacccatgatccttcaaaatcaagcacacaagctcgtagcatgtcttctagaatctgaatagttctctcgaattgcccatctgtctgaggatgaaatgttgtgctaaactttaactgagtacccatagctcgatgtagactctcccagaatctcgatgtaaacttcggatctctatccaaaacaatggactctgggacaccatgaagacgaacgatttatctgacatataactcagcatactggtcaatggagaaattcatccaaacaggtaggaagtgcgctgactttgtaaacctgtccactatgacccacacagagtcaaactgtcccgtggttctaggcaaacctaccacgaagtccatatcaatatcttcccatttccactctggtatgttcaatggctgtaacaaccatgcaggcctcttgtaatatcccgaaaataaataataaataaatgatatttaaaaagacatattttattaaacatgtgattattttggtaacgaagtaagattatgatcttacttagggtaactactgagaatttatctaatgat

SEQ ID NO: 363705 - DNA, 710 bp, Cannabis indica
aacaaattaaagctgctcagttaactaatttggaactagtgaagatccaagaagaggttttagcttgtcaagccaaagattttacggtttcagataacaggatgctatatataagacaagggttagtcttccaagtagtacggaacttagaagtgagattcctgagaagctgataccactccatattaactgcatcatggcactaccaagatgtatcaagatcctagaccctactactggtggtgcaggatgaagaaagatgtggtggaatttgtatcctagtgcttaacttatcatcaggttaaggctgagcatcagagaccggtagaattattgcagtcactgacacttcctaagtggaagtgggatgatgtcactatggattttgtggttggattacctagaaccacgagaatgtacaattcaatttgggttgtggtagatcgatttacaaagtttgcacattttctaccagtaaaaacaacctttgtagtggatcggtatgtagagttatacgtgaaagagatagtgcggttacatggcgctctgaagtccattatatcggatagagatctgaagtttactttgaaattctagcagagtctttagcgggctatgggaaccaaacggaagttcagtatagctttccatcctcagactaatggacaacccgaaaggacaattcagatactggaagacatgttacgagc

SEQ ID NO: 363706 - DNA, 559 bp, Cannabis indica
taaatcaaatagacaagtaattgataagatgaatcaaaacatacacaaatgtatgaaaaatacttctgtttctttattgatgttcaataaaatgaattacattgaaatggagttttatttagggcgtaaaaccaaacagtatatacattgatccactgacaatcatatcaaacttgagataccactaccttgatgcttgcttaagcccatatatctacttcttgagtttgcaaaccatgtgttctatgccagacttctcaaaacctacaggttgagtcatgtacacatcctcatataggtcaccattatagaaggcactcattacatttatttgtttgagttctagatcaaaatgggaaactatagccacaatgatttgcaacgaatcattggtggaaacaggcgaaaaagttactttgaaatcaatgccctctctctggctataccctttagccacaagtcgatccttgcacctctctacttgcccatttgagtcacgtttgatcttatacacccatttgcacccgatggttctacaacctttgggtagttcaaccaa

SEQ ID NO: 363707 - DNA, 684 bp, Cannabis indica
aagaccttttaaagagtttccatgtttgttttcaagtgtcgtggaataagtatctattgatgagtgagtcaatactgcgaaactgaaagagtgacactatagctttacagtgtaaaattaagtagaatagtaagatttttgtatgtaataacattcaacgaaagaatgggaataattaaagagaaggttgcataaggtcttttaccgcactctttgttgtttgatattcttgtatggtataatattttctcaagtgacatgtaaggatgttcataagagaataaatgattttactcttaatggcatgtaaggatgttcataagagaatgaaaacttttataatatcatgagcatgcaattgcaaaacttgtgtatttgaagtgtatgtgtaagttattattatgaagtatgttttgttattaaataaagtatggtaggataacaattcttatattaagaagtacataataaatgtgttatgattttactgataaggcaaatgttaaatacatgtatgttgggctaatgaaataaaaaaaaaatgtagtaggtggaaaagggcatgaagagacagtactctgagtatttgaaaagtgaaatttcgaggacgaaattcttttaaggagggtagaatgtcatacccggttttaaaaaaaaaagtatttaaagatttattgataaatt

SEQ ID NO: 363708 - DNA, 629 bp, Cannabis indica
gtgggagaattttaaaattctaaacccatcttcatttggttgacacttgtgatagcaactttagaacacaattgagaaagtaaaccattcatatggatagaattaacttgtcaaaactttgagaataagatagtacaattcttgcatagtctattcgaataacttaggcaaaaattcctaatcctcatgaaaagttttatggtatctctaatgattacttaatcttaagcaagtgttttacattaatgttaatactagaatgctatgttgatgacttaaataatatgtcacaacaaggtatcccttaaaacaatagtaagaggttaaatgtacttttatgtatgaatttaaccagactcctactgttgagtgggagccatcagagatgtaatcaaactaggaacataatgagaaagtcaagaaagatttataaaagtgacctatatgttagataatagggatgtatattagaggtccttatatctacaccaactcataaagaatctgagatggtggttactctaggggtggaggagttatcctagaagagtgtcaaaacccatttatattaattcaagctccatcagtgaagatatataactttgtaaattcaaaattaccagaaagtt

SEQ ID NO: 363709 - DNA, 729 bp, Cannabis indica
atattgatcttggtaaagatattataatcttactgttgtatctttctaagtcaatatcactaatttatcttagatcaaaagctcttaatccttacatgtccaggttcaatctcaagagtgttatttgtgttctttaatttgttagttaagtcaaccttttcgtctggatggtacatacattttgggaacatgatagtacaattgagtgggagcgctaaacatagatattgaatctatagcttctatctggacaaagaagtgaaactatgatttccttcgagcttggcttaatagagataaatggaatagctcttatttcagtaattatattagttttttgaaatatcttttattggaagctaagtgctttaaggataaaatacattgagggttcaaacgataaatgtgtccttactcggtgtaaatcatctatagaggatctttgatgattgggattagaacgatggttaaatgtttatagcgtatctatatcgtggaacatatagagcattctctataactgagagtgcaattccaagttctacggtggatgcaataaagaattaataagttagggaatttccatggtatattgtagatctgcttattgaaagctcggttgtataggcccatggtccccatactagttgagacaatactgcttataagacttagttaattgattttaattaatcaattataattttaaaattatactatgtctagttt

SEQ ID NO: 363710 - DNA, 846 bp, Cannabis indica
tcccatactttcttgatcattagcttgctaagtactttctcctattcgagttgatcgactatgggttctggatcgcctcgaagtcacacttgcttcttcatgctctattctttcctctcgagagcggtttttcgtatttcccccatcagggtttgtacgagtcctcgctctatgggtttggaaagaacgttggtgatttctagcaggtgacctctgttcccccaatcgagtcccaagatccacctcattttcatgagggatttctcgttcatcagtttttggttgtctcccatttggttgttcatccagattctcaaggggtgtttcattttcccaaggttgttcttcccaggccttttcctgtctcctagttaatgagccacgaggtctgcctcatggtcttctcactccaggttcaggttgattttgagtgttcgtccccttcaccctggccgaggttgtttcatgttctaactcagcgtttctacgctgagcctcttctagacaacatcccaggcgatggcttttcgtttcataagttctttctcccatagattaggcacctccatgattgagctcttcatccctcgccccagggttctgaccactcccacgctaagttttcctcgagcgtgttgtccgcatactaggactaacttcgagtttagttctttgggaacgtgtggtccaagcactggggccaccctcaggttgagccctcctcgaacgagtggtccttctggactgcggattggtagatcttctggagcgcatgggcccttttccagaacgatggttggcttcctcatgtggggtgttaacattttctggattttcagccatgta

SEQ ID NO: 363711 - DNA, 536 bp, Cannabis indica
cgctagtcgtactctagtcgtacagatgtgatattgtcgaatagtacttaagccaacatacatttatcgatatccaatataatactaaacatactgatatcgctattataatgtaatttaacaggcttaagtaacatgcacgctaaatatgtaaatacatatgcatatcattatactaatcttacctcattttcgaattcaggtgtgccggccaacctgagtggaacaactgctagacgaattacaggccccaaaatcacattattcgtaaaattggtgagtgacatgctaaatcactttttggggacttaaacttgaaactaaaagtttccctatcgatgaatagcaggacaataccctaaaaatcacaaaaatgggaaaaactaggcttcccaaaatgccccaaccgaaagaccgatttcccaaccgaaatttcggttctatagggtctccaagggaccaaccgatcgaccggttcagtgcaggaaaacttcaaaatttcactacaccctcaattcaatcccaaaccttaccaa

SEQ ID NO: 363712 - DNA, 548 bp, Cannabis indica
aaataattttcaactttaatctatttttcaaataaaattcgaaatttttttgcatttatgaaatacaatttcgaaatataaaaaaaaacttattaataaaataaaataaaatatatcttgagaattattcaaattgaagctgcttgaaattaaaatttccaacttaaaataattttctatttaattaaataccatgaaaataattatatttaagtatcaagaatgagatcaacttaaaaaattaaatttttaatttaattagatgtatcaaatataagaattaaataattatgtataaaagaaacttagttattaattctaatttaatactaggaaaaaatattctataattaagttggtccaaaattaattaaaataaataattaatttacaacttaaaatattttcctaattaaatattagaaaatataattagtactagaaataactatctagaatatatatcattaactaagtgtttttctaaaattaactttaaaaaatgaaatgaaaaataaatttcatataattttaaaagttaattatgt

SEQ ID NO: 363713 - DNA, 798 bp, Cannabis indica
aacaagtgaatcaaagaaactaataacatacatgagttcacgattactcaggatttaggtcgttctactattgatcatcgtaataatatgaattatgtttttatggtaaatacacattagataaagacagctttattcatattggtgcttgttatatataatctctattatatataatactttcactttaatgtcatactacatcagtaatccgaaatgagattacttgcaccaaagaatgagcattagtgaaccatactagcaactgttgattaaagattacataaatttattattctgctaactgttttattcataactaattgatcttagttctctgtacaactacaagtaacaacctcatatatgaataaagaatttttcaatatttatataaattattcaatactaaatattaataatttaacattcatgcatatatcaaaattttcaactctttattagtaatcaaaaaatgtcttgatacgcttttcagggcataaaccctaataatatcccacttgcccctaaaagcaaactagacatctcacttagtctcatattagttatatgacccataaaagatttcactggtagcgtctttgtgaatggatctgccaggttatgcttcaatgcaatcttcaagaccgtcacatcacttctctctactatatttcttagtagatggtactttctctcaatgtgcttgcctcacttgtggcttcttggagttggccagcgctccactgttgtcacagaagaacactagtagtttttctacttctagaactacttcca

SEQ ID NO: 363714 - DNA, 590 bp, Cannabis indica
ctcaaacgaaacaagaacattgtcagtcatgagcctaccaggaataaacgcactctgaaactccgagatcaccttcaataataagcttatgagccgattagccatgactttcaaaataattttacaagatacattgcaaagagcaataggcctcagatcacccataacagaaggaaactttttcttcgaaatgtgaacgagactagttgcatttagaccccaaggcatggacttagatcggaagaaatcctgaaccatgtcaacaatatctttaaccacaatatgccaacgcttttgatagaaagcatgcgtcaatccattaggcccaggtgacttgtctgggtgcatttggaagacagcatgtcttacctcctcctccaaaactggctgtaaaagagtaacattatcctcagatgttatggattgttgtataacatcaagaacttcagcacaattcgaccccatagaatgaaaaatatcagcataatagtctactataacctgagacagacccgactgttgggttttgtgccctaaataaaatccattacaatctgattagttatcaatttagaattttgaagtgaatt

SEQ ID NO: 363715 - DNA, 399 bp, Cannabis indica
aagtgtatttttaaccactaatcactcatctcaacccgggtcaggcggctggagctttgccacaggggacaccaggaggtgcgacaggagtattgactctagttgttccccccggagatgcccaacatatccctagcctgcaacccaaacctaacgggagagtggccatgatctcgggaggaccccatatcggaggaactacccgcaaggaactgaagcggtatgcaggggccatgaaacacaatgaggtttgggaagttactcaactcccagctcaaaggccccggctgatggatcaacccatcacattcacggaagaagacgctaagacagtgcgtttttcccaccatgacccgttgatcatagaaacccccattgccaataaagtggtggccagag

SEQ ID NO: 363716 - DNA, 757 bp, Cannabis indica
taattaaataaatatatatataataaatagattaaaataaatattagatgaaaatacactttaaataatgagctttattatgaggatatttgatctccattgttggttctacatagttcttgatctagtgagtaatcatccctaataaatgaacgttcattagcaattttcaggtatattttgaggacaaaattcttataaggaggggatggttgtaatattccaataagcctaatggtaaataattaggatttataattatatcatcagtaaataattaggatttataaatttaaatttgctataattggataaataagcataatttataaattacggagatttatatgacatatgcgaatgtaatatgagttaccggtgtaataaaaatatttttagttttagcgacctttgagactcgatcgggggccagaaatgtcataacgggtttaatttatagaattgatggaaatattgagataagttgattttaaaaataccgaggtattttgaggtactcgaagttggtcgaataccctagaaatagaggtttcttcgtggctaaataataataagataactattaataataaagttattattattattattattattaatatattattattataatattatttatatatatatatatataaaactttccttaaattagtattatatatattataagttatgttaacgtagattttcgttaaccaaatttgtagcctcacgaatatgattcaacaca

SEQ ID NO: 363717 - DNA, 594 bp, Cannabis indica
acataaatgagtatgagagaaacttacaagtcgagagcgaagcctggacaacgaagaagcggccctgaaaaacaccatggatccgtctgctacaaaccaaagtggaattagggttcaaagaaagaacctgaaagtctgaaaaaagaaaaagataaatatctatagtggaaacgattgatccaggttttgattctacgagagcaaaatcgaaagcaaactgaggaataatatataatttgaaaagggaaatttagactcttaacaaaatacccctaacaaaattttagacttttatattataattaaatataatataatatatacttttgctttcttttcctctggctactaagatgtttcagtttgccaggttgtctcttgcctgcccatggattcagcagcagttcgaaaggttaacctattcgggaatctccggatctccgcttattttcaactccccgaagcatttcgtcgcttattacgcctttcctcgtctcagggtgcctaggtatccaccgtaagcctttcctcgtttgaacctcgcctttaactttaaggctataccatcccctaaggtgctactaaatggaagga

SEQ ID NO: 363718 - DNA, 583 bp, Cannabis indica
tttgtccttttggattgacggttttgaattgaccgccaattttattgaattacaactgtctgactttgacataatcctgagaatggattttctatctaagtatggagtgaaaattgactgtaaatggaagatggtggtgtttgagcccgataatgctaacctagcggtgtttgtgggtaagattcagggggcacacataccaaatataacactattgaaagctaacgacctaatgagcaaaggttgtctgggattcatagtcactacagaaccagccaacctgtggcatcaaggcctgagagtatgagattggtatgcgagttccttaatgtctttctagaagacttacagggattgccatctacccgggagattgaatttgttattgaattggttccaggactggatcgagtatctaaagcaccatatcgaatggctcgagtggagttgaaagaattgaagatacaattgcaacagttactgaatctgggattgattaggccgagctactcaccttggggtgcttcggtattgtttgtgaagaagaaagatggaaccctgcgaatgtgtattgattaccggg

SEQ ID NO: 363719 - DNA, 1346 bp, Cannabis indica
ggagattcattgcacgtttagacctcaaaaacacgaggggcatttcttttaattgaatctttcttgcagttcagaccagatggtggaagcattatcatggtacatgatgttgtctcctatttcactggatacaactttcaatatccaagaaatgataaaattgttaaatctgcaccaagattcgtggtcttcgtcttcctcatctggtttaggcaatctaccatcaacgaacttcattttgttccttgcagctaaggccaccatcatcgatctcttccaagatccatagttctcacttccagtaagaacttttgcaacgagcatggcactaggatggtctatgtgcgatagataataagggcttcgtggatcgtcatatcgagtagcttgatctaatgcggaaaaacgattattgttaccagaatcgttgtcacaactggaagcatttcgagtctgagctcctcctcctcttgccatggcagctgggacacaacagatgcagagatgggaagagaagaagagaagaacagagaagaacagaggaagagcttaagagtttcttggctctgataccattttagctttaggagtggagaacgaaatctttattgattgaatctcaaaacatacaattaagctcaactgagcttatatacaactgaagcaaatgactaaaaaaccagaacaaaaccagtaacagacaaatcaatacaccagtaacaactaacagccttttattaactaaaaaactcaaccaaccataactaaccaacaattaacaattggtccttaaggtttagagattggagttgttggattgaagatatgaacagggagagttaaggctgtgattgtggcagcaactttttctactacaatttactatacatatttggcttaacatagaaatatttgtttttataacaaatactctcatagaataaatgcaattgtagatatgataaaagggatatagtaaataaaattagtatttttactcaaaagaaattgaaagaagatgagaagagttttgtgaggatctatatttttgtatatttgtgttgttgattaatgaaattttttttcttcataagaaaagagaaatttacggtaaaacttccttatgttttcatttttatacatttaactctttttttatagcaaaatctctttaagtttacttttttttgtaaatttaaagtttcagttagatattacgattaaataccaagtggattactactatatcgactttgagattttatatatacacaggtgtatacagtagtcatctagttgatatttaacggtaatatttaattggcgtgtcaaatttacaaagaaaa

SEQ ID NO: 363720 - DNA, 691 bp, Cannabis indica
gggttcgagtagtcgggggccgggaccgtggtccgagtctaagagtggggccggggtcagaatccgagtacctaaagtccagggttgggtacgaagtaccaaatattagaattaaagaaaaaaaattgtagtaaagttaatttttttttttttttttcaaaattttttaaaattttgattctagaattaaaaaattaaaaagtaaaaacagtattataaaacatgtttttagaaaatattttcacttttttaattaaaaaatatgaaaataattaaaaaaaaagtgttaccaaacgtacccttaaaaaattggagcctaaaaattgattctttgaacttgttattttttttttgcctgaaccaaagttcattaaaacaagaaagaattgggatccacaggagtaggagtggcaattagttttcgtgggtcgtattcgtttcgtgtcgagaattaataggtatatgcttgatcggaacacgactcgtttaataatcgtgtcataaaataaaactagaacatgacccgtttataaacaggttgacacgaaacgactcgtttaactcgtttataagcatatattttgtttaaacatgtcaaccaataacacgtttatgatccatttatgacatgttaaagtactaaactaactttaaataggtcattaacgggttagtttcgtgttagccgtgt

SEQ ID NO: 363721 - DNA, 1623 bp, Cannabis indica
gtgtagacttcatccaagctctccttgtgtttgaatgggtgacacgtgtcaggcgcgtctattcgcgactcgatgtgaagctgacttggtgtccttttggtttttggctaataaatgccctgacaattaatatttcgaaatctgattttctctcaccacagttgacagctgcacttgattgcttttgattccccatattcacttttagggaggaaccgaagtttgtggttcttttgaaatgattaccccttttcgttctttgcctataaatatcagttggcatttgtcctcgaacggattttcaccaaccttccttgctaagtaagctcagagcgaaaagagaggtttttggattcaagttttctgaagtgctttcctgaaaactgctcgtttggcttggtgcaacctgaatccagacattccatccttgagtaagttctcaatttcttttatgtttatttcgcacattttttttgatgaatgcaccttcaactttgttgtagaagatatgtaggaaaccctaagtttagaaactctgcgattttccttcgttacggttcattcgatttcaacgttcgtaatgcttgctttttgaactgcataatgcctgtctttcatcttgcttattctattcatgatatttttttccctaactcgagaaaatttcaaacttcctgagttttgacttttcgttaaatattcttattcttttatatgttgagtactcctggtctgcatatttgcctgttttaacgttcgatatcccgaccaaacacttatattttgtgttgtcttttgtacatgaaccaaggtgacatgcattttagcttaagtcttctgtccagcaataggataatggctcgtccaaaaaagacaatgcgtagaatcgatgcatctgaccctcaaatgatcaagcatgccaccttacccagtgtcgaacatgatccatccgtctaggcggaggaggatcatgaaggggacgccgaggtctaggagattgaggaacaggaggatgttcgtcctcgcaatcctcattatgtcccccatactatgggggatataatgaggctagggagccaatcaatgctgatggcgatgtcctggttgacggcgtggactatgccagtgaagaacttaatgctgcggttcctcacaaaaggcaaggtactttgggtgcgaggtgggtgagccctccgtcaaaggttaccaaggcacgtttatgggatctggaccaggatggctacctgggcgaattagactgttacattctcgctcacaacaatcgaaccacaaaccatgaaaggggaatgtgtgcctggtcgggtgctcacgccaagcaaggggcattgctgcctttgcacccgtactttaggaatgtgggagacttctttgtaacgccccgatttcccgaaacgtcacacttactagtccgtttaaaaccatttataataaaacaataaactaatttattgaaaataactaaagcatgagatctcattattttaaaacaaaaacacttgattcatttataaatttttaaacatttaacttttacaaaagtgatcgagccacaatctttaaagaaacattctcaaaccaaaacatcgtgacaatcccctaaca

SEQ ID NO: 363722 - DNA, 436 bp, Cannabis indica
atagaatagatataccatcttgtactaattaataattaaccatgcatgaaccaaataatacatatcattgcaaatttttgatggaggctaaccaaaaaaataaccttttcaacatatacgtacatactaatactataattacatattctattatgtacacatatatatattattaatttttcaaagttgggaccaacaatgggagctgtggtgatcaaattctcccttctaattaacatatactgatatacccaagccatatatctatatagtatatcctatctctatataatatatatatatttatatattctcaaaattaattaggaccgcacgtagaagaattattgaaattggaaaacaataattaaaagcaaatacatggagtcgttattggaggaaatatattatgggtatccaacgagagtgatataat

SEQ ID NO: 363723 - DNA, 461 bp, Cannabis indica
cgcctaagatagttagggtgttacagaacatctagcataaggggactatgatctgacagagaaatctcaagattaaacactttagatgaagagaaattatttaaccaagaattactcactagagctctgtccaaccgggcttctatccaatgagcagtgtctctactcttctcccacgtaaaaggatggccacacagatccaaatcaatcagcccacattgcttaaccacctcctgaaagccgtcaataagccacgatgggtaaggcaatccactgagcttctcaccctcacaaagcacattgttgaaatctcccattaaacaccaaggagcggtagaacgcccacatagagtctgtaatagatcccaggtgttctttcttaaacttctattaggttccccatagattgcagtgaaccgaaattccctctgtccatcaagtgttataagactatctatatg

SEQ ID NO: 363724 - DNA, 1040 bp, Cannabis indica
atttggctcaggtcgaacgtacattttgggaacatgatagtacaattgagtgggagcactaaacatagatatggaatctatagcttctatctagacatagaagtgaaatgatgatgatttccttcgagcttgatttaatagagataaatagaagagctcttatttcagtgattacattagtttactgatatatcatttgttatcccaattttcgcactctgacgtggcatcacatgctggtggcacgtggatgtaattccccatatctgcccgaaggagatgttccgagcgcactgtgtatacctgtacggacgaggtcctcccagccgagcagtggacaatccgaacaacatatcaacacttagcaattttagcatttgcatcatgaagcacaagagcaatccctataaatctgggatcgtatcacatagatatggaaagctgtccaaatccctcaatctgtgtactctatatatgtaatgtgtagtcttaccaattatagacattgtaagaaaaagggaaaccttccctcaagcacatagccctataaatagtgatccattctcactggaaaaggggtcgagagaattatctaagagagcatactcagagatgtcattgtaagagctttaagagaagaatcattgtattctttatttttaagtcaatacaaatcaaggggagtgggctattaccgaactactcggggccgaacctctttaaaaactctgtgttctttatttatttatttatcttttcatattatatctaaattatatcacttatcgcttacaattaagactcattttgttggttaaaagcgaggtcaacattttggtgctttcattgagaggaaaagtcataaatttgctctttacttcaaatttaatcataaacacgatggttctacaaactcgtagaggcgtggtcgatcaggtagatccaccggcagtggatcccgcattgtagaatctaggaaatgcaagggttccaccagccacaaatcttgaacaacccatcacgcaaccaccaaccgtggg

SEQ ID NO: 363725 - DNA, 962 bp, Cannabis indica
aaacgagcatcaagtgacagaccagctctctctcaggagctggtcgaccacccctggccggccctatggcgggacacccttgggactgcaccatggccagccaaactgccatccacaggggcctggctagccaagaaatgttctacaggatttcctatgcacttctacatgtggacaacacctctggggctacgaattgggccctaaaagcccagcagaatggttgaataatatttagaatcaatggaatttcgttcttttgtaattaattaataaaatatacaaatatctagggtttagacctcctatataaaggccttaattctagcctagaaaactaagttgaatttaagcttgaaacctgcctccaagctctaagtctaagtctgacaaattctctcttcttcacttcctctctcacacgcccatacaatcatcatccccacacttagatttttctattcttgattcatacattgtattcttaagggtattatagcagatcccaccaaaagtgatcgagatagtattaaccctcgatattaatacatctaaaatgggagtaggtcattacccactatcacaaggggggcaaacctctataacaaatcttgtgtttattacttttcattcttatttgttcaaacacatgtcaagcatcagatttatacgaccccactgttggttgataactttttgacgtcaacacattcctaaagatgacaacttagactagtgtttacaatatgaaacaatgaagaattttattaaataagaataactttgattctggcctaaacgggatatctttagattcttgttttaatcgaaattatcctttagtttcctcttagctttttcattaagaaatttctaagaaagtataacattggataaaaaaggattataattcatctacttatgatgtcactctattttcttctatgaaattgagtggcaca

SEQ ID NO: 363726 - DNA, 918 bp, Cannabis indica
tttgtaaattttctttttttttttttttgaaaattactgccctgaaaacgacatgtcatttttagctatatgccaaaaacgacacgtcgctttttctacaatgaaggttgcccacaacgacgtaaaacgacatgtcgttttctacagtatgaaaaacgacatgtagtttataaaaaatgacggttggataaaatgaaaaacgacatgtcgtttgaagcttacgatggctgccacttacttgaaaaacgacacgtcgttttttcacaaggaaaaacgacatgtcgtttggctgtatcttcaacctccagctgggtcaattttgacctgttttcagccacgtgggtccgatggacccgacccaaacccgatcggaaaaaagaattttgtcgaccaaattacgtgtttttcatcccgaaatgatccaaatgaaaaaataaagagatctatgtgggttttatggatctaaaacacgtaaaaagtcaattttaattccaataaaaaatagttgggtccaaacgtgttcttcaaaaaaaaaattcaaattttgatgtttattcaaatctttttcatccacgaaatcactctataattttatatgaatgtgatattacaataaagatttgaaatacacaccaaaaatatataaatatatatacgtatatatatacaacaatacttacgtatatataatatatataaacaaaattaaaataagaatatatatatgtatatacgtagattgaattaaaatgtatatatataatcgaaattatatgaatataaatatatatatatataaaatatataaattaagaaccgatcgtatacgtatatatatattatatatatgaatatgaatataaatatatatatgtatatatatgaagatgaatataagaatatatatatatgtatata

SEQ ID NO: 363727 - DNA, 1055 bp, Cannabis indica
caggcgatcccatttggacatcgaaaaaagtgcttatttggcactaaccgagcacttacaaagtacaaccatcgtttttttgccaccggggttcaggttcacacccggtagagggatgttggggcgaccccctctgtgccatcattgtcatggaacctcaacccaggaaatcccactgtctccgccacatccaccatatcaaactgctcttcctcctcaataattcggaggcgttgttcttccctagtgtaatcttggacagagaacatcacattaaatgcatcagcagtagcgggaactttctttccacgcactttcacttccccattccggcggtcgggccaattcgcaagaaattcacaagccatagtaacattagcccgaccccgagcatccacaaaacttccccacttcattctttctatttgagcccgaattgtttcaaatcgaggttgacgcctcaaaggattctcggggaattcaataccccgatcatcaatataagccctattcttaagtctcatgaagcgattttgggcctcaatgtttccaaagcgggtcctatcaaaacccgttggtggtgggtttgaagacgaaccctcctccacattcctagtcctcttaggtgccatttttctttttttttcgatttttttttctgattctttttttttttttttcctttttttctaaaaaaaattggcagcacctccccttaatttttctatatcccaaaaattcaaaatcactcaaacaatattctcaaatactcaacaccacaatacaatgatcacaaacccaatatcaacaatattcttgcacaagacacaattataccacccaaatctaaaaaaaataaccaaattccttaaagattaaaggaagtgatacttacaaacccgaagaagctttattccacctccattgttgaatgttcttgaaagcttgaggttgaagatgaagacaatgaggattttcggatttggggtgctatgggtgatttttggtatgggttttgatggtatgcgtagattgatgagtgaaattgggttttt

SEQ ID NO: 363728 - DNA, 587 bp, Cannabis indica
ggaggtgttacctcacgagtctcaccaacttgaggtatgacatatttcagaagaagagacaaggtaagacttgagattaaatagacaggtagcatactatctaaatttattcccagcattatcagaaatacatggtgttagtcatgtattaatgttgggtacgtatagaatgacttatgtaggggatgtagtactacagacctacaattagatacatcagatgatgaatgagttttttttagagtaggacgctagatttcataatataagccaagtggggaagaaacttggaaagtgaagtccaattagagaactcagtagttaaagatgtttagattcgatttcgaggagaaaatccttttaacgaggggataattgtaatgaccgcatacttaaaatatagaattagtaatcaattaatattaattatttgcgttatttgattatgtgcgtgtatcatgtcatatgggacctattctcaagaaataggcatttgatttataatttatcaattttagagattttattgaattctaggtgtatcatagaggatataaatgaattttattattttcatggttttattt

SEQ ID NO: 363729 - DNA, 572 bp, Cannabis indica
gggcataaaacccaacaggattgcctgggacaactggacaatatgactctgtgtgggtcatagttgacaggtttacaaagtcaacacacttcatacccattcggacggacttctccattgatgagtatgctgaattataagttagagaaattgttcgtcttcatggtgtctcaaagtccattgttttggatagagatccaaaattcacataaagattctgggagagtcttcattgagccatgggtactcagttgaagttcagcatagcatttcatcctcagacgaatagacagtcggagaggactatttagatcttaaaagacatgttgcaggcatgtgtgctttactttgaaggatcatgggtaaagtaccttcccctgatcgagttcttgtacaataacaactatcaggcaacaatcgggatggccccttatgaaattttgtatggaagaaagtgtagatcacctattcattgggatgaagtgggtgaaaggaagttcttaggtcccgaggttgttcagagaacaagtgaggcagttgataaaatccgagtgcgaatgcttgcggctcaa

SEQ ID NO: 363730 - DNA, 604 bp, Cannabis indica
gccaaaattatttattaatttgttgctctcttaaaaatatttaagatattttacacatattttatttttgtaaaatagaatactttagattttttttaaaagagaaataatcaatacataaaatacctaaggtttttattaagtttatttttttaataatgaagtatacatgtgtaaatagaaatataaaattattaataattttattacagttataaattatagataaatattgtctcaatttaattatatatactaataaattcatttattatatggtatgattattagtatatatattggctatataattatcaaatgcaaaatattcacttaaaagaataaagaaaccttattattttaaaattacaattgtaattagagactttaataaaataattacctccacaaatatttcacataagataaaatatcaattggatgacaaacttatttagcattaatcttaagaagtagtgtagtgtaatgcgttacttgttatatcaatatatttttttttttgtaatttaatatgttttgaaactaattatcactacaagaaaaggcatttttaccggcgcagttcgtcaaatgcgccggtaaa

SEQ ID NO: 363731 - DNA, 531 bp, Cannabis indica
aaaaataacagaaaaataactattaaacaaatataaaatacttaaacaacaacataaaaataacaaaaaaaagacagttataataaaatcaaacaaaaaaataacaagacatcaatcttgttaaaatatgaaaatcattgataaatcaactttgaataaactacaaaacatccataaaaaatatactacttttttattaattatgtaaaaaaataaaaaaatatagaaggagcgatcttaatttttttcgtaagagagagagtgttaaaaaaatatgataaaaatgatgaaagtaaaagaatcatattttagtaaaattagataaatagtagtaaatgaccctttttccctttttactaaagtttaatgtccctttttaaaaataatatagcaaatgacctttattatcttttttagtacctaaaatacccttagttatataaagatattattaacattatattcattctccaaatagaaacagaagctatgctctaaaatctaaatgacaaagcctccctctccttattt

SEQ ID NO: 363732 - DNA, 605 bp, Cannabis indica
tttgggtacaatacatataaaaagatgtatattttaattaaataaaaattaaaggtaaatttagttaattgattaataaaagaagtattttttaacttacccttaaaataggggtttttttataaaaaatattagatttttggccaaaatttaaattttactatcacgaatttttttttacaaaaatactgtctttttataaaacaaccgtaaaataataaaatagaacaactaaaaaacaacggtggaacaactgtgaaaatttacacagtatttttttttaaaaaaattccgcctaatagtaaaaagttaaaaagttaaaaatttcaacatgtggtgtaaaaccctataaatatacgggaaatattcatccatatgaatcttatttttttaaaaaaaattaccaaattaactagtaataattagttatgttatagagcccgtttggtacgcaagactagatataggctaatttgtcaaatccagtgtttggatatgttggaagcctggataactaatccagctaatctcatctgtctggactggatgggataaataatctcaggtgagattttttttttatcgttttttaattttgattttat

SEQ ID NO: 363733 - DNA, 850 bp, Cannabis indica
accctctccctctagttccttggggtagggacctcccgaggataggtttgaggtatctgttgattgtgggcatcagtacccatcccttgagtgttttggttgaagtagcttcgtattaagtcggcagcctcttgggtgcgacgatcttggtcgtcttggtgcctcctcatctcacgagcatgatcttccagccaagattagaattctctcctttggttagcgagactttcagtcaaggtcactcgagcttaattttgctcttggtgcacagtttgaaacagtccttgcatctggcctattgcgtctcgcatctgatccatctcggggtcaattccctcgatgtcaacatggggttcattccgcggcgtaaagacgctagggctgcgactagtctgagcttggcccgcaccgtcagtaggtgagaccaaatttttagtattacctctttcggtggcgtcatcagtagcaccgcctcctgcggtagtggcgttggtggtacgcccagtagttgtctgtccagtggctgtagtttgaccggtggtggccgtgccaccgttcccggtacgtgggagtcgttctccattgttcccagcttgattgcttgctgatggaacttggtgggcactttccatctcttcgtcaggtcgctcttgagatcttcgagttaacaccatttttcccggtgaaatcgctacaagattttggctaaaattctcaatgaaagcaccaaaatgttgactggatttttagccaaccgacttggattcgtaataaatgagatttaaaccaaaatcacaataataaatgcagttaataacacaagaattcacaataaatgtaaataaaagac

SEQ ID NO: 363734 - DNA, 617 bp, Cannabis indica
ttctctgtgtttcagtaatatagtaaaattttaatcaaactcttttctgttttgtaattttgtgtaaaaaaacccaataatacttgacctaattttaatgtagtttcttttgttttttgaattgacttgtacttttgcctagaacttccagacactattaatggaacgcatcatttccatgtaaaatcttcttccagttccacgtatgtatgttttattttttttaaataacaaaaatttctttcaaaaaaaattaacaaaaattattggaaaattatatataaaacattattttaaaataattatacttatatatttttatttatttcagtatggaaaaaaaattatagtttaatttttttttttggtaaaattcatacatttaattccttcaaaaaaaaaaggaatgtaatgatgtatccctatctgttttagtatccgaaataatttttagttcaaattttttctcatggtcatgtacgttataattatttattacatcctgcaaaattttaagaaattcagaaaatttaatacgtcgaaaacaagattcaaacagtgtgttgcacgcatgactattttattttattacgcgtgtgaaatacactatttgaaca

SEQ ID NO: 363735 - DNA, 711 bp, Cannabis indica
ttcaccaactctcaacgtctctgcctcatattcagatctctctgggtaaagaagtatttcagactcctgtgatcagtgtaaatctcacatttctcgccatataggtaatgccgccaaatctttagcgcaaaaaccactgctacgagttctagatcgtgagtagggtacctctgcttgtactcttttaactgccgagaagcataggctattacctttctagcttacataggcatacagctgagaccctatctcgaggcatcacaataaaccacaaacttttccttacctgaacgaagagttagtcttggagcggtaatcaagcgctgctttaactccaggaaacttttctcacaccgatcagtcgaaacaaacttcaggttctttcgagtcagctccgtcaagggtacaacaatctttgcaaaaccctcaacgaaccgatgataatacccagctaatcccagaaaggtcctaacctgagtaggtgactttggtgttggccaatcccgaacagcttcaatttttgctggatccacaataatcccatctttatctactatgtgccccaaaaatgagacacgagataaccagaattcacactttttgaatttagcatagagcttatgatcccgtaaccattgtaaaatgtcgggaatattttaccaggatctagatttactaacaagtatgttgaattaacatcctaaatatgaa

SEQ ID NO: 363736 - DNA, 1254 bp, Cannabis indica
aaaagaagttggatgctgcaaaaagtagatgggtagatgaactaccacaagtactttgggctcacagaacgactgagaaaatagcaacaattggctcggaggcaatgatgccagtagaagtgaatatcgcgacccacaaacgagatttctataatcaagaagaaaactaagaactcttaaagttatctttggttctacttaaagaaaagcgtagtgagttgcacattacgaatgtagcatatcaacactaaattacaaggtatttaataagaagtgaagaaaaggctctttaatatcggtgatttggtgctatgacgagtatttgcaaacacaagagatgcatctgcaggagtatttcacctaaactgggaaggtccttatgtaatcgaggcaatagttagaactggggtttataaatggctcggcctaacgactcgctaataaaaaaccactagaatgtcgaacatttgcgaccctaacaccaataaatgtttaagaatgctgtaatctctctttctaatatattttttaaaaaaattcatttactattagtaaagttgaagtattattcaagtaattacaaagttttattccttaaaattacttgaggggcttatatatgtgtatgattaattgaaatctatctggaaatacatgatatattacaaacccactccactttaaagatgttttccaaattgattaaagttgtctatggacaatataaagtcaaaaggaaaatcaaaaggtagcagttgtaaatgagatttaactcataaaaacaatattaagctacatgcgaggctgaatatctaacggctcgcattctataggaaaggaattataaacgaggcaccaagatgtcttaaaaaaatacttaacctaaaatatgaatagaatgcctaactattcatataggcaatcaaagatgtacaaagtaatacacaagatgaattattcaaagtatgtttaagtttacttaaaacagattataactgtttacgtgaagtataactgataaactgctcgcgaataaaaagcatagcaggtgaaaactactcacatacatagtagattattaactactcaagcaatattaaaggaagaacgagatcaatggaaatgcctacttaaagtatcttaaatttgatcaaaatataatttcttaagttatgaatgaaaatgcagacaagcaaatatattaagttcaagtataaagatgtgagacaataaataaaaagaaagaaaataaaa

SEQ ID NO: 363737 - DNA, 684 bp, Cannabis indica
gatccagccgtccagatggaggaggatcatgaaggggacgctgaggtccaagagaccgagggccaggacgtagtgctggcagttcctctggggaggaggaagagtcagaggttgcacccccaaactacggggagtacaacgaggctggggagccagtcaaagctgacggagacatcctagttgaggtcgtggactacgtaagtgaggaacttgctgcgacggttcctcatagaagggagggtgccttgggcgctaggtgggtaagccctccttccaaggttactaaggcgcgccttcggtctctcgactaggatgggttcctgggcgacttggactgctacattcccgcctacaactatcgtgccacaaacctcgaaaaggggatgtgtgactggtcgggtgcccatggtcagcaaggggcattgatgcgtttgcaccaatacttcaagaatgtggtggacttcttcgtcctctgcccagtgcagttcactcctaagggcatcaagtatctgtctaccctcttcgtcctctatgcctcccagaaataggggtatgccctctctccacgaggttgcttggtactttgatttgaagtccacccccaagcaaggcaggtcagggtacttctgttagaaatattttaccaggatctagatttactaccatgtatgtttcattaacatc

SEQ ID NO: 363738 - DNA, 562 bp, Cannabis indica
atggcgtgagacgcacgcacaaccagggtgaggtcgtgcgactcacgggcgcgtggaaaggagaaacatgcttgctggcggtggcagctgcgagcgaatgggaggaggccatgaggctgccttgtctgctgggagagagggattttggccgattgggccttgtttcttggactgttttggctcttcaaaaatgccaattttcatagttttgggcttttatttctgccatttttttatttcttttcttttcttttaataatgttattttttttaattcaagcaacaaataaaattaaatccaaacaaaatattttcaatatagaatatatcacaataattttaaagaaaatatttatttaaaacctaattagtttgtatttctttaaataaaaataatgcattttcttaactttttatttgtttttctctattatgccataaatactaactattatatataaacaaagataaaattaaatctaaataaaaaaattttaacataatattatattgcattaatttcttgaaaatattataaagaattaattttattttgtatttt

SEQ ID NO: 363739 - DNA, 837 bp, Cannabis indica
atcttactcagcaaaaatacatacggcatttactcaacaagacaaacatgatagaagcaaagcctcaatctacacctatgtgtgctaataccaaactgtcactcacttctggacagattcttaaagatgttaaacaatataggagtgtaattggggctctccaatatctcacaatgaccaggccggacattgcatttgctgtgaacaaattgagtcaattcctcaaggctcccacgacaaaacattggggagcatgtaaaataattttgagatatctagcaggtacatctcatctcggacttaccttcaaaccagccacccaaatcgatcttcaaggttacacagatccagattgggccgactgttatgatgacagaaagtcaacatcgggttactgtgtttttcttggacaaaatctcataagttgggcctccaaaaagcagagtgtggtagccagatcaagtactgaatctgaataccaggctcttgctttagcaacatctgagttagtctggattgaatctctccttactgagctttccatcaacctgtctcactgcccgatattatggtgtgacaaccttggtgctggctcccttgcttccaacccggtttaccatgctagactaaacactatcgaaatcgaccttcacttgtttggggacaaggtcattgacaacaaactcgatgttagatatgttgactccaactaccacgatagcagacatttggactaaaccaacttgttggttcgtaacagttttggtacttaagtagacaagttaactgttgtgaaaataatattgccttataattgtcgcaagtgtacacaatcac

SEQ ID NO: 363740 - DNA, 614 bp, Cannabis indica
ctgaaagggggtgaaccactataaaattcttgtgttcgtttatggtgaatttctttttgcaaaccggtttactttgattaactattgcttgtgttcatcttgctcgttttacgatcttcttagatccgttgacgaaaaaccgcgtcaacagtttggtgctttcattgagagcagtgagcacaagtgttaatcaccctttaccatcatggtgagtacaagacggacgaactatgaggaggaggatcatgatgaccccatgaacgaaggaaacaccatggaacaccatgaagagtaccaacccgctgagcccgctggcgaagggacctctcgacgtccaggcaaacaagcaatgcctgacgacgaaggtcgggtccaagatgcaggaagctcatcgtcaccatcccatggtgtacggcgaactaccaatgtccatgaggtgtacatggagaacgaggcattgcgccagcgtttagaagaaactctcaggctcaacaaagagtggcaagagaggtatggagcccaggaggccacaaggccacaaagaaggggaacccgcgggcgtcttggtacagcgagaaggggacgaccccgtgggagtcgttcaacacgttacc

SEQ ID NO: 363741 - DNA, 498 bp, Cannabis indica
tttcctccctctctccccgggcttttggtgcacgaatacgctctttttgtcctctcgatcttgagggccaagactcactcgagggagctagcccctctgcggccttttccctttcgtgaaatctgagcggactttttgcggatcctatgccttcttctttctccctgggatcgaagttggatttttctcaagattttcctcaaaagggtaccgtatagggcttggttccctgatcatgggtttctgagtacttgctgaggattcttttggtgtttcctcgagtcccgctgggatggccttgggatgtatatgtatccctgatgtttccatggccttttgcatggcaaccattacctcttgcatccttttattctattctttttgagcagcaagttcggcttcatgatcagctgccttttgcctcaagaccagcagttccgtatagctaccttcatcgtaggtgtcgtacccttcaaagttttcttcgtatccctcatc

SEQ ID NO: 363742 - DNA, 565 bp, Cannabis indica
tcatctatgttagaattttttactaaaattagacaaaaatccttaaatttaacaatctcaatagtttggggggaatttttaacagccaaaaaaagttcagtgggcacgatttagtacatgtcaaagttcagggggaaaattactaattagccttataatattcatcattatatatgtatatctctctctctctatatatatatatttttgaatgtcatcttttttagctacttattttatgcttcttttacaacaagtcacgtgacccactaagttatcattttttacactaaaaaaataaaattaccaaaaataaaattaacctgtgctccattcacttgctctgatctactctgaagtgtcatgtacttctacaaaaaagtgtcatgatactagtatatatatatatataaaaatagaacattccacagtcctcgtgatgcaactcactatgtgctcattatatacaactaccaaaaatgattgaaacacactcaaattagactaatttttttttttgggtttctagcagctcagttgattaaccttattgaatacacaacac

SEQ ID NO: 363743 - DNA, 643 bp, Cannabis indica
agtacgacacttacagcatgtttggtgacagctagtatattcctaattcttctccgtccagaggttttgagagcatagaaggttttgcgagttgcgcctttagctcctggaaagcttttttgcattcctccgtccattcaaactgcttatttccccacataatgttgaagaatgggacacacttgtctgttgtcttcgaaacaaatatgccgagtgcggcaatccgactagtcaaactttgaacttccttggtttttgttggcgatttcatatccaggttggcttgaatcttctctggattggcttcgattcctcaggtattgacgataaagcctagaaacttacccgagccgacttcaaaggagcactttaggggattgagtttcatgttgtatttcttgaggaccttgaagcatttgtccatgtcatctatatggcccccagccttcctggatttgatgagcatgtcatccacgtacacttccatggttcgccaatctagtctttgaacatcttgtttatcaatctttggtatgtagcttcggtatttttcagaccaaatggcatgaccttatagaacacagacctaaatctgttcaaaaacttgtatgttctggtctagtggatgcatcttaatttgatt

SEQ ID NO: 363744 - DNA, 682 bp, Cannabis indica
atctcgtccttgagattcttgcattcattggtgctatgaccaatgtcgttgtggtactcgcatcttttgctcggatctctccaggagctatccttgtacaatggttgtggtctccggtagtgtgtatttttcctagtagcaaagtacacacgctcttgggagtccgacaactccgtgtattgggtgtactggggagtgtacccccttttctagcgcttctcccccattcgagtgctgcccttggaggaccttttattcctcgaaccctgggaagggcctgccaggcttgcggtcgacgcggagtgcgaaggaatttgtccattcgtcccggatggattgccgaaatgggatgacgccggtgcgaaggcctggccctgactatatccgggggtggcagagaactgtatgccgcttgtctgtggagttgcggtcgggcagtacccgagtgcggtactccgggcatgtaccctgctatcccggtgggatatatcctccataagccactatttgggcttcttcgaggttgatatatttttggactctcttctggaagtcctgaaggctagcagctccttcttgctgtagttcattccagaaaggagtcgccgtacggatgcctgcttggagaagcgcaagctgttgtccgtcgtcaactttctggttttcgaggcttcctctcgga

SEQ ID NO: 363745 - DNA, 629 bp, Cannabis indica
cctcttctttacatgactccctctaccatgatataccgtcaactttcttctcatttccgagcttcatttcggttatttgggagtttcccaaactcgaggtaggccgctattggtgtcatccagtttggggatgtatcaatcattttgatttctttcgtgctagtgatgctagactcttcgaggaactggataggaaccaaattttccttgtcacttacattgctgcttgccaatcgagctaacgcgtctccagttgtatttttttctctcggaatttgtctgagaccatagcttttaaaattgtccgagcagatcatgtattttgctcagatatgctatcatattttctccccgagcttcgtattctccggatacatgatttaccaccagttgtgaatcaatgcacatatcgatgtgttcgaccttcatctcctgggctagtcttagcccagcaattagagcttcgtactcagcttcgttgttgaatgctttgaatccgaacttgactgcaacgtgcaggtgttgccccctaggcgtgtcaaagacaatccctgcactagatagttgatctgtagccaacccatctacatgtagtttccaggtcggtttgtcctcattgtgacttggct

SEQ ID NO: 363746 - DNA, 571 bp, Cannabis indica
gtttaacaatatatagagagagagagagccaaaaccccaacacaagaaaatatctcagctcaggtttatggagagactataatccagtgcggctgctttttcgtgtgactggtttttttgtgcttcctctcattgtaccttttagactcatttgcctattcactttgagaaatgctagaagtcattagtgttgtttttttttttttgtgtttatgtaagcgtttataaacatgagaaatgctaaatgacaccagtagtgcttagcaccctcttatgtatcgctattggtccaactaagtatcgggtcccacatagtttaatataatagtttttagggagtatcgctagccaatcgcaacttgacatgtcgagaaggtgctaggcaccactggtgtctaatagcaatgctctacaatcatattgggattcgaacccagaacttccaagacacacactccctcctatcgccacttgagctagcctcaaggttgaagtcactagggttgtactataaaactacctaacatacttatatgtagactttcaaaatttaaaaatttacaataatttg

SEQ ID NO: 363747 - DNA, 534 bp, Cannabis indica
taccataaaaaattaaacttaggtatttatttacaaccgagagttaaacttaagtatttatgctacaaattaccctatctttatatagtatttctcttatttatttatttatctattgaataaattatgcaattttattaatagtaattagctaaaataatagtctgcaatccaatcgagacatctcttcgttggagacacgaccagagttagaattagaaaaatgagtcaaataattaaccgtctaatttttaagtcgtttaataataaaactaatgtaaaatcagatgaaaaagattgtaacattacagttaactttgagaacacatatatttagtttcatccaccgctcagaagacacaacagtatgaaatgttgcagcaggttcattcagtatcgtaacttaagcactcaactagtgcaaggcacgtaattgcaatactaacaaccccttcactcgttgagaacttattattcacaaccattaacaatgattttatgacgagtcattgaagaacaaaaaagaactaacaa

SEQ ID NO: 363748 - DNA, 522 bp, Cannabis indica
atggatgtaatatttatagccataaaccaaggtggttttggcaggtccccataaatcaacaactatcaattgtaagggttcattgtaaacagttaatgatgcttgggaatggtaatttgtgtattttgccaaggcaacatgcagagcaaacagacaagggatttttattgctaatactgatattacaagtatgaagaatagatttcacaatcttttctgatggatggccaagtcggttgtgccacaaatcatactcagatagttgagatatgttggttttagtacaacttgaagaagcagatgtattatttggggaaacagaggcagtaaaaatgcatggggcagcagcaggtgtgttagattgcacattgaactgagatggtttaaaaatatagaggtcattctaatgtactccagtgagaaggatggcttgtgtttcctggtccttaacaaaacacttatcaacatgaaactcaaaaaagacatgattatcatgagcaaatttagagacgctgagtaagt

SEQ ID NO: 363749 - DNA, 810 bp, Cannabis indica
acttctcagactataaatggtcagccgccaaatctccggtcacaggttccacttgtgggccaaggagtaggtgggtagaccttgtttagtaattcattgggagaagtcataccttataattccaaccaggttaattgtgtcggtcggcacgttaaccaaaccaatcaatcactaagacagtcaggcatatatgtattcgaaaggttggggacgactcatgatctcataaacgatctgaacagaaggagaggagtagacgatcaacttggcacgccaatcgtgtagcccagaacccgtgctctaattccggctcagaaagatgctgacgtgactcagattgaccaaaatgccgatcaggttagtccagctgtgcaggaacaactgcacgaactaaagaatatgttccaaggcatggccggacagagaaataatgatctcgagttggaccgagcacatggaacccctttctctcttgagatcaatctcctggcgttaccccacaagtttaaaatgccaacctggaagatgtacactggaagagaagatcctctttcccacctcaagtatttcgagatgcaaatggatctgcagggggtgcgaggtgacgtatgttgcagaatttttcctgctaccctctcggaagccgcccagcaatggtatttcaagctggcccctggaaagttcaactcatggaaagctttctcctcggaattccatgcacaattctcctcctctcgccaacttctgttgcatttaggagacctggtcgaagtcaagcaaagccaggcgagcctctccgagcatacatca

SEQ ID NO: 363750 - DNA, 613 bp, Cannabis indica
tgcaagctccttgatatctcgtcatgtaaacttctattatatacactgtctatcccgagatggacatattgtctcgtcaattacatgtattattattcttatctcacatatgcttgtgtggcatcgagtttgaatatttttatcaattataattaattgaaacgagttatttaagccacatttaataatgtaatttaatattataactagggatgcacacggggcggggaattagcggggagtgctctccccgtccccatccccgttaaggattttaatccccatccccgccccatccccgcttattccccatcagggacggggcggggaatcccctaatggggcggggacgggacggggaatcccctattgtaaaataaaatttattttaaaaatttaaatgtataaaattattaaattacataaaagataaaatattacatattatttactattcaatatagtaattattatacaaaaacacaacttcaaaaattgtaaaaatgatattaatatactaaaaaaatacaaacatatataaaatataaactattaataaaaaaataattaataaattaaacgggtccccgtcgggacggggagtgtcatcccc

SEQ ID NO: 363751 - DNA, 856 bp, Cannabis indica
ccagtacacggagctaacagactcacaagagcgtgtgtactttgctaccaggcaaaatacgcactatcggagaccgcctcctctgtacaaggatagctcccagaaggatcccaataaaagatgcgagtaccacaacgacattgggcacaacaccaatgaatgcaaaaacctcaaggacgagatcgaaaacttgatctgattgggacatctctacgaatggatcaagaaccggttgcctcacctcaatccggttcaggcagcaggagctttgcctcaaggagcaccagggggtgtagccggagcatttgccccagttgctccccctggagatgcccagcatattcctggcctgccgccaagacccaacgggagagtggctatgatctcaggaggacctcacatcgggggaactacccggaaggagctgaaacgttacgcaggggccgtgaagcacagtgaggtttgggaggttactcaactcccagctcaaaggccccggctaatggatcagcccattacattcacagaagaggacgctaagacagtgcgttttcctcatcatgaccccctggtcatagagactcccattgccaataagattgtggctagagtcctaatcgacaacgggagttctgtgaatttattattcaaagaagccttcacagcaataggcctgacggaccgagatctttcaccaagcggttcccagctcacggggtttaatggaacaacacttatcccaatgggaaaagtgaggctcccagtcaccttgtgcccagacacaccccaaagcactttcaaatactgcacatttgtggtggtggactgcccaacagcttataatgcaatcctcggc

SEQ ID NO: 363752 - DNA, 583 bp, Cannabis indica
aaggtgactggaagtctcacttttcccattgggataagcgtcgttccattaaaccctgtgagttgggaaccactgggtgagaggtctcggtccgttaggcctattgcagtgaaggcctccttgaagagtagattcacggaacttccgttgtcaatcaagactctggccaccactttattagcgatgggggtctcgatgaccaacggatcatgatgagggaagcgcaccgtcttggcgtcttcttccgtgaacgtgatgggttgatccatcagtcggggcctttgagctgggagttgagtaacctcccaaacctcactgtgctttacggcccctgcgtaccactttagttctttgcgggtggttcctccaatatggggtcctccggggatcatggctaccctcacatttggtctgggcggcagaccgaggacgtgctgggcgtcgcccgcgggagcaactggagccaatactcctgctgcaccccccggtgtccctcgggcacaacccctgtcgcctggcccggattgaggtgaggcagccgattcttgatccattcatagaggtggcccaatcggatcaggtt

SEQ ID NO: 363753 - DNA, 563 bp, Cannabis indica
gtttattttttttattcattgtgttatagaacggttctatttttatttatatttgagacatacatttctggtgacttttctagcgatggtgactttactggtgacgatgacttttcggtgattttttcggtgccggtgacttttctaacaaaacttattattacaagttttatcaaatttatttattattttacaaatatagcataaaagcccaaattaaaaaaaaaaaatacataatcttatggtattatttatttatgtcatagaaaagtaaactcttataattatcttatatattgtgtaatttttatttataaaattttggctgtgtgcaaataaaacttaagaaaattacattgcatatccattttactttatctattttaatttttatttttatattctttaagatatactcacttttatagataatatatttgttatactctttacgttaacataaattatgtaatagactcacttaggtagaaagtaaaagtatattgggcaaatcactcacaaaagtaagtactttttaataaaatatatgtaacatccccgct

SEQ ID NO: 363754 - DNA, 643 bp, Cannabis indica
catacgctctaaagcaaccaaaaacaaaaataagatgataaataagtgaaaacttggaaaactccaatttagtttcaagatgataatacaagaagatatattactgattatccctattgaaaacaaaacatagaaatttcaaggcaaaacacaaaccaattaaaagaaaaaccgcatacaaatatacacaaactaaacaagtaaagagccctaaaatacgaaagatataagaataaactgagtaccagaactggacgctccgtgtttgggttcagaagcgttggaggcctccgccgctgctgccgccgcctctcgggcttgatcatcgtcttcagcatcaaggtcaaggacagagaaagcattggcgaggggctccatagcgtttgcttcaaggagtgttggggttcactacgtttggagccaatataatggggaaaagtagtgtaggagggaagtgcaatggacttcagtcttacttttttttattcaagttaactgcacttatttctttggggaaatttgacattatatgttaaaaaacaaatggtacactaaaaatatgctaaaatattttgcatcatccaaaatatacttatactatttttacatttctaattttaccccttaacaaataaaaacaaaa

SEQ ID NO: 363755 - DNA, 722 bp, Cannabis indica
aataaattaattaattaaataaactaatttatattatttttttttgtataatttgtacatatagtttaaacttcaatatctaaaacttagtgataagtgatattttaaaattattattttgtaatgttgattctttttattttattgtttttttaattttttttattttgatttaaaaaatatactattaataatattaataatatattttctttcaaaataattaattttttgaaaaaaataaatatatctcttacgcacaagtgtcctaactagtataaataaacatgtcattcaggcatatgttcaattcactagtcacaaatgttttggtgtgggttgttttcactatcaccaaatacttcaattatcaaacaattttagtaaaagtttcagcaacacatcgaataagaatataacaaagttcaaactaacaaagtttcgacgacacaataatacaataaatatacaacaaacgaattccagccccatctttcagcaagctcttcaagattcaataattttaaatgtacttgttaagctatcttatgcgagacaattatactttgaaaaaaaaaatagaattaacaataataaataagttattcgcctgaatcaaaacctcataaaagtagaaatctccgaaatgcactcttctgccaaactcccagttgaaccaaagttctatttactcaatttatatctcatcatagctacacaat

SEQ ID NO: 363756 - DNA, 526 bp, Cannabis indica
aaacttcaaagtctaaattagactatgttcttatcagattttggagaaagtcgaaagtcgaaacataaaagttttagatctctctttgagctttctaaaacatcttaaattgtctgattttgagtaatattgaaaaatttatggccaaaatttgtcaataagcttacaccctaaatttaggggtgttatgcttaggcactgaaatcttatgcctagacccgtgtcttcaaaatatcaaaggaatgtctacttcgcagacactggccacaacataagaatcttgtgcctaggcccaccatttaaaattttgaaaactgatatttttttagatcttttatctttttttggctataaaaagaggtcgactttcatatttttcaacaagcattctgagtatacaaaaattagagagcagaaacaaccggcaaggctttttcgatggatttttcaatattctcttcttctgtattttcttttttttttattcttagttgatatgtatgaagttgttacgatgaacaagagt

SEQ ID NO: 363757 - DNA, 514 bp, Cannabis indica
gatattgaataaaatggattacattgaaatggatttttatttagggcataaaacccaacactcgcatctatgtgacctgccctatcttccatagtaccgtagtgctcggctataccataaaatgactcgtgacagttaataggacgtaaaatctaggataccaactatcaaacttatgagcaatgcggtccacgagaatagaattccaagtataaaaattaagacgggagttttggaaggtaaccaatgtattacgctcagccctaagtatggcaagagaccagccacattaattacctcgggatgttccttcactggattcccgaggggcagtgctttgaaggtattgtacttgggccaagcgatcccaggcctgatcttcgagtggaacaattatttgctgccaagaagaatacttgggaaccttgtaatcacaagtgttttctttatcagcgagaaggcccactgatggcaagttaactttgttcaaaaggaatttgcatgatcagagacc

SEQ ID NO: 363758 - DNA, 818 bp, Cannabis indica
acacacacacatacacacattttggacgcggtgatcaaatcacacatgattaacaaagcaggaatccacaatcggtagagacacctcctcgaaccaggatagctcatcgtctaaccgaagggcatgatttgccaaaccatgtgctgcagaatttttattccgagccacataggacaaaactacccctgaaaatatagacaatcaagctatgtcttcaaaacagcacgatatcacattaaaaaataccttcccattattcataattgtctccagagctagcgaaatcgaaaaaacaatacaacaccaaaccacaaaatacaattatattagaatgacaatcttcaaaataaaataaatatacaaacttaaaaattaacacgcaactcatatcactagctcaacattactaaaaataaaaaaataacaaaatcattaagaataactagctaaaagtattaccctttggctagtaacaacatactagcaccctaatataaactgttgaaaattaaaaacaaaaaaattatatttaaaattaaagttatgagtaaattccctgttataggccctccacaaaataacttaaaaaataaactctattaccaaaccatataatgaaaaaagataatttgaaagaacaataataaatcaattcatattaaatataaggacataaaattgaaatacttatatgtttaaagtgaaaaggtcgttgaaacagggccggccctgagggtaggcgggctaggcgtgcgcctcgagcccccgaacgctcagggccccgaaattgtaaaaaaaaaattaatacatagataaag

SEQ ID NO: 363759 - DNA, 562 bp, Cannabis indica
aatatagtaataaatagaggattcgaaataaataccgaaaatgaaaacgaaaaaattacagaccgaaaaataaaaccttcatgtatatatatactcgtatacaatgtatatactgcataaaatcatcattaatgtatggaagatagtattacatacaattttatgcaataaaaatatgaaagcattgagtattatatataaacatatatacatgaaaattatatgtatatacacagtatatgaatataaataggaatgtgtacatatatgaacatatagattatgaaatatgaatgtaaaagtgtatatatataaatatgaatatatatatatacgtaaacaaaaaaaatatatatataaactatgtatataaacaaaacagatactgtatacgtatatatatacatatatacttgcatatacatattaaactatataaaatattatacaaatatataatagaatatgataattaattatatggaaagaaatcaatgaataaatgaataataatatgaaagtgtatacccagaaatatgtatatattatacagtataaatga

SEQ ID NO: 363760 - DNA, 614 bp, Cannabis indica
gcaaccagttgatgctgacgggaacgtctggttgcgggcatcgactacgtcactgaggagcttgctgaggcagttcctcataggaggcagggtgccttgggcgccagatgggtgagtcctccgtccaagatttcggaggcacgcctccgcactctcgactaggacggatacctgggcgagctggactgcttcattcccgcccacgacaatcgcgcctcaaaccctgataaggggatgtgagcctggtcgggggctcacggccagcaaggggcgctgatgcccttgcacaagtacttcgaggatgtggcggacttcttcggcctctgcccggcccagattactcccaaaggcattaagtatttgtctgctctcttcgtcctctacgcttcccacggatggggcgctccttctccccaccaggtcgcttggttcttcgacctgaagtctacccccaagcaacgcaggtcggggtatttttacttctcttagctaggcttcaagtggttgagcgggacggacaacaaggccatcagcaaaatagggtattttgttgatgagaacttcatggtgaaggatccgaacatcacccgactcggtttcagcagattccaaca

SEQ ID NO: 363761 - DNA, 452 bp, Cannabis indica
atatatatatatattattgaaaaatcctaggtacatatatatttataatatggttttctattttagtttagggtacttatattatactggtactagtctatactaccacttgtctagagatgctcaacctttctgcgcttccccatcaatatatacagaaatgctcaaatattttttctctattgaattttatataacttaaattaattatttttagtaaatattacaagtaccatgtttaagtattgctctaatactgtttacaaaaaaaaaaagtattgctctaatatatattatgagctcgctatttaaaatgcttaacactataatatattagtaattaaaatatacgagactctcttcttaaagataccctattaatatttctcatatattatatagagccaaaaaaaaaagataaatgttccatatagattaattacaagatagat

SEQ ID NO: 363762 - DNA, 552 bp, Cannabis indica
agggcacaaaacccaacaagaaccataataggaactaacatgaaaggaaaccacttccacataagtagaatgaccccgcacagtttttgtgttacaactgtaacaagccgggtcatatggcacgaaagtgtcagaacaagcctagcactgctctgttggctaacttgactcaagaagcttttacagctatgatttttgagatcaacatgattggtggatcagaagggtggtgggtagacactgtcgcctctcgccatgtctgctatgatcgtggtatgtttaagacatacactgctgctgatgacaagaaagtgttgttgggagactcccacatcatcattgtttctggaactggaaatgtggagctaaagattacctcgagaaggaccttattgctgaaagatgtaatgcatactcccaaaatgagaaagaatctgattttctggttttttgcttaataaggctgggtttactcaaaataattagggctaatttaaacaccatcactaagaatggtacttttgtggggaagggttatgctactgatggaat

SEQ ID NO: 363763 - DNA, 674 bp, Cannabis indica
atccattttaaaaccatagaatttttgtttcaagtaaaccctgctgggtagagtctttgtcatgtaagtttgctcaagcttttcccacattgcagcaactgtcttctctctaaccactttcctcaaaatctcatcttcaaggctcaaccatatagtgtttcttgcctttttcaggatctcttctttcttggatttctccaatgttgcagatattttgtcttctcccttaaaagcttcatctaatcccatgtttccaagatgagctttcatcttttctctccatagatagaagtcattcttgccattgaatttctcaatgtccatctttgtagacatctttcttgatcactttcaatctgaatcttgaagttcttgctgctatgattaagaacagtgatcaaacaccttctcttctctatcaaatcctgcaggtttcttgattgttgcttagctgatccttcactcgaaaccttgctctgataccatttgttgtgttagacaacaacctcggcaagcaatcaaacataaccacaaaccagaattaataatgtcttgcagaaataaaatgacaaaatataaagaacacaacaagattatagaggttcgaacttccttcacaaaacgtgaagagcctagtcttctttgaactcccttaggattagtctttattatga

SEQ ID NO: 363764 - DNA, 536 bp, Cannabis indica
tttattttgacaaaaaatcaattcagggttctattaccattttagaaaataaaaagtcaattttgtcatttaacaaaacagagggtctgattggtaagttttgcaaaacacaaggtccaaaatgatatttacccaatttaatatctaattaatgtttttattaaaaaaaaacttatagttttattattattttaatatgtaagacaataaaaaaaaaataatacaaatactttatagctaaatatactaataaaataatacaaaacacataaatataaataaaaaactaatatatttattatgatgtaaattttacattataataaatattgtgctaaatttggcacaaaatttactattttgttactagacatactttttattaaatgagctatattttaactttctactatttatttttcaatctctatttagagattggtctttagagctatatttttgtcttatgtgaattatatttaacttaaaatttgggttttttactaccacagtgagtgaaatttctaatttttaac

SEQ ID NO: 363765 - DNA, 501 bp, Cannabis indica
gaataatatagatttttaacttatgcaagaaaaataaatgactaagtaataaactaagtttaaacgagaattatgtttattgtccaaagatcttcttttaaaattactaatatatttaatagtaaatttaatttagagaaatgctaaagggcaccagtggtgcctagcaccttcctatgtatcactatcgctattggtccaactaagtatcgggtcccatataatataatgtaatagcttttagggagtatcgctaaccaatcgcaacgcgacatgtcacaaaggtgctaggcaccattggtacctaatagcaatgctctttaatttaatatacatataattatataatttatatattacttgtgctacacgtaaaacttcactagtctatacataaaagtgtcaataatttttaggcttttacatgttaaattacttatttaacctttattttattttcctattaaaatattttgtagttcaatataaatcacattattt

SEQ ID NO: 363766 - DNA, 512 bp, Cannabis indica
gtccttgtgaacatacaccatctagtgcatatccttatgatgaagaagaacaatcctacaactcttactatcaaaatagtcttgatgactgtaattggaatcccgagtacaactataatcccttatatgagtggagttgtgaagaggaagatccttcgtttaatcacaaaagttctgatgattatagttggaagcctgagtacagctataatccattatatgagtggaattgtgaagaggaagacccttcgtaccctcataactcccaacatccatacaataaattccctaaatgacactattgttgagttacaagcatctatggcgataaattgtgagatgatgaaagacttacttgctgagctgaaacaaataaagcaagaattgagcaaattttctgatcacttggtaagttcgcatgttaatggttttcctccacaaccagtgagtaaagcactaatctcaagtgccacccttcacaattttgacaaggtaagtgtcacctctaccta

SEQ ID NO: 363767 - DNA, 781 bp, Cannabis indica
tgtacccagccatagaatgatggatcttaccaagaaaacaatgcgtctggccgacgcatctgatcctcaagtggctcgacacgcccctttgctcaacgccgaacaggatccagccgtcccggtggaggtggatatgaaggggacaccgaggtccaggagattgaggggaaggacgacatttgtcccgacaattcctctgaggcggaggaagaggaggaggttgaacccctaaaatatggggaatacaatgaggctagggagcaagtcgatgctgacggtgacgttctgatcaagggcgtggactacgtcagtgaggagcttaatgtttcggttcctcataggaggcaaagtgccttaggaaccaggtgggtgagtcctccgtccagggctactgaggcacgcctgcggtctctcaacaaggatggctatctgggtgagttggactgctacattcccgcccacaacaattgagccacaaaccctgaaaggaggatgtgcgcttggtcgggcactcatgcctagcaaggggcgttgatgcctttgcatcaatattttaaggatgtggcagacttcttcggcctctacccagctcagttcactcctaagggcattaaatatttgtctgccctctttgtcctctacgcttccaagaagtggggtatgccttctccccacgaggtcagctggttctttgatttgaagtccacccccaaacaaggcaggttggggtacttctatttctctcaactagacttcatgtggttgacgggcactgatgact

SEQ ID NO: 363768 - DNA, 611 bp, Cannabis indica
aaattgaatttcctctcagttcttttaaccctgaattgtttagccttgatctttatcttttttaaaagattttctttctgtaatgatttaagctctattaattattttcttagtttactgtccaattttcctaaagcgtcctttatttatgcaaatcattcgaccaatataactatgcataaattaattgtacacgcacttaggatagatggtgaattaatttggatggagaattttccatctctctttataatatactcaacgctgattttttttaatgaaaatttgttcattgttccaaaaaaaattaaaaaaaatagacaataaaattttaaagaagggctaccttctctagatgtggagagggatttgtagttccttgtcctttttggctttggtttatgtttagggataattcatgattatactccatcatcatcaagctcaatcaatatgacagtcttgtgctgttgttgttgtttcattctatggtaatctattcattgtctttgagaatatgcaaactctcccttcaaagcaaaatgtaattttcttccaagaaatcatatcacaagctcctccacttggcacctgaattcactagtttgatg

SEQ ID NO: 363769 - DNA, 598 bp, Cannabis indica
actcaaggttcgaatatggaagaacaatgatggaggtgagaaatcactaaggtaggaactctctcatcaactagttgtctaacataaaaaactaggtttgatttggttgaaggcatcaagttgacattaatttgacaaagtgtcaagtggatgagatgagagcatcatgttccttttataatgtttcaactagggcttagggttgaattatatggattaagaaagactaaaaaattgggcaaaataacttcatggtcgtacacattaaaatgaccactttctagttacaattttgccacttttttttcaaccacttattcttctttacaatgataccatctttttcaattcaaacctataaatgccaaagctatttatttaataattataattacttactaaataaaattatcatttatgtaatttattaattagaccatgtaaagtctcttaattaacaaattgacctcaaaacctcttttcttcacaattaagcccttgcttagtgaaaattcataaataagacatagtctaattttagaattataatttattaattaaaattaattaactaagtctgcaagcagtattatctcaa

SEQ ID NO: 363770 - DNA, 861 bp, Cannabis indica
tgcagcttcacaaaccgctcgaatacagaatccctgtgcggcattataaacccctagttacccaccactggtactagtgcaggtggtaacacttgttctacaggggcagctggttgccttaatcaacgcaactcttcttcttgacgaagtatgatacctcgcatttcttggaacatctactgccagtcagcaggaggattagcattgtcaatccccgcattatcccccagattcttcagaagtggaggtgatgctggtggagtggtttgggcaaccccaggctctacttgctcgccttgtggtctagatgattgcggagggtccattactagtacccctataatcaacaaccccaacgagttaagcaccaataccacacttacgcacttattgccttaaaccctaactcaactatttattccatataaataaacacttaatcatacagcatttaaagcatggcatcacataactcataaatactttatatgcttgcatactgcctaaaatggaaagtggtaaataggtgatcatataaacagtaaattatttactctcaatacttactacaccatgagtcgagcttgtctttgaccatgaatgtacatgttcagtcagtctacaggaactttaaaaaccttggcgctctgataccaaattgtaacaccctaaataattaggcaggctacctaatatacttatgaaaccttaatcccctaatcgggattactaatgatgttaacgcagaaattaaactttataaataaacgaaatgaaaataacttgtaataatttaaaagttacaaaagttgggatcccaaaaatatttacaaaatactattacaagttcttttccattgg

SEQ ID NO: 363771 - DNA, 500 bp, Cannabis indica
tcgcatcccgaaagcccactctctcttcctctctctgaaatcgcagaaagaaaaaaaattgctcccgtccgatggtccaactaacacagcccccaaacacagtgaaaacaaaacctgatagagacctccttgtatccaagttccctgcataatctgcatctacaaaaccagcaacattatcactataagtgctgtcatttcccagcaccaaaccagttttgagtgtgccctttagatacctcagtatccatttcaatcctttccaatgttcttcaccaggatcactaataaacctactcacaacactcatgctatgagccaaatcgggtctagtacacaccatagcatacataaggcaacctacaccagtagcatagggtatgctttccatgtattttctctcattttcagtttgaggtgactgatcatgagataatttaaaatgttgagcaagaggagtgatcactggtttggcatctttcatgccaagcttgtcaatt

SEQ ID NO: 363772 - DNA, 497 bp, Cannabis indica
ttaaaggtaaatactattttagatcttatattttgcaaaagttatcgatcagatcctctattttgttaaatgataatcatttagattctgtatatttcaaaataatacaaaatagaccctaaactcaattttgtcaattttttttaaatataacaaacctgaaatcaatctctaccacagatagatgtaaaaaatataatcatttttgttataacatctctatgtcaagtccctattaagttttaatttaaaaaaaaattgagctcaagtctattttgttccattttgaaaacacaatatcaaaattattatttaacaaaatagaggatccaataaataattttacataaaaaaataagatccaaaataatatgtattattattttaaggagaattattccatatactatttttaaacttttttttttcaaatttatgatttgagtttttacggtagcttctatgtgggttactatatgaattttagttgcgattta

SEQ ID NO: 363773 - DNA, 694 bp, Cannabis indica
tgtgttgaaccttactgattttttatgttatttgtagtatccaacatggcaatgaccagccccatggcgtcactgttgactgataataagctgaatggatctaactttcccaaatggaaagagagcattaacattgctctcattggtgaaaatgtcttgtttgtgttaactgaaccgtctcttgagtagccaggtgagaatgaaaccaaagcagtaaaggagaagttcgagcgttggcagaatgccaacaacaaagctcgatacttcatgctttctagcatggttgacaccttgaaaacaaggtttgctaacactctcacggctgcagaaatcttgaaccagttgactgaactattcgggatggcatcaatttaatctcgctttgaagcgacaaggaatttcatcaatgcacggatgaaccctcatcagaacgtgcgtgatcaccttctccaaatggcgagttacttccaagaagctcagaatcatggagctgttatggatcagacaactcaagtgagtctgatcttgaacagtttgactccagcctttcttccttatacttcaaattatgtcatgaacaagaaggaacttgactttcacgagttggtaaacaaccttcagacatttgaaaatttgattggaggaccacagaaaaagggatctaaaactcctaattctggaaatgctaatgggg

SEQ ID NO: 363774 - DNA, 533 bp, Cannabis indica
ttttccccatggggatgggccctcgtagggacccgcccttaatggggcggggattccccgtctaaatggggaacggggtggggacggaaatcaaattttgtccccgaatattaaacggggcgggaacggggatgacactccctgccccgacggggacccgtttaatttattaattatttttttagtaatattttatatatgcgtttgtatttttttagtatattgaatagtaaataatatgtaatattttatcttttatgtaatttaatagttttatacatttaaatttttataataaactttatttctacaatagaagattccctgcctcgtaggagatttcccgccccatccccgatggggaataagcgacgatgggaattaaaattcttaacggggatggggacggggagagcactccccgctaattctccgccccgtgtgcatccctaactatagctcatttgactaaacatgtactttttttaatagctaaaagtataaaaagtaattttttttttatttatttgtta

SEQ ID NO: 363775 - DNA, 856 bp, Cannabis indica
agtatcaagatcaatgtggatgcagcaatttttgaaagacagaatcggtttggttgtgccttggtggtgcgtgatcacaacggtttgcttattgagggtcgtactaaactacacatcggcaatattgctccttctgtcgctgaagctttgagctttagggaagcattaagttggctcaaagatcaaagttacaacccaatttggatcgagacggattgtttattggtggtacaagccctgcggaactcgactattttatcttctcaatttggttgtgtgattcaggagtgtaaagccatgttggctaatctcagtaatgtttatttttgttttgttaaacggtcagctaatagagtcgctcatgagtttgctagagcgtcactattatatcctgattgtatgttcagtatggaaaacattccaactgatttgttacctgttttggtgactgatttcgaaggttaataaagtttgaattttacctttcaaaaaaaaaagtttccatgctataaatatcaaaatttttatttttttttctcatattttttgtaaattctccataataattaggaataaattgagaaatacctctttttttgtattcattaataaaaaatactctcatattatattttatcaaaaagtatcaacttttgtgagtaagttctctaatagaccctcatccttcaccagtgacggagctagaaatcggttcagtgagggcttgaataattctttttcaaaggcttgataaactggaattaataaaaaaacatgttaaatagaagtgttacactatgtgtcttagaaaaaaagtaaaaagcgcttttttttttttttatattttttttgttaa

SEQ ID NO: 363776 - DNA, 525 bp, Cannabis indica
gtcttgcagcttctcttcatctcttgccatatgatttgagtagctagacttgactatctaatcattattgttagggctgagcatcggtcgatttgatcagtttttttttctataaaaatccaaatttcggttttcggtctggattggtgcaatccgaaaatcgaccgaccaatctagaaacctatttagaaccgaccaatctaaaccgcaatttggtcggttcaaaccgccaaaaaccaaatctatttttttggtaaaatataatctaatatattatgtaagcatatttacaaatgcaaccatacaaattagaacatatgattaaaagtctaaagtctaaaacacaacataatacaacacaaataaaataaataacaatagtccatattaaatgattctcccacaaccacacaaatcaaatacattaaaaatgtagagagaaaatagagaaaatttctgcaaaactcaattttttctcttgaatctgctctagtttaagttctgtaataataattaaaaaaaaaa

SEQ ID NO: 363777 - DNA, 617 bp, Cannabis indica
cgacaagtagtttataacgattgaaatacgataaagtaatgtaaagacacagaaattttatagaggttcagccccgtgcagttcggtaatagcctaatcctcgttatttgtattgacttaagaacaagaagaaaggctccttttcttataacttttacgacaatatctctgaatataaattcttagacaatatctctcaagcaaaatctttcgatcctttgccgagtgaatatgcatcactatttatagggctatgagcttggagaggaagtatttcccttctcattacaatggctataagcagaaaaattgcataataaatacaaaatacactgatcatgggatttggacagcttgccatatctctgtaatctgatccccaagttatagtgatttccttgataactcacaatgcgaaagctgaattcgctaagtgtttgtcactctgcgcgaattactgatttctctacctcgagcacgcatatgaggtatcctgttcggactatatcttccgagcagataccaggagttgattccacgtgtcaccatcgtgtgatgccacatcagggtgcaaaaattcggataacagaatttatacattaaacaatcatgaaata

SEQ ID NO: 363778 - DNA, 541 bp, Cannabis indica
ccccaccggaccaccaacgaaactccaccagaccacgagaagcactcaagccccgactgttcacgagctccgaccgaccaagacaacccacgaccaacacgacccacgaccaagaagacccatgacgactcgcgacgacccaggagaagcacccacccacgaccaccgcaccacttctggcgaaacccaataacttgttttctgcatttttttttctggtttttgacgatgtcacgaaacattgctaaatgttgcgaaacatcgcgaaatcatgaaacatctctaaatgtgtccaattcacaatagtgcttgttttctgtattttttttctggtttttgacgatgtcgcgaaacatcgcaaaatcgtgaaaacatctctgaatgtctccaattcacaatatcgcgaaacacatcgcgaaacatcgctaaatatcgcaaatcatcactaaacttcatccctgacctcagatttattttatcaatgcaaacacatcgctaaatatcgcaaaatatcgtaaaaaaactggtaaaccagaagaaa

SEQ ID NO: 363779 - DNA, 523 bp, Cannabis indica
gtatgattaagatttcacctcagttagcagaagacatggtcagatcaaacatcgagtttgttgtaggcaaacttcataacatgatgctacaatctgatttgttagaacgaatttaagctgctcagttagttgatccagaattagtgaagatcatagaagaggtttcagctggtcaagccaaagattttacggtgtcaaatagtgggatgctgttgtttaagaccagggtttgtgttccagatagtgcgaaacttagaaatgaaatcctcgaggaagatcataccatgccatattcattgcatcctggtactaccaagatgtaccaagatcttaaaccctacttctggtggagcgggatgaagaagaatgtggtagaatttgtatccaggtgcctaacttgtcaacagagcaagggtgaatattagagaccagcaggtttattgcagccattgacacttcctgagtggaagttggaggatataaccatgggctttgtggttggaaaagaggcaaattatgccct

SEQ ID NO: 363780 - DNA, 622 bp, Cannabis indica
agaaatggtaggttgcatgctagttttggagttggttgttgttgctgtgtttatatgttgttttcagaaaattaagcatgttggattgagtggattgaaactgttttgatgcatgtttggttggttttaaatgggtttagagttttggttcaaaagctttggtttttcaaaatgaaaatgtgaaattggttgctgcgcttgatgtttaagtttgagaatgatctctgcagtttttatatgcatgattatgtagtttgattctagttttgatgcttgtaggtgaaatttagccaagtttgagttttgaactcaaagcttggagctcacatggcatttttcgtatctgtacttactgggtaatattgatgctttagaaatgttctttagggtatatagaacaggtctagaaggtttggtttggtttgggtttgatttgaaagagttatgaatttttgaaagtttcctgcgaggaaccggaattctggatgtgcaaccggaattccggatggggttcaggaattcccagaaccggaattccggttgcacaaccgatctaccgattgggaaattttcaggaaccctagattttctcgtttttatgttatttagggtattgtcatgc

SEQ ID NO: 363781 - DNA, 610 bp, Cannabis indica
ggagcagttgtttggagaagtgtcaagcaatctgcaatatctgactctaccatggaggccaaatacatagctgtcgctgaggctactaaggaattagtacagctaagaaagttctttatagagcttggtgttattctaggcatggaaaaaccactagtgttattttgtgacaacaccggtgctatcacaaacaataaagagcctcaaagctacaagaggagtaaacatattaagaggaaataccacatcatcagagagtatgtggcaagaggagacgtgctggtagaaaaggttgatactcaagacaacctagtcgacccattcaccaagacattgactgcatttgaaaagtacaaagagaatctaggattagttgaaatgtactgattattttatgttagtgcaagtgggagtttgttgagttttgtgccctacgatcctaaatcctattttaatatcatcttttattttcatttatcaataacggaataaaattattttattacttgtttaatataatgcttagttcacatgttgatttcatggtcatttgttcgatttataaattcttttaaattcttatcacattgttattcatgattattgtgtt

SEQ ID NO: 363782 - DNA, 697 bp, Cannabis indica
aatattaaattgtatcagtataacacctcataatagtgttagttactatgagttttagaagatctaattggtaatttgttatttaacaaaatagagggtttaattgataatttttataaaatacaaggtccaaaatagtatttattcttctaaaattttaaaaatacactttgtttagtaaatagtaagaaaatatttaaaaaaaaaaccagaaatcaacttcatgataactgtaaataaactataaaacaatcagaaatataattcatgacaactataacacaactataaataaactaaaaaacaactaaaaaatagttaattatttttattgaagaggtatttttgtaaataaaaattttatagagtcaaaatgaaaaattttgggtgttgaactatttttatatatatatttttaaaatttttgctctattttatatctttttagagaaattatcttgtatattatttttttaatatatttttttaaaatttatggttttgttttctaaattagtttgtctgtggttttttttatgtgggttgctatacgaatttttggttgctaataggttggtccgttagttggaatataaattttatgtagaatttcgtaaaaatatatataaaaaaatttattttaaagtataaaaaatgaaaaattcaatttttttttaagcttttaaccacatgatca

SEQ ID NO: 363783 - DNA, 619 bp, Cannabis indica
ggtttatgtgcttatgtgatgaatgtatgtgttgtacgaattttttccatgaaaaatattttttctatttttgaaaatattttatttggattccttgtgaaaaattaagcaatttttgtttttacggaacttgattccgataaaaattggtgaagttatgaattttggaaaatcgggattcaaggttgtcgagtgggtgctcgtgagcaccaagcactctgtgtggaagctcccatccgcgcgcgtgacacgcccatgcgtctcgtccaggaaccctgcagcccgccgagatttctcgccagatagtactgcaacctcctactccacgcgcattctgggctcttttgcagcctttggaggctgcacgtgcagcctcctgggcagcccaccccaaattgcgattttatgggttttttttccccaaaaatccgatttttatgggattgtttccccaaattcgatttttccaattttaaatatttccaatttgaaatatttccaattatggtaagatttaaaaatttgttaacttctttaataattatatattatttaattataagagtagatattttgatatttaactttgtcttttttatttaaaatattatattaaaat

SEQ ID NO: 363784 - DNA, 543 bp, Cannabis indica
atttattatttatgatgatagtgatgatggtgttttcctatgctttagttgatttttatttataatttgatcaaaagattagcattataaagtgaagagagcatgctatggtaatgttccatttatcctatttactgatcgaatttcattgtcaacgatagcatttttaatgttcactatatagcattaagaccttaatttctaattggtattgtcaatattcactctattttttatttatttatttatatataaggaacacttcgtaatgggtaatacccattgatgagaactaaaaaaaattaataaggtaataatctaataacctttttatggcaagtttctaaaaaatatttttttaaaaaaaaattatatttattttttataaaattggaaataataattacaactaataattagaaaaaaaaattaataaattattttaaaaaattaattaaaattactactttattatttatgaaattatgagtttattaataatttattattgtaaaactaaaaatcatttacatgtatattaat

SEQ ID NO: 363785 - DNA, 502 bp, Cannabis indica
aaaatatcataaattattttctgttgcatggtgaatatgattactttcatgattgtatgtttaatgtataaattctattaaactcagaatatatagttattcatgattataatgttgtctacgtagtggaatataatcatgattatatgttttaaagtttagtttcatgatttattagtacactgaatttatattgacatgataatcagcgataaaatttacttacaccttagataagtggtatgtcttttctagagcatttggcaaagtatgttagtatcggatgtatagagtatacatcgaactggaccgatattgacattagatatgatatcataaacttgtcgttatatctttctaagtcaatatcacttagttgatcttaggtcaatatatcttaatcctgagatggttaggttcgggcttaaatgtattattcatgttcttttaattgtttgttaaaattgaccaagtgaatcttcccaatacttacatcttggga

SEQ ID NO: 363786 - DNA, 763 bp, Cannabis indica
atttagggcacaaaacccaactagaacgtgcgtgatcatcttctccagatgattagttacttccaagaggctgagaatcatggagctattatagatcaaacaactcaagtgaatttgatcttgaatagtttgactccagcttttttgccctttacatcaaattatgtcatgaacaagttggagcttgactttcacgagttgatcaacaaccttcagacatttgaaaattttattggaggaccacagaaaggaggaactaaagctcctagttctggcactgctaatagtacggctaaggctgaggcaaacattgcccctacttcgagacccagtaacaagaagaattggaagaatagcaagaagcctcttaaagctgttaaaacagttaaaaagaaaaaggctgctaatcccgatgcaatgcaaaaaggaaagagcttctattgcaatgaaaagggccactggaaaccccaatgccctaagtttctagcaaagaaacaaggtatttctatctatgctataaactcatgtgttttagagaattattatccccttgggttattaattctagatctactaaccatgtttgttttcttcttatatcagctttagctgcttaaacttggattgctatcctagcgagttgagtcggatggttggacagaagggtggagaatgtccgagattgaagatgaagctcggaatcttcttttaatttatgaacaatttaatttaaattattattttgggattttatttcctattt

SEQ ID NO: 363787 - DNA, 633 bp, Cannabis indica
caaaatgaaaagtgctagcaaaaatgactcttcccaacacgtaaatacggtggaaaaagttagattttggccactacaaatgtgcgctggtaaaactttgatcgtttttccagcgcagtttgcaaaatgcgttgcacttttaccagcgcagtagcgaattgtgctggtaaaagtgatatttcttgtagtgtagcacactattgctcaactaatatacaacttaattagaactagaaatagaaaatttcaatgggcatcgtcatgaaaaaatttgttagtatttttttttgtcactgattaacaatcaattataccttaataatcttatgtggagaaataattattaaaattctgtaaatcaactgtatatcaaccaaatgaatgtatgttaataaattactaatcatgttataatttttttaaagagatttgtgctgaattgtcgatatgaaacacctgcaaatattgtaaaaactattatctcgttatcagtttgtaatcatttatatgtcaagtttcaggcattagtaaaatgtaaatgcaactacgtaaaaacttaaaaatcaaaacaatatttctatgtacgtgactctagataattcatttttttttttgttattcgtgatttgatat

SEQ ID NO: 363788 - DNA, 660 bp, Cannabis indica
ttactctttgaatttttttattacaaaaatacattttcagtaaaaataataaaccgttgtttttgctgttttatagcttatttgtagttgtattatagttctcgtaatattatttttctggttattttatagttgatttatagttgtcgtgatgttgattttttgttattttttagttgtttttatactttttgctagcaaagtttatttttgtaataaaaaattggaaaattctacaatgcacccccttaaaatagatatattgatgcacccctatctgttttagcatccgaaataattttttagtcaaatttcttcacatggtcatgtacgttatagttatttaagacatcctgcaaaattttaagaaatttggaaaagtttaacacaccgaaaattatgttcaaacagtgtgttgcacgcgtgactattttattttatacgcgtgtaaaatagattatttgaacacgactttctatattgtaaattatttcgaattttttcaaaattttgtaggatatcttaaatagctataacgtacataaatatgaaaaaaaattagactaaaatttctctgaataccgaaacagttaaaggtgcatcaatacatcccttttaagggggtgcattatagaatcaccctaaaaaattttaggctgt

SEQ ID NO: 363789 - DNA, 532 bp, Cannabis indica
tacggctccgtcagaaacctctaacttcttcacctggttcatcactgtagccagttttggtctatgaatcaccagagcttccacttcaacctgaatgacatagcaagttaaacatagctcttatgagaatatggaaaagaaagttagatttttttaaaaaaattacttacatgtaatgagttttagtgtgtgggggtactcggtggtgcgtggtgtccttgtgggtgcgtggtggtactcggtggtggtcatggtggtgaactcggtagtggtagtcgtggtgatgttaaccggtggtggtggtggtggtggtggagaagggttgagagagagggctggagaaataagttgaagagctgagagtaaaagtatggaaaatgggtcggtggggtatttacaaacttattagtggcggggtccgccgctaattagtatttaaaaatgtttgaattgaataggcaggaattttctcacccacttattagcgacggactattagcggtgggccccgctgctaatagtattagcggcg

SEQ ID NO: 363790 - DNA, 563 bp, Cannabis indica
taatcaggtgagcccgtgcacaaacttaacaccaatatattgcatcatctaatcaaatgagcccgtacctactcccggtaggtacttattatatatcactaatgccagtacttacgcccgatacgtcgctaggaagaaacccaacaatagtttcaatctaagccataaccagacaatttcatatcactgatgcccatacctacgcccgatatgtttctaggaatattgcatcacctaattaggtgagcccgtatctacgcccgatactcaaactacttatttaaaaattataattaattatcaaataaaattaccatttatattatttattaattagaccatacatcatatgtcactgacgcccgtacctacgtccaatacgtcgccaggtatatcgcatcacctatcgggtgagtctatatattagatccataatatcatcacattatcattgcttaaccaatcaatctttctattatataacaataataactatatctcaatattaatcaattcacaacaatactaattgtattacaatacaacgtactatgcagtacaat

SEQ ID NO: 363791 - DNA, 532 bp, Cannabis indica
ttcatatttattttagacaaaaaccatatattttataagtgttgtaataattattgctacattgtttacatttcataataatcttaataattttaatctatttataaaatagtctaatatctattgtcgcctctaacctttacaaaatttgataaatataaaaattaatttgatcaataattatgaatctcaaccatgaatggtcgagctctactaattacagtcgagtcatgtaattataatttttactaatctcaaccacatatagtcgagctcaactactctcagttgagttattttttgaaaatttgattaataattataaatttgattggctccaatcttcttatacaatttatccaataacatctcaaatgtagtactcgaatcatcatcgacaattatagatataacttccttattttttggtcgaccacttatatgaccatgttcatccttccactctccatcatactgaacatagattactattcaagtcattactgtataaaaatagatggttgatattaaa

SEQ ID NO: 363792 - DNA, 482 bp, Cannabis indica
ccccatagttcggcaactactcacaatctggtactgtaccgacgacaagcatccaaatataagacgaatccaattatcagcgaatcccaaccgagcaagcatatcatacaagaaatgccaatccacactatcataagctttacttaaatccaatttcaacgccataaaaccatccttgcccactttcttccgcttaagataatgtagaatatcgaaagagaccataatattatctgtaattaacctgccagggataaaagcgctttgatgtttggagataacctcagacagtaatcccttcattttgttagcaagaaccttagtaataactttggcaatgacattgcagagagaaatggagcgcaactcactcatttgctcaaggttcttcttttttaggattagcacaatactcgtattattcatccctaccggcatttgttcggttgtaaagaaatatttaactgtatggatcacatcac

SEQ ID NO: 363793 - DNA, 553 bp, Cannabis indica
ggcgcttctgaccgcctcgttataatacttggcgttgaagagttcctggaacctttcccaggtcataataatgacgtcatggatctgagacaccatgtcccaccagaccagagcgtcttcttagaactgaaaggtcgcacacaccactctatcattcccggtgacactcataaaaatcagaattctggtgaccaccgttagccactattcggccttcatcacatttggacctcccagaaagaccggaggtgcttgcttctgaaacctttcgtacaaagtttctattctgtttgccgctactaccaattcggcctgagcagcaggggcgagtgccactggaacttctgacacaggcactgcaggagcatcctgctgcctcaatctctgaatctctaagtcttgctcctctattctggcttgcacttcagcaaacctaacttcccaatctgggcttcccgattgacttgggcagtcggtggcgagttaacatcaccccaaccacaagccctgcccctgggacatctacctcagcccgtaacacttgggggaaact

SEQ ID NO: 363794 - DNA, 967 bp, Cannabis indica
gttgaagaatctattcatgttgcttttgatgagactaacccgcctacaagcaaaagtttagatgatgatgtcgtaggtttgggagatgaggttcaaaatcttgaaattggagagacttccaatgctccttcacaaactcccaaagaggaaccacccgtggaaaaggtaaatgaaagccaaggtatgaattctaaccttccacatgagtggaaattcaaaagtgctcatcctatagaccaaattctaggtgatccttctcaaggtgtcactactagaaactcccttagaaacttgtgtaatttcattgcttttatttctcaaattgaaccaaagaattttaaagaggccgaagttgatgaattttggcttctagctatgcaagaagaaataaatcaatttataagaaataatgtttgggagttagttccaagaccgtcacatcaatcgttgataacaaaatgggtctatagaaataaggtagatgagcatggggtcattatgcgtaacaaggctagattagtcgcccaaggttacaatcaagaagaaggaattgattatgaggaaacctttgccccagtagcaagacttgagtccattagaatgttgttagctttttcatgccacaagaattttatcctgtaccaaatggatgtaagaagtgcattcttaaatggatacattatggaagaggtttatatctctcaaccactcggttttcaaaaccataaatatactgaccttttatatggtttaaagcaagctcctagagcttggtatgaaaaattaagtacatttcttgtctcaaatagttttttaatgggtaaagcggataatacactttttataaaaagaaaatcgaaagatattattaaagtacaaatttatgttgatgatattatctttggtgctactaatgatgctatttgtgaataattttctaagtgtatgcatagtgagtttgagatga

SEQ ID NO: 363795 - DNA, 727 bp, Cannabis indica
gtacgcgagcagaccttgtctggtaattcatcaggagaagtcatacctgatggttccaaccaaatcaatggtgccattccacccgtcaaccaagcaaatcaatcgctaaggcagccatgcatttctgtgtttgaaaggttgggagcaacccatgacctaaggaatgatctgaacaaaaggaggggagtagacgagcataatattgcaacgatcgtgcagcctcgagcctgtactcaaattcccgctcaaaaagaagctgaccagaatgtcgagcaggtcagcccagccatataggctcagataggcgaactgaaaaatatgtttcacgtcatggctggacaaaggaataatgatcttgagttggaccgagcacgcggaactcctttctcaccagagatcaatctcctaccactaccccacaagttcaaaatgccgatgtggaagatatacactgggagagaagatcctctttcccatctcaagtatttcaaaatgcaaatggatttgcaaggattacggggagatgtatgctgcagaatcttccctgccactctgtcagaagccgctcagcaatggtatttcaagttggcgtctggaaagtttagttcatggaaaatcttctcttcagaattccatgcacaattctcctcctcatgccaacttccattgaatttgggagacttggtcgaagtaaagcaacgccaggcgagccactccgggcgtacat

SEQ ID NO: 363796 - DNA, 514 bp, Cannabis indica
ccaaaggatgacattcgcaggctgctgccccatagtttgataggcttttcgaatcagcgcagttgcttgccgactgcgattgtcaatcatttcttgctgagcccttaacgtttccatttctttgtctctccattaggcaaacatgcgcctctgctccccaaacgcgaggttcaccggagtgctgagttcctcctgatcatgatgcaaggtgttagtatgaccctacataagtccaattgttgtttgaatattagtagcaggcggaacggctatgttatgattgccctggtcggctgctgaactggtgttcccagtctcttgcacaccaactgcgatttcatctacaggagtcctcacactgtgacctacagttgtgggctgtctgggatttacggttggcagaacccatgtgtttcctgggttcagcaatgcaggatccaccgcctgtggattggctggatcaaccacgcccctacgagtatgtaccataatcgtacttgtgattaaatttgga

SEQ ID NO: 363797 - DNA, 446 bp, Cannabis indica
catatcataacgataatcaatagtagatcgacctaaattctgagttatcataaactcttgttcatgttattagtttctttgatttaatcgttaaaatttttcagagaagattcttacgacttctattttggaaatgtaataatgtagatggatgggaacatgatttacgatcatggaattctgattttatatcttttattttagggttataaattacttatacaacaaatatatatagttctcttctctatattattacaaaataggagtaaccaatgatcatacaatctgacaaaaagaaaaaatattgtatgtattttaatttctttcaataacaagttactatgaagaaaacaattccttagattcatgagcttacctccaatattaacttacattctttgttttaactcatgacccaaccatcttgattctttaagtagata

SEQ ID NO: 363798 - DNA, 726 bp, Cannabis indica
tatattcattggatatccccatgtaatgaaagcctacaccttgttgtatatagaaatgaaccaaatttatatttctagggatgttgttttccatgaaaacatattccccttcctatcacaaaaactaaactctaatattgacttgtgtttcccacatgtcatacttccatccaatgcataccttttaatcccataacttcagctccatgttcggatctccctaatcaaccctccataaaatctggcaggatcacaaaaaaaccatctcatctccaagactatgtttgtcataccacttccacggctcacccaattgagcccttcatctcttacatcaagcttagtcctcagtttagggctgcaatattagcagcctattctgaagttgagcccaaaaactatgctgaagcctctcagttcactcattggcttaaagccatggataccgacacacaatcatattagaaaaaaatcacacatggataatcgccaaattaccatctgggcaaaaagccataggttgtaaatgggtatataaggttaaatatgaccaatttgaggctgtaggttaaatatgaccaatttgagactgtagatcgattcaaagctcgtctagtagccaaaggctacaaccaacgacaaggacttgactactcccaaacatatgccctagttgccaagttcaacaccctaaaagttttcttgcacttgctgcaatgaacaatt

SEQ ID NO: 363799 - DNA, 1141 bp, Cannabis indica
acacgtgtcaaatttcacgtgtactctatgccgtcggttattatataccaaccgacggcatagggttatttaataaaaccctatgtcgtttatttccaaaccgcctctaaatgtgataccccaattttatacctacggtttttataaaaaaaccgcctctaaaggtaaattttcaataggcgggtattttcagaccctttagcttccctttttataaaatgggttaaaaaaagggaagctaaaggcccatattgtagtagtgaagtgagattggcactacaataatctgaaaaagagtttgatagtccttggcagtgaaaaattattgtaagaggtttggaaacactttgatgaaaaatgtccaattataaggcttagtcaagcccattaacttggctcgatagtggaactccaagctagctctatagctttgaagatcaaggacataggtggctttggtctaccgaaccttgtaagaattgagagttagtaatttcttacccttaaactctttactttacaagcttgattatttactctctatatttacttgtcatattatttgcatttacttgattaatttaaattgcatagttttgtgttgaaaattttattttaccgaaattagtttaaatttctaattcacccttcttttgaaaatatatcttggttaataattggtatcagagctagggctcatttgtttgattagatttcataatctagagcatgatgtttccaagtaattcacaaaataacatgttaaaaggtttgaggacaaatagagcaccatacttcaatggagtagattttccttaatggaaaattagaatggaaactaaccttcaatatatggattatgatttgtggcatatagtgtctaatgatcattacattcccaaacatgttagaaatggtgtagaagttattaagatctatgaggcatatgataagaacgataagaaaatactttttaaaaatactagagctaaatatgcactcatatgtgatttggatagagatgtgtttaaaaatattgaacaagtctctaccgcatttgatatgtgaaaaatgcttgaaattactcatcaagaaactagtgctatgaaagagactaaaattcaaatttattccactcaat

SEQ ID NO: 363800 - DNA, 562 bp, Cannabis indica
aaaagaaaggcacctactgcatcaagtgacacaagtcagaacaagaggttccgaaggaaccagggtcgaggcaatcgacaaggtagctctgagacccgatagacttacccagagtgccccatttgtaaaaagcaccatctgggggagtgtagagggcagggatgttttcagtgcggtatgccagggcattataaaagggattatccccaactcaagactgacgtacaaaagactacagtgaaacctactccaacaagggtgttcacgataactcaggctgatgtaaaagctagtccttcagtagcaacaggtcagctctcggacaacaactcttatttctctatgttgtttgattctagggccactcattccaatgtggcagcaagaattttaagtaaattggatagaccgcacgatagttatgaatcagcatttggaaccctattacttggcggagagttagttatctctaaaaggaggattaggtctatgccgatcagaatcgaggatagggagttgagtgctaacttaatgaaatgagtttagcagattttgatattat

SEQ ID NO: 363801 - DNA, 630 bp, Cannabis indica
gggagttgagtaacttcccaaacatcatcgtgtttcacggcccctgcgtaccgcttcagctccttgtgggtggtccctccgatgtggggtcctctcgagatcatagcaactctcccgttgggtctaggtgacaggccgggaatatgctgagcatctctagggggagcaactagagccaatacccccctgcaccccctggtgttacttgcggcaaagttccaaccgcctgacctgggttgaggtgaggcaaccgattcttgatccactcgtagaggtgtcccaatcggattaagttttcgatctcgtctttgagatttttgcattcattggtgctctgcccaatgtcgttatggtactcgcacctcttgttgggatccctccgggagctgtctttgtacaaaggaggtggtctccgatattgcgtattttgcctagtagaaaagtatacaagttcttgggagtccgttaactccgtgtactgggtatattgaggagaatacccccttttctgtcatttttcctccgtctgagtgctgcctttagaggaccttttactctttgagccctgggaaggaccggctaggctagctgtccgaaaggagtgcgagggggctgttgggttttatgccc

SEQ ID NO: 363802 - DNA, 426 bp, Cannabis indica
aatacactgatcgtgggattcggccatcttgccatatctctgtgatctgatccccaagttctaggaatttctttgatgagtcacgatgcaaaaactgaattcactaagcgttgattgctctgcgcggattgctgatcgctttgttccaaacatccctatgaggcatcctgttcggactatacccaccgagcagatactcaaagttgatttcacgtgtcaccatcatgtgatgccacgtaagagtgtaaaaattgggataacaagatgaatctcattaaaacaggaactatgtagaactaacaatggagattgaatatccttataataaagctcattattttaaaggagttatattttcatttgatacttactttagtctatttaaataattaaaattactaatttagataactctaagtataattt

SEQ ID NO: 363803 - DNA, 284 bp, Cannabis indica
atatttgcggtcgcctcggcttcgttgcattcagtaatgaagtccgccaaggcttggccttttatagaaattcgaggtatgtagtgcaagtcaaattgacttagctccatcgcccacttgaggagccttccggatgcttcaggtttttggaggacttgccggagtgggtggttggtcagtatcttgatcggatgtgcttggaaatatggcctcaatttccttgatgccatcaggaggcaaaaaaccagcttttcaatgattgggtaccttgcttcggctcctat

SEQ ID NO: 363804 - DNA, 778 bp, Cannabis indica
aaaatttaactatcgttctaatcttaataatcaaagatcctctatagatgatttacatcgagtagggacaaatttattgtttcacccctcaatgtatgttattcttaaaacacttaacttcctataaataatatttcagtaaactaatataattactgaaataagagctcttccatttatctctattaagcctagctcgaaggaaatcatcatttcacttctatgtctagaaagaagctatagatttcatatctatgattagcgctcccactcaattgtacaatatttccaagatgtacgtctgacccaaaccaaatggtaggctttaactaacaactttaagaacacaaataacaccattgagatcgaacctaactatatcaggattaagatcttttgatctaagatcaaccagtgatattgacttagaaagatacaatggtaagattataatatctttaccaagattaatatcggtcccagtccaatgtctaacatcaaatattttatgtatatttattaaaaaaatatattataagggatattggcggctgaaccacctgaactttacagtttgtaacagttaaccacaaaaaccgaaattttggtggcataactgcccaaaccctggtttcgttttgctctgtacccctccgtccaaaatcacagttaagtgcgacggtggactgtcccgtgtacacatttatacacgtagcgaatttttagtggtccacttaatattaattttaaaaaataattacaaatatttaaaaaaaaa

SEQ ID NO: 363805 - DNA, 729 bp, Cannabis indica
gcaaccatatgtcgcgttctgttcacctctctctctctctcgtttacatgaaaagcaaacaacttttatttattgcaaatatctttctatttatcattaaagataatccaaattttaatttattgtatgtattatttgcatttagatttactattgccctttacttgtagggcctaattctgtttacaactttgttgtagggtctggttctggctctttcgatagcttgctatgctcaatttgttgttctattgatatcttgaactatgtctaaaattacattttatttttttgcagctgctcttgttttctatcttgtaatcccttctgttgtaggttcttgtgatgtcattaatttggttagtttacggttactcagttcatacctaaggcaaaaaggaaaacatacaaccaaatattggaaaagatcagtggagcagagcatgctttcattctaagggtggtttatagaattgggaatgagattttgaagacgtggaacaatactgtataacaattgaagttatggtctgcagaagtaaaaagtgtattgcactttgtacacattttttattttatagttggtgatgttgaaatttaaattgattataaattattttataagcctaaacaagtaattatatttgagtacttaatatatttttatttatgctttgagttgtataatgattatgattataatatgtataaaaaaaaaaaaaataaaaa

SEQ ID NO: 363806 - DNA, 763 bp, Cannabis indica
caaaatcttccctgccactctgtcagaagccgctcagcaatggtatttcaagttggctcctggaaagtttagttcatggaaaaccttctcttcggaattccatgcacaattctcctcctcgcgccaactcccattgcatttgggagacttggtcgaagttcaggaacgaccacgcgagccactccgggcatacatcagcagattcatgacggaggcgaccaaagtttcacgggtaactgaagatggaaagttatccgcaatactgggggcatcgaagtcctcggtgaactctagaaggatataagaaagaacgggccagtagactcaatgagtgatttccttgaccgagccgaaggcttcatcaagctcgaagaagctattcaacgagcggaaggtgaacaaaagcctggcaagtcaaaggctccttccattggaacatccgcccaacttccccaataccaaaaaaattcaagctcaggtggtaagcgctccagtaacaaccacaagcaagggaatgggaagaaaggaaagtttactggcaaatccgaacaagctccccgggagaatcatgccaaatacactgcattcactattttgactaaagatatagaaagtgtatacatggcaactcagtcgctgccctcatataagaagcccgggcccatgaagaaagatgccaacaaaagggacatgacaaagttttgtcggttccacggatactacggccacgacactaatgaatgctacaacttgaagcgggaaa

SEQ ID NO: 363807 - DNA, 835 bp, Cannabis indica
gcccctactcaactctttcttcaacacgccaaagtcttctccacctacgataaagacgggttgaacgtaggggacttggtcacgactgtaaattgcaggagggctaagttgatttcagagggccaatcggtagatgacttcaatttatccaaggttctctgccccaacattcgcaattctgagtccgagaaggtgctccgggaagatattattgcctccggggaggataggtacaagaagtacctcttcaagagggaccaaaagtcagcctatatcaaggcccaagctgcctcggggagggttcttcatatagaagctgaaaaagaacaagcgacctcttggcccaagttcccattcccagttcctaatgttggggctcttgatgccagcacttccgaagctggtaagtccccactaattgttcatcacgttccttctgttcatgattattctacttgtaggctggtggaatttgatgaccggctacataagtttaggatgccccattttcgatggggtgatcacgccaagagtgtaacgctcgtacttttattaaaatattaattttgtttacaagcgttaaacgcggaaaatcactatgtcgcatttttatttaatacttgaaaatgttcacaactggccagttttcgtacaaaagacataataaataataactaaaataattgcgacataaatttaatagcgtaaataaataaatagagcgccctagactacccgcagttatatggtcctcagcgagttcacacacacaagcgtccaaagttccactcgccaacggcattctagactttcagttaccttggtctgcacatgg

SEQ ID NO: 363808 - DNA, 801 bp, Cannabis indica
ttttttttaatttttttacatatttataattattttttaaaattaaaaatacgtggaccactaaaaatttgccacgtatacaagtgcgtacacgtggacaatccaccgtggcacttaactgtgatttttggacggaggtgtgtagagcaaaacgaaaccagggtttaggtagtttagccgccaaaaattcgatttttgtggttatgtgttacaaatcgtaaagttcatgtgatttagccgccaatatcccttttatatatgtatttttttttattattattattatgttaagagaatgtgtagtttttaagaaaattgttagaatgaaattttcttaacaatttaacacgatattaaattattaaaaaattgttataattaattggacacgatattaatcaattacttatagattaaaaattaatgtcgagacaaattaaagtgaaaaaataaaaactttatttatataccacattaagtaccaataaatagttttttaataagggaaatttacatggtatactaacttttgttattttcttacaaaaatactgttaggcggaatttttaacttttttactgtgttttttcataagtttcatactgcagtatactgtattaagttttcactggtgttctactagtgttttactagtgttctactgttgttttgagttgttctgctttgtgttttactggtgttttacaaaaacacagtatttttgaaaagatttccgtgtgacagtatttttgtaaaagttaactcaaattccagtatttttgtaaatttccctttaataa

SEQ ID NO: 363809 - DNA, 848 bp, Cannabis indica
cttttctgtaatacgaggtgctgaaaacagtgatcacctctttttttggaatgcgaccttttgccgtttgagctgcctaccacaaacaaaagtgtggctggggtggaaggtcacagccacacggctggacagcttggtgagatctattgggcgaaagaagtgctctggcttccgaaagaaggttctggcagctgcaatggcagccttggtgtaccttatttggaaggctaggaataggaaatattggcagcaaagtgatgagaacctgaattctattgtacaataattaaaaaatacttgtaaagcagaatacatagtgtatggcctaacaaagtctctttagaagattcagcttggtttaatacattgtaaataagcatagaatcatcatcaggcccgatttgggtgctgttagacttgtaattgttcaaaaaattattagagtaatgaagaacactactgatttttcaaaaaaaaatattttaaaaaatatcattaactaattatatataaagcgtacctattgaagatattgcacactacaagtatctaatagtaatgttctatatttatataccaatctcactcaaattaatattaataatgaagattcactgttgacggcacttataaggtccaacaccatactaaattactaatgtgatatttaataattagttaccgatttctcatattttttaattaaaaatatttgtattgaccaaatattaaaatacactaataaaaatataccacttcaaaagatacttcacactctcttaacatttttctcagctactgatacatttattctaacaacaataattaatacatttatatatactagg

SEQ ID NO: 363810 - DNA, 594 bp, Cannabis indica
ataagaactacccagacatgttttttctttttggccttcttcaacgggggaattgctagagtaaccccttcagacggggctgcctggccactaacgcccgcctcgcctccagaacaagaacagggaataacggagacgctacctaaacactcgacttctgggtcgtcggggacttcaacgttttcagtctccataggaggagtatcagaaactaacaatgattcgacgaatccaggagcaatgctcgaggaaagagaatcagaaaccgaaggagagacacctggacaatccgtattcgacattacaccacagctaaaacgacaatcaggacccaaagcctacccaaaaaaaagggggaggggagaaaggctaaccctaagaagaaaactgcccttacgaaacgaggaactgcaaggactaaaaggggggaaataggagaatagggtagaagaaaggggaagatcccagaagaaaaatgagagggaagacaacagaaggatggaaatacaaaaatatacacgataattaaaacaaaacgtataaaaggggtaaaaatgaacgaaaaaaaggtaaggatgaaaggaagatataaaa

SEQ ID NO: 363811 - DNA, 868 bp, Cannabis indica
atctcacaatcgtaatccttaaccaactctaaccaacgcctctatctcatatttaaatctttctgagtaaagaaatatttgagacttttatggtaggtataaatttcacatctttctccatagagataatgccgccaaatctttaaagcaaacaccactgcagcaagttctaggtcatgagtcgggtatcactgttcataatcttcaactgacagcaggcataggcaataacccgatcagcttgcatcagaacacaccccagaccctgtctggatgcatgacaataaaccacgaacttctctctgtcaaaaggcagagctaacactggagctgtgattaacctctgcttcagctcctaaaaacttgattcacacttatccttccatacaaaacgctgattttttttggtgagctcggttaagggtgttgaaattttaaagaacccttctacgaaccgacgataataatcagccagacccaagaaacttctaacttctgtcactgttttttatcttggccaatccttgacggattctatctttcccggatccaacttgatcgcatctttgctaacaatgtgtccaagaaaagacacctaagacagccaaaattcacacttcttgaatttggcatataacttatgttctcgaagtcgctgcaaaaccatccggagataactagaaattcgtcatgtccataaaagctacaggagcattggccagtccaaaagacataaccagaaattcataatgtccatacctagtgcagaaagctgtctttgggatatcctcctctcgtattctcaactgatgatagcccgatcggagatcaatctttgaaaagacagtcttgttgggttttgtgccct

SEQ ID NO: 363812 - DNA, 631 bp, Cannabis indica
gctgacacgtaaggcactttgcaacatactcagcaatgtcattcttcatgtctggccaccaaaacatggctttaaggtcttgatacatcttggttgaccctggatgaactgagtaaggagtcgtgtgagattcatacatgatctctttcttaatactctcatccatgggcacacaaatacgattcctgaatcttaacattcccatttcatccactgagaaatcactagccttcccagccgaaaccctagctcgtgtttttaccaatgctaaatcttgcttttgtgcttctttaattcgctctaaaagagtggattgcagggtaatattagccaactgccctacaaccaactcaatcttagctcgagtcatctcatttactagatgtagggagatttgcttcacagtactcaactgactctgaccttttctactcaaggcatcagcaactacattggccttaccaggatgataaaggatgtcacagtcataatccttcaccaactctagccaatgtctctgtctcatattcaagtccctctgggtaaagaagtattttagactcttgtgatcagtgtatatctcacatttctcgccatataggtaatgccgctaaatctttagcgcaaatac

SEQ ID NO: 363813 - DNA, 664 bp, Cannabis indica
ggatggatacgagggaaaaactcctcaaaatgggtagagttagacagctgaaaagggttctttttatgaggggatgaaggggtagcacagaggatgtctttgtattccaagagaggagggtgagggaaattgtcacaacgaaggaggtatttggaacatttgttgtaggtatggtcaacaaggccacataaatagcagaaattcggaaggctctcatatttgaagctgagaaaaccaggtaaaacaaaccgagattgaaccagagcaaagcctgtaggaagcttcaagaagaagatccattttgttccagttggaaagctgaaatgttggttgtgatcttgaccattaatatatatatatgtctttttaatatatgtgtgtgaatataaatgtgaatgtatcaatagatatgtggatatatatttgtgtgaatatatatgtgtgtgaatatgaatataaatgtgaatatatatgtatgtatatatgatggtgagtttatgaatgtgaatgtatgacatattataaaattaacctaatataaaattaacctaactcttttcagatcttttaggccctaaattacatgttatctaatcatctctgaattagactaacatttgatcagcattacgcaataatctaattgtcactaaggctatgtaaa

SEQ ID NO: 363814 - DNA, 504 bp, Cannabis indica
ttcaatcctaaccctaatagaattattataaaaagaagagtaaggtctcactatccaactaatgcttctatagctttaaacctagttttcattttgacagacaactattgttttctagacttcttcttcttttttctcttctaatttgaatttcttagtcttcttgactatcaaaatttgagtcttagttattgagtgcatgcccacccatagcaagttagtcctcaatcatagtgtgtaagactgtgaagaatctaaacaactgaaggagtgtcgggctcatatcttggtgatactccatttatctctattaagccaagttcgaaggaaatcattatttacttctttgtcccgatagaagctatagattccatatctatgattagcgctcccactccattgtactattatgttcctaagatgtacttgtgacccgaaccaaatggtaggctttaactaacaacgatgaatcatgaggcattatcttttgaagcataagatcac

SEQ ID NO: 363815 - DNA, 530 bp, Cannabis indica
tagatctaagatcctggtaaagtaattcccaacactcactacatgaaaaatggggaaaatgttagataatgtcgtcactaaagagaactaaattgaatatgaaaaaagtaatcttacgtgatatacttctccacttcattacaattgttgagaatgtaccactctgccttcaatttatcttgcattggtaaagcaacaatggtcctttgagcaattggtcgcccaacatgcttaaatacagagaattccctttcaggcttatttgggaagacatcgctattttgatcttgacaattcaatcgagtttctacttcccaaaagtacattgaacaaaaggttaagactccgttaactgcataagcttcagaaatagatccttccggtcgagaacaatttttgacatattgtttgtacacagacatggctcgttcaattggatacatccacctgaagtgcactggtcccccaagtatcgcttctttaggtaaatgcatcaccaagtgaaccattatgtcaaaaaaatgctggtg

SEQ ID NO: 363816 - DNA, 569 bp, Cannabis indica
ggatctcaggattttataaatatgttactttatgcttttaattaagtaggaaaaatttaattaatcgcgtttttcattaacctcgttgattagcaacgagcttcacagtacattaaaaaaaaatcacgttaacatgcctaattagttagggtgttacagtattcaatgcccctacttcggtgtgttcttcctacagaagccaatgaaatcattagaaaaattcatgaaggtttctatggggatcatgcgggctggcaaagtctgtctaaaaagattattagaaaaggatattactggccagtgatcaataaggacacatatgagtttgtcaagaaatgtgataagtgtcaaaggttttcatatatacctcgcataccgccaacagaacttagaatgatgacctcgccctacccatttactatatgggggatcgacctaaatggggcattacccactgggcgaggaggagctaagtatgtggtagtagcagtcgacttcttcactaaatggacggaggtcgagcccctcatctccataacctgcaaaaaagtccttgactttgtcgtcaa

SEQ ID NO: 363817 - DNA, 624 bp, Cannabis indica
cagaacatctgttcctcgatagtatccgtgtaacaccctaactattttaggcatgttgacgtgatttttaactggctgtgcagctcattgctaatcaacgagtttattaaaaattgggattaattaaaattttgcttaattaattaaaaacataaaataacatatatgtataaatccaagatctcgtttacaaaagtatttacaaaagtttgtcgcctagtattaacacagatttttgttaaccaaatttgagcctcacgatgataattcaacacagaaaaaataaaaactatagaaaaataaaatatgaacaccgagtttttttttttttacatggttttgcagttaaaattctgcatagtccacgagtcaatcttattcagatttctgagtatttttttcagggcctcttgcataagaatttttttcgtcccttttttgagattgtttgcaactatttataattgcatagtggtagttaattacaaggctgacaaaaatgtaattgcagtcattatcccttaaatcatgggatctgatgttgggttttgtgccctaaataaaactcatttcaatataatcagatttacttattaacaaagatcagaaataacattttatgtt

SEQ ID NO: 363818 - DNA, 552 bp, Cannabis indica
gaagaaaaatgatggatgattgattgatagaggtcatagtctattggcatgtaaggaagccatgcatgaaatgtgtgtgtaagtggtaaaattgtaataaaataaagttgaagagtaaaaatgtaggcttcactgtggtagtattttagtaataaaatatgtattttgtatttttagtgtaaaaatttctttttcttattaatcattttttttacttgggatctgatatttatgtttgagagagtttataaatatttagggtttcctttagtaattggtttattttgcatgtatgagtatagacatagtatagctatatatgtcaaataaacttatgaccaagaaattttatctgagcaaggcatttcatcatattcaacaagtgcatatattattatccagatttactatgtaagatatgttacggtcatgtactttatatacatccagatttgatgtctagactaaaaaagaataaactaattaatttgttattttatagtacaaattgtgtttaaaataaaaaataaattattgttccaatatacaaaa

SEQ ID NO: 363819 - DNA, 598 bp, Cannabis indica
cttctactttgaattatgtccgtgggatcaaacattttcctgatccaacgaagccgatatcatgagtataaagtaagaaaaaggaaccacctttgaatcatttcctccattttagaaagtttgagaaattcttaagcttcttcgctaagagtcaccatcgagttttcctgacgatttgcatgccatccgtgtccttgacattttttctacgagtttcctccgacttcatcttctcaaagcggtccttactacatttgaagatttgcagaccgagcaaccgttcattgccccaagccctaacttcaaacattaagttgctttcttcctttacatgcttgttacattgtgtttaattgctgcttaatttctttgtatcgttgccatctcatttggttttggtagtttttaggcttaaactgtacttaggtcgatactagggttcaggcaatacgtaggttttttcaaatctcctactcacaaccttcgagtttgataaaattctctccaaggattgagactgcttgtgacagtcagtagtcccgtgatccgtaaggggaaacaccgggtaagttgtgcaatcccacaccgcctggggaag

SEQ ID NO: 363820 - DNA, 530 bp, Cannabis indica
atctagaaataagtacaatttattatccatatttatgtactaatttacacttcaaagtcaaactgtatataaaaaactaattatttaaataaataaaataacaaaatatctcaacctagtcttaattttattttatagagtaaaattattttgtaatatcatattgacagttcccaaacagtgaacacaatttttaatatttactctatttaaaactcaattaaatagttaattagtcacaaataattataataaatacctacagcaactaataaattataaaaacctttttatttcgtaccataaatagtaaatagcattacaaaaatacattttactgttttagcatcacttaactatttttcattattattttaagtattaactaaataaattcatgaaaaatacaaaaatgatcgaaaaaccaaatctaaccattctaacacagtttaaagtctgtaccaagccccagataatttattttgaattttctgaatagcctatgtatttttcataattaaatttagaaa

SEQ ID NO: 363821 - DNA, 627 bp, Cannabis indica
actattccatttctaaaaaattttagtatacaacatattacaaatattgattccgattatttttcatttattccgttacatttctccattaatttattccgattctgattactgtatactaaacgtgccattagtagtgctagctagacattatgatttagcatttgtttaacatttttttaaaagcaacgttacaaataataattattatattaagacacatgcaacttaatattttaaatattgagtatttttattagtaatatctataaaaataatattttatcattgattagtgatattttaaaaaattattataataaattatgtgatattcaatacttaattgctaccaataacaatatgatacttaagaatgtataagatctattcaacttgaaatttaaatattgagcattcttattagtactagttagaagtgacatcttataattagtcaccaatacttttaaaaaaactattataataaattatatgagaaccgataattttttttttgaacaaaattaattcattaaacaacaatatccgctatcacaatagactgaagagcatgtggaacattgctctcagtaaaaagacgatcagaccaaaaacaagcaccgc

SEQ ID NO: 363822 - DNA, 1010 bp, Cannabis indica
tataatatttttgaactcatttaattaatattttaattatgtggaatctagctttgaactataatatttatttaatttaatttttttgaaatggatatttaatttaaatttaactttaaatatttccacattgatattatctaaattgcattaatgatatattaatatgacacatcctcaccgtaatgacttatggtaatgctatactattaaagaacatttcttttgagtatgtttaacactaactatatagttggcgttttttattggttatttatatttttaaaaattattaaaataatttatataagttgatgcttattagtactgaaattatatttagaagagtactaagcactacagtggcggacccagaatttaaagtgaggggggcgtaaataaatttaaaaagaaaatataaagtgaagttagtggggtttgaacctttaccctctaacctatttactaactaccttaaccattacaccaaggttactattatgtctataaatatcatctttaaatacaaatatatgttgtaactaattaaaatacatatacatttttttctcgattttttttttcaggggggccgactgccccccctcgctacaatgtgggtccgcccctgaagcactactaatatttattttataataaagtaccagtattgttttacgataattggttagagatattttgtaaaaattattatattatattatttgaaacttgatattttttttcttataaaatatgaatatttaattattctaataataatataatatatgttagagggtgtaaacaatgatattagtggtgttgacaatcaataaggatacataatataaattacatatataataatataacaaattagttttattttaaaatatttttcacattttaagatgaaatatatataaattttacatataatttatgtgtacaaactgatatgcttttaatatctttatatattaaaagtgcctatctaacggcatttc

SEQ ID NO: 363823 - DNA, 828 bp, Cannabis indica
agaaatgctctaattgaatatctatcaagaatgaatacttaacttgttactaagttaagtgagtagattagcttaggaggacccataggaagaatagaaagatataattatgaattatatactgtgagattttatgatttcatctgacttgtaacggttggattcaccgacttaatatgttgtctattagtgtagataatttatacatcaaatgagaatatggagttcatacgaaggaatagtctaatcttctgaaattccaaggttgatatctttggcaaagatgttaagaattaaagaaggttattgagaaccatagagattaaagcgaaaatagtacgatgttttattattgaaaggtgggtaacttgagaagatcaataaaatattagaaacatgctgtaagctcgcttataaaatcatagagtgaattcgagttgtatgctcgcttcattgagtacacggaagagctacgctgatttaaagcgtaggattatcgagttttaaataggatattttgtgtttcttcgagtattgtctataaatggatacatagagagggaagttaaaccctaaatgtattataccttgtaatagttgagtaagtaggctaggtagcctattagctaaacttaaatcatgcattgtccagagtatataatgtgtttcatatctccatgctaagaaaatatatatcagacttgacccatattctgagctgtgacgttgttaagctcagataaatttattatatgggaaaaaatatcttgtctagattttggactagaaaaaaaggaagtattatggaatgagacaattccactagtt

SEQ ID NO: 363824 - DNA, 584 bp, Cannabis indica
aaaatgatatttatcctaaaaattatgagaaattgttgtttgttattgagcacaaatatgcctaccttatcttttgttcaatataaaaataattatatgatattgtgcacttaaatttcatatgttggatcgaaaagtattatatattatatattttaatttaatttttataaaaaattgttaagcattagtattagtgcatattgaattaagattttctgttaaaaattagtacttcataataaactaaaccaatttaaatattacaactcaaataaataaatttatattatgtaaaaaacctcttttagtgctcttatgaatgattgaggtgagagattcaacaacaacaacaacaacaataataataataataataataataatataaaaataaagagcgtatctaaagttttaaatttataaataacataaatttaataataataataataataataataataatataagagtaaatagcaatataagtataagtttataagtagcataaatttaatatttatttttaaaagcataagtatctaatttttttaaaactgtaatttttatataatttcgtc

SEQ ID NO: 363825 - DNA, 603 bp, Cannabis indica
tctaaaatcaacgattaaaaaaaaaattccctaccgataagaaacttttgctagatcctaccatagtattacccttaatcatattttgttatctttatctgactacggaaaagataagtttattaagtcatttattttatatacaatgagaagttaaattttctgtatgtacattgtatattatatgtacattcatttattgtgttttatttctttttatgcgatcacgtatactgtttggttattattaataataaaatatataatagttttaagtaataataataataataattcaataataattaatttaaattttagtttagaaatttattaaggatatataatattttagttaaattaattgaaacaaaatatcatcaaagtgatctattttgtgtagattaatttaataaaaatattatgataattgtgtgtgtgattcataaatttattaactaaccgaaaagtgagttaatatttggttgaagttcatgcatgtttatggtgataaatgtttgacaattatgaggcattttgtgtgaataatatgttagtccaaaaattgcatattgtttgacataatttattgtcaatatttga

SEQ ID NO: 363826 - DNA, 748 bp, Cannabis indica
gattgttattctagagctgcaacatgaaaaggctggtcatcagctgatgatgatcttggcaggagaaaccgagaagaaagatgaagatcttgatcctcgagttcaagatgaaagaaacctgctaaaaccaattgaagaattggaggaggttattctcgacctaggaaatcccaccaaatgtgcgtacattgtcaagaacttggacgaacagctcaaatagcaattaataagctttttgaaggcaaaccaggatcaattcgcctggagtcatggggatatgatagggattgaccctaagattatctgccatcacttaaatgttgatctaaactacctaacgaagagacaaaaagggaggcccttggattccgagaggctaggggcattaaaacaggaagttgacaagttattagtcaatgatttcatacgtgaggtattttattcctagtggatagccaatcctgttctcgtcccgaaacccaacagaacttggagaacttgtactgatttcttcgatctgaataaggcgtgcccgaaagactattttccacttcccaggattgaccagttagtggatgcaactgctgggcacgagcttatgtcttttatggacgcatattctagatataactagacaaaaatgtaagtcccacatcaagaacatacaagcttcgtaaccaacatgggactctattgttataaagtcatgccgttcggattgaagaacgttggggcaacgtatcagcga

SEQ ID NO: 363827 - DNA, 774 bp, Cannabis indica
tcacccatctaaacgcaaagacaactcgaatgaagtctacacgcaacttcgaaagtcccgtacagacttgggggcaaatgttatcccaatttttgcactctgacgtggcatcacacgatggggacaactggaatcaactctataatcaagaagaaaactaagaactcttaaaactgtctttgtatttacctgatgaaaaaggtactgagtcgcagattactaatgcagcatatcaacaccgagtaacaagatttttcaacaaaagggtcaaacaaaggctattcaatgttggagacttagtgctaaggcgagtatttgcaaatacgagagacgtagctgtaggagtattcaactcgaactgggagggtccttatgtgattaaagcgatagtaggaactagggtttacaaatttgctcggatgaatggctcgctcataaagaactactggaatgtggaacatttacgaccctactactagtaaattaatgattgtaactcacatttttgatgtaatattttgaagttcagttatgagtaaagttaatcatttcttttttcaagtaattacaaagtattattctttaaaattacttgaggggcatctgtgtatgattaacccgaatttatctagaaatacatgatatagtgcaaacccaccactttaaaatttttgaaattttttaaagttcttgatcaaacctttctgacgagaaaggaggatcaaactattatgaatagctttttgattaaaaacttgtctggcgagaaaggaa

SEQ ID NO: 363828 - DNA, 607 bp, Cannabis indica
gagggctcacccacctggcacctaaggcaccttgcctcatgtgaggaactgcaacagtttgctcctcggtgacgtagtccactccttcaaccaggacatcgccgtccgcatctactggctccccagcctcgttgtatcccccaaaatttaaaggtgcaacctcttcctcttcctccacctcggaagggcttccaggacagacatcgtcatgttcctctatctcctggacttcagcgtccccttcatgatccccctcctcctggacgggcagatcctgttcggcgctgagtaaagtggcgtgctgggccacatgagggtcggacgcgttgaccttacgtattgtttgctttgttcgagccatcatcctatggctggatggaaaatttgaagtggagagcccgtcacttgaagaggacagactgacacgaagacgaggataatactcgtacacgagttgaagaaaattctggtcaattcgatgttcgctttcctaaaactcaccatggttcatctacaaaagacaacacgcgagatgagtgtttggtcgggatatcgaacaataagcaggcaaatatgccgaccaggagtactcaacagattaaaagaa

SEQ ID NO: 363829 - DNA, 681 bp, Cannabis indica
actccactataaattcagaattgtactcctgattacataaaatgctctatatgtttcaaatataggtacactattaattatctattgttatgattcaaataatcaaagatcctctatagatgatttacatcgagtagggacaaatttgttgtgctacccctcaatgtattttatccttaaaacacttagcttcctatacatgatattttagtaaactaatataattactgaaataagagttcttccatttatctctattaagtcatgctcaaaggaaatcatcatttcactttaatgtcattatagaagctatagattccgtatctatgattagcgctcacactcaattgtactaccatattcccaagatgtaagtattaggtcgatctatttagttagctttaaaaaaaaattcaaagaacacaaataatacagttgagctcgaacctaaccatctcaagattaatctctactgatctaagatcaactaagtgctattgacttagaaagatataacgataagtttatgatatcgacgatcggtatatactttgttggatcataggcgtcatcttcatcaactaggttaggaagagacctgccattgtttatcataggcctttcaagcccgattcccagattctgggttttcccggagcttgtggtctgttcaaatgataa

SEQ ID NO: 363830 - DNA, 504 bp, Cannabis indica
cattgcattttgcaatcccatttccttcagtgtatccttgtataggatattcaccgagctcccattatccaccaacacccattttattcttttgttgacgagccgaattgtaatgacgagagggtcgacgtgtggatacctcacgtgctttgtgtcttcctccaaaaatacaactagaggttctttagtcttgatcttttagatgattctggagcgaaaattgaccgctcgtattttatttccttgacatatcttttttgggcattactgctttctccagcgagatgcggccctcacgagatgaccaaaatgtcctctccttctataagaggaggttgtaatctttggttgactggattattgggcagatttggctagttttgtccattaccctatcgtcttgcatactgctggaaataaccatgtgagataaggctctctatctcgtctttcaactgacgacattcttcgttgtatgccttatgtccttatgaaatcgataga

SEQ ID NO: 363831 - DNA, 495 bp, Cannabis indica
gaaaggaaatatcacatcatcagagagtatgtgggaagaggggatgtactggtggagaaattggacacagaggacaacctagctgatccattcaccaaagtcttggcaggaactgcatttgaaaagcaccgtcagaatttaggattaattgaaatgtactgattgttttatattagtgaattattttcatcacttatttaatgtgtcattttgttcaggctatcatttatatgtttattagaattataaattcatccaaacccttatcaaatttatattctttcttattgtgtcgtcagcatagtggaaagtaatcaagattgtgtgattaaatatatattcctagatttattagtacacagggtttacctgatatggtaatctacaacatagtttacttgcaccttgagcctactttttggtcagggtgacacgtacattttgggaacatggtagtacaattgagtgggagcgctaatcatagatatggaatct

SEQ ID NO: 363832 - DNA, 697 bp, Cannabis indica
aaaataacaaaaaaaaaaaaaaaaaaaaaaaaaaaactgttttgaagtgtaaaaatgaaaaagaccaattttttatatatatttattttatttaacaataaggtataataattctaaccaatagtattaaagaattaaaagttatttttagaaactcacttattttgtttaaattactactttatccttacaccaacaatagaaatttattaaattatgagggtcattagtgatatttcactctaacactctttcatgagttttttttttcaaagttaaagaaaaaaattaagttgttttgattttatcgttggacaaagaaaaaaatgagtagctttgtttttctgctctttgttcttattctaagaattattttgttacatttagtgcttgaatttcttgtttggtgcttgtaagtaaacgggtgattagtaaaaaaaattaaattggaaagtgttttcttcaatatttaattctacaaattttacataaacttttgtactatatttacttgtttgcttgttgagagagaagaagatcgagatgtgtattatttctttactccattagttcatgctctctaattgtatatggactaggaaaatagaatagtgtgtataaaacatgattttgagaaaatagagaaattgacaataactaaaataagtaattgttatgttctagtataacaactatt

SEQ ID NO: 363833 - DNA, 1017 bp, Cannabis indica
agaaagccttagaaggttttccttgacaaaagtcgggtgcaagaatcccacagatggtgacattacaaataagcaaagaaaaggaaaaaagggtaaaaatcgagaaagacaaagtcctctctgaacccttgaaggtcattacgtaaagaaagatgggtccttgaaaaaaaatacgtagaataaaagtaactcgaacaccagaaaagaggaatctaacgtattacacagaaactcaagacgaaaattcccagaaacttcaaacatcaaacccagaaaaaagcagatgaacagtaaagcatgcaatgagcacaaacaataaagtacaagatgcgaagaacttacataaagcttgagaactgggcgttgttgttgatcgacggtaaaaagttgactgacaatggcgaaggaaggtcagtaagaaatctgtggtgtttgagggttttctggttcgagggtttctttctctttggaaaacttaaagaaatttggtgaaagtctgaaagtaaccaaatgaagtgagaatggtggcttttataggccaaagtgcatgtggaataggtgcgatcatctaccaatcatgcggctgggaaggcacacgattagaattcccaggatccaatggctgaactagtttgtcatcgaggcggtggaaacgcttgagtgtccgtctgacacccattaatgcgccgtatcaattaatggacaagaaacgaattgacgcctgcaaaaagtgaatcgcagtagtaatggtgatcattaaatacaccttcacgcgctcgaagcacgtgccaggaaaccgaggagccaaccggaggtatctgagcaagccttgttcatttcacaattaaacaaggcttggggggtaaatgttgcccccgattttgcccaatgtacgtggaccaaccagacaaggacacgtggacacaaaggttttagcacttaaattaatagctaagtctttgtaaagaaaggcattatcttggatatgcctcccggagaaggcatgcaaggctttat

SEQ ID NO: 363834 - DNA, 290 bp, Cannabis indica
gagagagagagagagttgagagatatatatgattttttatcaaatttctaattttgtaaaaaaaaaatgaagaataaagttttatttgataaatatcagcttaaaattaacttaaaattttgattaaaaaaattaagaatttcactaaaggacaaaattacttatggggagaaatgaccattttgcccctcccacactaaaagggcataaaaggcacttaggggtattttgaaaaattctaaaattttgactattcctgacattcccattggctaactttattgtcccac

SEQ ID NO: 363835 - DNA, 1522 bp, Cannabis indica
tgctacggtcatgcaagacttcttagttgttgacctgccctcggcttacaacatattgttgggtcatccaacactgatcggactaggggcagtcagttcgatcaagcacctatccttgaatttccaaatgccagatggtgtgggagtggtgcgtggcaaccagatgcgggctcgcgattgctattgcatagtgttagagcgtaagaaagtcgatcattagttgatgacgatcttggtgggagaaaacgagaagaaagacgaagatcttgatcctcaagttcaagatgaaagaaaactgctaaaaccaatcgaagaatcggaagaggttattctcgacccaggaaatcccaaaaaatgtgtatacatttggaaaaacatggacgagcaactcatatagcagctaataagctttttgaaggcgaaccagaatcagttcgcctagagccatggagatatgatagggattgaccttaatataatctgccatcacttaaatgttgatccaaagtacccagcaaagtgacaaaaggcaaggggcactaaaataggaggttgacaagtggttggccaacgactttatgcgcgaggtgttttatccctcgtggatagcaaatcctattctcgtcccgaagcccaacgaaacttggagaacttgtattgacttcaccgatctaaataaggtgtgcccaaaggactctttttcacttcccaggattgatcggttagtggatgcgactgctgagcacgagcttatgtcatttatggacgtatattcttgatataaacagataaaaatgtatgtcccggatcaagaacatacaagcttcgtaaccaacatgggactctactgttctaaattcatgtcgttcggactgaagaacgctggggcaacgtatcaatgactagtaaatgaaatgtttgcaaaccaaatagggtaaaatatggaggtttgcgtcgatgatatgttggtaaaatcaataaagagtgaggatcataccacagaccttgcaaaatgctttaaaatattaaaaaagtataacatgaagctaaacctgaaaaaaaaaatgttcctttggagtctccttgaaaaagtgtttgggattcctagttaatgtgagaggtattgaggcaaatcctgaaaaaatcaaggcattaatagacgtgccatcaccgataaagcctaaggaagtacaagccctgacaggtagaatggctgcacttaacaaattcatttcgaagtcaagtgataagtgtgtgccgttcttcaacatattgcgaggcaacaaaaagttcaagtggaaaaaagagtacgaagaggcctttcagaacataaaaaggcatctcgcaacgcctccaattttggcaaaacaaataacgggagagacgttgtttctctatttagtcatctcgaaagatgcgattagtgcaactatagtgcgagaagagggcaagtaccaacaacctattactacataagtaaaaggttactagggacagaatccagatatccctctctagaaaa

SEQ ID NO: 363836 - DNA, 769 bp, Cannabis indica
taccacaagccataggtttagataatctcaaacctataatactaggaacaggaagttttgctaagtccattgaatacacttattttcaaaatttccttcttgtccttgtaatagaaaacttctggttactccatatgaacgattttaaccatggttctcttgactttgattcttagttccttattctaactatccattacttgtttaaactaacaatggattttaatcacaagtgccttccaaatcataaagggtggattccttaaaatcctccaattacgataaggtatcgtaaacactaattgtattatcctcatcggctgtatcaagacaacagaggtagtgggaccatcttatattgaataagatgatagaacacttttggaatcaagattatctcctctactttgctactttattttcagatttcgtcatattcttagaaaagtagtatttattgaaacaaacactttcttatcttaatgaccacaagatgttccacccttaatcacttagaatagctatcaaacttacacaccttagttaatagttctatcttttcttaaggtcacgatcaagacatccatgaatctagtaatagtttacactaagtacacaatcattctgtcattcttaaattttcctatcactagggtatttcctagaaagacttaggcaactactagcaactaatcatagacctttcactttcatcaatatgcaaacaaaattttagggaggtaagtttggatacaattcaaaaattcaa

SEQ ID NO: 363837 - DNA, 678 bp, Cannabis indica
gagatgcagatggatctacaaggagtacaaggagatgtatgttgtagaatttttcctcccaccctctcagaagctgcccaacaatggtatttcaagttggcacctggaaagttcaactcgtggaaggctttctcctcggagtttcatgcacaattttcctcctcttgccaagcctacatcagcagattcatgacagaggcgactaaggtttcacgagtaatcgaagacgaaaagttatccgcgatactggggggcattgaagtccttggtgagctttgaaaagacataaggagaatggtccagtagactcgatgagtgattttcttgaccgtgctgaaggctttatcaaacttgaagaggctattcagcggacagaaggtgaacaaaaacctggcaagtcaaaagctccttctactggaaaattcgtccagctcccccattacccaagcgattcaggctcgaatggtaaacagtccagcaataataataaacacgggaatggaaaaaggagaaagttcactggcaaaaacgaacaagctccccgggagaatcctaccaagtatactgcatttaccatcctgacggaggacatagaaagtgtttacatggccactcagtcattagccctatacaagaagcccgcacccataaaaaaacgatgtcagtaagagagacatg

SEQ ID NO: 363838 - DNA, 740 bp, Cannabis indica
ttatgaattgattaatattaagacatagttaatattgttatataacgaaaagattgattggttgaatattgataatgaaattattttatgcatgtgatatatggactcagctgattaggtgatgtgctatgcctggtgacataccaggcgtaggtacgggcatcaatgacatatgagtaccaagcataggtacgggcacatctgattaggtgatgcgatactcctagagacgtgtagatacgcgcgtcagtgacatatgagtaccgagcataagtacgagctcacctgattaggtgatgtgatactcctagcgacatgtagatacgggcgtcagtgatatgaaaatgcaaggttatagcatagaatgaaaccgttgtagggtttcctcctagtgacgtgtagatacaacgtcaatgatatgaaaattgccatgctatggcatagaatgaaattgttgaagggtttcctcctggagacgtgtagatacggcgtaaaggatataaaaattgccaagttaaggaatagaatgaaactgttgtaaggtttcttcctgttaacctgtagatacgggcgtcagtgacatatgataagtatcgggcgtaggtacgggctcgtctgattagatgatgcgatatattgatgtcaggttgtggcatgggcttgttggcaatatttcacgggaaactatagtaaatggccccaaatcatcggactatgttagttttgttgggttttgtgcc

SEQ ID NO: 363839 - DNA, 628 bp, Cannabis indica
ggaacttcaccaaagtttcaacagtgacagaaaaaatactcagagacaactttattcaagcaagaaaatatgaggtaaacaactaaatttatagatatatacacacagtacacattaaaaaaattgaacagctgtataaaataaccggttataaaataattttttctgtttaaaataacaggttacaccagtcacaaccatactccaccaagtgaatgtgctagagaaagggaaattcttggtcaattgaatggacaaaacatgtgaatgtaaccggttccagcaagatgaaatcccatgtgctcatgcaatagctgtattctcgaaacgaggattgcgagtttatgactatgttgcggactactacaaaactgacgaaatgaaagcaacatatgacacaacagtgaacccattaccaaatgaaagtgaatggacactgcctgagagcttggaaatgatagtcctaccaccaaacatgaaaaagagagcagggagacctaggagaagaagaataaattcaaaaggagagccaaaggtacaactaatgtgtggacattgcaaaaagacggggcacaacaaaaagacatgcactaatccagttctaccaccaaagcaacaagaaccaaaa

SEQ ID NO: 363840 - DNA, 963 bp, Cannabis indica
ggtgtttactcttgggggtggagcagtggtttggagaggtgctaaacaaactgcaacgtcagactctaccatggaacccgaatacatagctgctgcggaggctgctaaggaacttttctagcttagaaagttcttcacaggactcggtgttgttcatggaatggaaaaaccactagttttgctttgtgattacactggagccatagccaactgtaaagagcctcgaagctacaagagaagtaaacacatagaaaggaaatatcacatcatcagagagtatgtggcaagagaggatgtactggtggagaaagtggacactgaggataacctagttgatccattcaccaaagttttgacaggaactgcatttgaaaaacactgactgaatataggattaattaaaatgtactgattgttttatattagtgcaagtcggagtttgttgggctttgtgccctaaataaaactctatttcaatgtaatctttatcatttaattatcaataaagagaaagaattatttttatcactcatttagtgtgtcatttggttcatgttatcatctatatgataatttgatttataaattcccttatcacattgatattcatatttattgtgtcgtcagcacagtggaaagtaatcaagattgtgtgattaaatatattcctagatttatcggtacacagggtttaattgatatgataatctacaacattgtaaagaccgcttagtttaatttggaaattagcagttaattatgattaattatgaaaattatttatagctatttaaataatttattatactgttatttattgaattcagtgatgcattttatgtcattcagtagttttcatattttgcatttccggtgcccggtattttggaactcggtgtttggctcagtagaaatcacaacttagtatgttagtagtttggggcggtttattagacattggga

SEQ ID NO: 363841 - DNA, 515 bp, Cannabis indica
tctaggtttatttattaattaatagactttatatgtctaaattaataaatatattaaatgacaacattatttaataattaacttttagttattaaataattagaattgacatttatatggttaaattggaaaattggcatttttgagaaaatgagattgaaaaatgacaaaatggcaaaattgcaaagtgaggcccattatccataacatggccagccagtatgcaagtattttaccatttatatttttcattattttaaggccacacaattcaaacctaaccctatgtggtattctataaatagaaagtgatggcttcaagaaactatgtacattcatcttattctttttcagagaaaaacctaagcctccaagccgccaccctctcttctcttttcttttcttcaattttgaaataccctagtgaatgagtagtgcccacacacatcaagtggtatctcaatcatagtgtggaagattgtgtaggatccaatcaagaaggagaatcagcatca

SEQ ID NO: 363842 - DNA, 867 bp, Cannabis indica
attcgtttcatgcccattgattgatgcggcgaattaatggtgtcagacggatactcaaacgtttccaccgcctttattgcaaatcaatctggcccgttgatctttgggtatttgaatcgtgcgtttcccccaccgttcgattggtaggtggtgacgcctgttcctcatgcatttttgcctataaaagccaccatctttccttcatttcggttacttcccatttcttgccaactttgctcgattttcctagagagaaaattctcagacccagcacgaaacctttaaacactttgcaattttctcagttcttccttgcttgctgctaccagtcgttctcctctttacttgacttacatcaggacccccagttcataacttcattgtaagtttcttgcatccattggtagtgacatgcttttactcgttctgtttgttcttttttgggttcgcatttgagatttctgggcatgcaagtgtttaagtccttcatgtattctgttttgcatttactgctttagttgtaggatcgccattatcatgcctctgttattattgtgcattttcattgaagaagaccatacactcttcattcaatggttgtttagggcatagaatagggtctttcttttctgttccccttatcgtgtaaaaccaccttctgcgattttactgcacccgacacttgttcagggaatctttctagggtttcccgtgtgacacgtgtctggagggggcctctttccagcggttaggggacccccattccctttttcttgacttagggtttggtacggggcctaactgcttgaattttctctttcttcttttttttttaacagaatagaaaatgtctgcctctggttcgaa

SEQ ID NO: 363843 - DNA, 643 bp, Cannabis indica
ttgagggcgtggactacgccagtgaggaacttactgctgcggttcctcatcgaaggcaaggagctttgggagccaggtgggtgagccctccgtcaaaggttaccgaggcacgcttacgggatcttgaccaggatggctaccttggtgagttagactattaaattcctgcctctaacaataaagccacaaaccctgaaaggagaatgtgtgcctggtcgagtgctcatgccaagcaaggggctttgttgcctttgcacccatactatgtggcagatttctcccgcctctgtccgacccaattcactccaaagggcatcaagtatctgtccgccctcttcgttctttgcgcctcctaaaagtgggatatgccctctccccttgaggttagctggtttttcaatttgaagtccacccctaagcaaggtaagttgggatacttctatttctctcaaccagacttcaagtggttgacgggcaccggggacaaggccattagcaaaatcgggcatttttttgacgagtactttatggtggaaagcatgagcaccacctacactcggtttcagaagatccccacatatcactgccctcctttcacactggctctccggaatagagctcagaagcttgccttgctgctggg

SEQ ID NO: 363844 - DNA, 591 bp, Cannabis indica
agagcaatcggcctatagtcatttactccgctggggcactctttttttgggataagcacgatgttggtgttgtttatacattggggaagttcagtattactaaaaaaatggctgaccatatcaaggacatctcttttaactgtttcccaatgctgcatatagaaccccgtgggcattccatctggtcccggggctctttcttgtcccatggagcgtatgcacctttcaatttctcgatctgttgggaaagccttcaaatgctcgttatcttgagtagagatgatgcaattcgcaaggcagtttagagccggaagagctgctgattttttatcaatgtatatgttgttgaatcttgcaatgaacagattagctatgttggtaatgtttttctcccacctcccatcttccaaccggatctgctgaatataatttcgtcgacgacggatcacagtggtggccataaagaattttgtgcatctgtctccttgctgaagccacttaacacgtgacttttgcctccagaaaatctcctccctcgcgagagcttcggtcagtttgtctctagccattgcaagatcctctccatttaca

SEQ ID NO: 363845 - DNA, 560 bp, Cannabis indica
tcacgggtaaccgaagatggaaagttatctgcgatacttgggggcatggaagtcttggcgaactgtggaaggacaaaaggaaaaacggaacggtcgactcaatgagcaatttccttgactgggccgcaggtttcatcaagctctaagaggccattcagtgagcagaaggtgagcaaaagccgaacaaaacgaaggttccttctactggaacgtccgcccaacttcccatgaagaaagataccagcaaaagggacatgacaaagttttgtcggttccatggagactacggccacgataccaacgaatgctacaacttgaagtgggaaatagaacttgtgatcaagaaaaacaaccggcacttacagaagtatgtcaaggccaaccaaggtcagaataaccaggatctgatgcctccgccaatagatggacacttgcaagtcatcattggaggcccgcacatcgctggagacacaggcaaagctcgagaacgatatgcccgcacagctcaatacaagcaagaagaagtcatcctagccatggaagagaggaagcccaaagtt

SEQ ID NO: 363846 - DNA, 448 bp, Cannabis indica
gcggcgtatgagaaaagctatggctacctttgaattgtgcatattctactcttcttcgcccaccataatcagttttggactctcacactcatcaacaattatgctgtttaagctcctctgcaccaaaatgcttcttttgcatttaggctcttcacataattatctttttcattcaaaccccattatctcacaccatcattctcaatctttataatttagactttgcctctttaaattttgacatgtattaaattatgattttgatatattttaactattaaaaattcatcttgaattattgaaattatccgtttaaagacttttttcattttcattcaattttattgattcggtgattatttatatactaaattatgctttccaaattttgatatctatgaaattatgtctttcgaactttgacgtgtaccaaatcatgttttttgaa

SEQ ID NO: 363847 - DNA, 632 bp, Cannabis indica
ctctctctctctctctctcggttggtgtggtgtgctagggctgggatttcttttgatttttcaagcttaactcatccaatctaagtgttcttcaagtgcttggtaagacccttgtatcttgctcttttagtttcttgaattttagaaagaaaattgagtattacaggctattcttggtgttcctgctgctgctagttgttgttgttggtttgtgatttaaaatgcttgaattaaatggattagagaggttgaaacgcatgctagttgcccttgttctagtttgggaattttttgttcaaaagctttggtttttccaagagaaaaggtgaaaatagttgctgtaaagtttggttgtgtttgagaatggtttctgcaactttattatgcatgaatatgtagtttgattctagttttgatgcttgtaggtgagctttagccaagtttgagtttgaaactcaaagcttggagctcacatggcatttttagtatctatgtgttctggactgttttgatgctttggtattgttctttggggtatttagaacaggtctagaaggtttggttgaaattgggtttgaattgattgagttatgaatttttgaaagtttcttgcgaggaaccgaaattccggt

SEQ ID NO: 363848 - DNA, 611 bp, Cannabis indica
cccaagttttaataaaaccaataaaagttaatgtaagcccaaataaaaagtctaacaatatgaaccataaacccaaggatctcaacataatcaatatagattaaatctaactactgaaagaaattcaattacctcttgatgcctattagggtatcattgattctttttgtataacagtcgaacatccaatccatgaacttgaagaatccactccttgatctttcaagtcagtctcaacacttaggaatagagtgggtgcctatagtatagctgacggttttaaaccgtggcctatagtaaatttctcaaaaaaaaatcatcgcctttatcctcctcaaacaaagatggaaattttgtttggcctcaaaatccccaaatagttgagatcttcgacgatctgtgaaatacaaaaatctcaaaaatacataaatccaaaaataaaaataataataataataataataataataaagaagtaagagaaagagtggaacgagagagaaaagattggccgatgctcgtggtggctcatggtcgactttagaccagagagagagagagggagggagagagagagagagagagagagagagagagagagagagagagag

SEQ ID NO: 363849 - DNA, 642 bp, Cannabis indica
ggctctgtccgacaccttgagggcggaggcgaacctggccaaaaaggaagctaaggaggccagggcagaaactggagctgttcggctggagttgggcgaagccaacaagaagctgtttgctaccgagaagaagatctctgtgctaacaaaggacctcgaagctgctgatcgcttgaggagaccatcgagatcttatctcttgacgttaacggtcttcaggatgagaggagttctctgcggcaagttcttcttcgggtgaaggaggagagggatgccaaggtggccgaggtgcaccaattgaaggagaaggtcaatgccctagagacagtaggcctcgagctcttcttcgatttctggaaggctaatcccaaggccaattttgactacttaggcgaggctaaagacatgtaccttgagtactgcgcgacccaagttgcttatggtgggaaagaggtgggtgccttaacatccagcaaagcttctggccaggctgctgatgcttctcatgttcaaacaacagatcctcctgctccagtttgctcagaagaaccgaaccaagagcctaggactccagctgtttaaacacttctcttttttatctcctttatatatatatatatatatattatatggcctcaaggc

SEQ ID NO: 363850 - DNA, 532 bp, Cannabis indica
cagtcccagaaccccttggcctcctccacattagcttttccaacaagaatgagatcatcagcaaaaaagatgtgagaaagaagagggcctcccctactcagcctgatccccttaataatccccaaagattgggcattttccagaatccgagagagaatatcggccgcccagataaagagatagggagataaggggtcaccttgccggaggccgcatgagggggtaatcttgccaacagggcccccgttaaggcaaatgttgagagaggtagtagtaatgcactgggagacccaattccgaaactcaagcgggacgttgaagcaggacaagacatgatctatgaatccccagctcaatctatcatacgccttcataaggtcaatctttatggcaaaaaaaccctctttgcctttcttcctattgaaggaatggacaatttcttgggctatcacgttattatcctgaatattccttccaggaacgaaagcagcttgggtggggcagataaacttaggtaaaagtggtttgatcc

SEQ ID NO: 363851 - DNA, 772 bp, Cannabis indica
cacctgaattcagaattgaggtaagattagtataatatcatgcagatgttattacatgtttagcatacatgtgatattgcctgttagattacattgataacaataatagtatacatcgagtagtactgattattgataaatgtatgtgggtagagtatgactagcatattgagtataggctgacattatggtcgatggtatcgtcttatgaacgttctagactcagtaccgtgtgggacacggggattagggttatgatccggtgtatgggcgtcaggttataacctgggctatttgtatgtttatattatgcttttcttactgactctgtcgactcacagagctatgtttatgtgtataggtaagggcaaggccaaagctgaggaatcatgagcacgagcagatggaggttgtacatgtcggggcggttaggcctggagtgtaagattttcgggacatcagggcttttgttgttagtcgttgggcgacaaatattttgtaaatgaatagcgaacttttgtaaagtattttgtaaacgggatcccgaaatattttgtatgtaatattataagtttttaattaaataaaaaatttaattaatcacgattttcagtaacctcgctgattagcaacgagctgcacaatatgcttaaaatcacgttaacacgcctactgctaatcagggtgttacgtaattggtatcagagccgcgtagtgtcttccaaagatcgccacgacatgtacaatcatcatcatcagttagctcgttcca

SEQ ID NO: 363852 - DNA, 662 bp, Cannabis indica
  modified_base (554)..(554): a, c, t, g, unknown or other
aaattctacacaaagttatggaattagcacccaaaatcaagagaatcaacaacaaattccacttcatgcaaattcaagatcttcaacacctattcatgcttttctataattaaatttcagaaaaagcttcaagtaattaaataagaaagctacctcaattcacaccaaggcaagaacaatgatttttcctccaaactctagcttcaaatcaagccaagatcaaccttttctttcaaaactcaaaattgaatgcaaagagggttagagagagagagagagaggggttgggtgagatagaggataacaccaaaaaattccattttattttcctcaaaattcaatttttccaaacatagaaattagaggtcaaatgccccaagggccaattaacatgcatacacactttcaagggcaatattgtcatttcacactcaaataattccaaataaatttcagattatcactcaataataatagggaaatttacacccactactgatttttcccattttattacatttatactgttccacggcaaaaacaacatttatacngttttttttttttggtcagtttactgcctttaaactttagccgtgtaagggattttcattgccacttgtcacgatagggttttgtccacgtttttttttttaaaaaaa

SEQ ID NO: 363853 - DNA, 1083 bp, Cannabis indica
gagagagagagagagaagggtcgggcgagataggggataacaccaaaaaattccattttgttttcctcaaaattcaatttttcaaacatagaaattagaggtcaaatgaccaaaatgcccctagggccaattaacatacatacacacttccaaggacaatattgtcatttcatacccatttaatatccaaactaatttcagatttatcaaatataaaataacatgccaacacttaatcccaaattgcatttcgggcccgaacccggttcggcccgaaatacctggttgtgactataccacgtcaacctgtcagaacacacctgaaaaagacaacacaggcatgctatataataatatagttccattaagcacgttattaaattaattttattattttacccttttcgggtcataattactaaaatgtccttggctcaccaacggggtcttaacatgttaaaattcatattaattcacatatactgaactatataataatataattcctcaattattcataattatctaattagagttttgctaatccattacacacatagcatttaataattttttatcaattaactaaagtatatattttaaatcatattaactctaaatctaataattttttacaagctctccattctcattctttctctactcctattatttttttctataacataaagcaatttaaattattagttatatcattgaagcttaaaccaccaattcaatatagtctctatttttctaccacatacacaatatacataattatttattgttatgtttgattaattaattatatcaatatatattatatgtagttctaaaaattttaacccatagaaactaataattgttttactagatacatgcaaggtttagtatcttgatgcaacaataattagaagaactcaatcgaaaagaaaactggtgaattcgttgcaagtttgacattctatggtaagttttttcatagaactctctttttgtgaattcgttacaaagttctcaatttttaataattattaggctagctaattaggattttttttccccgaactttaacatgta

SEQ ID NO: 363854 - DNA, 1072 bp, Cannabis indica
gctaaccggtaagcaacttgtccaactttctccagaatttcaaaaggtccaataaacctagggctcaacttgcctttctttccaaagcgtctgatccctttcattggggatactcgtagaaagacatgatcaccaggttgaaatgtaacatcccgtcgcttgggatctgcataacttttctgcctgctttgagaagcaagcattcagctttaatcttgtctattgcttcatttgttttctggaccaactcagggcctaagtatttccgttctcctgtttcgtcccaatgaattggggaacgacattttctgccatagagcagctcataaggagccattcctatggtactttgataactattattataggagaattcaatcagaggcaaatacttactccatgaccctccaaaatccatgacacaagctcgtaacaagtcttcaagtatttgaatagttcgctcagattgcccatctgtttgaggatgaaaggctgtgctaaatttcaaattagttcccatagccttttgtaaactcacccaaaacttcgatgtaaatttagggtctctatctgaaacgatagatttcggtaccccatgaagacgaacaatttctttcacatacaaatcagcatactgatccactgtataggttaccttaacaggtaagaaatgtgctgactttgtaaagcgatccaccacaacccaaactgagtcgtacattcctgtggttctaggcaagccaaccacaaagtccatcgcaatgtcttcccacttccattctggaagtgttaatggctgaagtaatcctgccggtcgttgatgctcagctttgatttgttgacaggttaagcacttagtgacatagtccaccacatccctcttcatcccataccaccaaaaatagggtttcaagtcttgatacattttggtggttcctggatgcaatgagtaaggagtagtatgagcttcttccagaatttctttcttaagctcattgatatcagggacacacactcgtgctttaaacaacagcattccactgtcagaagctgaaaagtccttagctttgcc

SEQ ID NO: 363855 - DNA, 804 bp, Cannabis indica
atgttggtgtgctgtatgaggatgttatagctttattgtctaaattttttgggaacagtttgtctcatgtagctcactttctttagcaattcatagtttgacaagcatgctcttatgttagacgattagccatcctgatttgaggaggttcatgcgcggtttgtaaatatctgcatcgtaaattcgttagtgattctaatcactacgtcaaaaaaaataaatattattttatgagtacaaataattatcatataaatatatattaaaaaaaaggttggatgtcgttgttacaagtacatcatatatgttatgcctataatcacaagacaaatttaagcgcaaatgaaatctccctctaaacttatataacaacaaatttgacttgtacattccctttggagttgctctgaaagcaatttcttttttttttctttttttttgtgaagtttctctttatataattatgtctattaaactaaataaaaacaatttgggtttcaaaaaaataaaaaaaatcaaaataagaaggaattagaaattctcatccctttttggacaacattgaaaataattacaaaaaatataattatgaacaagttatatattgttgatctcgcttctcgccaacaacagtgagtcaaaaataaagcaattaaaaaagataattaaaagaaagcaaaaacagtaaattaaagtgaacaccagattttaaaaaggtctggccccgtgagtgtagtaatgacctactccccttgtattgtattgatgtgagatgaaggaacaaagtgttcttcctcttgaaag

SEQ ID NO: 363856 - DNA, 503 bp, Cannabis indica
ggttttctgggtaaaaccagctaaccggttttacactgcttgtaaaactggttacccggattttacagcatggaaaactggtttttcagcttgtcgtttcgtgtatgtttcaggtttctagttggttgattccctgctagtttgggatattaccatattaagttgcagcggatagggttttggttttaaacctaaatctcggttgtgatttagcgagtcacttttgcatgttgttatcgatgtgatttaggaacctataaatcgtcaagcagtcgttccactgctgaattcgaaattgaggtaagattactataatatcatgcatatgttattacttattcagcgtacatgtgttattgcctgttaaattacattgatagcagtaatagtatacatagagttgtattgattactgataaatgtatgttggctaaaatactgatcgattctgtcacatcaatatggctagagtatgactagcatattgagtataggctgacatt

SEQ ID NO: 363857 - DNA, 671 bp, Cannabis indica
ggattttttcttttagacttactttaggggacgttttattttatttatgtatgttagtgtaattaggtaaatgattctgattgatctagttttacgattgtaatggaatttgctggggaagatgatatattgagttattggaaatgcggaaaggtgggaggagttagtgccacggaaagtgggaattctgtgccttttgtggttaaattgtgcctttgttggggtttctttgtgccatgttaggtggctttactgatatgaaaagggattttgttgctgttttaaggtattttgatgtaatttgtatcaagtatcttacaattaggattttgacctttttaattttcttttaattctgtggttttgaccttatctagtaggatgatttaattatattactgaatttgtgggatttcaatgaaattaattggtaagaatgactttatgaggaaattatattaaggctttagttggaaagatttgtggaattttataaaatcagttttaatttcattattagtgatttgaagaaacaagtttaattggtatcaagggaattggtaattatgattttggtaataatgaattcgatagttatgaattggtttaaatggtttgattttcaatttttaaaagatcccgaatgtatttatagaatggtttttacaatt

SEQ ID NO: 363858 - DNA, 739 bp, Cannabis indica
tgaatgccctagagacaactggtgttgagattttctatgacttttggaaggccaatcccaaggcaaactttgattacttgggcgattcaaaagacatgtttctcaagtactgcactgctcaggcggcctatggggaattcaaggcgaccacttccacctcctcaactgaccaaagtgttgaagtgcccccggctcagacaaatgatccttcagctccagctgacccagttgacccgtacaaagagcctgggactccagttgtttgaatgctttttttttctatctattttctatctgttcggccataaggcctttttttaaggcaaagtgaccgaccaagaggtctttaaacttagaattaatttttaattttcagacaactagctgaccgggcagcctttaatcctgggtttgcatgcttttgttatctttaatgaatttcattatctgtttataatcatcgtgcaattgtgtttgttttattttttaccaaatgctttgtacaggtataggagcccccaagtgaccgagcagactcatgactcttagttagtttttatactttttgcaagtgtgcttttttgtctgttcgggaatttgggctcgaccaaaccttttgtacgcacttgatggtaaattaataacatgctatagattcgactcaatttgaattttgaaataaacatctttattcatttattgatcggaaatgtgtctattaccgtagtaacttacatca

SEQ ID NO: 363859 - DNA, 630 bp, Cannabis indica
aacttgccaacaaaaaccaaagaagtgcaaaccttaactggtcaaatcgccgcactcagtagattcgtgttaaaatcaacggacaaatgtgttccattcttcaacctcctgcgaggaaacaaacagttcgagtgggcagaagaatgtgaaagagcttttcaatatctaaaggcaaagcttgcaaaacctcccatacttcttaaacctctagacggtgaggagttgggaatatacctagctgtcacagaacatgccgtaagtgccgtgctgatcagagaagaaaacagcgtatagcacccagtctattacattagtaagagactcatcaaggtcgagggccgatatccgttgattgaaaaactcgccttctgcctcattctaacaacaaggaagttgaggccttacttccaagctcatcctgttcgggtatataccgaccacccgttacgacaaataatgcaaaagccagatgcttctggacggttactcaagtgggcggtagaattgggtgagtatgaaatcaacttccaaccccgaacaggaatcaaaggccaggccttggccgactttgtcgtagaatgcacaggcaaagaagaaagcataccagaaagctattggaaattattttac

SEQ ID NO: 363860 - DNA, 591 bp, Cannabis indica
ctctcactataacgtaagtgttacttttagtatgcttggtattgccattaattgttgtatatgtgatacgcagatctttgataaaatatgcctcctagaataagaaagtcgcgtgaagtggtacttagagaaatcaagagcatcttatcgcttaagattgaccatgttttgggcaaggaagataaaatacttagagctctgagggaattatcgctatcaatggagagattaataaaattgtaagaaaacggggagccttgatctggtcacaagagaaatttttagtattaagggtggcattatctcacgtccccgaattactttatcatatcgatgaaatttggcataataccacaaagaatgttgaggagacaactaggtacacaatattgatacaggagttagcaacgaaattccatagtttctcttttgagaaggcttatactgtagaagtcaatggtgtggaggaaccatgcatcaagaccgtacggtacaaacttagtgataagagtaagaaagatattatcgattccattgaccctacaactgaacgagactataaagaaacaaaaaggcctgactatttcgagg

SEQ ID NO: 363861 - DNA, 794 bp, Cannabis indica
ttaaactacatacttgtgagtagatctaagatcctggtaaaataaattccaacactactgacaactgaggtaaaaagtttcataattagtagaattaaagaaacaaaatatttttcagtcatactagattgtactccagatgcaagtaaggatgaacaaatatctcatattttaaggtgtgaatgttttagaatgtccaatatttgttgatgagtattttttagagttcataaaaatttatgacacgtcagggcttggttttcttaatgaacttttagatgcgttgaatattcttggacttaatgttgataatgtaagaggacaatgatatgacaatggatctgatatgagagaaaagaataaaggtgtacaaactaggctacttgaaatgaatcctagaggattttatactccttgtgcctgccactctctaaatcttttactttctgatatgactccttgttgtccaaagaccgtatctttttgtggtgtggtacaacgcaacaatcggcggcagcacctcctcgaaccaggatagctcatcgtctaaccgaagggcatgctttaccaaaccatgcgctacagaattctcatcccgagccacatgggacaaaactaccccaaaaaatttagacaataaagttataacgtcttcaaatagcaccacatccaattgaaaaccccccttcccgttattaactagttgtcttcagagcaaagcgaaactgaaaaaattacaacaccaaaccaaaaatacagttgtattagaatgacaatcttcaaaataaaaataa

SEQ ID NO: 363862 - DNA, 688 bp, Cannabis indica
aaatttaaaataattattaataaaatcatttaattatttttatataaaagttattttcttataattatttattttaatttttatttaaataagtaaaactatattaacttattaatacattatattttattagaataataaaactttttaagtatatattttaatatgtacttatggtgagatgggactattgtgaatattaaatttatacgttatagatatttaattggttctaatattattattatttagttttacatatttttgcactatgtaatctttgtcaaatctttaaatctaaaaaaaatctttaagttttttaataaataaaaataatatttatttttagatttttattttacattattaattttgttgaatatatctttattttctcattttcacatatttttatgtttttagtaatatgagagtcatttcacaaaagtctcacatgatttagaaactattatgggtgatataattttacattaaatagatcaatattcttttatttttgtttgtcacaaagttagcataatttattttctatgcgcgtgattgatgaacttattcttacctaattagttttgtttttcaagtgtatgcaaattgtatttttgtattttttcaatctttatcaagtttaaaataattatcaaaaaaaaatttaaaataattataaaaa

SEQ ID NO: 363863 - DNA, 700 bp, Cannabis indica
accaaaccatctacatcaattctaaccataatttaacttgagaaaacacaacaagcaatcaaagcaagatcagcaacaataaccctcatttaatgcaaaattcttaactttaaacttaagaaacaacaaaagaggaactagaaaacttactgttgccctcaattttgtccaaaatacgtggactaatacgactgcaaaacgtggatttgaggaatatggttctaagataatttgacttagtctttttagatcaagaatatcagcatgaaaatacctctcggagaagatatgaggggtccacgtactcctagaggacagagctatagcaaagcacctccgggaggtaccagaccccatttgaacagtcgactcgcatttaatgccgcatgggagaaggcgtattgaaacttccataagtattaagtctaacggcgtaacccctctcttgcaactattacgctatgataaataagcctagtgatggatactttatgagggatcacatcagtcaagaagggataaaggattatatctacctaacccctaagatacctaggatatagaccatgtatttcccattttatatctgctgggaatgtgtgcccctactgaaaatatacagaaagacatgtagtttggttctagggatcaccccataaaaacactataaataccccccaaacacattaagatgggggtc

SEQ ID NO: 363864 - DNA, 515 bp, Cannabis indica
aaaatcagagctaaacttttccttttctataaatggaaagttgcacttactggccacgatgctgtaggcacataaatagaaattcttgggctaattaaagatttactagttggctagggtcttgttcagactgtgttcaagctgtcaataaggtgtatattgattataaatacaccttataacagctaggtttagtatctctttcatacacttcgaattgtattcatatcttagggaaagagtttctttgttttctagagaagagcttgttcgactgttactctggttatttgtattttgtattgtgttgagtctgtattaaaatctacaaagaagaagaacaatagtgctacgtttgggagaaggtttttcaaagctttcaagagatttctttttaagtcttgcatcgggaggaagcaaccactcttcaagtagatcgaagggagttcgagcacttgaagtctcatcaagattcgatttaaagatagaatacatcaagcttacggcatacagca

SEQ ID NO: 363865 - DNA, 527 bp, Cannabis indica
gtgggtgtaagggcccaatgaaggcttgaagcggggacgttacagccaggcacgagatcctaagctttatggacgcatattcggggtataatcaaatcaaaaggcatccaccagaccaagaacatacaagtttccgagcaaatttgggtctatactgttataaggtaatgccatttggtctaaagaacgctggggctacctacctaagattggtaaacaaaatgttcaaagatcacatcgaacgaaatatggagtatacgtggatgacatgctcatcaaatccaggaaggctgggggcatatagatgacctgaacgaatgctttaaagtcctcagaaaatacaacatgaaactcaatcccctaaagtgcacctttggagtcggattgggtaagtttctcggttttattgtcaatgcctgaggtattgaagccaatccagaggaaattcaagcctcgtggatatgaaatcgcctacaaaaactaaagaagtccaaagcttaattggaggaatgccgcactcaatagat

SEQ ID NO: 363866 - DNA, 598 bp, Cannabis indica
ttaataaaagttaaaaaaattaatgttaattaaagctgaaaaaaatcataggaaacccttatagagtcggttatttcataataacctacgccataggattcctatagcgagaattatttcatacacctttgccgtcgcccaaaacagcgtagcaaattttaaaaaaattaacgctgaaaggccttaaaattgcatctaaataagctcaattttctagtagtgttacatggaaaacgatatacatagatattacaaaaatcttacttttaatcacaatagaacttgtgattaaaagtgaaaaatttgttactaattataaattatcatttctatgttgtgactaaaaggtccgtagctaaaggtattagtcacaagaatcacaatatttgttgtgactaaataagtttttagtcacaataattgttatgactaaaactaatttagtgagaagttattttcaaatacttagttttagtcacaagcagggtcgaccctaggtataggcgggctaggcccgtgcctagggccactcattttaagggcccaataaaaaaaatacttttttaaaaaaatatacatatatttttttaataatttt

SEQ ID NO: 363867 - DNA, 656 bp, Cannabis indica
tatcatcgatgaataacaccaaatgttctttattccatagaatatcgagtaaacactatttaattttttaatgctaattattttctatattataacttgaaattattttatactatcttacatacatcccaacatacttttttagtgcacattgggtgctaaagaacgttgcaccaaggaaaattattcatttagaccctatacgtagccacaaagttctccaacaaattattgaaatattgaaaaggtaataatttaattactctttatgtaacaaattttttaattaactaataaattgaaatgttaatataattcttaaagtagagcataccaaattataagggcatcaattgcgtatcttgggccgtggccaggaattccactagcaaattgtccaagacaacctaaaaactaagaatgttgtttttatgttttgaaatacatgactgacatcgtcgcacgagcaaactccaaccgttatatacaagatcaaaaagctataagtaattattaattatagtatttattgtgttaacaaataataatatatatatatatataaactaatataaatttttacttttttttacagtttggagaaaagtagacatacaatctaaaaaccgaattattaccattacagcgacagtgga

SEQ ID NO: 363868 - DNA, 1069 bp, Cannabis indica
tttgattcataatctcacacctttttcttttacataatctcacaactactttttttgttattcaattcctaatgtttgattcataaaaaattccttctataaaaaaaacactctttctatattctgtaacgtaaaaaaaaacattcacatagatatatagttatgaatacgtatacatataaataatttaaaaattatttaatttattattattaatttagttcatatttattattatgtgttttcttatataaataattaattattcatggatatttttatagaaaattcattaaaataatagtgaaatatcaatttataaatttatgctctaataaaatattaaaaatgagagaattaaggagaaaaaaaaatagtttcgaagagattttagatcgccacctcaccgtctcatacttctcctttatatatatagatctgaatcatattcatttaaaaatataatttatatatatatgttacctcataaagtaaccatcttcattacattgccttatcaggcaagtcaatgttttaatctgaaaatcctatattgcattgcctaatcagacaagcccgtgccataacatggcaaccatatatcgcatagctgcatcacctaattaggtgagtccatgccaaaaacctacacccatatatcatataattgcatcacctaatcaggtgagtccgtgccacaacctgtcaccaatatattgcatcgcctaatcataggagcccgtacctacgtcaagtacataattgcatcacctaatcaggtgagcccgtgccacaacctgacaccaatatatcgcatcgcctaatcagacgagcccgtacctacgcctgatacttataatatgtcactgacgcccgtacctacgcccaatacgtcgccgagaagaaacaatacaacgatctcattcgatgctataacctggcaattttcatattactaacgcctgtacctacgctcgatacatcgcttggagtattcggggtacaatcaaatcaagatgcatccaccggactaagaacatacaagttttcgaacagatatgggtctgta

SEQ ID NO: 363869 - DNA, 564 bp, Cannabis indica
ctcagaatcgctctccactataacaaaaggatgatgtcttgagaccgccgcctccaaagctaataaacaagccgccgcttccccaataagagagtcagcacactgaagttccttagtcgccacccacaagatagactccgtgtgatccctcgcaatcgccacaacacacatagaatcacctccgaccctaatgtcgcagttgattttaatccaatcttccggtggaggggaccaaataggagaaccagcatcctggagcggcctggacaaacatgacctataatctacgtagcaacaagagatagagtcaatataatgcattaggctacccatagtgttgttatggactttgtcattacgagctctccatatcatgtcaaccactatcaaagcatagataaataactcatcagtgtccacccctatggatttaagattccagataaaactaacccaatcccccatgtgagctcccgaatccctaatcgacatgataccccacgcagaagaccgccagaggtgggaagcaaaattgcaatagagaaagaggtgctccatagtctc

SEQ ID NO: 363870 - DNA, 804 bp, Cannabis indica
ttctgatcatattttggaaaaagtcgtagcataaaagttttagatctctttttttatctttccaacgcatcttgaattagctcatttagagtttgtatgagaaagttatgcctattttactgagagggctcgaagtagaaaaaaatgggctcagtggccgcggcgaaggactatagaaagcccgttttttcactattctacaaccgccgcgacaaggatattggccgctgcggcgctgacttcgtacaagtcaagtataacttcgtcttttctcgttttttggctaaaaaactctatttaatgaaaggggtcgggaattatagaggggagaccatatggaaccctagaaacacaagaagaaggctcttggagcgagcatgggcaatccgcgacaatcctccatgtagtttctttctcttctcttgatttcttatgtttttatttgtgtttagttttattatggatttgattatgagctaaattctctattcagggatttgatagatattgacggagattattctatggattaatgctatttgattgttcttcctttctctattatggtgatttatttatatttgtgcttattacatgtgtttgattgactaccttatgcatgatctatgatctcaatacaaaatctgagaagtgtgaatagacatatgtttggatgtgaaacgagagtattcacatagcttatgtaacttttagattattgcttaatgctaattgtatgttgttccagttagggctgcacacgggtcgggttttcgggttttcgggtggtcgggttcgggtttt

SEQ ID NO: 363871 - DNA, 556 bp, Cannabis indica
gatagaaattgcaagctagcatctaatcgcctcacaccactcccacaccttctggtgttcaaaactttagggatagatgcttgatcgaactaactgctcctagttcgatcaatgctgagcgacccaataatatattgtaagccgatggcaggtcgacaactaaaaagtcttgcataattgtggcagataagggtgcctctcccaaggtcaatgcgagctcgattatgcattgactggcgatactgtcgccagtgaagccgcacagatttaccatgcaaggcctcaatttggccttttcgagccccatcttcttcagcgtttccttataaaggatgttcactgaactcccgttatctatcaacaccctctttatccttttattggcgagctagatagtaataaccaatggatcgacgtgaggatacctgacgttcttttgatcttcctctgagaatatgattggaggttcttcaatttttaccttcttggaaggtctggagcaaataccgactactcattttttatttctttcacatacctcttttgggcgttgttg

SEQ ID NO: 363872 - DNA, 653 bp, Cannabis indica
ttcgcatcctgggccttggtctaggttgggtccgagtctcaagttccaatcccaatctgagtttggattcagttatgggtctaagtccttggttctgatcgtggtctgggttcgagtttgggtctgggtccgagtctagctctgggtctggttctagttgtcagtttgagtttgggtccgagtttgtgtccgggtttgtgtctaggtcttgaccccgatcttggtctaggttcgtgtctaggtccaagtttgggtgccgagtgcgggtccaagtttgggcctcggtcaagatctcagtccagatctaggtccagcatttcgatccctgtctgggtcttggtccgagtacaggttcgtatcgagatcccaatctaggtcaaagtcagtgtttcggattgggtcccagatttaggtctaggtccgtgtctcaattccggtctgggcacaggaccatttccgggcccgacttcaagtctcagtttgggtctatggctaggtctgttttcgattttaggtctgggtccggttccttgtcgcggtcctagtcttgttcttgggtcctcgttcggcaattcttgttcaggttctaattttgggtcctaggtctaggtctgggttcgggtttcgttcttcgtctaggttctggtactagt

SEQ ID NO: 363873 - DNA, 545 bp, Cannabis indica
caaatggaactagaaccgaactaagagtaggaccaggacaaggacctaaacccgaacccgaacccagatcaaaacctagacagagacttaaacccgaattgaaactaggactcaaacccgaaccttgaccgagacctaaacccacacaataactgggacctggacacataatgaggataaggacatgggaaaaagtactaggaccgggccctaatacccgaccaaaacctggacttgaacttaggatccagctcgtgacccggcaacagaaatggaaccagaccgagacccgagattgggatctggatctgcacccagggcttggacaaaacccgtattcggtgtctggatttgggacccacccctgtacccgaaccctgacaaggacccgaaccaacacccggacctgtacccactccaaatcccgaaagtggacccgaacccgtaccctgtgacccaaaattggaaccaaaaccagaagttgaccgggattggaactaggacttggacttcgaatcataactaaaattggacccagacctaga

SEQ ID NO: 363874 - DNA, 596 bp, Cannabis indica
acggactaaccgatttccatcgaacggtcaaaaagtgaaggaacctcgcaaatgttcaaacagtggcgcattgggacacaacaaagctacatgcaaggccagggtttgagcatcatttttgttttttaattgcatgcattattagtatggtttatgaaatctattttgtagttttttgtgtctgtgtatgttttaacaacatttttctccaatttttcgatatttttcgatatatatggatgactttatcgacatgcccacagcaagagtaacgaagcgctgtatgtggttgtttaacgacatctctcgatatatatcgatgacattatcgacatggcaacaagaagaataataattctttgtctatgtttaacgacattttcacgatatatatcaatgatcttgtcgacatggaaagaacaagaaaaactattttttttagattttttataatggtgatatttcacgaaatttagcgatatgtagtgatgtgaaatgcgagatggatggaacatttattttattttggaaaaatgtcgatatattgcgacatttaacgattacatttgcgacattttgcgattacagaaattaaa

SEQ ID NO: 363875 - DNA, 1197 bp, Cannabis indica
tgttaatgaaacatacttggtagtaaatctagatcctggtaaaatatttccaacagtatgaaggtataggcttataggttatcctatatattctaatatttgagcatttttaattttttttaatgtttcaatctttcttattttttctttatttttttaattttaaaaaatatagtatcactattttttataaatttatatgtctttttaaatattttttattattattgtagtttttcataaatttagtcttcattttttaaatagtcaaaatggggaattaagcatttttttttacttttagatatcggttttttgtattttcagatcatctccaatggttacaccaatttagtgtagaatctacatcaatttagtgtagaatcttttacttttagtgcaacaactctaataatttacactaaatatcactccaaatattctaccaaataaatatattttacttgaaaaatttcatattttatactatttacattaataatctaaaataattaatttgtgatataattatattatgtctactagtaagaatttaaaatcttaaaataatttaataaaataaaataatttattaaatcaattaagcattattattttgtgataaatttttatttgaggactaaaatgtaagaatattttttaaaataaaggttagaatgcaaaaacaccaaattggtgttgattcaaatctaatatcattaatggtatagaatttggtatacactaatttggtgcacaatttggtgtgccattaaagtgaaataatgtgaagattctacactaatttagtaaaatggtataccattaaagatgctctcacataatacatttatgataaaaatataaaatttaaaattattaataaaatcgttaaattctagcgccaaactatttcttattcattgccactttaaaattaacacaaaagttaatgtaacatttataatataataaatagatatagatatttaggcataatttaatatcactacaataaaaatttctacttttagtgacaagtttttagtcacaatataatttttttgtgactaaatgtgacttttagtcacaacaaaaaattatttgtaattaaaatatagcatttaaacacaaattgtcactaatttagtttttagtcacaataagtattgtgactaaaaacacatttagtcacaa

SEQ ID NO: 363876 - DNA, 972 bp, Cannabis indica
ggcaatgcaatataggattatcaaattaaagcatcaacttgcttgattaagcaacgcgatgttatgaagatggttgctttatgaggtaaaatatatgtaatttatatgattaaatgaatatgaattctattattggtataatagttttgtattaccaaatatctgtatactgatatttattcgtggcagatgccggtagtgatttggatttatcttatgaatagtgtgtgacgatttgattcttattgtgtataaatgataatattcgaataataaactatatgattgttattattacttttcttgctgagttcttgtgactcactggtgctatgtggtgcaggtaaaggcaaagaaaagcttgatcaaccacgaggtgaaaatcttctccagcaatgtacatattgacctcaccggcctgcgtgccagtttccaggagttgttttagactggttgtatctgttgtgtattctgattttgtgtttaaatggttgtcgtatatatttctttagcaaaactttttataacagggatccccgaaacacactttttatgctgttataatgttcgtttttagtatgtcactaaaagccaaatagaataactcattaaatggtaattatgtcaccaagaaccaaatggaataactcattacatacagaattaatagagtatacttataactcgctgactgcacagtcttaagcgagacaagaatgtacaaactatcaatttttgtattgacaagaaaccatcttgtctcgaaaggcgtcatcccacgggaaacatagacaacacatagcgaggcatatacctcgctgtaagtaaagaagtatcgacgaggtgaattagttattagaacacttagcgtataatatctgttataataactaagtgtaataacttgaaggacatgattgtccagtctgcaatgacttattgtaacgccctaatctatagggacgccacgtg

SEQ ID NO: 363877 - DNA, 569 bp, Cannabis indica
ttttttttttttttggttgtttaatgctataagtagtgaggaactaattaaatgatttttccacaagttattgtataatcaactcaaaataacagaaaaaaaccaaaacaatggaggcaaaaaacaatggcaaatgttcaacagcttatccaatgaatagtggagatggcccctatagctatgccaataactccatttttcaggtgtgttaatttataattacatcaacatgatatattgtattatttatttacttccaaaaaaaattatattaatggataatttcataaatacataaaaataataaaaatattacaaaaatattattatacggattttaaatattttcacaggttttaaattttatttataaaaaatataattttttaatatatttttatgttgtactcttattattttgttgttgattttttattacttatatattattttttaatattattttattattatttggatgttatttttatattatatttttattttcttatatttttatagaataccgaaaaatataaataaaaataaacataaaagtgtaatttttt

SEQ ID NO: 363878 - DNA, 712 bp, Cannabis indica
taccagtatcggatgtatggagtctacattggaagggaccgatattgatcttggataagatatcataaatttaccattatatctttctaaatcaatatcaatagttgatcttaggtctatgaatcttaatcatgatatggttaggttcggcttagttgtattatttatgttctttaagttgttcgtgatagctaactgatggttctagtggatatttacatcttggggacatggtagctcaattgagtgggagcgctaagcatagatatagaatctatagcttctataagtatttagaagtaaaacgatgatttcctttgagcttggctgaatagacataaatgatagagatctcatttcagtaattatattagtttatagaaatataatttataggtagctaagtgttttaaggataaaatacattaaaggatagaatggtaaatttatccctattaaatgtagatcatctatagagaatctttgactattaggattgtaacaatagataataataacgtatctatattgtggtacatatagagtgttctatataattgagagtgctattcaattctaaatctatagtggcgcaaggcgaaattaataagttaaagaattgggccaagatgcaaaatgaccctaaatctaacaattaagttaataaatgtccctttttataaaaaaaataacaaaatgtcaattctgttaa

SEQ ID NO: 363879 - DNA, 705 bp, Cannabis indica
ggcacatattcccagcagatacactaggaaatacatgacctataccttagatatcttaggggttaggtggataaagtcttttatcccttcttgattgatgtgatccctcataaagtagtcgtcactagccttattaattatagcgtattagctgcatcagaggggttacgccgtcagacttattgcttatggcagttccaatacgttttctcccatgcagcattaaatgcgaggtgactgttcaaataatctcctattcctcccggaggtcccttggcgttcccctagtctctgggagtacgtggagcttccatatctcctccaggaggtactttctcgttgatactcttgatctaaaaagacttagttgattgatctaagagccatattccttagatccacgtgtcgtagccacattggtccacgtgttttgggcgaaattaggggcaatagttagattcagtttttaatcatttttggtatttttcatgaatttacttagttaatgcttaactaattatgaaaaaagttaagtgttgttaaaatagtaaaatgtatttttgtaatatcatttactgtctatgatataaagtgaaataggtgttataatttattggttgctgtaggtatttattataattaattgtgattaattaactatttatttttattttaattagaataaatagtattttagtaaaattt

SEQ ID NO: 363880 - DNA, 514 bp, Cannabis indica
ggcataaaacccaacaaggattacttcagccattaacacttccagaatggaagtcagaagacattgcgatggattttgtggttggtttgcccagaaccacgggaatgtacgactcggtttgggtcgtagtggatcgctttacaaggtcagcacatttcttgcctgtcaaggtaacctatacagtggatcaatatgctgacttgtatgtcatagagattgttcgtcttcatggggtaccaaagtctattgttttagatagagatcctaaatttacctcaaagatctgggtgagtttgtagaaggccatgggtacgagtttaaagttcagcatggcctttcaccctcaaacagacgggcaatttgagcgaactatttatttacttgaaaacctgttacgagcgtgtgtcatggattttggagggtcatggagcaagtatttgcctctgatagagttctcccacaataataactatcaaagtactataggaatggctccttatgagctgctctatgg

SEQ ID NO: 363881 - DNA, 1116 bp, Cannabis indica
aattcgtcaggtggggttatacccaataactccacccagactagcagttctgaccaagtgctccgccaaaccaaccagtcactgaggcaacctggtgtttcagtattcaatagactgggaacggctcatgatcttagagatgatctaaatagaaggagagggttagacgaacaatatgttcaaccagccactcagcccggggttcgcatttaagatccagctcaaagagatcttgacgtgacactggtcggccaagaggccgaacaagttcatccatccgtgcgaacacagttggatgaactgaaaaatatgttccaaggcctggccggtcaaacgctcaatgatctcgagttggaccgagcacgtggatccccatttactcaagagatcaatgttctagagctaccccacaagttcaagatgttgacctggaagatgtataccgggaaagaagatcccttatcacatcttaagtattttgaaatgcaaatggatttgcaaggggtacgaggagatgtgtgttgcagagttttcccagccacactctcaaaagccgctcaacaatggtacttcaagctgacaccaggaagtttcaattcttcgaaggccttcttcttggaatttcatgcacaattctcttcttcacgccaactcccgttacatttagaagacctggtcgaagtgaagcaaaggctaggagagcctctccgggcttatataagcagattcatgacggaggcgacaaaagtagtacagttaactgaagaagggaaattagccgccgaaattcttggagagttgtggaaggacatcaagaaatgtggcccagtagattctatgagtgactttctcaaccacgcagatggtttcaacaagctcgaagaggccattcaacgagcagattttaagcctaaattgggccaatcacaagctccctcagctggaacgtctgttcaaaacccccagtatcctagtagttcaagctcaggcagtaaaagatttaacaataacaacaaacaaggcaatggaaaaaaagggaaagttcactaacaaagccgaacagacccctagagagaatccctccaaattcactgctttctctatcctgactgacga

SEQ ID NO: 363882 - DNA, 577 bp, Cannabis indica
gtaataaccctaatctcggttttgtaatttatcataaatataatattcaatataagcgccaccgtacatatctctacgtgcaactactgtcttacctgatgtcccgcaaacatggagattctaaatccacaggtgctcctgaccaagtgctgataatcctagtcataatttctaagattcacaagtataggattaatccctaaatccactttcacataatataaaattgacattcaaaatacaaataaacatatagagctcaaagcgatcttcccaacgatataaagaacatccaaaacggagtcctgagtcaaaagttatggccgaaataaaattcagccttccctgatatagtccaaccgaaattccagttggaacagccttgaacaaactggaatcccggttgtctgagcaaaaaaacacgacaaatcttaacttttaagcctccataacctactcaaattttctccaatcaccacaaaacttgccagagcatcaacatataacatataaacatattttacaactcaaacacaatcattgcaccaagaatcaaaaagtgtcattgttgagcaag

SEQ ID NO: 363883 - DNA, 668 bp, Cannabis indica
tttgagccagaggcccctaagttgtctactctagtagagacagtgcttgttaaaaattgctgggtttgcctcccaagcctattttcaacaagttcatctcttttcgagcttcctcttttcggatgaacacctaagccctttcgctgaactcagtgatgttcttcactggatgaccctgtaagtcgtcccacaatttgcccccactggtggatagatcagtagtgatccccgcctaaaggacagtaagttgtgtactatcatctagatttctaacccttgcagcagccgtgctaaaacgacttaagtatgccttaagtgtcttgactggctgttgctttatattggttagcgaggacgcctcgggttacctatcccttgcgacctggaattgttttgaaatccttggacaactgttcccaggaacttatggaatgatgattaaatttgttgaactagctgcttgctgctccaactaacgaggtgagaaacaaaatacaacgtaaattgtttgtcacattactaactcgcattattctgttgaagttattcaaatgcaagaccggattagtaatcccatcatatgatgagacgtgagggtttttaaatccctggggaaaaggagtattcataatatctggatggtgcggcatgagctccttgtctgagtc

SEQ ID NO: 363884 - DNA, 816 bp, Cannabis indica
tttagctcattcctggtggttcctccaatatgaggacctccggagatcatagtgactcttctattaggccgaggtggtagtccgggcatctactgaatgggcactcttccgggaggtgcctaaccctcaggcgtaatcccgtttcctccctgaggcactgggccttcggtttgagctggattcaaatgtggcagcctattttttatccactcatacaagtggcctaatcgaattaagctttcaattttgtcttttagatttttgcattcgtttgtggtatgaccaatatcattgtgatagtcacaccttttgttggggtccctctaggagctatccttatacaaagggggaggcttccagtaatgcatattctgccaagtggcaaaatataaacgttcttaagagtttgtgagttcggtgtactgtgtgtattggggagtataccccctttgctgcctcttgtcctcagtcttgtgctacctttagaagacctcttgctctgggagttttgttgggcccctaccatgttggtggctggtgtgggttgggacggaagttgaacgctcactccagatggattgcttacgagcgttccgaagtgtgatagtgctggggttaaggtaagattctggttatatcccgaagtagcagagaactatattatgcttgtttgaggagcagtagggagtgcaaccccaagaacctgcgttcctgttgcatatcctgatacttctgtcgggtaatatcccccgtaagacactatttgggcctcttctaggttactgtatttctagactctcttttaaaagtcttgga

SEQ ID NO: 363885 - DNA, 678 bp, Cannabis indica
aaaaagttaaaaaaaaaaaaaaaaataaagtgcaaaatcgggttggtcggtttaattgggcgggttagacctattttcaacccgcccaattaacagattgggcggtttgtaattttttcgggttatttcggtttgtaatttttatcggttttttcggttcggtttgggcgggttattcggtttaggcggtttataaatttttttgtacaggcctaaataagagtgtacccgtctatgtagataatactctatgtacacatggacaactaaatgcttcacagttaactatcaaaaataaataaaaatagctaaatactaacacaatgcaagttttgaaattttatcttgagtaatttgtagcatgaatatttaagtttaactcccaattgtaaataaataccttagtttaatttttggcggtaataatatttaagttataattttagaacttctgtaggtacttggttgttaagtgttaagtaaattgccacgtgacaatctttgattggtctaggtcatgaatttttatttttttttaaaaaaaaattaatttaaatttactaataagaaaatgacacgtgaataataacttgacattttacggtcagatacctattagaatatttctaattaaggaaataaaataatattattgattctgataaatgaatattttat

SEQ ID NO: 363886 - DNA, 1036 bp, Cannabis indica
caacctcctagtagctgaacttttcttgcccataaagttcctgaaatggttaagaaaatgttccactacttcagagtagtcatcaacaattttaccatttgactcaaacattgtaatccgattttccagtttcctttttttcattaaagaatggaaatacttggtgttatcttccccattctacagccaagaaactttactttgttgtcgaaggaaacaagagtattgttccaatgcagcagcatactcttggcctagcctattctcttcctgaagcaagtggctgttattaggatcgctggccaaattctctggagctgtaatgaaatcagctttgcaccgattatcgagattcactacatcaccaacctcgttcctgttaaacttctttaaaacatgtttcactctcagcagcttcttctctaagtcaccaactgtattagcatcagaaaatctattctagcaacataacaccctctcacgaaagcaactatggaaggaccaatggttacaatacctcaagggttaaatgcccacattgccaattctattactcttgacgatgcaataactatgatccgagatacaatcccacttgaagcaggcttcggggttggggaattgatctaaccaatcttcattaataaggacatggtccaatttggagaagattctggttcccatatcatgcttgttagtccaagtgtagacggccccggagcaacaaatttcttccacttggcctaaagaaagccaattttgagcatccttaacgtctttggtcatgatttgcttaccaccattcctatcttggaaattaaatatcgcattaaaatctccaagaattaacaaaggcctatttaacatacccaacgcagccaacttctcaaataacaacttcctctcggcggggcaactgctaccataaaccgcagtgaaatagaactcctctatcaaaccaactatcttcactttgcagtgaataaattgctcattatccaacaacacctcaacatgcacaaacttcgcttgccaa

SEQ ID NO: 363887 - DNA, 691 bp, Cannabis indica
gtcatccagaccattcattcaagcttgaatacaaaataagtttttaatggaaagtatgataaataaaataagactaaactaataacaacgtttttcctcagcgggaccatcctcatccactagcatcaaattgagtttttagaatgtgagaaaataaggggtgggcttataaagtccagtaaaaaatatctagtatcaaatgacccttagtttaataaaagattcattcatggttagcttttaaaaatagaacatctcatcaccattatcaaaatatataaacaaaatagagagaccgcgaataatcacaaaatcaagcatcaaatgtatatcacagcgtccactagacccctaactctcaataccaatcatagaaaacaacatctaaaaactgggtagtcaaacctgataaccaccataataccggggctcaaattcaattcacttcatgtacatattttaggtctttcacctacaggtgagtgcacacatgatctacgtatgatgacacagagactaggttgtgaaataacaatatgcacaaattatgattaacatgtctctcatcagtataaccaaaagcaggcaaataataagaatagcaaaaaaacatgttcccttttattttctagaaattctggcagcataagggttgtatttgttgggttttgtgccctaaataaaacccttt

SEQ ID NO: 363888 - DNA, 1116 bp, Cannabis indica
ttaaatgaaaataaataatctttacataatcaggatcacgtatttaaaatatttacaattgtattgcaatatattagttacaaaatttcccgcttagcgattattgaaaatatagtctgttgtctcgaagatcgtacgcttcaagtctaaccgtcccgacatgtacaatcttcatgtgctcgcatcgcacgcacgcactgctcagccttagccttgcccttacctacatatataaacaataactgtgagtcgacagactcagtaagaaaagtataatcatatcataaacataaattgaattataattaggtgcccatacacccaatcgtaatcctatcccgtgtcccacgcgtagtgagtctagaacgttcatacgacagtactattgaccataatatcaacctatactcggtactctagtcgtactgatgtgatagcctcaatcagtatttaagccaaacatacaatcatcggtatccaatataactctatgtatactaatacctctatctcagtatgttatctaataggcattcataaatatgaatgctaaacatgtaatcacatatgcatattattatattaatcttacttcgatcccgaactcaggtgtgtcggtggaactactgcttgacggtttattggcccctaagtcacaatatttataaaactaataagtgacacgctaaatcacttttcgaggacttaaaatcataaattaaagtttcccaatcaatggttaacatggcaataccctaaatatcgttaaaacatgaaaatctagggtgtttaaaattgccacaaccggtaaactagatcccaactggaaaatcagtttctatggattctgcctggggggaatcgatagaccggttctacagggtaaaactgaaccggtcgacggttcagtgtagaaaaccctaaaaacttcacacctgattcaattcaaccccaaattgattcaaaccttctagaccaccgaatacgggcacaccaaacataattcatgcaatcaaactaagcaataccctctgaaagtgaaatcaccatagaagagcaaagtttgagctctaaagctcaaacttttgaaaaagctcaaactttgttcaaacacaa

SEQ ID NO: 363889 - DNA, 507 bp, Cannabis indica
aaagcaatttggttttttcccccttgactcaagcgcatttgtgtattgtttccaatttccacgacgttttcactgggatcctttagcagaaagaagattttttctttttgtataattgtctttgaaaatcgaaatacaatagcctcattcccaactaagagcctgcaccatgctcaacttgtttgctaacaaacttcaaaacaggagatgctaagccaaactcaaaagtaatttgtagtcattcataagaataataataataaaataaaatatgtagatatcttgcaggaccttgtgttttgtaaaagttattaattggaccttttattttgttaaatgaaaaaatagatcttgtattttttaaaatagtacaaatatgatcttgaactaaatttttgtcaaaataaaagttaataataatttgatctaaatgtattatgacaaaattgtttacattttctgtgcttgttcgtattgggaattgtcttcaagttaattatattaaaa

SEQ ID NO: 363890 - DNA, 469 bp, Cannabis indica
gaaaacacaggaaatttttttttaaaaaaaaacgaaatttggaattattttcgtttcaggcatattagtttggaattgaggtattttttgatgatgtgtcaaggtattattgtaattgaaatttattaagggatttttgtaattagtttgtattttaagtatattattgaaaaaatccctaatattaatatacatcacaactatatatgttacatatctcatatatataacatttgtattttaacgtgcatccacatcataatatatattatctccacataatatattttatatatgtatcgcatacataaatattctcatcataaatatatattatcatatgttcaacatatataatatatatataactcatatacatgttatatattcaggcctggcccaaggattgggcagcttgggccattgcacaaggctcccatttttttaaatcccaatttttttttttttt

SEQ ID NO: 363891 - DNA, 890 bp, Cannabis indica
atttattctcttttatttattttcacatattacatattacatattcatattactatttagctttttctatatacattgtttaatgtttctatttaattacttattaggtatctctatgatgcaattacagctgaaataatgattaaaaaagttaaaaatatgatgactagcttgtatgctttttatcaaaagattgttgtgcttcctaattcctccaatgatcaacaagcaactggaaatgctactttcaaatccaatgcaagctcaagtagcacatcattccttatcaagctcaggtttgtgtcaagtgaagtagccactaatgattttggataattatcttaatgatagaaaggaaaagttgcttgataatgtggattttgacattctagattggtggaaaaggaatagtagtaagtatcctattgtctctcacattgctaaagttgttttggttgttcaaatatctagtgttgcttctgaatcaactttttctacttgaggacggatatttagaagttctttgtctccaaagacagttgaagcattaatttgctcaaagaattggttgacttgtgagtatcctgctctgttgtgttgagacaatacatgaatgaagttgaagatttggaggtctctgaactacttgaattgggtcaaataaatttatcatttcatatatatatatatttaaattcttatctgacaaataatttatttctaatatattttaattttattttacttctggaggaatcatgtattacaagcataggaacagagacaactaccacaactactagtggcacttcatagttagtcccatggaattgttttactagactagtttatgatattttgaactatgcatggatgtcttgttttgttat

SEQ ID NO: 363892 - DNA, 815 bp, Cannabis indica
atatatatatatttatatgataaggtacacggtttgggatattggatagaaaaataatttttttaattttaatttttgataaaaatattttaaaaaattgagaaaatagataaataggttttggtgtgcatattttcttaataaattaaataattaattaataattttaaatctaataaaatattcataaaatgagagaattaagaagagaacatatagatgtattttaaaccatttaaaattgtcatatcaccgttttatatctttcctttatctatgtaaatatataaattaagtttacaagaaatttataatactaattacccatttttttttattttttaaaaatactagtaagttgcgcgtacgataccgcacgtgtttagtatataaattatttattacattaattaaatttattccttaatatttttagatattatgagaacatctttcacaaaacttaagacttataattaagttaatattttttttttgaaaatataatgtatgtatatatttatatttttctggccaaataatttctctttcagcttaattaattttgttcttcttattgcataagtgaaaaaatttccaattttgtgtgtttaaactatgttatttcctattaaaaagaaaattataatattcctccttaaaataaaaaaaaaaacttaaaagtttttatatcatgctaatttttgtcatgtcatataactccacttacactttgttaatatatatgtatacatataatgtattatgtacaatttttttttttttttgtgatttcatacttgatttggttattt

SEQ ID NO: 363893 - DNA, 908 bp, Cannabis indica
tcgaaaggcttgttttcccaagtactccatagtcaaagggaaccaaaaagcaaaaaccatgggtgccaaaacagaagagatctttgagaattactattaaggggcatgaaacacaagaagatagagaaaattttgctcaagtcattacctctcttttgaagaaagcttgaccgtagaagatgaaggctcaagctcaaacccttcggaagattttatagacatctttcaaccagcacctcaggaattcgaagatggaggacaagcaactgtggatgacttaatagagatcaatctcgggaccgaggatgatccaaagcctgtgtttgtcagtgctttattatctgaagaagagttaccacagtacatacaagtccttcgcgagaacaaagatgtatttgcttggttataccgagacatgccggggttgaaccgaaaggttgctgtgcacaggttggcagtatcaaaagacgctacccctgttaaacaatctcaaagaaggattcgaccagaattacttcccaaagtcgaggcagaaattgacaagttaagagactgtcggtttattcgggaagttcagtatcctacttggcttgcaaacatcgtcatagtgatgaagaaaaatgggcaactccgcatatgcgtggattatcgagatcttaatcgggcttgcccaaaagatgaattcccactccccatcactgagttattgatagacgctaccactggttttgatgccttatcattcatggatggattttctgggtacaaccaaatcaaaatggcacacgaggacgaagagctcactgcttttcggacaccaaaaggcatattttgttatacagttatgccatttggcctcaagaatgcaggggcaacctaccaaagagcaatgaccacaatttttgaag

SEQ ID NO: 363894 - DNA, 580 bp, Cannabis indica
tcctagaagtccctccgaggcggaggaagaggaggaggctgaaccccaaactacgagggatacaacgaggctggggagccaattgatgccgacagaaatgtcctggatgagggcgtggactacgtcagtgaggagcttactgctgcggttcttcacagaaggcaagtgccttgggtgctaggtgggtgagtcctccatccaaggttattgaggcgcgcttggggactctcgaccagggtggctacctgggcgaattggactgctacattcccgcccataataatcctgccacaaatcctgaaaaggggatgtgcgcttggtcgggcactcatgcccagcaaggggcactgatgcctttgcaccaatactttaagaatgtggcagacttcttcggcctctgtccggcccagtttactcctaagggcattaagtatctatcttccctcttcgtcctttatgcctcccagaagtgggatatgccttctccccacgaggttagctggttctttgatttgaagtccacccccaagaatggtaggtcaggatacttctatttctctcaaccagacttcaagtggtt

SEQ ID NO: 363895 - DNA, 953 bp, Cannabis indica
aactggtcgatcctggaaagtggaaaacaatcttttggccatgccttattcagatcgaagaagtcaatacaagttctccaagttccgttaggtttcgagacgagaacaagattggctatccacgagggataaaatacctcgcgtataaaatcgttaactaacaacttatcaagttcctattttagtgccccttgcctctcggaatccaagggcctccttttttgtctctttgccgggtagtttggatcaaaatttaagtgatggcagataatcttacggtcgatccctatcatatccccatgattccaggcgaattgatcctggttagcctctaaaaagcttattaattgctatttgagctgctcgtccaggttcttcctaatgtacacacatttggtgggatttcctaggtcgagaataacctcttccaattcttcaattggttttagcaggttattttcatcttgaacttggggatcatgatcttcatctttcttctcgttttctcctgccaagatcgtcatcaactgatgatcgtcttttctatgctacaactctatgcgatagcaattgcgagccagcatttggtcgccacgcaccactcccacgccatcgggtgtttggaattttaaagataggtgcttgatcgaactgactacccctagtccgatcagtgctggatgacccaacaatatgttgtaagccgagggcaggtcaacaaccaagaagtcttgcataatagtagtagttaaaggtgcctcacctaaagttaatgcgagctcgattatactaaggctagcgatggtgtctctggtgaatccgcaaagattcaccatataaggtcttaatttggccttttcgagccccatattctttagagtctccttacaaatgatatttaccgagctcccattgtctattaacactctcttgatcctcttataggcgagttg

SEQ ID NO: 363896 - DNA, 512 bp, Cannabis indica
ataataattttataacacgttattaaccattgtctccggccaaggtaaattttatttgttaaagttcttgaattattacaaagtcatgatacattaaatatatatttacatatataattatttgactaaaataatttcaagaattcttttatttttttcttctttgttatttatctatagggatattgacagctaaactactctaacttttaggtttgtaacagttaaccacaaaaactaaaattttggcggcataactctctgaaccctggttccgttttgctctgtacaccaccgtccaaaaatcacaattaagtgccacaatagactgtccacgtgtacacccttgtacacgtggcaaatttttagtggtctacatcattttaattttaaaaaataattataaataattaaaaaattaaaaaaaccaatttataaaaataaaaaaatctttttttattctcttttttctctttttctttttctttttctttctctttcttctcgacaga

SEQ ID NO: 363897 - DNA, 622 bp, Cannabis indica
attaattttttttttgaaaaaaacttacctttgactgagctttgtggtggtggcgacggtccgtggttgtggtggcgatggcctgtgttcggtttcgacgagcacgggtactggtgttggcgactgttcgtggtggtttccacgagcacgggtcgaattcaagaccgaccgagagagagagaaagaggaaaaacagagatagatagagagagagggaaaaatcgagtgggaagaagagggttgttgggttcggcgtatgcgtggtcgtcgtcgtcggcttaggtttcgttgttcggttgttttgtttttgggcagggacgaagaggaaaagatggagagagagagtgggaaagacagagagagagggaaagagagagtgggaaagagagagtgggaaaattaaatgtaaggagtattttgggtagaatttgaaaatagtggaattgttttgtataaattagtaaggggtataaaatttgatatggggtatattattaagggcaaaaagtgaaatttccctttgtaaatgtgtgttgttttagtataaatataatgggctttttcatttttacactttaaaacaaatttttttgtatttttacgaaattttacatagaaaccc

SEQ ID NO: 363898 - DNA, 1002 bp, Cannabis indica
agatttgattgataatataaatatatgtgtattttttttttaagaaaatatgaaatttccataaaatagataagctaggacaaaaaaaatttaagatgtcacgtagtttttgttgaacatttttttatatatatagatttgattgatagattgattagatatataattgttttaataaataataaaaagttgaaaaaaaaaacaatagaaagggggaaaaaagaagagaatagattattattattattattattattattaatttagaagacataaataaatatatagatatatattttattattattataaaatatgttacaaatgatgtaagttataaaaatgagaagacaccataatttaatgatacaaaaatatgtggttttgataattaaaatgagagaaataaaacaaaaaaaataattaaatttgaaaaaaaaaataaagagaagaaagataaggaagaaaagatcatttaggatgccacatcaactccttcaaactttcttttatatatatactaggcaactaagccgcgcttcgcgcggtcttataaatttttatttttattattattgtgattacaaaatattagtactgaatgagtggtatattatacaatatactattattattttctaaaaatcatgtattttttgaatgaaacaatttacaataatgaagacattatacaatatacagatactgttatacaatatactgttattatatatatatatattaaagttctatgttttaaatttattttgcatcaatatataaatatttttcatgtatgtaggttaaaaattagttttgcagcttttaaagataatattatatagcaatatcttctcgctcctctttgtatccatttgcaaaagtaagtttataaagatattgcaaaattagaagtaggttttccactattttcatttcttagaattatcatcgatctatattattcaaattatacaaaaactaaagtagcatatataaatg

SEQ ID NO: 363899 - DNA, 469 bp, Cannabis indica
atctttaagccagcaatcaaggcttcatattcagcctcgttgtttgatgcgtcaaattgaaatctcaaggaataataaaacttgaagccttctagtgaaattaatattacccttgcacccgagccctgcttgttggatgcaccatccacatataacttccaagtttctacgtctcggtgaacacgcataatttcttctggagttataccttctattatgaagtctgccaaggcttggcccttgatggatgttcgagggtggtatgttatgtcgaacttccccagttcgattgaccattttatcaatcttccaaaagcatttggttttgataaaaattgtcttaagggctgatcggttaacacctttatggggtatgcctgaaagtatggtcgaagtttgcaagacccgtggactaggcacaaaatgaatttttcgagagggggatatctagactctgcccctagtaacc

SEQ ID NO: 363900 - DNA, 433 bp, Cannabis indica
ggcataaaacccaacaaaaagtacattggcgtttacctttacgtagtgcaatgggaagatcatctgagatttctggatctgatgacgaagatgcaggtgcaggacatgaaacaggaggtggaggagggggcgcctggtgtacactataggaggccgagggagtggtggaggtggtagaggtggtggaggtggtggaggtgtagacattgtgggggtgacgaccgaggcaggtgaaggaacaagagacctgccagaacatgtatcaggcgcataggatgtgacagaataaaccaacaaatcatcatcctccccctgactagtagaagtagtggaagatgaaaaataaggtgtattttctacaaatgtaacatcaatagaaacaagatatttgttgagatcaggacaataacacctataccctttctgaagacga

SEQ ID NO: 363901 - DNA, 667 bp, Cannabis indica
caagaggactgccataagctaatagcttttagaccactgaccatttggtgtattggatggcatgcgatttttattgtccagaacctatcctactattttcatgcaatttccacccagaaggcatgcgattattcaaagaaacacattaaacaaagagagtttttagaaaaaaccaacctttgatccaaaagcttattcttttgagcttaattatcacttcgaaaaagccctttgaacttcaaaacaatcttcagccaatgattgaattttgaaaaagatttctcttgaaatttgagagagagtaatctcaatggaaactgaaaatgaagtaaattaattcatatcccaggggtttaaatacgaataagtctcatccgtaaggatcttgacacgtggcattagaaaatcaaaagtcactcaatccaatggttatctcaaaacacgcctgtacgaatcccaaagaatttgatgacgttgtagattgggaaaataaaataataaatgtggctgtcatttcaaaacccttaacaagacttttgggtgtacatccaaagtcccacattggctagaaatgggaaggatcttgggtatataaggatgaacactatctccattggaatgaggccttttgggaagatgcccaaaaacaaatccgtgagggcttggc

SEQ ID NO: 363902 - DNA, 830 bp, Cannabis indica
aattcccaatctctactttttaatttttttaaaaaaaatatttaatgtgtagttatgagggattgaacctttgacctcttaattgttttttaaaattttaccattacactaagcactagaactataatttttataatatttaaactatatatataggggccccaaaatttgatttcgtcttaggccccatataccttaggaccggccctgatcttggggtttgtcagccggctgttgcggaagttttgagcgttaaggaggctctcagttggttgaagatgaagaacttgtccaatgtgttagttgagacagattgtattactgttgttcaagctattcatagctcggttgcacttccatctgtctttggtttgtttgttcaggaatgtcaaccagttcttcctattttaaataatatttttatttgtcgtgttaaacgatctgctaacaaagtcgcacattgtgttgttcgcggtacttgttttttgtctgatcgtcttttcactgagagcaatgttccttcaagtcttcagtctattgtaatagcagatattgcaatctaatgaattacttttattcaaaaaaaattaaacttaaatatttatattacaaattattatttttcttaattatgatatatatgattaaaaaattctacaatatactgtaacgtccccgcttcaagcctccattgggtccttacacccacggaataatggctcttatacacgattacgtcactttggcagcttcctggattgatgactgtccctacagaccaacacgagtgtttttagcgtactttgtcctcactcgcacgcttcctggga

SEQ ID NO: 363903 - DNA, 920 bp, Cannabis indica
atagcttggagaggaagcatggccccggccatcagatgcgtctggctccaggccccaaagccgccgtagttatgattgggcgtctccgcatcacgaggtggccggtggtaggtcccggatgtggaaggcttgattccagctacctccacgatgttttccagctgatggggacaagtcagagtggagtggagctcggccgcctcccatccggttgcccgagacttgtacccctcctaggcaacaggacccagcgagacctcctcgatggtagccaggcgcttaccgctcttcttagatgactttgagccagaagcagacatgtttcgattctgtaaaaagaattaaggttccagcagttaggccccataccaaaccctaaaccaagaaaaagggaatgggggtcccctaaccgctggaaagaggccccctccggacacttgtcatacagggtaccctagaaggattcactggacaagagtcgggtgcaataaattcacagaagacggcattgcgcactaaggaaaaaaaagaaagggcagaaagtagaaagaaaacagtctatcttatggcctaagcgaccactatacgtagaacgtatggtcttctacataaaataacaacaaatgcgtgacaagagtaatcctatcactagagcagtggacccaaatcgattatatgaagaatcaaaacatttgcattcccaaaaacttcgaatacaaaacccagaaaagaacaagcagataagtaacagcatgccatgcatattaacaataaagcaaagggtgcaaggaacttataatgaaatgttgagactgggggtcctgctgtgaatcgaatgaagataagaaggactgacagtagcaaacgaagaataactggaaaaattgcaaagtgttcaaaagtgtttttctgggtctgag

SEQ ID NO: 363904 - DNA, 833 bp, Cannabis indica
gactttacagtcagcaagttataattataattatatttgttgattcgtatcccaagttaacatgtgtccttctatgaagtattagccgattttcgggtataacaattgcccattcaaaagttctttttaataaaaagtacttttttacattattacagagggtatatttgtcataataccttttgaaaaaacactcgtcctctgattttggtggttttgtcatttcgaggtacattagtatttaataaccatcttttccacttcttttccaaattctacctgtaggatctattatctccctgatctaacggagattaacccaagagtataaaataaaaaagggaccatatttccattacctctgccattttagaaactttgagaatttattaagcttttccgtcgaaaaatcattaccagatttgctcaaaaatttgcatgtcatctctatcattaacattttttctacgagtttcatccgatttaatttttgacttgaagcattcggagggatcttcacgccgttcgttgattcacaaattgcagagccgttcatcatcccaaaaatcaacttcaaacaataagtgactcttctccttattttcttacaagtttgttatgttgtatttctgggtgtaattaccaatttattggtttgcattgttgtcatctcattttgttttagcaatttttagggctgaactgtatctgggtaaatgttagggtttagacagtaagtaggttttctagattcttcaatttaccaacttctggtttgataaatttcttccagtaattgggattgctttctccttgcagcaatgtcccaatct

SEQ ID NO: 363905 - DNA, 348 bp, Cannabis indica
aggtccttcttcggctgaaggaagaaaaggacgctcaggctgccgaggtggaccgcttgaaggagaaggtcaatgctttggagactgtcggccttgagctcttctttgatttttggaaggctaatccccaggccaacttcgactacttgggcgacgccaaggacatgtacctcgatgccaagttggcttcaggaaactcataactttgaacattgtttccttccgagaaaagccaagcggccccttctctctcttttcttctcttctaatttcgaaatacattcagtgatagagtagtgcccacacacatcaagtggtacctcaatgatagtatgtaagactatggaa

SEQ ID NO: 363906 - DNA, 481 bp, Cannabis indica
tgttctttttcttgttcttcttcttctttttcttttttttctttcaaattacattaataaaaatttaaatttgaaagtttaataagaatattgttttagtgtgattgtttattattgattctactcatttgtcctcaaattttgtaaattttttcttcttctttaagttgaattttttgttaatatgtatataagggcacaccttctatgtgtttgacaaaatgcctaatatagttattcttaatcactagcctaaagaaagagagcatatttaattgtgctattgtaatttttattcttctttaaactgggattttcatgttgttcctctgatgttatttatgttcattttgatgttatgaattagttaatttatcaataaatttgatagtgttgtttatgtgttgtttataagttgtttatacgtgttgttttgctactgcagcagaaagaaattttttttatgtgtgtgtgtgtgtgt

SEQ ID NO: 363907 - DNA, 1133 bp, Cannabis indica
ttcggcttcatctctcgggctagctttagcccagcgattagagcttcgtactcggctttgttgttagatgctttgaatccgaacttgactggagcgtgcaggtgttgcccccaggcgtgacaagggcaatccctgcaccagatagttgatttgtagccgacccatccacatgtagtttccaagtgagtttttcttcattgttacttgactgaggtgcttgtaccggctcggggttgctttctgttatgctttcttttttgcctgtgcattctaccataaagtttgctaacgcttggcatttaattattgttcggggtcgaaaagtgatttcgtactagcccaactctactgcccacttaagtaaccgtccagaagcatcttgcttttgcaatatttgtcgtagtggctggtcggtatatacccgaacaggatgagcttggaaataaggcctcaactttcttgttgctagaatgaggcaataggcgagtttttctatcagtggatatctgcgagactgggtgttgtacgttgttctcttctgtgattagcacgacactcacgacatgttccgtgacagctaagtatattcctagttcctcaccgtccagaggttttgaaagtacgggaggtttagcaagttgtgcctttagctcttggaaatctttttcacattcttctgtccactcgaactgcttgttcgctcgcaggatgttgaagaatgggacacacttgtctgttgatttttaaccgaatatgttgagcgcggcaatctgaccagtcaagcttcgcagttctttggtttttgttggcgagttcatatccaggagggcttgaatcttttttttggattagcttcgattcctcgggcactgacaaatgaagcctagaaactttcccgagctgactccaaaggaacactttaagggatttagtttcatattgtactttttgaggactttgaagcattcatccaggtcgtttatgtgccccccagccattctggatttgacgagcatatcatctacgtacacttccatatttcgctcgatctggtctttaaacattttgtttaccaatctttggtatgtagctccaacattttttagaccaaacggcatgactttgtagcaata

SEQ ID NO: 363908 - DNA, 682 bp, Cannabis indica
taggccgatcccggatgggttccaaacctcctggacctattcccatggatcattcagcttatctgtcttctagctagtttctccccttggacaactttcttggggatgattaagccaatattgtagtaaagactttgctagggctgagttagatagtcagggtaggactagttttattgctttgttttcgtatgcatattttcttatggccaccctgacacttaatttgtttgtctttttgaagaagctaggccaatggaggatcttttggtgactcttgcccagacctacagctctgactcagttggtgaccccagggaggtcttcttctggtgcccctctaggccaaatcgtcttgatcgacgaggatggagaggtcgaggaggaggaggaagatggtgagatcctggcccccttggactgaaaatgcaagggcaaaatggtagaggtagagtctcccaaaaaggctaagagggtgaacactccggtcgtcaactctgattcggggattccgcttgaagcaaaagaatacactgtacctcccagtatcatccttactcccgtccccacagatgaggagaggcagcacctctggattgccaagcataactacgccatggccgagtacacaagggggaatgctgaggtggaagccctgaaaaagatcttacgagaggctcag

SEQ ID NO: 363909 - DNA, 653 bp, Cannabis indica
caccgaagcaaaatgtaaaagacaattctcaaatttttactttttgcctcggttcgtcttttagcgttagtgtagtagctgacactaattatattgattttgcttcggttatatactgaagcataaaatatttgcttattttttgcttcggtcaaccattttatggagacgcgttgacaaacgcaaattacacattttgtagtagtgtattgtaaatgaacctaagaatcatcaagattcatcataaccacaacaattatatctatggcatgtaacaccctaactattataggcgtgttagcctgcttttaaacgtactgtgcaggtcgttgctaatcaacgaggttattaaaaattgtaaataattaaaatttgcttatttaatttaaaacataagtaatacatttataaaatccaaggattccggttacaaatccatgaaagttgcaggagcattggttagtccaaacgacctaaccagaaattcataatgttcatacctagtacaaaaagccatctttgggatttcttcctctcggattctcaactgatgatagcccgataggagattaatctttgaaaagatcgtcttcccctgaagttgatcaaaaagatctcgatcctaggtaaaggatgtttattcttgattgtta

SEQ ID NO: 363910 - DNA, 960 bp, Cannabis indica
tgaataaatttagagatcttgaattacaattctattttgatgagaattataaaataaattcaaatttatttgagactttatatctttatagaagcaatttaaattatatatgatggaattaaactcaacaatatttgctagaatacttttggcaatgatttagatttttttttgtcactttcgattttattgggatattttaagttcctaatttctctcattgattgtgtattcgcatctttcgacttcgtatgcactaaaatattctgaagctttactttgggatctaatttcaaattttatatacatccacatacatatatatatacttgatgcacggtgagaaacctttaagaacttgacttttagtgtcataatcatgtatacaaatatatatatacaaatatataatatgtatatgattgtagattgtacactattacaaaaaccccctttagaggcagttttttagccttttcagcgtcggttttggcaaaattcgctctcaatgctgatcagggcgacgctaaagggttataaataaccgacgccatatgtacccctatggcatcggttattagctaataaccaacgccataggggtacatatgttgccgattattagctaaaaaccgacgccatatatggcgtaggaactgatgccatagagagttttttaatttttttttaatttcatttaatttatatatttatttatatattattttatttaatttaaatttaaattacatattaattttttaaaaggtaaattaaatgttactaaaattaattttaaaattgacttaaatacataatttcatttcataaaagtaattaaatattacataaacattgtaaaattagtccaagtataaacaagttaataaatctaactacaagttaacctaaaaaaataacatagggaagaaaaattcttgggcctttcaacctcaatcg

SEQ ID NO: 363911 - DNA, 648 bp, Cannabis indica
tagttttttgcctcttgatagcctcaataaagttaagaccctactttcaggctcacccaatcaaggtattaactaaccatccgctccggcaagtcctacagaagctggaggcgtccgaaagactcctcaaatgggccatggaattgagccaatttgatctacattacataccgcgcacctccataaaaggacaagcgctagcagacttcataacagagttccatgaaggagaagctagcggaaacgtgcaaacaccacaaaccccagcatagaaagtttttgtgaacggtgcctcgaacgaaaatggaaccggggttggggtagcaatgatatctccgaacggacttcaactccaggaggccctacatttcgaattcacagcttctaacaatgaggtcgaatacgaagccttgattgtagggctgaggttagcaaaagtcgtgggggccacaagagtagaagtcttcagtgattcgcaactggtactaaaccaagtgtcgggtatcaaacgcatggagaaaaaatgggcgtgtatgtagcaattgtacgagagctgctccatgagttcacggactacaaagttgaaagaatccccatagaaaagaatccccacgcagactgtttggctaagttagcatcagacaacga

SEQ ID NO: 363912 - DNA, 709 bp, Cannabis indica
gaagtattagttttttttaactggtaattgatttatatgatattttacaatatatataattaatagaactatttttttttaatcctttaagagtttaagtaagggattgtttggaacgtcgtattaggttgtattgtattgtattatattgaattggatcatatatcatatttttatataatactatgttaaattttaatttatactaaaatattatatatttaggtgttcataaaagttaataccacatatagttttgcataaaaatattgcataaaatacaactcaatataataccatacaatacaatacggtgtaccaaacgaaataaaataattaattaattgaactaataagttttttttaattctttaattatttacttggcaccttttacctcttgaaaaaactaatcaattaaatattttagtttattttttttccagtgttatttatttatttttaagtaaaatgttagtgttgggttttaaaaattgtaaaagtaatataattaataaataaataattttaattatagatattttaactctaaacttcattttccatggaaaataatcaagactttctaaataatgaagatttatctaatgagaattatgagttattgatttctatgcgttcttctttgttacctgtaagagtgggcaacgatgcatatttggaaccttattatcctaatagatttgct

SEQ ID NO: 363913 - DNA, 531 bp, Cannabis indica
agaaaaccctagattgctttacgcgaatgttaagtagtgttttgggataaacacttattggtttatcactgttatggcatagggcccaggattatcgatcgttctctaagaaggttagccaacatacctggacaaggacttgaggtcaaaaaagtataatgtaccacatggcatgacaagttctgagattatcgattgtctaattaggcaatgttaatatgataatactatggacataatatacgggctcacctgattaggtgatgcaatatacctggcgacgtatcgggcgtaggtatgggagtaaataccatatgatgagtgccaaacgtaggtacgggctcacctgattaggtgatgtgatattcctagaaacgtatcgagcataggtacgggcgtcagtgatatgaaaatgcctacttatggcatagataaaccattattgggtttcttcttggcaatgtatcaggcataggtacaggcgtcagtggcatatgataagtaccgggtgtaggtacgggctcatctgat

SEQ ID NO: 363914 - DNA, 1227 bp, Cannabis indica
gcccaagtgggagattgttggattaaaataatcctattgtggacacatatgtataatgtatatgctattataaagtatgatacaaaattatgtgaccaattatgttatgggtatcaaaagggtattaaatcgtcatgaaaataatgtgtagataccatcagttaatttataatttgttgagggactaaattataaatatccaaaactcattttaagatgagtctataaatagatagtgacccccaagaaacactagggtttttgtattctctcattccccatcagagaaaatactttagaaatagtgtattcttgaaagatcaaaatcttctctgcaatctccaacaatgactttatattaattagtgcttccgttcatcttttatcatcatcttcttctttaatttagtaaatgttatatagatttatgatttaggattttctatatttaaataattttaagaatatatttaaatctgtgatcgatatatatgttttgagtgttttataaatcctaataccactcacccaaactaattaacaaccttctttttactaacttctaactaacctcaagaaaaagaagtttgttttaataagcttgattttctgtgaattacataccacatggtatttacatgacttgttatcttattacatatgagttgcgctactaaaaataagttttgtcagttgaaatgtgcgattaaatttgtattgataaataaacgactcatgcatgcatgcatcatatatgttaaatccatatacgtcgatcttgtcttttacatattattttaatccaatcctttttaaaggaactttacttttcgaaatgtgatcctaaagtattaaagtttgagataagtaaagtaaagatgatgacagttggtagctaggaagttacaagacactctgtcatgaataaatatacgatatgtatattttatatatatatatatatatatatatatgcatattcataaaaaagaagtactgtatttttatttgtttggatatatttaaaataagtttttaagtctaaattttatttttattgtttatggcatgttcatcacgttacaatttatttaaaagcaatttttgcaaaaatttttaagaccgaaaataagggttcaaatatgggttacacgagtgcttatttattttatacgtcgtgtaaataaaactgtttgaacattgcttttatattgtaaattatttcaa

SEQ ID NO: 363915 - DNA, 694 bp, Cannabis indica
gactaggaccgtgtccaggacccagacccagacttagaaccccacacagacctagcctcagacccaaacagagactggaactcgggcccagacacggtcgtgtaccacgactggaactgagacccgggcttggatctaaatctgggacccaatcccaaacacagagttcgacctagatagggatcctgatacgaacctggactcagaccaacacccagactgtgatcgaaatgctggacctagatcttgaccgagatcctgacccagaccaaaacttggacctgcactcgggacgcgaacttggacctggacccgaacttagacccgaattggggtctagacctggacacaaacccggacacagactcagacccaaactcaaacacatacacctagaatcagacccaaagttagatccgtacctggacccaaactcgaacccagaccaggatcagaaccaaggacttagacccagaactgaatccagactcagatcaggattggaaattgggactcggacccaacctagaccaagacccaggacgcgaacgcaaacacggagcctgatctggaccttgactgaaatacgaaccagaaacaaaactcagaccaggactcgaactctgacccatactataacccaaactcgaactcaaaatttcaaatggatctagaaccgaactaggactaggac

SEQ ID NO: 363916 - DNA, 1228 bp, Cannabis indica
caaaaatttagtttttgtggttaagtgttataaaccgtaaagttcaggtggtttagccgccaatatcccttttataattgactttagaacgtaatttttttttctgaatatatttcaattttttatttatttactattaactttagaacttttcattacttactaattttagcacaaatcaatcatgtttgtatattagttcgatcgaaatactttttaattatcaatgtaaatactattttttaattatatgtttttaatatctaattttatatttgtaattgttaacgcagattttcgttaactatattaaagccttaatcgtgatggatttgcacagggctttgtctctcaaggatttttcgtccctttgttagtgtattctgctcctatttttagttacataggagggcagttaattacaaatcagacggatatcccacaacaataatcccctgaaatcatgggatgtgattatgtcccacgtaacataaatgcggttattatttgagaatcacacagctgtgattggtccgcttttaccaggtcaatgcatgtgtatattaaatacgttgcaaagtgtatcatgctgggacatctcgctggaaacatagcaacaataactctggtagcgagctagagcttttcccatgtctttctgaggttgataatataaatctcgttgcttctactattgaagacataacgctccatctaacaatcgcagttcctggtgacaagatggacttcaacattcaacatcatttgaatgtcagcttctatctgagagagctgactcgacggagcagtgaatctcattgaaagatgtctcaagctgattagtgaaggtatcatgagtatgctttcttatagcgagatggatgcctcactattcgctgttcaagttcattcaactgtgtgcttagttgtataatgtgcattatatgctaagtgttctaacaatcaacatgtcctatttacatttcttcatacatagcgaggttagtgcctcactttgtacttctgacagtgaatggtttctcgttaacgcgcgagataatagtttgtatatccttatcttgcttaagactttacagtcaacaagttgtaaatatactccattagctccacatttaatgagttattctattttaatatctcctaatataattatcattatatttgttgattcgtattctcccaaattgacatgtgtctttctctgaag

SEQ ID NO: 363917 - DNA, 901 bp, Cannabis indica
atactattttttaaattattattttatcataaaataaaaaaaattaattatttatattaaataataatataatattattttaataattttaaaaaaatacttaacattacaacattttagaataaaaaaatattatatttttaaataatgaaaaaatttgttaactccataagagtttattttaaaatattagtggatttgattgctaagatacatggcatcacatggttggacccaaaagaataagctcacgtggtgttgataaccaacaaattcttttttttcaaaaaaataaaaataaaatagataatattaatgaataatagtattagaaaaataaaacttttttttttttttgtgcaatgagaaaaataaaactttacctgtgcatggataagagaaatatttatagattatttacatacatatgttcaaattttttaattttttttattttttattgtggggtagaatttttttcaaaaaaatattgtatatttttttcaaaaatactgtgtcagttttatactgtgtactatgttaagttttaattgttgttctacggttattttttagttgttccattgttgtttttacttgttctgttttgtattctactattattttataaaaatacaatatttttgaaaaaaaattatatgtgactgtatttttataaaaattaaccctaaaattctaatataatttataagttttccaatatttatcacatgcgaggcccaagacaggttaggcctgcgtacacatatttcctttttttgaaaaaaaaaaatttacattttcttttaaaaaattacctaataaattttgggtataattttgaaaaagtactttttttttaattattacattaactaaatataattattaaataatttaa

SEQ ID NO: 363918 - DNA, 524 bp, Cannabis indica
tcttcttctcactgccagaaacccaccaccaacccccaaccccaaactagcaccaccactaccataaccactctctctctccttaagacccccttcgaccaccgtctgacccaaagcgtcgaccacgatcaacccaaaaagccaacccaaaatccagattattttcttcaatatacaaatcctaattaaccctacacaacaccaaaactctaattaaccctaattcttttcttcaatatacggaagcctcatttctctctctcaagaaattcaaagtttcccaaaaatacttcttctattctaacagttgcaccaaaaaatagggttagggttctatgggttttctattttcttcttcctcttgctgctaaaaataaggctagggttctaatgggtttcaaattctcttcttcttctcttagtcacagttaggattagggtccttagattctaggttttcttcttcctttaacctgaaataaaacacagaaaaaaaaccagtatagagatcaaatcaataaaaa

SEQ ID NO: 363919 - DNA, 579 bp, Cannabis indica
aaatcacaacaactcttttgggcaatttgatttgtcccttgagaatagtcccttacgctcggttctctctgagcttgatgacttgtattctccctatctttattctaattgttagctgaactgtttttatcctctttgcttattttggtttagtgttttattgctagttttagtttgtttctggtttgtgtcttgtgtctttgccgttctggcagtttgtatggccttcgtgccttgtttgttgttcgcgcccctacgcgcttctaggggttctctaatcaaaaaaaaaaaaactttaacctattttctttctaaatataatagtgtacacaacaaagttaaactttttaacttgttttattttttttgttttatttacgtatagtatactgcttcggtcttgtattctaattgttatatataaaagtttaactaagaaattagtagttgtagtgacgtctctactgtctactttctatttctatgtctatattttttttatttttaaatttaagttaattagtattgtatgtactctctatgtcactttctattctatgtctaattttttattttaaa

SEQ ID NO: 363920 - DNA, 645 bp, Cannabis indica
ctccactaatcattaataattaatttataacaaaagttacatcgggtgttgcaattaggtatttaggctaaggaagcaatatgtttgctacttccctaacatatctgcacccttcaattgagattgggattttagcgtcctcttgcagtattttcgaaatcagaacccgagcatgtgaatcatcttagtccttgcagtgaaatgtgattggaccctcatgctcgtacaaatacgctcgggcgacaatattgtcgatattgtcaaagcagagatagacttgctgatcaagggccctctggtcatcgaaattgtacaggagaggtggctcgttgagggaaacaaactcctcagcatagatttgtggtcgaccatcatcctcacgtgcgtatttttgtcgaacatacgcctgatcagccacctctccttcttcctcttgttgggtagtgtttttcttctgtttaagggattggggtcaggaacctggaaatcatgaaaggcaaattacctacgattttttttgtatagctaaggaaacaacatttcaagtactagcatacccaggatccttgacgcgtccaggatgctctagtgtcccgagcacctgcgtcaggatatcgttttggccatggacttgaatttgtccct

SEQ ID NO: 363921 - DNA, 718 bp, Cannabis indica
ccacaccactattgttactggaactggaaacgtggagctaaagtttatctcgagaaagatattattgctgaaagatgtaatgcatactcccgagatgagaaagaattggcttctagttttttgcttaacaaggccgggaataattgggtttgatttgtacgccatcactaagaatgatacttttgtggggaagaattatgctactgatggaatgtttaaattaaatgttgaatttaataaagtatcttcttttgcttacatgttgtgtgattttaatgtttggcattctagactttttcatattaataagcgtatcattaagaacatgagtaatatttgcttaattttgtaaatgttagaaaaggattttgaaaaatgtgtttttcatagtcaaacaaaaataactaagacaccacataaatcaattactaaagaaactgaacctttagacttgatacattctgatatatgtgaacttgatggaacactaaccagaaatggtaaacattattttattaaatttatcgatgattgttctaattttacttatgtgtacttgatgaaaaataaaaatgatgcacttgacatgttcaaattatttgtggctgaaattgagaatcaatttaataagaaaataaaaatgcttcgtagtgatagatgaattgaatatgaatcgaacttgtttatagaattttataattcacagggtatgatacac

SEQ ID NO: 363922 - DNA, 836 bp, Cannabis indica
aaaccaaaaataatattaaaatatgtacatatgaaaactaaatatatatatatacatatgtatttattttttttttcttctcttagttaaacatttaataacaataaacaattagctaacagtaaacaaataactatataagaaaaaaattcaaatatatatatacaaaaattgacttttaactttatttggcaacaaaaatataactacacaacaatactaattaacaaaaaaatatgcaaataaattggacatgaacaaaatattgtcgacaaccttaaaaaaaacataaacacaacacacacaaccttaatacatgtttaaacatctaattaacaaccaacaaacaactgtataacaacacaaaaacaatcttaatacatatatttatgaaaaattaaacatattattattttaatattatttggacaactaaataacaacagtaaaacaacacaataacaaccccactttaatatgcaaattaaatagatttcaacaccacattgtaataacaaaaataaaagctacaacccaatacaaaaataaatagatttcaacaccacattgcagtaactttttgggttctcacaatacatacacaatcttaatatatgtttaaacaattaattaacaaccaacaaacaactgtttaacaacacaaaagcaatcttagtacgtatactcatgaaaaattaacacattattttttttatattatttagacaactaaaataacaacaataaaataacacaataacaactatactttaatatgcaaattaaatagatttcaacacattacaataacaaaaataaaagctacaaactaataa

SEQ ID NO: 363923 - DNA, 688 bp, Cannabis indica
gcatcacaattaaccttaatctcacccaaacaaggtttagcccattgcacacacccataagtaattacagcattcaccaccctctctaccgacaaagccttattattctataccaagtcaccccaaactccccaaagaagcatagcaagcctctcaatacgatccctaggctgcaccttacaaacagtatcaaaccaactgccaaacacaacagcttcacccctcctaccgaccctcccagcaccctgtccaaacaactcttagtaaaagtgcagctaaccatgatatgaaaaactgtctcatcctcccgattacacatcggacacaaactgctgtcgtggaccctttaaaatatttaaaatatatttatttatatgtatattttagagtaataaaagtaaggaaaaaaaaaggaagtataagtcttaaaaaatatatattttgtattagtttttcataaaattgagttccctaattataaaattttggatgaaaatataatgcccaatcaaaatgtacactattaaatccaaaagtcggtcactttttaaatgtttgtttatttatttattattattattaaaaataaggtaataataataatgatgatgagatcatcttaaataataataaaattgttataaaataatataatataatataaagtagatgagaagaaagaagaaga

SEQ ID NO: 363924 - DNA, 898 bp, Cannabis indica
aggggaagagagaggtccgatgggtccgattggtcggaccccatcggaccccatggtccgaccatcggacctggggtgtgggattcttgggaccggccgagatagagagagaaagagagatgctgtgagagtttgggggtatttttggggttttgaaaaaaaaggtataatttttttagggtttaaattattggtttagaaatcaaattttttgattttctaagtatagaaaatcaaatttccctttcttaattactttacctagcatttactctttcttcatttgtttataattataacgggttttagtcctcggaactttgacatgtatcaaatcatgtccttttaaacttttaatgtcgttaaaaatgctccctgaactattgagattgctggatttaaggacttttgtccaattttaataaaaaaaagtctaacatggatggaagttcagaaaacataatttagtacatgtcaatgttcgagaggtatgatttggtatatatcaaagtctgaagagcatggtttagtacataaataattaaatgaaattagacaaaagtccttaaatctaacaatctcaatagttcatgagactttttaatagccagaaaagttcagaggacatgatttggtacatgttaaagtttaggggacaaaaatcttaattagccaaattgtaaggggtgttcatgaattgatcatttggtctgaatttttattttttttctaaccaaattagtaatgcgcttctatcaaaaataactacttttagtgttaaattttttagtcacaatataaattttttgtgactaattaatgtgacttgtggtcacaataaaaggttacttgtgactaaagcatttaaatacaaattgttactaatttagttttagtc

SEQ ID NO: 363925 - DNA, 508 bp, Cannabis indica
tttaaattgggcgggttgcacttaaattttagcaacctgaactttagattgggttagaaaatatataggataaaccgcccaaaccgaccgatgtacatccctacctgggactaggattcttttccagcctttaggctaggtcttggggtatggccggccactaggacctagaaccttggtcggccaaggtcaaggttctaagcaggcagccagtttttctccctcttttgacctcggctagggtctcgcgacgaccttggaggcatatacaattgtggccttatgcatggtttcccttacaaactctgtataaggctaggtaatgagtccattatagttaattgtgcaacttaggacttactgtatgtcttagtgagtgtatccaagatggtacttggtcgttggtcgaccttgtaccctttgttttacgtggaagatacccttgggtgttgttgacttgaataatttgtacctttgtcaggttgctcacctccccttatttcttcca

SEQ ID NO: 363926 - DNA, 516 bp, Cannabis indica
aacataattttcgatcaaaaaaatatccaaatacacatatttcatgaaacaaataaaacacactaagggtaataaagacaaactcccaatgaatctaattatcctcataatctaaaacactcatatgagcagtgtgctcatgaaagaccttgggtggaaaatccttagtaagggtgtctgcattcatggagtttgtacctaagtgttcgatacaaatttgtctactttgtacccgttcttttacaataaggaacttgatatcaatatgttttgacttcgtcgagctcctgttgttgttggaatacaatacagctgattttttgtcacaatacaacttaagtggtctttcaattctatccacaatgcgtaacctggtgacaaagttcctcagccacataccatggttggacgcctcataacatgcaacaaattctgctgtcataatagatgaagctatgagtgtttattttgtcactcctccacgatatagctcccaccaccctaaccagatatatg

SEQ ID NO: 363927 - DNA, 578 bp, Cannabis indica
aaacctcgaatgtaatgcgctattgggtgggaaacaggattgtgcgacatcttagtcttcattgacttggcattgttaaatttgtggtacaaagcttggatggaatcatcaaagagacaatcagttgtcgcaaaattcaatgtcacatcggaagaatatttaccttttttcataaggtaatagaatatggttatgatgaaacaaaaacatcacagaaacgcaaatcaaaaggttgaataactgtttaaaaactttaatacagtatctaaacttaaaaatatttaaaaagcaactgaaaactaactatcataaactataatggaaaatggaaactttactgagtcatttataaacatgtcgcaggtagccaaatgataaaaccatgttttatcctccacataatcaacacctaacctaaaacctagggaaaatttcttcgcaccatcaacataacaatcgtaatgcctaaaagaacaaacaaacaacaaaaaaacaatattaaaacacgaataaaactgaaaaaataaaacagaatacaaatatagatttaataaaaatagtcacctaggatgtttaag

SEQ ID NO: 363928 - DNA, 520 bp, Cannabis indica
aataaacaaatctgattatattgaaatgagttttatttagggcataaaacccaacagccctacagttgtatccttctctcaaaggaattagacaagggtgggtattgaaaggcttggatgttcttaagttggcttccagattttatgagttattagttgattgtatggagattctttcaaagcaggagatggagaatttgttgttccctgatagaggattaggcataggtggaatacactttttcatgatcacaagttgctctcggatgatatggtgaatcaatggtctgtaagtttcatttggcgctatcaagatgcttagggttcttcttctagggtgaaaattctaaatgattcaagtttggtcggcctatgataagtcaatattttatcttatatatatagccaattcatgtattaatattcttaaattgattctttaaattattgattagtgtgattataatttgttagactattttaaagactaatcatgcatttagagtcatttggagagatg

SEQ ID NO: 363929 - DNA, 836 bp, Cannabis indica
aataacaggccacacactgtaagcgttactcatgttaccaaagggattgaacccgtcggtggccaatcccaatctcacatttctatgctcaaatgcaaaggatggatgacgtctgtcaaactgcttccactcttctgcatctgcagggtgtctaagcacgccattctcttagagtagtgccaccgcatgtcttctgccgagtatcctgaaccgtataacctcttcagtctcaaaattaaaggaaagtaccgcaaaacttttctagcaactatttttctgtctccctttctctttttccaacgactctcgccacaaataggacatacttcttttttttcattctctttttaaaataaggcacaattatacttgcatacatcaatggtttcataacccaaaccaaggttatgcaatttcatcttcgagtcgtaatgggacttgggtaattttgtactctctggaaataactcaatcaatatggcgagtaacatatcaaaagaatggttactccacttattgagaactttgcagtgcatcagcttcaccaaagcgttgagcgctaattttttgcagcccgggtacaattcagtttccatatccttgaacaaatcgtcgtacttaccaccaccattcacagggggctcattaaaggaagcagtggtagaagttggatcgtcaaaactaggatcttctcttaaaatatctgccattacatccgccatttcttcttcttcgttgtctaatatttctacaaccggttgcgggaatgactccccatgacaatacaggtcgtgtacgatcgttggatgccatgcacaaacagatgtaccctaata

SEQ ID NO: 363930 - DNA, 732 bp, Cannabis indica
ccccaaataacataaaaacgagaaaatcaagggtttctgaaaatcacccaaccggcagaccgtttgcccatccggaattccggatgcacaaccggaattccggttcctcgcagaattcaaccaaaaattcataacttgctcaaatccaaaccaattcaaacaaaaccttccagacctgctatttagaccctaaggaacaattctaaagcataaaaaccaagcttcatgcaaacaaaccaaaatcaccattaaagcttcaagctttgagttccaaactcaaacttgattaaacaacaccaacatgcattcaattcagcccaaacctacttaaacatgcataatttaacctctgaaaaccacaacaaacatcaacaaaacaacagcaacagatttcaacacttctctttgaaaaccatagtttttgagccaaaatttcatatctcaataaaatcaagtaatcaccaatcctaacatgcttgaatcaacattttaaattataaataaacctctgaaatcaacatcaaaacacagcagcaagaacaactcaaacaagcatgcaaacattatcttttcatcaaaaattcaagaaactaaaagaagagaagctagacaaggattacctctactaaaatcactctaaacttgagaaaaacacttgaattttgcaaagaatcacagccctagcagccccccaagcttggccgaaaagagagagagaggaagagcttgaaa

SEQ ID NO: 363931 - DNA, 644 bp, Cannabis indica
attattattatattggttgccgaaaacctcggtcaacagaagcaattattacaaaattactactaaataaactaatagaaaattaaatttttaaaataaattttaaaatttatacatataatatataaataaaattagagatttaaaaaatatataagctttatttatatgctatattaagcattataaataatctttaaataatgtgggacttatgtttaaaataatatgtaaataatgtaaaaattttatttactattacatgtgaagaaaataagtgatgtacatttaatatatatatatatatatatattttataaaagataaaattctcttaaaattagcaaaatagattaagaatattatagaattccacatcattactctaagattaagctttatatagatatataggtagatatagatatagattggtcaaaaaatttaacatttttgccattatttagaaatgcaaaaatatatattgcattcataaaaaaaatgtactataagcaagctaaattctttaatcacccatggaaaataatgtaacattaattttgggattttttttttcaattaaaacttactaatgaatcaaattattatatgatatacagaattaaaaagaaaaataaaaaaaa

SEQ ID NO: 363932 - DNA, 505 bp, Cannabis indica
tggacctagatagggatccggatatgaatttggactcgaaccaagtcccagacatggatcaaaatactggacctagatttggattgggatcctgacctagaccaaaacttggaactgcactcgggaccccaacttggacctcgacctgaacctagacccaaataggggtccagacccggaaacaaacctggacacagtcttcgaccggaactcaaacccacaacttgaatcagacccaaagctagacacagacccggacccactctcgaacccggactaggatcagaaccaaggacttagaccaagaactgaatccagactcagattgggattggaacttgggactcggacgcaacctagaccaagacccaggacggtaacccacacccggagcctgatctggaccaagactgaaatctggacggtaacccaaactcagaccaggactcgaactccgactcgaactcaaacccaaactcgaactcagaatcgcaaatggaactag

SEQ ID NO: 363933 - DNA, 584 bp, Cannabis indica
atcctaaggaatcctttcattggactttatcttttctagaatagttgatacttttccttagataaataaaatctatatctagaagtggagaagcttctatagattgccattagaaaattgctccaacaacttactaaagtaagttgcttgcactagagtaagtaaataaccaggtataccacaagccataggtttatataaactcaaacctttgataatactcgtaataggaaatttttttaagtccattgaatatacttattttcaaaatttcctttcttatccttgttatagaaaacttttggttactccatatgactggtttaactatagttctcttggattcacttcttagttccttattctggctatctattgcttgtttaaactaataatggatttagtcaagagtgtcttccaagtcataacagggtgagttcctcaaaaccctcccactacgataaggtactgtgatttttctatctaagaacccttaatggtattgtccttatcagttgtgtcaatacaacagaggcagtgggatcatcttatatagaataagatgatagaacaatttggaatca

SEQ ID NO: 363934 - DNA, 819 bp, Cannabis indica
aaaaacttatttaaaaaaaataagctaaaataatagcaatataattttagtaaggcaataaattaacaaaacaatttcttccgtataatcaaaattattttcttaataaaaattcaattttacaaatatcaaaactcatataaattttacatgtttcttataagtttaaaaacattagcccaataccaaaattaatttattattatgtatttaattagattttcatgtgataatagtcaaattgtttaggtagtttgtgtaatatcctcacttttctaatttattgtttttaaatgataattatatttagagattattagtattatttttacaattcatatttttgagagtatttatatttacttgaaatatttattttgtttttatacttttggtagtactttatatttgtttttgcactattttttatggtttggatgctttttatggcttttgtgctatttttatagcttgtccctaattgtttaaggtagatttgtagtacgatcaatatgggtaagagaaaggtttcatatttggtatccatagcttctgcaaacgacttttgagatttgacagataagtgtttcaagtcttgatattattatatgaattgttttacaatctttattcacattacatttttttcattaaattgtgtggtaatagagttttattattattttgtagatcgattttgtggagggcctactgttacagaggctttgatgataagcttttaaatataatttatttgagagttgtcatctttctactattgatattttctattagtttttaatatcatcgttaggggtt

SEQ ID NO: 363935 - DNA, 500 bp, Cannabis indica
atttttattatatcaagtttttaaaaatattgtgttaaagttttaaaattacaaaaatattatttttcagtaaaataaaaaataactaaaaaacaataagatgaaaacaactataaaacaacaaaaagataactacaaaataacagaaaaataacaaaacaatgatctaattgcaatatgcaaaacaatatcaacttctcaacatatttttgtattacgattttttttacttagtttcgaaaaatttgatttatctttttgtactgttactaaattatttttttcaatgaatttgttgttacaacttcatactttcaatcttttttcaattttcctttttaagttaatgagagctaaaataataatttattttttaagagttaaataaataagaggcttttttatttttacacttttaaaacagtttttttttttttttttttttagttcattttttacgttaaatacttacatagtaaactacctacttgtcaactaac

SEQ ID NO: 363936 - DNA, 566 bp, Cannabis indica
ctgcaaagatggattcagaaatagttgtagaccgctaatttgtttggatggtactttcttaaagggttattgcaaggggatattattggtggttgttgggatagatgctgagaatgccattttccctattgcttatgctgtttgtgagaaggagacaacaaattcttggtcatggttttgtgatctactgaagacagattcggaaagtgaaaggccagatatatacacattcatgagtgacaagcaaaagggcttggacaatgcagttggaagagttttcacaggttcagatgttagacattgtgttaggcatctttactctaatttcaagaaggattttcctaatttgttgatgaaaaaaatgtcgtgggctgctgcaagagcaacaactattgctgaatttgatagaagaatggtagaaatcaacgaagtcaatgtcgccgcatataattggttggttgcaaagccacgtacagaatggacaaaggcttacttttctgaaggtgtgaagggtgatgtcttttgacaacctgtgtgagtctttcaataatgtcatactgatgcca

SEQ ID NO: 363937 - DNA, 587 bp, Cannabis indica
cgaacctagacgtagacctgggaaccaaatttagaacctgaacaagaatcgctgaaccaggaccctagaactagaataggaccgtgagcacgacccagacccaaacgtagaaccaaacacagacctagcctcagacccaaacttagactggaactcgatcccggacacggtcgtgtacccagaccgaaactgagaccaagaccaggacctaaatctgtgacccaatcccaaacacaaacttggatctagatagggattcagatacgaaccaagacccagactgggatcaaaatggtggacctagatctggaccgagatcttgaccatgacccaaacttggacccgcactcgggaccaaaacttggacaaggacctgaacctagacccagatcggggtcaagaccttgacacaaacccggacacagactcgaacctgaactcaaacccacacctagaataagacccaaagctagactccgacccagacccaaactcggacccagaccaggatcagaaccaaggacttacaccaagaactgaatccagactcagattgggattggaacttgggactcggacccaaccta

SEQ ID NO: 363938 - DNA, 571 bp, Cannabis indica
tacgcgcatgggacggatgcaccatgttggaaagggacagagttctagtgtatgcaactagtttggtggcttgtctcgatggcctgccaatatgtgtggaggcatggcgcctttaggattggtccatgtacgtatgggagtccttgtgcgatgagggagactgttctgacagtatcgaatgggtgatgatagaagcgctggcacgttgacttggtgttggcatcttcccacacatgctaccttggtcacgggtgacaaggtgagcgtcggtgttgggattggtcttgccatggtgggaacctatggacagtacgagtatcttggctagagagtctcgatgcatggatgcacacatggatgcttgcgggcatgactcggcgggagtcattcgagagatggaagtgtgcaagaggcacacggtcgcgcgaaaaatgagcccattgttactcagatggttggaaggctgaccttggcttagagaagtcaaggtgccgcacggctgtttcgctgtctgaaaaggtgagccggtgacagttggtatcagagccaagttcatctcagtgggaggtga

SEQ ID NO: 363939 - DNA, 521 bp, Cannabis indica
tattttcaaatttaaaaaatttctactttaccaattcagaagctcaacatatgttcaaaaagtcattttctcaattctcacaaaaaatgaaaccttttaacttaagattttttttaattaaatgtgttaaaaacaatctaatcatatatttagtttctgcaatttttattggaattactatctaagtaactgttatcccaatttttgcactctgacatggcatcacacgatggtgacacgtggaatcgactcttggtacctgctcccaagacataggccgaacagggcacctcatacatttgttcggacaaagtcctctagactgagcagtgatatggtaagttgtccaaatcccacgattagtgtattccgtatttaccatgcaatctttctgcttatatcaattgtaacgagaagggaaatacttcttctccaagcttatagccctataaatagtgattcatattcactgggcaaagggtcgaaagatttgtctaagaattcatattcagagatattgt

SEQ ID NO: 363940 - DNA, 763 bp, Cannabis indica
acagaagcaaatgaaatcatgagagaaattcatgaaggcttttgtggggaccatgcaggttggcagagtctatctaaaaagatcattagacaaggatactactggccaacgatcaataaggacacccatgagtttgtcaagaaatgtgataagtctcaaaggttttcgaatatacctcgcgggccaccaacagaattaagaatgatgacctcgtgctacccatttgctatatggggaatcgacctaattggggcattacccactgggtgaggaagagctaagtatgcggtagtagtagttgacttcttaaccaaatggattaaggtcaagcctctcgtttctataacctgtaagaaagtcctcgactttgccgtcaagaacattgtctgtaggtttggaatttccatgaagatagtatctgataatggaacccaatttgatggcgacttgttcactaagtactgcgagaggaacaaaattatcaagagcttctcgtcagtatccaggcctcaagcgaatggacaaatggaagttcttaataaaacaggaagaagttagacgctgccaaaggtaggagggtcgatgagttacctcaagtactctgggctcacagaactactgagaagacagcaacggggcacactcctttctctctagcatttggtcggaagcaatgctgcctattgaagtgaacatatcgactcacaaaagagagttttataatcaagaagaaaaaccaggaacttctaaaattgtccttgga

SEQ ID NO: 363941 - DNA, 1042 bp, Cannabis indica
tcttttaccagatagaatcaatagtataatttagtagtaattagtccaattccctgtggttcgacctcacctgtgtgagcttactacttgattgcgtatacttgcgtagtgattataaatttagcaacaaggtggaatcggtttggaagatgaatgtcaggggcactaaaatgtatcaaattgtggcgaagctgaaagctcttaaaccggtcttacaagagatcaataggcagggttttcatgacattcaaattgctgagaagaaggccaagataaatttggaagagtctcagaaggctcttcaaggggaccctttaaacattgatcttcagcaagctgagcaagcttttagggagaattatgctgttgtacagaaagcttacatctctttcttacagcagaaatccaaggtggattggattaagaatggagactccaatacagcagttttttatgccagcatcagaaatagaagagtttccaacagaatcttgtctattgcagcgagtaatggagagagagttgaggatcctgaacaggtgacacaagctttcttggattattaccaaggccttttgggaactaagatgcaggggagattgcatgtgaagcatacagtgatagcagaggggccggttttatcagagtcacaagctgagtttctcttacaggagttctctgaatctgaagttaagaatgcagtatttagcatccctggaatcaaaagccctgggcctgatgggtttgggagttatttcttccaagacaactgggagcttattgggaaagacatttgtgaagcagtaacttcttttctgcactcaggtaaccttctaaaggagatcaactctacagtcattactttaattcctaaaatcaaatgccctaataaggtgagtgattttaggcccatatcttgttgtaatgtgctttataaggtggccactaagctgatttgctctagattgaagcatattcttcctggtttagtgtctttaaaccaggggggattcattaaagggaggtatattgcacataacat

SEQ ID NO: 363942 - DNA, 962 bp, Cannabis indica
ctcagtcaaatcacaagttttcataagcctttctgacagaaatttctctcttcagaaaaactgagccttccctactttctatacctggccgaaatcctcttctcttttctctcttcataaatttcgaaccctagtgaaagagtaagtgcccacacacagcaagcagtaactcaatcatagattggaagactgtgaaggatcaaacttaaagaagaaggacattcgggctcagatcttgattatactctgctacagaaaggatacaagggttagagatctgagtggaaggagacattaattccgctgcatcaatgtaaggttttcttaactttatatgtgtttaatttatcgttttagaaagttcatatttagggtgttaaacaacatacttgtgagtagatctaagatcctggtaaaataatttccaacaactggcctcagagccatggtaattgatttacttgcaagaaatttggactttaaaacgattgtttgttatttggatggtttcatgttgtattgagtgttatatgatgattgattgatgtttgtgaattttcgtgaaaaataattgaaattttgtttctggaattatttttattggatagtatggaaaaaattaaaattaagcaagttacttttttaagttcttttttacagaactcaatttcgatttaatttgaattagttatgattttttgaagattcgaaaaaagatagggatgttgagcatcacccacgcgggcgacgattcagacagcatcgaccgagcttgttgtctgaatccccttatgcgcgcgcggaagcttgtcagaaccccccattccgcgcgcgggaagtgctgctagatctcccacttccgccgagttttcttcggcccacgcacccactgcggcgcggacagtatgcgtacagctcccaaatttttcgtttttcttcgttttttcatgctttttcatgga

SEQ ID NO: 363943 - DNA, 662 bp, Cannabis indica
taaaatatttccaacagttttatgttagtcagggcgctgatttcgaggttaatcttccttaccgcgacaaactgtcttcggaaactgacttgtaatttgttccaacagtccactgatcctgactccaactttttgaaccattcctcagcaaaaccgcttaacgttagtgaaaagcataaacactttgcatcattgttgacccccatgacggtcatcaccctgttaaaccgggacaaattgtcaatggggttcgaatctccggtgtaagttgccatttcgggcatcgtaaaatttttagggagttccactccagtatgtatcaggggcatggttctcggtcctcacaattagagtctaaatcatcccctttttgtctccgggagaccttagccatgtctttgcgtagttatgccaattcagctaaaattccttcgttcaaggtgccttcggagactggcaatgcgtgttttttcctttcaagatggtttcttaaatcaccatgcttctcgttgattttctatcttaaattagccggaagatacctccgacttttcccccttttccacgggttgttggtgcacagatacgctctttcggttctctcgatcatgaggaccaagactcgctcgagggagcttgcccctctgcggacatttcccttt

SEQ ID NO: 363944 - DNA, 659 bp, Cannabis indica
ggtgctctactgtgcaggaaagggtaaagttgtttctgatcagccatgagtattggagctgaacgaagaatgtacatgttcgggccacactagaccaagcaggttggggcctaccagtgatgtattttgagactctgttttgccgcttaggtcgaccaaaggaaaagaacttgtaatagtgttttgtaaatacttttgggatcccaacttttgtaacttttaaattaaggtttaaaatgttacaagttattatcattctgtttattaataaagtttaatttacgcgcttattgtactagtaatcccgattaggggattagggtttcataagattatcgggtagcgtgcctaattatttagggcgttacagtgatagaatcattaaagtatatttaagttttcttaaggcagattattactactatagcaactgccaaaaattgaaaagtgtggtagattactaactacttaaacaggaagattacgagcgatggaaaaacccaaaagtattgtacatttgatcaaaatatagttgtttacattgtgaataaaaatgcaagcaaacacaattgtattaagttcgaatgaaaatagtacaaggcatttaagataagaaaaacctaaaactggttacaaacttttctttacaaaaatgccac

SEQ ID NO: 363945 - DNA, 761 bp, Cannabis indica
cacaatccactatcaagatcaacaattacatccagtttctgagctccaagacacatggatggtctagtagctcaagctcttcaatccaggtatgtacaatctttctcaaaactctccttttcttttctctcttaggatcgaaccgatcctctcacttttctctctttttctctaacttttcttctatcttctttctgtctaaacacgagagaaactctctctttttagatctagatctctcatcttccttttttataggggtgttcatcaaaccgctcaaattgctcgcaccgcaaaaaaattacggtttaaaattctttgcggtgcggtcgcggtttgaatttttcctaaactgggtggtgcggtttgcggttttgaattattaataagtggttcaaaccgcaccgcacattataaaaatactaatttttatatttatttaggtccaatatgtgaatgtccaacccaaagtccactaattattatattgttgaaacttaaaagtttttttttatatttattttcaagtcttatggtattttttgacaagtgttgcttaagctttgttgtatttgtgatagtttaattatttggtgatagtccaaactgcagaaactgcaaaaaccacaccacactattttctgtagtatgatttctgcggttttttagtttcgtggcgcgggtgcggtttgagaaattagaaaaatcgcatgtgtgggttagtttgaaaaaatagtcaaaaattgcactacccgcaccgc

SEQ ID NO: 363946 - DNA, 687 bp, Cannabis indica
ttggtctaacttaatttgttttttctaatggaacatatcccaaaagattgtcattcgttagacaaatataatagtattagatctcgacagataaatatttgtaaatgcaacatctagctgtacatccaaagatgacaacttagactagtgcttacaatatgaaacagtgaagaaatttataaaataagaataactttgactttcgcctaaacatcattggattcttatttaatcaaaattcctttattttttcctcttagcttttttcattatgaaattgcttagagagtacatcattggataagaaagattataaatcatattcttatggtgtcattctatttttttcctgtgaaattgaatggcgcagatgactatattctagatatcttatcctgaaataatagggatattagcggctaaactacctgaactttacggtttgtaacacttaaccacaaaactcaaattttggcggctaaactacctaaactctggttttgttttgctctgcacacctccgtccaaaaatacacagttaagtgccacggtggactgtccacgtgtacacacttgtacacgtgacaagttttagtggttcacataatattagttttaaaaataattataaatattaaaaaaaaataaaaaatacagaattttttttactttttacttttttaattt

SEQ ID NO: 363947 - DNA, 1001 bp, Cannabis indica
tggatcatcaaaagtttcttcgcagtggcgcatccataagaaaatggtcaagttgaagcagtcaacaagacattgaaggatacactaaagaaaagacttgaggatgctaaaggaaactggccggaggacttcctaaagtcctatggtcgtaccgaacaactgagaaaatggcaactggacagactccattttcgatggcatatggatatgaagcaatgttgcccgtagaactcgagccaccatcccacggaagactgatgtatagccaagaagcaaatcacgtactccttgctgaatcacttgatgaaattgaagagaagcgaaccatatcaaacttaaagctgatggcccatcagcaaaaagtagctcaatatttcaacaaacaagtgaaggctcggaaattgtttgtgggagatatggtcctaagaagagtatttctaaacaccaaagacagtacaacaggtgtactcaaacctaactgggaaggaccatatcaagtggtcgatgttctcaaatcgggagcatacaaattaggcaagtatgatgaaaaaatggaactcgttctggtaccaaggtattggaatggggaacatttcagaaaatactaccaatagaagtactaggtcgaatgaccatatcaagtactaaacaaaagaacatttactcttaagtgaatggccttctgggcggaccatgcctaaaggttcgaataaaattataaagtactcaagtcggatgaccataatttaaagtacaatatttaatttctgcaatttgttttatttcatgttaagctaaagatcagattacatcaaattaatagctttgatgtaagttaccactgtaattgacacattttcgattaataaatgaataatgatgtttgtttcaaaattcaaattgagtcgaatttactaacatgttgctaatttaccatccagtgcgtacaaaaggtttggtcaagccctgttatcccaatttttgcactctgacgtggcatc

SEQ ID NO: 363948 - DNA, 1014 bp, Cannabis indica
ggacccaaagagttcaagggttctacctactgttaatcccagacagaagggaaacgtggtgaatggtgaaacaactactgttattggaattgcgcctggtttgcaagagactagaaataacagttccgcacacaacttgggcatccataatacgactgttccacctggagccaatgcctagacgaccatcggagacgcaaccgaattacaaaatctctgtgacgcgctcagactcatgtagggtcacagcaacactttgcatcatgatcaggaggaactgcgtgctgcagtaaatctcgcatttgacgaacaaaggagtatgttcactgaatggagagataaagagatggaggcattaagggctcaccatgcagagattgaagaatgtagtcgtcaagccaccatgctgatacaaagagcctactaaactgtaggtcagcaatcactgaacgtcattcccctgggagaaacggaagatgacccaacgatgaatacttctcagactacgaatggtcaaccgcccaatccccggttacgagttctgctcgtgggccaagcggtaggcgagcagaccttgtccggtaattcatcaggaggagccatacctgacggctccaaccaggctaatggcgctattccacctatcaaccaagcgaatcaatcgctaaggcaacctagctcttctgtgctcgataggttgggagcaacccatgacctaaggaacgagctaaatagaagaagaggaacagacaagcagaatactacaacgatcgtgtagcctggagcccatactcaaatccccactcagaaagatgttgacgtaatccaagtcgaccagaatgccgagcaggtcagcccagccgtataggctcagcttgacgaattgaaaaatatgtttcatggcatggctggacagtgtaacaatgatcttgggttagaccgagctcgcagaactcccttctcaccagagatcaatctcctgccactgcctcacaagtttaaaatgccaacgtg

SEQ ID NO: 363949 - DNA, 515 bp, Cannabis indica
aaaagtccttagcttgcaataagcaaactaagtgtaaaagttaaatcgactcaaagaaaaagtatgcgagatgaccatctcgctatgggaagactttctatagcttcattcaactaacaggagcgaggttcacgaccctagcgagtcaaaagatttctttataaataaatgtgatcaacacaaaacatacatcgtcgacctcggaaggaagaatggccccagctcgctattgggatcactacaatcaagtttctatcgagacatctctagattcaacaattacagatgtgtttaatacacgacaattttgacccagtaaaagtgggaaaattacaactatacgattttcaaaatcataaaccgcatttacatttcctaatatgtaaaattttaggataattgctgtaaacatattctcgtcaactttataattactgcctactatgtaattataaatagtggcgaacaagctcaaaaaaagggacaaaaaaaactcatatgaaagaggccctaaa

SEQ ID NO: 363950 - DNA, 579 bp, Cannabis indica
gtttggcggttttagacggttttcggcggttttgacggttttttggttaaattattttttatttcaagaaccgaaaccgaccaccatgtcaaaaaaaccgaaaccgaaaccgaccgccaaattcggtgatggcgtggaaccaaaaattcggttacggtctggtcggtttgatggtcggtttcagtttttcggtttttatgaacacccctaattgtatgtagggtaaattttatggaaggtaggtaggttaatacttagctctataaaaggaagattgatggaactcacaacacacaactcagaagcgcagaagagtctctctttaaaactaactctcatttcatcattatattgtctaatacatcctatttttctctcttacacacaaccatcccatctcatcacttctcttttatacacaaccatcccattcctaatagtctttttaattaatcacacttatcattcaccaggctgcctgtttaacaagcttcgataaaagactagagcttggcgcaaattttcagttttcagtttttaaaattgtgtttttaaaagtgagaatagaaaacaattttt

SEQ ID NO: 363951 - DNA, 629 bp, Cannabis indica
gttaaaaaattccattaaagttattatgtattatacttaatagtaattttttaataatctatgcaatttatactttggtatattttatttttatgtctctaaaacaatttcttaaagtttttttttcttttaaatattgtaagcaagcaactaaatgtttgctttttcattttggtgatagtgacgcctgatgctatgtattctaatggactagcaattgaattcggtgcattaatttcctcatccgacattatttggctgacgtgtaacgtcataattagccatttaaatattataaggtataattgtaaaacaatcactttattcgtatatatataaaaaaatcccttatatcattgggatgtgctacttgggctgattctcttgttgggccgactctgaagatgaggagagtcagtgtttgactcttgtttttgaccgaaccacataatgtgaattagagtaatatttgattggagagagaaagagtcttttactcttgttgatttgttttcttttgtgttgatagcttttgggccgaattctttgggtttcaattggtataacttgatgagaaatttacatgagaaaatttttattatacccatattttaatattaaatagtcta

SEQ ID NO: 363952 - DNA, 580 bp, Cannabis indica
acaaaaataaagaatcatgctcaatcatataagtagaactagatactttattattgctaatattgaaagttacatcattggtgcataatttcaccattccctcacaagagtatcccttgcccaaaaatacattagacttggtgagtatgagcttaccagattcataaacagccttaatcctgagttttccaagtaagccaccactgatcaagtttctattcatgttgggcacataaagcacattcaaaaatgtgactttcttatcggaggtaaaaaacacatcaatggtacctttgcctagtacctttgaattgacctcattgcccatttggatctcatggttaccctttgactcttcaaaggtcttgaacaatgatttgtcatatatgacatgaatggtggcacctgtatcataccaccatccatttcccttgcacaaaatttacctcactaagagtagcaatgtaacgtccccgcttcaagcctccattgggtccttacacccacggaatgaatggctcttatacacgcgtacgtcactttggctgcttcctggattgatgactgaccctacagacca

SEQ ID NO: 363953 - DNA, 604 bp, Cannabis indica
agcactaatgtttatttattttttcacattcaattgttatatttaattattgtgataatgagataaatataaaaattgaattcaaagttcaaatcatccgcaataaagaaaaaatataatagtttgaactttctattttctataaatatgtatataaattaaataatatatagattatatataataaaaaacacacatatatatatatatatatataaaccctctcttagtcgggttggtcaggttagtttgggttgatatcattttcaccccttccaatgtaaagattagaccagttatattttcgtcgggttttttggtttgcattttttatcgagttatctcgatttagtttgggtggattgttcaactttggccgtttacatttatgtacaaccctacttttgaccttaccacgaaaagcatcgtttgaatacgatttcaggtgatgtttggtttggtggaatgtaatagtactggtaatggtaatagtaatataatcctcattaatatagcttttctaatgtaatggggattcccttgtttaatataagagtaaatactattttagaccctgtgttttgcaaaagttacagattggacc

SEQ ID NO: 363954 - DNA, 547 bp, Cannabis indica
gacaccaatagacgagaaaatgactaactttaaagaccgaaaacataaggctaaatataacctaacatcatattgtacacactagtctaagttatcatctttagatgtacaactagatgttgcatttacaaatacttatctgtcgagatctaacactattatgtttgtctaacggatgacaatcctttgggattagtctcattaaaaataacaaagctaagttagaccaacaatgaagattcgaaatttatactacaacattaataacaaaaaacaacataattcaacataaattcatacacttcaagaaattaatcatacattcagcaagtaagaaaaacaatagtgaaaatacaaaacaaagcacgtcttaaataatttccaaggtttccaacaaactaatacagtgtctcgtttaggcgagagtcaaagatatcattcattgaatagagtagtcaactcatctaaaatggataccattctagcaaccttttattttggatcaagactagaatctggtgttgtcctatttaggtgagagtcaagg

SEQ ID NO: 363955 - DNA, 532 bp, Cannabis indica
gtccatttttagataagctgacaactctattcaattgatgatgtatttgactgtcgactaaatgggacacttatatgatctagttgaaaaccttggaaaatttgagatgtgtttgctttgtattttctcatgtcttcattacttgctaaatgtttataaatttctaaaaattgtgtatgaatttatattgaacctgtattgttttttgttattgattatgtagtatcaattttgaaacttcattgttagtcttacttggcttgttgtttttaataggaaaatccccaatagattgtcatttgttagacatcataacagtgttagatctcctaagataagtattttgtaaatgcgacatctagttgactcatccccaatagatgacaacttagattagtgtgtacaatactgaaagaataaagaagtttataaaataagaataactttgactctcacctaagcgggatatcattggatttttattttaattgaaattgttctttagttttcctcttagctttttcattaagaa

SEQ ID NO: 363956 - DNA, 1217 bp, Cannabis indica
ttttttttttttttttttaaattttataatttaaaacttaatttaaattttttaggtacaaaaataattatctaaataaaatttaggtttgataatcatgctggttttttttgcactatttcttgatagttttgatgcattttatggcgcttgtactattttttaggagaattaccccatgtactgttttcttaactttttttttttttcaaatttacagttcgtgtttctaaagtggttgcaatgctagttgcaataggagtttctatacgattttttattgcaatttaggttccagcgctagtttcaatgggagtttctatgtagaattccgtaaaaatacaaaaaaaaaaactattttgaagtgtaaaaatgaaaaaaaccctattttttatggcttgcccctaattgtttagggtgtggtcaatgggtaagagaagagtttcattttgtattcatggctttgacaaatgacttttcatatatgacaaataagtatttcaagtcttgatattataatatggattgttttaccttctttattcacattacctattttttttattaaattatgtggtaatagagttttattttttattattctgtaggtcgatttgttggaaatattttaccaggatctagatttactaccatgtatgttgtttaacatcccaatatgaatttttaaaacaatgtaaataaacacatataaagtttaagaaaccttacattgattgcaacggaatataatgactccttccgttcagatctctagcccttgattcctttctgtagcagagcattatcagatctgaacctggatctctttctctccttcttgtttattgactcttcacagtcttacatactatgattaatgaccaacttgatgtgcgtgggcacttactcaatcactaatgggtaaaattatttagtgaagaaaggctaactgtttcgaaaattcaagaggaagaagaagaaggaagaggtctcatcagaaagctaggtttttagctttggaggcattagtttggatgaagagaccatagccttccttttatattatcttcaatagggttagggttgaattatatggtttaaaaaaaataaataaaatattgggcaaaactaatttgttggccgtacacttcaaagggtcaatctctagttacaattttgccactttatttcaaccacttattcttcttttcaataat

SEQ ID NO: 363957 - DNA, 493 bp, Cannabis indica
aaatgggctcccttatgcgaagtgcatgttcaataggtctgggcgtggccgggagtttcttcttcctcttcaatgcggtcacctgctcagcctcagcctcagcctcggcttcatcttcaggattcataggctcctgagtatactgctttgcccgggcacctcccttcaacttagcttcacgcttaagttgaatgagatcatcctcctaattagctcgttcaggccgggcagcatcagatttccgcttcttccccaccacggacttaggagaaaagtcctctgggtaaatcccatactgcaccagattctgaaaccgagtttgggatctgctgaaaccgagcttgggcgatgcagggatccttcaccatgaagtactcatcaacaaaatgccctattttgctgatggccttgttgtccgtcccgctcaaccacttgaagcctagctgagagaagtaaaaataccccgacctgcattgcttgggagtagacttca

SEQ ID NO: 363958 - DNA, 995 bp, Cannabis indica
attgttgggatgttaggcagatatttaagcaaccctggtatggaccattggatagcagctaagagggttatgaggtatctgtaatattcgcttttcttgaaaggtaattaattttctttatacttagtttattttttttgttaatggagataatttatcattttgaatatttatgagtttagtggagtatgatattttttatttgtgacaataaaatttattttatttttaatttattttgagggtgcgtataatgttagataaataattaaattattggagataatttaatatttaattatttgtgaatagtattataggtatattaataataataataatatatatgggtaaatatattgtagcatattatttagtttattattattattggtatatgtacactattttatatatatttattattattttaagttattaatctagggttaagattagagtttgggaatatatataggatgcttatgagataattttagggttgagaacacataaagaagttgaagggaggaggttgtgcgcagagagagagactgatagagtttcatgtgaaacttagagagagaaagagagattttgattctgaaacgcttagagagtttctgggtttgtttgattgctttgaatagcttttgcacgatctaaggaagctaatggtcatgactgcgctaagacagtaagtttcaaaatccacaattctcatgcacgttcaagcacttcttgagcaatctcgggtttgagtcatttctgggttaaaataagattgtgtttaagcttaagggactcctagaagacgtttggcgtaaaaaaaatgaaagctttaaggccctaaatgaaaatctccattgttggactctatttttaatggtacaccggcgacaaagaagacaacgactttggaccttattatttggtgagttatggtcggcttgagattctaagtgttgggttttatgccctaaataaaactcttt

SEQ ID NO: 363959 - DNA, 511 bp, Cannabis indica
aaagtaggacctatcaagctaagactctcagagataaacaaacagatatcagaactggttataagaggatttcaagtggaaattgttgagtaaaatccacttataaccagtcccttttacatacaaaaatccacatcagcattttacaacagaaaacaaacaaggactcaatcctaggtgtcttcgcctctactggatcaagaaataggagttagttacaattgttattgtaactaactcctagatatgtgatcaaccgactcaacacatgtatatataagtagaaaatcaaaacaaacagaagtagattacacagatcatagaagatagagagagaaaaggagtaaaccctagttgaaggcttctgctccaagatccagagatgagaagccaggttctcatggtgaggaggtagaagaagggagtacatgcacaaggaaatagaaagagagttagatcgagaacaaatcacgtgaaagaataaaagaaaagtgtaaaagagagaatcgag

SEQ ID NO: 363960 - DNA, 535 bp, Cannabis indica
aattttataattacactaatattatttttaatacgttattaaataatatttcaaatataaatatttaattttttcaaacaaaaaatttgtaatctttaaaaataaaatacattcaaaatcttaaataaaactagcaatacgtggctcggcacgtacattcacctagtatgttaatatgtatgaatttatttgaataaatacatatgatacctattttggtcattgtatatttgacaactatctaatcatttagtttaccaaacacttatataaaattttttaaactcacagttgttttaaaattatatttaccaaacactcagcagctttttctcacagcacagctacagctgctttttctcacagcacagctacagcagctttttgtcacagcacagttgtgccaaactggctctaagtgttgttcggtcagaaaacacttagtttgtcccgagtctttattgataaatgaacaagaacagtacaacaatttgaggtacagggaatcaaaagtttcgtttacatcatatctcac

SEQ ID NO: 363961 - DNA, 515 bp, Cannabis indica
aggcccaacaacccacaaaaataaggatatttgtaaagagtacttaattttaatatgaaaattagcagataattagggtttaataaagaaattagacttttaattctgatttataaatttatggagatatattttaattctatgtgtgatatttatgctgtaaagaccgcttaatttaaatttggaaattagcagataattagggtttaattatggaaattttttattgatatttaaataattatttatgttgatctatttgaattgagaatgcattttatatgtcatatagtaaaatttcataattttgtattttctgtgcccggcaatatggaacgcggtgtatggctcagtagaatcacaatttagtattttagtatagcgagacggtttagttagacattgggaatgtcgggagtggtcgggaatctagaatttcccaaaatacccttaaatgctttttaacccttttagtgtgggaggggcaaaatggtcattttgtcccataagctttt

SEQ ID NO: 363962 - DNA, 730 bp, Cannabis indica
tttttttttttttttttgcggtatgacgtgaacttcagttcacgatttttcctatatatagaaaaaataatataattaccacatacggtttatattgttccatgaagtgagtgccacttattccttctctttctattgagagatgaatattttaaatgtatatctggctagattgaaaattgtgtttagtagaaattctgcttcagattcttaaatatatatactgacaaatttatatataagttatatagcatgttttattgttattagatacatgagtatagatgcacatttagaggtaaggagggacaaacataatattagatttgacatgatagttaaattattttatagtatattatagaagataatagttcaaatcctaataaaaacatctttacctttaatattaatttacttcttatttccctaaaagaaaagccccccaattttagttcttagtccgttactaattaaatatataaatatataactatcttgctacattatatatatagatatataatgggacttagtggcgaatctagaatttaattggagggtgaacgcaaattttttcatatataaaaatattccaaagaaacaagtaaataaaaacgaaaacacaattcaatatttcaattcccaactaaaaagatattaaatatcaagcactaaaaatcttctaataaaaaaaaaaaaaaaattaaaaacgatgttcaaaatatat

SEQ ID NO: 363963 - DNA, 592 bp, Cannabis indica
tggtgcagtaagtgttgagagtaaatgcttaactgcctttgtgattatttatttatcgctttccgttttaggtagtatgtgagcatctagaaatgaatgtgataggaaaagcatgattagtgtcttctttaacaaatgtttatttaataagagaaatagtatgtttgagttagggtttaaggcaataagtgcgtaagtgtggtattggtgcctaactcgcctgggttgttgatttcaagggtgtttgtgaaaatggaccctccacaattatctagaccacagggcgagaatgtagagcatcgtaatgaccaaaccaatgcaccggcaccgcttgtgcctctgtagaatctgggggataatgtgggggttggtaatgctaatccacctgctgactggcagtaaatgttccttgaaatgcgaagcattatactttgtcaagaagatgaattgcgtcagtttaggcaaccggaactggtagctctagcaaaacaagtgttaccattagctcttgttccagtggtgggtagcccgtgatttatttgttaggttttatgccctaaataaaactccatttcaatgtaatctattttat

SEQ ID NO: 363964 - DNA, 699 bp, Cannabis indica
gaagcaattttgctgttggagctgttttgggacaacgaagggaggggaaaccttttgttgtctattatgcaagtcgaactcttaatagtgctcaaatgaactattccactactgaaaaagagttgcttgctgttgtctttgctcttgacaaatttcgagcttacttgattggttcacctattacgatcttcacagatcattctgcccttaagtacctcctttccaaaaaggatactaaggcgcgcttaatacggtggatccttctattgcaagaatttgacatcacaatcaaagacaagaaaggtgttgagaatgtcgtcgcagatcacttgtctcgacttgaatttagtgattctgctgatgatccacctattcgtgatgatttccccgatgaacaactgcttgctgttactaagttaccgtggtatgcacacatagttaactacttagtaacaggtgaacttccttctgagtggagttcacaagatagacgcaagtttctggtcgaggtgcgcaatttctattgggatgatccatacttgttcaagtattgccccgatcagatcatgcgaagatgcatccctgatgatgaggtgtctagtgttttgaacttttgtcacaatgatgcttgtggtggtcacttctctgtgaagaaaactactgcaaaaatcttacagtgtggcctttattggcccactt

SEQ ID NO: 363965 - DNA, 1161 bp, Cannabis indica
tagggtatagtctcagctaagcagttttcgactgcttgcccagtgaacatgcatcactatttatagggctagtaagcttagagaggatgagtttcctctctcgtcacaatgcgtataaacagaaagatcgtgggatcaatgctgaatacaaggatcgtgggattgatactggatacactaatagtgagatcgtgtgtatgccatatccctgtaatctgatccctgagatatagggatttcgttgatgactcacaatgtgaaagctgaattcgctaagtgttggcttctccgcgcgggtggctgattgctttgccctgggcatgccagcgaggcatcctgctcagactatgcttcccgagcagatgctccaagtggattcgacgtgtcaccattcatacgacgccacgtcagagtgcaaaaattgggataacattttcccctcaagtctgaacgggacttccaaagttgcgtgtagacttcatccgagcttcttttgcctttggatggggacacgtgtcaagcgcgaccgtccgagactcgatgtgaggcttactgggcgtcccttcagttttcggctcataaatgctctaacaattaatatttcgaaatccaattttctctctccacggctgacggctgcacttgattattttttatttcccatattcgcttttaaggagggaaactgaggcgtctgaggttcctttgagatgattacctcttttcgtgacttgcctataaatatcaaacagcattggcacataaactcattttcatcacccttctttgctaagtaagcttcagagcgaaaagagaagttcttggcttcaaagttgctgaagtgccttcatcaaagctgcttgttggattgacgttgctcgaacccagacatctgactcttgagtaagtttctgatttcctttatgcttatctttgcatgtttacatttcgaatgcaccttcgactttgctgtagaaaatgtctaggaaaccctaggtccagaaacttctgcgattcttctttgtcatgtcttcatgcgattttacagtccataatgcttgttttctgaactgcgtaacgtctgtctttcatcttgcttattataagcttcatgaactttttttccctaactcgagaaaatttctgacttcttgagttctg

SEQ ID NO: 363966 - DNA, 966 bp, Cannabis indica
gttgacgagctacctcaggtgctttgggcccacagaactaccgagaaaacagccacgggacacactcctttctcgctagcatttggcttgaaagcaatgttacctgttgaagtgaatatatcgactcacagaagagagttttataatcaagaagaaaaccaagaactcttaaaattgtccttggatctacttaaggaaaaacgaactgagtcgcaaatcaccaacgcagcataccaacaccgagttacaagatacttcaacaaaaaagtcaagaaaagactattcaatgttggagacttggtgctaagactagtctttgcaaatacgagagacgcatcagtatgagtgtttaacccgaactgggagggtccatatgtcatcgaagcagtagttggagttagagtctataaattcgttcgacttgatggctcgctaataaagaactactggaacgtagaacatttgcgaccctaccatcaataaataaatgatgtaactcgcattatgacgtaaactttaaacttcagttatgaataaagtaaatcatttatattaagtaattacaaagtttcattcattaaaaattacttaaggagcatttatgtattactaacgggaattcatctcgaaatacattgtataatgccaacccatcatttcaatttttttaaatgcaaaggttctcgactaaatctctttaacaaaagtagagttgaaccgtgataactccctgaccaaacctttttgacgagaaaggggtcaaatcgttataacaccttgatcaaacctttttgacaaagaagggatcaaacaactataatttttgatttataacctatctgacgagagaggaaaatcaaaagttatgagtcgcgtataaaactgaatactaacggttctcgcgagctaggaaagtattaaacgaggcatcactatgccttggtagaagtacttaaacctagaaaa

SEQ ID NO: 363967 - DNA, 935 bp, Cannabis indica
ggtaattgggtaaaccaatcatgggcattttcctcgagtgttgccgcaagaatgcggcactttgcgagctgcggtacctgatccacttccattatagtattaaatttttcaagataatctatcgggttagaagtacctttatatttgagggattcggatagacgaaacccttttggaagttgagcctgtcgcacttctgtagtgaaaggcgaggtaccatgcaacttatatataggctttcgttgctgctcgagcattttcaaagcctgcagaagcatgctttggtcaatccctccagccgcaggagccggggctgctacaactgcggggctcgcaactactgcggcaagatttgctgggacattaatcccagtggtcgcgatcggcgcggtaggcgggttattataagtattggcaccctgatcgtccgcatggggatcacggagtgtctcagtattatgtgggacgcgagagcgtgccctgaaaactgcgttgagatgatcacgcagatcacctcggtgtacctgataacgtcctccctgttgtgtctgtacagagccggaccttgtgtacctgcttggagtgcgaccatgcgatgacgaagaggctgactctgcgtcgttgtctcttgatggtcggctgcgaggattacggcgttcaggatcttcatcgacttgtgtgctttggtttggataccttgcggattgatccctcgacgttggatggttcaggtccagaccttcagggttggttcttcgttccctgcgtacacggttagtatgacgtctagaagtcgttacctgagggttatcggtgcgaatagcaggaactcgaggagggcgtcgggctcggttttgtccatctacttcggcctgtagtgcacgcagttgatcctgaatcgcagcatattgatcagtggtgagctggatcattcc

SEQ ID NO: 363968 - DNA, 507 bp, Cannabis indica
ggttttctccacttatgacaagaaaggtcttaacgtgggggacttggtcacaatggagaactgccggaaggccaagctcatctccaggagtcaatcgatagatgacttcaatctctccaaggttctatgcccaaatattcgtacccggacgctgaaaaggtgctcagggcggacatcatagcctcagcggaggaccggtaccaaaagtacctctttaggagggaacatgagttggcatatattaaggcttaggccgcagccaggaagacccttcgactggaggcgagcagagagtggacgccttctcaacctaagttgctggtcctggttcccaatactgtggccctagacgccagcacatccaaattcggtaagtctcccttaacagttcatcatgttccttctgcccaagagtattctcggtgtaggcctataggatttgacgagcatcttcttagatttaggatgcccctactcggtgggtgatcatgccaaagccttttattt

SEQ ID NO: 363969 - DNA, 382 bp, Cannabis indica
cccctctaaaccggaattccggttcagtgcaggaatgaccaaaactttcatatctcaatcaaatcaaccccaattcaaaccaaactttccagacctgctatttagaccataaagaacgaaacccaagcaacaaaacaactacggaacctcaaaatcaaatttcaccattaaagaccaaagtttgagttcaaactccaaacttgattaaatccaaccaacaaccaccaaaacctgcttaaatccatttaactaaacataattaagctttagaaaacaaaaccaaacaccaacagcagccacaacaacaaaacacaaagcatgcataaattttctttccttacacttcaagaaaacaaagaggaggttgcaagagctatacctt

SEQ ID NO: 363970 - DNA, 649 bp, Cannabis indica
tgtgacatttttggccaatttatcgagttttagtactgccgaacaaaaaatataaaatcaaattttatatataacatatttagcacaccaagaattcaataaaatctaatcattaaaaaattatttcataaatgtctatttcctatttcataatttactaatcaactgctaatttttatattaatcatgtggtcattataattatagtcgtcatgaggttatttttctaattgttttcggttgtttaatagtttatttatagttatggtgagtttgatttctcgttattctttagttattttcttattttatgttgaaaaaatgtagtttttgtaattttaaaattttacaaatgtattttacaataaaatttaagtcataagattgtaaataaatattaaaaaagtattttaaaaattctccaatattatttatattttgttactattaaattcttaatacatttttttttattaatgacaactttgcatgtatatggaagccttttttattctttccttgttgaattatatgttgatcagtcaattattattgttttcttattctttagaagttcaattattaattatgaaaaaagtgaaataaaaataacttggcgaatgatattttgcgctgaatgcatagaatt

SEQ ID NO: 363971 - DNA, 804 bp, Cannabis indica
tatggctgggtacaaggtttggagaatgcccttcactagaggaaggagggctagaatgaagacgaggatgctcctcgtgcaagagttgaagcaagtcctgatcaacccgatgtccgttcccccaaaactcacctgagttcatctacaagaagacatcacacaagatgagtgtttggtcagaatatcgaacgatagataagcaaatatgccgactaggagtactcaacagattcaagaacaagaatgttcaatgagaagtcagagctcaagaagtttgaaattttctcgagttagggcaaaaaagtgcatgaagcttagaataagcaagatgaaagacagacgttacgcagttcaaaaaacaagcattatacttgtaaaattgcatgaagccatgacataaaagaatcgcaaaagtttctggacctagggtttcctagatattttctacagcaaagtcgaatgggcattcgaaatgtaaacatgcaaaaataagcataaaggaaatcaggacttactcaaaagtcagatgtttgggttcgagcaacgtcaatccaacaagcagctttgatgaaggcacttcagcaaacataaagccaagaacctctcttttcgctctgaactcatttagcgaagaaggatggtgaaaatgagtttatgtgccaatgctggttgatatttataggcaagtcacgaaaagaggtaatcatttcaaaggaacctcagacgcctcagtttccctccttaaaagtgaatatgggaaataaaaaataatcaagtgtagccgtaagccgtggagagagaaaa

SEQ ID NO: 363972 - DNA, 906 bp, Cannabis indica
aattacatattttaaataactcaatcattgaaatacatggtataagtcaatttttaactatttaaagaattagagtacacaatatacaagtgtaaattcaaggttatttatggtcattaagagcaaagttaatttcttatcgaagaacataagagaccatgatggtcgcatagcgtaaattcaagttcgtttatggtcgtttagagcaaattcaagttcttaaaagtttgttgaagaacaaaagaccatgatgattgcatagtgtaatttcaagatcgtttatggtcgttcagagcgaattcaagttctttaaagtttgttgaaaaacacaaaagatcatgatggttgcatagtataagttcaaggtcgtttatggtcgttcaaagcaaattgaagttctttaaagtttgttaaagaacataaaagaccatgatagtcgcatagtgtaacattgtatctatgttatcgtcgttgagcaacattgtagctgactcgttgcacttaccagcaatgtgcattttcattgtcttaagcatgaatataccacaatcactgctataaagataaatttaactacgttagtattaatattaacagtttggatttcaagcagacatattaaataaaacttacgtactcttgttcaaagaaacagtatttgcaggagctacttttatactcatgagatctttacactgatgatggaggctcccaatatggcaactgtttttaagtaaaaaaaaggaaaatatgctgcaagtggctccatagcttttttcattgcctctatagagatccagtgatatggaatcgagtcataaatcaatattgtctagctatgtctgtcaactaccactaacatccagtgtgtatcatcattccaaggcacatagaagtaattgacat

SEQ ID NO: 363973 - DNA, 500 bp, Cannabis indica
tttgcatcaacttttattattattctctaatacataattgtaagttttgatacaaaatttaatatgttatttaatgttcatctaataattgttaaaaatataaaataataataataatataaaaataaatataaaatttaataataaaataataataataatgaaagtcatttaatgtaaatgagcatgctaactaaactttaataataaaatattaaaaattgcataatggtaaatataaaatcataacatttattgtaatataaattttgcattatgctatattgtgatctaagtttgaatcactttatgttatgtaagatattgttgggttttgtgtcctaaaaaacctatttcaatataatcaaatttactaattaataaagatcagaaatcgcattttatgttgcatggttcacatgatttatttcatgattgtttaatgaataaattttgttaagtccacaatatatgtatttgttcatgattatagtgtcgtc

SEQ ID NO: 363974 - DNA, 398 bp, Cannabis indica
aaaattaaaaaaaatatatacaaataaaatacgtttatgaaaaaaaaattatttttactctttgaatttttatttgtttacaaaatgtctcttcactaaaaataataaactgttttttttgttgttatttttaagtttatttatagttgttataatattatttttatgtattatttttaattattttataatttatttataattgtcataatatcaacattttattattttctactgagtaaaatatatttttagaatttttcaaatttttataaacctatttttataattaaaaattttaaaccataaaattataaataaaacatacaaataaaaaaaatagaatatttaaaaattcttccaatttttttttttttttattttctacaaagaagaag

SEQ ID NO: 363975 - DNA, 916 bp, Cannabis indica
taaatagagttttatttagggcaacaaattcaactagaactcgagtttaattcgcataaaattaatgtcctaactttaattttcagatccatacatgaaatgtagatcttaaaaaattgagttggagttccgaaacaatccaactcaagtataatctaaaaatattacatgaatactgtagtaaaatgtttatcctgatgtattttcgttgttttccaaatttataaccgtaaatttatttatattaaatcacgaagagacatatagatagagttacgtaagtggaagtactgttttaatctttaatatttcataacagttgcataaatattttgctaacagttatttctccacatattattattaaggtacaagtaattatcgatcagtgataaaaatatactaacaaatagtttcttacagatacacatttacatttaatatttttagttgtaattaagttgcacgttagttgaataatgtttttgctactacaatatcatagtattataaaaacagggcccgaaattttcaaatacgcgacctgaacagataaaacatgattgttgtattattcgtttgtactaaatatgtagaattattagtttttttgtagttttatgttagttggctcgcaacagatataactgttgcattacagtttcatcacagtttccttgcagttgacttcttctttcctttctggccgtcgaagttgaaattctttttaggcaaagacaccttcgacttcttcttcacttgatgacgaccacctttagccacgaggggagcaaaattacagtcatcatcgtcgatgactgggcgtttccctttagccttgttaacaactgatttatgacccatttttgaagctttttttaggcaatggagatggagaagcagaagatgatatata

SEQ ID NO: 363976 - DNA, 373 bp, Cannabis indica
tttaggacataaaacccaacatcttcagtgtccactttctccaccagtacgtcccgtcttgccacatattccctaataacgtggtatttcttctctatgtgcttgcttcacttgtggcttcgaggctctttactgttggctatagctccagtgttgtcacaaagtaaaaccagtggtttttccattccaagaacaagatcaagtcctgagaaaaactttctaagacaaacaagttccttagcagcctcagcgcagctatgtactcagcctccatggtagagtctgatattacagtttgcttagcacttctgcaaacaagtactccacccccaagagtaaaaaaccatcctagatgtagacttcttgtcatcaa

SEQ ID NO: 363977 - DNA, 724 bp, Cannabis indica
aatccaatatttaaaaaaaagtaagcttaaaatatttgaaagtcacttttattattttcaaaaacgttttttttttctcatattattttgtgtcaattacaatacttattttcatattttttaaaatcatgtatatatattttttattttttttttctaataaaatttcacataattttttattataatatttaaaatataatttgtttgatatgtatattttttttaagaatataaattaacaaaaaaaaaataataataaaaaaaaactaaatataatttaagataaaaaaaaatttaagggattgcataagtatctaaaactttaaatttgtaagtgacataaacttaatatttattattagcggcataagtattcaatatttataaagttgtaatttttcttcaatttcgtcattgtagactctattttaaatttagtaaaaaaacattaaaagtaattgatactacatgtttttatatagagccagtaatttaaaatttagttttatatgtatcttgtttaaaataataatagaatttgtaatgagtactaatgaaattaaagaaaagttatagttttacaaatgctgagtaaaaataaatattgaatttatagcatttacaaacttaaaattttagttagttatgctcatatttatttttgtaagttttttttatttttttatcttttacactttctaaaaattagtttttttttttt

SEQ ID NO: 363978 - DNA, 504 bp, Cannabis indica
tgagattaatctttatccttccttgattgatgtgattcttcataatggagccgtcactagccctttttattatcgtgtaatttccgtaaatgaggcttacgttgtcttacatgtcctcttatgggcgttcccaaacgttttccccatgctgcattgaatgcgaggtgattgttcgaatatgtcctcctcttcccgaagatgctttatcatattttagctcctagagaggaaggacatgctttttgcacttcttcgggggctcactccctaaactacacttgttcgtctgtatacgtctcacctaagtcttgggtgaggtgtccgtttggtccacgtatcatacgtagttgtggccatatattttaggaaaaacccggggcaatagtatataattttattagtacggtattctaattttcagtaatacgatatattaaatactgatgtatatatttaatgatctaatatatttagtcatttctgttacaatataataatatgcaa

SEQ ID NO: 363979 - DNA, 386 bp, Cannabis indica
gaaagacttaagggatgagatgcctccagtatcatttccagtaataacgatgtcatcaacatacaccactaacaaaatgataccaacagttgatcttttataaaacacaaaatgatctgacttacttttcaacaaaccaaacttctcaacagcctgactaaatttaccaaaccaagcacgagggctttgtttcaatccatataaagatttgcgaagatgacaaactcgccctaactccccctgagcaacaaacccaggaggttgctccatatatacttcttcctcaagatctccatgaagaaaagcatttttaatatcaagctgatgcaaaggccaatgatgagtagctgccatggaaatgaacagtcgaacagatgtgagtttag

SEQ ID NO: 363980 - DNA, 514 bp, Cannabis indica
agatagagttcaagactacggtcactctagtaaaatctaaatcgtattcactacgcagaggttcaaatcgaaagatacctttgtttatgctcaatcttattgttgaatgatactagtagatggaaatatttttttaaaaattcaagtgggggattgttggaaatgttgtgaatgttttaacaaaatatataagtgtcttagtgtgtgtgtgagttggaaagagtcccacatgggatatgaaccctcatttacaagggtataaagagtgcaactttggcatttgggtttgggccccaaggggtacccagttttgtgtgaatgggtgaggacacacacacttgacccaccacacgcgcgcgccgtccgtccgtccgagccgagccgggccgggttgggttggtgtggtgtgacactatattattttttacagaaaaattatttaataaaataattattttttttattaatttaattaagaaacgtgtttaatgaaacagattacttagtcgtatca

SEQ ID NO: 363981 - DNA, 616 bp, Cannabis indica
aaaaatcaaaatcctcttgaactctctctctctcttgctttcggctgggacaaaccaaggagctaggactagattttccttctcttttctttgggattgagcaaagattcaaggctattacaagtgaggtaaaaccctagacctttgaatgttatttataagctttttatttaggttgaatgtgtgattcttaatgttgggagctgttaggttttaaaatgtttaggattcaatttctaaggtaagttgagttaatctaagtccctagcagctggttttgatgcttgatgttagttctaagcaagcttgagttttgaaactcaagctttgagctttaatggcataatttgatttattggtttgtcctgtgaattattggttagaaatggttgtttatgcattgtataggtgtactggagagtttgataaagtttggttgagatttgaggtcatgggggaaattttcgggttcccagcacagaaccgaaattccggttctgggggacctgtactaaccggtcgaccggatggtgacccagaaccggatttccgaatgggaaccggtctgcctgttgggggaaatttcagaaccctagttttgcccaattttgagata

SEQ ID NO: 363982 - DNA, 795 bp, Cannabis indica
aaattaggcagctggtcattattttgctcctttttttttattttaatcgtgctcgtgtctcaaaaaaaaaattattatttaacttttgtattgaattaatattgtgtaagtgagatgaattaatttttgtgaattgttaggacaatggaagagggaatagctaaagccaacaacacaaaatatgggctagcagcagggattgtgacaaaggacttgaacgtggctaacacagtttcaagatcaatccgagctgggattatttggattaactgttaccttgttttcgatcgagattgtccttacggtggatacaagatgagtggatttggaagagatcttggcttagaggcacttcataagtatcttcaagtcaaatcagtcataactcccatttacaactctccatggctttaattatttcagatttgagtgtaccagctaatacataatattgggagttgtacaattttttttttttatttttaaggttattctataaagaaacttgtaagattttccttttttgaacatttaataaattcgagtgcttaaaaagtgtaaaataaatagaatcattcaataatatgagaacttgttattgtattaatatcatatgactactgttgtggctgttttctacaattacgtaattgtaaaccaacagcttgtaaaggacaaaggaggcaagagttcaaataggagcactagtggagtgtcagtcaaaaggactccaaaaatcaagctagtatgattgcaaattgaataatgagacaacgataaataaataaaataatg

SEQ ID NO: 363983 - DNA, 703 bp, Cannabis indica
ggtttggataaatttataaatcaaataaacatataaatgataacatgaaccaaaagacacattaaataagtgatgaaaatacttctgtctctttattgatatttaaataatagagattacattgaaatagagttttatttagggcataaagcccaacatgctattcatcgataaggaaatctctagttttgattttaagtccccgaaaagtatgttagcgtgtctctcatcagagttacgaatattgtgatatagggtcctgtaaagcgtcgagctgctcttccctatcgatggataacatggcaatactctaaatatcgtaaaaactaaaaaatctagggtgccctaaaatgtcccaactgatagaccagttcccaaccagaaaactgaatctgtggggttgacaggggaggaaccggtagacaagttcctacaggtccaaactgaactggtcgaccggttcagttcaggaaccacaaaaactcttctaagcaattcaaatcaatcccaaattgaaccaaaacttttagaccacctaattaggtcacaacaagcataattcaagcaataacatcaagcaatataccgagaaactaaaaataccattgatcaaacctcacaactagcctctaactcaacctaatctagcataaataacctcaaaatcacttctgaaaataggaacaacaacaattcaaactta

SEQ ID NO: 363984 - DNA, 520 bp, Cannabis indica
ttattttttttttcaattttttatcttaaagtcgacaatatatcgacatgtcatcgatatattgtcgacactgtcagtcgactaaatgtcgacatcctatcgacaacttgtcgacaaattcgcaaataacttatgtatgttaattttctttttaatcgacataatatcgacaaactgtcgacaacatgtcgataatggtcatccctgacctattttagtaggatatcgacataacatccatattctatcgataaactgtcgataacatctggaaaacttagatttcgacagaaaaccagatctgcgagatctctaccgtttcaagccaaaaaatatcagttccgacaaatacgacacatataacgaaagcaaactacataaagtctaacaaaatgcttaaagcacaacttacccattataatggtgtaagattcttgagtgagattggggtgtgctccagttttctaccaccgcccaccgagaaacaaccattcgacagggacgagagagagggacgaga

SEQ ID NO: 363985 - DNA, 427 bp, Cannabis indica
gatttctatcttttgcacttgcaaagtgcatagtttttgcgacgatacgtatgccattattttgaacctctcgagtattttgatttcttagaaccattgattgtaacaactccatatggtccgtgtaaacaagtaaggtaaatcaagttattgttcatcgtgacttaagtaatgttaatcaaagaaaagatacttacgttatatatggttgaacctctgcattattgttcatcatgactaattgagcttgatctagttcaagcttggacacgatcaccatggtccctttcccccttaatcctctatcaacctcatctgtgtcagttcttggtttgctaattcctattgcctcaactccagccatgtactctgaacaaaattctgttgggtttggtgccctaaataaaacccattacaatctgattag

SEQ ID NO: 363986 - DNA, 568 bp, Cannabis indica
ccgggagcatacggggctccgtatgccttctccgggaggcacgtcccggatgcgcaaaatcaggggcaacaattagtaactatgtaataaccggttgagggaatctctcaaccacttgagacaatatctcaactacctggagagatctctcaactactttgagtgaatatttaaaccaccataaatatctgtaactactttttaaattaaaatttaaataaatatttatcttttaaattaattaactaaataaaaaaaaaaatatagtggggcccatcttatctcataagcgcctatcactgtgtcctaatacagtgactggcaccaccattgtattaacaagataattgtgatgtctttgtctagacaacactttatcttttccctaatttttttaaataataaattttaaattaattatttattgcaaaataaataattaatatttttacaattcaaaataaatttttctgaatatcattatatagttttatccatccccttgacagtattgtataaggtggtaattcggggaccatggacctataatactgagctccaataagtt

SEQ ID NO: 363987 - DNA, 586 bp, Cannabis indica
tcataccaaatgctccctatgggtacctagttaccttggcccgagtttctcatatttttgcatagacagtacaaaaattccataaaatttgtaatttcatctttgtatgttctttggttgttcacctccctttttcgctttgtagggatgaacccacacaacttttagggaggtggcaaccggattgacgaagacttatcagtctggaggctagtccttttgatacaactttgaacccgtcgaccccaattattatttaaagacatctgaggacttttgtaatgccatgatacttaggcgctacgtgattttctaattattgtgccaccttttctaatcaaagaattttctataaaaatcatgccaaattacaatttttaatttaaactattaatctttataaacatatatatatttacataaactgaaatcccgtgtgtaaacttttacaatcataataaaatacttttacagacatgttgcactatgactacaaaatacaacccaagtcgtcccgagaccaaacactccaggtcgcaccgtctcgaaatgtacatcatcccccgagctcggaactgttggtttt

SEQ ID NO: 363988 - DNA, 1248 bp, Cannabis indica
gcactaatcgcatgcatcttttgagatggctaaatagagaaacaacatctctccagttattggttttgccaaaaccagaggcgttgggagatgccttttcatgttttgaaaggcctcctcgcactcttttgtccactcaaacttcttgttacctcacagtatgttgaagaacggcacacacttatcagttgacttcgaaatgaatgtgttaagtgtagacattctaactatcaaggcttgtactttcttcggctttgtcggtgatggcatgtctattaatgtcttgatattttcaggatttaccttaatacctctcgcgttaactatgaatcccacaatttttcatgaggaaacacaaaaggaacattttttcgagtttagcttcatgttatacttctttaatatttcaaagcatttcgcgaggtctgaggtatgatccttactttttatcaattttaccaacatatcatcgacgtaaacctccatgtttcgccctatttggtttgcgaacatttcgtttactaatcgctaatacgttacccccagcgtttttcagcccgaacgacatgactttataacaatagagtcccatgttggttacgaagcttgtatgttcttgatctaggacatacatttttatctcgttatatctagaatacgcgtccataaatgacatgagctcgtgcctagcagttgcattcaccaactggtcgatcctgggaagtggaaaatagtcttttgggcacgccttactaagatctgagaagttcaagacgagaacaggattggctatccatgaatcataaaacacctcgcgtataaagtcgttggctaacaactagtcaacctcatgttttagtgtcccttgcctctcgaaatccaagggcctccttttctgtctctttgctgggtagtttggatcaacatttaagtgatgacaggaaatattagggtcaatccctatcatatctccatggctccaagcaaactgatcttggttcgccttcagaaagcttgttagctgctatttgagctgctcgtccaggttcttcccagtgtacacacactttgtgggatttcctgggtcgagaatgacctcttccaattcctcgattggtttcagcaggtttctctcatcttgaactcgggggtcaagatcttcatctttctgctcagtttcttctgccaagatcgccatcaactaatgagcggcttttctatgctgtatagctctatgcgatagcaatc

SEQ ID NO: 363989 - DNA, 540 bp, Cannabis indica
aataaaatggactcatggactaatgatagttaatggctgaaccacaaaaaaaatcttgtatttgtcatttaatctgttatttctttcctaagctctaaatatatagttgccaaaaatctcggtaaacatttcggtgctttcattgagagttgaagaaagatagaaacatgtgtggtgtcttctgtcataaatctgaagaaggaaggctgcctcattgcccgcgagggtcaagcctgagatcaggggtgtgttggtcagaggtgtcatcgcaagtggaggcttacacccttgactagacaaagaaaatatagaagatgaacgcatatggtcttgaaatgtttgcagtacccatgcacgtatataaaagttcatatcttggcgtccaactctctgaggatatggctatccattggtatcctcaagccaaattcccccattgtccaatggggtatgaccacgcagacacaatgtggtgcaagaggtgttatggccaagtgaggaagctaagactagttgtgattacgatgaataacttaggaa

SEQ ID NO: 363990 - DNA, 639 bp, Cannabis indica
agggcacaaaacccaacatggtattccttaacctcccaatgaaagtttgacaatactcgtctgcaatccatttttgtttatttttataatttcatagaaccattgattgtaatatcttgatatggtcactgcaaaacatgtaaagttaatcaagttattgttcatcgtgactaattaaatgttaatcaaaggaaaagttatctataacttacgttatatatggctgaacctctgcataattgttcatcacgactaattgagcttgatctagttcaaacttagatactgtcaccattgttcctttcccccttaatcctctatcaccctcatctaggtcagttcttggtttgctaattctaattgcctcaactccggccatgtactctgaataaaatttcacagcctcttaaggaatgtagcactcaaccatagatgcttttggtcgatagtggttatgcacataacttttaagtaccttcatatttcttttaaatggatacatctatcttgcctaaattggcccacacaaccttacttctctcaatatatgaaccattaaatgtatcatgacgtggaaaaaaaaaaggcagaaaaaactttttgaggttgcacaatggtttgactacatgttcatgtaat

SEQ ID NO: 363991 - DNA, 792 bp, Cannabis indica
actaatgacgtatctatatcgtttaacatatagaacgttctatatgactgagagtgcaattccgattgtcaataggtcaaataaataatttgtaacatgtaaattttgtaatcttctttcatatgtgtataaacctagtaacatgattggatccatctaaatcaatgtgtgcctgtgcctatatgtttgttttgggcctaaatgcatatagggagcccatttaattttgataattaacatggactgggttgctaaaagaaaaatatcacatttgatagtttttatttaggtctaattagtattgggcttattcaattcataacaattatttaattaaggttaaattcatctccttttgggccttgtgtgaaagttagggggccattagtagtgggtacgacatactaaatccaaccctccctcacatgaataaccctaattttgaagacccattcaccttatttgaataattgtattaggttaattacattagtttaacctaataaaattaattatatatgaaattatttttttatcacaattattttaaaattaatttaagaaaaagacacttagtttaatgaaatatattcaagataaattatatgtatttttctgtatttaattaaataaagaagctataactaattagatttttctagatacttaattatttgaattttcttagaaatatatttaagttgaaaattattttatttcaaatagattttagatcaacttaaattagattttttttttaaattaataattaagtagatttttctaggaaat

SEQ ID NO: 363992 - DNA, 660 bp, Cannabis indica
ttcttgagttgtaagaaaagtaatttttgcatgttgtgggattttagttgctgctgttgttgttgatgtttgttggttgattcagtagttaattcatgtttgtttaagtagattcaagcagattttgttagttaattagttagatttagccaagtttgagttttgaactcaaaacttggagctttaatggtgaattgagtttttagttgctgaagttgttagatgttgtttacagaggtttaattatgagttattatgttgatctatgcatgaattggttgttgttttgttggttgagcaagcttttgagttttgaactcaagcttggctcattaatggcaaattttgattctgtgtatgggtgaatgttttattgccttgaatatgttctctagggtgtttagaacaagtctagaaagtgtggcttggtttggagttgaattgattgagaaatgaaattttgaaaaattcttgcactgaaccggaattccggttgagggaggccaataggaaccggtctaccggttggcttccaggaatttttaccagaactggaattcctgttagggaaccggtctaccggttgtggaaaatttggggacacttgttgtaacaccctaactagcataggcgtattacgttatttttaaacatactgtg

SEQ ID NO: 363993 - DNA, 546 bp, Cannabis indica
acgtttcagatttcttttgcattaggtaaatgaaactgtatctagagaaatgtcaatgaaagtgacgaaatactcataacctcctcgggctttgacattcaggggtccacagacatctgaatgtactaacccaaggggttgtttggcacgctctccctttgcagagaaagaatgtttggtcatctttccttttaggcaagattcacatactggcaattcacccaagatgacatttttcaatggaccgtctttggttaacctatggaatctgtcatagcctatgtcacctaatcgtaaatgccatagataagtttgatcatcattatcaatatcttttcttttaaggtttttaggtttagcaatattgaaaaagttcactattaagtgcgatttgtatatccagtcttaaaacataaagccattttccatgtgagcaacacataattgaaatccattatgagaaattgtgcaaacataactcaaaaaattcaatttataaaattgtgtctgcaaacatgaaacactaatcaagtttctactcaaatt

SEQ ID NO: 363994 - DNA, 662 bp, Cannabis indica
aagagaaaaaaattattaaaatagttaagacttaattatttgttctaaatacagattgcaagaaaaatcatcaaataacttttagggatatttgtaatatatatactttatattttcaaattaatacacttatatatatatatatatgttttttaacagattaaatataacaaacattccaatagaagaagaagaagaagaagaatgtaatatccagtttaaaatagtatttaattttttttttcggatattaattgtgcgaggataattatctcatttatttgtgttgttagtgagttgatattattgcttagagtagttgtaccaattttctagagagagttaaagttgtattaactacgaaagtaaaatattatggtatttttacaaagtaggtaatcgtttaattaaaacccaatatgaaggtccattaggattttataatatatttagtgggattaattaattaatgttaaaaattcatagatttggataaattcataggattaaaaaaattattttactaaaacgatcatatttggagttctaaggctcagattgaggtgattctagtggcgttggaaagataattcgaagatctatcaattatgtagaaatagatttatcttaattttattggggtcaaaattaagctacaaagt

SEQ ID NO: 363995 - DNA, 1035 bp, Cannabis indica
tcttgcactatttttattttctaattttttttttttttttgtaatttttatttaaccaaatagaagtataagtttaattttaacgtacttaaccagaatccttgtgggatcgacctcactctcggtgagtttgctacttgcaacgatacgtgcacttgcgtgtgcagaatatcacaacaagtgtttggcgccgttgccagggattgatagttaataatattaaaaatcaaattttgttctaatttggtttttcttttcaattataatactaattctgtttgttttagaatcttatctttttcaggtgtaactagtttatgagaagtctaggtacaattgacagtttacctgttgatcctgaaatagaaaagacttgtagaaagaacaaaagaaggaagaaattggaaagagctgcaatagagattgaacaagaaggagtgatgactgacaatgctaataattaatggcaacaatagaaacaacagaggagctatagaagaccaagctaatggtcgcaacaacaatgatcgtagcctgagggaatatttgcttcctaacttaacaggggctagatcttgtataaggccacctgctgttgacgccaacgattttgaaagcaagccagccatactgcagatggtccaatcttcagtccagtttgggggactgccatcagaagacccaaacatgcacctcaccaacttcgaagagctttgccaaaaattctagatgaacagagttaacaatgacgccatcaggctaaagctgttcccattctcactaagggagcgagccaagagttcattggtatcttttccatccaattctatcaatacttgggaggaattgaccctgaaattcctttccaaattctttccccctgcgaagattgccaagctgagagttgaaattaacaactttatccagcatgacaacgaatctctttatgaagcctgggatagattcaaggacttattaaggaagtgcccaaaccatgggattgaaaagtagttacaagtgcataacttctatact

SEQ ID NO: 363996 - DNA, 743 bp, Cannabis indica
aaaaattataaccggttttatgagatattatgtgttatgaagtattttattgtgaaactagttttgtttttaatttatatttcagtgttttaggaacctctttgtttttaattgtaaccggtttgagttattacgtgttacttgtttatattcattatgttatataaccagttctattttagctataaccgttttgagttattttgtgttatttatttttattcattataacactattatagaaccggttctattttaattataactggtttgagttattttatgtcatttatatatatttattattgttgcccctgattttgcccaatatacgtggaccaaccggacagggacacgtggaccaaaagatcttaacatttaaattaattgctaagtcttgatgaagaaaggcgtctttcgggacctgcctcttggagaaggcatccggagccctctatgctcccggaggcctaagtaacatcaaagcatctccgcgaggtgtcaggcttcccctgagcagtcatctcgcatttaatgccgcatgagaggaaacgtgttgggactgccacacggaataaagtctgacgaacacaacccccaatctgcacctacgaagctatgatcacttaagtctattgacggctacactgcgaagagtcacgtcagtcaaaaggcaataaggacattccacataaaagccctacaacacctagggatttgaccatgcattacccatggtatat

SEQ ID NO: 363997 - DNA, 1053 bp, Cannabis indica
tttaattttttttttaatataacctcgagacgctagactttgtctcctttatggatggttattcgttgaaagtacttaacactgtaacatctcgtatgataagtattttgtaagtttttgtttctattagactctcccttacagtgactacttagaaataaacttacaaaatatgaaacaatggtggtagctcaaaaaatgagaataaccttgactctcgcataccgggagaccgttggattcttattttgatcgaataaaaggttgctaaaatggtgtccatcatcatcattctatataatgcaaaattgcaatagaatcttgagctgcaacaagatatgtcttatgaagaacaaccagttcatatccttgacagaaaggataaggttcttcggaacaagaccatagttctggtcaaagtactctggagaaatagcaaggtggaggaagccacatgggagttagaatcagacatgagagctcaatatccagaattattcaggttagatttcgaggacgatatccttttaaggggggataattgtaaagaccgcttagctttaatctggaaattagcagataattagggttttaattatgaaaattatttattagtattgaattaattatttatgatgatttatttgaattcagaatgcatttttatgttgcatatagaaatttcataattttgcatattttgtgtccgacaacattggaacgcggtgtatggctattagaatcacatcttagtatttttagtatagcggtacaatattttagacattgagaatgtcagaaatagttgggattttagaatttcccaaaatacccctaagtgaccttttatgacttttagtgtgggaggggcaaaatggtcatttcgcccaataagcttttgtctttttgtggatttaattagataagtttaatcagatttttaatattgttttggctaagattgatttagtaaaaccaatctttcatttcatttattcaaaaaatagaaattttggaaaaaaaaggatagcatctctctctctctctccatct

SEQ ID NO: 363998 - DNA, 841 bp, Cannabis indica
agagttatttaggttttttattttacagaggtataatatgtattttggaaaattttaggtatatactagtacaaaattattaaggggccattttttgatggggtaaatttattacatgaaaaatacaaattgacactttatttacaaaaataccctcataaggtgtggacaatatttatatcttttatgtgcttttaattaccaaaatacctcttacactatcacttacacaatcagaggacggttgtttgatggttgttgggtggttggccgaaggttgcatcagacgaaagtttcaatcaaacgaaggttgttgggtggttggccgaaggttgcatcagacaaagctttcaatcagacaaaggttgttgggtggttgaccgaaggttgcatcagacgaaggttgctaggtggttgaccgaaggatgcatcacacgaaggtttcaatctcaggaagcatggatcatgggttgctgtttaaactgtaatgcaacagttatatctgttgcgagccaactaacgtgcaacttaattgtaactaaaaaatgtaaaaaaaaagtgaatgtgcatatgtaagaaactatttgtcaatattttttttgtcattgatccataattacttgaaccttaattagtagtaacatgtggataaataactgttaccaaaatatttatgcaactataatgcaacttttatgaaatattaaaaatcagaacagtatttccacgtacgtaactctatctacatgtctcttcatgatttaatatgaacaaattcatcattagaaatttaaaaaacaacgaaaaatacaccaagataaacattttattatagtattga

SEQ ID NO: 363999 - DNA, 1032 bp, Cannabis indica
actacctcacgcccaaatgtttcgggtttgctagagtcaatcacaactactaaaaatcctacacatccaatgtgtagtagatccctagctcttaacactaaaataactgggattcgagacccttgaaccgatccaacatagacaaatggatcttcacccactggctgaaacgtcaccattttccgcttacagtctatacgagccgaatacttggacggaaaatccatcacaagtataatgtcaaaccctgtaaatttcagctctataaggttagcactcaactccctattattgatcctaacaggcatagacctaatgcgcctattggagataaccaactccccgctaggcattagggttccaaaccctcttttaataaaatcacatggcctacctaagagatcgattacccgtgtagccacatatgagtatgtagctcctgaatcaaataagatagtataaaacgacttgttgataggaagttcacctgtccccaaaaaggactagctgcagcattagcttgagtgacggtaaacacccgaccaagtacatgttttgcctctagcttatactcttcttttttggcctgagggcaatctttcttgaaatgccccaccatgccgcactaaaagcatgtcttctggttgcattcttcgggatgatgtttcttacaacgtgggcactcagggtaagagtaaccttggcgtccacctctaccttggttcccacggaatcgcttgctctgtccagagccaccagatgctggggtaacttttctcctctgattagttgtggaatcaccaccatccctaccataaagaggagtaggaagagtgggggtcccacaaacactcggagtcacacgaggctcctgaagaaacttaaccacaccctcttctcgcagagccttctcaaccatcttcgcatatgatgttgcctcatttttattaatcaccgaatcatgtctaattttcaaattaaaccggccagatatttttctttcttgaattctgtaggcacaatacccgaggc

SEQ ID NO: 364000 - DNA, 719 bp, Cannabis indica
taaaataatttccaacatacataaccacacattttcaaggcttcataaagcattctaatcttacatccctataaacacatattcttacatctcgtgagtcactgaagctctgcatggaaagtgactaatttcataagcaatataacattcatccagtgacactataatgaaaatgtattcaattacaactcatcacataatatcatgcttaatccatttcacaacatcgtaacgacacaatcttggtacttcataaagtacccttaccactcgttaaccacgagttacatatgtcactatcgttgcctgatacagcaaacgatacgtaagaaacctatctgcagttttaggaataattactcataacggtaatgaccgtttccaatcctcacaactcattatccacgggctgcatatgtcactatcgttgcctggtaaaacaaatgataggtaagaaagctaaccgcggtttcaacgagtaattactcataacagtaatgactgtttctaaccttaccactcgttatccacgagctgcatatgtcactattgttgcctggtaaagcaaacgataagtaagaaacctatccgcagtttcaaaaatgattgctcataacggtaatgaccgtatcttaattcattcataacaacgttgataaccgtgtttttcccttaatcataaacaattcacaaacaacaataattgtttctcatcatta

SEQ ID NO: 364001 - DNA, 500 bp, Cannabis indica
ataggtgcccccaagtgaccaagaagacttttgactcaaggtcacttgtttttcacaagtgtgctttttgtctgttcgggtctttgggtacgagtagaccttttgtacgcatttaatggtaaatgaataacttgctaataaacttgactcaatttgaattgaaataaatatctttattcatttattggttgggaatatgtctgcaaccgtagtaacttacattgaagctattatattgatctagtctgatctttagcttaacataaacaaaacaaattgcagaaaataaaaactgtactttcataagtgttcacccgacctgagtactttttcattttatctgaacctttgggcgtgctccgcccaaaatgccattcacttaagagtaaatgttcttttgtttcgtacttaacatggtcatccgacatagtactgttacagttagtattttcttaaatgttccccgttccaataccttggtactagaacgagtgtcttct

SEQ ID NO: 364002 - DNA, 1065 bp, Cannabis indica
taatggcagaaaccacaagacaaggggaggacaaattttgggagaatataaagatccttacgatcaatacttgtatgatacttgtactctgtaataaacaaaaaacctagaaataagatggacttatggactatgaagtatttaacttacaaaactacgtaaaatttctttgtttattatctatagtcatctctcagtaatatttaattgtcaattaaggcttattatgagttaacaaaaaattgcattaacataaagtattagatgagtttataggttagtttagaagttttttaatgtttattttgatggatatgtgtctatagtgaagtgtaaggcaaacttgagtttttgaacagaaagttagatgtttaatgacaacttccataatttgatttgatcatgaattttatcaatttgggaatgttatattgatgccataggaatgctctgtgaagtttcattacttttggttaggtttggagggtgttggaggcaagaaaaactcagggctcattttttgcagacgaatggcagaccatttttggaaaatcggtcaactatttttttgggcaagaagagccaaaacagtctgtcattttaggtaatgtttaggaccctgttttatcatattttctcaatatttagggtattgacatgctatatattgataggaaaactctattaaaaaattaagaataaaaacgggataggtcaagtgctttaccgaccaatttatcgttcttgtgacttaaggtcgggatcgtcaggcgtttctctatttgggttggccgacatgcaagaatctaaaattaaatgtaagaaaagtacatatgcaccacatagcatgtcaagatatgatcaagattatttgtgaattaattggttatgaaagtaatgagatgatcattaccgtcatgaaagcaacgagacggtcattaccgttatgagagtaagtgacagtcattactgttatgaaactaacaagacgatcattaccattatgaaagtgagaaagcagacataaccgctatgaaagaaaagccataactctaaatagaaact

SEQ ID NO: 364003 - DNA, 1610 bp, Cannabis indica
tcaccatttatattaagaacaatgttagatttgaaaaaatatgaaaacctgattcgcaggacgagggtaccctagaaggatcagggggatccctgccatcaccatccccaccgtggtatgtcgctagactagctgacattgtactttactttgaagatgaaaaataagaaaatgtaaaaattcacaaaatgtgaagcacataattcaaagttgacacaaatattaatacgaaagaaattaaaaagtcatttaattatatagagtttttgtaacaaacaatagtaaaattaaagttacaccgacgaatcactatcatttccatcattcaccaagttttcattttcatcctccacatgttcaactagtaaatcatctacttcttcgacaacataattttcatcaagttcattattctctatctcagaatccactaactgatcggacgattcaacaattactggaggttcattcgattgcaaaatcaactctccaagatcaaccgtcaacacaaaatttgaagagttagaatcattaacaacatcaacatctgtctcatcttcattgtcattaatgtcccaaatttgtcgatggctaatatcttcaacaaccttccaatcgcgacctctgagtggatcttcaagatagaaaacttgcttggcctggttagcaaggatgtacggttcatcttgataccaaaatccacgtatatttatactggttatattattttcagtgattttcttctttcttaatggattagtgttataccatttacattcaaacaatgtcactgtatatgcaccagtataagatatagtgattacatcttcaagtgtgccgtagtaattaaacccttcagttccagcaacagtaacaccactattttgtgtctttcgcttttggtctcttttagacgcaataaaccgaacaccattcaccacacaaccttcgtaaaatgtttgctaagtaatcggagctagaagctagagcgagtaactcatcagcattttgtgcaactcatatatctaaatacataaaatgtattaatgtgagaggaatataaattattgaattaaaactttaaaattttttcatcataccttcttatgaaaccacagacggaacgtttgcctatgcaaaacatcgtggttgccattaggatattcatggatgatcttctccaaatgttcactgtgaagaatgataatgtcaaggtacgatagaggagaatagagaataaaaactaaaaacttaataaaataatttataggaatgtaacaaacttactctaagtaagcttgaatttcaggagaattttgaagaatgtaccactcagctttttcacgaccgatacgatcaagaggcttgataattccgctagtcaaaggacgagattgaaaattaaaaactgagagatagcaagacacagaaggtgcatcttcatttcaatcaagacaattaaatcttgtttcacaccctttaaagtacattgaacaaaaggttactgcctcatcaacaacataaccttctgcaattgacccttcaggacgtgccttgtttcccacataattcttcaattttttcatgtacctttcaaaaggatacatcca

SEQ ID NO: 364004 - DNA, 540 bp, Cannabis indica
gtgctgttggcaggaataaaaatatcatctttggatatttgcgggacaaagttcagaagcggatccagtcttgggacaataaatttctttctcgtgcaggaaatgaagttcttattaaatcagttgttcaatctcttccggcctatacaatgaatgtgtttctcattcctgtcgggatttgtcaggacattgagcgtgctattaccaagttttggtggaggtcgaacaagaataaaggcatacactggctcagctgggacaagctcacgaaacataagagcaatggtggtatgggatttcgagatttaagggacttcaacttagctctgttagctaagcaaggatggaggcttttgacttgtggggatagcttgatggggcaaatttacaaagctagatacttttcgtcagggtcttttcttacatcaaccttggggagtaacccgagttatatttggagatggttctaccatagaagtgtgtttgaggctaaggagttagttcgggtgggggttcggcggttggtggctgatggttcta

SEQ ID NO: 364005 - DNA, 778 bp, Cannabis indica
ttttaaaacgtaaatatttttttgggctcctgggataggtgggccctaggcacaggcctagcccgcctatgcctagggccgggcctggttctaccgtcaatattttgtctgagccttggcttcctgatgagatgaaccctttcattgaatctgtccatccaggccttgtggggaagtcggtcgcctctttaatgaaagtcgagcaggctgaatgggatggggaagttttagctaatctgctcactcctagagatcaagctttggtgtggaagattccgctcagtagtcatttgagtactgatttgtggtactggttacatgatgcgtcaggagttttcactgttaggagtgcatattctctgcttcaatcaatgaaacccatcagagatagtccaaataactctgggatttggcggctattatggcagttgcagctccctccaaaggttcttaattttctgtggagagcttctaccaacagtcttccaactcggtttaatctctccacaaaacatgttccaattgctgcaacgtgtccgttctgccttgctgctcctgagacgattctgcatgtgctggtgcggtgctcttttgctagaagttgctggagcaaggttccaattactggtgtggtgcctgatgcaatgttgttctcgagttggttagaagcggggttggtatcgtggaactcggccgaggctcttgaggctggtatggtctgttggtcgatttggaatcgtcggaatgagttggtttggaacttcaagcaccctgatgc

SEQ ID NO: 364006 - DNA, 382 bp, Cannabis indica
ttgcaaaaccattcggagatattgcttgtgcttttcttctatgagagtatacaaggatatcatcgataaacactatgacaaaatttttgaggaaatccttgaacaccctattcataaggtccataaaggctggcagagcatttatcaaaccaaatgacattgccaagaactcatactgaccatataaagtccaaaatgtagtcttcggaatggcttcctcaagaattctcaactgatgataacctgaacgtaaataaatcttggagaaaatagtcttatcctgaagctgatcgaataagtcatcaattcttggcaatagatacttattcttgattgtcagcttgttcaactcccgatagtcaatacacatccgaagggatcc

SEQ ID NO: 364007 - DNA, 612 bp, Cannabis indica
taacatttattattttatttagtaagacaatttttgtcttaatttggtttttgggcttgagtttgaatttcaaacctaaaatcaattacattatttaattcaaatatatatatatataatatacatatttataccgaatatacatacacatatacgatcggatgtcaaagagaaaaggggtcgatcaccacgaccagtcaccgtggtcggtagcttgacagccacatagcgaacggtggtcatggtggccacgaggaagggaagcttgcacagcccaaatgggttaaaacaatttcagaccatcacgggtccattcgtgcatgaggcaaagcaaggggaggaggtaaacgagtccctcatatttttcttgacggtggtccaatcaccatagaaccctcacaagtcctttactctgtccatcacagtcacacgggtcataagacccgattgtgatttgcttctgtttagggactcacgtccctttgaatgcaatgcatgcatggcctttcacgtgggcctagtacctggggaggagcatggtcggggctcctccatgaactcaagctcacatgcatgtgatgttttcaatgtctatggtttggtttcaagatt

SEQ ID NO: 364008 - DNA, 714 bp, Cannabis indica
aaagaagacacctacatctattgttgagagttcagcgctagccaccatgggcgcaggatacaacaagaacgccccatacatgcagaaaactgatgagaagccacgtgtttggtgtgatttctgtaataaacctcatcatactcgagagacttgttggagaatccatggcaaaccaacaaactggaaaagcaaggcagagagagaaaaggcaggtcgaaccccttttacacatgaagctgagtccagccccttcactaaggagcagatgaatcaccttcatgcattgctgaacactacctcgtcgtcatccggtattcctactgcctctgttgcatatgcaggtaacaaagtataagttgttatcaaaaatcatccactccatggataatagattttagaccttcagatcatatgacaaattcttctaatttttttaaatcatctatacattgttcaagagatcaaaaagttaaaataactgatggtaatttctcatccattgcaggaaaaggtttaattaagatttataaggggatagatcttaaatctatcctccatgtttctaaacttacttgcaatctcttatctgtcagcaaattatcgaaagattctaattgttgtgtggttttctatgaatctcattgtgtttttcaggaccagagttcgggaaagacgattggcagtgctaggatgattaatggactctattatttc

SEQ ID NO: 364009 - DNA, 710 bp, Cannabis indica
gagccaaaaaaattcaacgatcattacaaattattatttagtttagtttagtcggactcttatttattcaacttttgtcgaaaattatttctaagtgataaagaggagaattcatactctcttttttattagcttccttaatcaactatttataagattgaaaccatttgatttctacattattgaagccaaaaaaatattatgtaactaatcaatcacatactatatatataattttggagattgaaaatgatttaatttttgtgttttgaaaagaaaaaaatttaatctcctataatatatatacattaatgtttatttttctatacaaattaaattatggtgtacataattaatccaacaagaacacaatacaacacgattaataataattcaaaaaaattatagggtgtcactacaatgtgccttttataagaagaatatcaatgtactttctttttattttgacattcagacaaaaatttaatcttagttttttttttcctatcgtgtacgttataataataaaacgttataattattaagaaattcaaaataatttatgatatagaaagcagtgttcgagatatttcacttgtatataaaataaaaagagtcacgcatgcaataaattgtttaaacactattttttggcgttttgaatttttctaaatttttaaaattttacaggatgtcttaaataactataa

SEQ ID NO: 364010 - DNA, 837 bp, Cannabis indica
acttaatttttttttattttgttgtgactaaaaataagatttttttaaactattatcacattaatcacaacaaaaagttacttgcgactaaacataatatttacaaactgtcactaatttagttttagtcacaacaagtatattgtgaatatatttagtcacaacaaattgtgattttcgtgactaatgtatttaaccacagatattttagttacaacagaataatgatttataattaaaatcacaactttttaatttttagtcacaaattttgttgtgactaaaagtaagatttttttaaactattatcacattagtgccacatgtgtaattaattttaaaaaaaaaataatttttaaaaattttatttttattttacttaatttttttaatcaccaaatgatttttagtttaataatttttttacaaaatacatatttttttatttcttttttcaatttttaatgttatacacgtagtgggtgagggtggcgatatggagaattatttttgaactgattgaaaaaattcagaagcactataatatatatgtcataatttttgagagtaaaaatttctaaatagtctacaatttataatgttttttagatatataatatattgaactatatatatatgcgtgtattactcatgaatgggtaatattagaaaattttgaatttttataattaatttttatatttaattagaaattttttttcattttttacatttatatatgagctagaattagtctatcagactaaaaaaaaaaaaataaaaaaaaaacttaggcaaaaaaagtagataaaaaaaagttgaatttgacttaaatat

SEQ ID NO: 364011 - DNA, 593 bp, Cannabis indica
ttaatataagtgagtccgtcactcggtagtttaatatttaactatttgtgaattattataggcacattaataataatataggtaaatatattatagcatattgcttagtttattattgttaaaattattattattattattagtagttgtattattgttattattattattattattattatttttattatcattattattattattattatttaacataatagaatatacgtatagttagtttgttatacatatatatgtatatattttagggtttggggatatatatatatagcatgcttatagatagttttagggtttagaacgcagaaaggaattgaggggagaggcggcgcgtagcaagcgacaccgagagagagaaaagtgagattttgagtttttatattttgagagtttatgggctgctctaaatcgtttccttagttctatattctctcatagagcttttgaaatgtgattaagaggtctggaatcaaacagttcgaaagtcaccattatttacgttcgaagatacagttcttgaaacggacttgaatttgaacgtgtttaagttgtttcagagatcaaaggag

SEQ ID NO: 364012 - DNA, 770 bp, Cannabis indica
tttgagggttagagtaatgaacagaattagttattatattcctctgccatttttatgagtaatcttaaataagttgtttacttatcgttttaaatttcatattttaagatgttaaattatattattcataatcaacataaatgttagtaaaatttggtaaaataaattccaaaaactagtatcaaagcctcggtaattatatactttcatgagaaatatgttttaaaatgacttgattgctttttcatgtgatttggatggttagtgctgtgtttatgcgattttgatgaattttatgtgaaattacatgacttgacaaggtttcttcgtgttgtgagttcttggaaggtcatatttgagtttaagagaccctaaggagtagattggacgtagagaaacgatttgaagtagtccagaacgcgaaattacagtttggacaccatttttgccggtgtaccgtgtttggagaagacaatccaaaaccggccatttcgagatgaaatatcagtggtatttggcttctttgaggttctgggatccttggaaatcattttccaatcaaaaagcgcattgaaacggacagtagaaagaatttggagctcgccggcgccagagaagacgagtacgctagcgtaacgccggcgaccacaatctggacagttctgaggtattttttcccatattttttttttttagatttttgattctacatattatttttagggtgtttggtaaagtttcataattttcttgcaattatttgatttatt

SEQ ID NO: 364013 - DNA, 735 bp, Cannabis indica
ttgaattacaatatctaaactaattaacgtaaaaatcaataaatgaatagcagtttctactcactaaatgcagcaacgtatgcatcttctaacgtgcgagttgactgttcatattctaatgttaagctcgcgggtccaacacttaattaagtttaggatgtctgcgttcttatatagtcgcctctttggacatcgtatgacgagctgatagaacctatacatgcgagtctatatcggttaatcaaggctgttgggtcatcaggaccgactcgcattatagagaatcgatctctatgcttacgcaagaatatagagaggatactcgcacatatcctgatatatgcgaattagatccattctcttgtcctgcataatacgagttatagttatgcgatcagactttggtcatactcgtaatatctcgctgactctatcttgggcgaggtttcaacttcgaggagtctcttacggacatctcagctttcattgaaaatctgagtacacgtgtcctctaaataagagtgtggtctcgcgtttctaggtgagagaaatctcactataacatgtcatataggctatgatagacttcacaggttaaccaaagatggtccattgaaaaatgtgatcatgggtgaattaccagtttgtgaatcttgcatagaagaaaaaatgaccaaacgttctttctctgtaaaggaagagcgtcccaaaaaacctcttgggttagtacattca

SEQ ID NO: 364014 - DNA, 806 bp, Cannabis indica
gggaaagtttctagcttcatcgtcaatgctctcggaattaaagccaatctagaaaaaatccaagccctcctggatgtgaactcgccaacaaaaaccaaagaggtgcaaagcctaactggttgaattgccgcacttagtagattcgtgtcaaaatcaacagataaatgtgttccactcttcaacatcctgcgaggaaacaaaaagttcgagtggacagaagaatgtgaaaaagctcttcaagatttaaaggcacaactcgcaaaacctcctgtcctttctaaacgtctgtattgtgaggaattgggaatatacctagcagttacggagcaagtcgtgagtgtcgtgctgattagagaagaggacagcgtgcaacatccagtccattacatcagtaaagacttgtcgaagctgaaggccgatatccgttgatagaaaagctcgcctactgcctcattctagcaacaaggaagctgaggccttactttcaagctcatcctgttagggtgtataccgaccaaccactacgacaaatactgcagaagcatgatgcctctggatgattactcatgtgggcggtagaattgggtgagtatgaaatcaacttccaaccccaaaaagctatcaaaggccaagccttggctgactttgtggtggaatgcacaagcaaaacagaaagcgtactagaaagtgatcccgagccaataccactgccaagtaatattgaagaccaacctgtaatgaccgctctagtatcaggattagtaaaggcaattaacactaatttttattattttactattatttgt

SEQ ID NO: 364015 - DNA, 452 bp, Cannabis indica
agagagagagagagagattacctgaacagaagccattgaagatcgcagagcttgaaatcatagagttaagggagagcggagagagagacgagagaaaagaggaaaaagtgtttttaaaatgttttaaaatcgtaaaaattctgtttttaaaatttacataattttaaattaaaaaaatagaaaacgcaaatattttaccaaacatgattttattttgaaaatttttgattaaaaaaataaaatttttaaaatggttaccgaacaaacccatagcgaataattcttttcacaacagaaagatgagattccatgggatttccttgatatcgtgcacaaacaagaccactatagcaaatgccaggacgactagcagtgagataaagcaatctacctatcatactttgatacaaagtttgatctatctttactccttgttcatctttgcttaattt

SEQ ID NO: 364016 - DNA, 710 bp, Cannabis indica
gaaattcttgatgtaattggattagcctactaaatataagagaaattgaagaattacttttttaatacataaatcaaatttacatttaaataaaatttaattcaaatatacatctttttatgagtattatatccaaagtattctcacatcctcacatagacacaatttcagatataatagattatgttctttagagacaaatgtgtaggtttgtgaaaaaattgagacaaaattttgactagagaagaatagatactattatgaaataatagagaggtaaaattagtagactaattaaaaaagaggtaaacataatagattttgaaagaaagataaaaattaaagacataaatttaaaaaaaaaaaaaaaaaaaagaatgtgtaattttctcaactagtctaacccaaccaatgaacaacctaattttagataagggtgttcataaaatagccgatctaatccaatccgcacgatccaatccaatcctctgcaaagtgcggatatttgcacttgtgcggattggattggataggaaaattccaaatccgcacttgtgcggattggatgttgattgacgtgtaaaagtaactgatccaatccaatccacacatctttataaaaaaaaattaaaaaaattaatgtatacaaataatattttgatgtaaagaaaataagtaatttaaaagtactaatacatataatacaatta

SEQ ID NO: 364017 - DNA, 581 bp, Cannabis indica
aaaataacaacggtaaaccaaattaataatttttgggaaagaatttgaagcaatgataataattttagagctactttttctagtttggctcaaagaagagggatacttgcatgcattgctgttagaatttggggataagatgaataaggttccatctcaaaatcaattgaaaataggaggagtagcccattcatcttatatatgacaatttatctccacacattagcaatgtaggactaattctaatacaccctcctcacgtttggacctggaaagtatgggtataacgaacgacctttaagagaccacagggtcgaacatgacatttaaaagaatcccacaaggccaaatatcgggaaatttgtgggtgtacacgtcgggaaatttgtagatttttgaaacaagttaaagacccaacactggaaactagcacacattggccgaaaggtcccaaatggaggttaaaggggagatagcggaagtatctgtttggaccggcagcactttagctcacaacggatcacaaacgactttttggaccagtagcactttgggctccaacggatcacaagtggctctga

SEQ ID NO: 364018 - DNA, 695 bp, Cannabis indica
gagtaccgtcccgggagtatgctgaggtggaggccttgaggagggttttgcgagatgaaatgcaaaatacccttaacgatcagaactaccagaacacgtgggatctaaacttggaccccctgtcggactggttcaatcgtttcctcgggcctaccttggctccttttcccgcggagatgaccggcgagtttgtctcccagctaacccggtgcgcgcctaaacggttcgctgcttgtgcatccttgaactccgtcttttaagttcaggatctcagccattccttgactgtggtaaatattctgtagtttacttctttcctcattatttttcttaaggactttactcactcttacatatttttccagcttgctgcagaggtcgtccgcctttccaagaacctaatcaatcacggcttcgtcttgtccgaatttggggacataggcgaagtcatgaagaccctgcatgatctgtctgctgaaaggcggaagttccaagaggaagctgcgcggtaggaggcccttgctaaggccaagttcgaggaagaggctaagcaaagggaagcccaagcggaggcgatgatctgtgaggaggtcctttggagggataggctggaggccaagcaccgggaggaattgagggcggagggcgaggctgttgccaaggccaaacgcgagctccgggaggctagggaggcc

SEQ ID NO: 364019 - DNA, 522 bp, Cannabis indica
atgtaatgcatctgaacccttcacatatccatatttatgagttaacgaaagtactggtagtaacggtgtaaaagaattgtaacattaggtatttttgccaccaaaaataaatattaggtatttaagtgtataaaatcagaaacattaggtatttatgccgcaatttaccctaatttgattataagaaatattataaaggagaatatgattatagagaaatgtgtaaactgtgtttggctgtgtaaggtaatatgtaatcatattcccgttaattgaattatactgttttgttaagtatagaaatcttatatattattataaaaaattaaaattaaaatatttttttattgtatctatataatattaattatacataaaagtaaaataattattcattcaagaaatatatttattaattagaaaatattaaattttattgtattttttattaattaaaatgaatatttttatatatcactatgttatttatttttattcgctatgttatttatgtacatcatt

SEQ ID NO: 364020 - DNA, 799 bp, Cannabis indica
gcaagggcatcagcgccccttgttggctgtgagcccccgaccaggcgcacatccccttatcagggtttgtggcaagattgtcgtgggcgggaatgtagcagtccagctcgcccaggtatccgtccaggtcgagagtacggaggcgtgcctccaaaatcttggacggaggacttacccacctggcgcccaaggcagcctgcctcttgtgaggaaccgcctcagcaagctcctcactgatgtagtcaacgccctcaaccaggacgtccctgtcagcatcgactggttgcccagcctcattgtactccccatagttatggggttcaatctcttcctctccctcagcggcgggagggctgcccggacgcgcctcgtccagctcctcaacctcttggacctcagcgtccccctcacggtcctcctccattgggactgccaaatcttgttcgacggcgggcagactggcaagtcgagccacctggggatcagaagcgtcagccagatgcgtagttttcttcgtacgagccatcatcctatggctgggtacgggatcagaaaaatctctcgagaaggagaattagcacgaagacgagggtggacttcgtgcagaagttgaagcagctcctggtcgatttgatgctcgaactccaaagactcacctgggttcatctacaaaagacaacacacaagatgagtgttggacggagtatcaaacgaaaaacaaccaaatatgccgaccaggagtacccaacagattaaagaacgaccatgttcaaagaaagtctaaactcaagaagtcaga

SEQ ID NO: 364021 - DNA, 562 bp, Cannabis indica
aaactcaacttacctcaataatcccatcagtatatataactaataccgttgtgacatttttggcttccaatcgagtctccatggttgccgaacttgaaaatatttttattccacatataattcatattacattcacgcatgttatatacatctccgtaatatataaatatttcttatttactcacttatagcaaatttaaatttttttgctaaaatacattagtaggatcataatctcatttattacctgattaacccataatataaatataaatataaatcctaattattaccattaggcttatcaggatattacatccacagtcaaagtcccttctggcgtggaaatagaaacagttatcaccaacgtttcccaactatcaggtaaagaactgaggagtaatgatgcttgcatctcatcattcatattcatcttcatggcaactaactggtttgcaagactctgaaattgacttgtatcctcaaccatactaccaccatccttgttgtaacaccctaactagcataggcgtattacctgatttttaaacatactgtgcag

SEQ ID NO: 364022 - DNA, 726 bp, Cannabis indica
ataaattattttttattatttgttttataaaaatagactttttaagaatgccataattgtatatataaacttatgatgtacacattgttattaataatactaaaaaattggtaatattagaagtacttatgaactgtacttatgattatgattaaaacatgttacacttagaagattgaaagagacttcatattaatgataaatcaaagagaagagcttgcagtaaatacatctttcaaccgcctatataaatatttatatatatagttcacaggtaagattattagctttgaaaatatatagttaaatttctgttgagtcctgttaactcttgtagtaaagaatggtgtgggtccttggaaagagttcccttaggaaacctttcatcaagacaaacaagtagtcagctattgttaataaggatatagatattgcaacatcatcagatatttgttcatcttgccttacaaagtagtaagatttgaccaacttcctataaaatcaggtattatagaaaaatacagatattatttaagaaattaattgctaacacgagtaccaacaatttacttaaatgtggattccattctaaaatgctaagtgcatgtttgtcatcataactaaaaaactgttttttgttttaaaaacatggcttgtttggccttgtttttaaaaacagttttcagaaaacaaagttacaaaaaacaagaattttgaaaacaacaa

SEQ ID NO: 364023 - DNA, 852 bp, Cannabis indica
ctcaacaaaaattaaattaggattaacaaaataaaatattaccaaaatgtaaatttgagcatacttacataatgatacaaaagtaaatctgcaagtacaaatttgtccctttcacttaaacccaaaaggattgagatttagaacgaagtgatatgtcggttttttttttttttttacgagagagtggtataattttggatttgattgtaaaaaaaataggtttttttatgatgattttttacttttattttgtttaaaattaagtttcaaatatttaaatttgattaatttgttgtagatttttagttgatctatttaaaaattcttaatatatttatacgtttttatattcaattttttttaattaattaattcgtttttaaataaataattaaatataagctaataaaatattacataaaattagttgtcacggatataactaacatttaataattaataattaaaatagctcgagtgcaactaaacaatgaccctttttataagttctttttaatttttagaattaaaaaagtatttctaaagatagtaaaaataagttaaaatttataattatttttatacttctagctataataaaggtaatatagaatagactatcgcattttaggttataattggttttaggtttttaactggtttttttttttgttctctggtttttgtttactggttttttggttttttggttttaggtaaactgtttttaaccggttattttggttctggtatatatttgttttgtctgttatgtatatgtttcttacggttgaccttgattttgtatattattttaaccggttattttttttatatgtgttcattaaaatg

SEQ ID NO: 364024 - DNA, 541 bp, Cannabis indica
ttgaagcggggatgttacaatcaacttgaagaaaattcctaacacgaaatagttttgtcataacacatttagatcaaatttttattaaattttacaaaaaattagttcagagtactatttgtaccattttggaaaatacaagatttattttgtcatttaacaaaatagagtgtcttattagtaacttttgcaaaacacaaggtccaaaatggtatttacccttatagttattacaaaaatttaaatttttactgaggtttttattgctataaaaagctaaatatacaattaaaccaagagaaattctaaatgttatgcctatcattattatgagatgtaatagtgaattatattatttactgatatattctaattaataattattatgtgaaacaattaatcattttcaagacgttattttatggtaattttgtatataacatgataaccaagtggacatgatacaaattaagttgtgtcaatgatgtaattgttgggttttatgccctaaataaaactctttacaatctgattagttatc

SEQ ID NO: 364025 - DNA, 768 bp, Cannabis indica
cttctggcaggctcttctcgggagagagcattttttttaattttttattagtttcaatttttatttttgttttatttgtgaggaaagagagagtaataagatgtcttaacacattttcttcaagtgttataaatacatagaacatgttttctcctcacaaataggacatgctttgtaccctttcacactgtatcctgaaagatttctgaaagctggaaaatcattaatggtccatagtgatatggccttaatattgaattcttctttcctaaaggcatcatatgcaggaacaccctcatccaacaattgactcaaatcatcaactagaggagctaagtacacattaatgtcattatcaggctgtgaagggcctactatcaacagtgtaagcacagtgaacttcctcttcattaccaaacaaaggggaaagttatacatcacaggaaaaactagccagcaactatacttacaactaagggtggtatgtggattgattctgttcacagaaagaccaagacagatattcctaggttcattgccaaattcaggccacctaggatcaattgatttccatgcgagtgagtaagctgaatgtctcatcttaccataaaattttctatcactggcatgccagatcacatttttagcatgattgatgttttgaaagaatcgaaccaaacgaggtattgggggtaagtaccataatacctttgcataaacaacaacctttacctcatcagaattctttttcttttgccacctagactc

SEQ ID NO: 364026 - DNA, 758 bp, Cannabis indica
atgaggctctaagtgatgaaaaccaggactataattatcctaaactctttacctgaatcctatagggaagttaagactgctattaagtatggaaggacatcaataaccctagaggaggttatctctgccctaaaatctaaagacttagagatgagaactgagaaaggtggaaactcaaatggtgaagtcaatttgagtaggggcagaccagatccaagaaaaccttggaataacagaggcagaagtcaaggcagaaattcaagcaaaccaggaggacaacaaagaggcagatctaattctaacactagaaatcctgatgcaactaattgttgttacgattgtggtaaacctgggcattttaaaagagattgttatttcttgaaaagaaataacagggaaaaaccacatggacagggagattctaaacactcaaactctaagaataaacatgatatgcatgatgctaatttgactgatggatatgacagtagtgaagtgtaccaagttggaccatccatcaaagatgaatggatccttgactctggttgcactttccacatgactaataataagaattttatgtttgatttcaggaaatctaatgatggtagagttatacttggaaacaaccaaacctgtgacatacaaggatctggttctattagtttcaagatgtatgatggcatggtcagaacactaagtgaagttagatatgttcctaacctagccaggaacctaatttcactaagtgttctaga

SEQ ID NO: 364027 - DNA, 649 bp, Cannabis indica
ttgagcggggttatggattttgaccattttacccctagctttagaaaagccttagtttatgggttaagggcattttggacatttagtaaattgatttaatgagtgttaggtggcagccttaggtagtgacacctatattatttcagcctaagttatgtaaaaggaaaatactctttgaaaagaagtaattaagaaagaaattggaaattgaaggaaatatcatttctcttctctctcttggtgttcggcccctctcaaaccagaaggaaacccagccaagttgccatttttcttgtgttttcatccatagattcaaggggaaacaacctaaggtaagctctaatgaagctcttctatagttttcaagttttaagttaggttgattatatggaattgtaaatcaggggctgttagggttagagttgtttgaatttcgaattctagggttagtttgagttgattgaagtccctagcagctggttttgttgctagatgttagttctaagcaagcttgagttttgaaactcaagctttgagctttaatggcataatttgatttattggtttgttctgtgaattactgcctggattatattgtttatgcattgtataggtgtactggagagtttggtaaggtttgggattgaat

SEQ ID NO: 364028 - DNA, 1068 bp, Cannabis indica
taagagtttcattgcctcgtttttgtcagttggaagttgtccgtcgagtagatacttgattataggagtcatccaagtaggtgagctatctatcatctcgacatcttctttttcacatatacttggctcatttagtacctccactggaaccaagttaaattcatccaagtcgttctgcgaggccagttttgctaaagcatcagcgttagagtttcattctctttagattttttcgattttaaagtaatcaaacttttccaagttcttctgaaccttctctaggtatttagccgctttcagacccttagcctggtattctccgagaacctgatttacaatcatctgcgaatcactatgacatacgagattcttgaccttcaacgcttcgaatatcctcaaggcaacgatcaaggcttcatattcagccttgttgtttgatgtgtcaaattgaaacctcaaagcataatgaaacttaaagccttctggcaaaatcaatatcactcctgcacccgaaccttgctcgttggatgcaccatccacaaataacttccaagtatcagtgtctcgttgaacaagcggactttcttctagagttattccttctattaagaaatctgccaaagcctggcccttgatgatgttcgagggtgataggttatgtcgaactgccccagttcaattgaccattttatcaatcttctaaaagcatctggttttgataaaacttgtctcaagggttgatcagtcaatacttttattgggtgtgcctagaagtaaggcagtaacatgcgagacacgtggatgaggcataaggcaagtttttcaagagggggatacctcgactctgcccccagtaacctcttactaacacagtaaacatgttgctggtgcttttcctcttctcgcactattgctacactaatcacatctttcgagacagctagatagaggagtaatgtctttctagttactggttttgccagaactaaaggggttgccaaatgccttttaatactctgaaaggcctcctcgcactcttctgtctactcgaatttcttgttgcctcgc

SEQ ID NO: 364029 - DNA, 761 bp, Cannabis indica
aaattttaaatctctgatctatattttcagtttttatatatgtatatatattcatacaatcagtttaattttatttttatgttggattgtgattttctttcttttaatcttttgattcatattttgttaatttcattctatattaactttttatatgcatcaaaatgattaactttcatataaatatatatacatattcacattcatatatatatatacacccagggtcggccctaggcatagacgggctaggcccgtgcttagggcccacacctttcggggaccaaaaataaaaataaaaaaattattagacttttatttaagtaaaattaagtgtattgtaaataactaatattcatagcttggttggttaaggtgtagggaatattatacaatgtcatgggttcgaatcccatagcactctttttcaaaaaaaaaaaaattaatatatattttggtaggccccaaaatcaaatttagccccccaataaattctgagggtcagccatgtatacacctatcatatatgtatttatatatggttatatatattttcgttatatgtatatattttttacattggattgataatttaatgctatatatattgtatacgagtatatataaacatgaatatttagttttggtcccagatttgagtttttatttttcgatgtttatttcaattcctatatgcatcaatacattcatatagtataggagatctttttaagcatgaaaaactcttcagaaaaacaaag

SEQ ID NO: 364030 - DNA, 1076 bp, Cannabis indica
tgttatttctgatctatatcaataagtgaatctgattatattgaaatgagtttatttagggcataaaacccaacaggcgcacgacctaaacgggtcaaaccagtctacgacctcggtcttcgtcgtatgatggtggagcataggaggagggaatgagtccctcgtggtgcttgatggtggttcgaccaccctagaaccctcatgggttcttactctattagccacagtcacacaggccatatgacccgactatgtttgctcctcgttaaggaactcacgtccctattgcatatgatgcatgcatggttttcacgtgggcacggtacctaaaaccactcaggtggttgtgcatggccagggaaaaatttatgagctcacatgcatatgattttgacgtctatggccaagttttaagattagaatctgagctcacatgctatgaacattacataggtacaattttttttacgtaaaataatttcataaaataaattacataaaatttttacccaaattaacttagatattattttttaaaaataataacaacacaacttacacccaattataccatataattaatgattcatcgcctctcatacattcacaataatataaccatccattcacatacatatcacatatatattaatgcataaaacctacacaacatttaatgtatacacattcatggaactgctcttcataccaattgttggtttatagtactaaatcaggtatgcagcggaagtgtttcatattatgtgattattattgtaccatagcctaaaagatctccagatgtgtgtacattaaatcaaaacaataaatagtaagtttgtattaaatacatcttgaagtctatcaggatatcctcaaaacttctcgtatgttgtattccttaatctaaataatgcaatttaaactcacaccagtgtcttcaaaatcgatttaccacacacaaagaatactgtggactattaggataaattgtataggtttgttcttgttgagttctcaacacatgaggaagacaaatgagaaaaaaaatcaatttcctttctctctctctctct

SEQ ID NO: 364031 - DNA, 732 bp, Cannabis indica
aataaaatattttttagtaacctatagtttttgttaagtttaaaaattgatttattaaatagaaaagaaattaaaaattatattttaattggatcatcttctccaacggccgaaaaaaaatatatacttcttatatataaaaatgatccttaaaaatagtaaatcgtaacagtgcaaaactcttgagactaaatgattacgaatgtaatttgaaaaactttttaaacttattaaatagaaagaggaaagaaaatagtttttaatattaaaaatatattatacatgtgtgaagttaaaaaaataaaaaataaataaaataagaaaagcttttattaaaaaaattgaaacaagaaaagtttttatttagaaaaaaaaaaaaaaagactagtgtgctactattatatattacacgtgtaatcaaataaattcaaaagtttcaatattgcataattaaatggttgtcggtatatttagccttcaaaaaaattattgtcggtattttgacaactaaattcaaatctcagctcctgaggtaattttctctaattttaagggaaattacagtaaatggtcctaaatcataagactatataagtaaatattttatttcaaaacttgtagcaaaatggtccttttagattatttattatttatattgaaataaggcctcaatcatttatttttattcagccaagctcgaaggaaatcatcgtttcacttctaaatacatat

SEQ ID NO: 364032 - DNA, 324 bp, Cannabis indica
tttcaataataaaaatagcattagcatttgaagcttagtttagaacactcaaataaaatagcaaatatacaaaagtaacaaataccatttgtcgtcattgtcgtggctggaggacgacttggtggcgttgccgcctacgtgaatgaaggattgctcggctggtgccttgtgtggtgtcgtcgaggtaaaggatggactaggttcgtggcttggtggtggagagtgaaacttgagagtttagggtgatgagtggatacgtgtggatttagggaccctaagaaactgtaaactgtttggagatttggtgagacgagagagagaaag

SEQ ID NO: 364033 - DNA, 972 bp, Cannabis indica
aacgccccaaccacgtaaaaagtcttcatctcgctttcttatagctcattattataatcatattttactagttgccgaaaacctcggtcaacagtatctaaaacaaatcaaaaccaaaaattactactatataattataagaagaaatactgaattctttaggaagaatcaataagacattcttaaaggggtatttcggtagaccacttatctatttagccattcatgagagcttttaagtctattttttttttttttatgatagtgtatattgtagatatttaggaccacttgtaaattttcaaaatattttaaattgtttgtattgtcgaaaaataaagttcaaatagttgtttactaaatatataaaaaaaaatagtcatgattgcaataaaatttttaaaacttatttttggcattgtaaactattcaaagttttctaaaaatttaccggtgagcctaaataactacaacgtacatgatcattaaaaaatagtttgaaaaatactctaaaatgtcgaacaaatagagaaccaacaaaaatataagtgtactatacatactcaattattttttttttgtttgtaaaaaaaaatctttatacttggcccctccttaaagtggtgccaagttccgccactgagggtccctcgactgatcttctaattttttctccgtggtgataccaaaccttataactcctgtctataccgttcttaaacaaatgttctcttatttggacaatttttatatgctccatgttaccacatttgagacatgggcaatgaaccaaatctggattaccagcattctttccagaaaactccaaaaaaaaaaatcaacaccttccctgtattttactgttaacctattcgcactcatccaatctctatccctttcgaaaattctaacaaaacaacaaattaattaacctaattaatcaataaaataattctatttcaacttaaacct

SEQ ID NO: 364034 - DNA, 983 bp, Cannabis indica
cccggttcccactactttggaacactaaattaaaactgagtgataactactcaattatctaaagatatgcccagaactaagtttatggcatcaaagtgtgcacattcggattttgatcagaattggtaatataaacgagaacagaaaaaggcagaatatataaactgaaaacattcacattaatgtatatcttttatatttttttgagttctaaaatgaagtaatcctcaatatatatatatttatattttaatgccataaaacccagtattcttaacttctgcacaatatatatgagaagaaaaaaaattaaagctcactagcttcccatatcataaaatagattcctttactactcctaattagtcctatctaaaagaatgaacatctaactactactaagtataaagccccaaaaagctattttacgaaggtagctgagcatttctctttctagtgacccgaatataacaaaacacagctgcaaatatggcagtgacaaggccaccaatgataacacctccaccagccatagacttatcagaatggtgttttcccatctttctactcgccggggcttcagcctcggtttcggcctcttctggatcttcctttccttcatcagatctctcagcaacacttgaaactggccgatctgctatcctgttcacattcacaacaccttgagcttttaaaatcccaacagggtttggctcagatacttcagactttatcacctaaagcctggataaccaacatcccagctagaattaagccaaacaaacaaagcctatgagccatttcttgataatggatagttaagaagagaatgtattgtatgtgtgggttgcacttggttgtgtttgtgtagtgagtttatgagtaccggaaggctttgagtgattttgattctttacttacgattgagggtttgggggacagtttatatagaagaagagaagagaaagaaaagatttttggga

SEQ ID NO: 364035 - DNA, 880 bp, Cannabis indica
aagcatgcatatacacataacatatacatacactcagatattcatatcacacattatatacaattctaccttctttccgaattcaagtgtgctggccgacctgaacggaaaatctcgtgctagatggatgccctaatcacaataattataacacagatgactgacttgctaaatcactttccgaggacttaaactcgaaactaaaagtttccctatcaataaataacatggcaataccctaaatatctcaaaaatgggaaaaactagggttcaaaaaaatcccccaaccggcagaccgattcccaaccggaagtccggttctgggtcaccaaccggtcgaccggttgctacaggtcccccagaaccagaattccggttctatgctgggcactcaatgacctcaaaaccaaactaaactctaccaaactttccagtatacctgtgcaatgcatatacaacatttcccaaccaataattcacagaaaaaaccactaaatcaaattatgccattaaagacccaaacttgagtttcaaaaatcaagcttactcaattcccacaccatagctcaaaactgatatccagagcttaaaatcaactcaaaacaaccttagaaatcagactacacaatctttaaaccttaacagcccctataacacaaaatcacctcttgaaaccaactaaaacttgagaaaaaccataactagtgagcaactatggtttaccttggttagttcctcctcaaattcttgctgaaaacacaaaatccagcaaagaattccctatgcttggctggtacgaagagaaagaagttaaagagagggttttcttgatttatttcataaattccttattttcgaaaatgagaaaatgcatttctca

SEQ ID NO: 364036 - DNA, 710 bp, Cannabis indica
tacattgaagggtagaacagtaactttgtccctattcattgtagatcatctatggattatctttaactaattagattagaacgatggataattcatagccataggttatacttataggtataattatagtacaagtacttatttaacaactttaagctacttaaaattcaatttattgatattaaacatataaacaataactctaagaatgcacaaacatactctcataatttaccattagactgctaattagtaatttattttttatttggactcttgaattggactagattaacgtgatgttagtgttatatcaataaattattttaaggctaattaggaattttgtcccctgaactttgacatgtactaaattatgctccctgaacttttaaggtcgttaaaaatgcccctaaactattgagattgttggatttaaggacttttgttcaattttagtaaaaagtactaatatggatgaaaattcaaggggcataatttagtacatttcaaagttcgagaggtatgatttggtatatatcaaagtctggggagcatagtttagtacataaacaatcaatgaaataataaaattaatgaaattagacaaaagtccttaaatccaacaatctcaatagttcatggatatttttaacgaccttaaaagttcaaggggtatcatttggtacatgtcaaagttcagggggtaa

SEQ ID NO: 364037 - DNA, 1299 bp, Cannabis indica
attcatttcgaaatttaatcaattgttgcaaattcttcgtggaatgtaataattgttatgtattatacataaaaatattgctaatttcctttcagttcttgtatacgtaaaagtcattaaacttattactgagtgcattcgaatgggacgggtcctaccatgagccatgaggtcacttttttacgagataaggtcgtaatgaaaactcgtttagttgttccagaaacttccacagaacagaattagattagttgtgtatctgataaaagagagagagagagatcggagagaaaatgaaatctagaatgttcgccaaagtgcattgagactacttatttagcaagcaccctccatcaatatttatctgtattctatattctataatgttcataggcatcaaccaatccatacgtaatacaactgaattgaagtgttcaccattattacttgacttatattttgtttttcatttttattgtttgcgttttagataggttggattggaaaatacaatacatgtaacgtttggttgtaacaggaacagtaatgggagtaatgggaataacattatgatgtttgatttaattttagaatgataatagaaatgggtagtggcttaattaacataatatgagtataaataaggttataaaggtaattctatttgtatataaataagtgtaagtggaattatattgtacaagtattaacaatagaattgtaatggtgattacattgtaaaaactatatgtattaagggcatgtttataaagaaatgagagaattggaattagtttataattgaagttaattatataattttgtgtgtttgtcagtaattaaactataattgtgtaattaaaagtaattaagagatcttaattacattttcatattctcataccccataaatattgagtgtaaattacattgtgtaattattaaaaaaaatcattttaaacattaagtactgaaaaatattattttcttatataaatattaactattttgtcaaataatatattaagaattcataagtagttaccactttatatttaaacaaacatactgtatattttaaaatataatgtaattactatgttgtgtgattactcgtaattttatataattacttctaaataaactctaaatattttgataaaagtaaatcagaagaagaaaatcaaaatgaatggattggtatatttcattaaactagatgagagttacgtggcgagccacgtaaatattagttttatataagttctagtggtttttgtttaagaattcagtaactaa

SEQ ID NO: 364038 - DNA, 677 bp, Cannabis indica
aacttagaattgcactctcacttagaatttatagccaaactgtaggtcagcaacctccgaatgtcattcccctgggtgagacggacgaagatccaacgatgaatacttcccagactgcaaatggttagccgcccaatccctggccatgagttccactcgtgggcctagcggtaggcgggcagaccttgtctagtaattcatcaagagaagtcatacctaatggttccaaccagatcaatggtgccattccacccgtcaaccaagcgaatcaatcgctgaggcagccaggcacttctatatttgaaagctgggggcgacccatgactgaacgaatgacctgaacagaatgaggggagtagatgatcagaatgttacgacaattgtgcagcccgaaacccgttctaaaatccttgctcaaaagatgctgacgtaattcaaattgaccaaaatgccgggtaggttagcccatccgtacaggcacagctagatgaactgaagaatatttttcatggcatggctgcacaaagaaacaatgatcttgagctggatcgagcacgcggaactcctttctcacatgagatcaatctcttgttgttgccccacaagtttaaaatgccaacgtggaagatgtacaccgggagagaagatcccctttcccatctcaagtacttcgaaat

SEQ ID NO: 364039 - DNA, 808 bp, Cannabis indica
ggtgaggttgaaagaggagtcttacgtgccaaaaacacaatgagtttcacatgtttaatgttattagtatagtattacttttttttctttctcccgttatattaaacatgttacttaaatactctgataagaatgggataagaccacattcttataaatttattttcttgaataaaatgttgaaaaagatgagtaaatgcatgatgattttgatgttgtggctgctgtagttttaggttgttttctttgattttctatgcttgaattgaatggaattaagtaggtttcatgcatgctagttgcttggtttaagtttgtgaaattttgtacaaaaactatgatttttcaaagaaatgtgtgaatctgttaattgcttgctgtagttggtagatttcattttcagaggtttaattatgcatgattaagtggatttaagctagtttgattgcatgttgtttaggtttgctcaagtttgagtttggaactcaaagcttgagctttaatggtgatttttgtttctgtgagttctgggtggttttgttgccttagaaatgttctaggggttatatggaataggtctggaaggtttgagatgatttggagttgatttgagcaagatatgaatttttgatgttgctgcctgcgaggaaccggaattccggttgtgcatccggaattccggatggggttctgaaatttcccagaaccggaattccggttgggcaaccggtctaccggttggggaaaattcaggaaccctagatttcctcgattttatgtttttaggggtattgccatgctttttatc

SEQ ID NO: 364040 - DNA, 691 bp, Cannabis indica
ttgtgacatcgtgtatcatggacaccatgtcccaccatactaatgcgtcttcttgaaactgaaaagttgtacagaccactctatcattcccggtgacgcccattaaattcaaaatcttagtaatcactgtttgccactgcttggctttcataacatctggacctcccagaaaaactggaggtgcctccttgcggaacctttcatatagaggttccatctgattcaccgctatcactagttcggcctggacaacaaaggcaggtgccactggaatttctggaacaggcactgcaggagcaccttgctgtcttagtctcttaacttcactgtcttgttcctcaattctggcttgcatttctgcaaacatattttcccaattttgggcttcctgagtagcttgggcagcctgtagcgtgttagtatcaccccggccacgagccctgccccttggacctctacctcggccccgagcattttgggggaaactaagctccctgaccatcatttgacccgaccgaattgccctgactcctggtatttcgcctggtgtccatctagtctgaacaacttgcgtaactaagagttggcatatcagattatgatcaacgagagcttactaacgctgcttatttggaaattaaaaacatgcgcctattctactatctggctactaacatgcttcctaacaggc

SEQ ID NO: 364041 - DNA, 477 bp, Cannabis indica
atgaaatattgtaatgaatatactcagtctttagaagaaagatcaagatttatatatatatatatatatatatatatattcattatatcttgatatattcctgttttcgtttgagacatgttctttgtgagaaactagacataatatataataaaaaatatataatatatttttttttatggctaaaaattaatatttagacagctaaaaaagaaaaattaacattttgttttgaatagaaagaaagaataataatacaagtatttattattattataaaaattataatttttgtgattaatatatgttgaactattttttgttagtaaagaaaaaaccattgataaatatttatataaatgacaataattgatgagtccattaaagattgattagattagggaaatttataaaaatattggaatttgggttaacttttacaaaaatactgttacacgaatttttttttcaaaaata

SEQ ID NO: 364042 - DNA, 1314 bp, Cannabis indica
atctctttctctcattcgggtttggttaccaccatctttcgcatcatgattgattgagtacttgacttgctatgtgtgggcgtgacactctatcactatgggcaaattggttgaagaacaatgaaggagggttcgaatcactatagaaggtgtctctcatctactagttgttagagaatgaaaactaagtttggtttggtcgaagtcaatagttggatgagatgagagcatcatgtttcttttatagcatttcaactacggcttaggtttgaattatatggattagaaaagaataaaatattgggcaaaaatgcactagagtggctggccacttaaggaccaatctctagttacaatttttccactttatttcaacgagttattcttctttcaataatacaatatttccaatttcaatcctataaatgtcaaaactatttatttaataattaattaattatcaaataaaattgccatttatattatttattaattagaccatgcaaagtctcttaattaacaaatagactccaaaactttttttcttcacaattaagcccttagtgaaaattcatatataagacatagtctaaattttagaattataattgattaattaataccaattaactgagtctgcaagcagtattatctaaactagtgaggggatcatgagcctatataactgagcttccaacaagtagatctagaatttataaagtaaattctttaacttattaatttcgtcttgtcgccactatagattttgaaaatttgaaattgaataacactctcaattatatagaacgctatatatgtaccacgatatagatacattatgattattcattgttacaatcctaatagtcaaagaccctctatagatgatctacattgaatagggacaaatttaccattctgcccttcaatgtattttatccttaaaacacttagctacctataaatgatgcttcaataaactaatataattactgaaataaggcctcaatcatttatctctattcaagcaagctcgaaggaaatcatcgtttcatttctaaatacttatagaagctatagattccatatctatgattagcgctcccactcaattgaactaccatattcccaagatgtaaatatctgctagaaccatttgttagcttccacgaacaacttgaagaacataaataatacaactaagttgaacctaaccatatcaggattaagatccatagacctaagatcaaccattgatattgacttagaaagatataacggtaagtttatgatatcttatccaagataaatatc

SEQ ID NO: 364043 - DNA, 515 bp, Cannabis indica
aaaatttatggtttggttgatacgttagttctcacgtgctttctatgagggttgttatatgaattttagttgtatttaagttgctccgttagttactatagggaattctatgtggaaattttgtaaaaataacaaaaacaaaactagttttgaaagtgtaaaattaataaaaaaccttaaaaaaaaataataaataaaaaaaaaagactcagaaaaaaactttacaaaaaaaattacagaaaaattataataattcatttaaatttaaatatatatatatatgtgtgtaaataaattgtacggtatacgtggtgttactaacatgtaaacaaactgtatctctattctatactttacccacccatcaatcattctatacataaattggcaatgatgatgattcttgttatcccaatttttgcactctgacgtggcatcacatgtggtgacacgtggaatcgattccgagtatctgctcgtgtaaagtccttttttggcaagttagttaacaaaat

SEQ ID NO: 364044 - DNA, 593 bp, Cannabis indica
atcagtatctgagccaaacatacaactatcaatatccaatataactctatgtatactgataccgctatcgatgtaatctaacaggcataaataacatgtacgctaaacatgtaatcacatatgcatatcattatactattcttatcttatttccaaattcagctgtatcgtccaacatgagtggaacaactgctcggcgaattataggctcctaattcacatcgatcataacatggataagtgacacgctaaatcacaaccccggacttaggttttaaaccaaaaacctacctactgaaagttaacatggaaatatcttaaactaacagggaaaccaaccaaaactctgaaactaacacgaatcgacaacgcgaaaaatccggggaagccagtactgatccagttaacaggttttacaggacctgtaaaaccggttaaccggtttgcaacagaaaacccaaacaattcgaatacctaaccaatttgaatccaatccttaccaaaccttccagacctgcatattataccgaaacaaacattttccaagcaacaaaacaactaaccaagctcaaaatcaaaaattaccattaaag

SEQ ID NO: 364045 - DNA, 539 bp, Cannabis indica
aaaaatactattttttttaaaaaaaaaaacttattctaatattacctaccacctatataactaaaacaaaaactaaaaccctaacaatttctctcattttctctactcctctccctagactatgtacctaaaaataggattaataaagtcctaacaaactcccccaaatgtgacatttacttgccctcagtaaagaactaaacaactaaacatgacacaacataactgaatcacgtcaatgaaacaaaatatgagtctcaatctttcaattaagccaagtaacatgggtttttcagaaaattttaataataggctcgaaactagaattttaactaaatcacatccttaactcacctcatttcttcctttcagctcatgaaaccataatcattactcaactaacatttgagacaatttatacatatccaatacaaccatcaatccactagcaggacttatagcatatgcttacaatgctcactattctccattgtaacgccccgatttccagagacgtcacactcgctagtctgtttaaa

SEQ ID NO: 364046 - DNA, 746 bp, Cannabis indica
tcgcttcctcagtgtgaatctcatcccttgaagcccaagccgaaacaaattcccaaacaagttgctcaaaaatctatgcgaccccacaaaccttgcacttcatcgtcttcatcgtcgaaggggtctcctcctcgtgcaactgcatcgcctcctgctgcatcagaaaaggggtgttgctgcatcaacaccaacaggtccatcctctcgcactcgtgcccagcaagcttcactcgagaaggaacttcgcactaaacaaagccatgacagacccattcctcctgccaagaagctgaaattgaatccgccttcggcttcttcaagttttgaagaagaaaaaccaatggaggtcccctctgatgattatgagaccaaatccgagtctatccattctgaaaaagagcttctagaagactttggagtctcctctgacaatgaggaaactgaactcgaacccgagccacctttgaccaaatctgctccagcacctcctcgtgcatcttcagcagccaaagcttctgctgctaccaaaggcaagcagcctatgcagagttcatctcctggtaatatttctccatctcaaactgtccattccaaattttactatcatgataatcaacgtgattggaatatttatgctacccgcaagtttgaaagtgagaggaattaagatttgcatgcttatagggtatatggtattgttaagtttgttcaataccatcaatggaaaaatactctcactggttttg

SEQ ID NO: 364047 - DNA, 661 bp, Cannabis indica
acacagtgcatgcaccccgtatagtgaggggtgtccatattagctttgtctttttgagttaattaatttattcaattagataaatatttgaattaaaaaagtagttgagatcttttctcaagtggttgagagattccctcaatcggttataagatataaatatatataatcaaattcaattatattatttatttaaatggttaagtatgatttaattgatagatttgaatttaaataattaattaaataaaatatttattagatttatttaaaatattgtataacaaaattctaaacaacaaaagttttttgaataaaattttcacgtaacttttctaaaagcctaaaaatatttttatctctatcacaaaaagaaattatttttgctcatgtattgagatgaaaacaagaacttcatatacactttgtcctagtagcccacactactctttatgtgtggtggattaatttagaagactacggtgtgagtttctaatcaacccaagaggatacgacttgcaaaaagaatcaaggataccttgatagacatcaagaggtaaatattattttcatctgtttacttttagttttgtatatgtacatatggtgatcttgggcatatgatacaatgataatcagaaacaaactctttcaccgcgta

SEQ ID NO: 364048 - DNA, 487 bp, Cannabis indica
gcaaatgtttgttgttgttagaaagagttgtttagtagttgttttgccagattgaaatagttgtttgcaacttctgaaattgaaacaaataaataatttacattatttcaggatacggaaccattacaaattttggtacagagcaatgggcattgggatgacaacaactcagcacaggcagatttgcagcaatctggaaacaacccggcaacaacttccaagcaacaactatctgcgcacacaattggatcagttcaagacgatacattttttctaggaacagggaccgtgacatcataatcaaccatacaacaaccagaaaacaacaaagaaaaaactacagcaatagatgaatataaaaacaactaaaaaataactcaataacaacacaaaaataacatcaacaaaaatacataaaagaaatacaaaaagaatgacagaatacataaaaccgtcatgataaacgagtaaaacattgacaaaaaaa

SEQ ID NO: 364049 - DNA, 355 bp, Cannabis indica
tagacttggaggctcaattttctaaagacaagaaatttcatctctcatcattctatcttaagtgtgagcctattggaattattttaccaagatcttagatctactcacaagtaagtattatcaagatctgagcccgcatgtccttctttgttgaatctgaattcttcatagtcttcctcactatgattgaggtactacttgctgtgtgtgggcactactctatcacttagagatttcgaaacaaagaagaagaaagagagagagagagagagagagagagagtggcggcttaggaaaatttctgtgaaaggaaagaatgcaattgtgttttgctatgtttcctgaagcctttacc

SEQ ID NO: 364050 - DNA, 1257 bp, Cannabis indica
tcatgagatccataaaggccgcaggagcatttatcaatccgaatgacattaccagaaactcatagtgtccatatctagttcgaaatgcagtcttcggtatatcttctgcccgaattctgagctaatgataactggatcgcagatcaatctttgaaaacacagtcttcccctgaagctgatcgaacaaatcgtcaattttgggtaacgaatacttgttcttaatttttagtttgttcagttcccgataatcaatgcacattctgagggaaccatctttctttttcacaaacagaaccggagctccccatggcgatacactgggtcggtaaacccaatatcatgcatcccctgaagttgtaactttagctccttaagttctgctggatccatcctatacgaagctttagaaacaggttcgactctaggtgccaaatcaatcacaaattctatttctcgttgtggcggtgggatatacattgagaaaatctttaacaaccttgactacctcagtcccaaatattttgggtctactggagtcaatcacgactgctaaaaatcatacacatccactgtgtagtagatccctagctcttaatacagtaataaccgtgatctgaaacccctgaaccgatccaacataaacaaatggatcttcctcttctggcagaaaagttaccattttctgcttgcaatctatagtggccgaatacatggatagaaaatccatcccaagtatactgtcaaactctgttaattacagctctataaggtcagcactcaactccctatcttcgatcctaactgggatagacctaatgcgcctattggagataaccaactctccgctaggcattagggttccaaactagctttcaattaaatcacatggcctacccaagagatcgattacccatgtagccacatatgagtgtgtagctcccgaatcaaataacacagtataaaaagagttgttgacaggaagctaacctgtcaccacagaaggattagctgcagcatcagcttgagtgatggcaaacacccgagtaggtacgggctttgcctccgacttctgctcttctttctttgcctgagggcaatctttcttgaaatgccccaccatgccacactgaaagcatgtcttttagttgcactctctgggatgatgtttcttacaacgtgggcactcagggtaagagtaaccctggcgtccacctctgccttggttcccacggaaccgcttgctctgccccgagccac

SEQ ID NO: 364051 - DNA, 286 bp, Cannabis indica
tgggagtccgacaacttcgtgtattgagtgtactggggagtgtaccccttttctggtgcttctccccgtccaggtgctgcccttggaggaccttttactcctcgagcccttggaagggcctgccaggctagcagccggagcagagtgcgaaggagtttgtccattcattctggacgggttgccgaaatgggatgatgctggtgccaaggcctggccctgactagtatccgggggtagcagagattgtttgtggagttgcggttggggcagtacccgagggcgatac

SEQ ID NO: 364052 - DNA, 632 bp, Cannabis indica
tgccgctcttctcgaatagccctcaacaaatcttctatagtaattggctagaccgagaaacgagcatagttgttttacattggctggggtcgtccactcttggatcgcccgtaccttttccaaatccatacggatcttcccgtgttccacaacatgacccaggaacttgatacttttctgagcaaaagagcacttctcccgctttacatacaactgttctttcctcaacttctgaaacactgttgccaagtgttcctgatgctcttctaaagtggcgttatagaccacgatatcatccacgtacaccaccacgaacttgtctaagacatcatggaagacttcgttcacgagtgtacaaaatgtggctggcgcatttgtcaagccaaacggcatgacgtgaaacttgaacgccccataccgagtaacacaagtagtctttggttcatccctttctgcgatccgaacctgatagtaccctgatctcaagtccaacttcatgaaatatttttctccacttagctggtgaaacaaattagcgataaagggaatggggtatctgtttcgcacaatcaccttgttgagggcgcggtagtctatgcacagtctcagggtcccatccttcttcttttgga

SEQ ID NO: 364053 - DNA, 615 bp, Cannabis indica
ttcgaatctctatctgaaactatcgactttggtacccatgaagccttactatttctttaacatacaattctgctaactggtccactgaataggttgtttaaacaggcagaaaatgagcagacttcatgaatcgatccaccacaacccagatggaatcgaacaaacctgtggttctaggtaatccaaccacgaaatccatcgtgatgtcctcccacttccattcaggtagggttaaaggctggaacaaccctgcttttctctgatgttctgtcttaatctgctggtaggttaggcatctcgatacgaattctaccaaattcttcttcataccgctccaccaaaagtaaggtttaagatcctgatacatcttggtggtgtcgggatgcaaggaatatggggtagtatgagcctcttcaaagatttcattcctgagctctacactatctggaacacaaactctagatttaaacaatagcatcgcgttgtctgacagtgaaaaatccctggcttgaccagctgaaacctcttctctaaattttactaacactggatcagtcatctgagcgactttaattctttttaacagattagattgcagcgtcaagttgtgaagct

SEQ ID NO: 364054 - DNA, 677 bp, Cannabis indica
tagatcctggtaaaatattctcaacatcttatcgctagctcagactttgaagctacccagatctcgacgacgctcaggtcctagagcatgtcgagttctattcctctatccttgaagccacccaaattctaaggacgctcagaatttgaagctgctcgagcatcaaaacatctcgaattccaatttccttcattctcaaaaacatagagctctagaaataagctcttactacgataataccagggctagaactcaaaagtgaataatgtcaaagtaaaagttgttgagatttatgccataaaaacaagtaattaatggataatatatacaaaatatatgaaatacaattataagataaatgaatacattaattatagaagtataattaataaatatctaaaaattctttattcatatggagaagatataatcttgtaaggatgtactagagaattaagattatacgatatgaataaaactaatcggtagtgtattgtagtaaaaagaatctttaatatggaagattttgattcagatcacatatgtgtatagacatgtagtaaatatgttgtgcagaatttaattatgcatgagtggaccgatatgtaataacatctttcattaatgtgtcgtttaccatgaaaaaattattcatatcacaacgatgatcattagta

SEQ ID NO: 364055 - DNA, 638 bp, Cannabis indica
gaggaagaagaactatgataactactaaactccctagacctagtgaccatgtatatatcatggggatttattggagataagtcctaacttgaatctagatggcttgccctatcgaagttagtaccatatttctcggcaattccgtagtaaaaactattacaactaagttggacatgaaacataggataccaaccatcaaatctatgtgttatgcaatctatacagaagttatcccgtgtataaaaattatacttgctatcttgaaacttaactaacgaagtacattcagtactaagtacagttggtgaccatccaaagttattacctaaggatgcttcttcttcagcttcttgaggggctattttatgtaggtagtggtgcgagccatgttgtaacacccgaactagtataggcgtgttaacgtgattttaaacatattgtgcagctcgttgctaatcaatgaggttaatgaaaatcgtgattaattaaaattttcctaattaaacacttataatagtacatacaaaatattttgggatctcgttgacaaaatactttacaaaagtttgctattcatttacaaaatatttgtcgcccagcgactaacagcaaaagccctgatgtcccgaggatcgtac

SEQ ID NO: 364056 - DNA, 530 bp, Cannabis indica
tctcttttatagtgccctgacaaaccacactggaagcacccttgccctctacactctcgccgagtatgctttttacaattggggcatctgggtaagtgtatcgggtttcgaaaccaccctgatggtttcttgaccttggttccctcggaacctcttgttttgacctgagccaccggatgcagttggttcccttcttttctaataagtggtcgagccactcccacccctaccataactaggggtaggaggagtaaaggccccacccaacaacctgagtcctttgggactccttagtgcactccactgcgccctcagctcgtagtgccttccccacccatatcaacataggtggtgttgtcatcagtggtgatcataaggtcatgtcttatcttcgaattcaatccatgtactttgcgtcttggaacttttcccaggtaatagtggtaacattacaagtcaggaacaccatgtcccaccaaactagagcctcttcttgaaactagaatgtggcacaggccactctgtcatta

SEQ ID NO: 364057 - DNA, 933 bp, Cannabis indica
ccccagtctcgatcccgaacccaaactcaaaaatgggaccagggacttgaaccacaaccagaccgagacccgtgacagtgatccagatattaactcgggattcgagtaacggggccttgaacagaccagtagtcggtgtctagatctgggactcaaactaggaccagaacccagacgaagaaccaaaccttaacccagaccttgacctgggacccaaaataagaacctgaacaagaatcgccgaaccaggaccttggtacaagactaggaccttgacaaagacccggacccagacgtagaaccgaacacaaacctaggctcagacccaaactgagactggaactcaggcccggacacggtcgtgtacccaaaccggaactgagaccccgaactggacctaaatcttggacccaatcccaaacacagacttggaccaagatagagatccggatacgaacgtggattcgaaccaagaattagactgggatcgaaatgctagagctagatctggaccgagatcctgacccagacccaaactcggacccacactcgggaccccaactttgacctggactcgaaccaagacccagatcggggtcgagacctggacacaaacccgaatacagactcaggcccgaactcaaacccacacctagaatcagacccaaagcaagaacaagacccggacccaaactcgaacccagactaggataagaaccaaggacatagaccaagaactgaatccagactcataacgcgattggaactttgtactcggattaacctagaccaagacccaggacgcgaacccacacccggagcgtgatctggacctagactgaaatccggactggaacccaaactaagaccaggactcgaactcctactcgaactcaaacccaaactcgaattcagaatcgcaaatggaactag

SEQ ID NO: 364058 - DNA, 696 bp, Cannabis indica
attttcaaatatctagctgttaactatggtctttggtatagttgtgacacgaatacctctttggtcggatatagtgactctgattgggcaggatgtatagatgataggaaaagcacttcagggggttgcttttacattgggaataacctagtctcgtgggaataactttcatgtcaggaattccctttacagcttgaagcttcaccaatctttggagatctctatagttcaagtgtcccagcctgtagtgccataagtcaggtttgtccaagaaggtcctgttgcacactatggtattgcatacagcatagcactggtctacagttctgtttcctgttaagacaacacacccattagatgaaactaaacattgagttttagtgaaacttacagagagattgtcgtcacacaattgaccgatgctgatgagatttgctttgagtcctctcacatataagacattagtcagttgagctgctccattcacatttacatcacctctcccagcaatctatcctttgttgccatccccaaacgtgacaaatccccctttttcatctttgaagttaactagcaatttcttatttccagtcatgtgacgcgaacatccactgtcgaagtaccactgtccttcaacaaaggcagacagagatagcttcgcaaccaaaccaacatcaggatttggtttggacttta

SEQ ID NO: 364059 - DNA, 694 bp, Cannabis indica
ttatttaaattaataatattagtaagtaggtatattaaaatttagaataattatataaaacactatttttctatgaatgttttacatatttacggtcaaagttttttattttatatttttacggtattttataaaaatacaagaaaataaataaaaaaaagttaacatgaaagtaacaagaaaataacatcaaaacaacataaaaaaaataatatacaaataacaaaaaatcaacaacaaaataacaagagtacaattagtgttttactattttactattattaggtaattccaattagtgttttatggggtttgaatttttagttttatgtgttgaaaataattaggtattcccattgatgtcttgtctattgatatggtgagagtattcttttcaatttggtgagtcttgttttcggttctaatagtgctatggcttctagtagtacatcctatcaggaggtggaagaacaatatgcgaatatttcacttgagggagaggatgatggggagttgggtattgattttcttgtccctgatgatcaagttttgaatgatgagttatgtattgtgggccgatttttgactggaagagccattgacttcgaagttatgcgccatgttatggcctctttgtggcagccaggtaagggggtttatgctaaggagattgacaccaaccgttatctatttc

SEQ ID NO: 364060 - DNA, 810 bp, Cannabis indica
ttttcttagtacgaaaaaaatgttattttgtgtgtatcggcaacataaaaataactttgtttaaaaattaaaaataacacttcatatttcgtaaaaaattaaaattcacaaaatataaagaaaaattttaattcgtaataatataattttttttatcatttttaggtattaataaaataatcatataatcacggttaaaagctcctgtaatcacttacagacgatcaatggtagttggaactcatccatggaggataatgtctgaaaaatactatggaagattaaagctcctcctaaggttttacattttgcttggaaagctctttcgggttgtttgcctatgcgtactcaacttcatagtaaacatgttcctgtggctttacactgtgtgttgtgcaactatgaggaagagtcaattttccatgttttgatttaatgctcctttgctaatttatgttggctccgatcgacgttaggtgttggtgattctgcagcaaccatttgttttgactggtttatggaggtgttggcaataggcaataaggggttggttgaagaagctgtcatggttggttgggcaatttggaaggcgcagaatgatatgctttggaatggtaaaagttgtagtgctgttgatgttgtttggctggctcgtactactcttcgacaatggacgtgtgccctgtctaagcggctagactcgggttccctggctaagagaacactggtccaaaccggctgctggacagttaaaaattaaatggatggggcgatttttgaagacacaaatgagatcggtactggttttgt

SEQ ID NO: 364061 - DNA, 656 bp, Cannabis indica
aatattattgaagattaaaatataatacttattgtatgttaaattttatacaatattatatcttaggttaaatttaatataatttagagtcatatttatcataatttttttgaaataaaatcatcatctttattaattgcaatccatagtgattacatgattacatctggagtaacatcactactcctcataacacgatcagcctcgagctaagaagtgagcaacactatttgcagaacgtctaataaaattgacagaaacatctctcaaattattttaacatcatcttacaatcagaaataacacttccaaagtatgaaaccataggaagagaactacgtaacgcttgcaccactataagactattagtttcaatgacaacctccttccaatcctttgccttaatccaacttagcgcctccttaatacctaaggtttccaccatttcgggctgcagcactcctgaacgacagcagctaaacgcctccaccaacgcactagtttcgtctctaattacccccgcgaacctataagttccattctctgaaaaaatggcagcatcaacattaatcttcaaggtattaacagctggtttgatccatgtttcatctccatctacatctgtaaggaaagcagcagtgggaatcatagttgta

SEQ ID NO: 364062 - DNA, 1267 bp, Cannabis indica
aaaaaatgttaactgtctccgtcccactagaggacttggaggtgatcaagtgcaagactttcacgcaaggattgagaggacccgctctgcgttggttccacaacctaccatccggcacagtaaattcttaccaggatcttatcctaagattccaggccaattttgcgataagtgtgcgaaccgccaaggtggatacgaacttaatgttaatacaccagcgcctcgacgaacctctggaacattttatcaacaggtttagcgaagaatacgtcagtatcccgaaatgcaccgattcagtggcgacaaaagtattaatgcaaggattgatacatggttcagagttaaagaaggcgatcatagtggagcctggcctgtccctcacaagggccctgactatggcaagaggatatgtggccttggaagtagaagagaagcggcacaatgaggaagtgtcgcgcgaaacattggcatcaggagatactttcctcttcgaatctaagaaccggacaccagctgcacggcctcataatagaactgacaaccgctcggccaacgaaaggaactcccgagggacagtaatggtgagtatgggcgaggcggggcagccgcacgcccagcggggagaagaggagctaccacggatgaccattaccctaactgagttgataaaacgactgcggggattgaaggaaaccaaatggcccccaagaatgaccacggaccctgtcaagagagataaggggcgatattgtgccttccacggagagcacggccacgcaacctacgagtgcaggcagttgaagatagaagtcaaccgtctggtgaaagaaggattcttccgggactgcctcgtttcggacgtcgcactccacatgggggagtaacaaaaatcgggatcagtcccctccaccgtacattaagaaaaccgtaaatgtcatatcgggagggtcagacctgggcgggaattcagtacgagcttcgatggcccatgcccgacgggttcaatcagtaagggctatgacgtcaattaacaacgatggccctgacgtgctcttatcatttaaccgaggggaagcctccgaattagaacacccccacgatgacgctcttgtcatcaccctggacgttgctcatgttcgaatgaaacacatgcttgtcgacactaggagctcagccaacattttgtcgccggggttctgaaagaaatggaaatcgaagacctaaaagcccaggaccaccttacactagtaggattctcgggtgaaag

SEQ ID NO: 364063 - DNA, 590 bp, Cannabis indica
tgtttaaacaacatacttgtgagtagatctaagatcatggtaaaataaattccaacaggtttgtccacagttgacgcctccgccgcccaaacgccctttaagtttacccatactgctagcttaatcggtatatttatttttttgtccacctaattatctttctctctccctctctttgtctttgatttatgcaggtggacgacgtttgaaagtccacgtgggtcttgcctttaatttttttgaggtacacgatcgacgttcgtgttcgaaggggttgggttcgacaagcccggtgtttgatgtttgtggttgacagtgtgggatttgagttcaaaaatggacttgggattatttcattctaaagccatatttgacagtttatggttgacaatgtacactttagatatgggtttttttttttgttgtttaggtttattttgttcaaagtgtacactgtgtaatattttgaaagtgatttgagattatttcattaacaacagataaataatttgatgtgggttttttttcttcatgtttttgtattttttaatagaaacaaatgtgagtttgtattaagtttcatatcagtt

SEQ ID NO: 364064 - DNA, 510 bp, Cannabis indica
tcacagaacaaactaataaatccaattatgccattaaagctcaaagcttgagtttcaaaactcaagcttgcttagaaccaatatccagcatcaaaaccagaagctagggacttaatttaactcaaataacctatacaattcaaaccctaagcattttaaaacctaacagctcccaacaccaagaatcacaagttcaaactaagtaaaaagctcaataatacataaacaagagttctagggcttaccttagatgaaacctccttgaatcctagcttaaattcaaagaaatggaaggaaaaattctggttttggtccttgatttgtctcagccgaaagaaagaaagagagagttcaagaggaaaggtatttcttctaatttcttttcttttctttgattttctaaattggaaaaaggattgattaatcctttgctgaaaataaaggccacttgtcacctccctaggcagccactacaccattcttttaaaaagacttaaatacccttaaaga

SEQ ID NO: 364065 - DNA, 509 bp, Cannabis indica
atcgaagcagtagttggagtcggagtgtataaattggcttgacttgatggctcgctaataacaaaccactggaaaatagagcatttgtgaccctactatcaataaataaatgatgtaacttgcattactgatgtaatctttaaacttcagttatgaattaagagaatcatttatattaagtaattacaaagtttcattccttaaaattacttaaggggcatttatgtatgactaaccggaattcatctggaaatacaatgtttaatgcaaaccctccatttcatttttttttaaattcaaaggttctcgactaaacctctttgacgaaagtggagtagaactgttataacaacctggccaaacctttttgacgagaaaggggttgaaaattattcaaatttaagttgataaataaaattagttagaaataactaatttacaacttaaacagaaatatttaatgaaataattaaaataagcttcagaaagaatctagttagttataattc

SEQ ID NO: 364066 - DNA, 792 bp, Cannabis indica
aaataccacccttatcgactaacatatagttcctctttttgatcttagatttacttgattggcttccaatgttcatttcctggattaatctgatacttgctctttactcccagtcaacaacaggtgtctagtctaatgcatagcaaagcatatttgagacctctcattgttgattcaaggaattctttctttggcttttttcttttctggaatagttgaaacttttccttagataaataaaatctatatcttgatgtcgagaagcttctatagattgccattaaaaaatgctccagcatgttattaaagtaagttgcttgcactagagtaagtaaattaccaggcatatcacaagtcataggtatagataatcttaaacctttaacattaggatcaagaagttttgttgagtctattgaatagacttaattaacaagacttcctttcttgtctttgtaatagaaaatttttggttactccatatgaatggttttaacaatagctcttttggctttacttcttagtttcttattctgacaatacattattttttaaactaataatggagtttcatcacaagtgtcttccaagtcataacaggctgagttccttgaaaccctctcactacgacaaggtaccatgaatttttgtctaagatcactaaatgttatgaacctcttcagttgtgtcaaggcaacagaggcagtgggaccatcttatacaaaataagatgacagaacacttttgaatcaagaaaaaaaattgtctcctctattttgatactttgttttc

SEQ ID NO: 364067 - DNA, 918 bp, Cannabis indica
actgaagatttttcaaagtttattttctatcctgaagctcgctcataaatatccaggagccgaagtatactagccgcctccattttgtttgctttgcagaaaatataactatcatctgcaaacaacatatgagaaacaccaggagcatttctagctacacgacagcctgttaaccactgctttcgcacaaacatgttgaccagcgaagagaatccctcagcacaaataagaaacaaatagggagatagtggatctccctgacgaatgcctctacttggaaatataggacccatcactctaccaccatgagtaatcttgtaagtgactgaagacacacaatacatgattaacgaaaccagcttacttgagaaaccatctgaatcatcatcatctctagaaaagcccattccaccctatcataggctttactcatatccaactttaaagccatagtaccaattttgcccattagcttccgcttcaaataatgcatgatctcaaaagaaatcatagtattatcagaaattaatctaccttgtataaaagcactctgagtttcagagataacacaaggcaagacacttttcaatctgttggcaagaactttggaaatgactttgtagacaacattacacaatgatataggacgaagatccatcaaggacacaggtagtttcttcttaggaataagcacaatacaagtttcattaagcaaaggagaaaaataacctgtatcaaagaacatccttacttgagaaacaacatcaccacccaccacactccaatatttctgaaagaaacccggagtcataccatccggaccaggagatttgtcaggatgcatttggaaaagagctcttcgaacttcatcatcagtaattggctccaaagtaaagcattttgcatatccgaaacaac

SEQ ID NO: 364068 - DNA, 527 bp, Cannabis indica
cataactttttactcgtttatccaatttcaaaaattccagttgcgttctcttagttaaatgatatgtgatcttaaaaatcaatttaaaaagtttaaatatcatttttttgagaaataacttgtcgcacaagttagtgagccaaacttttaaacttataaaccctagtgtactatgcaaatcactttaacaagactaaagtaaacttataccacttgattgtatgtagtcttgatgtagatgagcttcctagcttgatttgcatgttttgatccaaacttgacttttctctgagagttgactttgactttcaggttgacttttgactttgagcttttgaagtcctctttttggatagggtcttgaattcttgatctctcgatgaaactttagctcttatgaagtatgaagtagttgatatacttgttgaatctacttctttaattatgtttgactttaacgagcaaatattgatactttgtggattcgcttgcaaaataatcaagaaaagattagtaacaaataataa

SEQ ID NO: 364069 - DNA, 653 bp, Cannabis indica
gattatgttgactcgggttagtgagttaatgagtgttgagagattacaccatggatgacttattgtgattattttcttgtagctcctgagattgatatctcttattctcactatcaataatgattggtggcaatgctttcaaactgcagtatgaccaagttcacattaaacttaggatcggaactagtataattctcatgtgttgttgtgtttgacaaacgtctagattcatctgttgttatctttctggtttaatgtgtttgctggttttttgttcttaatttgtttgttttgatttgacatttgtttgtttaagtgtgatcttgaagttgaaattacaaaggttaattcatatcagagctaaatttcctacaaatcagagcttggttctttgatcattaagggggattcaaagatcacttcgttccgcaccaagaattcatcaataattcatcaagaaattctacaaaaacacagattgaaggaggatgtcgatggttaggttcgaactagagaagttcgatggatcaactgatttcacactatggcgagagaatttgaagggatacttgtgcaccaaaaggtggcaaaggtactcagagatgaaaagttgctggctgagaagaagccagaggaaattgcaaatatggagg

SEQ ID NO: 364070 - DNA, 518 bp, Cannabis indica
acaccgagtcactcgtcagacgcgtgttcggaccccctgtccgaagaaacacgctcgggttgtcctaatgcccctcgtacacgcacggaatggctgcttgcagcctctagcgctgagaaacctcgaccgtgcacccctctgagcccacgcggatgatatgcaatgcataccatccgtacaacttgcatttttcgattttcttcattttttcatgctttttcattgaattaatttcggatttttcgagtagttttgtattttaatttttacttttcaaatttcaaatctaattatcagaattaaattatttttttttaaaattaatttaagatattagtgaaatttaatttgaaaataggtaaaaatctatcctttttgcttaatttgttatcttatttttaaaatttgattatattatcttatttttaaatttaaggtcagatattaatattttttaaatggaagaggtttgaatggttatatttttacaataaccatcatggttacatttttttaag

SEQ ID NO: 364071 - DNA, 512 bp, Cannabis indica
aaaccgtcgggaaacccacattagcgacagttttgaaccgtcacctattatgcccattttacgactgtcgtataggcgacggttatagaaaccgatgggaatactttaaacgactatttaaaaacgtcaggaaaacctatttttgtagtagtgggtccacgattgtgttgattctgatgagactgagctccgagttcacgagtgtaatttccagtatatcctcctcttgtgttactgaagttgctacgattttgtgctggatatcgtgagttgcgattatactgagctatattcgcctcaaagtccagatttggatcgatagagtaatcaacttcagttttggccaagtttgcactgatttcgtgttcttgatcagtcttttcgattcttgattcagatgcaagaagtaatgcttcgatctcagcgacagtgtagccttctattcttgtgttagaggagatgatgaacgtgtcgtattcgttgggtaatcctttgaaaatagccgagatatg

SEQ ID NO: 364072 - DNA, 734 bp, Cannabis indica
aaaaattccttaaatgtaaaaatgtaattttttttacaaaaaaggtgtcttgtataattatccttttaatatactacctaattaaaaatagagtttttatacttttaatattttttctttccaaaaatatttttacatttaaaaagtgcatctctctttcttttgagagtaaaatatattaaaagtataaatactttatttttaattgaaccctatattattaaaagaccatatttcatatttaatctaagcatgttaagccaaatttcacctattagctaactagcaaactacttaactttcaaatcaaaacaaaacagttcagttagttatttgtaccaagtgtctaaaaactctaacaacatattataaaaactttgtgacttttactattaaatgttgtaagaagactttttgtagattagctgattaggttacctaagtataattagccacctttttttacggcactaatggatcatatacatatataaatattatttattgcacaagttccaatgttagttaatgctatattcttctcttgttaattgttagactaaaaaacaaacaaatgtttacaattttcaacttttctttttttttttttttctttttggtctaattagtatttttgtcccttgaactttaacatgtactaaatcatgccccttgaaattttaaggtcgttaaaaatccccctgaactattaagattgttggatttaaggactt

SEQ ID NO: 364073 - DNA, 602 bp, Cannabis indica
ataaaacccaacaggaacatctacttggtaagataggccgagcaggatgcctcgctggcatgcccagagcaagatattcagcgatccgcgtagagcaaccaaaacttagagaattcagctttcgcatcatcagtcattagcacaatccctataactcaaggatcaatttacgtggatatggcatacacacgatcccactatcagtgtatccagccttaatcccacgatctttgcattcagtattgatctcacaatttttctgtttatacgcattgtaacgagaggggaaactcttcctcctcaaacttcctagccctataaatattgatgtatgttcattggggaggaggggtcgaaaaaagttgagataagactatactattatctaagaattatatatttagagatactattgtaagagctataagaaaaggaatctttctctttgatcttaagtcagtacaaataacgaggattaggctattactgaactactcagggctgaacctctataaaatccctgtgtcttattattgctttatcatatatctgttattatatatcgtttatcgcttataaaatagactcattgtcgttggcta

SEQ ID NO: 364074 - DNA, 776 bp, Cannabis indica
tcttaatatcttgtttggcaaaatagttagtaattacatgggaaaataatattttttagtagctaatgtttaatatggaaagtttttagtaattacacaatgtaattacattcaattctcataggggccatgagaattggaaagtgtaattggaacccctcaattacttcaaataacacagttacagtgtaattacatggtgataaacatgtcaaattgtgtaattacttccaattacacacaaatccaattacactgtagctttccaaacgcacctataatttaatatttctattggaacacagcaatttctaacctttaatatataaactctaaagagataaagaatatgttcttatttttaataatgaaactttaagctaagcccaacaaaacaaaaccttattcccacataggatttatgtgttttaattttgtgttgagcattataaatattttactaatttgagaaatgatgatattaaattctcaaaaaatgtttttttcagaataaaaaaaaacaaaataagaccaaatatgtgaactatttttcatttcttaattatttatttcattttgttaaatcaaactatttgactaaattactattgagaaacaaaactaaatctatggcttcaattttctctttctagaataggaagggaaatttgattttctatacttacatatacttaatatttttttttaaaacacataacatttaatatttgtgggatataacacattttagaatatccctaaaatactcccattta

SEQ ID NO: 364075 - DNA, 656 bp, Cannabis indica
ggggtagaacggtaaattttttcctactcgatgtaaatcatctatagaggatctttaattatttggattataacaatggataattaatagcgtatctatatcttggaacatatagagcattctatataattaagagtgtaattctgaatctatagtggagtcatgatgaattaataaattaaagaacttacttggtaagttctagaactgcttattggaagcttgattatatagactcatggtccccacacgaaataatactgcttgtagacttagttaattggttttaattaatcaattataattctaaaattagattatgtcttatttattaattttcactaagaaatggcttaattgtgaaaaaaaagaagttttaggatttatttgttaattacgagactttgtaaggtctaattaataaataagttaaataaaaattttatttaataattaatttaattattaaataaatagatttggcatttaaaaatgtttaaaattaaaatatggtatttgtgaaaggaaaagatgaattatgaaataaaatagcaaaactgtaaatagtggagtccacactaagtggtcggccacttaaggagtaatttagtcatttatttatcttttttaatctatataatttaaacctagcccta

SEQ ID NO: 364076 - DNA, 1011 bp, Cannabis indica
ttctttgaacatggtcgctctttaatctattgggtactcctggtcggcatatttgcttgtttttcgtttgatactccgtccaacactcatcttgtgtgttgtcttttgtagatgaacccaggtgagtcttgggagcccgagcatcaaatcgaccaggagctgcttcaacttctgcacgaagtccaccctcatcttcgtgctaactctccttctagagaaggaaattcttctgattccgtacccagccataggatgatggatcgtacgaagaaaaccacgcgtctggttgacgcttctgaccatcaagtggctcgacttgctactctacccgacgccaaacaagatttggcggtcccaatggaggaggaccgtgagggggacgctgaagtccaggaggttgaggagttggacgaggcgcgtccgggcagtcctttcgctgctgagggagaggaagagattggaccccctaattttggggagtacaatgaggctgggcaacaagacgatgctgacagggatatcctggttgagggcgctgactacgtcagtgaggagcttgctgaggcggttcctcacaggaggcagggtgccttgggcgccaggtgggtaagtcctccgtccaaaatttcggaggcacgcctccgcactcttgaccaggacggatacctgggcgagctggactgctacattcccgcccacgacaatcgtgccacaaaccctgataaggggatgtgcgcctggtcgggggctcacagccagcaaggggcgctgatgcccttgcataagtacttccgggatgtggcggacttcttcggcctctgcccggctcagattactccaaagggcattaagtatttgtctgctctcttcgtcctttacgcttcttagggatgggatgctccttgtccccacgaggtcgcttggttcttcgacctgaagtctactcccaagcaaggcaagtcagggtatttttactttctctcagccaggcttcaagtggttgagcgggac

SEQ ID NO: 364077 - DNA, 575 bp, Cannabis indica
attatttatatgattaaatgaatatgtaatcctatagattagaataatagttttagtattacgagaaatctgtgtactactgcttattcatggcagatactagtagtgacttgaattttatcttatgaacaatgcgtaatgatttaataatgattatgtataaatgataacattcgaataataaactatatgattattattattacttttcttgctgagtccttgtgacttacgggtgctatgtagtgcaggtaaaggcaaggaaaaaactaggtcaaccatgaggtgacagtcttctccagcaatgtacatattgatctcaccagctagcgtgtcaggttaccaagagttgttttaggctgtatctattgtatattttggttttatatttttgaggcatcattacatatagtttgttcttgtaaaactctttataacagggatacccaaaacacactttttatgccgttataatatccatttttagtatttcattttagtcaagttattattatcacagtttttaataattaattatcctattagtattaaactagtttataaaatcacacacg

SEQ ID NO: 364078 - DNA, 644 bp, Cannabis indica
ttataaaaaaaataaaaaataacactcaaacaacaaaaaaataaaagtaaaacaacacacatatacctcctttaaaggtcgagtgaagatgatgtagttgacattgtccattttcaactgagatactttaagcgtttggaattttttggccagttaagaagcctaggaatgacaatgcttgaatacaaaggaagtttcccaatgacgtatggacaacactcaagaaaccaaacttgcaatgcatacggaaaacctaataacctataaaacccaccatccttttccttcttcttaaccatcctaatattgacatcagtcttactcttaagagattcaagagtcatctcaaagcactcattgccccacccatactcattattattgggattgttttatcaggatttagatttactaacaagtatattgaattaacatcctaaatatgaatatctctaaaacaatgaaattaaaaacataagggtttaagaaaaccttacattgattgcagccgaatatagtgactcattcccttcagatctctagtccttgattcttttctgtcgcagggtattatcaagttttgaaactggatctctttctctccttcgagcttagttactaccgtcttactcactatgattgag

SEQ ID NO: 364079 - DNA, 539 bp, Cannabis indica
attttgcaaaaagtggcattggccatgatcctagtaaataaaagtttttgagaaacttttttcactactaaaaagctcgaaattcttgacggttttgcaaagaattctcgatagtccataaaattgttgcctatacgagtgtcgcgagtactgggtagaataggcaacagtcatggaagaagtaaacctcctctcgccaaagcacacccaaccaagcaatgtgagaagcatatttatgtccaacataaataatcgagaggacgacctaaacagctagcatgacaacattgatgatgagagagatgttgagaatgaagaggaagaggactacgatggagagtacgtcaaagatgggcactataaatatggataccactttgagcaagaccccaaagtagttcaagtgtctgatcaggagttccttgagaccaaacaaaagctagcccatcaggaaaagttttctcaaaaaatggagaaaataatggctcgccttcgagccatgatgcgtgttgtatgtcgtatctgttggaaattatttt

SEQ ID NO: 364080 - DNA, 983 bp, Cannabis indica
taagggtttgagtttcatgttttgattcttagggactttgaagcattcgtccaggtcatttatatgccccccaaccttcctggattcaacgagcatgtcatccacgtacacttccatatttcgtccgatctggtctttgaacattttatttaccaatctttggtatgtagcctcggcattcttgagaccaaatggcatgagtttataacagtacagacccatatctgtttagaaaattgtatgttcttggtctggtggatgcatcttgatttgattgtatcctaaataggcatcaatgaagcttaatatctcgtgtcctgctgctgcatccacaagttgatctattcttggaagtggaaagcagtcctcggggcacgccttattgaggtcggtgaagtcaatacacactcgccattttttgtttggcttgggcactagtatgggattagccacccaggccaggtagaaagcttcaattatgaaattattgttgcccaacttttctacctcttcttttagggctagggcccgttctttatctaacaatcttcttttttgttgaacagaatagaaattaggatcaatattcaaggcgtgtgaaattatagaaggatcaattccgaccatgcaaaaatgtctaggtgtgctcttaaaatttttatcaatgctgattttactttgagtagcaaaccttttccaattttgagtttcctgttccgaacatttgagtcgattctaatctcttttagttcttccactggcccaacatatgtattcggttcccaaagtcggggatccacatcttcatccccgccttgggcggttccctatttggcaatgtattttacctttcccaaactctgactagaggatacttcctttttagccttgttcaaggcaaggttgtaacatttctgtgtaacttgttaatttcctctcaggcatccgaccccattcttcgttggaaacttaaggcacgaatg

SEQ ID NO: 364081 - DNA, 1312 bp, Cannabis indica
ttttttttaggtagtccatgatttaagcacaaacctttggattttccaaggccatcagaacccaatataatatacaacatgaagtttagaaagaacggaaaaacacacacacacacttggaatttggtggaatatatatctttcattacaaatttaaatggatatactattgtttaatcacccaatatatatgtttattggatcacatttaatatttttaggcctatctaaatttgatctaattatatatatgttgtattgtaaaaatagttgctgcaaaaaataaaaggaacgaatttaccgaattagaatctgggttgagtcgcggataggagtgttcattggatcacatctaatagatttggacccatctgatccgatccaattatttattggatattagattttgccatccaatccaatccaattaaattgagtcatctgatctgatccgatccaattgatgtattggattttgatcggttccatccattggatactttaaactgatttttttatgggtattggattggatccaaccaagggatctaatctataagaaaaaaaataatgaaaaaaacataatttaaaatctaataatccaacatagataataaacaatagtttaatccaaatccaacctacttttcatgatcccataataaaaatataacacaaatctaacttaataagcgcaagtcttaataaacaagtccaatacatcaaatgcaaatattatataaaatataaaatcaatcactatcttgagtttaatctttgatggtccaatctcacaaaagaagatgtttactcaataattaaatatataaaattataaatattaaatacaattggatgtacattggatgatattggattggatcggttcggttatttattggatcggatgtctcatccaacatccaatccgatccaattatgattggatatccaattttattggatcggttgtgattggatcggtcggttgtaattggatcggatgactttctgtacacccctagtcgcggactaggtcgctctctttaagacgttcgtgacattgcccaaatatgtgcaagcagactatcagtctcctcgtcccctgggtaaaacaacccagtcaaacacactgtatcggaactctattgcacgatagagaaccgtcgaaataccacaccaaaaaactaactactgctcgtgtaatgaccgctctagtaatttggattagtaagggcaattagcactaatttttagtattttattattttattattatttgtgaattaatttaattatggaccccaatatt

SEQ ID NO: 364082 - DNA, 812 bp, Cannabis indica
agggcataaaatccaacaaaaaaccctttgttcatacttttacttttatagcttttatattttctgtgtgaaatcactactgtgaggttcaaatttagttgacaaaattctgcgttaacaatgacaagtatgcgttttggtgtgccgtgggaaaaatggcctttttgccatttgattctttgtcttttagtgaaaataagttaagtaatgtaatcggattatatttcattattttagttagataaacaccgaaataaaactattatttcattttattcaaaattagaaagaaaatcacaagccttctcttcctctctctctctctctctcgcacccaagaactagcaagggttagggttctcttcagttcaatttatgtcatttttagaataatctttgtgattccaatcctaggtaagctcccaagctcttcatttgttgatttcataaaatttcaagctaagtttatgcatgattttagagttagggttctgtgatgttaatggtatttaattttgtattgtgagattaaattgaagttatttaagttgatttgagttgagtttttggtggttgtgaggtttgtttaaggtttcagcttaagagctcaaactttgctctcacattgtggattttgattatgagagtattggtttgttttattgcatgatttctacttattgttgtgtaattaggtactctggaaggtttggtttagttaagggttgaattaagttattttttgggttttttgtggttcctgcactgaactggtcgactggtttagcaaggcctgtaggaaccagaattcc

SEQ ID NO: 364083 - DNA, 702 bp, Cannabis indica
tatgccttgctggcttgctgagccttttcttttgctgctccacttaaaatgaggataaccgaaggaaccttgattatggttcggatctaagttaaacttgggcataatccttattaatggttgtgtatagcttgaaaataattcaacagtaataaactcctttattaagaatttttgtagaacatttaaagcttacatctgaatggaatgcgtcattatatactgctgctatcaatgtaaggatttcttaatcttttatatgtttattttattattttagaaatttatatttaagaggttagataatagtgttataatcaacatacatgttagtttatctagatccttataaaataagttctaacagtttctactatgagatgcgtgataatataactatgtggaatttctatatataacatgttattcactaatgcatgagcatggttttaatcaactattaataaaaatttatttaaagacattaaatacataataatgataaatcggataaaatttgggtatttctagtttcacaactctttgtaaaaattataagggtgcgtttggaaagccacaatgtaattagatttgtgtgtaattggagataattacacaatttggcatgtttgtctgaccatgtaattacactgtaactgtgtaattggaagtaattgaggggttctaattacactctccaat

SEQ ID NO: 364084 - DNA, 1036 bp, Cannabis indica
aatgtaccctccttttagtcgagtaatgcaagcagtattatcttgatagagaactgttggtgttgatacttctttattgagtgtaatccatatgttttctaaatatgttatggcatggtctcacccacacacattctctacttgttacataaagtgcaagaatgttagcatgatttaaagttgtctcgttataaactttgtcagaaaaattcagtgggacaaaatttgagctaagggaaaaagagtacaatatatataattcatatttataattatttacaagttgccttgttaaaaatcttctcaggaaaattcagtgggacaaaacttgagctaagaaaaatgagtgcaacatgaatatgtgtccctctcgtgcacatatgatcataattattttactgataatatatcttataagattattattatcacttttaaaatatcaccgtatattatctaacttattgataagaggttcctggaacatcaatatttatctaacttattgaatcattcatgcatgtgtatatacaatgttgttcatactaaagtttaaaattttaagtaatatgaacctaacacattaatgataatataaatttttatttgtgatgataatgatactccaagaccatatatttatttcattattgttatatgatcctaatttccatatcaaatgatcatatatctataattcttgatgcatatgaagtacttcaaaacttctctactaatgaacaaactatatacatttaatatttctcaatatataaaaataaataaaagtttgtttttcactcatttataatataatcaaaaactcttcaagagtctatcacaacgtataattataaatttatattgcataaacaatcatatgcattttttaaataataatttattacatgtctttatatcatacaatgattgtttttcatatagtgatcgcaattttgaattcaaatctcttaagacatgtattaaattcttctaaaatttttagataaggcaatatttcaaattctcactatat

SEQ ID NO: 364085 - DNA, 745 bp, Cannabis indica
aaataaaaaaaaaatgagaaaaagcttggtaaagtgggctggactcaagcggcctagtcaatgcgaggaggaaggcgaggaccaatacgcgcttcaagcatagcatcaagtttcttcttcttctcccggaatttggcaataacctcctcaggtttggggtagaagtcaagcttgatactctggccatttgtcgaccaggccatatagacgccatcatcgaagcgcttgacacaacgcttacaggagacaggggacaggagctcatctcttttagccttctttaaggcttgatctctgaagtcctttagctccttcatctccacggccaagttagccctggactgcaagtccgcctggtgcaactcctctaaggacctcaccttggcggccatctcgtctatggcctccttagcctcccgaagctcgcgcttggccttggcagtggcctcgccctccgccctcagcgcctcccggtgcctcgcctccagcctatccctccgcaggacctcctctcggagcatcgcctccgcctgggcttccctctgtttggcctcctcctcgagcttcgccttagcgagggcctcctttcgctcagcctcctcttggatcgcccgcctctcagcggacaggtcccgcagaatcctcacgacctcgtctatgcccccgaattcggacaggacgaagccatgattgacgatggtcctggagaggcggctggtctccgtagaaatctgaaaaaaggaga

SEQ ID NO: 364086 - DNA, 520 bp, Cannabis indica
gcctcaatgagtcttttactgacgtaatagaccgggtgttggatattgttttcttctctgatcagtaccacacttatagcatgttcggtgacagccatgtatatccctaattcttctctgtccagaggttttgagagcacataaggttttgtgagttgcgcctttagctcctggaaagcttttttgcattcctctgtccattcaaactgcttatttcctcgcagaatgttgaagaataggacacacttgtctgttgactttgaaaaaaatatgccgagtgcggaaatccaattagtcaacctttgaacttcctttgtttttgttggcgatttcatatctaggttggcttgaatcttctctgaattggcttcgattcctcgagcattgatgataaagcatcgacttcaaaggagccctttaggggattgagtttcatgttttatttcttgaggaccttgaagcatttgtccatgtcatctatatgccccccagccttcctggatttgacgatcatgtcatc

SEQ ID NO: 364087 - DNA, 609 bp, Cannabis indica
ggtactaaatcaggtacgcatcaaaagagtttcgtgttatatgattatcatcgtaccataaccacaagatctccatacgtgtgtacattaaatcaaaacaataaaaagatataagtttagagtatacctattgaagcctatcaggttatcctcaaaatttctcgtaagttgtatcgcttaatccagttgatgaggaattaacaatttagactcacaccagtgtcttccaaatcgatccaccacacacaagaaataatgtgagccattaggataaagtgtatagccttgttcttgttgagttctcaatacatgagtaagaacaactgagacaaaaaataatttcctttttctctctatagatttcaaaattcagtgtaaaaaagttattctgatttctcaaatcagactcctatttatagtagataaatccctttaattaaattattatttaattgtttaaataaataaatatctataacaaaaaatcacataatcaaatttgagtgtgtttatatatagattggattcgtaaatttaatataaaggatttttattcctaaactttacgaaaaatatggtgtgaatctgtttaccataactaaaatggaa

SEQ ID NO: 364088 - DNA, 837 bp, Cannabis indica
aaaatgaaattattaaattcaaaactgcaaatcgtactgaaccatgcgatttgataaaaatgcaaatcacaaccgcaccacaaagaatttcaaaccgctttttttatgttgtgtggtgcggtacaagcagtttgtacggcgtgagcgatttgatgaacacctctaataatattatgtatgcacacaaatttaacttgataggggccacatgtagatatgataaataatgaacctagaatttttacttgtggtgacttatttattttaaaagatatgtgtgcctatattgtaattatttctgttgaatttataattattaaattaaaaaaatatgccaatttttttttttttcaaataaatatatttaattttcataagtgtaatactgtttttagtggggctatctcatatagcaatgaatggattcgtttcctcaccctatttattataagtagcatattatataatataagtatgtattgaatttatgtggaatttgtgtgcacatatccctaatttatcttttaaaaattactctttgatatcgtattcatattccaatcgaaatttttccaatataattcagagtaatttactacttgttacatgtacaaaaaatataataaaaagaaaactaagccaatagttatactttaaaataaatataaatataaataccatttatataaggttgaataatctaaaaattagctaagatcaatgttacaatgaaaagtaacaaaactgtctcaatgtttccaccggccattggcgagtgttgttcccacatggtcttgcagctccttactaacccaaccaataccatgtgctctaata

SEQ ID NO: 364089 - DNA, 607 bp, Cannabis indica
ttcagcgttttaagtctgggattatctccgctttggatacgttcgattagtaggagactcttattgaatgtccacggagtgccttcaaggactctcccaatatccacttcatgaaagaattggaatagaaatcggttagtttccagttctttgacatacatccctttccccggccgccataatgacgccatcacatttcttaaagaatcgaaatcggcaggcctatccgataacagctttcctaccaaacaccaccttccatcaacttcatcaaccagcctttcctcctgatcaaacaagagccctccttcctcctcatcttctacttgtaaatcagcccattgttgccccaaatcttccactacccgactactagacgccatacgaatcgatcaaaacacaacccaacaacggaatacttttacaacctcatacacatgtcactagacaagactcacttgtaatttcaattttgtctcaccaatagctcgtataatgttattaacccaaaatagacttttaattataattattatgcagtataattaacatagtaattacatgaaaagcattaatatttagcatcttaaggttttttttttttttt

SEQ ID NO: 364090 - DNA, 795 bp, Cannabis indica
ttattttagaaaatagttaattataattaattaattttaaaaatggaatgtttatttattagtaacctactattacaggtcaaagaaaaatgtaaccataaaaatgtaaccattgaatagttacctatatatatataatatggtgttaaatttagcataaaatataaataaatgatatatttataataatatttattattgtacaacaatgcctaatgtacaataatattttaaagaataagtagtaaattttactcctgaactcttgacaatactaattttccccttaaaatatacagcttgttaagaatttcccttgaacttttacatcaacagaaatttagtcctcccgtcccattattccgtttaaataatgacatgtctttgtaaattagcaactttgccccctaaactttgacaactatcaaatcgtaccccctcaaaataaatatgagaaagatttaacactttttttttagtaaatcttagaaaattaatttagatcttaaaaaaaatatatattttgaattattaaaaaaattaaaaaaatttaaaatattaaaactaattcatcgatttaaaaagttatttattttttattaaaaaattcatttagatataaaaaataatatatttaaaattcaattttttagaaaaactaaattttacgatggaagactcccatagctcggtactaatccgtgaagactcccatagtgaattaattggaaaaggagatcttgcctgaagacaaaatagaagcaagaaaactgcgatatcgagctgctcgatatg

SEQ ID NO: 364091 - DNA, 552 bp, Cannabis indica
ttatatatattaggtagatgttacgtgtcgagctccatattgttagttttacttgaggttttaattatgaaatttaacaggtagagtatcgtgttaaatttcatgtgttaatatttttccctattcagcgaccttggaggaaacaggcatggtgtcttcgatttcctcaaaactgcttgccatcgtcgatatctacatggtgatgtcatcactgagtcccagctgcgctctaccatcgccacaaaacagtcacaaaaccaagcattccaatattaaatttatttctatactattcccatcacagaccacaaattacaaatagaaaaaatgagttgggttggacaggttgattggtttggcccaaattttgtgcacccctatttgaaattcttttagtggaacttgataattggagtctttttcgaaacttatttcattacgtttaagaaagttataatgtcatggttgtggccataaacttatttcaatcaaatcattcaaacatatgctcttgggaaaatatacacacaaactaaaataaaaaaaaaataa

SEQ ID NO: 364092 - DNA, 607 bp, Cannabis indica
tgatttgcaaaagttcaaacatatggcttctctttatggccatattctttatgattgtatggtttgattgctgattttgatgttgtttcttttaattttgctaagcggtctgctaataaggttgtgcatgccttggcgcgatcttctctttttgaggctgaccgtacttttagtagggactctttaccttttgtttttgcatccttggttttggatgatttagtttaatgaaattattattcaaaaaaaaaaaaaaagatttagaaggattttgattttatagatattatttacagttaaatattttagttcttttagaaaacaaaataaaaagaaaataaataaataagtttaaaaaaatggaagaaaaaattaaaaattgagaaatctctcatgaaattcagaaatctaaaatataatgaacaacataagaactcacgaatataaaaatctatatagaaaacttaccatataatgatagattctaaatctttaaaaaaaatttaccatacaattcagagtaaaaaaacaaataagtgacataatcaaataatagtagagatgagaggattaaaagttctttctttcttttttataaaaaaaaaaa

SEQ ID NO: 364093 - DNA, 1147 bp, Cannabis indica
ttttattttttattattatatatatttctattataaggtatctattttttgttatatggtacaatttattgtatagtatatcattttattttagatcatacatgtttagtttttattttattttatataaaagtaatatataattttgttatcatgatatatattttttttaaatattaatttagtattgttataatttatttgtggtatataattttattactacagtatattaattttcattgatacgatatatcaaatattgttgtatatatttaataatctaatatatttattcatttttgttacaatattataatatgcaatactagaaaaaatatataacttaatttaattattatatatatgtatattataaaaaaaaaaatgtagtaaatgtattcttataacttttattagctaatttattatatttgactattttcttaatatttttataagagaaatatttactaatataatttctaaatgtagaatcattttgcatctcaacgagtataataatagccatgttccaaatggaagtgggctgatatcttctgatgctttctaatcattcttttttgagaaatttacacttcatactattttttttttcagtttctttcatttttactgttacacggtaatatatacttttatactgtttctttatactgtcttgtaataaatgcatattgagcacatattaaactattttatttattttttaagtgtaataaatgtgatgtgactttgtgctgtctactttagtgatttaattttttttaactaaaattatattatagtttagataatataaattgtgatttgagttatgttgtgacagtattttctttttattttttttttttttaatttttctttaaattaaaattgatgatagaaaaattatattatattatactgtattttttaatttgttttatcttgtcttgtcacttggctacggttttctaatttttttatcacaatacacatgttatctcacatttttcatttcatcagttcattgatcttattatttttttctttattcaactttattcttaaggtattcatctctctcctctattcatcttcttcttcttgtttcttttctttttttttttttttgttgtttact

SEQ ID NO: 364094 - DNA, 895 bp, Cannabis indica
gaaagaacttatgaaacagaaatctaccgcctgagacgccgtctgaaagagccagaacgtcgaaacgttgagttagaacatgaggcagcctcgtccagggcagcgcaggggacgaacgctcaaaatcaacctgaacctggagtgagaagaccaagaggcagacctcgtggctcacgaaccaggagacaggaaaatgtccggggaaaatgacacaccccctgagaatcaggatgaacagccagaagggagacaatcgaaaactgatgaacgagaaatccctcatgaaaatgaggaggatcttggaactcaatcgggagaacggagattacttgctagaaatcaccaacgttcgtcccaaacccatagagcaaggactcgtacgtaccctgatgggagaaataagacaaacagctctcgggaggaaaaaatagagtgtgaagaagcaagtgtaacttcaaggcgatccagaacccatagtcgatcaactcgaagaggagaaagcactcgacgagctaatgattgagaaagtatatgggaaccagtaaatcggcgagccactcaaagacaaagtctatgggtaggacgcgatctatgagtaagatgagatctgctagtaattactcccaactagatctgcgagagaacttgaatcagaaaaaaccttaccttcgccaatagattggtccaaagtatgaggatccaatccaattgcagataaacgagctggaggacaagttcagaagatatcaagtgggggaattagggaaattatctagatacgactctgacgaggaccatgagccgtatcacccagatattatgaataccccttttccgttgggatataaaaacctgcatgtctcatcctatgacagaactattgggttttgtgccc

SEQ ID NO: 364095 - DNA, 387 bp, Cannabis indica
aacgtgagagtgcaattgagtgggagcactaaacatagatatggaatttatagcttctatctggacatagaagtgaaatgatgatttccttcaagcttggcttaatagagataaatggaaaaactcttatttcagtaattatattagtttactaaaatatcatttataggaagctcagtgttttaaggatagaatacattaaggggtgaaacggtaactttatccctactcggtataaatcatctatagatgatctttgattattgagattagaatgatggttaaatttttatagcatatctataccgttgatcatatagaacgttctacataattaagagtgcaatttcaaatctactgcggtgtaaggagaaattaataagttag

SEQ ID NO: 364096 - DNA, 897 bp, Cannabis indica
agacaaaggaggtggttagaactagtgaaagactatgattgtgacatcctgtatcatcctggaaaggcaaatgttttggcagatgccttgagtcggaaaggacctgatcagacttttaatatggtaatgatttctcctcagttagcctcagatatgtttagggcaaatattgagtttgtgattgggaaattgcataatctgacacttcagtcagacttgttggaaaaaatcaaagtggcccaactagaagatcctgaattacttaagattcgggaagatgtcttagcaggtaaagctaaggacttttcgatctctgatagtggaatgaagctgtttaaagtacgagtgtgtgtccctgataacactgaacttaagaaagaaattatggatgaagctcacaatagcccttactcattgcatccaggaaccaccaagatgtatcaagatttgaagccatatttctggtggtatgggatgaaaagggatgtggtagattatattaataagtgcttaacctgccagcaaattaaagcagaacatcaacaacctgctgggttacttcaaccattatcacttccagaatggaagtgggaagacattgcgatggattttgtggttggtttgcccataaccacaggaatgtacgactcagtttgggtcgtggtggatcgctttacaaagtcagcacatttcttgcctgtcaaggtaacttatacagtggatcattatgttgacttgtatgtgaaagagattgttcgtcttcatggggtacctaagtctattgtttcagacagagaccctaaatttacctcaaagttttgggtgagtttgcagaaggccatgggaactagtctaaaattcagtacgacctttcatcctcaaacacatgggcaatct

SEQ ID NO: 364097 - DNA, 1430 bp, Cannabis indica
ctagattttctcaattttttcagaaccaaaatgtctgcttccgtgtctggttctaagtcttctaagaagggagaggttcaactggccaccctggaggaggtcatgcagggtcccgtggcccaggagaactttaagtcccgtgctaacggatgggaggcggacgagctccactccacacagacttgtgcccaccagcttgaaaagattgtggtggtggcaggcatcaaaccatcagcctccgggaccttccaccggctgcctcgagacgaggagccacccaaccacaattatgggggcttcggagcttagagccagacccatttgatgtccggggctatgctccctcttcaggactattttgtaaattttctttttttgttggccttgcgccgtaccaattaattcctcaagcataccgcctgctttcaggcttgttcattttgtatgctgcccggagctggggttcgcccagtccggctgaaattttgtacttttacgaacttgtttctgtccccaagaatggtgacaaatttaaagacggattttatggccttcgggcccaccctttgaacgagggcccaatccctttcaaccatcaaaagcacgtgaaggagtaccatcaccgcttcttcttttactccggtttctaggccatggaccacctggagcttcttacagagtggatcaggatccccccttacatgcggaccacacctactcgagtattcctccagcgggccaagactttctccacttatgacaagaaggccctcgacgttggggacttggtcacgacggagaactgtcagaaggcaaagctgatattcgagaatcagtcggtggatgacttcaatctttccaaggtcatctgcccgaatgtgaggactccggctgcagaaagggcgctccgggtggacataatcgcctcggcagacgaccagtaccagaagtccctctttaagagggaacaggagctggcctacatcaaggcccatgctgcaaccgggaggacccttcgtctggaagctcctccggagcggaggccctccaggcccaagcctgtggtccctgttcccaacactggtgctcccgacgccagtacttcaggttctagtaagtctcctttaataattcattatgttcctcctgtccaagagtatacccaacgtagacctatagggttcgatgagtgcctctgtaggtttagaatgccttccacccggtgggggagtcgcgccaaggaatattatttttcccacttgggtcatttcttgggtctgtctcggatgggctctggacctccggcgcctattaccttggaccattcagcccatttatcctccagctggtttctcccctcagccagctttcttaggggtgataaagccagcattgtagtccaagactttgctagggctgagttagagagt

SEQ ID NO: 364098 - DNA, 600 bp, Cannabis indica
gtaccttcataatcagctccaaacacctttcaatggggtccacagctccatcgtgtcagctttctcagatagaagctgacatactaatgatgttgactgctgaggttcaccttgtcaccaagaactgcgattttcagatggagcattttttcttcaagcgcaggagcgacgaggcttctattatcaacctcgaaaagacatggcaaaagcttcatctcgataacaagattattgtttctatgttcccagcgagatgtctcagaatgatttgatttacaatgtatttagtacacgtttacattgactcggtaaaagcagatctatcacagctaggggtacacatgggctgggctgggttggctgggttagaggtattttaataggccaacacaatgattgtagtttggataaactataaaccattcaaattttttttattgtacaacccaaccctacttagtacaataatataggggttgggttgggttgggttcattgggttaagatgaatattttaaactttaatatttatgttacaaagaggataaaattattcaacctagtgcatacacaaaaaaacgatacatatatatgtgtgtg

SEQ ID NO: 364099 - DNA, 831 bp, Cannabis indica
cttaaaaaaggccttatgtccggatagatatatatataaaaaaaaaaaaagataaaaagagaagtatttaaacagctagagtcccaggctctttgtacgggtcttctggggtggtaggagctagaggatttgttgtctgagcggggggcgcgccaatgttatggacagaaatagaaaaggtcacctcgggttcaccataagccacttgagaagcgcagtactcgagaaacatgtctttagaatcacccaagtaatcaaaatttgcctcgagattagctttccagaagtcataaaaaatcttgagacccgctgtctctaaggcatgtactttctcttcaagcctcgtaacctccgctctttgctgctcagcttttgctctctgctgttcagcctccgatttgtacttcttaatctcagctgtaagctcctcctccttagacttcttctctgcttccaactgacggaagacagtctgaagaactcccctttcctcttaaagactgttcacttctactgacaaggtggcgatggtagcttcaagttggtcaggagcctcgaggtccttagtcaactcggctaccttcctctcggcagtaaaaagtttcttgttgactttacctagttccattcggatagctctgagttccaccctggcgtcatcagcatccttcctggctaagtccactttcgccctcatggtgttggacatggcagtgttcttggaggcaacaggcttagctcgagaataggtgtaagccatcttcagaccagtctgtatagagaaaaacattagagtctgagccacgtaaaagaagattaaaggaaactgtc

SEQ ID NO: 364100 - DNA, 621 bp, Cannabis indica
acaaggtttcacaatggctgcatttgaggaagaagtcacaaagttgagattgcatttgagcgaggaaatgagctgcttcagaaattttgtttatagagagatcaagaaagaattcggcaacacttttcaacaaatatttcaagcccagcttcaaaaatccttccaaacacaggttcaatagccaaaacccatggagattcatccaagaaatctgaagaaacatccaaaaatcccgaagaaacattcaagaaccagcactttttatcaaaaggaaagccttcttttttttgaaaagagaaaagacccacttatctagagtccttcccattatttattagtaaacctcacttatggcggaggaaaaccatggttacaattagcctcgaacaaaagtccttagacaagatcatactaggaagcttataagaatgttttccattctctacataagtctaaaaaggacaaatcctcaaagttatttggtatctaaagacccaagtagctgtccagaatttgactgtctcccacacataccacttctgatttggcaacccccgttcaaaaattctggcatttctttcaagccacacggcccagattgttgctaataatcacagtttt

SEQ ID NO: 364101 - DNA, 1554 bp, Cannabis indica
ctaaggaatgatctgaacaaaagaaggagagtagacgagcagaatattgcaacgatcgtgcagcctggagcccgtacttaaattcccgctcagaaagatgctgaccagaatgccgagcaggtcaccccagccgtacaggctcagttagacaaactgaaaaatatgtttcacggcatgggtggacaaaggaataatgatattgagttggaccgagcacgcgaaactcttttctcaccagagatcaatctcctgccactgccccacaagttcaaaatgccgacgtgggagatgtacactgggagagaagaccctttttcccatctcaagtatttcgaaatgcaaatcgatttgcaaggagtacggggagatgtatgttgcagaatcttcccagccactctgtcagaagcccctcagcaatggtatttcaagttggcgcctggaaagtttaattcatggaaaaccttctcttcagaattccatgcacaattctcctcctcactccaacttccattgcatttgggagacttggtggaagtaaagcaatgaccaggcgagccactccgggcgtacatcagcagattcatgacggaagtaaccaaagttttgtgggtaaccgaagatggaaagttatctgcaatactggggggcatcgaagtccttggtgaactttggaaggatataaggaagaataggacggtagactcaatgagtgatttccttgaccgagccgaaggcttcatcaagctcgaagaagcccattcaacgagcggaaggtgaacaaaagctgggcaagtcaaaggctccttccactggaacattcactcaacttcccaactactcaaacaattcaagctcaagtggcaaccgttccaggagcaaccacaagcaagggaacgggaagaaaggaaggttcaccggcaaattcgaacagactctccaggagaatcatgccaagtacactgcattcactattctgaccgaagatatagaaagtgtatacatggcaattcagtcgctgatcccgtacaagttattgttggagggctgcacatcgctggagattcaggcaaagctcgggagaggtatgcccgaatagcacagcacgtacaagaagttatcctagccgtggaagaaagaaagcccaaagtttcacgagcaggagatccaaccatatcattcaacgatgaagacgctgtcaagattaaatttccacacaacgacccgctggtcgtggaggtccagatagccaataaaatggtggccagaactatgatcgaaaatggagcctcttccaacattttgttcaaagctgcttacgaaaaactgggactatgaccaggacgttggaaatattttaccaggatcttagatctactaacaagtatgttgtttaaacaccctaaatatgaacttctaaaacgatatgaaataaacacataaaaaagtatgagaaaccttacagtgttgcaacggatataatgtctcttccgctcaaatctctaaccctgtatcctttctttcgcagagtatcaccagatctgagcccgaatgtcc

SEQ ID NO: 364102 - DNA, 498 bp, Cannabis indica
tggaacaacaatttattttttatttcaaacaaaatgtgtgcatataaaataacaaactaattagtctattttttttataggttgagacatcaaatctaattatatacaaagtatatcactgtaacatatcttgtatagtaaacttggataacaatatatgcatttgtcaaaaatttgaatatgataaaaaattttgctcacatgaaatgccttgctcataagtttatttggcatatatctcaaataaacatattagtttattttggcatattgaaataaaatttcagtctttaacagccttttcgtatagcctatcatcgtatatactaataattctattagtttattttagcatattgaaacaaaattttatttttctttttgtatattggaacaacaattcattttatttcatattgcctaccattatatatgttaataaatttactaatttctgtttattggaataatattttatttttttcaatacagagtaaa

SEQ ID NO: 364103 - DNA, 389 bp, Cannabis indica
ggtaaaataattccaacagtctagtgaaccacatatttttaaataattagggagtatccacaacattcttaattatataaaattatatatattatgttgatcaagatcacataatggacatgaattataattaattatgtggatataataatcttacttctcaaggattttattatgtttatataattaattaggataatatgttaaattaaattctcttaatttatcccacatgaaattatgtagattgaatttaatagttttatcataaagtataaaattctaaaacatttataaaataatatttcacacttttcattgagatagaaatattaaattttaagttttttataaattgtgtaaatctatcataatctacatctaaatct

SEQ ID NO: 364104 - DNA, 508 bp, Cannabis indica
gtatatttattaattgggaaactttgattagtttcattaataaataaaacaaatgaagatatattatttaataattaattatagttattaaataattagatttgacatttatgtggttgaatgagaaaattggcaattttgcagaatgggaaactaggaatgataaaataggaaagttgcaaaagtcagaggcttgtttccatttttctatggccggccactttgcttcccttttatcattttatttttcatttttaaataccaagtaattcaaccttaaccctatgtggtattctataaatataaggtaacggctttaggtttcatagagaattgtatctcattcttctcagagtgaattcctgagccaccactttcctctctcttttcttctctaaattttcaaaatcccttgagtgaatgagtagtgcccacacacatcaagtggtacctcaatcaaagtatgtaagactatggaaaatcatccatcaaagaaggagagaaagag

SEQ ID NO: 364105 - DNA, 767 bp, Cannabis indica
cattagggttccaaaccctctttctagaatatcacaaggcctacccaaaagattaattattctcgtagccacatatgagcatgtagctcctgaatcaaacaatacagtatacaaggagttgtggacgagaagctgacctgtcacaacagaaggactggctacaacatcagcttgggtgatagcgaacactcgagcaggaaccggtttaacctcagctttcgactcttctttctttgcctgagggcaatctttcttgaaatgccccaccatgccacacagaaagcatgtcttccggttgcactctcccggatgatgtttcttgcaacgtgggcactcaggataagagtaaccctggcgtccacctttgcctcggttcccacggaactgcttgctttaccctgaaccaccagatgtcgaggtaaccttccttttctgatcagtggtggagtcacaaccatgcctaccataaacaggagtaggaaaagtgggggttccatcaacactcggagtcactcagggctcctgaaggaatttcacagcacccttggctctcaaagctttttcaaccatttcagcatatgtggttacttcattggtggtgatcactagatcatgcatgatcttttcacattcaaaccagccaaatacttctctttcttgctaaagtcgattggcccgattcccacagcgagcttggccagacagtcaaacttggtagcatactcagtaaccgacatcccttcggtttgtaccaactcagtgaactc

SEQ ID NO: 364106 - DNA, 851 bp, Cannabis indica
tgcataaatagactccctcttattatatgtcccaagcttgatgtaatccacattctcaaatgaatcttgctgaaacttcaagtattcaaactctcttcaatctacataaacaatgcttgcttcctctcaaggtaagacttgaaacactttctctcgaaagcttgaaaaaccttctcccaaaggtttatactttttttttgtcttcttggttgacttgattacagagtaaaagcaataacaaagatataaacactgaggtagagttaaactcgctctcctctacaaagcaaatacattattttttcacaaaataagaataaaattcaaagagatgggaaatctggctgctaatataagtatttatagatgatatactcgtattattggacaactcatacacgaattagacacgtccacaactcataagaaacttttctaaaaaaaattcttcaaccagcccataaatttcttgttctgtacttacaaaattttgagcaataagtgcgagttccattttttaaaaaatgaaacttccaaattaattttctccaattaatacccgatcaaatctttagcaaatggtcaatatacgatcaacacacatttagatacaaagatataatttttttttctttttattttaccgagatttttaaaatttaatataaaatatgtgaaagttaaagaaatagataaataacaaagaaataagatcatactttttacatgattggcgcattaataagcattagtttacgagtcaatattattaggttaagactagaaaagctttaaattttatacaaatatttgaaccctcaaatttaactgagcaattaaaaaaatacgat

SEQ ID NO: 364107 - DNA, 1014 bp, Cannabis indica
ttcataatcattttgggtagcgtgcctaattatttagggcgttacattactcttttcattttgaaggagattcttgcataatctatgataagcaagataaatcatttcaaattgcaaaggaaaaaaatgagagataacagatgctttctcatacaattgagatatgtaagcaatgtgaaaatgcaagcgcaaatagatgagtcgtggcttttgcatagaaggtttggtcacttcaacttccacgggctaataaagatcctcaaacagaagaatattatgcgagacctcccaacaatcaaggagattaacacagtctgcgaaggatgcatgatcaggaaacaacattgtcaatcttttccgtcaggcaaagcttggagagccaaaaagccactagagctgttccatatagatatatgcagggcaatgcccactccatcaaatgatcaaaataggtacttcattctcttcatcgatgactttactagaatgacctggatttattttattcaacaaaagtcccaagtttttgatattttcaaaagatttaaaacctgtgttgaaaaataaagtggacactatatcaagacaattagaagtgatagaggtaaagaatacacttgtaatgaattcaacaagttctctgaagatgaaggggtggagcaccaactcactgtttgataggcaccagaacaaaatggcgtatctaaaaggaaaaataggactgttatggaggcaacaagagccatgctactaaaaaaaggtctcccaaaacaattttgggcagaggcagtaagagctacagtctacttgctctacagatgtctaactaggaatgtcaatctgggccattttcgcgggccgggccgggcccccggcccgacgggccgactgtggcccgaattattcgggctcttatcgggcttctggcccggcccggtacaaattatttcgggcccagcccggcccggcccgatttcaaatattaaaaaaaaaaacctaaatccctaaaaaaaa

SEQ ID NO: 364108 - DNA, 577 bp, Cannabis indica
tgtacatattagccgcagtaccacggcccggtggacaggataacccactttgattgtattttgaagtataatcgtactttgtaaagcacttttgaaattgaacatatatattttgtattaaggggtccttgtaaatattagtacttatcttttataaaaaaaaaattattatgcatttattttaattacaaaattttaaattacccacacttttggtataattatataaatgagtaaaagagaattttataaaagtgcacatatgtggcgtccctgttggacagggcgttacaacatggtatcaaagtgaccaaggtttaaagatcctgaagactgatttgatatgtacattggctgcgaagactcgttcaactcatggttcagtaagttttaattattagattatctgttaattacttgattgtacgtctatttggaatatgctagttgttagaaaagtgtgaaaagtttgagatgtttagaaatacttattggtattgtcatttcttagaatgtgaccataggtgtataaattatgcacccgaggtaatctcgtagaggtaaccgcgagcttgct

SEQ ID NO: 364109 - DNA, 950 bp, Cannabis indica
aatatgaactcttaggctaccaaaagaagtgtctggaaaaaactaaaaattaaagagagcaaggaagagacggagatcgacttcgaagtgttcttcattctagttcttttcttctccttctactcttactatttattatgatttttattataatgtctagttctgagtagttttcttttagttaagggttattttaaaacccgagacatgaattcttaatttcattattgaatgttaatttttagtttccattatatatcaaattgcttctattcttctatgttcaatgccatgattattgttataatcttgtttagatggcaattaaattaggttttactttaatctaccgtcatcttaggattactattcacctaatagtctaggattctaagtgtttgtgacaaattacaatttttatttgtgatgaagaatagaacctaggttaaatgaattatatgtttcattgatttgttgcctagattagtctatctccataaatctcaatgctttatctaagttaaaaaaattgcatgcttcatggatttactgctttaggtaaaagagttaattattgagcgcttcgccttgattacatacaatagggagattgggataattgactacttcagcgttatctgcgggattaatagtttgattagaaactgaaaaaattacattctttaaaaaagttaggaatgattgttgagggtgaagaataacctttaattagtctctcataccgtagtctcacttttaatttgttcttttctttaatttctattattgcaatttttattctaatcttcaaaacccccttttcctaatccttgttactaatttatgaataatttaataaacatagtcctcgtgggatcgacccttacttacgattatactaaaataattggaagtattggaattaaaaatagtaaatttgttgtggctta

SEQ ID NO: 364110 - DNA, 1026 bp, Cannabis indica
aggtcccggtccgtgttcggtactggtccttgtcttgggtcttggcttggtctaggtttgggtcacaattcggttctcaggtataaggtctaagtatcgggtcccagctcccgggtcccgggtcccggtcccggtcttggtcccggtcccaaacccaggtcccggtcccggtctcgttcccggtcccaggtctcgatctcggtcccagctcttgagtctcgatcctcttcctagtctaggttctagtcctagtccttgttcaggtctttgtcctagtccgggtctaggtcccataactgatatcggtctaggtccgggtcccgggttcgagtctgtgttctagtacgagtacgagtcttggtttgggtctgagtctgggtcaaagtttcaatccgtgtctgggtccgggtcttggtctgggtttgggtctgggtccgggttctggtataggtttgggttctggacctggtcccgggtaatgggtcctgggttacaggatctgggtcgtaggtcctggcgcaagtctaggcttgggttcgggtgtctttggttcgagtcagtattcggttctgcggctagatctgattttgggcccatgcccaattcctgttccacggtccttattcaagttcttattccgatttcatgtctcggatccgagtttgggtttggttcctagtctagaaatgtttccaggttctggtcttggtacgattcccatatctagacccccactaggggttgggtccaagccccatgtcgtgggtcaagatctggatcccaatattcggtccgattcggatcttgggtccgtgtccgtgtccatgtccgggtccaggtttgggaccgagaccggggttggggcttgggtcactgtcccagtcctgggtctcgattcttgttctaatttttagtttgggaccccaatctaggtctgggtcctgggtccaggtctgagtctccaatccaggtccaggtcctaggtccgggtcttggtccaagcccatgtctgggtttgggttcgtg

SEQ ID NO: 364111 - DNA, 800 bp, Cannabis indica
ctttctctcaaggatttttcgtcattttttcagtgtattctgtccctatttatagttacatagggaggcagttaattacaatcagattaatatcccacaacaatattcccctaaaattatgggatttgatttcattccacgtaaaataaatgcggttattatttgaaaatcacacaactgtgattagtccgcttttactgggtcaatactgatgtggatttagatacactgcaaagtgtatctcgctgggatagcaacaataatcctgacagcgagctggagcttttcccatgtctttctgaggttgataatataaatctcgtcgcttctacaattgaagacataacgctccatctgacaatcgcagttcttagtgacaaggtgaacttcagcagtcaacatcattgggatatcagcttctatctgagagagctgactcgacggagtagtggatctcattgaaagatgtctgaactgattagtgaaggtaccatgaatatgtctccttatagcgagatggatacctcgctattcattgctcagattcattcaacggttatgcttagtttgtatgatatacattatacgctaagtgttttaacagtcaacatgtctcatcttcatcccttcatacgtagcgagattggtgcctcgctttgtattactggtgtcgtcctcatgatcgtgtctttatatacgaaatgatttctcgtcaatatgtgaattaatagtttgtacatccgtgtctcacttaagactttacagtcaacgagttacatatactctatcagctctgcatt

SEQ ID NO: 364112 - DNA, 590 bp, Cannabis indica
agtattggaacccaccagaattttgcagttaaactttgaatagatgcacaagtggatttagggattctaaaacaggacatagcaaaagaaggaattgcttgaataaccgatttgatgagagtttctttgcccgccctggagaaaagcttttcattccaaacattgagcttagaggaaaccttttgaatgaggtagtgaaaaatagaatttttaaccctgccaatgcaatgaggaaccccaaggtatttgctaatgaaaccttcaccattgagcaaaagggatgttctgaattgggattgggaatcaggagaggtatttggtgagaagagaattgaggatttatccctattgacagattggcctgaagcttggaagtaaaggtgcaaaattctgtttatggcttcagaggattgggaagtgacaggaacaaagaccatgctatcatcagcaaaaaggaggtgagaaaaagagggtgcacctcgacaaattttgatgccagagaacaaggcagcatcctcttgaatacggatagctgcagataagccttcagccacaattaagaagagataaggagaaaggggatcgccctg

SEQ ID NO: 364113 - DNA, 567 bp, Cannabis indica
tacatttattagttatactattttgtatttaaaatttggacattttaattttaacttaaaacttagatttcatagttaataagttttagtgtatttagatatttaaaatctacaccatcggatcatttttttttattattttattcaattattttacatttactcaattatatttatcttatattaaagttcttaaaattaatttaaactatagcatttttttagcttgaaatataaataatatattttattttttaaaatttaattatttgaattctaaaaactaacaataacaattataaaaaaaagaacggtttggacgggttaacccgaccaaactgacaaaatcattgggcgggttgaaatttttctaaattttcattgggcgggttacgattaaatatttacaacccgatattaatattgggttaatgaaaatatgatataacccgaccaaaccgaccgacgtacacccctagactactcagtggttgcagttgactattttaccaaatggacggaagccgagcaactagcaaccatcacgtccaaaaaagtgcaagactt

SEQ ID NO: 364114 - DNA, 494 bp, Cannabis indica
aatttacaatataaaaagcagtgtttaaataatctcatacgcatataaaataaaatagtaacgcgtacaacacactatttgaaccatattttcggtatgttaaaatttttcagaatttcaaaattagttcaatttttttttatatatattcgtatacgttatagttatgttatagttttttaagatatcctacaaaattttgagaaattccgaatttacaatataaaaagtactattcaagtagtctatttcacacctgtataaaataaagtagtcacaagtgcaacacactggttgagccctatattcaacgttttgaattttttgaatttctaaaaattttacgggatttcttaaataactataacgtacatgattgtaaaataaaaaattgactaaaatattgttttggataccaaaacaaatagtagtctatcagtgcatcttttttaaaagatgtattgtagaattttcttatatttttttattgtttt

SEQ ID NO: 364115 - DNA, 527 bp, Cannabis indica
gttcttcataatcaacccatagtgatagagtgtcatgcccacacatagcaagtcaagtacttaatcatagtgcggaagacgatggtaaccaaacctgaaggaaggaaagagatccagggtcagattttgataatactctgcgacagaaaggtataagggttagagatctgagtggaaggagttatattattccgctgcaatcaatgtaaggttttctaaactcttatgtgtttaatttcatcatattagaaaattcatatttaggatgttaatgaaacatacttgttagtaaatctaaatactggtaaaataatctcaacatctattgtatcatcatacttgtagagtgaatttacttgtaatttcaaactcattcccatattgtgattgaggtgaggttgtccttggcagtgtaaaactgttgtaagaggttttgaaacatcttggtaaaaatttcccaatagtaagggttagtcaagcccgttaacttggcttgatattgcaactcaaagctaggtccatagctt

SEQ ID NO: 364116 - DNA, 731 bp, Cannabis indica
agcttaattcgctaagtgttggtcgctctgcgcgggttgttaatcgccttgcttcaggcatgcgtatgaggcatcctgttcggactgtattctccgagcagatactcgaagtcgattccacgtgtcatcatcatgtgatgccaggtcagagtgtaaaaattgggatcacacttgttttaataataaattaactataaaacacacacatgcaacaaattggatagctggatataagatttatttaattttaatttaattaaataatccattttcgaaaattaaagaaaatgtattaattttgaaaaaaaaaataaattaaataattaatttcaaaattaaacctataaatttaaaaaattaggttatcaacaaacctaaatatctatttgaaaaagatgctaacaacttttcaaatttaatgttattttgaaaaataaaattgaatatccaataaaataaaatgataaataaatatcatttatctaattttataatttaatttaaataaaataacaacattttaaaagttagtaaaatatcttgttactatataaaatttcttgattaaaatagtaaggtcattttataaaaattaattaaataatttttaaaataaaatatctgatcttaaatttaataataagataaaataatcaaatttaaaaataagataacaaactaaggaaaaagatgatttttacctattttcaaggttcaaatattactaatat

SEQ ID NO: 364117 - DNA, 813 bp, Cannabis indica
caatcttattcaaatttctgagtttttttaggggcctttttgcctatgagcctccctttttcgatcttatctgccactatttataattacaaagctgaccaaaatacatttacggccattatccctaaaattgtgggatttgattacaaatcaagccaaataaatgaggtttttacagagctgtgaatatcccacctttatcgggccgagatgaacacataattaatgatacaaggtaggtcgtatctcatatggatgcctcgccgaggagggtgccaagatcactttgataacgagcagctgcttgtcatgttgacttcttgagactaatattatcttaactctgatagttatactctctggagtcgagaggattatccttgcatgcataccatattttagcgagacaaacgcctcgttgtctattatcttggctcgtcatattatctatactccgtttgtatatcgtataatatacgctaagtatttttagtgctgtcactttctctttcacatagcgaggctgaggcctcgtcatgaacgtgtgtgtccacatggtttctccttaatatataagttagcagttcgcacgtttttgtctggcagaaggctattaagccagccgagttataaacataccctgcaagttacatttccaatgagttgttccatgctaggcacacttgtcttttgcgtgtttgagttcttcccagctcgacatgtgtccccttcttatgtgctcaccgaacttcgggtataacaatgcgcctattaagctatacaggactactaacatgcttcctaaaaggcttt

SEQ ID NO: 364118 - DNA, 585 bp, Cannabis indica
aagcaataaaagcttactgaaccgtgaaacgagctgatcgctggtgatgattgtacatgtcataacgatcttcaaaagataacctggcagctctgataccaaattgtaacaccctaactattttaggcatattagggtgatttttaacttactgtgcagctcgttgctaatcaacgaggttatcaaaaatcgtgattaattaaaattttacttatttaataaaaaaacataaaatagcatacatataaaattacgggatccaatttataaaaacctttacaaaagtttaactatacaaatacaatagtctgtcgcttagcgactatacaacaaaagccctgatgtctcaaagatcgtacactccacacctaactgccctgacatgtacaatctccatctgctcgctctcacgactgctcagccttagctttacccttacctacacatggaaatagcaattgtgagtcaacaaactcagtaagaaaagcataacataaaacataataacatctcgggttataattaggcccccatacacccaacccataaccttaatccccgtcgtcccaccatggtactgagtct

SEQ ID NO: 364119 - DNA, 726 bp, Cannabis indica
agttcaaagatcatttaattgaacttggaattgaatctcaactaactgcccttagcattccacaacaaaatggagttgcagagagtaaaaatcgtacgctttcgaaaatgataaggtccatgcttagctattcaactctacctacatccttttggggatatgctatttagatggtgactaacattttaaatgttattccatcagtctctaagacacctttagaattatggaatggttgtatagccagtttacgccattacagaatttggggtgccctactcatgtcttaagagagaaagatggcaaactagaaaagtaaactaaagtttacatgtttgttgggaattctaatgagactaagggtggactattttatagtcaaaaggatgataaagtatttatttctacaaacgccactttccttgaagatgactatattaagaacttcaagctgcaaagtaaagtatgattggaggaaatgcttttagatataactccaagtaatgttccatcgtcttctactcaaatagaggatgatcccagtccctcagttgaaccaatgcaagttgatacaatcgagaaaattaccactgatgttcctatttagaaggtcacgactcctcgtcgtggtgggagggtttctaaaaaaccagctaagtatggcctggatggtgaaatcaatatgattattggtgacgatattgatgacgatccattaacctataa

SEQ ID NO: 364120 - DNA, 538 bp, Cannabis indica
atatatacatacaaaatatttccaaagatttttcaaacaaaatatcataatatatattatgaatattaaattaaacaacataatagcattaccaatctgataatatatagggcatatatgacatattttaataaaaaaatcatgattatataagtattgagtttgaaaaatataccatgcaattattaatgtacagattatatacgtgatattagtaatattctaatacaaattttattattaatgtacatattatatacatgatattatataccatgcctaatacaaattttattatttattagtaatattctaatattgattatggtttgaaagcttactcattaaatgttgtacaatttagccatacaaataattataaaacggataaaatttaattatggtaatcattctcattaaatccatccaatataattaaattaagaatttgtatgattttatgtaaaaatgttttcaaatgtgtacattgtaacaattaattttttttgcacattttttgtaattatttaagaaaatg

SEQ ID NO: 364121 - DNA, 925 bp, Cannabis indica
gaaatatggtttgctcacacttgaataaatgaaatgtcttttctaaggcattagcatacaatgtaaattagtattgcatgtatagactatgcattagattgaatcgatattcacagtagaaaggatatcataaacttactattatatcttctctaagttaatatcacttagttgatcttatgctaattgatctttgttaggctatttttagcttagattttaggtatcacttaaagttatttttagttgtttgtaatatttttaagacagaattacacttatttttttttttgtattttcaggcttcctatagttttaaaaggtccaaagcttcaaaagtgtggtaaaggatcgaggcgagtgaagttatattgaaaaaatagcattcagtgcattcttcgtcggggcagatttattcgtggtcgcagctaaaatgtggtagaatagaagagtttcgactggcccagtgccatggcgagaccaatcaacgccacgaccaaagctgtcatcgctgcagcgagatcttggcagagagttgcgaaatttaggttcgtgatctcgcctcagcgaggcattttatggccgcggcgagaataacagacgataacagacgatagtgagagcaaagtggcagcccaaattcattccaccatcagtgtctttcatctctttttatttattttatgttaaattctattttagttttattatagatatgaacatgaactaaactaaactcccaattagggatatgatgaatgttagttgaagttttcccaatttagttaatgtgattattagtttactttccttgattgtgtgatttgttcttatttgtgttaattacatgttttagactggttatctttaatatgatttatgattctaatatgaaatctaaaaagtgaatattagaaatgctcta

SEQ ID NO: 364122 - DNA, 649 bp, Cannabis indica
tttgatgctaaaagtgatgttggtgtgttcattggatattccacaaatagtagagcctattgtgtttacaacatgagaactcaaactattttggaatcagctaatgtggttgttgatgattttaaagatttttcagatttatacacaaaaatcgagattgatagttttttcgatactccaccaaaagtagcaaatgtagattctaatgcagcagacttgaattctaaagaagcaaatgtcgaatttgccgccacaactaaagcaggtgaaccagaacaacctatctcgattcatccaaacatcattactgattctatccaaaaggaaccaagcattggagtaaaaccgaatcatccgaaagatctcattcttggtaatcttgaagaaagcttggtaacaagaaaaaagtatgttaatttgatatgttttctatgttttgtctcacaatttgaatcgaaaaatgtgacggaagctatgacttatgaagaatggcttaatgtaatgcaagaagaactcaatcagtttgttcgcaacaaggtttggatttgttgggaataatttaccaagatctagaattactaacaagtatgttgaattaacatcctaaacatgaattctctaaaacaatgaaattaaacacataaggatt

SEQ ID NO: 364123 - DNA, 782 bp, Cannabis indica
taagtcttattaaatggatgcccggcgaaatctaagtagtcagggtaatatggttgagaccgaaggcggcagggaaatcaaattccctagaatccccgtggtcgtggctgtggctatggcagagttcagggtggtcgtcctgtaaatccaccacaagctcctccggattgggagcagaggtttgcggagatgcaagatcgaattcgccaacaagatgaagaaatactgagattaaggcagcagggtcttcctgccgtgcctccacaacaagctcaggtcgttgtagctccactgatgccagtcgaacaacctgttgctggcaaccgtatggagtccttatacgaaaggttccgtaagcaagcacctccaatgtttttgggaggtcctgatgtgatgaaggcttagcaccggctcactgtgattgagcaaattttgaattttatgggtgtggttggtaatgatcgggtgacctgcgctactttttagttccaggatgacacccgagtgtggtgggaattggtgtccctcactcgggatgtcactgttatgacctgggaagaattttgggagttattcagcgctaagtattataatgaagccgtccgcagtgctaagcggaacgagttcactgagttagtgcaaacagaggggatgttagtcactgagtataccacaaagtttgatcgtttggccgaactcgccgtgggtatcgtgccaacaaatttcagtaagaaagaaaagtacctggttggtttgaatgtgaagattagacatgatttggt

SEQ ID NO: 364124 - DNA, 590 bp, Cannabis indica
ttttttaaaaagaaaacaaaaaaggcacataattctaaatattttctattagaagtgggcttttaaatagtctctagtttctagtgaaaattacccaaaatatgggaaaattttaagagtttatttttttatggcataaataaataacactatagggttatgtgttattttatttttttacatttatatgggtttttttttatgccatatttttgtaaaaaagaatagaaatcccatatttgtaaaacaacaataagttttgtcggaaaagttgcaggcaccggaaaattcaccggcactggaaaagtcaccgaaaaaatcacggtcgccggaaaagtcaccagaaaagtcaacgtggccggagagtcaacggaaaagtcaacgttgccgaaaaagtcaacagaaaagtcaacgttgctggaaaagtcaccaaagtaaatgtctcatatataactaaaaatataaccggttatatgaataaaaactaataactcaaactagttataattgaaatataaccggttctgtaacataataaataaatataaataacataaaataactcaagccagttataattaaaatagaac

SEQ ID NO: 364125 - DNA, 730 bp, Cannabis indica
tcccaaaaatattttacaaaatagtacagtcttttcactagccgtcctaagcggcaaaattagagttacaaaagtacatcgctggtagaccccaactcgcttggtctagtgtggcccgaacatgtacaagcaccgccaagctctcgcactcatggctgatcacagacagatttacccgttcctgcatagtagagcacccgtgagccaagctcgacaagacagtaaaaatataaataattgtagttaacatatcacatatacaataatgccatttcacatttgtctatttagcatagacccgcatgttacgctcacacgcctatttatgtctatgtggcatagacctacgtgttacgctcatacgtgtaaatacaataaggccttagaacgattcatttcagttctaattaccgacgccaacccgattatgccttgaacgtataacccttattttcaaaatatatacaacgtggcataacatttacaacttactagggtaataaccataggcccataaactgcttactttagggtaataaccctaatcttgatttctaattactcacaaatatcacattcaatataagcgacaccgcgcataactctatgtgctaactattgtcttacctgatgtctcgcaaacgtggagattccaaatccccaggtgctcctgaccaagtgctggtaatcctagtcataatttctgcgattcacaagtatagggttaatc

SEQ ID NO: 364126 - DNA, 1167 bp, Cannabis indica
ccaataatttaaacaaactaagattttttgaagaaaaaatcggacttatttatatttataaactcatatcttaaaaaagaagaaaaataattaaaaattcagtaaaaatataaaattattttgaaaaaacaaaaagttagaaattaaactaaataaaatattatgtttacttaaacaaatgtagattttggagaaaaaaaatagactcgagcttgttcccataaaattttgtttttacagaacttaggaaccaccttttcatcacttttccatttcaaaaaaaaaatcttgagattctctgcaaaaaactccggccagattatacgaagctttgcatgccaacattgttttatttgtgttcagcaaaccttcatctcatttgtcgcccaacgtcggggtctcgaccggataaggcaactggagagcgagctccagaaggtgattggtcagtgcaagggcatttctagagagtggaacgaggctcagtcagagatctctcacctaaacaaagaggctgaggaggtgaagagggctaacaaagctgaacttgaggcagctcagaaggaggccaaggacaagtccgagctgtgtcaaaaaactccaggaagagcttagtgcagccaccgcaaagcttgagggggccgaggccaacaccaaggagtgatgcaactccattgccaagcgctccatctatcgagcttggatggcgaatccagaaatggatttcagtttcgtaggaaagggcatggaggaagtccttgtctactgcgagcaggccaagaaaggcagaggaggaggccgaggcagcgagagaagaagaagaagaagaaccatccaagtctcctactatgtaggcttggttttttatttttttttattttaggaaaatggccatatggccgagataatggtttgccctttgtggctctttttttgtaaagacaaatttgcatcgttagatggccaaatttgcatcgttacaaatttgcatagttcatcatacacctatacatatgtcccccaagtaattctaaagagcaaaactttgtaattacttggaaaataattcaactttattaataattgaaattcaaaatattacatcagaaagaaaaattacagcattagtttctaggtagtagggtcgcaaatgctccacgttccagt

SEQ ID NO: 364127 - DNA, 564 bp, Cannabis indica
tctttaatcaacggtttctagtgtagctcactgatacctgttgttcggtgcaagtaatatcaattcggattactaatgtagcatgacatctaagtgaaggtattgtatataatagagattatatatgacaatgaccaatatgtaactaagttgtctttatcaaacatgtcatttactaaagagacctaattcttatcataatagtatattggcctaaatcctgagtaatcgtgaactcttgtttatgttagtagtttctttgattcacttattaaagtttctcacaaaagatgattcttaaaaaatttgttttggggatctaataatgtggatagttgggaacatgatctacaattatagaatcctgactttcctaacgaatcaaatgttggtttctgttgaccttaaaatgtgatcaaccgacagtgcagtcgtatagatctgatgcttgccacgtgtttgtacaaataagaataaaaagcaataaacaacaagatttttatagaagttcaacccccttgtgatagcgggtaatgacctactccccttttagttgtatttata

SEQ ID NO: 364128 - DNA, 444 bp, Cannabis indica
gcatgatggccagagggttgaatcattggaacttaatacatcgtaggagtcggaagggcgtgatgccagtgtgaatcagttggaaggttgaatggataatgcacgcatatggaaatcgacagaggtgctatatgagatagttgacttgagagtcacatcctgcgggatgaactttagatggcatgatgtgtatgaagagttgggtgattaggcattcgtgtgtgagcatgttgtcgaggacgagaacagatgaaatgggggagataccttcacggttcactcattagactagggatttattacaagcatcgagatgagtactgtggagattgattgtcgttcaggatgtaaagtcaagaagactcgggacacaggcagtgccagttatctagggtgaaagtttgcaggactcaggtactaagataacaccatggcaatgttggc

SEQ ID NO: 364129 - DNA, 1071 bp, Cannabis indica
ttttttgtatttacattaaattgtttcacatttaatgcttagaagttataattttaaagcgaaggaaaatctatttttttattagaaaataattggtttgatactgattaaattatgagaatcaatatgaacataaatatttttatatatacttcagtgaattctgaacccttaatactatctccaaatattactgaaaatatctgttactttcattttaccgtcatttttaccgtttaaatattttattttattttcttactaaaaacctcactatttttggaactaggttagagttgtaataacttagattaaataagtattttcttcgatctcatgcaattcttatgggttcgacctcgttcttcacaatctcgatactacaataaagattcgtgcgcttgcgagttgataaatgtaaaacgtactacttttggtacacaacaattcgttgattattcctaattctctgaatggttctacatcaaacttttcttgttttctagatttggtactggatgcttcacatcaattattctatttctctttattttgtgtctctcgtgttagaaaggatgctaacaaagccgtgtacagattggctaaacaaactttagtgttggataatgattgtatatgattagagaaaattctttctgttattttctttgttgttgtaaatggctctgttttgatttataataacaagctttgtctcaaaaaaattgaatttaaatatttttaaataattgttttttgaaaaaatttaaaaaaacaaagaaaagataattaattgattgatttaacggaattagttttaacacttaattttaacggaaaaaaataaaatctgttaaactaattaaataaccacatttaatataagatattatatgtatatatataaatatataaagtatatatatgaaacaaacagaaaaaagaatattataagagaattaaagtaccatacataaaatgtattgagacgaaaagagaaatggaatatgattgtatgtccaaaatttggttcaagccttcctctaaagagtgtaacacgagatcaccaca

SEQ ID NO: 364130 - DNA, 679 bp, Cannabis indica
attagtattatattctgaaaatatattttatttatttataattctttgcaaattaacattcttaatgtagcatgtcaaacaaacactccactttatattaaaaaaggctactataaacaaaattataaaatatatgtttatagatatatatatatataatatatatataattttgcgaagtgacatattaaaattttacaaactctatacgtaaaatttgatatgtgtgaatatatatataagctcataattgcctaaaataataaaaaaaaatcaactaaaaaaaaattttaatatttagtcttactattttctttattttatttttttacattggtatatgttaattctaataacttttttaatctcgcgttttcataattttatttatttttattctaataacattttatgtacatttttatgttaataatattaaaatatatttatttatatatatatatattgtaagaaatgtgagatgaaagaaaaaaatgaattatacaaagtcaaaataataaaataaagtgtgttcaataattattgatttctcaatgtatatttatcatgtaaaattattataattataaaggaaattacaattttggccttttcactttaagctgattaacatgattctaggtttctaaaaggtaaacaaaaaaaactgttcaaaaac

SEQ ID NO: 364131 - DNA, 547 bp, Cannabis indica
tttttttatgtgactcctacatgtgccttggcagaaaacattatcctttgattaatcattaatcaattgacagggataactttctgactttaggaaatccttagttttttacatgccttatttcagagtgcttatgagtgtaaaaaataccaagaaagaaaaaacgaatccttatttgaatcagattaccccctacaatactcaactttcccgactttgatgcctatcgtatatcttctttatgtctatatgtcatcgtaccatatgtttggaaaagctgtgctaccatgttttgccacaatgagtgttgcatcatatgagaatagagtgatgagttaacacgaccactaagttttaaagaaaaagatcacggttgttgaagtttcaacatgaaataattagtgaggtggctccctttaggaggagagtagtacccttgaagttttcttcttcaatttaaagttttagaccttgcatttcaagttctcactttggattaaatcaataaatagtataattttatgaaatttagaatgattataaatat

SEQ ID NO: 364132 - DNA, 680 bp, Cannabis indica
actcttggaagctcttcctaccaatgagctttgcatgcctgaaactttttcttcaacatggtctttaaaatcttgttaacaacttccacttgtctatttgcatgtggtctggtcacagctgaaaaactctttataattctgtgcttgacacaaaaattagtgaattgatcactatcaaattatcttccgttgtcggacacaattttgtgtggaagttcgtaacaacatactatgtttttgataacgaagtccaaagccttcttggaggtgactgtgttcataggttctgcctcaacccatttggttaagtaatcaacagagataatggtgaatttgactcctccttttccagtttgaagagagcctactagatcaattcctcaaacatcagaaggccatggactattcatcaaggctatttctgttgatagagctcttggaacctttgaataacgctggcactgttcacatttttaggcgcagtcaatacaatccttcttcataattggccaaaaatatccttgttggatgatctttttggaaaaacttggtctagatatatgatctccccataaaccttcatgtatttcatgaattgcagtgcttattttggtttcagctatacatctcagtgttgatcgaggttttcagcaaccaatataataataatatttaggaaa

SEQ ID NO: 364133 - DNA, 390 bp, Cannabis indica
gctagtcatactctagcccgtaccgatgtgttacagtatcagcctatattcggttcactggtcatactccagctgctagtcatactctagcctaaccgatctaatacggtcacatagaaactgcagaaaccaacaacaagcatcaacaaaggcaacagcaacaaattcttcattttttctttgaaaactatatttttgagtaaaaactttcaagcttgaaacaaagctactatcatgcatcaaactagctataatctactcaaataatcatgctttaaacttcagaaacaacatcaaaaacacagcagcaacaacctcaaaaaccaaacatgcaacactcatttttcataattttcaacaaacttaaagagagagagattaggagctaac

SEQ ID NO: 364134 - DNA, 923 bp, Cannabis indica
caaatgaacaagtaaagcatgcaacgaacataaacaataaagtacgagatgcgagaaacttacataaagctttagaactgggggttgttgttgatcgacggtgaaacgtagactggcaatagcgaaggaaggtcaataagcaacctatggtgtttgaaggttttctggttcgagggtttctttctctctggaaaatttggagaaatttggtgaaagtctgaaagtaaccaaatgaaggaagagtggtggcttttatagggcaaagtgcatgtggaacaggcgcgatcacctaccaatcgtacggttgggaaggcacgcgattcgaattcccaggatccaacggctagattggtttgtcatcaaggcggtggaaacgcttgagtgtccatctgacacccattaatgcgccgtatcaattaatggacgtgaaacgaatcgacacctgcaaaaagtgaatcgctgcagtaatggcaatcattaattacaccttcacgcgcccaaagcacgtgccaggaaaccgaggagccaaccagaggcatctggacaagccttgttcatttcacaattaaacaaggcttgggggtaaatgttgcccctgattttgcccaatatacgtggaccaaccagacaaggacacgtggatacaaaggtcctaacactcaaattaatagctaagtctttataaagaaaggcattatccaggatctgcctcccagagaaagcatacgaagtcctctatgctcccggaggccaaggtggcatcaaagcatctccgggagatgtcaggcttcctctgagcagtcatctcgcatttaatgtcgcatgggaggaggcgtgttggaactgccacacgcaaaaaaagccgaacacacaacccccgatctgcacctaaaaggctatgatcacttaagtctaatgacggc

SEQ ID NO: 364135 - DNA, 537 bp, Cannabis indica
tatttattattttttttcaaaccttttataatcttttttttattaataattttttgttctattagaatcaataacaacttttataaatagttgaagtttttggtgtttagaaaaatatataactgaatgataatatttaaaaatattatttataaattgtaattttttttgtagagacctaaattttaaattagaatagggcctccaacatatttaagacgatcattagtcctatatagtttaatatattggaaagtatcgctagtcaattataaggcgacatgtctagaggtactagacaccattgatgcccaataacaatactctaactataagtataagttgactaagtcaaagcttgccatttgattgaattcatatatttaaagtggaatttgagtattattcgacatattttacaaacttttacaaaaaatatcatttttttaagctaattagtatttttattctctaaactttaaaatgtaccaaatcatgccgctggacttttttggccgttaaaaatttcccttgaac

SEQ ID NO: 364136 - DNA, 932 bp, Cannabis indica
agcaacaggccgccgcttctccatacagagcttccgagaaatccaatcgggacgtgtgtatagaaatcacccttcccaggtggttcctagcaacaacagctgtgcacatactctccatacccacacgaacatcacagtttacctttatccaatccagaggtggaggcgtccaggtatccttcacaggtggcgaaggtctgggcagaagagaaggatgtgcctctgcataagaagaacaaatatagtcaatacaatcatgaatattaggggagcaattgttgtgtaccacatcattgcgcattctccatatatggtccaccacaatcgaggcataaaggaaaacatcctctactcggatacccctctcattaagggaccaaataaacttcacccaatcccagactctaataccagtatcacccacagggaagattccccaaggagacgagcgccataaatgcattgcaacatcgcaagtaagaaataaatgttccattgtttcatcccccacaccacacaacgggcaactggaatcttcaatctggattcttctgttgataactgcacgaaccgggagagcttgtgagaggatacaccaccatagaaccttatgtcgctccaatatgttactattccaaagcttattccaaagagcaggggcgacagtacgctgaggagctctctccatggccagtgccaaataagccgatttgctagagaagttcccattactttccaatgtccacacccatccgtcatttcccatgcccgggggggggggcattttctggatagctgacacagtctcctgatcgaacagacttttcagcttacaagagtcccacccacccgtaggggataggagatcagccacacatttattatccatggcaacacctctgtttggtctcgggacgaaacctttcaagtga

SEQ ID NO: 364137 - DNA, 482 bp, Cannabis indica
agggcataaaacccaacaacctggtattggatgaaggaagacaatggtctattcatggtcaaaagcgcctatgcactccaacaagagatcaaaggcagcaatggtatggcggcaaattctgggttttggaagcaactctggcagttgaaacttcctccgaaagttgttaactttttatggagagtctcaacgaattgcttacccactcggtttcagcttatgactaaacatgtgcctatcaacactcaatgtcccttctgtgatgcagcatcggaaacaccatttcatgtcctggtaagatgtccgtttgctcaagattattggtgtttgtctcgggttcctggtgtggcagctgcagcaatgacatttgcagcttggttcgaggaaggcctgggcagatggactatggccgagaggttggaggcatctatgttgtgttggtcgatttggaagcacaggaatgaactggtttggaacgctaa

SEQ ID NO: 364138 - DNA, 790 bp, Cannabis indica
accctattatgacttgggagacatttgtgattaaaaatccattgttagtttaagcaagtaatggatagttagaataagaaacaaagaagtaaagccaagagaactatggttaaaaccattcatatggagtaactaaaagttttctattacaaggacaagaaagaaaattttgaaaataagtctattcaatggactcaacaaaacttcttgttcctagtattataggtttgacattatataaacttattgcttgtggtacgcctggtgatttacttactctagtgcaagcaacttacttttgtaagatgctggtgcatttttcttcgaatggcaatctatagaagcttctcgacttctagacaaattttatttatctaaggaaaagtttcaactatttcagaaaagataaaggccaaagaaacaattctttaggatcaatagtgagtggtctcagatatgcaaatatgcttttagtatgcatcagactagacacctgctgtttagtgggagtaatgagtaggtatcagattcatcaaggaaagaacattggaagataatcaagtaaagcttaagatcaagaagaggtactatatgttagtcgataagggtggtatttaatactcgtagactacaccaaatcacgtttctagacttgcttgatgctagaaagtctactgatgagatggtgattactctaggggtgtagcagtgattaaaaaatgatctggggtctcttactctaccagtgagactgaatgttaaagttgtaggaaatatacttattcagtct

SEQ ID NO: 364139 - DNA, 526 bp, Cannabis indica
atattcaagaaatagttaaaggtgaatccccaaactgaacaattatcattaattcttaataatgaatgttatttcagatttctaatcgaactactaatcccgcatataacactgaagcaatcaattattccaatcttcttattgcatgtaattaaggagaagcactcaataattaactctttttacctaagcaacaactcttttaaataaagctttaagttcaatagagatagattaatctaagcaataaattaatgaagcgtataattcatttagcctaggttctattttcatcacaattaaaaatacctttgacaacattagaaattgtaatttatcacaaacacttagaatcctaaactattaggtgaatagtaatatcctatgatgataatagattaaagtagaacataaattagtgattatctaaacaagattaaaataataatcatgacattaaaaatataaaaaaatagaagcaattcgatataatggaaactaaaaattaacattcatcataaaaatt

SEQ ID NO: 364140 - DNA, 603 bp, Cannabis indica
cgtggtgtcagcagaggattttcctttgggttgaacacgatcactggttggggttggaatagagaccttagatggaggacgaggagggcctacaggtttcgagggagactggtgactcaacgaagaacgagtgactcgtttggacacaggtggggaaggagatgaaagtgaaggacgaacctttttagagataggaggagccttacctagaaacatacgaagtttctaactgaccggaggtgaggggggagacggggttgactctgaactcgggaaatgtgcagaaccacctacctccgactggtagaggacaatgtcaagatagggattaggcaatgcagacgcgattgtaggaggcactggaggatcatcagtcgactccatggatggaacaaccatagcaacaggggttacgacaatgggtgtgatattctccatgatagagaggaaagaatttggatgaggcagagcttagggtttcagagaggaaagtgaagaagtgagactgatcactttccgtaggccttaagtataggcaccctgacacaactaaccagacaaaaaaaatgatgatgattttttttaaaatttgatttttgccaa

SEQ ID NO: 364141 - DNA, 599 bp, Cannabis indica
tcccatcttgggtcccggtctcatttcgattcggatcctaaatcctggtctgtgttcgtgtccgggtttgggtctaggattgagaccggggtcgggtcttggattacagtcccagttgagtttgggcccccaatctttgtcgggctcgtgggtccaggtcttagtcaccaatctcggttcgggtcttggatttgggactgggtccaagtccgtgtctgagttcgggtttgtgtcccaagtcgttatctgagttttgattcgggttcgtgtcccggtccagatctgggtctgggtcctagtcagattccggttcctggactcaaacctagacttggactcggacccaggtctggggtacgggtctgggtcagggtcttcgtccgagtacgggtctgggtttgagtttgggtataggtcccagatccaaacactaactacgggttaggtccaagcctcgggtccagatttgggtcacggtctctggtccctatctagttccactttacgccaggtctcggtccgggtcctaggtcagggtccgggtctgggtggggtcgtgggtctcaatcctagttgtcatgcccgtgtcccgggtccaa

SEQ ID NO: 364142 - DNA, 596 bp, Cannabis indica
attcatagttgctgctgtgtttttgattgttgtttttcataagtttaatcttgactatttgagtagaatagagctacttgtgatgcatgttgtggtgttgtttaaagttatggaatttttactcaaagctataatttttcaaagtgaaattgtgaaatttgttgctgttgagattgttgatgcttgatgttgttttatgaagtttttatatgcatgtttaggaagatttgagctggtttgaatgcatgatagtgatgtttaatcaagtttgagttttgaactcaaagcttgatgctttaatggtgatttttgattgtatgcatgaagctcggttttgatgctttagaaatgttccttagggtctaaatagcaggtctggaaggtttggtatgatttggggttgtttggaatgagttatgaatttttgaatgtttcctgcgaggaaccggaattccggatgtgcaaccggaattccggatggggttcaggaattcccagaaccggaattccggttgtgcaaccggtctgccggttgggaaattttcaggaaccctagtttttctcgtttttatgtggtttagggtattgccatgctt

SEQ ID NO: 364143 - DNA, 814 bp, Cannabis indica
gatgcactattgatcccgcgcaattttgtgcaatctctaaaagaggcagcattcacctggtatactcagttacccccaggatcgataactacttgggatgacatgcaaaaagctttcctggcacaattcgtgagctcaaagaagaccataagtctccatgacctggtggaaacaaagcaacgaattagtgaaagcgctaatgagttcataaccaggtggagaaacctcaatctccaatgtccagaaaggatatcggaacaagcggcggtttcaatgtgcgccaaaaacctcaaccctgaggtggcaacttttgtgggtacagcagaacccaaaactttcaatgagctcgtctcgaaggcctgcaacgttgaaatacaaatttctcgacaaaggggtggcaaaccctcaccgagattcgaaaataaaaagccattcaagaagggagaatcaatggcaacttttatcaataccggcaacaaagataaagggaaggcacgggagccgcaaaagaaattaactctcaaagaaaggaaagaagttaagtattcattcgacgatgatgatgtcgaccaaattttcgatgagttgttaaaagctaaggcaatacgactccccgagccgaaacgacccaacgaggttggtatgacaaatgatccaaattattgtcggtaccaccaaattgtgagtcacccattgtcggattgctacatcctcaaaaacattatcgaaggcatgatcaagagaaaagagattgagattgactcttctcttgggaaagcgacaacaaatacaacttccttaaccgagaatgacc

SEQ ID NO: 364144 - DNA, 587 bp, Cannabis indica
aagcttatagagcccacgatttctatcccagaagaagacactgctaaggctagtttcccgcacaatgaccccttggtcaacactgcacaaatcgagaacatgactgcagcgagatgtatggtggacgatggagcctcatccaacattcttttcaagttatcatatgaaaatatgggcatccagctcaccaacctgacaccctgtaaacaagtgatgtatggcttctttggccaaggcatcacacctttcgggtatatcagattacctctcacagttggaaaaattacagccaccagaactctgatggcgtagtttgtcgtaattgacgttccatcagccttcaacggcatgataggtcggccaacccttagtgacctgaaggcggtaacatccatcgactacctatgccttacatttccaacaacgcatggggtaggatgtgtgaagggagaccaacagtctgcccgtcactgttacaacttggccctatccaaagccaagaaagagaagatgccagccaagagctctgaagaagagcctaacaaaggcaatgaagtccagatgaaagcggggacacagacatagat

SEQ ID NO: 364145 - DNA, 799 bp, Cannabis indica
acaatgagattttctctccagtggtcaagcaagcttcaatcagagccatgatggcaaggtagctagcatggacctgtagattgaatagatggatgtaaggataagttcttacatggggaattggaagagaaaatctacatgaaacaacttgagggctttgacaatgggaacccatatgaggtatggctacttaagtctttttatggcctcaagcagaaggcagctaggtaatgaagtttgaggtttgacacctatatagagaatattggatatactaaaagtaagtatgactcatgtgtgtatttcaataatcaaacttatttgctactctatgttgatgatatatagatatttagtaaagtaaagtaagagattgaaaagcttaaaaggaaactcaatgatgagtttgagatgaaagatctgggcaaagcaaagataattcttgggatagacatatataaagagatcaaagccaaagcctggcatgataatactttctcaagctacctacctacaaaaagtattaaataagtttagcatggtcaagtgcaaactaatcgcaacaccatttgctcaacacttcaagttgtctgcatcttagttaccaaaaacatatgcaaaaagagccaagataagcaaagttccttatgtaagttgggaggtctcatgtactctataatgtgttctagacctgacttagctcatgatatatatgagtgtgttcatcaagtacattttaaaccctggtcctaaacattaggaagcactaaaatggacaatgaggtacctgaaaggtact

SEQ ID NO: 364146 - DNA, 877 bp, Cannabis indica
ttgaagagtaggttcacggaacttccgttgtcaatcaagactctggccaccactttattagcgatgggggtctctatgaccaacgggtcatgatgagggaagcgcaccgtcttggcgtcttcttccgtgaatgtgatgggttgatccatcagccggggcctttgagctgggagttgagtaacctcccaaacctcattgtgtttcacggcccccgcgtaccgttttagctccttgcgagtagttcctccaatatggggacctccggagatcatggctaccctcccgttgggtctgggcggcagaccggggatgtgctgggcatcgcccgcgggagcagctggagccaatgctcctgctgtaccccccggtgttccctggggcacaccccctgtcgcctggcccggattgaggtgaggcagcctattcttgatccactcatagaggtggcccaatcggatcaggttttcaatctcgtccttgagattcttgcattcgttggtgctatgaccaatgtcgttgtggtactcgcatcttttgctcggatctctccgggagctatctttgtacaacgggtgcggtctccggtagtgcgtattttgcctagtagcaaagtacacacgctcttgggagtccgtcagctccgtgtactgggtgtactggggagtgtacccccttttctggcgcttctcccccgtccgggtgctgcctttggaggatctcttactcctcgagccctgggaagggcctgccaggctagcggtcggagcggagtgcgagggagcttgtccattcatccctgaggggtttccaaaatgggatgatgctggcgccaaagcctggccctgactatacccgggggtggcagagaactgtatgc

SEQ ID NO: 364147 - DNA, 605 bp, Cannabis indica
cttggcaaaactagcctcacaaaacgaacttgatgaattgaatttggtaccggtggaagtgttagacgaactgagtatatgtgaaaaggaagaagttgagatgattgacagctcttctacttggatgacacccatagtcaactatcttcttaatgggcaacttccagtagacaaaaacgaagcacaaaaactcttgtattcagtgcctcactacacgatagtagaaggcaaattatattaaagaggttattcaatgcctctcctacggtgtgttctccccatagaaggaagtgagataatcaaagagatccacgaaggcttttgtggagaccatgcaggttggaaaagcttgttcaagaaaataatttggcaaggatgttactggccaactataaataaagacatacatgaatttgtcaaaaaatgctataagtgtcaaatattttcacatataccttgcgtaccaccaacggaagtaagaatgatgacctcgctttacacatttgcgatatggggaattaatttcattggggcattgcccacagagcaaggaggagcgaagtacgcagtagtggcagtcgacttcttcacaaagtggatagagg

SEQ ID NO: 364148 - DNA, 765 bp, Cannabis indica
ttgaaagtgctttggggtgtgtccgggcacaaggtgactgagagcctcacttttcccatcgggataagggttgttccattaaatcctgtgagttgggaaccacttggtgaaagatctcggtccgttaggcctattacagtgaaggcctccttgaataatagattcacggaactcccgttgtcgatcaagactctggccacgatcttattggcaatgggagtctctatgaccaaagggtcatggtgaggaaaacgcactgttttagcgtcttcttccgtgaatgtaatgggctgatccattagccgaggcctttgagctgggagttgagtaacctcccagacctcatcgtgtttcacggcccctgcgtaccgtttgagctccttgcgggtagttccttcgatgtggggtcctcccgagatcatagccactctcccgttgggtcttggtggcaggccgggaatatgctgggcatctccagggggagcaacttgagctaatgctcccgctacaccccctggcgctccttgaggcaaaatcccgccgctgacccgggttgagatggggcaatcggttcttgatccactcgtagagatgtcccaactggatcaagttttcgatctcgtctttgagatttctgcattcattggtgctgtgcccaatgtcattgtggtactcgtatctcttattgggatccctccgggagctatctttgtacaggggaggcggtctccgatagtgtgtattttgcctagtagcaaaatatac

SEQ ID NO: 364149 - DNA, 569 bp, Cannabis indica
aatctttattattgttgtgtaacaaaactagttccttgatgaagaaaccactttcttggtgaagaaatcagtttcttgacgaaaaaaccactttcttggtgatttttctaatcttttgctaattaggacgacttttttgatgccggaaatacctccggtgatttttccgacaccggcaactactccagcgacttttctggtaccaacatcaaactccagaatagtcgttggaattggcattgtcaccggtaaaattacctacaaaattaccaagacgcgggtttcttagaaagtgattttttcatcaagaaaccagtttcttggtgatttttctagcgacaatgctaattctgaagactttttctgcgccggcagcaactccgtcgacttttctggcaccagcagctacttcgacgacttttttcggtgctggcagcaaactccaatgacttttccggcacgagtgacaactccggcgatcactatagttttattgattatattttttttaaagaaataaatatgaagggaatttttaatatttttttatggtaatttaattaagtttt

SEQ ID NO: 364150 - DNA, 765 bp, Cannabis indica
atttgggtttgcccctatttagatctagacagaaggatgctgatttcaactttattcttgacaatcttacggcaaagcttcagggttggaaggctaaaactttatccaaagcaggccgagctactctgataaagtcagtgggcttgtctatgcctatgtatgcgatgcaaacttcgaaactctctactggaatggtaaacaaaattgatggtatgattagagatttttggtggggttttgagaaaggaaatcacggaatttatcttaaggcttgggacaaactttgtcttcctaaatctctgggtggtcttggcttcaggaaaactaaggagatgaatcaggcatttctggaaaaatggggatggaatatcctgaatggaagccaatctctgtgttgtcgagttcttatagccaaatacctcaaagggaaagacttccttagctgcagatacaaagattcagattcttggttttggaaaagtgtggtgaaggcaacttccatcttgaggaaaggagcttgtaagttggttgctaatggtgagaacacgaagatctggggtgatccctggattccgcataaaaaaggtttccacccgaaacctctcgagggtacttttaccaacctgaactgtgtggctgaccttatgttaaataatgggaagtgggatattcaaaagctgcgaaacatctttgaccgagaaacggtctcagacattcttaaaggaggcaatccctctgggattggtaccgatagatgggtttgga

SEQ ID NO: 364151 - DNA, 537 bp, Cannabis indica
aggcctggagcgtacgatcctcgggacatcagagcttttgctgttagtcgctgggcgacaaatattttgtaaatgaatagcaaacttttgtaaagtattttgtaaacgggagcccgaaatattttgtatgtaatgttataagtttttaattaaataagaaaattttaattaatcatgattttcattaacctcgttgattagcaacgagctgcacagtatgtttaaaatcacgttaacacgcctatactagttagggtgttacagttatcttcttttatacaatttatatttatctatcaatatatataattatatatatgggttcactctgaatggatattacctatgaatgggtagattagaaaattttgagtttttatacttaatttttctatctaattaaaaaaatctctcatttttatatcatataggctgagattgttccatcggtaaaaataaattttgaaaaaaagttttttatcaagaaaaataagaaaagaaaaagttgagtttgagttaaatatttttgtatgaaca

SEQ ID NO: 364152 - DNA, 1278 bp, Cannabis indica
gcttctcgaccgagtgagaccatcacaaatttgggcccatatatttgaattaattagagaaatggtccaccttgagtttaattgaatccacgtatgggtcatcttctagtgcgcttggacgttggagcttggaacttgatgtagttgtgattggaaagagaaaggcatgggaaatggttgaactttagccaatttaattgggctttgctttatgcaaatgagcttgccactaaattttctctttctaaaaaataacataaaaattaaaataaattaaatatttccaactaaaataaatttactataaatctaagaaatatatataatttatattaattatatatggataagtaaaggtttaagatgtacaaatttgaaccttaatcaggagacttggacagatcttcttcttcctcggcctcgtcgccttcttcttccaccttggtgttctcgcaaagagctaaattttccttttccttctccttcaagaagctggtatccatgttagggttacaaagccatgccccgtatacagcgtgaaagccaactttatcgcaccattctacggtctcgatctctttctcagcaagtttttcagcaagcttctccttaaactcatcggcttggactttgagggccttctcaacctcctctttggccttctcagcttccttatttgctttctctacttcctccttcgctttctcaccttcttgcttgaggcgaataatctcctgttgagcgttgtctcgttggtcacacacctccttgcattgggatactaattttttattctcgccttccaaatactcgagtcgctcagagagtagtcgattggaagcaaaagaagcctggagaattacaaacagatgaatataaaagaggtatagaaagataatataattatattaatgaagtcgacataccattaagtgacagtccaaagtccttgaaagcatcttctttgggttcctaagattgagaaaatcccaatctagggaaaggagagtttgaagcttgcgccaagaagcggccccgtatgcctggaaaaattcagagccagcttctccaactacgacccatagggtctcgatggcctggcttgaagaggcactagcgagagtcgcttcgagatgaggggcattgccgttgggaacaactggaggaggatcttgctcttggatctcgttgttcgaaacctcgagatcaattggcttgtatggtaatttcttcttatgagcggtggttttcctttgcttcttgggaggaaccacttcg

SEQ ID NO: 364153 - DNA, 500 bp, Cannabis indica
agtttgtaagtagtataaatttagtatttatttttagcggtaccaagtgtttgtaaaactatagtttttctctaatttcatcagtacatactctcttattaacttatacacacatataaaacctaaattttagattattaagtctaaatagaaatatgtaatgtcagttacttctaaatattcttttaatatatttaaaacggagtctgtactgacgaaactgaaataaaattacagtttacaaacattcagttgagtacttatgccaactaaaaataaacattaaatttatatcgcttataaacttaaaattttagttacttttgccgctaattacctttattattattaatgaaaattttcgtaccacaatttactccatcttttttgtcatatatataggaaaattttactttttgaccctaataaaatccccaatatcaaaatttagaccctccactaatttgtacaaattaattccattaattacatgaacttcc

SEQ ID NO: 364154 - DNA, 590 bp, Cannabis indica
ccctgcatgagtccaagagcagcacggaggttcaggatctcagtgtcatctccaatggttatttgaacattggtagcgggcggaacgactgttctatgaacgccccggtcggctgctgaactggtattcctagtcttttgcacaccaggcgcgatttcatccacaggagtcgtcacaccgtgacccgcagttgatggctgtccgggatttacggctggcagaacccttgtgtttcttgggttctgcagtgcaggatccacaacctgcggatttactggatcaaccacgcccctacgagtctgtaccaccattgtacttgtgattaaatttggaatatagagtgatccttgattctactctcaatgaaagcaccaaaatattgacctcgcttttagccaacgatagtgagtctagtttcataaggggcaagtagtttaatacgattgaaatattttaaagcatataaagacacaagaattttatagaggttcagccccgagcagttcggtaatagcctaatcctcattatttgtattgacttaagaacaaggagaatagttccttttcttagagctcttacaacagtatct

SEQ ID NO: 364155 - DNA, 759 bp, Cannabis indica
agccaaggccaacgactcagtaaagggttgaccgacctccaccatacactttcctagagtatggctgacctacccctacaacattcagagtagcagtctctccaaggaggaccagtcatccaagtccctacaacaatagatgcttctgcgtaagcacagttggaccaaatatgggagatgatcaagggcctatcatgtcttaaaccttcagaccttgaacttgacaggtcaaggggatcaccattctcggcatacatagattccatgcccttacccgagttcaagattctgttatggaagatgtataccgagcgagaagacccattgacacacatcaagtacttcgagatgcagctcgatctttaaaagatcactagtgatgtgcagtgtcatatattccacacaactttgtcagaaacaactcagcaacggtaattcaagcttgccctaggatgattcaattctttgaatgagttttctcaagaattctacacacaattctcctccttaaggcttataccatcacaactaaaagaccttgttaaggtcaaacaaaacaaggagaacctttaaaggattacatccaaatgttcatggctgaggccacaaaggtcaaaggctttacagaagaatgctgatatacaaccatactcaaaggcatccttctgttgggttttatgccctaaataaaactcatttcaatataatcagatttactcattaatatagatcagaaataacatttaatgttgcatggtt

SEQ ID NO: 364156 - DNA, 804 bp, Cannabis indica
ttctggggtctgtgtgttcgacagtagaggttctgggtcggggttaacgccggagagtaagagagagaagtttttttgaaatgtaaaggtattttgggaggaaaaatattaaaagtatatatgtactattttctaatttggtgttatattaaaacaacatattttatatataagcatactaaaccaaatttccctactaattaattcatatattgcatgtataaatatagaaactttagggtaataaccccaactcacatttctaactaagtattcacgtaatatacaagtgcatcttcgcactacactctatgtgcaaggtttgaattcttacttgaattctaaagtatgaggacaatttatagtccacaggtgatctggagcaagtactgatattcttagtcaaaatttttggtttacataatatagggttaatcccaaaattacatttaacaaatattcacatttaggactccaactctagaccaagcaatagagctcaaaacgaacttgctaacggtataaagaacgtccaaaataaagtttggagtcaaaatttataccgagaattaaatgagaaaaattgaattgtcccctcagagttgtaaatagtaattttgtaaagaaaatatgtatttttgtaaatgataaaaaaaattagttataactgtaaattttcataaaagagaaaattattgaaaacttgactctacattgtttagggcttaagtttagaaattattgaaaattggggttagttgaaaaatatcacttttattaatcaattaatcaaatttatcttta

SEQ ID NO: 364157 - DNA, 529 bp, Cannabis indica
gggacgcacatggagaccaagggaggcagaggccgcaatcgtcagaggatgattgtacttggaggtgttcgcatgtgacttttatttgatccgtaggaaagcgtcgaggcagttgagtgggatgtgttggcttgtcaaggcgccagagggcgtaagtcacacaaaggcatcgacagagatgcagagttgtggaatgaatgcatcaaagtagccagcagggctaagaagactgagcgcaagtgttgagatggcgctagagtttgtgtggaagccagagggcttcccagggagacttagttagtcatgtttgcctgcgaaggtcaagaagggtgctagagtttgcatgaaggccagagggctgcatcattgcaacttagtacatcgagggagccagaagggcgtgattcaagtgtgaatcagttggatggttgagcggacactacatgcatatggaaatcgacgggggtgctatatgagatagttgactcgagagtcacatcctgcgggatgcacttttagatggcatggt

SEQ ID NO: 364158 - DNA, 535 bp, Cannabis indica
acatcaaccaagattatgttatatatatgctttttcattacaaaattaaacaaattttaataatcaaattattagtcctccattacttctaatcaggatccttccccataaattaggaccacaatccaagttacaaatttctaatgtgtataaattagtaaatatatggaattttttaattatatatggcttttatgtgtaatttttccaaaaatatatgaattatactttctttaaaaaaaatcaatcataggaattattttaaaaactatattatacacaaaaacaagtaagtactacccaatcatatatagttattagggataagaaatttaaattcaatttatttaaccttccaagaaaaatatatatgtatatttacacatcttattcttaccatgtaagagtctcgtgattcatatagcaaaggctaattagtatttttaccctctaaattttaacatgtaccaaatcatgacccttgaatttttctggccgttaaatttttttcctagatttaaggatttttgtttaa

SEQ ID NO: 364159 - DNA, 528 bp, Cannabis indica
agtgttttagtgtgtctctcatcgagttttgaatattatggtttagggcactgtaaagcgtcgagctgcgtttccactcatgctgaccggcacacttaagcacagaatgaggtaagatagcatggtaatatatatatatatatatatatgaatgtatgcttgttttaactatttacactactagcactaattgtttatgcgatattaagggtgttagtatagtgtaggtttatagagtagttacagtgttaccaatacgagtaccaaggggtacgccgtgcatgtggtacaacaattagcaacttcttcgggtacaataatggctctaccatcacgagtacaggtttgatactttagtgcatatggtacagtggtcgttcttcccttaagaatattcttaatcatttggtgggttcagttatagagctcagagtggcttaagcataaagccaaaatcgcatggtttatatatatgttatgcatatcttactgagtctgttgactcaccagtttgctaccttgtgtagg

SEQ ID NO: 364160 - DNA, 542 bp, Cannabis indica
gtgttgtgattgtatatgatttgggtgatatcatagcggcacaaccattgtgttggtttgggagtacagtcatcgtactggttaagagtggtactcacccaagaaagtattaattggtgctatcatagcggcacaaccattgtgtgagtttagcagtacaggtatcgtactggttaagagtgatatcatggccaataatactttcgggtactattgatgctatcatagcggtgcgaacatagtgtcggtcctacagtgcgatcatagtgatagtagtgggtgatatcatggtcattagtaccaactgttaagaacgttcttaagtcatctagtaagccttgtggataggtgtatgggcgcctagacacaagtcgacaatatatgatttgttgtatgcttttcttactgagtttgttgactcacaaatgctacttttatgtgtaggtaaaggaaaggcaatggctgaacaagagtgagctctaggcttggatgaagattgtacatgtcgagacgacacaacctggagtgttcggtcttgggac

SEQ ID NO: 364161 - DNA, 831 bp, Cannabis indica
tgtgtagtttctcaatacaatatgtcaggttcacctgagaaaaatggcattactgaaaggagaaattgcactctcatggatatgttagaaacatgatgagtagatcaaatcttctagagtttttatgggataaagcacttatgactgcaacttatattttaaatcgtgttccaagtaaatctattcccaaaacccttttgagttgtccagccactacaagaaatatcacttttaccatcacagttcgctactgcgctggtaaaagtaattttgactagcacatttcgcaaactgcgatagcaaagaggtcaaagttttaccaatatacatttgcagtggctaaaatctaacttttaccagcgcatttacgtgctgggaaaagtcatctttgccagcgctttttattttatgctggcaaaagttctaataccaacattgatttgctaacccccttttgccaacacatcacaagtaaattctattttaccagcgcaatactaacttttgccatgacaaaaatgtgctgggcaaaagtgacatttcttttagttagctaaaataaggatttatgattctaatttgagaacgttagatctaagaacagttcactgttatttcattggttatccaatgcacccaaaaggctatcgcttttaatgtcctactcgtgatacacgaattgttgagtctcaaactgctaatttttttttggaatttgatgttgctgaaaatatttcttcgacatctcttgaaacaggggagttatctaaaggaatttttattcctatatctttttcaagagctgataataatagcagtcttattcttact

SEQ ID NO: 364162 - DNA, 836 bp, Cannabis indica
agccgcctgcatttttggagcaggcattgtaagggcaccctgctgtcttaagcgcctgacctcttcctcttattcgttgattttggcttgcaatgctacaaacctattttcccattcctgggtaacttgtggcgggtttacattaccctaaccgcgtgccctgcctgtagggcctctacctcgaccacgaacattcgggggaatctttgctccctgactgccagtagacctgatcgagttaccctggctcctaatgttttgtctggcatccattttattagaacagcctggaaaaccaagagctagtctgatcagatcgcgatcaagaaaaacttacttattatcgcttattttggaaatttaaaacacgcgcctattcagctatcaggctactaacatactttctatcatgcttttcttaaaacatactattaatttaactactaaagcaataaaggcttactaaaccgcgagtagagctgatcgctgatgacgattgtacatgtcgtgacgatcttcaaaagacaacctcgcagctttgattccaaactgtaacaccctactagtttaggtgtgttaatgtaatttttaacttaatcatgcaactcgttgctaatcaacgagtgtattgaaaattgtgagtaattaaaactttatttaactaattataaatgccaaaataacttacttatattaaacagggatcccatttacaaaatatttacaaaatttctacagtgcataatacaaaactttgtcacccagcgactatacaaaatatgcccaactctcccaaagaccgtacgctctagccctaacttccccgacatgtacaa

SEQ ID NO: 364163 - DNA, 740 bp, Cannabis indica
ttaggattaaactcattcaatctatcaaaatcagtagctctatcttttcactcctcggatgaatatgaaaaaagttgttgttaattatatgggtatgcgggattagtcaacagacctgtgaaaacagtattgtaggtctaccgaccaatcccaattccatataacttgagaggctgctcgtggttaggatgaatagcaaaattcttttttgaagaaattaaacaagaaaattaattatacggtagatgcttgttgtttatggtttagtatatagggtttaaggtcaatttacattggtcaatattttgtttttaatatatggactttaatatggaatatggtaaccttttactcttcatcatttttcaggaataaccaaaaccaaagcaatcaaacacatgatttaatacacacatgtatttctatgaaacatattaaagaagagtgatcatttcatgattttgactattttaaagctacaatgaccaaattcattaacttcttatgggccatgttcatctttgccaaccatgaaagagaaaacaaccaaaaccagttagctattctttatcaaactacactatcacatgctttgtaccattttttgttagggaaaatggttaattaaaaaggaaaatttggtggactgtctcatctttgtgtggattgttaaataaaatatgcttatatttgagtagttgattagattaagaatagatgtggttatgacacaaaaacgc

SEQ ID NO: 364164 - DNA, 535 bp, Cannabis indica
taaaatatttccaacatcaacttctatgggaccagagatgtcagagtaaactcgctgcaatacctcctatttcttagcagaggaactcttaaataaaactctatgttgttttccaaataagcaatgctcacatggattagatatactacctttctctaaagagatgaacttcttcttgcgagtagttgcaaacccttttcccttatatgtccaagtcgtttgtgccataaattttggtgaagtgtcatttgctacattgatactattgttgcaagccttcccatatgtaacaccctaactagcctaggcatgttacgtgatttttaaacgtactatgcagctcgttgttaatcaacgaggtttatggaaatcgtgattattaaaattttgctttttaattaaaacttatataatatttcatacaaaatactcgggatcccgattacaaaatactttacaaaagttaactaattctttacaaaatatttatcgcccagtgactaactacaaaagcgctgttgtcccgaggatcgta

SEQ ID NO: 364165 - DNA, 943 bp, Cannabis indica
aaccactacctcccctgctaaagcctgatgcaggaggagtaggagcccccgccaaccactagagtcctagcagactctgtcattcatccaactgcgccctcagctcgcagtgccttttccaccatttcatcataagtggttatgtcatcagtagtaatcatcaaatcatgtcgaatctttgcattcaacccatccaggtacttttcctttttactgaaatcggttggcataattcccgaggcaacctcgccaaccggtcaaactgcgtcgtatactctgtaacactcatattttcattctgagtcaggtgggtgaattcttttctcttggcaaatctgactgcctcattaaaatacttcgcattgaaaagttcctggaacttttcccatgtcatcgtagtaacatcatgtatcatggacaccatgtcacaccatactaacgcatcttcttgaaactgaaaaagtggcacagaccactctatcattcccggtgacgcccatgaaattcaatatctttgtaatcactgttagccactgctcggctttcataacgtccagacctcctaggaaaactggaggtgcctgcttacggaacctttcatgcagaggttccatccgattcactgcaactattggttcggcctggatagcaggggcaggtgccactggaatttctggagcaggcactgcagaagcaccctgctgtctcaatcgctggatttcattatcctgttcctcgattctggcctgcatttctgcaaacttgttttcccaattctaggcttcctgaggaacatgggcagcctgggtagcttgtggcgggttagcatcaccccgaccacgtgccctgcccctgggacctctacctcggccccgaacaattggggaaaattgagctccctgaccttcatttgacccgatcgagttgccctgactcttggtat

SEQ ID NO: 364166 - DNA, 714 bp, Cannabis indica
tttattccctacctcgctagttgaggcagcgagcagctggttcaacaaattcacccatcactcgatcacctcttgagaacagctgtctaaagacttcaagaaaaaattccaggcagcaaaagataggcgacctcaagcgtcttcccttactaacataaagcaacaggcgctgcgagggttagaaacttgaacgacagtatccaacttactgctcttcaagcagggatcacgactgatctctcgacggctagaggcaaactgtgggatgatttctagggccgcccagtaaaaaacagcagcgagttcaatgagagaactctggtgtttgttcgaaaagaggaagcaaggatagagttgaagttattaaagactggctctagaggtaaacccagcactatctcgacaatcaccgactcgataaaggctgacaatccaggaggctctagcacaaagaagaaagatgactctaaggaatcaaccaaagataagaaaaaacaaaagaagcacgacaagtagtgccaatctacactatttatactgagcttaataaaattcaggaaaatatctacctcgcacatgagcacagggtcgcattctgcaaacctgagcccatgagaccttcgagacacaaaagagatgcaacaaaattttgtaaatttcacaaggacatagggcatatgacaaaagaatgtcgtcaattgaaagacgagatag

SEQ ID NO: 364167 - DNA, 649 bp, Cannabis indica
tgtaacattaggtatttttgccaaccaaaaataaacattatgcattgaagtgtataaaatcaaaaacattaggtatttatgccgcaatttaccctattgtttattatttttaatttcaaatctgtacatttgttatatttgatctattagactactagccatcatcaatcgtattcgtatctcaatttttatgattaacagtgtagttagtattagtagttagctagtttctttttctttgtctttttaccttttatttttttaaaaactaaatatacctatttacatatttaatgctgaaactaatggaggaaaaaaaagtatgtaatatgtatatgttgtaattcacccttgtttaatactgtcaatcaatcatattgtaattttttttaattgagattaattgttatttagttaattattatttattgggaaaaaaacaggaaaattctagaaatggaaaaaaattacaaaattactatgggtcggcccattcgacatttatacagcccagaatgaaaaaattacaaaaataccacctagtctataccttaagccgcacagaatgaacggagaagatgaacatacctccatcgatcaaatctgtaacacaaccagaatgaaaccaaaacgagggtaatacaaccat

SEQ ID NO: 364168 - DNA, 977 bp, Cannabis indica
atcatatctccatggctccaggcaaactgatcatggttcgccttccaaaagcttattagctgctatttgagctgctcgtccaggttcttcccaatgtatacacattttgtgggatttcctgggtcgagaataacctcttccaattcttcgattggttttagcaagtttctttcatcttgaactcgaggatcaagatcttcatctttcttcttattttcttccgccaagattgtcattaattgatgaccggcttttctatgctgtaactctatgcgatagcaatcgtgagccagcatctggtcgccacgcactactcccacgccatctggtgtttggaattttgaggataagtgcttgatcgaactgactgtccctagtccgatcagtactggacgacccaacaatatgttgtaagccgaaggcaggtcaacaactaagaaatcttgcataacagtagcagttaaaggttcctcgcctaaggttaatgtgagctcgattatgccaaggctatcaatgctatctctggtgaatccacgaaggtttaccatacaagaccttaacttggcatttttgagccccattttctctagggtatccttataaaggatatttaccgagctcccattgtctattaacaccctcttgatccttttattggtgagctaaatggttatcaccaagtggatcgacgtgaggatatctcacatttttatcatcttcctccgtgaatgtaatgggaagttcctcagttttcaccttcttggaaggttctaaggcaaagaccgactgctcgttctttatttctttcacatatcttttctgggcgttattgctttcccctgcgatatgtggccctcttaaaataaccaggatgtcctctccttccacaggagtaggttgtaacccctggttgtttgggttattgggcaaactgggctggttgtacccctagccctgtcttttcacgtactgcttaa

SEQ ID NO: 364169 - DNA, 618 bp, Cannabis indica
ggtggtgggtttttggggtaggagttcctggtggtggtcaattaagtatggtttccatggccatgcttgcggccgttgaagaagaagaataatgagagagaaagagttgaacataaagagagagaaaataaaataaaaaatgttaaagtttttatttatttttttaatattttctataaaaaaatattaaattttttaaatttttaaattttttaatttttaaataatttatttattttttaatttaaattattttaaataaaaaaatatgatttagactaataatttgtcgacatgtggcattttatttgagtttaacggatctgttaaaaaagggaccaacagacttacagaaaatgcgatcttaagccatctccaaccgaacactaaaacaccaaatttagtgtagtttcacactatatttactccaatggagcactaaaactatactgataaatgggtttgtctacagtgccccaccaaatttagtggggcactttagaccatactattttttttttaaatttcttttaataattaaataattcttttaaaaagaaaaacttattaattatatatatttagtattaaaatattcttattatattaataaaataa

SEQ ID NO: 364170 - DNA, 666 bp, Cannabis indica
ccaggatttccctcattctcacgagggatttccttttccctgatcctaggcgccttctgttctcatttcggtgagaaggctccggttggtcatttggttgttcattcttagggggaccctcagtttcccccagttgttctttctgagcgttctaaggattctcctaagccgtctcctatctcctagttcgtgaaccgcgaggtctacctcgtggtcttctcactccaagattaggttggttttctgcattgttctgttgtgccgccctggccgccgctacttcctgttccaactcagcattttgtcaatttgcctcctctaggtggcgcctgagacgaaaattttccaactagacaattggcacatatcttgtgggaacataggcacgatcattatcatattccataggttgagcaccccaaacattgggttcttcattccatgcttctagattctggccattttcatgctgagtcctccttgaacgtgcagaccgtgtactttggccaccttcaggttgggtcattctagaacgagtggaccgtgtagatcgtgagttgagaggcctacgtgagcccattagctcttttctaggacagtgagtggtctcttcaggatgagtatcaacattttctccattaccagccatggagaaaggtttttctt

SEQ ID NO: 364171 - DNA, 706 bp, Cannabis indica
ttttttaaataaaaatataattaaatattattataatatgtataaagttttaattgtatacatgcactctgtcactcttatcgtaagaatgtacaccttacatcttaataaccacgtgatctaaaatttatagtaaaaaaaactttcctaccagtaggaaacttatgctaaatcgacctaccatagtcttgcccttataagatatgtctatgatagggatcattattttgttcctttcataagggtctttttgtagccatagatcataaatttaacggtgacagataaaaaagtgtataataccatttagtatttgagttgcattaaattattttttctgaataattcaattgatacacattcagcaaataaattccaaaaactcaaataacaaaatttaaataattaaatggagtttgagaagatttcaacttacttatttttatcgttttcacggggtttcaatctattttatttaatttcttaaaatatggtttaaagtaattattgccttagagagagaaagagagagattaagagacaatagaagagagagaaaggaagaatgaaatttgggcgtagccttccattaggagaaacaaataaagtttgatattttatattgatagcaaagttggtaactaaaattattttttgaaaataaatacctatataaaaaaattaaactaattttttaaaaaataat

SEQ ID NO: 364172 - DNA, 802 bp, Cannabis indica
tatgaaatcttagccttgctagaccgaatcctaagggaggctcttgagaggggaaacatgtttgcgtggcgagacttcgccgtactgaaccgaggatcgcgtggagactttgacggactacgcaaaggggccgaggatgatgcaaatgagctgccttgtgcagccttagatcttcaaccactttggtacgaatttcattttgttcatcagttatgatcctcgcagcgatttccaaacgtgcctcaatcgggtgaaactgtgggacaatacagaaacaaaaacaaaaacttagaaaatgtaattaactctaatcaacttgacagtagaacaccgaattaaatttaaattagacaacgttaatctcaatcaaacttgggtagtacattctgaactaactaaacagtggtatacctgatcaactacttcttcctcattagccacagcctccatgtacttcatcacgtatacaccacaatctcggtcattgtcttgttgaggaagcccgcgatctgtactgtcaattccgaaatccacaaaagtcacattctttgacttattctcatcaaacaaaaggtccaacgtcgacagctgcaaacatatacaattagttagattcaatgaagaatgagttcacatcaaacaatgacactttgcaactttaccatttctttcgtagcgtcaacacgatacttctcatccattgcggtgtgtagcgagtccagaaatgagacaaccttggacttcatattaagttcggcaccaaacaaatgtggtgcaccttctagcgtcaacaccggcacaa

SEQ ID NO: 364173 - DNA, 589 bp, Cannabis indica
aaccatgcaacataaaatgttatttctgatctttattaattagtaaatctgattatattgaaaaacccaacagagtctactacccatgagtctactaccctggtgtgcttctgccgagccaatggcagggcgccatgtggtgctgatgtcggcagggaaggaaatttgggccgattgggccttctcttgatgggctgagttttgtgcttcaaaaatgccaatttttatagctttgggccatagttttgctattttttttatttctttcttttcctttccataaatattattttcttcttcaaacacaaacaagattaaatccaaacaaaatattttcaacataaaatatattacaaaaattttaatgaaaatatttatttaaaatctaattaatttgtatttcttttaataaaacaatgcattttcttttaatttaatttttttttccattatgccataaataccattattattttaaaaaaatttaaaattaaatataaataaaatattttcaacttaataatatagtgcattaatttcttgaaaatattataaagacttaattttattttgtatttttacactataa

SEQ ID NO: 364174 - DNA, 630 bp, Cannabis indica
ttaatttcatatagccaggatcaatttcagtgacagatgctatggctgaagaagttaaggctggaaatgttgactcaatttttcatattggagacataagttatgccactggctttctgttgaatgggatttcttccttcatcaaatctttcctgttgcttctcgagtttcgtacatgactgctatcggaaaccatgagaggtacaattagaactcactctgaaattgggtacagatttagtctgcctagccccatacacttcaaattacacattttatagataaagtgaaattttttagaagaaccatgataaagtaactggttacctcaccttaagaagtaactggttaccctaaattgtttttctgtatttttgaagaaaatatgtatgtatagtgagactgttgttgtatggtgatttgcagggactatatggattcagggtcagtatatgttacaccagattcaggtggagaatgtggggttccttatgagacatattttcaaatgccaacacttgccaaggataagccttggtactccattgaacaaggcactgttcatttcactgttatatcaactgagcataattggaaaaaaaattctgaacaggtaattatcaatcttca

SEQ ID NO: 364175 - DNA, 460 bp, Cannabis indica
ccacatattatctgatgatgtggtatttcctctctatgtgtttgcttctctttgtgagcttcgaggctctttactattgcctatagcaccagtattgtcacaaagtaaaacaagtggtttttccattccaggaacaacaccaaatcctgagaagaactttcttagccaaacaagttccttagcagcctcagcggcagttatgtactcagcctccatggtagagtgtgatattacggtttgcttagcgcttctccaaacacctgctccacccaaagagtaaaaaccatcctagatgtagactttctgtcatcaagacaagtgtagaaatatgagtcggtatagcctacgagatttaaagccccacccttgtggactaacacataatgcgtagtacttttcaaatatttcagaatatgtttaactgcagtccaatgttcctctcctgggtttgtctgatacc

SEQ ID NO: 364176 - DNA, 484 bp, Cannabis indica
tccaacttcactagacagccatctcatactcctattatgtttgatgccaccactaccatgaccacaacagctctatatggtaaagaaaaccagtcacctaatcgagtttcaaagaggctctctgaacatatgtcaatgcgtaaggctttaaagcgttgtagagagcacaaactcactttctcaaattcagatttgtctactgatgctgagatgaatcagaatgtttctgatgctgatgcaaatccttctggctcctttgacaactttgcggaggctgcattacagccccgcaaattgccatgaaaattctaagttggaatgcgcgtggtttggggaatcctagcgcattcagacaacttcgtttgcttgtaactgagcaaactcctcatgttttatttattatggaaactaaattagattgtaatgtagttactcgttatcgtcaagctttacgtttttctaatggtctagaagttcctagggt

SEQ ID NO: 364177 - DNA, 752 bp, Cannabis indica
tcacttattcagtcaagaaagcaatcttcttgacatggtgctttctttttgcagtgcaaaagtccttgatggttttggcataagctgacacttattttatcacgtggagcaaaggaagattaatcttcacttgtgtcaagtgctcaaggagttcatcttggttttcaagaattttctcaacaagtctaagagcctggggaaatggtactttgacttgagcattgagtggtgcactgtcaggggcaacttttggatttgaagcagtggttttgatgaatggatcgtccaaagttttatcacttcttgttgtgatgacgttaacccctttaataatgggatccttagaggtggagatttcaaccatatgttgcccttatgcattgaattgaggttaggaaggtagtttgcttttctcagaaatagccaaggatgcggtcaattttgaaaattgactttttatttcttggacatcttcctttaactgacgatttattttggtttgttcctcaatgaatgcatgaatggtattttcaagggagttcccttgctgttgagcattgtattggggcgcaggatatgcctttagaggttgagcttgattctcatttctccattgtcctccagatgtttgagcttggttggaattatctctccaactgaaattcgggtggtttctctaattagggttgtacatatgggagaatggcttattatattgccctaaggcattgcattgctcctcatgaaccccc

SEQ ID NO: 364178 - DNA, 605 bp, Cannabis indica
taatccctttttattttctttaaggtattagcacattcggattgagtgtgaccaaaaccttcacattctctgcatttaataccttttttattgttagatgaaaaaggtttagagggaatattaccagaaatgttaccttttgggttctttgaaaagaactttttatttccaccagatttcatgaatttttggaaattttttgccaatagaaccatttcatcatcattttcatcatcagaaacaatattttcagaagcattaaaggcaatacctttgcttttctcattcgagagattttgcttactctttttcttgatttgttgattcaactcaaaggttcttaaagatcccatgagttcctcaaccttcattttgccaaaatcttttgcctcttccattgcaagcaattttgtatcaaacctgtcaggaagaactcgaacaatttttcgaaccaagacagattcatctagtttttctcccaaggcaaaaaactcattagaaatatcagataatctttcatagaaatcatttaaagtttcagtatctgacattctcaattcatcaaatctagtttgcagcatggtaaatcgtgatctctttacatc

SEQ ID NO: 364179 - DNA, 673 bp, Cannabis indica
attcaattttactgtttcagtaattgtttatgtactaaactatgctccctagactttgatatctaccaaattatgcccctcaaacttagatatgtaataaatcatgtcttttaaattttcatccatattagaaactaaaattagacaaaagtccttaaatctaacaatctcaatagttaagggagaatttttaacggccaaaaaagttcaggggtatgattttagtatatgtcaaagttcgagaaaaaaaattactaattagccttaattaaaaggaatatatattttttctcaatggttttttcaaaatggccactaccccctcgattctatgtgggtccagctttgatcctacttaatagcaaaaataatcaaactcgatctggttcagtatttatctcaatactaaataaattataagaataaataaataaattcaaaaaaaaaaaaaaactacaacatagacacatatagcaagaagttatagtttctattcactaatacttttatttttctaattttttaaattcacaaaaaagcacgtagtttttttattttttgtttttgaaaaataaatttgtgttttgtaactagtattttttgtttttttttattttaaaacaaataaaaatatgtactctctaaatttcatttaaattttttttaaaaaaaa

SEQ ID NO: 364180 - DNA, 670 bp, Cannabis indica
tttgtcatataagataattttaatataatatttcaaataaaaaaaagataaagttatctttaaatttaaaatatgataaatatcaaaatatctaatcttataattaaataatatataaatattaaaaaaattaacaaatttttaaatctgaccataattttaaaaataaaataatctatttttaaatttaaacttcaaaatatcaaaattaataataatctattgaaaaataaatattattaatttaaaaaatgatatttaagttcaaatatatttaaaaataatatttattttaaatttagagtttgaaaattgaaaaaatcgtatttttgggaaaaaatcccatgaaaatcgggtttgggagtgtgttgcccaggaggctgcacgtgcagccccccggaggctgcaaacacccctagacgcgcgcggatgtggaaggcagcagggtgggacgtgcgggaaacttcggcgcctgcagggttagtctgtgcggatctgcagggtgctcctcgggcggacacagcttcagacaaggtgatgtccgaacccacgcgcgcgtgatggtgtcttgtccgagaacctggtgcgtgcgagcaccatgctcgacaccattgaatcccttttttcaaaatttataacttactcaatttttattggaatcgagttccgt

SEQ ID NO: 364181 - DNA, 545 bp, Cannabis indica
aatattaacataagacaatctagagtattctaccaaaccccatggtataaatacactaaaataaaacttaaatattggctctaaaacatacactatgttgtagatctcgttgcaagcttcgaaacggtatatggaacgtccaaaacagacacccgagtcaaaagttatgacaaaaatatgacttttgatctcctaaaaatttctaaattccatatccttatttgttgtataaattgtctatactgacagacaacatattaactcagtatgtccaatcgttattactcagtcaaaatcataagatcccacaatacataattcataattatgtctttccattccttatatgggacctactaagctgacctactgacttaacttaataataagttaagtattcatttatgatacgtattaaattagagcatttcttatttccacccactaacatgaactcatcttgataccttgtaaatctttacttgttagcacattctttccatcttgataatctctggaacgactaccgattatgcatcctaata

SEQ ID NO: 364182 - DNA, 910 bp, Cannabis indica
cttaaaacgaaattaaaccataccttaagctttccatcttcaaaggtttgctatcctgctactaccggatcttagatcactaagttttgaattaacaatcaaagaaaatgaatataagggaagaaagttttgttaaaagagaaagaacgagggtttgttcgttcgttcattcgttctttcactgttatattatatataaaacttaatatatataataatagtataataataataataatattaattaaaattttattattagtagttatcttattatttcttagccactaagaaatttatattttaagagcatttgatcaatttcgagtatctcaaaatacttgtgtatttttaaaattaacttatcctaatatttctatcaatatttctaactaaaaccattgtgacatgtttggcctctaatcgggtctcaagggttgtcgaatttgaaaatatttttatttcacaaataattcatattatatccacatatttcagataaatcttcgtaattaacaaataacgcttatgtatccacttattgagtcttcagggtcaccgaacctaaaaatattttattccacatatagctcatattacattcacacatactatataaatctccgtaattaataaattactattatttactcacttatagcaaaatttaagttttatgttgaaataaattaatagaatcataatcccacttattatctaattaacccataatataaatataaatcctaattatttaccattagacttatcgggatattacaaccatcccctccttatagaaatttcatctcgaaatttatttaaacaattcgtgatattatcaccatatttatgattctaactctcaaattaatgttctatcttgctatatatatattttttttctaca

SEQ ID NO: 364183 - DNA, 532 bp, Cannabis indica
taccgggtgtaggtacaggctcatctgattagacgatgcgatatattggtgccagattgtggcacaagctcacctgattaggtgatgcaattatatgttatatgtgtgtaggtttttcgcacaggctcacctaataagtgatacagttatgcgatatatgggtgccagactgtaacgccctaatgctaaggcaccctatagtgctttttcaattacagtgttgtctttgctaaccaaagaattttcttgaaaaacgtgttaaattaaaacttttatattaattaataaactttataatttacaaattattacaagtaccgggatcccatttaaaagcttttatacaaaaaataccaaaatacattactagtcgcacagcgacagccaaaataatatccccagatgtcccgagaccgaacactccaggtcgcgctgcctttacatgtacaacctcatcccagctaagttcactccttttcagctttctcctttcctttacctacacaaggaagcagaactgtgagttgacaga

SEQ ID NO: 364184 - DNA, 683 bp, Cannabis indica
atctaaactgttcttagtgtcatctgattaatcaattttgcctatgagtatgcttgtatgtcacagttcttcaggaatgggatattctttccttccccatctactacatgctacattgattgatactacacttgaatcttccccagtcaaaaaggctacctcttccagatgcaatgggaagagctctcttacaccttgttctaataagtagcatgctttttctctattagttcttggtactcaaagaggacggctacatctctagaagagagtgaaagccatgtctgggtactaaagcaaaagccagagtgatataaaaaaaaagacttaaataataaaaaaaaaaaaaaaaaaaaaacacaaaaatcgtcatttttctattatcagttgttgcttagttgagagagtggtccaactgattttcactcttcttggaccacatgagatcactgttcacacacgaatggagattcaagctttagtgctctcatgagtatcattgtggctggggaaggggaatgatctgttgctcaagatgtgcattacgtgtgtactcagaaactgtattcattgatcagttgataccatttttttcttaaaatttgagtatctctaagttttttttttattattctctgttttgtctaacggtgggctaaatgcaaatattgttggtatatttg

SEQ ID NO: 364185 - DNA, 828 bp, Cannabis indica
ataagatatataaaaaaaagagataaaaagaagtgtttaaacagttggagtcccagactctttgttcggttgttctgggcaaaatggagccggaggatctgttgtttgaacaggagaagtatcagcagcctgacgagaggttgaagcagcttggccggaggttgaagcagctgcctcgtttctaccataagcctcgtttctacctcgtttctacctcgagaccgactgtctccaaggcattgaccttctccttcaacctgtccacctcggccgaaagctccccctccttggcatccttctcctccttcatccgaagaagaactactcgcagagaagtcctctcatcctgaagattgtttacttcagtagataagatctcgatggcctcctcaaaacggtcaatagccttgagatccttagtcagcatggagatcttcttcttagcagcgaagagcttcttgttggcctcgcccaactccaactgaacagctccgatttctgccctggcttcttcagcttccttcttggccaagtccgcctccgccctcaaggtgtcggacagagccgcgttccagactttgcccgggagtaagtgtaggccaacttcagaccggcctgcataaaggaaaaaatttagcatattaagctaagtgtggaaagttaatgggaagtatcaaaaaagacttaccctggtgaactccttcaagtctccgcccaccaacacatccaaagataagtcgttatcagcaccagccaattgctcactggcctcaagaaccagtcggttcatgtaatgggccagcatcaccttgcccttttttggcctct

SEQ ID NO: 364186 - DNA, 993 bp, Cannabis indica
tttttaaacttttttatatataaattttttatagtaatatgagctgtcacttttaatgtactttaatttttttaatattatttatttatttttaatttttttacttaaccttaataatgataaaagatgaaaatatatataaagttttgatttgattgatattgttgacaaatttttttatttttttacttaaacttaatgataataaaaatgagacccaaaatgtgttctcatttcactttttgatcatatttccttttctttctctctccatgttcatcttcttcttcttcttcttcatgggtttctttcatttttttttttcaaaatccatacacttatttaataacttttaaggaacattgctaaccaattataacgtaacatctataaaaagtgctggataccactacgtgcctaataacaactacttttctaactttatataccttccaacttgttgttggttgaatgtccctccaactttgtttttgattcagattccacttgcactatttaagaactctttgatgtaactaaacctaagtcatcaaaaagacacaaccacattttaattaatctacgacatttgtatcttgttcatagtggttttgacaagatcaatctctgcaaagagttaatatgccaatatccacttgaaagtaagatctgttgggttttatgccctaaataaaactcatttcaatataatcagatttacttattaataaagatcagaaataacattttatgttgcatggttcacatgatttatttcatgattatatgtatataatgtatgaattctttttaagtccagaacatatgagttggttaaagattatagtgttgtcagcacagtggaatataatctttattatatgttcaaaagtttattccctgatttgtcagaacactggatttagactgacatggtataatcagcgataggtattcttacaccttggaaaagtgttatgtcctttccaggac

SEQ ID NO: 364187 - DNA, 735 bp, Cannabis indica
aagttttttttacaacatagcattctcctcctcggtcaaagtttacaattatacacacatgacatatatgctacatcttaaacattttacaatatttatgctacagttttaataataataataataaataataataataataataaataataataataataataatataacaacaactaatataagaattttatctctatttcaacgtaccaaataaataaaaaatataagtaataataaataggtaaataaaagataaattttcatgaatatggtaattgagggtatagtttacttttttatagcataaataaataacactataggattattgggttttttttatttttttacatttatatgggatttttttatgctatatttttgtaaaaaaatagaaatctcatatttataaaacaacaataagttttaccggaaaagttgccggcagcagaaaagtcgtcgaaaaaagtcgatggcaaccggaaaaattaccgccaccggaaaagtcgtcggaaaagtcatcgtcgccagaaaagtcaacgtcgctggaaaagtaaccagaagtaaatgtctcttatataaataaaaactaataactcaaaccggttataattgaaatataaccggttatgtaacataatatataaataaaaataacataaaataaatcaaaccagttataatcaaaatataaccggttccaaaacagaattataatgaataaaaataaat

SEQ ID NO: 364188 - DNA, 939 bp, Cannabis indica
gcctctccgggcatacatcagcagattcatgacggaggcgaccaaggtttcacgagtaactgaagatggaatgttcgtccgcgatacgtggggggcattgaagtccttggtgaactttggaaggacataagaaagaaaagcccggtagactcaatgagcaatttttgttgaccatgctgaaggcttcatcaagcttgaagaagctattcagcgagcagaaggtgagcaaaagcgtggcaagtcaaaagctccttccactggaacgttcggccaattcccccattacccaaataatttaagctcgaatggtaaacgttccaacaacaacaataggcaaggaaatgggaagaagggaacgttcaccggcaatactgagcaagctccctaggagaatcaagcaaagtacactacatttaccatcttgactgaggatatagaaagtgtctacatggccactcaattgatagccccgtataagaagcccgcacccatgaagaaagatgttagcaagagagacatgaccaaattttgtcgttttcacggagactatggccacgacaccaacgaatgcaacaatctgaggatggaaattgaattcctgataaggaaaaataacccacacttacggaagtatgtaaagaccgatcagagtcagaggaacgacattgaccaagacttgctacctccaccggtagacagacatttgcaaattatcattggaggtccacacatagctggagtaacaagcaaagctcgggagaggtatgcccgaacagcttatcacaagcaacaagaagttatcctggccatagaagaaagttagcccaaaatcccacgggcaagagggcctaccatgaccttcaacgacgaagatgttgtcaaaatcaggtttctgcacaatgacccattggtcgtggaggtatagatagcaaacaagat

SEQ ID NO: 364189 - DNA, 1293 bp, Cannabis indica
tctcaaagcaggcaaaagagttatgcagatccgaaacgcagaaatgttgagttttaagtaggggatcatatgttcctacgagtgtctccaatgaaggggatcaagcatttcagaaaaagaggcaagttataaatttacaggacctttcgagattctcgaggaggttggacaagtggtatcgattagctttgccttcatctctttcagcagttcacaatgtattccatgtctttatgttaaggaagtacgttttagaccctgctcatgtactaagttatgaaaatcttgagctgcaaccggacatgtcatatgaggaacaaccagtagtttagatccttaacagaaaggataaagtcctttggaacaagaccatagctttggtcaaagtactctggagaaatggcaaggtggaggaagccacctaggagttagaatccgacatgagaactcaatatctagagttgttcaagttagatttcgagaacgaaatccttttaagggggaataaatgtaaagacctcttcgttttaatttggaaattagcagatacttaggttgaattatgaaacttgttattagacttgaattatttatttacgatgatttatttgaattcagaatgcattttatatgtcatatacggaatttcataattttgcatgttttgtgcccgacaacattggaacgcggtgtttggctattacagtcacatcttagaatttttagtataggagggcaatatagttagacattgggaatgtcgggaatagtcgagattttagaggttacaaatatacccctaagtgatcttttatggttttagtgtgggaggggtaaaatgttcattttgtcaatctttgattcgtcttttagtgaagttggttaactttaataatcacatttttatttatgtttgatgctgatattttattaataaaacaaaatcatttcattaaaatcatttttacaaaaaaaccaaagttgaaaaaagaactgtctctcaaaactctctcttgttcgaaccctctgaaactagctagggttctgatttttgtgcttcaaattgttgtggtttctagcagatttaagaggatataagtcaaggagtctgtaattcaccgagcagttgttccactcaggttggccggcacacctgaattcgaaattgaggtaagggcaaggctaaagctgaggaaccgtgagagcgagcacgtgaagattgtacatgtcggggtggttaggcctggagcgtacgatctttggaacattagggcttttttctgtatagtcgct

SEQ ID NO: 364190 - DNA, 857 bp, Cannabis indica
tttatttagagcatcaaagaaaatacacatacctcccatactatccatgagagccattatcctttaatgtcctcaaagagaatcaccaccaagatccttgaacaaaatctagagagcactttgtggagctaacccctctttctctcattaccatcaacctacacaaccacttcttcacataagacatatatatatgtcatacccttataaccctaaggggatatatactaattgggcttaagtgattcagtaatggtaaactataatttaatcggccaactatagtattaagggtgctttcatgtgcctctaacacaaaattaagttgttaactatcccattatggttattagcaatattaggcacatagttaatgattgtgtattatggaattaaacctatgattgtattagttcattataataattctaacattctcccacttaaacaatacaatcaagccaccataacaatgtctatcctctcatataaggtaatcaaataaaacatacataatatcatatctagaggatacgtatatcatgtatgaattgaccttgtagacgtccaattcaaaacaatcatcaacaatcaatccaaacatgcatgaggcacaataaaattgagattatgtgcattcatctcgttttgtacctgtcacttccttgaacaacaatatatatgtataagcacacatttgtaacaacaataaagaagtgacttcattatcataatgcatgttcttaacaaaacaccagccataagcaatctgtacaaaatactagcatgtccaatacatatatatattaaactcccactgagcttaacaagctataggctctcaacaatcccattcg

SEQ ID NO: 364191 - DNA, 654 bp, Cannabis indica
atggtatatggcttttgttgtctatagtatatcatttatttaagatgatatttaatttctattttattatatataaaaaattttgtatgtatacatattttaatagtagtatatttaattttgttagcttaatatatatatattttgagtattaatttaaaattgttataatttctttgtggtatataattttattactgcgacatattaattttcagtaaaatgatatatcaaatactgttatatatatttaatgatctaatatatttattcattttggttacaatataataatatgcaatactaaaaaaactatataatttaattttattattatatatattttttttaaaaaaatatatgtaataaatgtatttttataatttttattagctaatttattatatttggtcattttcttttaaaaatgagacatttactaacttagtttccaaatttagagtcattttgcatctcagcctttttttttaacatttcaaagttttcttagtatatattgttataaatattaataattatattgatgtccaaatcttaattaccattaattgtaattaatctttatcaccctttgcaataaacattaagaaaattctcatctcttctctattttatttctctaaattataatat

SEQ ID NO: 364192 - DNA, 766 bp, Cannabis indica
tataaagtcatgccgttcggattgaagaacgttggggcaacgtatcagcgactagtaaatgaaatgttcgcaaatcaaatagggcaaaacatggaagtttatgtcaacgatatgttagtgaaatcgataaggagtaatgatcatacctcagacctcgcgaaatgctttaaaatattaaaaaagtataacatgaagctaaacttaaaaaaatgttcctttggagtctcctcgggaaaagttttgggattcatagttaacgcgaggggcattgaggcaaatcttgaaaaaatcaaggcattaatagacatgccatccccgacaaagcccaaggaagtacaagccttgacaggaagaatggcggcacttaacagattcattttgaagtcaactaataagtgtgtaccgttcttcaatatattgcgaggcaacaaaaagtttgagtggacaaaagaatgcgaagaggtttttcagagcataaaaaggcatctcgcaatgcctctagttttggcaaaaccaataactggagagacattatttctttatttagccatctcggaagatgtgattagtgcagctatagtacgagaagagggtaagcaccagcaacctatttactatgtaactaaaaggttactaggggcagaatccagatatccccctctagaaaaactcgcgttatgcctagtccacgtgtctcacaaactacggctgtacttctaggctcaccccataaaagtgttaaccgatcagcccttgagataagttt

SEQ ID NO: 364193 - DNA, 668 bp, Cannabis indica
tgtagatcatctatatagagatcattgatcaaattaggattataacagcagataattaatagcgtgtctatatgattgaacatatagagtgttctatatagctgagagtgcaattctaaattctatgcgtggatttattgaagaattaataagttagtgaatttaagaggtaaattcttgatctgcttattggaagcttgaatatataggcccatggtccccacactagttgagacaatgctacttgtaagactcatttaattggttttgattaatcaattataattctcaaattatactatgtctatttgtgaatttgtcactaagcaagggcgaaactgtaaaaaaagaatttgaaattatttataataaatgacaatattaattaataattatttatagttattaaatagttgaaattgacatataaatggttgaatttgaaaattggcgtttttgagaaaatgggatgaacaaatgataaaatagcaaaattgcaaaagtgggtcccatatccacaagccatgaccggccacttatgcagggattctcatttaatattttcattattttattaccaaataattcaagcctaaccctaggtggtatactataaataggtagtgatggtttcagaaaaataacatgcatcttattccttttagaga

SEQ ID NO: 364194 - DNA, 703 bp, Cannabis indica
ttttttaatatttaaaattattattaccggcggatgggtccgccggtatttatcattataatatatttttttaatatttaaaaatattaataccggcggaccccaccgctattaatccgccggtattaatattattaccggcggattccccctttcgtcggtaataaccatttttatcgaccaattaatgccggcggataattaccggcggattccgccggtattaattattaccggcggtactattacttattaccggcggatgcttccgccggtaataatgatatttgttgtagtgtggtcaaagttacagggttgactttagtgtcttcaaggtactcttggcatgtgggcccttgtgcaagagtagacattatattttcttgcaaaaattagatataacgcatatatatgaatatgtgtattcatctcttttattatatttcaatcaattatatgacatatttgtatattcttcaggatatatataagatgttatcgaagatatataatcttctagataaatgcataatttatatatattttctctatatttcgtaggtacaaattatataaaatatattataaataataacatataatatatatacatgaattcaataataaacacatatgagaataaatatatatatatatacacatataaaatatatatatggatatataaataaaaaaaaaataa

SEQ ID NO: 364195 - DNA, 827 bp, Cannabis indica
tagctcttcttaataaagaacaccttttcaaaaaaaatataatatattttagagtatattaaataaattaatgaaagttacttgattttagagtatctaaaataaattaaataattaaatttctattatgaaatattagtattatgtaatattataatttagagaaagaaaatagagaagagatgagaattttctgagtgttttattccaataggtgatctcctatttatacacatacaagagtcaaatattaagaaactaagagaaagggaaactaagaaaaagggaatgttgattacattaatggtaataaataaaagatttggacatccacataattaatactatttataacactcccccttggatgtccataataactgcctcattaaaaacctcgccgagaaaacccagtgggacaaaactcggtcaaggaaaaaagagtgcagtatgaaattactccccctcattttggcattcgtggagatcctttaatcgacgcattccaatcttgtgaaccatcttctcaaaagttgatgttggtaatgacttcgtgaataagtctgcaagattatcgcttgatcgaatttgttgaacatcgatatcaccattttcttgaagattgtgtgtaaagaagaattttggtgaaatatgtttagttctgtctcctttaatgtaccctcctttaagttgagcgatgcaagcagcattatcttcatagagaattgttggtacttctttattagatgttaatccacatgttcctcgaatatgttgtgtcattgatcttaaccaaacacattctcgacttgcctcgtgaattgcaa

SEQ ID NO: 364196 - DNA, 645 bp, Cannabis indica
atattttagattaattgatatttataaattaataaaaaattaaaaaatgagagaattagggagagaagagataatgctgtttgaaatgattttaaaccgcgcacgtcatcgcctcatacttctcctttagatagatataataacaattatctatatatacattaattctgaatcataaatcacattacttttcttaatatatatatatatatatatatatatgggtacactcttaatgggtattacacatgaatgggtagaaaagtaaaattttgagtttttatgcttaattttctatctaattaaaaagatctctcatttttagtatcatatggactgagattgttccatcggtaaacaaaaaaaataagcaagaaaaaatttagaaaaagaaaaaagtagattaattaagaaagagataaaaggatatatatacatattaagaaaagtaaaatattaataaaattaataaaattgatatttatattaattaaaatatttatattaatatataaatatcactatatgggctgatattttatatatcatatttactttacattacttttctatgcttaattttattttatatcatatgcttaattgtttggaaaatatttttaactaggatcttagatctactca

SEQ ID NO: 364197 - DNA, 494 bp, Cannabis indica
cagagcattggttaaagtaaagggaaccatacctggtgaggtgattaactgtgtagggcctttttggactttttcacttttttcgtttttttagttaatgttagttggtttggctaaaagggagagattatttattattttgtagtgattttgtacacaataattaaatcaaggataatgttgattgaaccgaccattattaattacatttggataacgttttaaattctgtagtagattacattacggggttattagataatgtttggattttggggtaagctaagctaagctaaagccaacctaatttccactcttaaaaaccttgactaatgactcttgccttgggagaatattctatttatattcattcgtattattttggctaattaccttattggtgaatcttttatccctgaaattttggatttggtgatggtaggtatggccttagtaaactttattaatataaacgctttttctaaaaaaaaaaa

SEQ ID NO: 364198 - DNA, 564 bp, Cannabis indica
tccacgaatgtctaaataagggggagtttatttatactgcactctttttttcttggttaggtttttgtcttattatcttttttggcaagatttttaatgaaggagagtgttatgaaatattatatatatatattgggtgtacaaccaaagtcccacattggctagaggatcttgggtatataaggatgaacactatctctattagaatgaggccttttgggaaggtgcccaaaaacaaatacgtgaaggcttaggaccaaagcggacaatatcataccaatagagaaatagatggtgtctgacggtccttacaagtggtatcagagccaaattccaaaaattagccatttgaatgtatccttggatttgcctaacaaaggaagtgaagcttgctgtcagagtcgtcagaggtttagatctggttcgaagggatttcgaatcttgctggtgaaaagattcatctagcgtactcaaagtgtaacgtcctcgcttcaagcctccattgggcccttacacccacggactaaatggctcttatacacgagtacgccactctggctgctt

SEQ ID NO: 364199 - DNA, 954 bp, Cannabis indica
agagagagagagagaattgtgtatatttttggttaaaaataataaatattattaatgttaaaatcaaattctgtttttaatgtattttatggttttttttttaaaaaaaaaaaaaaaacatatttgtagtttggttggttagatgatgccatattttgtaacatttactttttatgtcatatttatcataaaattaataatttttcccatattattgaaaatagcctaaataaaaatattacttcttttattgagtttttataagcccaacgtctacaccttagaaacccaatttattgggtttttataactaattaatagcatacctaaaaccaaaaatctcatatacttctttttgatagtagaaccgacacaacacaacctctttctctgttactcatctcatcaaggcacaacttctctctctcattgtttctcttactcgtcttaaacatactaaaaaacctagatcctaagtcttagagttcgcagagcgggttgtttttgattattttttcaaatcaatctgcatatgtaatttttccaattcgccaaaccgcacatgcaccgcgaaaactgcaaaaccccaccgcaaaaaatgatgcaatgcagtgcggtttctgctgtttctgcagtttggactatcactaaataattaagttatcataaatacaacaaagcttgagcaacacttgtcaaaaatattgtaaggcttgaaaataaatatgaaaaaaagtttcaagtttcaacaatacaataattaatggactttgggctaagtttttacatattggagctaaataaatataaaaattgtatttttctaatatgcggtgtgcggaccgtatattaacaatttaaaactgcaaactgcaagtttagaaaaaattcaagaggctttttcatttttacacttcaaaacagttttttattatatttttacggaattctaca

SEQ ID NO: 364200 - DNA, 709 bp, Cannabis indica
agactccatttgccatggcatatggatatgaagcatgctgcctgtagaactcgagtcaccatcccacagaagattggcgtatagccaagataccaatcacatactcttgaccaaatcacttgatgaaatcgaagagaagcgaactacagcaaacttaaagttggttgcccatcaacaaaaagtagctcggtatttcaacaaacaagtgaaggctcagaaattctttgtgagagatatggtcctaagaagagtatttctaaacaccaaagacagtacggcaggtgtactcggacctaactaggaaggaccatatcaggtggtcgaagttctcgaatcaagagcatacagattagtatgatgaaaaaatgcaactttttctggtatcacggcattggaatggggaacatttaagaaaatactaccaataaagtaccaggtcagacgaccaaattaagtactgaaagaacatttactcttaagtgaatcgcctgctgggcgaaccatgcccaaaggttcggataaaatgaaaaagtactcaggtcggatgaccaccatttaaagtacaatttctaatttttgcaatttgttttatttcatgttaagataaaagatcagactagatcaaatagctctaatgtaagtttctacggtaacaaacacattttcgatcaataaatgaataaagatgtttatttcaaaattcaaattg

SEQ ID NO: 364201 - DNA, 786 bp, Cannabis indica
aaacaacaagaaaactatataaatgtaacatgaaaataaaaataaaaactaacacacatataacaaaaaatcaacaacaaattaacataaatacaacataaaaaagaccatattttctgtaaataaaatcaaaaaattcttaaaaatattcaaaattccgtgaaactatatttttataattttttattatttttgtgtatttgtgaaatttagcctaattattttgtgggccgtaatttctcaaaagtctctcgagtctttaattctagtagaaattaaattacacaatatagtaaaaaaatttaggagtttatttttttatggtataaataaataatattatgggattatgtattttttttttttacatttatataggattttttataccatatttttgtaaaaaaagatagaaatctaatatttgtaaaacaataataaatttcatcggaaaagtcaccggtattgaaaaattcaccgaaaaagttagtgttgtcggaaaagttgtcagaaaagttaccgtcgccaaaaaagttgttagaaaagtcactgttgtcgaaaaaagtcactgaaaaagtcatcggaagtagatgtctcagatataaacaaaaatagaaccagttctataacataatgaataaaaataaataacacaaaataactcaaactggttataattgaaatatatccgattctgtaatataatgaataaagataaataacacaaaataacttaaaccagttataattaaaatagaaccgattttataacaatgttataatgaa

SEQ ID NO: 364202 - DNA, 1108 bp, Cannabis indica
ctattgatgtaggtcttgtatctctgcttccagcaccttcatccttttgctcatcctctctcggggattggcggatagaactttggtccttttttatgttttacatagggcctgcaagaggtactcttcttgtcccatcagtgtgtgacttgtcaccaaagctgaaagggtaaggccttacatttctcttgatttggggaggggggtgccataggcgaggtgcccctagcatgagaccttttgggtgaagtctctccataaggttataaggttattcccacagtgcgaactcctcgtggtggataggctcaagttgtctcacttacccatatgattcttgtcttgcgatgggctcctttcccgctgaacttttagggggctatcagtggatatgcggttgagacaccgttccccctattggtggcttttttattaaaagtgtgaggcttgaatttttcctttgagtatgcaactcaatactttttgcatgccagccactgaagtttctagcctttggttcttccagcggaggtcgtttatctcctcttcatagtagcgagtttgggagcttaagctcatcgagtacattcacatctcctttttgggtccacgtcttgaagtgtgaaggtcttgtgtcacagatggtggatggtgtcacaccagagatggcctccttggcgattgaatacttccgttgacgaggttagacattgatgtcattatcaagtcatattgtgttaggtaggggtgttcattggatcacatccaatggattcgaacccaactgatccaatccaattatttattggatattgaattttgtcatccgatccaatccaatctaattaagtcatctgattcgatcgatccaatctaatatatgtattggaatggatcggttccaatcgttggatgaattgactggttttctattggattggattggatctattggatggatccaatccattttagctaccatttaagtcgatttcattaaaaagaaaaatatatgtatacaaatataatttaaaacctaataattcaacatacatttagtccaacctaattcttatgatctcataataaaattgtcaaaaaaaaaaaa

SEQ ID NO: 364203 - DNA, 763 bp, Cannabis indica
tttatagtgtttatttctctctctctctctctctctgaatattgtgctaatcctcttcttcttctttctctgtgtatgtcttcctttggtttggatctccgagctctaaccctaggactccaagacttaaccactgtaagtctcctcctctccgaaattctgatctgttctcttctgttctgtgttgatttgcatgtatttatagcttgtagattagaagagagagttgggagttagttgcaacagttttaacaaactttgcaactaactgtttgttctgtctgtaggttgttagattcgacctcttagctttttcctgctttgtatttcttgttacatgctgatctggacagtgcatgtgggaatttatttaaacgtcttgtagtgtagtttttgggttgagataattattcttggtttattctaagtttttaattatatgtatgataatttttgcctgattgaatggccaatcaagttatatttaatcttatattccttccttcttttctcgacaagaagtggtggagtttagtcattaaaaataaaacttttatatttatcattttttttaagtaacacaacttaatttttaaatgatttatgaattgcagctcgttttattaactttctcatttcttattactcgttatttcctcaagtattaaaataaacttgaacatatgcacgagcagttatttctctattcgtacttagctttggcgtactattttttgtttttcaaaatcaatttatatgattt

SEQ ID NO: 364204 - DNA, 1009 bp, Cannabis indica
tcttaaataagtataatttacatgaccatgagaaaatttttgactaatatattatttattcgaatactaaaacaaatagagatgtatcccttttaagggggtgcgttatagaatttgtctataatatattagattattgtaatattctaatataatcttaataaatgttcaaaatttagaaaattttactgttaaaatttaaatttggagggttaaatgcaaataaaacaacaactgagagagtttagccaccaaacaatcataaaaaaaaaaaatgtgtatcttactaaaataattgtgtcttttaatctatataatgtattatatcatatagagtaatgttatagtacaatgtatacaattaaaatataatattaaacagtaaactgatatttagttcattgtaatagtaatggtaataaataggttcactacattgtttgtttttctcttttaacttttgtattccattacaatgtaatgcttattactgagtattgtgatgatgattacataccaaaactaatgtataatctccattacaattatattctatattaccttttttttaatattttataattttataattaaaagcaatagaattattttagtcaatatatattttattccattacattctcatatcaaactaacacaataattctgattacattgatcattccaactacaaaccaaacattataaattataatcaattcatattaccattcttattacattacattaccattactattactaaccaaacatcacctaaaatattaaaatatgcaaatcaaaacctaatatttaaatattaaaaattataacaggtaattttttttttttttttgtttaaaggttaaaatcaaatctttattaaccttcgaaatcagtcaccaaaataggtaacaaatcagttggaatattttccatactgaaagtacaatcaggatgtaatagtgacgctctagcaaactcatgagcaacactattagctgaccgc

SEQ ID NO: 364205 - DNA, 824 bp, Cannabis indica
aataggcttccctaagctaagttagggtttatttcatcctttgaaaaattgtagggttataaacctgcagtaagtcactttcgagtatttggttgtgtgtgctacgtattcgtgccaagccacctacgtagcaaatttgacaagaaggcgatacgatgtgtctttgtgggatatgacagccaacggaaagggtggagatgttgcgaccgtacaactggaaagtgttatatatcaaggaatgtggtcttcgatgagggatcatcatggtggtcatcgcaaaaggaagcattaccagattctaaagaaatggaagacgaattgcagaagaaaatgagggagcaaattgttgagttatctccaactcaagatacagatgaagaagaaaacaccgaggacgagacacctcagaatccatggcagataggggtgcatcaaagagaaagacatgatgatagccaaccaaaacttcgaagatcaacaagagcgcgaaagccaaatccaaaatatgctaatgctgctgtagctgagaagaaaagtttagagaactagagtcatataaagaggcataccaaaactccaagtggctaggagctatgaaagaagaaataaatgcgctagaaaagaatcaaacttgggagttggtgccaaagccgaaggaagtgaaacccatttcgtgcaaatgggtctacaaggtaaaaacttgtcctgacggttcaattgagagatacaaggctcggttagttgctcaaggattctctcaacagtacgggctagattatgacgagacatttagcccagtcactaagattacaacagtacgggtt

SEQ ID NO: 364206 - DNA, 582 bp, Cannabis indica
ttatttaattatctacaaataaactgtctagaatacaatttgactaaaaaaaactagaccatggttattagatactttaaagtatttaacattttatcaatgtgttacattataattagtttagttagtagtttcggtattatttattaaattaaattatataagttctaatataaatgtactaataatagtacagacacttctagtagtacttggcaacaaaataataaaaagtaatatattgttatctatattacaatattaagtatacatattttaattaaataataatataaaaaattgctaaccacttacatcatatcacattatatagtattggatacctaaatgttggattttgtgtcctaaataaaatacatttcaatataatcagatttactaattaataaagatcagaatgaacattttatgttgcatggttcacatgatttatttcatgtttatatttaatgtataaattctgttaagtccagaacatatgtatttgttaatgattatggtgttgtcagcacagtggaatataatcttgattatgtgttcgaaagtttaattccctgattt

SEQ ID NO: 364207 - DNA, 702 bp, Cannabis indica
gccttcaatcccggccttcgacctagttttttccgtttcgccatggaacgagagaaaccgtggtcaggaggcgttaattaatttatatgtcgtgaacttaattttttattgttagttggtttttaatttttagtttttagttgtttctttattttgagtcaattttctaaatgcgagtcaatttaaaagtaggtagatagcatagtttgaaaattttatttatttttcaaaaaaatctatgtgcttggtgatattacattcttgactaattttagttttggaatttaaaagagcatggaatcatattagataattttatagcaattgaattagtttatgtatgttgagtgtgatacgtgaaaagttgtttggaaaattttagaacttgcttgcttgctatttgaggtgaaataataaattatgtatgattaggaaagtgatttaggtatttttctcgatcgattgtgccattcaagctatccctgtaattttatcctagttaccctttttgagccttagcatcttctttgtttctacacatattgagcctaaaaaagataaatccatgaatatccaaatatttaaccctaatcataccataagtagatctttagtttggggaatttggatgggaagtttgttgtatgtgtgtggaaaaaagtgtgaaaattgagagaagatgaaaaaaaaattgattggcaa

SEQ ID NO: 364208 - DNA, 1063 bp, Cannabis indica
gatgaagaaagctgatggtgactatttttgaaaaaattaagacaataaaaaattatacgaatactcacttagagtaccgaataatcaaagaatatagtatacagggccgtctcaaggtgatgagaggcctagggcgaaatttgaaacaaggccttttcttttaataaaaattaaaataaattttaaataaatttggacacaatataattttaattcttttatctctatgtaataaataattttttgcattaaaaatgtacgtgaatattttaaaattaaaagtactttaatatatttttttatatagtgtaatacaaatatttaagttataatattattatttatttatttttgaaatgctaagtaaaacttttcacaaataactaaaagtataaaaggtgtattttcaaaaaaagtattaaagatgactagcgtaaggattgaaccttgaacctcaaggctaacacaagctctacttaccatctgtgctggatgcttttcatgtaatttattgagttaaatatttatatattatatgtttttatatgtatatatattaattttgattttttcggggcctccaaaattgtggggcctggggccaaggccccggctgccccaccctctggccggccctgatagtatacatactattaacttagaattttattagcaagatttgataatatttctcttaattttggataatagtttaagtaataaatgatatataattcagtaaggaaaaatagaagaacactaaaatttttacgtggttttgtaattaaaatctacattgtccatgagttcttatgatttctggatttttaaatgtgtctacaatttgatagagtttttgtaagctagaataattgcccttctctttataatgttctcactactatttataggaatagaataacatttatttaatttaatctaaattactattatgaaacttagacatttctcatgtttcatgctcttatgcaatcggtgggaagaaataactgttaggttttatgccctaaataaaactccatttcaatgtaatctattttat

SEQ ID NO: 364209 - DNA, 103 bp, Cannabis indica
gataatttcgaatttaaaataagaatccaacgatgctccgattagcgagagtcaaagttattcttactacttttataaacttcttgtttcatattgtaaatac

SEQ ID NO: 364210 - DNA, 760 bp, Cannabis indica
ctcctcgagttattattgtcttggctgtttccaccccttcccgaacctagccagttaaagattagcctttaagttactcactcctagatgcttcgagacaggaattcaccctattagccagccaaaggtgcaccacttaggtgctggctggccaaaggttggacgattgggggtgttgttgtactgaagacccttgggaggcccccattccaatggctgctagagtctggctattctcgccactagatcttcatgacaaggcttgtccaccttcaggttaggaaaggtttgtcgtagttccagaggaacttggatggaaattttgcttgtagaacctcccagatttgtcgattagtctcccttggagaggatctctgatgagatctattgacctcgcttctagccaacgacattgagtcaaaaataaagcgattaaataagataagtaaaagaaagaaaaaataataaaataaagtgaacactagattttaaatagtctcaaccccgtaagtatggtaatagcctacttcctttgtatctgtattgacttgagagaaggaaacaaagtgttcatcctctcaaaagctcttacaattgatctctgagtaactttctctattagatcactcttttttctatagaatgtatttctgaagaaattctctcgatccctttcatagtgaggttaagccactatttatagggatttcatacatgagggatgatttcccttttgtcctataatgagtaaaataggaaa

SEQ ID NO: 364211 - DNA, 769 bp, Cannabis indica
atgactttgcttctccatctccattgccaaatatgatgatgactctgatttcgctccccacgtggcttaaggtggtcgtcgtctaatgaagaagaagtcgaatatgtctttgcttgaaaaaaattctaactctgacagccagaaggaaagaaaaagtcaactttaacacaacagtgatgaaattgttagtacaaaaaattttacttttagtcacaacaaaaaagttgcgactaattattaattatcattcccattatctgacaaaaaagtccgtaactaaaagtattagtcccaaaaattataatttgttgtgactaaatatggttttagtcacaatacttgttgtgactaaaagtaaattagtgacaacttgtgtctaaatactatgttttagtcacaagtagtttttgttgtgaccaaaagtcacaaatttatgttgtgactaaaaagttgtcactaaaagtagttttttagttgttgaccaaaagtacacaaatttatgttgtgtactaaaaaagttgtactactaaaagtagctatttttgtagtgtgtaatgtaacagttatattgcaagccaacaaatataaaactacaaaacaactataattctacataatttgtacaaacgaatattacaaccatcgtgttttatctattcaggtcgcgtatttgataattttgagtcttgattttataataccatgatattgtagtagcaaaattattattcaactaacgtgcaacataattgcaactagaaatattaaa

SEQ ID NO: 364212 - DNA, 648 bp, Cannabis indica
ccatgaggatccttcgggacttgtctgtcaaaaggcgggcgatccaggaggaggctgcacggagggaggccctggtggaggcgaagcttcaagaggaggccaagcagagggaggccctcgcagaggcgaagcttcgagaggaggctaggcagaaggaggccgaggtggaagcaaggcaccaaaaggcgctgaaggtggagggtgaggccgctgcccgggctagacgcgagcttcgcgaggctagggaggccatggacgaaatggctgccaaggtgaagtccctagaggagttgcaccaggcaaacttgcagtctaaggccaacctggccgtggagttgaaggagctgaaggactttagagaccaggccttgaagaaggctaaaaaagatgagctcctgacccccgtctcctgcaagcactgcattaagcgcttcgacgacggcgtctatatggcctggcagtcaaatggccaaagtattaagcttgacttctatcccaagcctgaggaggctcttgccaaattccaggagaagaagaagaggcttgatgctatgcttgaagctcgtcggggccctcgtcttcctcctcgtattgattaggctacggagtccaacccacttcttggtaatcatatctctttttttttat

SEQ ID NO: 364213 - DNA, 640 bp, Cannabis indica
tgttggtagggtttgtttcgtaccctgagtaccactgagtgatataccacacaccatgtactttcccgtacttatgttggtatcagtgtattgtactctttaaccacatacattataccaatgcactttgtaccctaatcgtataagtgttggtagtgtaacaaaaatatcagcatgcatatacacttaacatatacatacacttgcatattgatatcacacattatatacagttcttacctcctttcaagattcaagtgtgctggccgacctgaacggaaagtcttgtgctggatggatgccctaatcacatattaaaaccgggtaaatcacatgctcgaaaaccctaattcagaaactcaaacctacaactctaggttctattatattcactagggattacactaactcaagaaacaggaaaacacccaactatggcactgaaatggaccagaattgagaaaatggcttattcgggagccctgccaaaaccggctaaccatttttacaggtactggtaaaatcaactaaccgattttataccagtttcccgaaaacttcgaaatcttgctcaaaactccaccaaatgcaaccaaactttccagagtacctaattagggtatacacaatatattccaac

SEQ ID NO: 364214 - DNA, 1119 bp, Cannabis indica
atcggacggggcatcagacccataacccgatgccccgtccgatgggtccgatgggcccatcggacccgaccttaaaaacccaaaaaaaaatggttttgtgtgatacagcgcgggtctcgatcagagtggtccgataacagtgctggtggcggtgggtggtcgtccgtcatcgtgcggtcctatcggtggcggtgggtggtcgtccgtcgtcgtcagaggtgaagccgatggtggtgggtgtgagtgtaccgtgcgagagggagagagagaactaagccttttgattttagtttttaaatgggagggtatttgtgggaaaatagtaatgtggttatatatgaccaattttaataattataaatttaggaaaaaaatttaaaaatattataagcatggaatttcaaatttccccatatataattgtatgaaaataatttttattttttttacttagcacttgatgaacaaaagaatatatatttaataaataaattgacataaaaaaaaatatatattcatcttaaatagtaagggtgtaagttttaaatttttaattattaacataataaaaaaaaaacatgatggaatatttttaaaatatatcaatactattattattattttattcaattgaccacatgacatgtattttaacaaatttcatcttacataattaagtgtaccactaattctcataatttttttgttaaggttcaaatttgatatagttaaaagcaacttaaaaaaacaacataaaccaattaatgaatactcagactaagtaaaattatatagattgtacataatttgtaagttgtaaagtttatacttttaccttgttattgaatggtgtggacagttaagtttcacaatatatataaatatatatatatatatatatatatatacatatatatgggctattatggtaggaattggggtaattttgatttatagcctttgattttaatctagtggttcaaatcaactcttgaaaactaaaccaaaattaatatattttttatttataactaatttttaatattattaatggtaggttcaactaacaaactccaaacctaatatttttatctttttattttatttctatttaaaatt

SEQ ID NO: 364215 - DNA, 555 bp, Cannabis indica
tattggatcagtcggtgtaattggattggatgactttcagcacacccctatatttttatggctgttatttatgttttcggaaggaaaacacgtggcacgaaggtgaaggtaatcatcgtgtcaatttgggactcaagcttccctagtcgcagaaggctaagctagattcggattgggcctaagccaagtggagggttagggccttccctagaacgcaatgatctcctaagacccagaagtctgcccaacctcccaaaatgcataagggacgaagccctccaggcgtactggagggtgcgcggaagcctaccgaagaatagaagctggatgtcacccctaatgtgtccgctcctctgacatagggttagatcttgtcccttatgttaggtctgagttgtctttttgtattggtcacttgagtttaattaaagctgctgatgtggcaggcttattatctatatataggagattagaactcaattaagtgggtagataattaagtattgaggtggaggaggggggcgcctggtgtacactataggaggccgagggagt

SEQ ID NO: 364216 - DNA, 527 bp, Cannabis indica
gtaaaataatttccaacagccttcaattctcatttctttgagagggttttggctgatcattctgatttttaagaggtatctcattttccccggttgttcttcccaggtattttcttgtctcatggttcgtgagtcacgagacctacctcgtggtcttctcactccaggttcaggttaattttgagcgttagtcccctatgccgccctagccgcggctgcatcacgctctaattcagcgttccgccgctgtgcctcttctagatggagcctaaggcggcaattttccatttcatacgtatcttctcccataggctcggtacctccacgattgggctcttcatccctcattctaaacttctcgtccttcccacgctgagttctcctcgagcgcgttgttcgcgttctatgaccaatgtcaggttgggtcctccgagaacgtgtggtccgagagctggcgccacccttaggttgagtcctcttggaacggttggtcggtttggactgtgggttggtagaccttctggagc

SEQ ID NO: 364217 - DNA, 581 bp, Cannabis indica
taaaataatttccaacatctagatcctggtaaaatatttccaacaactggtatcagagccatggtaatgatttactttcatgaaatatgaattaaaatgatgatttatgttgatttggattgtttcatgtggttcatgtgcttatttgatgatagtttagaactcgctatatttgttactgaaatatttcttatttcgatctgaaattattttttctagaaagtagacaaaaaaataataaatttaggcttttacagaaccttatttggattttttatgaattagttatgattttttgaagttgaacaaaaatatcagggtttgaaagcacactcgcgggagcgcatgggacaaaatcccttcacacaaagccttgtcggacgcttcccctgtgtcacgcccatgtttctcggccatggaggctgcatacagcctcctgtctgggtcagacgggccattccgcgcgcaccggggtatgcaatgcatacccctgttcaccaaacttgctttcttcataacttttgattcaaaaattgttttccattgaaacaaaaaccaatttttggtagaattttgtgtag

SEQ ID NO: 364218 - DNA, 832 bp, Cannabis indica
atctaaacataatttaactttagaaacacaatccaaacatctacagaaactacagaactcaaacaccgaaaatcaagcaaaatctacaacttatagttcaagaaactaaaaggatggtgttaggaacataccttgagttgagatatcactaacaaattgctgtaaaacaccttggattgctgaagacaaacccaaaccctagctgggttctaagagggttcgaaagagagaaagagaacttgagagaataatatatttttgtctaatttttcttattttaataaaatgaaaagataatttggttttatctaataaaattaattggtttaatattcagaataaaaacctaattaaaactcactaaaagacaaaaagttaattaggcaaaatgaccattttgcccttcccataactaactaatcacaaaatctcctaggggtattttggtcacttctagaatttcgactattctcgacactcccaatgtctaactatattaccccgctatactaaaaatactaagatgtgattctaatatccaaacaccacgtttaaatgttgtcgggcacaaaacatgcaaaattatgaaattccatatatgacatataaaatgcattccgaactcaaataaatcactgtaaactaataattcataactaacatacaagtttcataattaaccctaattatctgctaatttccaaattaaagttaagcggtctttacaagtgaagtacaaagatacaaaagagatactaaacctagctgctataaggtgtatttataatcaatatacaccttattgacaacttatacacggtctgaacaagac

SEQ ID NO: 364219 - DNA, 720 bp, Cannabis indica
taaatacaagtaaaatacacacacaaattaagctaaaaaacataacaaataactctttattcaagagtcatcatgcccccaaacttaaaacattactcgtcctcgagtgatgacttaaagagaaataaaagacacacgacaaagaaaattgactcaaaatacaactcacacaaaagaaaataaatgacacacaagactcgagacaaagagaagagatctttacttagcatgcaacttaacaataataaatgctctcaaaactttatttagatgaggatggaagatgacgatgatgatgatgattattatgcctcttgctaatgcattcgactaatttactcaagtgttaatgaagtgataaaattataatgcaagtgtctctcccaatagctaatgcaaagctcttcccaaaacaaactcaatttttcctaaaacaagctcgacctcaatcctaaagcctaacattttgtctccataagttgactcgatgcttccctctccactaatgtagacaaagactcaaccaaggatcaataggactttatcaagcttgtattgttaggctaaggtgaaggtaggataaaagctattatttttggctcaaaataccttaaacacctcaatctttctaggacccaagtaataagacacataatcactttcccaaaagaatgtccccacaaacattgaataccactcttgccactttcaaaataagaa

SEQ ID NO: 364220 - DNA, 519 bp, Cannabis indica
aggtaggcgcctaccatgtccctatggaagtaattgagatattccctcaagtaattgagagattccctaataaatatcagtaatcgaattcggttatagatatatatttatttaaacaattaaatgtgatttaatactattactagaagcctgatttgagaaattagacttaactcttttgacattcattttcaaaattagagagataaagaaagaaagatttttttctcaactgttcttgctcatgtatttagaactcaacaagaacattatacactttatcctaatagtccacactattctttgtgtgtggtggaatgatttggaagacgttggtgtgagtccaattgcatcatctggattaagtgatacaatatacaagaaatttcgtgaataccctgatagtcatctagaggtatataacctaaacttgttattttattgttttgatttaatgtacacacatctggatatccaatgggatatggtacaataataattagataatacgaaactctt

SEQ ID NO: 364221 - DNA, 900 bp, Cannabis indica
aatccgagtcatcccctttttgtctccgggagaccctagcaatgtctttgcgtagtcttgataactcagctaggattccttcattcaacgtggccccgaaaactggcagtgcgtgtttcttcttgtcaagatggtctcgtaagtcaccatgcttttcattgatttttttgtcttaggtcagctggagggtacctccagtttttcctccctctctccccgggttgttggtgcatggatacgctctttcggtcctcccgatcctgagggccaagactcgctcgagggagctttcccctctgcggacctttccctttcgggaaatctgagcggactttttgtggatcttgcacctttttctttctccctaggattgaagttggatttttcttagggttttcctcggaagggtatcgtatagggcttggttccctggtcttgggtttctgagtacttggtgaggattctttcggtgtttcctcgggtcccgctgagatggccttgggatgtatatgtatccctgtcgtttccatggatttttgcatggcaaccatcacctcttgcatcctattattctgttccttttgagctgcaagtttggcttcatgattagctgccttttgcctcaagaccagtagttctgtatagctttcttcgtcataggtgtcatacccttcgaagttttcctcgtattcctcatcgtttgcctcatctcgctcctcagaacccacatttactcgcgaggccacttcttcgccttctgggtcttgagcatcctgaggagacggggctgacgtgtattgttcgagtttctaccattgttactcttgactttttttttttttactgtttgtctttttagacgattgcttcctttcaactctcaatgaaacgcaccaaaat

SEQ ID NO: 364222 - DNA, 532 bp, Cannabis indica
ctccggaattgagaaattataactctaatgcccatttctaacaatgggatccacaaataataaaattcataaataattataaaaataccaataattaatgctaattgcctttactaatctaaattatgaaatgcggtcattaaaattatcccccattaaaaggatttcctccttgaaatctaacctgaagaactctagataatgagtcctcatgtcagactccaactcccaggtggcttcctccaccttgctattcctccagagccctttgaccagcgcaatggtcttgtttcaaagaactttctcctttctatcaaggacctgaactagctgttcctcgtaggataagtttgactgtacttcaagggcttcataactcaagacatgagtcgggtctgaaacatatttcctcaacattgaaataagaaatatattattgatagctgatagcgctggtgataaggctagccgatacgctacctgcccgaccttctcgagtatctgaaatggcccaatgaacctagggcttaac

SEQ ID NO: 364223 - DNA, 655 bp, Cannabis indica
catcacccaacctacatatttactaagatttctcggaaactaattaaataagagctaacgaaataataaatgcagcaataaagaagacaaaaatttttacgtggttccggcattaatgagtcttagtccacgagttagtgtatttttcttaagaggcttgtatggtattttatagtagtggttacaggaaaaccctgactccgccctcttattttctcttgatgaagaagaaagcttagagaaaattaggcaaagcttcgagtactattaattttttgatccccactttgcatgaaaatcaaggagtatttctaggctaaattgtgggtatggacatgcccatgatctgcttagagtttttgtaaaaaggccactattggggtaaaattagtaagtgattgaaataaatttgttgttagaatttgaggataagatgaataaggttccatctcaaaaccaattgacaatgaaaggagtaccccattcatcttatatatcacaatttatttccacacattaccaatgtgggactaactcttaatatttgtatcttggatagctttgtctactccaaataagagagaaccatatcggattctatttgtccctcgaccagataattgtgtgttgaatatcagaaaaaaaaaaaaaaaaa

SEQ ID NO: 364224 - DNA, 632 bp, Cannabis indica
ataatgaaagttatgagagttgtttgaacaatgaagaagtgtcattagttgaatacaaggaagagaatgagcctacaattgaagattaagatccttttgaagtggtattaactcaaaatttggctaaattagattattacttgataaataatgaatgtcgtgtagtgaatgaaatcatggaagagaatgaattcatccatgatcatgaaatcattgaatatgaaatcacaagcaagggtatggatagccaagtggagagtgagcaacaagaagaagggttgttagatgaaagtgtagatactgtgacattggaggatgaggaagtacatggcatcattgattcgaattcatcaatgatattgacttatacaccaccaatggatccatattttttatcaacaccatccccaccatattatatcctctacgagctacgaaaggcttctcccaagctcatcatccaaagtcgtgtgttgttggcgctgattttggttcaaactcatcacatgccaagcttgaaggtaattacaacaataactttcatgttgtcctgcataacgcttattatggacgtcaaccgcttgttgatgtagcgctcaggtaagttcaattttctctctctttaatgtcac

SEQ ID NO: 364225 - DNA, 1065 bp, Cannabis indica
aggaaacgtggttgtaatgtcctgaataaattagaggaccagaggaaaaaatcttcagtgccgctacctcttttgtgtgacgtccgtgctggtaaaattgttggagttgagagtggctctttttctcgtttgattgggagagagattagaatccacgtcccaggacattatggtagttgggagaaagtcccaaatatgtatcatgatgcagtcttcaacagagttcgggtaagaaaattatattgaatttttgagtttttttactcataattattatgtttctaacttatttttaatttccagtattattacgatatcgacaacaatgaacattctgagataattacaacattgcatgggctgaaatggcaaatagatataagaaacgggagttgttaagacatgtaaattttaaaaaatactacaaaagtcttgctgattttgatgacgttgttgcccacccgcctagtgatcttaatccagaggattggcttcctctttgtaatttcttcaccagtccagagtttattactcgttctaaaattaaaaaatagaaaaaaaaaaaagaagtaccctacaagacagggatcaaaatttatggctgagatgcattttgaaagagtaagttaaaagatttctttaattaagttattaatttgcacattttctaacttatatccttaatatagggtgagctcgtttcagcttatgaaaaatgagccagtactcctgatgctggacctgttaaggagattgaagtgagaatactcactgaagtacttggtgaaaggcgtggtataaatccaggagtggggagaaaaataaggggacaatcttcgtcgcggcgcacacaacctactcccactcaagatatgcctatggatccaagagttgagcgtcaacttaaaaaattaataagaacaattttgtggatgtctcaaaggtggggacctgatgttcgtctacctactgaagatgagttgttcgcaatgtcaatgcctccaacacagacgttccaacctcaaatgtctggaggtggatctgcttcatcttcacagcccggga

SEQ ID NO: 364226 - DNA, 545 bp, Cannabis indica
atgttatatcatgtagaaaaaaatggtacggtctcccttactttaaaaaaaagtttgtcttccctcaacttaaatcttaagtccgtcactaatcagtacaatatctaatttttgtcagcacaaaaatacattgctaaaagtctaaaatagtaagtatgtgattataaatgatgcccaatgtaataatagtattataaatgaccaaggtgtgtgtaactttccagaaaagtttaccataatatattgtagtttgttaacacaaccgactatgagctgtataataaggactattaaatgtcccaaggtgagtgttcaaaggtgttttgttgtatctaaaagattaagtctcaaaaaggccctttttctatctagatgaattactaagtctatatatctattatgatctaataagtcttgtcttgtgacatgtttgagagttagcatttgtgttttgtgcgtccgattacggttgtttatgatttaatggcgtctagtagtagaactatggaagatttgggacatcagtgggctgatctacaagtgga

SEQ ID NO: 364227 - DNA, 624 bp, Cannabis indica
gagaatatgaatcaacgaaaataatggcaattatattaaagggtattcaaaggaataactcattaaatgcggagtttatagagtatatctataactcgttgactgtaaagtcttaagcgagacacggatgtacaaactattaattgacatatagacgagaagctatttcgtatctaaagacacaatcataaggatgacgtcaataatacatagcgaggcatcaacctcgttgcatataaagtggtgtcaacgagacaagttgactgttagaacacttagagtatcgctgcatataaagtggtgtcaacgagacatgttgactgttagaacacttagagtataatatacattatacaaactaagtataacagttgcacgaatctgaacaacaaatagcgaggcatctatctcgctataggaaggcatattcctggtaccttcactaatcagctctagacatctttcaatgagatctactgctccgttgagtcagctctctcaaatagaagctgacatttacatgatgttgactgttgaagtttaccttatcaccaagaactgcgaatgtcagatggagtgttatgtcttcaatagcagaaatgacaggatttacattatcaacct

SEQ ID NO: 364228 - DNA, 704 bp, Cannabis indica
aaagctccaaaatagccccagtgcccaggttgacatgtggcttggtgcgttgggttctgcttactcgattctaattctgtctcgaccgctcatctagtttttcatagtaaccgagagctatgaagtcagaagatcaaattcataacttcatattcttacttttctaacaaggtgatttactcgaaaactaagtagttttgagtctcgtttttccaaaacatcaacatcttcgagaactggtaaccagcttcactaaaacacagattcatgctaagtgatgtcaaaatatcacttaggcatcaaaaattacatcctcgacacattttcccactcaccaggcctctaggttaacatcacaggtcaacctgggcgttgggatatcaacttgggcattggaatcagaacaaccttcagtaaaatagtcataactcactcaatattgatccgattgatgcgattcaacttgcattttgaagctatttcaatgttctatcaagtcatgtgttgcactatattgtttattctaaagttatcgactctaaatttcaccctcaaaagagttacaaatttaagatactgcttacatggggtgggtcccgcaggcatggcataagctccaaaaattgacaatagaccttcggaatcagtactgtaatacccggaattaagaaattgattagcaaagtcctaactagataattatg

SEQ ID NO: 364229 - DNA, 537 bp, Cannabis indica
ctaggtccaatttcagttatgattccaagtccaagtcctagttccagtcccggtcaacttccgattttggatccaattttgggtcacagggtacgaattcgggtcaacttttaggtttgggactcggttatggttcgggtgttggttcgggtcattgtcagggttcggatccatggttgggtcccaaatccagacaccgactacgggttttgtccaagccctgggtccagatctggatcccaatctcgggtaccagtctggttccatttctgctaccgggtcaaaagttgggtcctaagttcaatttcgggtctgggtcgagtactaggtcccggtcctagttctgtttcccatgtccctatcctgattcttggtccaagtcctggatattgtgtaggtttgggtcccggtctaggttcaggttcgagtcgtagtctcggttcgagtttaggtctttgtttaggtttggattttggttcggatttgtgtttaggtccttgtcctggtcctattcctagttcggttctagttccattt

SEQ ID NO: 364230 - DNA, 580 bp, Cannabis indica
cctcatataacttcatcccgttaacgttagcgaggctcataaccctgacaagtcaagaagctaacattcaaataagcttcgaagaactctttgtaaataagaaccgcgatcgacacaagacatgcatcgtcgacctcggaaggaaaaataaccccagctcgctattgagatcactagaaccaagtttccttcgtgacaactccagaaacaatagttaaagacgtgtttaaaatacgatcattttgacccagtaaaacacgatcattttgacttagtaaaagcagaaaaatcacaactatatgatttctaatcataaaccgcatttacactacgtgatatgtaatcaaatcccatgattttagggatgattaattgttataaacatattacagtcaactttgtaattaactgtccactatgtaattataaatagtgacaaagaagatcaaaaaagggatgaaaaaactcatagaagagaggtcctgaaaaaaaaaaatcagaaatctgaataagattgactcgtggactatgagaattttaactgcaaaaccacgtaaaaaaccatgtgttcatattttta

SEQ ID NO: 364231 - DNA, 660 bp, Cannabis indica
aggagaatcgggctcagatcttggtgatactctgctacagaaaggacacaagggttagagatctaagtggaaggagtcatttaattccgctgcaaccaatgtaaggtttcttaaactttatatgtgtttaaattacattattttagaaattcatatttaagattttaaacatttactttcatgaaatatggatttaaaatgatgtttgtgtggatttggatggtttcatgttagtttatgtgaaaatttgatgattgtatgtaaatcacaaaatattttgtaaaatattttttgtttcgttctgaaaatatttttactagaaagtagatgaataattaatgaatttaggctcttaaaagactcaatttgcattttttatgaattagttagttatgatttttttgaatttggatgaaaatatctgaaactgggttgcacatgtgcgcgcgcacgaggggctttactcggcattcacaccgcttcagacaagccctgtccgaggaaactcggacacgggctgtctgaagcttgtatcacaccgagatccctcacccattgaggatgcgtgcagcctcctgtctcggtccaatgccccattccgcgcgcaggggtatgcattgcatacccatgtgccccaaacttgtttttgtgatatctttt

SEQ ID NO: 364232 - DNA, 868 bp, Cannabis indica
acctagatcttcaccgagatcctaacccagacccaaacatggacccgcactcgggacccgaacttggacttggacccgaacttagacccagatcagggtccagacctggacacaaacccggacacatactcggacccgaactcaaacacccgcacctagaatcaaacccaaagatagaccaggacccggactctaactggaacccagacaaggatcagaaccaaggacttagacccagaactaactccaaactcagatgaggattggaacttggaactcggacccaacctagactaagacccaggaagcgaacccacacccgaagcctgatctggacctagactgaaatctagactcgaacacaaactcaaagcaggacttgaactccgacccaaactcaaagccaaactcgaactcaaaatcgcaaatggaactagaaccgaactagaactaggacaaggaacaggacctaaacaaaaactcgaacccagataaaaatccagatagagacctaaaccctaaccgagactaggactcgaacccaaacctagaccgggacccaaacccacacaaaaactgggacctggacccagaatcaggatacggaccagggacacagaactaggaccgggacctagtagccgacccagacccaaacttgaacataggacccagctcgtgactcggcaccagaaatggaactagactacagacccgaaagtaggatccgaatctagacctagggcttggaaacaacccgtagtcggtgcttggatttaggaaccagcccttgacctgaaccctgacaaggacccaaacccacacccggacctgaacccagtcccaaacccaaaagtggacccgaacc

SEQ ID NO: 364233 - DNA, 1136 bp, Cannabis indica
ttgataaatctttagagaaacattacaaagataaaaaaatttattaattaactaaagagaaaaagttaccataatttgtatcatattcactccatatttcttaaatcccatcactcaacacttgagaaaagaaaatccactgatcaaaaacataatcagagctatcaccatcattactttcttggtccaaatattgatcaatacaattactccaatgctcatttatcttattatggattcttttcaatttgtctttggaaaccttactttcaagatcctctacctttgaatgaaacactttaataaagtttttgatctctatagggatgaattcaggactaaaaagcttacctcgaaacgaagaacttcattgatgatatgctgaactaattcgtcttcgatttcatcattcaaataaatattgtcttcttcctttccttcttattcgtctgttataccaaaatggtccaaccaactccattgcttttttgaaaaatggcaataaagtatcagaaccatctattacaaaagacttgttacgattctcttccacatttaagcattggattaaagttataacctcatcaagaaacaacaacaatgttgaaaatattaaacattttgaacactttgaaaagtagacgttacgttcaaaatatttaaagaaatgaatcttatcagaattgagaaagattggttgaaaaaggaagagagactaataaagtagttcaatgatcaaggaaaacgttagagaaggggttaaataaggagtcatttataattactattatcatatataaaaaacaaatcatctctacttttatttgagtaggtacgtatataaacatcaattatggttgtaacctgaatttattcgacactttagtaactttttaatacaaatatgttatttttttcctccaaatattatggttttttaaaatatttttatgaaatgattgcctaaattggtgtaaagaaataaattataattttcaaaaacacaatattttacttttttaataaaaccaccatttaaaattttgccatagcctaaagctatagagagcaaaaaattttctttatatattttttgaaaattttagatagaaatataaaaaaggtaaggttggtat

SEQ ID NO: 364234 - DNA, 869 bp, Cannabis indica
ccaagttgctcattcaaaccaacccccaaatctgtttctgggacaaaggtcccaacaatacttctaggggttacattttggggagtaggctccaaattcatattcttcttcaccttaattacaaatagtggcaacaagttatccacactcatttttgccttcatgctcaagaacactcgtagttgactatctttcactaaaacctcaggcggatgcttagtgcctttcatgtacatgtaaagaacttctaatttcaattcatacaccaatgggtccacatctaactcctcatgcaaaacttcacgcacctttttcagtgtagagtcaatgtcaaacatcattgtcttactttttgaggaatcaaattcctacttgaaaccctccacagtccaaatgccatcatacagtacaggcacaaatacagttgaatctgtcccaaagaaatacaaataaataaacagaaaaaatcgccatactatatcgcacaagctatgacgaatgtcgcacaatgttgcctaatacaaaaataatagaaacaagtatcatgtcgcacaataatcgcacagcaaagaaacaatatcacaaaatgtcgcacaagataacatgcgcaacaaaatcacataatgctgcaaaaatatcgcacacaaatcgcccaacatcaaaatcgcacaaaaatcgtacaatgtcgccaaaattaatcatgtcacctctaacctcagatttcttatgacattgcacaaaacatcgtacaatatcgcaaaaaacaaaaaaacccagaaaaacacagagtgttcggaacaaactctacctccatttcgaggacacaaaagtcacaaattacaactaacaacgttcagatccatacaata

SEQ ID NO: 364235 - DNA, 788 bp, Cannabis indica
taacaaatgaatatataactactcagcgctgatctaagtttttttggctttcttgtgcaaaagattaaaattatattttttattaaaaaaaaaaagtttcatttacattaagactataattccattactagtttttagtttcttttctttttttaaagatatgtttctaaacttttaattataaattttcttatataataataataataaaaaaagtattttctttcaaaaaaaaataagcctttaaaaatagaaggccttgtgcaatggtctcagctgtctaaaacttgggtcgaccctataactacctatataactaaaaattataaaagacaatatgcacatgtatttgggttggagggccaaggccacagaactacctcaagatcttctcaacacaagcacctaaaatcaacctccaagctcaacaccaaaactcaattgaaatttgaaaccaatatcaatgtgaagaaaatttaagaaaagagagaggggggaaagaggagtcaatttagggatgatcaagaccaaaaaaataccatctaatttccttacaaaaatttcttttattaaaaatacattaaatggtcaaaaagaccaaaatgcccttagggccaacatagcatatacacaatctcaagggcaaataagtcatttagtcatacaccatacttaaataaatttcaggttattcatatatcaataacatgccaatttaaaaattctgaaaatgtattttggccccgaacccagttcagcccaaattactcaattgtgactataccgtg

SEQ ID NO: 364236 - DNA, 627 bp, Cannabis indica
tgaatccccaatgtgaaggggcttcccggcaatcgcctgactccttctctccaccgggctccccacacggagcgtcctcccggaagccgcctgggccttagagtacgccttctcctgggccttccggtagagatactcctggtatttcttctctgccgtggcgatgatctcgtcccggaaggtcttctccgcgaccggcgccctcacattgggacagatgacccgggaaaggtttgagtcctccacggattgatgcggaaggataagtttggccttcctgcagttctccgtagtgaccagacccccgacgtcaagatcggcccggtcgtaagaggcaaaggcctgggctctccgaagaaaggcctgggtaggtgcagtccgttcatatggagggatcctcacccactcagtaaggagctccggatggtccactgccctaaatccggaggagaagaaaaagcgatggcgatactccttaacgtgagtctgcctgttatacgggaccaccccttcgttagcagggtgggcccggaacccataaaaaccgtccttaagtttgtcccccttcttagggacggaaacaagttcataaaaatacaaaatttccgccgggcggggagatcccca

SEQ ID NO: 364237 - DNA, 936 bp, Cannabis indica
atcagattgtaatgagttttatttagggcataaaacccaacacaaacttgagttttgctctcaatgaaagaactaaaatgttgacctcgcttttagccaacgacagtgagtcaattaataagcgataagaaatgtaattaagatagagcaaaaaatagtaagcaataaagaacacaagattttaaagaggttcgactcctttagttcggtaatagcctactccccttagattgtattgacttgagaacaaagaatataatgtttcccctctcaaaattctcacaatgaaatctctgagtgtcttctcttagatctctctgaagcaattctttcgacctcttttacaatgaggatggatcactatttatagggctaaatgcatgaggaaaggtttccattttgcttacaatatctataattggtaagaacatacattacatatttagaatacataaaatgagggattcgaacagcttgccatatcaatcttaaagtagttattaagtcttgatgcacggtctggagagatgactttatttgttgttcggatcatctgccttttctctgttcggtcaggaaaactttatccgtgcagatgtattacttgaagtctgttcggaacacttctctagcaacctataaagaataacagacacatgtcactaattcatgctgccacatcatggtgctaaaaatgggataacagatacttcatggtgttaaaaatgggacagcagatactttatccttcacctctaattatatatctccttttgctttagaagatcactagtattggataaaggatcgtgctggtgtctacactgtaaaaattgcataccacttgttgcagcaattaaaaggtaactggggccttgaccatctttttgatttttcagtaaatctttatggtagttacaaattccccctcgtgtt

SEQ ID NO: 364238 - DNA, 565 bp, Cannabis indica
ttttttaaatttatttacgtagaattaattttttacttcaaattgtaatacatgtataaacattatatttactcaaaattaattctattataatatagtattaatgattatttattgttattattattacattgatattttttgggaatttgattttttttttctagagtaactctatttagttattacctgttaattagaatataatttacttagtctcaaatgtatttttggatagagattctactttatgagacaagtattaatcaataaattttgcattgttttattggaatagatgtactaaagaagccttgaaatttgaactcatataattgggtattttattaaggttaattaggacttttgacccatgaactttgacatgtaccaaatcatgtcccctgaacttttaaggtcgttaaaaatgccccccgaactattgagattgttggatttaaggacttttgtctaatttcattcaattttactatttcattgagtgtttatgtactaaaccatgctccccaaactttgatatctaccaaatcatgcccctcaaact

SEQ ID NO: 364239 - DNA, 604 bp, Cannabis indica
gttctacttccatctacgattctgtgttagagtttgggtttgagttcgggtcagagttcgagtcctattctaagtttgggttcgggtccaggactgtgaccaggacccggaccaagacctagaaccgagaaaagacctagcctcagaccaaaactaagactgtaactcgggccaggacacaatcgtgtacccacaccaaaactgagacccgaacctggacctaaatctgggacacgatcccaaacacagattttgacctagatagggatccggatacgaacctggacacggaccaagacccagactgggatcgaaatgctggacatagatcttgactgagatcctgacccagaccaaaacttggacccgcactcgggaccccaacttggacctggacccgaaactagactgagattgggatccagaattggacactaacccagacataggctcggaaccgaactcaaacccacacgtagaataagacccaaagctagacctggacccggacccaaactccaacctagaccagtatgagaaccaaggacttagacacagagctgaatccaaactcagatcgggatcggaacttgggactcgcacc

SEQ ID NO: 364240 - DNA, 500 bp, Cannabis indica
gattcaaaagaaaaaaaaattcagtgatgttgggaaaagaaagaagaaaaaaaaatttctctcaatcatgattagttgtggaaacactttggaaaattttgaaattataagaagcttgtaggttctgttgtgcttatgatatctttagccaaaattgtcttttgttttccaaatatctaagccataccgaaaggatgttatcaacattagtggagagaggtaagcatgcaagcgtatgagctatcggattgtggaatgattggaaagagtaaaactattataacattgtttagattgtgaaggcatcttgtgtttatccattgtgtgataaactgagcatctaaattaattgttagagttggtggaattaaaattctagtttgagcaatggaagaaaacagaatatgaggcaagaatattgtgattatctgatagcgtagttagtagtaatttttttttttgtcttactcgagggcaagtaagaatctagtttggggcaa

SEQ ID NO: 364241 - DNA, 516 bp, Cannabis indica
tagcatcaatgcaaattttaaaattaacattcttttttgctcaaaaaaaaaaaatagcattcttttatctccactaggatatcatccttatattttggcagataagttttccacctaatcaagtattctccaaaaatattaccgttagagatgctcttagtaattaataacaatgttttaataataataagagaattggtaaaaggtaccattaatgcctatataaaataacttaagaaattttttttaattaacattgctaactaattatggagcgtcagtaatatcctctaacaatgataataatagagaaattatgggtaaatattattttagactctgtgttttgctaaaattatcaattgaactatctgttttgttaaatgataaaataaatctcatattttttaaaattataaaaataagacattgagttcaatttttaataattttatataatcaattttattataatatctctaaatcaagttatttttaaattttattttataaaaa

SEQ ID NO: 364242 - DNA, 723 bp, Cannabis indica
ccgataaaatcattggacgggttgaactttttctactttttaattggacaggttacaattaaatatttgcaactcgatatttatattgggttgaatatatactataacctgactaaatcgaccaatgtagacccctatagtcaactatctactcgacggacgacttccaactgacaaaaacgaggagcgaaaactcttatacgcagtgcctcgctacacaataattgaagacaaactatgtagaagaggttattcgatgcctctacttcggtctgttctccccacagaagttaatgaaatcatcagagaaattcatgaaggcttttgtggggatcatgcaggttggcaaagcctatctaaaaagatcattggacaaggatattagtggccaacgatcaataaggacacccatgagtttgtcaagaaatgtgataagtgtcagaggttttcacatatacctcgcgtgccaccaacagaactaaggatgatgacctcgtcgtacccatttgctatatgagggattgatctaattggggaattacccattgagcgaggaggagccaaatacgcgatagtagcggttgacttcttcactaaatagactgaggtcgagcctcttgtttccatagcctgcaagaaggtcctcaattttgtcgtcaagaacattgtctgtaggtttggaattcttatgaagatagtatctgataatggaacccaatttga

SEQ ID NO: 364243 - DNA, 858 bp, Cannabis indica
atttcattgttttagaattcatattaggatagttaatacaaacatacttggtagtaaatctagatcctaggtaaaataatttccaacagttttcccacataacattttgtattttagtaaagaaaaagttaaaatctttaaaaatataaatataaaactataaattcgtaaatatatatatatatatatataaatattttttgttaattttgtgtacttataaaataatctcatttatataagacccaagcccaattatgatagaatagcagagcaaaaatcggtcatatttctccaataatctttctactaacattgcctttcttcagtttcggcaccataatcattagcgttacgctaaaaatactatcaaccaactaattgagaattgaagaggagaaactccgtcagggttttcacttttgaggctgctaaaggataggaaattgggtctttttcgcatattgggtcgggcccttccccaacggaacaacctctaacctgtgtgacagctgggccttattcgggtcgctgccccaatccaacccgacactttttattttggatcgggggccgacccgccttagtttagactgggtctgtgcagaaataattcaatccaataacaaatcgaccgatccaatgtcaaccgaccactaaaaattggatatcctatcataattgaattggatcggatgatatttttgaaaattcaatattggatcggttggttcttggatgacatgtaaatcaaatagatcaaaccaaccaatccaatccaacaatcatctaatattaaaatagaaaatatatattataaattataatattaaatatattatattttaaaaacctaaa

SEQ ID NO: 364244 - DNA, 1121 bp, Cannabis indica
aattctaaaaaaggaatgtctacctattagtaacctgctattacaggtcaaagaaaaatgtcactatatggttacaataaaattgtaaccattgaatttattgtaaccatatagaatagtcacccataaaattatatatataaatatatataatgtaattatattttaggcaaaaaaacaccatgacaaagtgaactaatcaacctaaaaaaaattaatgtataggtacaaaacatcactaacaaagtggataacataaacccattcaacatagtattgtttaaaggaaaataaaataattgaaaaacaaccattcaaaaatattagagaattttatattgataatatgtgaaaatttatactatatataagacatacatgctatttctctcattgttgattgattttgagatgaaacccgttgtccaaattttttcctagcacatgtggcccctagtaaaacaaccacgtgtcgggtgggacctagctcaaggaggtttagagactaacaatcatgaagcttaggaacgcatggcttcagaaggagagtaggtatctgaaagtgtattatacttttataaggtatcaagattcaaacggagaacacatgagtctctgggaggattaggaccttccggatacttcttttatgtgtggtcgcaagtcgcacagtacaacacttttcgagaaaaagtaatgttacttgtctacttcgtacgagtgaaaaaaagagtttaccacatattcttggagatttgtcctactattttcttacatgcacctttccaaggcacatattgatggcgcgtgccttcaacaatcccatccaccgcgaacttgtaaggtcttgtctcaccaattcctactttgggtctacttgacaatcccacaaagagaagatacaaccttgttgatgaaagtatctttacaaaggacaggaaacgggtcgaagccccctccaataaagctcatccatttattctacaaatacgggaataaacccactataaaaaagattcggtctcggaaactaagtgggaaaactctgtcaaattatccttacaaaagaagaaacacaattggtgtaacctgtttaacatataactgttggaaattatttt

SEQ ID NO: 364245 - DNA, 557 bp, Cannabis indica
gttctgttggccgaaggtggtggtggggttttgttggccgaaggtggtggcggggttctgttggccgaaggtggtggaggggttcggttggccgaaggtggtggcggggatattggtggtgccggaaaaaatgggagccgtctgttgaaccgtcggggtcatggtggtggcggagaatggcggaagcggattgtaagatggtgaagccgtgaaggatggcgccggcgtcgagtgggaaccaatcggagctgtggagggtggtccgatcgttccactaatggggagatcgacaacgtgactggagccgaaaacaccagaagtggaaggatcggacattggaggaggagctccgatcgtgtccgacgagagaggagcagtaggaggtaaggcgggcggagcttcgacgtcggcgacaatggcttcggcagaggagatgtcgtggccggagatggtggtgggctcggggacagaagcggcggccatggagttcctggttcttggagccatggaacaagaagatgatgaaggaagggaggctagggtttatgtgtatctga

SEQ ID NO: 364246 - DNA, 477 bp, Cannabis indica
ttctttctattaaaggagtggattatttcctgggctatcacattattatcttgtataacccttcccggtacaaacgcaacttgggtggggcagataagctgaggtagcaaaggcttgatcctattagcaataatcttagagattaccttgtagaccacattgcaaagagagatcggacggaagtgattaggtcttttcgggttctgcaccttggggatcaggacaatattagtggcattgattcctttgtgcattcgcccagttatgaagaagttggaaattgcatcacagaagtcaaacccaaccgagtcccaatagtgtttaaagaacagaaccgacataccatcaagtcctggagctttgctactgctcatggcaaacagggttgttcgtatttcctcgtgtgaaggctttctgatgaggtcagtctgctcaaaggtagaagaaaagccatagagaggaatttaaccttaaaat

SEQ ID NO: 364247 - DNA, 1192 bp, Cannabis indica
ccactggttgcagtagatgcctttcttttctgatcagtggccgagccacacctcccctgctaaagcctgatgcaggaggggtaagagcccccgccaacacccggagtcccacgagactctaaggtgcactccactgcgcccttagctcgtagtgccttatccaccatatcagcataggtggtactgtcatcagtagtgatcattaagtcgtgtctgatctatgcatttaacctatccaggtatttctctttcttactgaaggtaagttggcacaattcccgaggccaaacctcgccaaacaatcaaattgagttgtgtactcagtaacactcatgttctccttctgatttagctaggtgaattcttttcttttagcatttctgactgcctcattgtaatatttggcattgaacagttcttggaacttttcccaggttattgctgtaaaatcgtgaatcatggacaccatgtcccaccaaaccagtgcgtcttcttgaatttggaaagtggcacaggcaaccctatcattgccggtgatgcccataaaattcaagattctggtaatcaatgttagtcattgctcgactttcatgacatcaggacctcccaggaaaactggaggtgcctgcttacggaacctttcatacaggtattccattcggttcactgtaaccacaggttcagcctgcacaacaggggcaggtgccactggtatcactggagcaggaactgcaggagcaccctgctgtctcaaccgccgaatctcctcatcttgatcattaattctgtcttgcatttctgcaaacctgttttcccaatcatgggcagcttgggcagcctgtggcgggttagcatcaccccggtcacgtgccctgcctctaggacctctacctcagccaaagatatttaggggaattagagctccctgaccacaactggatccaaccgaatttccctggctcctggtacttcggctggcgtccatactaattagaacagcctgcgtaaccaagagctagtttggttagatcgtgatcaaagaacaacttactaatgccgcttatttggaaattaaaacatgcacctattctactattaggatactaacatgcttcctaacatgcttcctaacaggcttttcttaaatactactactactacaaaaaaaaagaataaactactaaagcaataa

SEQ ID NO: 364248 - DNA, 481 bp, Cannabis indica
taatgcgcctattagagataaccaattcctcgctgggcattagggttccaaaccctcttacaagaaaatcataaagtctatccaaaagattaaattctctcgataccacatacaagtatatagtcctaaagtcaaataatacattaaaatgggagttgttgataagaagctaacctttcaccatagaaggactggatgcaacatcagcctgagtgataacaaatgtctgagcaagtacagactttacttccaggttctgcttatctttctttgcctgagggcaatttctcttaaagtgcccaaccatgccacacaggaagcatgcttttcggttgcactctccgggatgatgtttcttgcatcgcgggcactcaaggtaaaaataatccttacgtacacccttaccttgatttcctgggaaccgcttgttccgttttaaacccaccactgacgacgtaggtttactcttctgctcaaccat

SEQ ID NO: 364249 - DNA, 728 bp, Cannabis indica
gttcccaggctaagtcctataaaatggatgcccagagaaatacaagtagtcagggtaatatggttgagactcgaggccgttagggaaatctaattccccagaatccctgtggtcgaggtcgtggacgtggcaacgcttagggtggtcgtccagtaaacccaccacaagctcctccagattaggagcagcgatttgtagaaatgcaagatcgaatccgccaacaagatgaggaaattctaaggctaaggcagcagggtcttcctgccgtggctccacaacaagctcaggccgttacagctccagcggtgccagcagaaccacctattgttggcaaccgtatggagccgttatacgaaaggtttagcaagcaaggacctcaagtgtttctgggagctccttatgtaatgaaggttgagcagtggtcacaataattgagcaaattctaaattttatgtgggtggttggtaataatcgggtgacctgcgccacttttcagttccaggaggacgctctcgtgtggtgggagttgataacccttactcgggacgtaactgttatgacgtgggaagagtttttgagagctatttaactccaaatattccaatgaagccgtccacagtgctacgcggaaagagttcactgaactacaaactaaggggatgttagttactgaatatactacaaagtttgatcgattggccaagctcgccgtgggtattgtgccaaca

SEQ ID NO: 364250 - DNA, 921 bp, Cannabis indica
atatggtatttaaaataaaaactaaacatatatgggattgaattaccataaaaaatattaaaatcccttcatattttaaaaaaaataaataaaacaaatgaaactacagtgatcgtcggagttgacatcggtgctagaaaaggcgtcgtagtttgctgtcggtgctggaaaagtaaaccggagtagctatcagtgccgagaaagtcgctagagttgctgtcggcgccgaaaaagtcatcaaaattggcattgtcgctggaaaaatcaaccgaaaaaattaccaagaaattggtttcttcaccaagaatttcttgatgaagaaaccaatttcttgttgattttttcgataatttttccggagaccgccaattccgacgactttttcggagtttgatgtcgctatcgaaaaagtcgcgcaaagtagcttttggtgtcggaaaagtcgtcggagttggcattgtcgtcaaaaaaatcactggaaaaattagcaagaaagaaactggtttcttagtgacttttccgacgactttttcgaagtttgctatcagtgtcggaaaagtcgtcggagtagctgccagtgttaaaaaactcgtcggaattggcattgttgctggaaaaataccaagaaagtggtttcttcatcaagaaatcagtttcttagtatttttttggtaatttttccagcgacaatgccaattccaacgatttttggacacctgcagctactccgatgatttttctggtgccgacaacaaactccagtaacttttccagcatcagtgacaaataaatcttcctaaacagataaaaacattaaatatgagatttaaaaacgtaatttgcatatatatatatatggcatatcaaataccataaaaatactaaaaataaaaaatatcatataaattggccaaacttaaa

SEQ ID NO: 364251 - DNA, 823 bp, Cannabis indica
ttgactcagcttttctaccctttacatcaaattatgccgtgaacaagttggagcttgacttccacgagttgattaacagccttcagatatttgaaaatttgattggaggaccacaaaaaggaggaactaaagttcctagttctggcactactaatggtacgaccaaggctaaggcaaacattgcctttacttcgaaacccatcaaaaagaagaattggaagaatagcaagagcctcttaaagctgttaaaacagttaataagaaaaaggctgctaatctaaatacaaatctaaatacaaggtatttctatttatgctataaactcatgtgttttagagaattattatccccttgggttattaattctagatctactaaccatgtttgttttcttcttatttcaactccaactgattaaacttggattgccctcctagcgagttgagtcgggtggttggacagaagggtggagaatgtccaagtgaagatgaagctcgaaatctacttttaatttttgatttaattgtttcagtttatgaacaatttattttcaattattggtttgggattttattcgtatttcatatttatgcagacaattcattatgacaattttgagattattaattaaattttctctttatgatatgttgttttgaattgcagttatgaaattgagcttcatatttctttaacttgtatgccaataccaattatattatatgtttatcatgtttgtgtgtgtttgtgttttattattgatgcaaaatctatggtatattattctttgcaaagagataaataccacataaatacttagaat

SEQ ID NO: 364252 - DNA, 857 bp, Cannabis indica
cccacaccatctagtgtttggaactttaaagataagtgcttgattgaactgactgcccctagtccatcagtgctggacgacccaacaatatgttgtaagccaaaggcaggtcgacaaccaagaagtcttgcgtaatagttgcagttaaaggttcctcgcctaaagttaatgagagctcaattatgccaaggctagtgatgctatccctggtgaatccacaaagattgaccatacaaggtcttaacttggccttctggagccccattttttttagagtctccttgtaaatgatatttaccaagctcccattgtctattaacactctcttgatcctcttattggcaagttgaatggttatgaccagcgcatcgacgtgagggtatctaacgttcttctcgtcttcctttgtgaacgtaatgcggggttcctcagttttcaccttcttggaaagttctagggcaatgaccgactactcgttctttatctccttcacatatctcttctgagcgttatttctttcccctacaatatgtggcgctcgtgaaataaccaggatgtcctctccttccacaggaataggttgtaacccctggttgtttgggttattaggctgatagggctggttgtatccttggccctgtcttttcacatactgtttaaaatggcctggagcgatgagactctctatctcatctttcaattggcgacattcgtcggtcgtatgcccaatatctttatgaaatttacaatatttgttaggatatatttttctcctcaaattcctcattggctcgggttttctgaaggctaccttctactcatgtgcgaggtaatattttcctgagtttcattaagct

SEQ ID NO: 364253 - DNA, 526 bp, Cannabis indica
attttgctaactatacaagtgatgtatttgagtaatccaaaaaaatacaattgttcttattcctccaaacatgataaatggtggctgccaaaacgacaatcaacaacctcccaatcaagttagaatgacccatcctaagccaattgttccagctcccaaaatcggcagcccaacactacccaagcaaaaactgcttcaagaaccatctttgagaacctgcaagtgaagaaaagatgctgatggttttcaatgtctaggccacacacatcacaaagcaaattagaagttggtatgtggaataaaatcaatttatctcttgtgagcaggtttgagtgagcagcctgccataagatgaaactatgctttggaacattcaacccacaccaaatagcccgagctgctaggtctggttgctgcaaaatcaaagaattatagagcttagaagctctaaattttcatttaacaccagcacctaataatctgtagtcgaaaaactatttctcagatggcacaacttcttccaata

SEQ ID NO: 364254 - DNA, 632 bp, Cannabis indica
cctttatataggaggcctaaactgtaggtttataacttaaatctcttgagaataagatagttagctacatatttacataagaccaaaatgcccctagattctagatgcttctcagcctgcgaattgggcttttggggctcgattcgcaaccccttcttgctgtgcatgtgtaggagggtcctgtgagacccacagtgaaatccttagctagccatggccttgtgctggccaggctggctggccatagggccagccaagggtggctagccagctcccgggagcgagctggactatcacttgagttgtactgccacgtgacataagttttgtccacgtaagcttgcaacgtcataaggacaaaaatcaggatcacatttgcccaccaagtccctgtgtggacgtctgtacgaatagggactttaccagcaagattgatattgtcgggactgcagttacttttgcctaataaaaagtagtgcgcatgtttggagcatttttgtcttgattgtttgatcttgtcgtaatagagaaataactgctttatgtgtctttatgatgagttggtgaagtaagtgagaaaaagggggcccacatgtacataagtgagtttttgggggaaaacccttttttca

SEQ ID NO: 364255 - DNA, 808 bp, Cannabis indica
ccttatgacatatttatgaacagatctagagtttagtgaatattatagtcctcttttgtcaccttctaaaaattacggtaactttctcaagtgggagtttattccccattttcacttatttattttgcttaaatgctaatgtacttccattgccttgaagatatggatctgtatttggagaacatgttcaagagtcctcccccaatcgacaagaagtctaagaagagagctgcccaagttggtgaggccttgggttctaccaaagaacccaaaaggaccaaaaccacgaccaacaagaagaaatcatcaggccagctcaccatcaagccagccaagtctccagagaaggagatcctgttggatttattttaccaggatctatcaccaagatctgagtctgaatctccttctcttgaaattggattcttcacagccttacacattatgattgagtactacttgatgtgtgtgggcactcactctttcactatgcggcttcggttttgaagagagaaagagagagatggtttcgactagggtagtgaaggaggctttgaaattttttactgaaggaatgagatgcatcatcttttcccttaagccatcactacctatttataggaaaccacctagggttaggttatacttatttggcattaaaacaataataaaaataaatggtaaattgctattagagtggccggtcatggattggattgggccccactttgcaattttgctattttctcattttttccatcttattttctcaaaataccaattttctaatttaaccacttaaatgcca

SEQ ID NO: 364256 - DNA, 989 bp, Cannabis indica
ttggattagactggatccatccaatccaagaaaaaaagagtaaaattttaatgttaattttcatatatacatatagatttgaagtataacaatataaaatctaattactcatccaaactaaatgtaaatacaaattagttcgattggatgttggatgtattggattttttagacgccctatccactatccgatccgatccaattggatatttaaaaataatatccaatccgatccgatcataattggatatccaatgtttggcggtcggttgtaattggatcggtcggttctcattggattagatcaatttatgcacacaaaaattaatagttacttaaacttaaagcatataaaagaaaaaagagaaaaaaaaaataggattagagataaatggaaaatcttttaattaaaaaaataaaagaaaaaattaaaaaacagaagaagaagaagatgaagaaaaaatagcgtgagagagatgtatataaaataatcttcattaaaaagaagaaggaagaagaaaaatgtgtgagagagagattcatatagaacaatatataaatatatataatatatttataggtttagagttatatgtgttttaaaaactggagaaggtttaaagctagatatttaagtttttaattggtttattaaagtaagggtaaatggcggcaaaactcccaaaagtttcattttggtttcacttaacccccaaaacctaaatttggatggtaaaacccccaatactcttaggtggcgtttggttggaggtaatgaaattgaatagaatggaaaggaaacaatttttattccattcctttgtttggttgcattttaaagtattggaatgacattctaatagaatgttctttccaccattttggtggaatggatattccattttaaaaagaaaagaatgaccattccaatgtaacagaaaaaaaatttaattattttttttatcatctgttagcaatttaacacttcc

SEQ ID NO: 364257 - DNA, 819 bp, Cannabis indica
atcagaaacaagagttatagcatcactttaatcgtagtagggtcacaaatgttccacgttccagtagttctttatcatcgagccattcagccgagctagcttgtaaaccccgattcctactatcgcttcgatcacataaggaccctcccagtttggggtgaatactcttgcagatgcgtctctcgtatttgcaaatactcgccttaggaccaagtttccaacgttaaagagcctcttcttaactttcttgttgaagtatcttgtcactcgatgttgctatgctgcattagtaatctgcgactgagtacgtgtttcatcaagtagatccaaggacaattttaaaagttcttagttttcttcttgattataaaactctcatatgtgagttgagatatttacttctattgacagcattgccttcaagccaaatgctagccagaatggagtatgtcccattgctgccttcacagtcgtcctatgggcccaaagtacttgaggtagttcatcgacccatctacccttggtagcgtctagttgattcttgatagtatccttcaaggttttgttaacagcttcctcttgtccattcgcgtgatgcctggatagatgagaagcttttaattatcttgttcctttcatacaactcaatgaataattcaccatcaaactgagtcccgttgtcttacactatcttaatgggtactccaaacctttaaatgatgtttttgagaacaaagtgaaaaacttttttgcaggttatgtaaaccagaggttcagcctccgtccattttgtaaggaaatcgatagccacaactacgt

SEQ ID NO: 364258 - DNA, 240 bp, Cannabis indica
ttcccgtacccgtgttggtatcactgtatcgtactcaaaacaacaacactcactataccaatgcactctgtatcatatccatacaagtgttggtagtgcaaatcacaattcaagcatgcatatacaaacacatatacatacactcagataatcacattacatattatattcagttcttacctattttccgaattaaagtgtgttgcctgacctgaacaaaaatctcgtgctagatggatg

SEQ ID NO: 364259 - DNA, 817 bp, Cannabis indica
tcgaagtagagggccatatatattctctccttgttcttccaactggccaagaattgactttcatcccctcgaatcaaatctaatatgctctcgtcccactgatagttagcctggtcatcacccgcagcttcccaccgagcaataactcctgctgggaaaatacacggcattatgacacatctattcgggtaggactcgggataaaagtgttgccgcctcctcatcaaatggaatgccgcatccaaatgctaaaacatgaaaattaaatatgtcagagattaaataaaaaagagttagataaagtctttaaaagcaaaagcagtaaaaaagtcttaaaaacttacatcgttcccaagccaaaatttcggagtatgcagttcgaggaaccaagacgaatggtatcgaccggtgaagcactctctcgggtaattgttcccaatctggccgagtacccaattgtgaaaagtcttgagcagcttccgatcaaccactctaagtgggtccgcattcacgagtgtcgaagtagccctagccttcttcttcatttcagtgtactcagcgaaccacctaggccgccttctcttcctccggttctccatgacttctggagctgtctctaacacctgcacctcagaatcctgagtatccccgatgctggtgatattcgtcttctcaggtgtacagaacatgtcatcatcatccggttggtaatcatttgggagaatgaagtcatcttccggtgtccgagcctcctcttccggttgtggctgtggctgtggctgtggctgtgaatctgctgccggccttccaggatctt

SEQ ID NO: 364260 - DNA, 529 bp, Cannabis indica
aacataaaatgttatttctgatctttattaataagtaaatccgattatattgaaatgggttttatttagggcacaaaacccaacagtcgccaacactcttgaaagggatccccgaggtaacgtcgatcacttctatggatggtcacctaccgtccttagggtagaactaacttgccttattaaatttaaggatagtcaatataaattttatatctagaactgtgttgatcttattgtccatagatttgacaattagtaccccaaattttatgttcaaataacaagtatcagctcgtattatggtatcgctgatcaatataactcaaacgattattgagctaaaatccccttaacattatagatctttacatgattactggctctagagagttaattaatactcaaaccactttctcctcgtctaacatccttgagtgtaggtgagactccatcttcacaattatatatatatatacagtagaacctctattcaagaatactctattcaagaataacctctaatttgtta

SEQ ID NO: 364261 - DNA, 737 bp, Cannabis indica
tctcctttccctcgattcagtgaacatgcgcatttgctcttcgaatgggagatttaatacagctcggagttcctccagatcgtgatgtagggtgttgctatgacctggcatgactccaggagcagcactgaggttctagatttcggtgtcatctccaatagttgttcgaacattggttacttgcggaacgaaagtgttaggaatgccctggttggctgctgaactggtattcctagtctcttgcacaccaggtgcaatttcactcaggagtcgtcacactgtgacctacagttgatggttgtctgggattcgtggttggtggaacccttgtgttccctgggttctgcaatgcaggatccactatctgtgtatttgctggatcaaccacgcctctacgagtttataacacaattgtatttgcgactagatttgagataaagagcgatccttgatcctgctctcaatgaaagcacgaacatgtttacgtcgcttttggccaacgacagtgagtctaaattgtaagcgacaagtagtataatgtgtatataataaagtaaataaagacatgagaattttatagaggattagccccgagcagttcggtaatagcctaatcctcttagtttgtattgacttaagaacaaagaaactaatccttttcttagagctcttacaatagtgtctctgaatatgaattcttagataagtttttttgaccttttgcccagtgagtatga

SEQ ID NO: 364262 - DNA, 509 bp, Cannabis indica
gacaacaccacctatgcatatatagtgggtaaggcactgcgatctaagggcacaatggagtgcacctaggagtctcgagggactcaggttgatggtggggctcctactcctcctacctcaggctttagtaggggaggtagtggctcgaccattaatcagaaaagaaaggcccctattgcatacgatggctcaggtaagaacaagaggtttcgagggaatcagggttgaggcaatcgtcagggtagctccaaaacccgatacacttatgtagaatgccctaattgtaagaagcataatctgggagagcgtagacggcaagggtgcttccaatgtggtataccaggacactataaaagggattgccaccaacttatgaaagaagagctgaaggttgctgcgaaacccgctccagcaaggttatttgcgttaactcaagcagatgtagaagctagcccctcagttgtaatagatcagctctcggtcaataactcttacttctctgtgttatt

SEQ ID NO: 364263 - DNA, 755 bp, Cannabis indica
attggatttaataatatgatttttaactcttaccgtagttagattagatcaagaatgtcatttaattaatcattttgtattgaatagaaaagtcaagagctatacctttctcttcctctctctcgagctgcttagaaaaccagctagggtttgtgctttttctactcaattcaaggagtttccagaaagtctttagtgttcccatccaagttaagcatcatagttctcccctctctttgattttctaaggtttatgtcagtttatgcatgttagttgcgagtaggggttctgtgttgttgagtggtgtttgtttatgttttctaagttgaattaaggttaattgtgttgaattgggctaggtttatgggttgttgtgatgtttgagcaagatttgagtttaagaactcaagctttgttccaaccccttctcacatctgagaaatgggtatttctaggatctaatggcctgagttacatggtgatcccaaggggacaaagtgtcacttttaggatgcacgtcgcaggtgtaggaggtggtcttgcacctcatacctttgtcaagtgtcaggtggtccccagttgcaggagtgtgctccctggttacaggagtgtggttcctggttgcaggagtgtggtccctagttgcaggtgtgtggctgcagtgtaccctcagttgggtccttagaccttgcaggtatgttgcctctactactcgtacctccttacttttcgaatttgtagaaggtgtggttct

SEQ ID NO: 364264 - DNA, 800 bp, Cannabis indica
acttggaatggatttcttatccaagtactgagctagtattgattgtaatccgaagattgtaatcttccaagtagagggtgaggaactgtttgtctttgttggatcgatttgagggatctaggatcccagtgatttcagtaataacatccagggaattgttacaggatagatgtctaaggtttctgcccgtggtattggataccacacgacatgagttaattcggccagaagacatcaaggttgttcgagaattcttagatgtttttcttgaaaagcttctaggtttaccaccgtagagagaaatggattttattattgacttagaatatggagaagaaccggtatctaaggccccttacacaatggctctagcagaacttaaataatagaaaactcagcttcaagggttgcgtgacctagggttttcacgacctagtgtgtcaccctagggagctcccatgttatttgtaaagaagaaacatgggtctttgcgtatgtgccttgactatcgggaattgaataagttgatagtcaagatatgtatcctttacctaggatcgatgatctttccgataaacattagtggaagacggtcttttcaaagattgatctccgatcgggctatcatcatgtaaagaccgcttagctttaatttggaaattagcaaataattagggtttacttatgaaacttgtttattagttttgaattatttattaatgaagatttatctgaattaagaatgcattttatatgtcatgtatagaattttataactttgcatgttttgtgcccggcaa

SEQ ID NO: 364265 - DNA, 936 bp, Cannabis indica
aggaaagttcagctgaaagtgcaactttcctaacaaggaaaagggcaactaaaaaccgaatttataaggtaagaattcgaatatgaatgcacaacaatcttaccataaaaggaaaaattattttgtcaactaacttgacaacaaaagaactttacatgctagatgcctttttatgttctgaaaggcctcctcgcactcttttgtccactcaaactctttgttgctcgcaatatattggagaacggcacacacttattatagttgacttcaaaatgaatctattaagagcagccatttgtcctgtcagagcttgtactaggctttgtcggtgacagcatgtttattaatgctttgattttttcaggattttcttcaatacccctcacgttaactattaatcccaaaaaatttcctgaggaaactccaaaggaacattttttcgggtttagcttcatgttatacttctttaatatcttaaagcattctgcaaggtctgaggtatgatccttacttattattgattttaccaacatatcatcgatgtaaacttccatattctgccatattttgtttgcgaacatttcgtttaccaaatgttgatacgttgccccagcattctttagtccaaacgacacgactttataacaatagagtcccatattggttacgaagcgtgtatgttcttgatctaggacatacattttatctggttatatccagaatatgcatccgtaaatgacataagctcgtgcgcagcagttgcatcaactaactggtcgatcctggaaagtgggaaacagtcttttgggcacgccttattcagatcggagaagtcaatacaagttctccaagtttcgttgggcttcgagatgagaacaggataggctatccacgaggggtaaaatacctcgcgtataaagtcgttgactaacaact

SEQ ID NO: 364266 - DNA, 521 bp, Cannabis indica
atttgggagactttggaactttggctcaactcaaaatctgagtctgaatttcaaccatgggacgagaacgtttggacatcctcctcttcgaagtttcaccaagaaatttacgtttgcttggaactgatgaggtaaggcttggggatgttccttaaaactttttttacccattgaggatcgacacaagtttttctgaggcatttttgggggattttttacaactggataagaagactttgatagagtaataaccatggataataaacaagcaaagtatttatatgagaaaccaacaaataaatgaggaaaaatatagagagaaaattataataaaaacaacaacaacaacaaaaaactgtataaatttaatttaaataccattaaaaactgtccctaagagaataactggatgtgttttttttttaaaaaaaaaaaagaacacaagaagaagatgatgaatagttaaatgggatagtgggtataaaccacaaacgtggtgtgaaagagagagtaattgtatt

SEQ ID NO: 364267 - DNA, 646 bp, Cannabis indica
agttcataatgccttacatagggagatatatcagaaaaatgaaaaaaaaaaatgtggtttaagtttggtgatgagaatttcagatttagtttagctgagtttgttgttgtgtctggtatactgtgtgttggtgattctgatttgagtaagtatacacacagagaaaatgcttttgttgatcgatatttttgtgatcagtcagtgacggttagtgctgttgagcatatgtttatgtatagtaattttaagtcagatgagtatatatgctgtgaagatggttgttttgtaccttgttactaaatgtttgattagtagcgtttactccaaaaaagttcatgttgagattctaaacataattggggttgacgagtatggtagtttcccataggtataccagtgtttgagttaactttgcacaatttaaagattggactgagggatgttaaaaaggcaaaaggtgtttctaagcctcttgttaaggttaaaggaaaacatttggaaaacgttcctcgttcttataaactacctggtttaccttttgcattcttggtttggttgtatgaaaccattcctttgtgcttgaaggctcggttttgttcctatgattttggtaaaccatataggttttgtagatggaagagtattg

SEQ ID NO: 364268 - DNA, 571 bp, Cannabis indica
tcggcttagataatactaatttgatgacctctcaatatttataaaattcaaaaaatatttaataaattaaaatgaataaaaaaatatataatattattttattaccatttgaattaaatatttaactttaaattatgtgaacattaaaataaaattattaaatagtatattatatgaataaaaaatatataaataataaaatatataatattaaaatgaaactaaaaatatatagttaattagataagactaattttattaattagtccaaaaaataacatactaagaaaatatttatttgctataatacttttttacactacagcaaataataataattaaactaatgaaagtggcaaagaaaagcttatttatagtttagatatagaaaaccacaatattttttaaacaatgtgagattttttacaaagttagtagactttttttaatagacaaaacttgaagttctcacaaaatagtaaaaatactatgaaaaaaaatatgagatgccacatcatcacttttaaactctcctttatataaatactagaaaactaagccgcgcttcgcg

SEQ ID NO: 364269 - DNA, 634 bp, Cannabis indica
agtctagcatataatttacataaactaaggtcatggaagtaagaattaaaacaagtaaagtaaagtgagtataaaatgtaatttcctcgaattgttagtaccttcaaaaattaggttcattaaaaaaaaaactattgggtattaaagaaaaaatatattgaaccattttattttatttttttttggccctgtgcagtagtcgaccttacacaccattatggccggccatgacaggccgtatcgagtctatccttttaaatattggcacaaaatagcatgacctatattttttacgggctgagtacacacaactcatattattacaagcttctcaaaatatgaatcgggcactcaacacacttatttacaactaaccaatccattatcatggtgtatatatatgtcatcaaatagaatattactattaagtatggacaggggcggaggcaggacttgaatgtaaagggggccaaattttaaaatttagtataaaataaaatttttacatatcatttaaattaaaaatattaatatacttgtaattaaagcatacgttaaagttaaattttaaatttgattaatattttataaaataaaaatatatatataaaaaataattttatatttaacaaaa

SEQ ID NO: 364270 - DNA, 564 bp, Cannabis indica
aaataacagtataataaattattgaaatggctataaataatttccataattaatcataaacaactgataatttccaaattaactaagcgggctttacactttagtgatagagtaaatgcccacacagatcaagtggtaccctttagtgaagaatctagattcaagagaaggacattcgggctcagatcttggtaatactctgctacaaacaggatacaagggttagagatctgagtggaaggagacattattattccgctgcacccactttaaggtttctgaaactttatatgtgttatttacattgttttagagattcatatttcgggtgttaaataataataaaaaacaatctaaaacaagataaaacaactgatgatgacttagatgatttctaattatcaatgcatttcccattaatattttaatttgagctttatgagtcaagtgtttctaggacaatagaatttaggtttctagttctagaaacataattatcattaggctaattagtaatttttttcccccgaactttgacatgtactaaatcgtgccctcgatttt

SEQ ID NO: 364271 - DNA, 950 bp, Cannabis indica
ccaccagtgaagctaaataacttagttgtttcaaaaggcactagaaagttattcaaactgaagaaagtttttttaacattttttatctctattccgtttttggaaaagaattagagatgtgtcttctgtacattcagatacacttaataaactgtaaagaattcagtatccctagaagagtaatagatatagaaaaatgatattgcataatattttatgaacaggtaggaagtactggtggagaatgcagttgcttaccacagctttacagttccaattttatttgagtttagtcgaacaaactacacttgatatggatatcaagacaatggattgattaaaatgcacttcttattttatgttagtgcaagtggtagtttattgggattttatgccctaaataaaatttatttcattataatcttatttaatattaatagaagattagaagtcatttatgtttacatgtatttttcatgtttatggtttaatatacagtttttgttaaatccagaacatatagttattcacaattacagtaatatcaacacaatggaaggtaatagtgattatatacttcaatagtttatgtcccatgattcatcagtgcactagatttacactaatgtgatagtcagtgataaagtttacttacactttggataagtgttatgttcttttcaggacattggcaaagtatggtagtatcggatgtatggagtatacattagactgggaccggtattgatcttggtaaatatattataatcttatcgttgtatctttctaagtcaataccactagttgatcttagatcaaaagatcttaatcctgatatggttaggttcgatctcaagagtgttatttatgttcttagaattattacgttaaagcctaccaatttgtttgggtaacacatattacaattgagtgagagtgctaatcataga

SEQ ID NO: 364272 - DNA, 964 bp, Cannabis indica
ttttttactatttatatgagtttttcttatgccatatttttgtaaaaaaatatagaaattccatatttgcaaaataacaataagttttattggaaaagtcatcggtaccggaaaagtcactggaaaaatcaccgccactggaaaagtcatcagaaaagtcacagtgcctggaaaagtcaccgtcgccggtaaaatcactggaaaagtcaccagaattaaatgtctcagatataactaaaaatatatccggttctattatgttagagaatcgattatagttaaatataaataatataaaataactcaaatcagttataattaaaatagaactggttctataatagcgttataatgaataaaaataaataacacgaaataactcaaaccggttataactaaaatagaaccggttatatgacataattaatacaaacaagtaacacgcaataatttaaaccaattacaatcaaaaacaaagaagaaatcaattcctaaaacactaaaatataaattaaaaacataactagtttcacaataaaatacttcataacacataatacctcataaaactggttataatattttttttttttaaaaaatggggatcaaatatctcggatataataaaaatagaaacggttctataacataatgaataaaaataaataacagaaaataacgcaaaccggttataattaaaatgtaaccagttctgtaacataatgaataaaaataaaaaacacaaaataacttaaaccagttataattaaaatagaactggttctataacagttttataatgaataaaacccaataacatgaaataactcaaaaccagttataactaaaatagaactggttatatgacataatgaatataaacacgtaacacacaataattcaaaccgattacaattaaaaaataaaggagaaatcagttcctaaaacactgaaactataaatt

SEQ ID NO: 364273 - DNA, 674 bp, Cannabis indica
agtttctcgacttctagacttatttatctaaggaaaagttacaactattccagaaaagatgatggccaaaaaaagaattccttatgatcaacagtgagaggtctcagatatgctttagtatgcatcagactagacacatattgttgagtgggagtaatgagtagatatcagattaatccaggaaatgaacattggaagacaatcaagtaaatcgtaagttcaagaagagaaactatatgttagtcgataaggatggtgttttaatacttaagactacaccaaatcaagtttctagacttgctttggtgttagaaagtctactgatgagatggtgattactctgggggtggagtagtgattttgaaaaagtgtaaaaaccaatcttaagtctctaactctactagtgagactgaatatcaaagtagcaagaaagatacttatttaactatggaaaattctatacagtttttggcattgtaccaataatagattaactactagtaatacaacctgactaacacaaatatagttaccaaaaagtaaagaatccaatatccctataggagtagacatatagagaggaatttcataatatcaatgattttgtgactaaggatatgtaatggtggagaaaggttgtgttgaatacaacctgtcagattctattacagaga

SEQ ID NO: 364274 - DNA, 647 bp, Cannabis indica
acggtggtgagtggaaggaggtgagtagtggagatagtattaacttgttggtagtttattagtagggaaagtagtagtcgccacgtcatcatcgacggttggctggtggttggtgggaccgggaagtacaataaggcaggtgggtttgcggagatccggttggttgttcgtagtggtccacgtggtgtttatggtggggtgacgttgcttaggattattgttcatctaacctaattcactaatcttataggaaatttatgcagtaaaccttagaggatattctaggatcattttactatattgttcttaattatctgttttgatattgatgagagttttttagttttaatttttttttataattacaaatgttgtacatatttaagatatttgtaaattttttagattctaaatagtttataatttcgaaaataaaatttaaataatttcttactgcgagtataagataaatacatgtgtaacaaaatatgtaaatctttatttacaccattataaatattaacgtatattttcgttaattaatacataaacctttttataattaatatattcagaaattagtgaacaataataataataaaagtaacaagaagaattttaacatagttttgaaattaatttttcat

SEQ ID NO: 364275 - DNA, 519 bp, Cannabis indica
aaatcacgtaatacgcctaaggtagttagggtgttacaataatcgttgttggtacaactatcataatttattaaatctgacctaattgatttgtccaaattttaataagaaaaatgtcatattagtatattagagcccaacaaatattaaatctccttaagtaattactggtaggtttcgtgttttcaaatagtatcttaattaactcaaatcagggaatcccatgcatgtaagaatgtaggcagtttgatttgaagttacactgtgaaatcgctgacgtacgttatttaaagtataggaaatactccatttaacgtcagtgagtacactgtgggacgtacacagaaaattaaatattgataagacaacaattgatttttttggtgagtatctacaaattaaagaggaaatagtccatacttggttaagaagattacaatatttggacaatttttaaataattcccaacaacttaaaaactagtggtcctaaataggaaatagtttaaattgtattaaa

SEQ ID NO: 364276 - DNA, 549 bp, Cannabis indica
tgtgagatttactacttgattgcgtatgcttgcgtagtgtttataaattatagcaacaacttctcaattataatttacataaagttatcaattataaatcacaaaccaaacaaatgaatagattcactttagaaaaagtcattccatttcagatccattccaatcaactaatactaccctagttagttaattacaacttatacaacttaataacatgaactaaactaaaacaagaattatagtaatatataaattaatatgaattaattgtgagaaacctagttagttgttgagatttttgcccttcaataaaacccatttcaatacaatctaattcgttatcaatagaagattagaagtcatttatgtttacatgtagttttcatgtttatggtttaatgtgtacaaattttttaagtcctagaacatatagttattcacaatttacagtcttatcaacacagtggaaggtaattgagattatatgcgttcaaaagataatgtcccttgattcatcagtgcactagatttacactgatgtgatagtca

SEQ ID NO: 364277 - DNA, 696 bp, Cannabis indica
atctcttatttaattaatattacaattgtttttttaatttaaaaagagagaaaaatgaagaaaaaaaaaaaagaaaaaaaaaaaaaagaaaagaaagggagttaacatgtaaaagagactaaacataagcaataaaggtatttttgtaattaaagaactttttgaaaagtaaaattaaaaaacagattttaaaaaaaagtttaaaaaaccaaaacataaataaaaatagtaaaaaagataccaaatttgacatatagtgtaaaaatcccaaatcaaaatcaccattgatgagccaaacttaagtttaaaaactcaaagcttgctcatccaacaaactagctatcaaaaccttctcaaatcaccctataccatcataatatagctacaaaaaacataatccaacaacagcaacaagaacagcaagcaaaacaacattttatgcaaaactcaattttcttacaattcaagaaactaaaaagattgaagctaagaacttaccttggctcaagaacacaagaacctagctgcaacaagcttgacttgaggaagaaaaagacaaaccctagctgctctaagggttcgaaaaagagagagagagtttgagagtgaaaaatggtttttccttagttttgtaaaaaggaaataaattaatcattttctttctttttgataaattaattttcagccaacataaat

SEQ ID NO: 364278 - DNA, 594 bp, Cannabis indica
acctaatgaaaatcgaaaacacatcaaacataccaacattaaactataaaaaaactaataagaaactacagacaactgattgtacacactaaaacgaaaacaaaatacagaacctaaaacacaaacaaacactgtaaataaagaaaacaaaatcaaatttaaaaaccaaacccagaaaagaacaaaataaattgctcaaaaccaacaataaagacctaaaaaattaaacaagataaaacgaaattttcaaaaggaaaccctaaaattacacgaagcagaatgaacaaaaaaatgcaaaaatctgggaaaacactaaaatgttcaaaaggggagaaacgaaaatgaaactaaaaaccaacctctgttcgaacttcggcagatgcactagcttttttcccataaatttttgaaccatttgctcctccacattgagcttcgatttcttcgtagtatgtggcctcccacgcttggtcaaaggaggatcaaaatcagaatcctcctcttcaacgatcggacgtttaccctttgatttgttagccaaagatttcaagcccaatttttcgattttttttttctgaactggggaaggagatg

SEQ ID NO: 364279 - DNA, 626 bp, Cannabis indica
  modified_base (587)..(587): a, c, t, g, unknown or other
agtaccagcatatgccaaggtcatcaaggatttatgcaacacaaaaagaaaacaccatgtcaagaaaactgcgttcttgacagaacaagtaagtgcggtgattgaacaaaagataccgatcaaatacaaagatccaggttgtcctacaatcgcttgccaaattgggacacaaggatttggtcaagctctcctagacttaggcgcaagtgttaatctcatgccttattcaatttacttgcaactaggcttaggagaaatcaagcccacatctatggtgctacaattggctgacggttcaattaaaaagccacgaggaatagttgaagatgtcttgattaaagttggaaaattctattaccccgctgactttttgattttggacacttagtctgaggttaatactgagtcaaaaattcccatcattctcggtaggcctttccttgcaacagccaaagctctcattaactgtaggaatggtctcatgaaattatctttcgggaatatgactatggaggtcaatatttttcatgttgtgaaacaaccaccagaggaggtggaagattgctatcatactgatgtgatagacncaattgttgaggaggaagttcttttgcatgatgattctg

SEQ ID NO: 364280 - DNA, 519 bp, Cannabis indica
ggtcttctcaccccaggttcaggttgattttgagcatttatcccctgtgcggccctagccgggctgcatcacgctctaactcagtgtttcgactctgtgcctcttctagacgacgtctcaagcaacagttttctatttcataagctcattctcccacaaattgggcacctccacgattgagctcttcatccctcatcccagggttatgaccattcccatgctgagttctcctcgagcgtgttgtccgcgtactaggaccaatgttaggtcgaattctttgagaacgtgtggttcgtgcactggggccaccctaaggttgagccctcctggaacgggtggtccttctggattgcgggctggtagatcttctagagcacatgggctctttcctagaacgatgattggtttcctcatttgggttgttaacattttctggattttcagccatgaaggaggttgtttttcttcaaaagaagggaggttttttttctgagcattttcacagaggctctcaatgaa

SEQ ID NO: 364281 - DNA, 565 bp, Cannabis indica
gaaaatgaaaaatggaaaaatgaaaaagaaatggaaatgaaagaactttgcttttcccagcagagacgaaaatggaaatgaaagaactttgcaaaataaacaaaaaaataaaaataacaatgaaatgatatagtggagagggacgacggttgataggttgataggacttgattgatggatgtaacggttcacttttccattttttaataaatttaaatttcaaaaaagtaaccggtacccatttatttaaccctacatacccctacatcaacccctacatgaaccccaacctttggatcaaagtaactgcccatccaacggttacagtacatcacagattgcaatccgtgtccgtacagtaaccggacaaaatccggtccctataaattatataaataaatataattatagcataatatctatatatgaattatgttatcctaatttctgcacgatggtgacacgtgaaatcaactccgggtatctgctcgcaagatatagtccgaacaggatacctcgtatgcttgctcaagacgaagcaatcagtaacccgcacagaacgaca

SEQ ID NO: 364282 - DNA, 747 bp, Cannabis indica
atataaacatggaaagataagcataaaaggagatcagaaacttactcaagattcaagtgtctgggttcaagcaaagtcaatccaaccaacggttgtatgaaggcacttcagcgactatgaagatagaaaattttcttttcgctctggaggttacttagcagagaagagtgatgaaatgagtttatgtgccaatgttgtgggtatttataggcaagtctcgaaaaggggtaattgtctagaagaaacctcaaacgcctcggcttcccacctcaaaaacgaatatggaaaatcaaaagtaatcgagtgcaactgtcagccctggagagagaaaattggattttgaaatattaattgtcagagaatttattagctgaaaactgaagggatgtccagtcagcttcacatcgagtcttgaacggtcacgctcgacacgtgtccccattcaaaggcagaaccagctcggaagaagtctacacgcaacctcagaggtcccgtacaaacttgggggcaaatgttatcccaaattttgcactctaacgtggcatcatgagaatggtgacacgtggagtccacatggaacatgtactcgggaagataggccgagcaggatgcctcgctggcatgtccagaataagatattcagtgatccgtgcagaataatcaacacttagcgaattcagctttcgcatcatgagtcatcagctcaatccctataacccagggatcaatttacgtggatacgacata

SEQ ID NO: 364283 - DNA, 811 bp, Cannabis indica
aacccagacacggacttggacccagacgcgaatgcagtacccagaccgggattggagactcaaaccaagacctaggtccctgacctagattagggacccaaacgcgaaattagaaccagaatcaggacccaggaaagggactgggacctaagaccagaccttagtctcggtcccagactcggacccagacacggaccgggacccaagatcggaatcggacctgagcccaaacacgtacctagacctagaccaggactcagacccagacccacacccaaaccttaaatcgtaccctgtgacccaaaattggaaccggcactagaagcagacccttaaaccctaaaccctaaacctgataccctaaatcctaaactctttacacttacccctaaaccctaaaccctaaatccctaaacaataaacccaaaacccttaaccctataccctaactttgacacggggccagacccatacccataccgagatcagaacccaggacctagacttggacccgtatcgaaacccgaacctagacccaaacccaggacctgaactcggaccaaaacccagaccgaaacctcgtccgggacctagaccttgactgggacccgaatcgtgaccccaacccagaccccaacagggacgtggactaagactgggacccgaatctagactcaaacctgaacccgtattgggacctagactcggacccaaactcaggatccaaactcgaacctaaacttggacttagactgggacctaggatctagacctagatgggggacctgggccccaaaccaaaacctaaacc

SEQ ID NO: 364284 - DNA, 843 bp, Cannabis indica
aaacacagggtccaatctgtaacttttgcaaaacacagggtccaaaatgatatttaccctttaattaatagcaatcaactaaataatagtctgtaatccaatcgggatatctcccccattagagacacaaacaatattagaattagatggatgaactaaataattaattgcctaatttttagatcgtttcacagaaaaattaaaataaaatcaaatgaaaaagattacaacatcacaattaaccttaagaacacctatatttaatttcatccactgcctagaaaacacaacaatagaaactgttgcagtaagttcattcaacctcgaagcttaagcagtcaaactattgtgcaaggtacgtaattgcactactaataaccccttcagtctcggagaacttattattcataaccactaatagtgatttgatggcgagccatcaaagaataaagaaaaaccaacagtgaaacgaaataaaacaaaaccatgtcacacatacaagactaaaacactcaaaacaatgtcattaagacatgactagaacaataaaagctatatcacacagataagactaatcgcaatagtaaaaattagattacaatagcaaaacacaatcctaaccaaagaagaccggtgggcctaaccaaagaaaaaagacaacctccgatagtcatagatttaagaacaataaaccctaaattgcataatgttaaaaaaataatagggaaatttaaaaaaatatgcataaaatattaggatattttatgcctaaactaatacatttcaaaattgaaaatatatgaccactttatcaaaaacccaagaatacccctctcatagcaa

SEQ ID NO: 364285 - DNA, 463 bp, Cannabis indica
taaaaattcactcaaattccaatatttttgtaagttttcctataactatagggctgaggcaaaggggcagtaatggttgtgagcctgtggcaaggaccgaccttaagttaaatggactataagcaaagaaaaaattagatccttactataaagataaatagtatttttaaaattattaaaaaaaatatgtatattttttaaaagatattttttttatttagactcctcacatgaataaaactaaattgggtgactattcaatggttacatttttattgtaactatatggttacatttttctttaacctgtaatagcaggttactaataggtagattttccttttttagatttaattaattataattaactatttttcttaaaataattaattaaatagatattccttctttagaattatttaattataattaactattttcttaaaataattaattaaatatt

SEQ ID NO: 364286 - DNA, 589 bp, Cannabis indica
agacacaatcgatctaaaaaaaatgcctaaatcactttcctagtcatgcataatttattatttcgtatcaaatagcaagcaagcaagttctaaaattttctaaacaactttccacatttccaattagcatacataaaccaattcaattactggaaaattacctaatatgtttccatggtccttcaagtataaattgaaattagtcacaagtataacatcaccaagcacacagatttttcaaaataactaatttttcaaatcatgctatctacctaattttaaatttactcacattaagaaaatttactaacacaaaaaaaattaattttagatctaaaaaaaattaaaattttaaaatttaagttcaccccctcaagagataaaggacatgagaagggttccttatgcttcagcagttgggagtctaatgtatgcaatgctatgcactagacctgacatctgttatgcagtaggaattgggagcaggtatcagacaaatccaggacaggaacattggaatgttgttaagcatatcctgaaatacttgaaaagtacaaggctattcgtgttagtctacaagggtggtgct

SEQ ID NO: 364287 - DNA, 1014 bp, Cannabis indica
tggtaaaatattttcaacaataagggcataaggaaagttgaagatattgagaataattcctccaacaatcctactacttcaggctcagtttaaaaggatagagaaagtgattccacttcctcatattatctttcacaacggattgaaccagcaataagaacattccaaaaacaattaagcaatgattccaatgctttagtttttgaatcatgtgttttaaagaatgacaaatccatatggattcttgattctggatctacaaaccatgtctgttgttcattgcaattgcttgaaaactagaattatttaaaatcctgagacttgaaacttagggttggtaatggcgaaatggtatcggttagagctagaggaaaatccaaactcaagtttcagaacagaattttggatttagacaatgtcttattcattccaaatttcagtagaaacttgatttctgtttcatgcttacagttgcaacaatacaaattagattttttgagttctggttctatcatttctcaaaatgatattcaaatttgtgttgcatctatggaataggggctttatgttctaagaccagatgaaccatctgcacttaataatgaattgtttaaagtagctaaacctagaaaccacaaaaagcaaaagatcgataatgaagatgaaacatatctatggcacttacgtcttggtcatataggctatgatagacttcccaggttaaccaaaggtggtccattgaaaaatgtcaccttaggtgaattaatagtttgtgaatcttgcctagaaggtaaaatgacaaaacgttctttctctgcaaagggagaccgtgccaaggaaccactaggcatagtgcattcatatctttgtggaccactgaatgtcaaagctagaggtaattatgagtactttgtcactttcatcgatgattactctagatatggtcatatttaccttatgcataagaaatctgaaacctttgaaaagtttcagaaatttctagcattggctcaa

SEQ ID NO: 364288 - DNA, 533 bp, Cannabis indica
agcaaacacacaaaacaactcaaaatcaactactaatactgttattgcattagtatatataaattttcttcatatttgcaatatcttcttatcacattcagttatatttgtgttgttattgtattgcatgtacatttcacttttaattttaggaagatgaaaaaataacgtaaatgaaacttaaaaacaacgtacacgcaacatattttgtattgaaattttaacacatactcattattctttttatattttccagaaattcaatgcagtggttttcttctagattgtcaaaaatcataaaaaaatagtttaaatatatgtaaatcaaccaaacaacaacaaataattatcaaaataattacgaaaacacactaaaaacatcaattttttttaatttacctttgttttttttttttttgaaagaaaacccaaaacgtgtggggtatgaaaatccaaggagatctccctcaatcgttgatattcaatgattccactagatctcctccttgatttttgatcctttctcgtcggct

SEQ ID NO: 364289 - DNA, 586 bp, Cannabis indica
atatggagccatctcttatcgtactctgataactgttattgtacgaaaactctatcaacggtaggtacttactctaggagccttcgaaatccataacacaggctcgtaacatatctttcagtatatgaatcgtcctttcagattatccatccgtttgaggatggaaagctatactgaacttcagtttggtacccatagcccgtcgtaaactctgccaaaattttgaagtaaactttatatgtctatctgaaactatggattttggcacaccatgcagtcttacaatctctttaacgtacaaatttgcatactgatccactgagaaagttgttttaattggtagaaagtgagcagacttggtaaatcggtctaccactacccaaattgaattaaataaacccgtggttctaagtaatccaaccacaaagtccattgtgatatcttcccacttctactcaggtagggttaaaggctgcaacaaccctgtcggtctctaatgttcagcctttatctgctgataggttaagcatctcgatacgaattctaccacattcttcttcattccgctccaccagaagtaaggttt

SEQ ID NO: 364290 - DNA, 696 bp, Cannabis indica
caatgatattgatgtatacttagctcctcttattgatgatttaagtaaattgtggtatgacggtgttaatgcatatgatgcctataggaatgaagcattcaatcttagggccatgttattgtggacaatcaatgattttcctgctttcgggaatctttctggctacagtgtgaaaggttataatgcatgtcctatctgtgaagagaaaacatgctctcgctatttaacacattcgagaaaaatttgttatatgggacaccgaaagtttttgccacccgaacatgtatttcggacctggaaaaaggcatttgacggtaagcaagaatttgaaatgcctcccccacctttaagcggaagacaattggtagaaaaattgaataaaattcaattcaatcttggaaagcgaaagtcaaaatcgaagaaaagaaaaggaggtaagggtgtcacaaatgaacctcagggaccgtggaagaaaaaatcaatattttttgagcttgagtattgggagcatttggttttacgtcacaatttagatgtgatgcatattgagaaaaatgtctcagatagcttaattaataccttgtttaatattcctggtcggagtaaagatggaattaaatcccgtctagatttgaaagagatggggattagaggaaatttacatccagaaattattggtaaacgaacttttttacc

SEQ ID NO: 364291 - DNA, 522 bp, Cannabis indica
taaaaaattaagatactgctataacgcttataaagattattggtatgtatgtatgtatgatgacaaaaatgtaccgtcatcgtagtcccagctagcttgtttactaaaactagttgtgtaaatggttacaattctatgagggctagtatcagaaatcattctcctcgtcactctaacatcgttccaaattagtgaaggaagatttttgtcaggcacatatctctttgacacctttaaaatcatttttacacgtaaataaatatgcatactttttaataccgagttgtattaacattaaactattgttagaggagttcatgttgttagtgttctgagttgttactacctagtcactgttcttaagcacgaatatagtgagtgttagttagaattagttgtaggtggtaacttatgtgtataccttccttacattgtaatcagttctccatgtagaataagagtaatatatgactctcattataaagaaggtaaactaaaaaataatctcatgacaactataat

SEQ ID NO: 364292 - DNA, 588 bp, Cannabis indica
tttttacggaactcaattccaataaaaattgaaaaaatatgaattttggagattggttgtcatggttgtcgagaggggtgcatcaatcccacccggaactcggacaagccgaggtgatgcgcgcggatcctgtctgaagacacgtgcgttcagacaggctgcacccgcccagatgctgcaatccgcccagacgcaatgctgcaggcgccgaggtttctgggcgtccccctcctcatccgcgcgcgtccagcctcatttgtcagccttcgtaaggctgcgtttgtcatcctactcgcagcattcactcccaaacccgattgtctagggattttttccaattttcaaacactaaatttaaaataaaatattatttttaaatatatttgaaattaaatatcctttttaaattaataatatttatttttcaatagattatgattaattttgatattttgaggtttaaattttaaaatttattattttatttttttaaattatggtcagatttaaaaatttgttaatttgtttaatatttatatattatttaattataatattagatattttgatatttaacatattttaaat

SEQ ID NO: 364293 - DNA, 1014 bp, Cannabis indica
agcatataattcatttaacctaagttctattcttcatcacaaataaaattgtaacttgtcacaaacatttagaatccaaaactattaggtgaatagtaatcctaagatggcggtaggttaaagtaaaacataatttagtcaccatctaaacatgattaaaacaataatcataccattgacatagaaaaaatagaagcaatttcatatggtggaaattataaattaacattcaataatgaattaagaattcatgtttcgggttttcaaataacccttaactaaaagaaaactactctgaattagacattataatgaaaatcataatatttaataagagtagaaggagaagaaaagaactagaatgaagaacatttcgaagccgatctccattgcttccttgctctctctctcatttttcgctttagaattcataaattcgtagcctaagaggtcttatttatagtacttgaaaagatagatgaatccccttagaattaggattctatttatagtacttgaaaagatatatgaatctccttagacttaggactctatgtatagtattatgaaaatatctcactaacagaaaagataactcatactttaaaaaaaaaaaactaaaaaaattaagcaactctacttgaaaaactattctttttttttcagaaatttcttactgcgatgactaatagtattttggccataactctcacgatattactcggaattagacgattcaagatgttccagaaagataagaacaagatctaagactttcatgctgagctccaagtacagttatacctctaaggtcatcgaaatttgtaattaagttccgccttgtaaaatcaagctcaccgacttctactattttccaccaaaatatactaaaatccctccaaaagactctaaatgcatgaatagtctttaaaatagcctaacaaattaaaaatcacactaatcaataatttaaagaatcaatttagaatataatacataaattgatcatattta

SEQ ID NO: 364294 - DNA, 905 bp, Cannabis indica
gatcagaattgaggatagggagttgagtgctgacttgatagaattgggtttaggagatttcgatattatacttggaatggatttcttatccaagtactcggctaatattgactgaaaacggaagatggtgatcttccaacccaagggcgaagaaccatatgtatttgtgggatcgattcaaagatcccagattccagtgatctcagtataaacagctagaaatttgttacaagatagatgtataagatttctagcagtggcattggataccacacggcctgaaacagttaggccagaggataacagggtggttcgggaatttctagatgtttttcctgatgaacttctgggtttaccaccgtagagagaaatagatttcgttattagatctagcacctggagcagaaccggtttctaaggcaccttacataatggctctggtagaactcaaggaattgaagattcaacttcaggggatgcttgacctagggttttctcggcctagtgtgtccaccctggggagctcccatattgtttgttaagaagaaagatggaaccttacgcatgtgtatggagtaccgagaattaaataaaataactatctagaacaaatatcatttacctaggattgatgatctttttgatcagcttcagggaaagatggtcttctcaaagattgatctccgatctcgctatcattagttgagaatccaagaggaggacattccaaagattgtttttcgcactaggtattggcactatgaattcttggttatgtcctgtggactaaccaacgttgctgcagcttttatggatctgatgaatagggtattcaaggatttccttgatatctgtgtcattgtatttatcaatgacatccttgtgtactctcaatcggaagagga

SEQ ID NO: 364295 - DNA, 1025 bp, Cannabis indica
ttgttctgtattgttatatttgttctgtattgttatatttgttctgtttgttaatttaggcacttttaaaaattttgggaacgtctaattacaaccattatgctgctgaaattttggtagaattagaataaattttactaaaaaaacataaatgttaaaggaaaagtacataacataaataactagttaattactcgctagttgtaagatattaagtgacataacatatttatataaaattttcaattataaatgacgaacaaaacaaatgaatggaaaagtcaatgcaattctaccaacattccaatcaactaaacactatcctagttacttaattacaacttatacaacttaataacatgaaccaaactaaaacaagaattttagtaatatgtaaattaatatgaattaattgtgagaaacttagttagttacattgtgtaattagtaactagttataattagttactaaatactgaattttttttagttaggacatttgttatggataaatcatgaatacgtgaggagagagacacattgcgaattcaagtagggtttgatacgtttttagagtttgccttaaagaattctaaaaatctcgaacgtattcattgtccgtgtgtagattattgtaatggatctaaaagaaatattacaatgattaaggaccatgtgtatttacgaggtttcaatagaagttatactacttggtattggcatgacgaacatttagctgatgatccatatcaattaggaaagcgggaggtagatgatatcgagggtaatgatttcgatgataatccattagacttgcttaatgaaagcacatgaggaatttcttaatgatcctgaaaaattcgataattttctaagtgatgctgatatatagcccctgttcaatggttgtacaaaactaagattatccaaacacgtcatatctttctaagtcaatatcaatgcttgattttaggtctatggatcttaagcctgatatgattagtttcaacttagttgtattattt

SEQ ID NO: 364296 - DNA, 715 bp, Cannabis indica
acctcaacaactcatcctcatcttcatcaactgaagaattggccaactcttggtgaatatttgcatatctcaatgaatacttatttacaattacataagtagacccactaaacttcaatgttacactataaaagtctccgaaaatctcacaaatagacttgcattctcccaatcagtttcaatgggtggctcaacctttgatttcccatctttgtcaacctcatcaaagtacttcatataaaatgcatttgattctgccatcttttgaaatgcctttttaaatttgattgcatagttaagcataaaaaatgttgagttccaccttgttgggacatctaaacaaagaagaccattgcattcaatcttttcttgcaccactacttccttaaaagctttaagcctagcaggagaagacctaacatatctcaccgcatttctaattgcagcaatggactcatgtttttccttcaagccttcactaacaataagaacactatgtgtgcactatatctcactaagagctttccctccaaaataagtctattctctttctctttaaacatcatgtttaagtatctaatggcaacatcattagatgaagcattgtctaccgttatggtaaataacttagagatatcccattctcttaaacatatctcaatctatttaccaatagtttttcctttatgatcgatgacttgacaaaaattgataa

SEQ ID NO: 364297 - DNA, 729 bp, Cannabis indica
ccatttcttgccaactttcgctcaaatttcccagagagaaaaaagtctcagacccagaaaaacactattgaacactgtgcaattttttccagttcatcatcgttcactactatcagtccttcttatcttcgtttgattcacagcaggacccccagtctcaacacttcactgtaagtttcttgcaccccttgctttattgttaatatgcatggcatgctgttacttatctgcttgttttttctgggttttgtatttgaagtttctgggaatgcaaacttttagattcttcacgtaatcggtctaggttcaccattctggtgataggattactcttgtcacgcatttgttattattttttgtaaaagaccatacgttcttcgtatactggtcgtttagggcataggatagattgctttctttcgactttctgccctttctttttctctggtgcgcaatgtcgtcttctgtgaatttattgcacccgactcttgtccagggaatccttctagggtttcctgtttgacaggtgtccggagggggcctctttccagcggttaggggacccccattccctttttcttggtttagggtttggtatggggcctaactgctggaatcttaattctttttacagaatcgaaacatgtctgcttctggttcaaagtcatccaagaagagtggtaagcgtctggctaccctcgaagaggtctcgctgggtcccgttgccca

SEQ ID NO: 364298 - DNA, 265 bp, Cannabis indica
tttagaggaggttactcagcctcacactgatgttggcctcaagattgatcatggggctgagagtctcgacattgagtttgatctcgaggaggttcccccattgaacaagcttgatgagccctcaagacttggcttggatcacgtctcggatcaatattctgagcatgagattctagagatgagatcataaggaagcaggtggatttcccatgtatcttctgttgaaattattttaccagagaagaaagagagagagagagaggtg

SEQ ID NO: 364299 - DNA, 1446 bp, Cannabis indica
ataaatgatgatctaacggtaaacattagcttttagtggtgatgactatttttcggagcccgacgggtcccattacgggttacccagagcttattttcgtaactttcttggggtaaaatttgacgacaatagcttcataattaaaattaaagtgtaagacatgacttgatagagaattgaattatcttcgaaactcaagtttaattgcgtcaatcggattaatattaagtgagttatggttgtactaaacgtaaattatgacccaacgtccaggttgaaatctagcccccaggttgacatcccaacgcctaagttgacatacgatgtcaacctggatgcgaggtaagtgtaaaaacatccaagggatgtactttaacattcctaagttgtatttggacctcacttagtctatttctgtgttctggcgaagatggtcagagatattgctatttttgcgaaaatgtgagactcgaaactcttcatttttgagtgagccagaaatgagaaatgcaaagttgtgaaattgacttctctaaatttatatatcgttgctattgtgaaaaactagatggccaatcgaaacgacatcagaattggataagtagaacccaatgcaccaagccatttgttaaccttggcactgggtacttactcgcaagctcctaggattttgtttttgatacttccaaggcttttgaacttgaggatgaggtatcctaccccattttttaccattccatatttaatatttgcatcaattttggcattgagcaattgaaggtagcgttccaggttgattgtcaacctgggcgctgggcccaacaccaagtcaacctgggcgctgagccccatttcttggggctcgagtttgtggttttttttttcaagtttgcttgaatcttcatcattgtttagatggaaaaaatgcctagaacatattttgctgaacttgatcagaaataacccaagttgacaatatgtcagcttgagcactaggtcccagttttgccccttcgaaaattttgtttggtccccaaaaatagttgaatcttaatattttctgaaaacaaagaagatgttcggaagtgttcttaaaaactccattgaaaatggcccaatttgaaaacatgtcatccagggcgcaaggccagccccaggtgccaacctaggcgatgggacctgtttttggcacccaggaagtgttgtttgttctttgaaaggacctatttccctgtttttaatgaagaggaagaagatacaaaagttggatctccgatctgatacttaaagaaacccagattgacaaattttcaacctaggcgctcggtgctcgaggcccgtggtcctgggtgctcaaaaatgaacttgctccgattttgattctgatgcctcaaatatatctgtgttatgtctagttgatgtctcaatgcaagttttgacccattt

SEQ ID NO: 364300 - DNA, 373 bp, Cannabis indica
gaagaaaacgaaaaaaaaatgcaagtggtacggacagtatgcattgcatactgtccgcgcggcgtagcagggggtctggccgaggaagctcggtgctggaggctgcatgcagcctctccgcacgcgcaaggggtgatttctgtccgagggttgcccctcatccgcgcgcataggtgagttgcaccattccgatatttttctgattttcaaaaattcataactaactcaaataaaatcgaaattgagttctgtaaaagagtaaattgcttaatttctcccaaaatatccaataaaaataatttcagaaatggattttcaattagttttttcgaaaattcacaaacatcaaccaatcatcatacaacacacaaaa

SEQ ID NO: 364301 - DNA, 501 bp, Cannabis indica
tttccctaaattatatatacaaaaaaaaaatacagctaaaattaaattcatgtacctatatatattcatcaactttaaaaacaacttattcaaaatactaaatttaataagttgatcagtttctattaattaatacaattaataaaaataatatgtgtttttcttcattttttttaattataagttttagggtgattctacaatacaccccggatgtactgatgcaccctctacttatttcgacatccagaaaaaaaatttagtctaatattctttcatttttatatacgttatagttatttaagatatcatacaaaatttagagaaatttggaataatttacaatataaaaaataatgttcaaacagtttattttatacgcgtataaaataaaatagtcacgggtgcaatatactgtttgaacacaatttccggtgtgtttaacttttccgaatttcttaaaattttgcagtatgtcttaaattactataatttacatga

SEQ ID NO: 364302 - DNA, 601 bp, Cannabis indica
aatcacgtaatacgcctatgctagttagggtgttacatacacagtaacaacagaataacattcttttttggtagctacctaagcaatagtatgtaataatatgatagtagctggaagtgaacataactcatgtcactcaattgtgcaacaacttgacaacaacacaacaataacaactaaacaacttttatctgctccaaggaggggattagttttaaaagatattattttggttgatactaacactttgaaaacagaatcaaccgtaaaacaacaagaaaaaaaaaagcaaaccctttaagaagataaatattgaagaatctataattattaattgttcatcaattattttttttatgtttttatattgttgctaaatagttattaacagttaaaaaacttattaacaactattgtctttttctaaaaatataataaaagttatttctcactgtactaaaagttataaataaattaaaataaaattataatgttgaatatcttatgcaagatacatgtgaaattaaccagaaaaagttaacaaaaatataaaagcaacgtttcttaaaaatatgttgctcttcagcgcacaaactaaaat

SEQ ID NO: 364303 - DNA, 640 bp, Cannabis indica
gcatattaactctttgcagagaaggatctgtcaaaacccctatgaacaagatacaaatgccatagattctaaatcgtgattgtgtcttttgatgacttaggtttagttacatcaaagagttcttagaatagtccaagtggattcggtcacagaatactaaactcatattccatactttaacatacagtgtgaatccattgatagaaaatggttattaaacacttgtgaaagtgtaactgtattatattctggaaatagaaatataaaatctctatttggaatctaaaatttcaagtcaaagacttaaattcataccaaataacatgagtaattcactctttcttggacaaccactactaatctaactctaagtctaatttgcctaaagtaaacatatacaagtagaagattctaagattgaggatttacatcattttgggatagaatgtcgggaatataatcatgtgcgctattcaatttcttaagaggaaatagaatgaaattatatgatttataaaccattcatcaaatgatatattattagcgagagtaaagttatttttacttttataaacttcttgtttcatattgtaaatacttgtctaaggtgtcatctattgatgaacagctagatgttgca

SEQ ID NO: 364304 - DNA, 746 bp, Cannabis indica
cattagaaaataatcaatagaaacaatagaaaaaaaaatatatttattttagtatagtataaatattagatatgtctatttttatgtttacaattataataaacatatcaataatataaaatattttgtatgtatatatgcatttattttattttctattaattaaacatactaatttaataaacaaaataataatattcacatagatttattatatcactctatgtgtgtcatgtttattttttagtaattttttagaaaataaataatatatatataaaattgtttatctttttttttttgtttattgtgtcatgtttatattttctaattaaataatatttggagtgtataaagttatgtttgtttattaatattttgatgtaagaattttatttcaatacaaaattcgttcactaactcatgagaaaataatgaatgtatagaaacaatagaaagaaaatattaataaacaaaataataatatttccgccgggcggggagatccccatccccgggcggaataaaaataaataagcctgaaagcaggcggtatgcttggggaataagttggtatggcgcaaggctgacaaaaactaagaaattaacaaaataatcttgaagagaaagcatggccccggccatcaaatgcgtctggctccaggccccaaaaccgccgtagttatgattgggcgtctccgcgtcgcgaggtggccggtggtaggtccctgatgtggaaggcttga

SEQ ID NO: 364305 - DNA, 525 bp, Cannabis indica
acttaatgacacactgtgcttgttgtgattgtaggctcagaatgagtcttggatagttctgttagagaagaggttgtcatgagtttggaggatttttttggccatttatgatgaagaaaccacaactgtggtgatttggccgagcttcaaacttatgattgggccatgaatattagacaaccttgcaaatgatttatggggattgtgaccaagttcgaaaaggttgccaattatgggcaagggtcttggccctagtggaagttgttgttgagttttggtgcatagagacaataggttgaagatttgaaatgatagaaaaattgtgagcatgagataaaacaaatcactcaacatatcataagtgtagaactccatattgatatttctttccagctaataatttaactactctttttttatcaaaatggtgtacattactattggggaaatttcattgtttgcccctaataaaacccccaatatcaaaatttagaccctccactaatttgtacaaattaattccat

SEQ ID NO: 364306 - DNA, 715 bp, Cannabis indica
aatcacacataatttaaagatcaataggactttaggggttataatgtaaggctagggtgaaaggtagataaagaaggttaatttgggctcaaatcacaccataacatacatatacaacattctctcaaataattcctatttgtgttccccaatcactctcctcaacaattcaatcttgtatcttttttttttttctataaaacttactattcccccacacttaaattgttgcaagtattcattctaagggaataataataatttttttctcatcatcacatatacataaccatgaatattttctcatcaacaaaactctcacatctttacataaaacatcaatatactatggtgtgaaaaaggatgaataaagattttctttaggcttaaaggttattgtatagggttaaaaagaaaaaacaaagatgtcaacatttaggctcaaattgggtaaaactagggatttaacaaatagggtaggcttgaaaagctcaatcggtccaaaaaaaattgcctatatcatatctcaaaatcatgtgtaatttatgaatttcgcctcaaatgattatcaaacaagttctagagtagttgagacttcaaattaaaagaaaagtccaacatgcattcatctttccaaacattagcaaataagataattcaattgatgtgcaaaagttttttttaaaaaaaaaatcaagtttgagcagtaattaat

SEQ ID NO: 364307 - DNA, 529 bp, Cannabis indica
acataacctaatataaaactttgtaaatctagtatctattacatagaaattatttcacaaatacacaaaaacaacaaaaaattacaaaaatacgatttcacgaaattttaaatatttttacgattttttttattatatttaaagaaaatacggtctttttatgttgtactgttgctaatttgttgttgattttttgttatctgtatgttagttttttgttattttcatgttacttttgtatagttttttttgttgttttcgtgttgtctccatgaaaaactgtagaaatgtaaaaaaaattccataaacataaaaatgtaatatttttacaaaaaaacggcatccctattatataagtgaggaattttcttaaatatgggaattgagggtatggtttacttttttatggcataaataaataacactataggattatgaattttttaattttttgacatttatatgggttttttttatgccatatttttgtaaaaaaaaaatagaaatcccatatttgtaaaacaacaat

SEQ ID NO: 364308 - DNA, 508 bp, Cannabis indica
acccgaacctagaccgggacccaaacccacacaataatcggatgctggacccagaatcagggtagggaactaggaaacagaactaggaccaggacctagtagctgaccaacacctgaacttaaactcgtaccatatgacccaaaattgaaccaaaacaggaagttgacaaggactgcaaatattacttggactttgaatcataacggaaattggacctagatccaacaccgtaaccaaaccaggccccggactccaaatcagacctaggcccgaattgggagacgaaccgggatcccaacccaaacatggactcgggacccgaacccgaacctgaactaagacccaaacatggaaccagactagggacacaaaaccagggtcgggacctagaaaagcacctcggtctcgatccctgacccaaactctgaattgggcactgggacctgaaccagaaccaaaccgagacccgtgacagtgatccagatcttgactcgggattcgggtaac

SEQ ID NO: 364309 - DNA, 1021 bp, Cannabis indica
tttcactaaaatatgatctttgaatcaaaagacatcacaaaaataaaaatactccctgcgcgcgcgcaaaaggagtttggtgcgagggagaggctgtaatgcagccctcttggccaagtgagctcagcgtgagcatgccttcggataggacctttctaagacacctgggtcacgaggttgtttgaacctcaatcatgaccgaggtgtactcagcctccgggcgtgcacacaatgcaccaattttgggactcaaattcaaaaaatcataactaattcataaaaaattttaattgagttctataaaggcataaatttattaatttttcatctactttctaaaggaaaaactttcaaaatgaaactaaaaatagtttgcatcgtaaaattgtaatttccatacaatcattaaatatgcacataaaccaatatggacacatccaaatcaatacaatcattgttttaaattaatatttcatgaaagtaaatcattaccgtggctctgaggccagtttttggggattattttactaggatctagatttactaccgtgtatgttgtttaacatcctaaatatgaatttctaaaacaatagaatttaaacacatataaagttcaagaaaccttagcggaattaaatgatttcttccacttagatctccaatccttgttcctttctgtcgcagagaattatcaagatctgagctcgattctccttcaggtgttggattcttccacaatcttacacactatatgattgagtactaacatgctatttgtgggcatgtactcaatcactaagaggctcggaattaacactcaagagatttcgaaatagaagaagaagaaagaagaaggtctcaaaactctctagttgtctcacaatttgtaaaataggttatgagcattagttggataatgagaccatcctattctttttatactatttcactttgggttagatttaaattatttggcattaaaaagataaaaatgggcaaaatcaccttaagtggccggcca

SEQ ID NO: 364310 - DNA, 630 bp, Cannabis indica
ccagaccaccaccgcccagaccacccttcctccgcccagaccactgcctagaccaccacaaccgaactgtccaccaccaccaaaaccacatctacccaccacaaccatcaccgagacctctttttcagatccaaacaaaaccccaaatctcagatccaaacacatcaaagaaacctaaacacctaccaaaattcggatccttccataaaaacaaacaaatacaaattaaatccacaagaaaaaaaaacttcaaattagagagaaagaaaatcgcaagagtgagagagagagatagcttactgaaaatcacaagggttctgtcgatgtggggggctcgtgagatctgagatcctgaactccaggccgctcttggggacgacctctccgtccgattcgccaaactcaaagcctccttgtctcagtcgcatgctgcttccatctccggcactggtggcgttcgtcccaataaaaaattagagagccttggtgatgaagatgaagaggaggatgaagatgatgaggttgagaagttgattaggttgagaagttgatgaagttgatctggactgagagagaaagagagaggagatcgagggagagagtgatagagcgagagtgatagagagagag

SEQ ID NO: 364311 - DNA, 436 bp, Cannabis indica
ctttgtaagcgttttattttattatggatcaccctaatggtggcgactttaataatgctcacaaaagtatgaaactttagtattttcacttgtcattcctacttgctatgtgctaataatttctgaatgagattttgtgttaaaccttaattgatttctgtttattgttatttgtagtatccaatatgacaatgaccaatcccatgttgtcactgttgattgataatatgctgaatggataactttcccgaatggagaacattaacattgctctcattggtgaaaatgccttgtttattcttagacaaaatcacagtaccttgtcatagtgggagggtttcaaggaactcaccctctcatgacttgggagacgcttgtgatgaaaatccattattagtttaaacaaataatgcattgttagattaagaaactagga

SEQ ID NO: 364312 - DNA, 544 bp, Cannabis indica
ttacaaaaaaaaaaaattgtgataattcaaaccgcataaatcgcaaaaaccgcactgcaccgcatcattttttgcggtgcggtttttgcggttttttagtatcgcggtgcgggtgcggtttggaaaattggaaaaaccgcatgtgcgggttagtttgaaaaaatggttaaaaaccgcagcacccgcaccgcgaacacccctagtaattggatttatatataattgaagataattatataatttgatatgtttgtctcattatgtaatcacactgtaatcatgtaattggaggtaattgagatattccaattacactcttcaactttcatgccccacgtgagaattaaggtggcgtttggttggaggtaatgaaatggaatagaatggaaaggaaacaattttcattcgattcctttgtttggttgcattttaaagtattggaatgacattccaatggaatgctctttccaccattttggtggaatgactattccattttaaaaagaaaggaatgaccattccaatgtaacagaaaaaaattaat

SEQ ID NO: 364313 - DNA, 700 bp, Cannabis indica
ttatccaattggatcggatcggatcgaatgttggatgaggtatctaaaaatccaatacatctaactaattagtattttcatttagtttggataagtaattaaattttatattataattattatatgtatatataaaaattaatattaaaattttactcttttttgttggattagatggatccaatctaatccaacctaaaatattggatggatgtgatccaatccaaaaaatactatacctttaaaatgttgaataaatttaaattaaacaaatatatatatgaaatacatccaacggatagattcgatcaaatccaatattcaatggatatattaattggatcggatcagattgtaaaatctaacatccaattgaatatggtccaataaacacccttaataagcttgtaattttgctaatttttatattttaaattattcgaaatttactagaaatttgtatgagattcaaaattatatatcatcataaaaaaaaattaattgctcaataatttttctatatatattactaactatatacattcaaacattataagttgcaattaatgaaactagaaaaggaaaagtagtttcaaattaaaatagagaaaaggggaaagaattaatggcacatatatatatatatataattatactagtaaaaaaactacgtgcgaggcacgtatactaaatttatgct

SEQ ID NO: 364314 - DNA, 901 bp, Cannabis indica
aaaaacattaaccaccattgaaaatcgaggatgtcataaccctcatattttacaggcagttaaaaattagtatcaaataaaaaaagttgtttagtagttgttgtagagttgtaaacacgttgtatgcttttatttattttaaaaatatgttgttttcgtgttgtttttacgtaaaattttagttgttaaaattcaaaaatttcttaaattttaatatatataaatatatatatattgaaggtaaaaaatataaacaaacattaactattacaattaaactaatacttgatacataaactttagtaattctttgttataattgttaacatctatataaaaacatgaaaacaagagtatataaaatttaaagattctacaaattttaactactgaagttcaacatataaacaacatgaaaatagcgtgtttaaaaaagtaatgaaatcaaacaacgtgattacaactttacaacaactataaaacaacaaaaaatgttactacaaaatattagttttcgattgcatgtaaagcatgaggcttctgtcatacttgatttttaatactgagtagaactttttaatttgataatgtagttgtatgtgtgttgttgcatattaataatatagttgtatctgtcgtttgaaatatatagttattttgttggtgtactacaattttgcgagaaaaattaattaaatatacaacaaaaatacaactagaaaacaacactaattaaatatgtaaattaagtagacatcaaaatatattggtgacaaccttaaaaaaatataaatacaacacaaaaccaatcataatacatgtactcatgaaagaaaaaaaaaaaaaactaaacattttaattttttacttgtttgcacaactaataacaacacacaaataa

SEQ ID NO: 364315 - DNA, 577 bp, Cannabis indica
taacacatcggtacaggctagagtatgactagcagatggagtatgaccagtgtaccgagtataggctgttacttgtcaatagtaccgtcttatgaacgtttgggactcagtatcgtgtgggacacgtagttagggttatggtcaagggtatgggcgtctgatcataacccaggatttatgtatgtttatgatttatccttttcttactgagtttgtcgactcacagtgctatgtttatgtgtaggtaagggcaaggttaaggctgaaggaccgtgagagcgagccggtgaagattgtacatgtcggggcggttaggccttgagcgtacaatcctcgtgacaccaaggccttttgtaattagtcgctaggcgacaagtattttgtataaaccttgttgattagcaacgagctgcacagtacatttaaaaatcacgcaacaagctgtacagtacgtttaaaaatcacagtacgatttccatatcaatgtaagctatttgagagagagcaaggggtctattcttcctgtttctaataatctgaataccaagaacataagcagcttcactcaaatccttca

SEQ ID NO: 364316 - DNA, 728 bp, Cannabis indica
agctcgtcattgtgaggtagctctggcactctggaacaagttgtggaacagtagaatattagaaaggcataagatcatgtagtggtgcatcctctccaatgcgctccctattagatctgtgattgggaggcgattccatatcgaggatacctgttgccctttatgtggcttgggggaggagtccatggaacaccttttcttgtcttgcgatgtggcgatgcatttatggcgatcgtcaccatggggcatctatcctatctgcaatactgggattcgaatttgggattgggtcaaatttttatggaatcttaattctagggggatccgagtggaagaagttttcctgtatgcttcgattattgtcgaaacgatctgtatgttttgaaatgtatcgaccagggtaaaaattcttatgcagagcttcatgctactttcttaccttgccctacaccatctttgagggggacctggaggccgccacctcaggactggataaaattgaattgtgatgtaagggtgggatcagaaagtatgtgcttagcggtggtagctaggaaccatctaggttcggtggttcgaatacacacggatcgtttggacttcttggatgcattgtgtggagaagcaacggcttgttgtgcagcggtttcgttggctctagaggaaggttttaagtttgttttgatcgagagtgactcgagatttgttatcaatgctctcaatgggac

SEQ ID NO: 364317 - DNA, 516 bp, Cannabis indica
tgtttcacaacagttgcattacatttgtatagacattttgccaacagttatttcgtctgaatgaaatcttcgtctaatgcaacattcggccaaccacccagaaactttcgtctgatgcaaccttcgaccaactacccagcaaccactctgtaactatcgtctgattgaaaccttcttctgatgcaaccatcgcgcaaccacacaacaatcactatgcaaccatcgtctgattgtgtaagtgatagtgtaagtggtattttggtaattaaaatcacataaaaagtataaatgttgtccttaccttacgaatgtatttttgtaaataaaatataaatttatattttttatgtaataattcttaatattttattattaaatttaattattgcattaaattataaaactttttacattagttgattttaataccattttgtatagggaaatttgattttttatgcttacatttggttaaaaaaaaatttctaaacaaataataactaatatttgtaaaat

SEQ ID NO: 364318 - DNA, 727 bp, Cannabis indica
ccactgtgttgacaatactgtaattgtgaataaatatatgttttggatttaactgattttgtgcatatattaaatatatattaaaccataagcatgaaaaattcatgcaaacataaatcactttaaacttcttagattgataactaattagattgtaatgggttttatttggggcacaaaacccaacaacatatacattcattcgcatatctatatcacacattatatatatttcttaccttctttctaaattcaagtgtgctggccgacctgaacggaaagtcccgtgctgaatggatgccctaatcacatattgaaaccgggtaaatcacacaatcaaaaaccctaatccgggaaacccaaaaccacaaccctaggttctgttatactctctatggtttattccaactcaggaagtaggaaatcacccaactatggcacggaatggacgagaattgaagaaaatgagagactcggggaaccctgccaaaactggctaatcagttttacaggtacgtgtaaaatcggttacccggtttgcactggttcacccaagaaatctcatttcttgctcaaaactctaccaaacgtaaccaaaccatccagagtacctaattagggtatacacaatattttccaaccagtaattcacagaaaaacacactgtatcacaatatgccattaaagaccaaagcttgaagtttcaaagctcaagcttgctcaaatc

SEQ ID NO: 364319 - DNA, 577 bp, Cannabis indica
caattaactttaaaacacattaactttatacaataacaaaaaagaatatataataaataaaaaattatataaataaataattttatttataccgcgcacagagagagagaaagagaaagagggagatggaccagaggtagtggtggtccaacgtatgagacagagatgagagggacaccaacgggaggtggtggttgtccgacatatgcgacggagaggagagggagactgacgggaggaggggtgggtggagatcgatggatgagaagaaataggtgggcatgtggaaaataaaaaagaagtaggtggacatgtgggaaatgtggcgagaagtaggtaacgattttttattgggccctcatagccgacggtttaaaattgtcgcctatactgtaggcgatggtagtataggcgatagttttaaaccgttaggtataagggcccaataaatttacgaattccaattaaaaccgtcacctattcttgtaattactgttataaaccgtcaggaatactaatttttctcgacagctttaaacaattacttaatttttttagcaacggtccccccaaaaaa

SEQ ID NO: 364320 - DNA, 475 bp, Cannabis indica
aagcccgcgcccatgaagaaagacgtcagcaagagagacatgaccaagttttgtcggtttcatggagactacgaccacgacaccaatgaatgcaacaatctgaaacgggaaattgaattcttgataaggaaaaataacccgcatgtacagaagtatatcaaggccgaccagaatcaaaggaacgacaaaaccaagacttgctacctccaccggtagatggacatctgcgagtcatcattggaggtccgcacatagctggagaatcgagcaaagctcgagagaggtatgcccgaaaaacacaacacgagcaagaagaagtgatcctggccgtaaaagaaaggaagcctaaaatcccatgggtaggagggcctaccttagccttcaacgatgaagatgctgtcaaaatcaggtttccacacaacaacccattggttgtggaggtccacatagctaacaagtgttgggttttatgccc

SEQ ID NO: 364321 - DNA, 748 bp, Cannabis indica
gatgaacacctctgcagtactccaggatataatcttcccacacaaagtttctcctatgacccttgtgattcgtccatgagctggtgatcatgctggtaacgaatgtagagagaatgatacccttctgaggaaatgtcagtggatagttggcgcgtcgcctcctcagcatatggactgctacatctatatgctgcatataaaggttagagaaagcagttagacaacaaaatatattaattgtagattagttgtaaagtaaagtaaaattataaattagtttacgtacgtcatctgtaagcaattcctgtagtgtcaacagcttccaaaagaacgatggaccgtaatcaccacttttcaaatcccgaagcgggtggttgaaatgagtccagaacaccactttcggaaagtatccaacaatcgctcatctagtggctccaggggatcaaatatcgaagaaggtcgctatttcttcttcatctcagtgtagtcacggaaccatacaaggggatttctcttcctcttccgactcttaacccctgcaggttgtgcctctatcgccaaaatttcaccctgagactcactgtctggtatacagataacacatgcactgataggagtagctggagctccctcataaggatcatacccatcaggaaagacctcctcctcttgtagtgggggtaatgcagctggcagtggggtagatggatctgctagggcctctggtgctgaaactgtcgttggcgga

SEQ ID NO: 364322 - DNA, 565 bp, Cannabis indica
acatttagtcacaacaaattgtaatttttgtgactaatatttttagccacggactttttagtcacgacgtgaaaatgataatttatgattagtcacaacttttatacttttaatcacaagttttgttgtgactaaaagtaagatagtgagcgctaaatgtagctaattaagagacttttaggttttagtgcgtagctataattttttattattatttttaagataaatattttttacttataagtgtaaaataaataaatattatgtaatatattaaattttattatttgtgtattataaatatattatttaaaatgattttagagaaaaatatataaaaagaaatgtatatatgttgtaatgtaaatgtatgaagtaaaatagagaaaattaatttttgtgaagatagagcataaaaatgttgtttgagtactactttgctataacttttctattactaattttatgatatcttttgtagtttccttataagtgtaaatataatatgtaataatattttgttatttaaatgatataagaaaaaaaaatagaaaaattgagatat

SEQ ID NO: 364323 - DNA, 675 bp, Cannabis indica
aatatggactcatcagggcctatataaccgagcttccaataagtagatctaaaattttccaagtaaattctctaacatattaattcctcattgcaccactatagatttagaattgcactctcaattatatagagcgctctatatgttccacaatatagatacgctatgaattatccatttgttataatcctaataatcaatcatcctctatagatgatctacactgagtagagacaaatttatagttacacccttcaatgtattttatccttaaaatacttagctacctataaatgatatttcagtgaactaatataattactaaaatgagtactcaaccatttatctctattaagccaagctcgaaggaaatcattattttacttctatgtccatatagaagctatagatttcgtatctatgattagcgctcccacttaattgaactaccatgtccttaatctatatgtcacgagaagattcattggtcgactttaacgaacagattgaagaacacaaataatgcaactgaattagaacataaccatctcagaattgagatcatttaatctaagatcaactaggtgatattgaattgaataaatatttacagtaagtttattatatctgatccaagttcaatatcggtctcttttgatgcatactctatatatc

SEQ ID NO: 364324 - DNA, 565 bp, Cannabis indica
agtggagtggaaaaacaatccttagcccggggagcccttcaaattttggaggatgcattgagcggcatggagatgaggttaccacagagccgaaaggaattgacttaaactcttaatagcataagaaatatcaagtctagttatggttaagtaaatgagttttccaatcaaacttctataagtggtagaatcagaaagtagctcccctatgtccttgctgagctgtgtgtttggttccatcggggtggagacgagtttggcactaacctaacctgtatcatttaaaagttgtaaaatgaatggtctttgggagaccgaaataccattggtggatcgcccaacctctagtccaagaaagaacagcaaaggaccaagatctttgagtttaaatttggagtcaagctgtcttttaaataattcagcatcactagaattattgctaggaattaaaatgtcatcaacataaactaagacaacaagaaaaatattgttagaagatctaataaaaagagagtgatctgaagaggattgtttgaatcctccacttaccaaagtagaactaagt

SEQ ID NO: 364325 - DNA, 1166 bp, Cannabis indica
attataatattttttaaaaaaaagaaaacacttcaaacaatacgattattaaaatttttgaaaaaaaaatgtaaatattataattaaataggttaatggttaaaataattaaatcaagggatttatatataaataaaaaaaattatttaaaaattttaattgctaaaataggtctttgttaaatatttatttaattacttaaaaaatagttaattataattaattaattctaaaaatggaatttttacctattgttaacctgctattgcaggtcaaaaaaaaaatgtaaccatatggttacaataaaaatgtaaccattgaatagtcacccatcattatatatattaatatgatataaatatatatacatatatatatatttctttctctatattaacatgtaaaactttcctatctcaagaaaagaaatatgttaatacatatattactattatttaaattgtgaaatataaaatataccatcatgctcacctatgaatgactttcacataaaatttcttatccttgtattctcataaacttgatttatctccctcttctattgaaaaggaataaattttttattgttaaaaattttatatatcagtggaagataatcaagatatattacaattcaattgtaaaataatacaataactaaaatattgattacataaatgttacaacatgtacactatatgtatatatgaaaagtagaagagatgaatatattacacaatattatataacatatatataatatgaagaagaaaaagaagaccactcactcacaactttgagtgtagaatggtggagattaccatgacttgaaccaggtattacacatttgtccaaaaattaactccccctatatttctaaacactaagagaactctcatagaaataattttgtgaattatcaaatcttttagaattttctagcaaagtactttttcgataaaaaacttctttcatctcaatatgaacaccttagacctctttatatagtgtttaggatataccatttgaaagggaaatttgaaattctatgcttaaaataccatttaattttctccctaaatgcatagttattaaaattggtcttatatgacaactttcctaattttcctaaactacccccctctctctctctctttgtctctctg

SEQ ID NO: 364326 - DNA, 450 bp, Cannabis indica
aaaatggacaccattctagcaatttttattcaatcaaaataagaatacaatgttgtcctgttaggcgagagttaaggttattcttattttatgagcttttaccattgtttcatacttcataaatttatctctaagtagtcactgtagggaaaagtctaatagagacaaaaacttacaaaaaacttatcataagagattgttactgtgttaaatgcttcaacgaatagccatccattagggggacgaagtctagcgtcttgagattataataaaaacatttaaccatgtaggacaaacaatggagattgaatatccttataactaaagctcattattttaaagagttgtattttgttttgatacttattttaagatatatttatttaattaaaattactaatttagataactctaaatattaattttaatttaatatttataaaattatac

SEQ ID NO: 364327 - DNA, 605 bp, Cannabis indica
gcttggtgttgacaaaaccaatctaccggcgccgcctgggcctccgctgagtttgagggataatgtaggggttggcaatgctaatccacctgctaattggcagcaaatgtttcaagaaatgcaaggtattatactttttcaagaggaagaattgcatcggttgaggcaacctgcaccgatagctcttgtagatccaggggtaccaccagctcttgtgctagtggtgggtaaccaggggttcatgttgtctcacaaagattcagtgtttgagcacctcgtgaagctgcaacttccaacgtttttgggaggtactgatataatgaaagctgaggaatgaatgagtactattacccgcatccttgatattatgaggtgatgggaacagagagagtgaattgtgctacctttatgttacaagatcatgcccacgtctggtgggatattgtggggcagactcgagatgttaggacaatgacttgggatgagttcaagagtctgtttggggaaaaaaattctataacatagatgtgagggacgaatgccacaatcattcaggacttgaagattaccatgttgggttttgtgccctaaataaaacccattac

SEQ ID NO: 364328 - DNA, 582 bp, Cannabis indica
gatcaatggagtagaaggaatgggtatcgaacatgggggactggaaatcgaagtgggtttatgtctttaaagtccatgggattagaactgactttaatcgcagacctagtatgtcgcgtgcttttttaacttagacattttctgaattacttttaagatcttttgcttactcgctcctttttgctctcgcagatagaccagttcgaccggcacttgacgcgactcgcagagagacagcggaaatcctcgggagccttccggtacaagatcgcgactggcgattactgtgtacaactgcaaagttgcgagaacaccagctgattagcaactcttcaaagggagccagtatacaaagaaccatccaagaggcaacaagagcggatagacaagcatctctccaagcaaacttctcgaccaatctcaggtaatttatctcttgttataaactaatagatagagtttgacttatacttatctttcatttatcttcgcagacatgacttttttgaagtccgcacctgtcctgaagatcaagccgaagggtggagcaacgacgacctcgcccgttgtcgcccaaaagag

SEQ ID NO: 364329 - DNA, 497 bp, Cannabis indica
ttatgatttttatagcgtcaaaactggtttcacaggtcgaaactggtttcacatgttttaactgttaaccgacttaaataaaatcaaaaactgaaaatgaaaatgaactttacagaacacacttttgttacaaggagtttgttaagtcgtaactaacttaacaatttagcatttgcagccactgattttgggatcttgatccccacctataaataccaacacttatcatttgagaaggaaatcaacagatgagtttcgagaggtaattttgaaggaagagattgagaggtagagagagaggtacagagaaaagagagggactgggttcggatttcgtatgaagaatattttgtagatgaagaagaatcttgggtaagagtatgagagataaaaactttgagagaatcgatctcgagtgtattgtaccatgttcttactcaatcaataaaggagatttggtggtgttcttgcacaattttttctattttatatatcat

SEQ ID NO: 364330 - DNA, 742 bp, Cannabis indica
cctccagtagttgagagatcagtcgtgatccctacttgaagggcaatgagctggatactgtcgttcaaatttctaactctcgcagcagttatactgaaacgactcaagtaggcctttagtgtctcgcccaactgctgctttatatttgtaagagaagacacctcaggtcgcctgtcacttgctactgggaattgtttcttgaagtccttagacaacttttcccaagaggtgattgaatgatgtgtaaattttttgagccagctgcttgctgccccaactagtgaggtagggaataaaatacagcgtaaattattcatcacattgttggctcgcatgatagtattaaaattattcaagtgcgcgaccgaatctattgtcccatcgtctaacaagacgtgagggttcttgaatccttgggggtcagcactcataatatttggatggaaaggctcaagctcctcatctgagtcgtaactaggcagtttcccaaattcctcatcttggtgccttttgaacttgtcctccaactcgttaatttgcaatttgataggatcatcttcctttctttttgattgagttgttgacgacggttaggtttttttttggttcaattgattacgaagatccggctattgtgaatcatagttactcacggacctcgtccttgagcaaccttctattctacttgtgcccatactttctcgatcaatactgcgacgagttctatctcctccttgcgtag

SEQ ID NO: 364331 - DNA, 630 bp, Cannabis indica
ccatatgatggtccacccctaatatctttagaattgctatcaaagatgcaaaccttaattaatagttctagcttttcttaagttcatgatcaggtcatccataactctaggaattgggtgtactaagtttacaacaattctatcattctgaactcttttcaatcactatggtattttcctagaaggactcagacaactactagtaactaatcatagacctttcattttcatcaacatccaatctgagttcttgggaaggtatgttaggatatacttcgaagttcaacttaatgatcgttgaactacataaccaaatatttctctacgcatatcagttcgcaagatctttaaccacttaccttaatggtttttcaacatttctagaaattcatgaaactattttaacatttcaaatttcttttcataaggtaaaatctagagtgatcattttaagaatataacgataactcatatccatccctgaatgtacatccataagttctaatatagatgatcttactttcaagtggatataggtataatttctttttgcagagaatgatctcgtcaaaacaactatgatcaagatgcaaattgttgggttttatgccctaaataaaactctgtttc

SEQ ID NO: 364332 - DNA, 580 bp, Cannabis indica
aaagatagaatcctttagacacaaataggaaacaataaggtgaataagggtcaccttggaggactacccaactgaaacatatggcccatctctcttccactgcttgtaacaaataactgaaggttaagatactgtagattatggttacaagtttttgctttttggaattagaagctgtgaatccgaagagcagatactggaagcttagtgtggaactagaaaaccctgtgtaggaggtcttgttgaattcagaaggtacttccaaataaacttgtactgtgtatgaaatgtctctctaggaaggcttgtcattaaatcggaggtgtactctcggacagctctgtcagtcttgaaggttcacatggggatgaagttatgtatgtatctggaaggcttgtgtgttacaaagcttccagattattcgtactgaaagcacatttttcaagatgatgtagattattgttgctggtgttgagtttgatcatttatggcggtataaatgcaccatgatgatttaagagatatatttggcaacaatgaaaatctatatatagctgtatgttggatatttattttacca

SEQ ID NO: 364333 - DNA, 898 bp, Cannabis indica
aaaaatataatttacaacaaaaaattatagaaaaataatataaaaatatgatgcttgcctcctatacccaaatagatgaatgaatatattatcaaatattacataacaatagaatctctctaattttatagaagcatatatataggtatatataatagatattagattagtaattaagtaaatatgttataataataataataataataataataataataataatgggagttatataaaaaaataaaaagtcaccattgataataataatagactaaatatttaattaaatctttaaaaagagtagtaaatctaaaaaattgagagaagagagattggaaaaaagaatgacatataagctcccacatcaattccactaaaactctcatttatatatatatatatatatatttatatttatatatatttattttacatcatttacaccattgaattgtatgtactatattactaataagtcatttaaaacatttaatgaaaaaaaaattatagtactaccaattttattaagtactatttttgcaacgaattatttgacatcatgcactattttttttaaagaaaattgtgtgaaaatatattgaataataaaatggtacaaatatactaagagattgcatcacaattttattgatttcgcatagtagtgtactcaataataataattatcaaaataaatttcaaatacaatattatgcagaattgaagaataaataaattaatatttaataaaaaaatatatcatatttataattatgtaaatgagatttttttacatcacacttgataaggtcaaatttgtaaataaggtcaaatttctaaaaatagaatattttataaaaaaaatttaatatctgaccttagatttaaaaaaaaa

SEQ ID NO: 364334 - DNA, 574 bp, Cannabis indica
aaaatttcccaaccggaattcggttttggaaattcctgaaccccatccagaattccagttgcacatccggaatttcggttcgtcgcaggaaccactcaaaaattcataactacctcaaatcaaaaccaaatcaaaccaaaccttctagacctgttctaaataccccaaaggacaattctaaagcatcaaaaccgagcttcatgcatacaatcaaaaatgaccattaaagcattaagctttgagttcaaaactcaaacttgattaatcctcactaacaagcaaccaaaccagctcaaatcttcctaaacatgcatataataacttcataaaacaacagcaagcatcaacaaccactgcagcaacagatttcattatttcactttgagaagcatagtttttgaaccaaaattctaaattggtttcaaacaaacccaatatgcatcaaaatagttccattccactcaattaagcaagattaaacctctaaaaataacccataaacacagcaggaacaatgaaccaaaactaagcattcaacctatccattttcctcaaaaattcaagaaaacttaaa

SEQ ID NO: 364335 - DNA, 1123 bp, Cannabis indica
agttgaccgggactgaaactaggacttggacttggaaccataactgaaattggacctcgatccagaaccctaatcggaccaggacccggattccaaataagacctagaccaaaattgggagccggaccaggatccccacccaaacctagactcaggacccgaacccgaacctgaactcagacacaaaaatggaaccagactagggacatagacacaaggtcaggaccaagaactgcaacccaaactcgatcctgaacccaaactcagatatgggacctgagacctgaacaagaaccagaccgagacgcgtgacagtgatcaagatcttgactcaagattcgtgtaacgcggcttggaacagttgtcggtgtctagatctgggactcagacttggatcacaaaccagacgaagaaccaaacctgaacccagacctacacctgggacccaaaattagaacttgaacaagaattattgaacccggaccaagaccttgaccaagaaccgaatacacacctagcctgagacccaaactgagactagaactcgttcccggacacgaccgtgtacctagaccggaactgagacccggacctggacctaaacttgggacccgatccctaacacaaacttggacctagatagcgatccggataaaaaccttgactcggaccatgacccagactgggatcgaaatgcaggacctggatctggaccgagatcctgacccagacaaaaacttggacccgcactcaggatccgcacatggacctggagtcgaacctagaccccaatcggggtccagacctagacaaaaactcggacacaacctcggacccaaactcaaacccacagctagaatcagacccaaagctagacccagacccggacccaaactcgaaaccaaaaaaggatcagaaccaaggacttacacccaaaactgaatccaatctcaaatcaggattgaaagttgggactcggaccaaacatagaccaagacacaggacgcgaacccacaactggagcctgatcttgacatggactgatatctgaacccgaaccaaaactcagaccaggactcgaactccgacacgaactcaaacccaaactcgaactcaaaatcgc

SEQ ID NO: 364336 - DNA, 500 bp, Cannabis indica
tcgagggcgagtaagaatctagtttgggggaatttgttaggcaaaaattagtctatgttttgggtcatattttcggttagctttcactctttgtttctagttttagggctattttacgcatgattcttttgtttcaggtccttgggtgtttaaagaaagtatgtacaagaatttagtacgcgtggtgaaagaatctagaagaaaaaccaaatattgtgccgctgcctattccagtcgcaacgggaaacatgccagtcgcgacgggaactggcagaaagtttttcaagaattcgctacttaaccccgtcgcaacgggggcatttccagtccgacgggaaccccagtgacgggatttttgggaagtttcgtaatttcacgaattttaaagatgagacttggtttaaatagagggagttcatgaaaattaggtttcattcagatttggagccctagaaacaaaggaggaggctaaaagagcggcttgtggcgacccggatcaa

SEQ ID NO: 364337 - DNA, 455 bp, Cannabis indica
aatcaaagtttattgttaatctccttactaaaaaaaaaagtgtattgttaatctgttaaagataaattgagcgttaagtttagaaatttgaaatacaaataggaactacaatgatgacattaactttatatgattggaatataaaaataatgcattataaaaaaaattaattcataatctcacacctgtttttttatttatgtccaattcatactaaatattttttataaaaaatacacttttcttatattctgcaaagtaaaaaaaaaaaaaacttcacacatatatatagttatgaatacatatatatataaataattgaaaaattatttaatttatatttattattatgtgttttttaaaaaataattaatttcagatagatatttttatagaaaatttattaaaataatagtaaaatattaatttgtaaatttatgctttaataaaatatt

SEQ ID NO: 364338 - DNA, 612 bp, Cannabis indica
aacctctcaattagaatataatttacttggtcccaagtgtattattggatagaggttctactgtaattgtctcttgttttttttagtgaatcaaataagctataaattatcacgttgagtaaaattttaatggttatattgtgttttttttattttttttaagttgcgttggagggattttaatttctaaaaaatttctatattacagtatattcatattctagtatattactttaattatgtagtatagtgtttttatgtgtagtggtatatgaagaacgaaagacaaagatattcgagtatattactttaatagtgtgatgtattgtttttagagaaatttacatgatatactaacttttgttatttttttacaaatatactgtcaggcggtattttttacttttttactgtgtttttttataagtttcacactgcagtatactgtgttaagttttcactggtgttctactggtattttactagtgttctactgttgttttaagttgttttgctttgtgttttactagtgttttataaaaacataatatttttgaaaagatttctgtgtggcagtatttttgtaaaagttaacccgaattccagtatttt

SEQ ID NO: 364339 - DNA, 690 bp, Cannabis indica
accataccatgtcatgaactcatttggctccgggttcgagtttggttcgggtctaggacctgagtatgtgaacaaaaatataaaatataatatgtcagacaaaaaaaatatttttaaaaattgaaaaacaacattttgatgttttctgttttctagttttttaaaattcaattttttttaaaaaaatattttaaaatttttttaccaaacgattcatattagtttttaaaaactgtatttattttttaaaactgaaaacagtttttaagttatgaagccaaatagcggtttagtgtccaagcttcagcatgtagtctttgagccaattgggtttcatgcgagtcctcttacgtgtgtcctccttgctcttggtctcgacttgctggtttcggtccaacagttggtatattctctttcatttggtcttaggcctttgagtaggcttctcatttttattgggaaatttacacagtttactgtgttttcccattttctttcttttatactgttacactccaaaaataacttttgtactttgtttttttttttttttttttttttttttttcggctgttcccaactttttttttttttttttttttttttttgtaatctaacaatatagatatgaagcttttttactatttaatctacatattgtatactgaattagtatgaagcttttccctt

SEQ ID NO: 364340 - DNA, 598 bp, Cannabis indica
aagaattacacttgaagatacaaggagataaatggtttaaaccacaagcatgttacacattaccattggttgatcgaagaaaattttgtaagtggttagcgtcagtcaaattttcggatgggtatgctgcaaatatatcaaggaatataaatataagtgaaggtaagactactggcttaaaaagtcatgattgccatgtattgttgcaaagattgtgaacagttggcttgcgactgtatgtcaaaaaagatgttatacttgctatttctgagctctcattattttttcaaaaattatgtgcaaaaatattatatgttgaagacttggattcactagagaaaggaattgtgaagtgcttatgcaagcttgaatccatttttccccagccttttttgatgttatgatccatttagcagtgcacttacctttagaggcaaagttgggtggtccggtgcatacacgatggatgtatcttattgaaaggtaatatgttaatgaacgtgcatctcattttaaaaatttacaactatttttctaataatgaattttaatttttaggttcttaggttctctaaaaaatttagttaagaatagagca

SEQ ID NO: 364341 - DNA, 350 bp, Cannabis indica
  modified_base (284)..(284): a, c, t, g, unknown or other
atcctttgatcagcccaaaaccaaaactcctcttgctaagccttcgctatagcaactgaagagcatcctgccaccacaaacttaatgtttttgcccaattcaaaacttcttcacttccacagcctttttcacttaattctctacacaaagaaaagacacaatctcaatttcaccatgacaattatttatagctaattataatatatattcttcttctctttttttatattttttctcttttgcctttctttctttctttttttttctaatggtgccttcattgngaattttttcttttcattcttttcatcatttttttttctaattctaatttttctttcttttttttt

SEQ ID NO: 364342 - DNA, 649 bp, Cannabis indica
tggatttctgttgctgccactttttctgattctaaaatttcaaatgaaactgtttggcactatagattgggccatccatcttgtgtaaaaactcatccattgaataaagctttgaaatttcatgttgattctaattccttgtttcattgctctatttgtcattatgccaaacaaaggaaacttcctttcatttcaaatcataacattgctgaaaagtgctttgatcttattcatgttgacatttggggtccctataatacttgtaccattgaagggtataagtactttattaccattgttgatgattgttccagatatacatggatcaagctcatcaaacaaaaatctgatgctcagcatgctataccccaatttattacccttgttcaaaatcaatttggtaagacaatcaagggtatgaggtctgataatgcaaaagagttacagttcaaagacttgttcaatgaacttgggattatgcactatcactcttgtgtcactacaagaattttagttattagcagcggaagaattagcagcggagcaaatccgccgctactaataggactaataccggcggacttctgctattaaatgttattaattttttttttgtattaaaatgtattagcggcggacccatgtacta

SEQ ID NO: 364343 - DNA, 655 bp, Cannabis indica
gcaataatatgctgaaaaaaacagtaactagttactagttaccattttttcagctttggccaattcttttccaaagtgttccaaatcattcccacttgattttgaaccatttatacaccttataaatgaataaatcaagtctccaacaactatatttttaatagctatcattcattcacattcataaataattagtaacatcttttactaatttaagagtgaaaaagagatgagagttacatattcaagtgatcatcaatttaaaggatttgcaactcctattttgtgatcattctacatacattttgtaattccataatgtatgttacaatttgaaaaaattaatactttgtcacacttaattatttacaacttaattatttaatctaaatattatattatataaaataatatgacagtcaccacttccaccaagtgaccttgtcaccgcctcggccaagtgacattgtcaccgcctctgccaagtgacataccaacgcccctattactaacggctgaaagtcctcactaaaaatgccattatcaataacgacactacaatgtcattggtacttttattttttttcaaaattacaatcatcaacgacaaaactaatcccaacgatgccattatcaataacgacactacaatgtc

SEQ ID NO: 364344 - DNA, 1258 bp, Cannabis indica
caatcacattacattacatacaccattctctactcatctacttttaaaaataaatctaataaaaaaattgtaaatagtactcttattcagttctattagaaggcaaatgatcttgatcaaggtcaactctaggtgtctcatatttgatagtaatagtttcatattgatcatcaccatctttcttcacacactcactaaaacaagcaagatttccaagctcctcaacttcatttatgacaatgtcaagcttggccacagcctcaaccaacaatgaaacaaaagcagctaagggaagtgcttctgagaactctagacttgttatggtgattttgcttatttgcttattcaacttcttcttctgatcagtaccatcagttaactcctttgatatttgagatttctcccttcttggaaatgtcaagaccccagaaaagaatttctgtggcgtttgttgtgcttgttcttgctgttgctgttgctgctgttgttgctgtggctgttgctgctgctgctgttgttgttgttgttgttgttgttgctgttgttgttgttgttgttgttgtagctcatcatttggcttgtcaatgttggttgagccgaaactcggttgggtggtgatggctgtgttcaggcttgtaaggctttgttgaggttgtcagtgagtctctcgaacgagcaatgggagcggtttcttatgctgttggctagttctttaagtatttttgagacttctccagataattgaatgcaggggtcctttagtagaactcgaattggtcttggggtctgaaaaaccagattgtattttaatattgttagtattattatgtgattaggattaggaaggaaggaagatcatgctaggaattacaagatgaagaaaaggtttattaggatttgtctcccgaattttaacatgttctaaattgtgttcttccaaaattttcagacagttaaaaattttctataaagtattgagattgttagatttaataacttttgttcaattttatttacgggtgcctaacatagactgaagtttggggtatttaggtgtacaatttggtacatagacaatcactgcattaggcacccgttagtaaaattgaacagaattggacaaaaattcttgaatctaacaatttcaacagtttaggagaattttgaacggtttgaaaaattcaagaagcacgatttgatacatgtcaaagtttaagaaataaaatcccaattaaaaaaaaaaaaagacaaaagacaa

SEQ ID NO: 364345 - DNA, 639 bp, Cannabis indica
aaaatttagacaaaacaacttaaattatgcaagagaatgacacccaatctaaatgaataatttaaacaaatctacaaaataaatagataaagtagaagattgattagcataccaaaaaaataaaatactacaaaattttatattataatattgtccaataatttatgattaaaaatttattagagtaaaataatgtcatccttattattgtaagagctagagctccccatctattcttataaagggagatagagtgcccaacatgcactacacaaaagatgagagacatgtgaaaataattttggtcttacctttcactaaatggcatgtgaactcaatcattgaatgcaaagatggggtcttctaaaagtaagagttgacacttcattctaaatgactctaaacttgataagtcattttcttaagactcattgatgatttctaaggtggtgtaggtattgatcttattcgagttataatctattgttgtagggtatgtatatcgctactagtggcagatctaagatttaattttattggtgaacttaattgtacatataatataatccaaaacaagtgacaaaaatactgtgtaaattttacactgtgtattgtgttaagtttttactattgtttcac

SEQ ID NO: 364346 - DNA, 466 bp, Cannabis indica
gaagaacctttttttgtttttgttggatcggttcagggatctcagatccgagtaatttcagtattaacagccagggagttgttacgagaagagtgtctagggtttctggtcgtggtattggataccacacgacctaaatcaatttagccaaaggacatcaaggtggttcgggaattcctagatgtttttcctgataaacttccgagtttaccaccataaagagaaattgattttgttattgatttggcacttggagcaaaaccgatttctaaggccccttatagaatggctctagcagaacttaaagaattgaaaattcagcttcaggggttgcttgacatagggttttcacggcctagtgtgtcaccctggggagcccctatactgtttgtcaagaagaaagatggatctttgaatatgtgtatagtgttggattttatgccctatataaaactccatttcaatg

SEQ ID NO: 364347 - DNA, 979 bp, Cannabis indica
acgtcagcatgcccccgggagtactcgtccatggcgtagttgtgtttggctatccggagttcctgcctcgcctcatctccaggaaccggagtcagcactatgttgggaggcactgtgtattcctccgcctcgggagagatcccggaatcagggccaggggccggagtatcagctctccgctgccgtttgggcacctcctcggcaaccatcttgcccttgcgcttgcgaatcagagcaacttcttgctcttcttcaccttcttcaacttcctcaggaagagcccattgctcttcttgaccttctttagcttcctcaggaagcgcctcctcctcatccactaagtcaatagtgtctggaggggcactggaagaagctttcaagggagtagccacctgggaggaagttaaaggaaggggagcgttaggagtgtgagctccggcaagttcggccaaaatggcatccatggaattaccagctacaacaaaagaaaagagacaagtgttagaatatccatggaaacagtaaacactcgaataaagcaatcaagctagtcctaccctgactctctaattcggccctagcaaagttccgaatcttaacgttggctgcatcatccccgagatagctatttgaaggccagaaccaactggaagaaatgtaggccgaagggtccaagggaacgggttccggaggaccagaacccattcgggaccgacctaggaaatctcctaagttggaaaaataataatccttcatatggtctccccaccgggtcaagggcatcctaaacctatggagacgctcatcgaaccctacaggcctaaggctggcatattcgctaacggaaggaacgtaatgtactgctaaaggagacttaccggagccggaagtactggcatcaggagccccagtgttcggcacctgaaccgaaggctttggcctgggagccctcctctcagccgggctcccaatgcgaagg

SEQ ID NO: 364348 - DNA, 517 bp, Cannabis indica
gtggagactcgaaacacacgtcatcccgtcctcttcaagatgctcaagacccaaacgatgaggacgtggcctcaagagcgaatgtgggctctgaggaagaagaaggaacccacgatgacgagtatgaaggaaacttcaacgagtacgacgcctatgacgaaggcagctacacagagttggtactcttgagacaaaaggctgccgatcacgaggttgaaatcgcagcccaaaaagaacaaaaccgaaagatgcaagaggtgatgctggccatgagaaaagcgatggaggcagcaggaatccatgtgcatcctaaagccatccctgtaggacttggagagaaactagaagaatcctctccaagtacccaaaagtagaagtctagggaacctagccccataaggtatccctccgaagggaacccaaagaaaaagcctacttccactcctgggaaaaagaaaaaggtgcaggatccgcgaaaggaccgctcagatttctcgaaagggaaaggttcgcagag

SEQ ID NO: 364349 - DNA, 408 bp, Cannabis indica
ttttcccatcgggatcaacgtatccccattaaagccttgtagttgaatcagacatggtagcatattggcgtctacccgaccaatggcactcatggctcctttgaaaatgatgttcacagagcttccattatcttcgaggatcttggaaactcttttgtttgctattcgagcttctattatggaagggtaattatgagggaagtggacatgcctggcgtcatcttctatgaaagtcattggcaaattcattatccttggacgctagttaggtgattccaccaagtgggaatcttcacctttattcaactcattcagataccacttctgtgcattcctagtgcttccaacaatatgaggtccacttgaaatagtggctacatgaccaggtgatgttggaaatttatttta

SEQ ID NO: 364350 - DNA, 798 bp, Cannabis indica
acctccaattacacacaaatccaattacattgtgacttttcaaacgcacccttaatgtagtctatagtgtcacactaataatagtgggacattatagacaatattataaatatgataggttttagagtgtgattagaatgaatttagtgtaaaatttcaccaaatttgaaattttagtgttccattagagttgacctaaggatgtaaaataaaatttattgaaataggacccaatttacaaatttttgggttgaaaataaaacttttaaaaacaattcataaacatcacacatgtaaaaatattaagtagtgttaagcaagaaaaaaatattaggctaattaggatttttgtcttttgaattttgacatgtaccaaattatgccatttgaacatttttttccgttgaaaattccccttgaactattgagattgttaaatttaaatatatttgtccaattttattcaattttactaattcagtgattgtctatgtaatatagggctgttcaaaaaaattaacaaatcaccaaacccgaataaactgcccaaactaagctgaataaaccgacaaaaaatacaacacgaataactttacaaaaaattcaaaccgcctaatgaatatattgggtgggttgaatattattctaacccgcccaaataacctaaataaaccgaataaactcatttgcatatttttttactaaaattatttataacataatgttataaaataatatagaataatataaaataagtaagaagaagaagaagatgaagagagaaagagaaagtgaatg

SEQ ID NO: 364351 - DNA, 816 bp, Cannabis indica
gtttggatgagtaattagattttatattgttatacgtcaaatttatatgtatatatgaaaatttaacattaagttttactcgtttttttcttggattggatggatccagtctgatccaatacatactggatctaaaatattggatggatccaatccgatcaaaaatataggttaaatattggataaacccaaattaaataaataaatatatatgaaatacatccaatggatagaaccgatccaatccaacatccaatggatgttggatcgattggatgatgaaattaattggatcggatcggatggtaaaatctaacatccaatatatgattggatcggatctggataggacctaaaaacattggatgtgatccaatgaacacccttaattatttcataataatcgactcctgaaggtcgtatggcatcatttattgtataataaccgacgacataaggtcctatggtgtcggtgattttatgataaccgacgccataaggtccctccctatgtcgtcggttatttcataataactgacactataagattcttatgtgttgcttgttttttactccctaccgtcgctatctacttcttacataatcacctgaaataatgtcggtagaaaattttttcataactaatgttgaaagcctttaaaaaccgtctctcaattttatagtagtgtaattagatatgtatttatttttgtgatacacatcatggccgagtgaaattattattaattacttcatcaactataaaaaattatatatgaatctagctactatcaaggaaaatccatcgattgaaag

SEQ ID NO: 364352 - DNA, 803 bp, Cannabis indica
agaagagtatagcaaggcagtacagtcaaatcgatggcaatttaagacttgggaaaatttgctgcaaccaaaaagttgggatagagcaatggacagaacatcttgcaggccacattaaatgataaattcaaactcaaaaatggcaaaatggaataagggcctgttgtcgacagatttagggaggttcccatacgccccaaatcttttgtaaggtacagaaatcagggtataatttaatgggcaaaccaacaaatatttatattgttctatcaaaaccattttttctgagatgatttgacaatgaatagggataaatgtagaagaagatcagtacctgtaagaggttcattaatcacggtacgattcaaatgaaatgggagaaggccggagttaatggtgacgcgactggagtggttgggcacctgcagaggggaacggcttgctcggcttggtcgagtcgagctgcgttgtgtctcagcagaggaggagtcagcagaggaggagccaccatgatcaagcgatctggagctgggcatgggtttcaccttgtggaaacgttcagaagatctgtgtgaacatgcaggggaagaggatgaaactgtgttcatactgagaagtcgagagagagagagtctggaaagagagagattagaagaaagaaactcaaagattgaaaaaagatgtttaataataactaatattttccctaaaaaaaagattgaaaaaagatatatattttcaattaattatcaaattatatataaaaaaaatatatacattaataatatagtgaccttatttac

SEQ ID NO: 364353 - DNA, 404 bp, Cannabis indica
tttgatatttttttaaacagtagtttttttttcttaatcaatattttggactccgacaagacctgaacctaaatcctctctcacggctcttgtgatgaacccgatctctgacccgaatccgaattcgaccccggaccttgacccgacttaaataaaatcaaaaaaatgaaaataaaaatgaactttacagaacacacttttgttttctgtttttaaaattgaaaaataaaagtggttacagaatgcatttttatttttcaaaaacaaaatttttaaaaacaaaattttactttcattttgtgattaaaaattagaaaacaaaagtgttaccaaaccctaaaccctaaaacccgaaccccgaaaccctaaaccctaaaacctacgaaccccgaaaccctaaaccc

SEQ ID NO: 364354 - DNA, 717 bp, Cannabis indica
aagttttgtcggttccacggagactacgaccacgacactaatgaatgctacaacttgaagcgggaaattgaattcctaataaggaaaaacaatctcaactgcaaaagtatgttaagaccaaccaaggtaagaggaacgacaacaaccaagatttgctacctccaccagtagatggacctctaccagtcattgttggaggccctcacattgctggagattcgggcaaagctcgggagaggtatgcttgaataatgcagcatgagcaagaagaagtcatcctggccgtggaagaaaggaggcccaaagttcgacgagcaggagagttgaccataaccttcaacgatgaacacgctgtcaaaattagatttctgcacaacgacccgctagtcgtggaagtccagatagcaaataaaatggtggccagatgaaccatgatcaataatggagcctcttccaacattttgttcaagactgcttacgaaaagatgggactccaactcaaggatctagccccatgtcctccagcctgtcaatggtttctccggtcaaggagttgcacctctaggacaaattcgtctaccactcactgttggataagctctcacgagcatgactatcatggcacagttcctaatattaaatgttcctttagcttttaaagtaatgcttggtcggccggccttgtatgacttaaaggctgtcacatcaatatttcac

SEQ ID NO: 364355 - DNA, 850 bp, Cannabis indica
ataaacaaaactgaaattttcctcgcaagaaatgcatgcagcaaagtaagttaagaagtaaaatgaggaatccggaccctcaacagttttcagcaaagttgttttcaaaaaaataaaaaataaaagcagcaacactaactaacttaacttcaatttctcttactcactcaaaattttcccagtgcccaaacagaagagaataaaagcccaaacatttagagatagagaagaagaagtaaatagatgaataataagttagagcttaccagaggaagatggagaaggagaaaaatagaggtgagagaggcgattgagggatatgaaggagggtggagatatcggcggcactatcaggtttatagaacctctcatcactctattatattttctctttctctttctttttctttttatttttctttttttaatttttatttcttttttatgtagtctgggattgggaattggggagaaaccctcagccctccttcgctggcttctcctcccactagtcgcccacgccacgaacctttgtgctgcaaggctaagtaaccttattagggatttgactttatttatttttggctaattaggatttttgccgccgaactttgatttgtagtaaattatgttccatgcacttttgagactgataaaaattcccctattgagattgaaattccgtattttaatattcccagtttaattatttaattaaagtgattaattaaatgtggaattaatgaaactggtactgaaaacagttttttccgtagtttacggaatacaattctgtaactccagagaacctaaaaaaacaaacaagtgcataaagtaaaaacacacaaga

SEQ ID NO: 364356 - DNA, 487 bp, Cannabis indica
aaaaattaactttcaaaatttttttaaattagtttttttatttaaaaatttttagactccgatcccaatctggaccttgagacctaactgcctcggccctaatcctagtaacggatcatgacgggataagttggaaaatatctcctctttgtattcatgaataaaaaaaaatatcctcatattatttttttattaaaatcaacctactttttttcttaagtagattgcctaatataccctcactctctacttaaggctagcatataatttacataaactaaagggtctaatggagacatcatccataaaaatagatatatctaaaaaaatataaaaatagtggtaaaaattaaaacaagtaaagtaaagtggatatacaatgtaattttctcgaccacggcctcgatcccaaacccaagcctagacttgacttaaataaaatcaaaaaataaaaatacaaataaaaattatagaacacttttatttt

SEQ ID NO: 364357 - DNA, 668 bp, Cannabis indica
tttaaattaatttttttttaaaacataaaactttaatgacttggaccaatcaggaattgccacgtgacaatttacttaacacttaatagtccggtacctacaaaagttccagagttataacttaggtattattatcgccaaaaattaaactaggtatttatttgcaactagaagttaaacttaggtatttatgccgcaaattactctttttttttaataatattatattatttttattttattttttattgtgtatatacatatattttgttgtatggtatataatttttgttgcctatagtatatcatatatttaagacgatatttagtttttattttattatatataaattttttagtatgtatagatattttaatagtggtatatctaattttgttagcatgatttatataattttttagtattaatttagtattgttaattttttttggtatatatatatatttttttacgaaacagtatgctttattttagattatgtatgtcgataatatgtcgacacaatgtcgacaatcagtgccctaatttctggtgttgtgcttctcgacattatgtctattgaatatcgatgggatgtcgatgtttattttttttggttgttttttcctttactcaccttgtttttttggtttgcaattgcaggaga

SEQ ID NO: 364358 - DNA, 1091 bp, Cannabis indica
acctagaaaatggatagataatataactattcatacgagcaaattaaaaatatacaaagtgataaaatccttaaattatatttaagtttgcttaaggcagattataattgcaattgcgaggcagaattgacagctgctcgaaaatcataaagtttagcagattactaactacttaaacaagaagattacgagcaatggagaaacccaaaagtactatatatttgatcaaaatatagttgtttacattgtgaataaaaatgcaagaaaatacaattgtattacgttcgaatgaaaacagtacaaggtatttaagataagaaaaacctaagactggttataaattgtctttacaaaaatgccactaggggaaaaccattaagtcattctcctaagaaaaggatgagaggggaagccgatgaactcgagaaggaccgtctgcatatagcttgaaaaagatcgtctacacgttgctcgaagaaagaccgactacacatagcttgagaaagtccgactacacgtagagagccttggtctctgcacagacctcattctcctcataatcagaagatcccattgcctgaagccgagatctttttcccagcctcaggaaatttctcaacactagagagaggttgacgcaaagatctcctggcacaggttagggtcttgggttggctggattctctgatagaaatcacgccaacttccttcccagatccacctgaaaccatgccaatcttcctctggaattcttcatcagccttaggaggacctttgagatcgctcataagatttgtaccctctgggatcacttgtgaggatcggccattgcgggctacggggttcccctagtttggattcgtcagaagctcctcaaccctggaaaccatggcttccggccccaattgaggcttgaattctgtaggaacaaatggaaactggttggtgcatttgggtattatgagtttggaaggataaacttctaaactcagaagggacattttggtaggaaggaaatgatccattctgaaaatggatctcactaaagagttagaaggtttgtgaaaaatgacaagcttgagctgcctttt

SEQ ID NO: 364359 - DNA, 388 bp, Cannabis indica
tcctaaatatgaattctctaaaccaatgaaaataaacacataatggtttaagaaaaccttacattgattgcagcgaaatatagtgtctccttccgttcaatatctctatcccttgattcctttctgtagcagagcattatcaagatctgaaccagaatctctttctctctttcgggtttggttaccaccatcttactcactatgattgagtacttgacttgctatgtgtggggatgacactcattcactcaaggttcaaatggtgaagaacaatgaaggaggttttgaatcactaaggaaggaactctctcatctaggttgaagtttgacaaagtatcaagtgtggatgagatgagagcatcatgttccttttatagtgtttcaacta

SEQ ID NO: 364360 - DNA, 540 bp, Cannabis indica
agaaaaagactaggaccgtgaccgggacaaagacccggacccagacctaggaccgaacacagacctagcctcagacccaaactgagtctggaactcgtgcccggacacggtcgtgtggcagaccggaactgggatccagaattggaccgaaatctaggacccgatcccaaacatagacttggacctagatagggatccagatacgaacatggactcggaccaagacccagactgggatggaaattctggacatagatctggaccgagatcctgaccaagagccaaactttgacccgaacttgggaccgaaacatggacctggactccaacctagaccgagatcagggtttagacctcgacacaaacccggacacagactcggacccgaactcaaacacccacacctagaataacacaaaaacgtagacccggacccggacccaaactcgaacccaaattaggatcacaaccaaggacttagactcagaactgaatccaaactatgatcgagattggaacttgggactcggacccaaccta

SEQ ID NO: 364361 - DNA, 509 bp, Cannabis indica
tttgggaagttgttccattaccacaaagtgtaaaactatttggttgtaaatagatatttaaaaccaagaaggatgaatatggtaatgtggtgagatttaagacatatcttgtagcaaaaggctatactcagaaataagacgttgattatatagagactttctctttagtttcattgaaactcttttaggataataatggcacttgttgctcactttgatcttgagttacatcagacggatgttaaaacagtgtttctcaatggcaacatttatgagacaatttatatggagcaaccaaaaaattttatgtctggtgacccaaaaaatatggtttgcaaattaaaaaatctatctatggactctagcaaccttcttgtcaagggtgtcactagtttcatcaagtaattgtctcatttggttttgagatgaatattgatgattgtatatatcacaagtttagtgggagtaaatatatatttctggttctatatgtcaatgacatattgctt

SEQ ID NO: 364362 - DNA, 594 bp, Cannabis indica
ccataaacgagtctgatcttgtattgggtcttgatacttgccataaatagtttgtatattctgattgtatcaagacgcaattaaatttaataaggaaaaagggaatagtcaaagttttctttaaaaaccaactttccataagagaattgcttctcttacaagaactttccatacaagaaaagttcatccgaaaatacatctttcctattatagaaaagagcaattaaactgaataataaaggtgagaaaatcggattggaaacacaaagaaaactcaccataaataaaaaatattttggcatctaacttgccaacaaaggagtttacaatctccccctttggcactttagataataaaaatattttttaatcaaggaagtacctgcaaatcaaagttagcaagagcaaacaagaactccccctgagaaacacaatcgaaaaccgaaataacaaaataacaagctaacttttaatccaaagttaatcacaagtaccaaacacaactccccctggaaaaaggatccagagttgagaaattaaaaataaattattactccccctttttgtttatctaggggccaaagataaaaaaaa

SEQ ID NO: 364363 - DNA, 656 bp, Cannabis indica
aatgattctttcctaagatagaagagagtaatcaaatgcataaaatcaatgtaataaaaataatttaaaagctcaataaaatgcattcattaatcaaaaaatagtgttttgacaactaaattgtcgaaaaaggacctaacacttatttggcaggtttgaagtctaaattcgtgatcttggttctatttggaaagtttcctttctggtcctaatctgctactgtgaaacccgattctgatgctacaaatcaagaatttttttaagaaagttttgtacagctgcgaaataatttttgtggctgtctctagggttgctatgttctataaataggacctagagagcagccaaacgattttatctcttctagtctcatattttcatatctttctttgtgagaagagtgtttcatttgtaaaaacctagagtgttcaactaggtttttgttttcttattatgatctcatactattcttagaataggttgaagagaagctttgaacaagcgtgggtcttcgggagaagacttttccaagtctcattttgggaggaagtgagcatatatcttcgagagaagatttgtttaagccttacttcgggaggaagtaagcacacatcaatagttgaagggagttcactacttggtgtgtttcagagatc

SEQ ID NO: 364364 - DNA, 778 bp, Cannabis indica
ttttcccttgtctgggctctggctggaggatatttccttcttagccttggccactgcaaggttgtaacattcccgagcagattgctagttccctctaagacaccctaccccattctttgttgggaacttcaggcacgagtgaaatattgatgtgacagcttttaagtcatacagggctggtcggccaagcattacgttaaaggctgaaggaacatccaatgttaggagctgtgccatgatagttatgctcgttggagcttgtccaacagtgaggggtaaccggatttgtactagaggtgcaactccttgaccggagaaaccatagacaggctggaggcatggagttagatccttgagttgaagcaccatcttctcgtaagcagtcttgaacaaaatgtttgaagaagctccattatcgattatggttctagccaccattttatttgctatatggacttccacgaccagcgagtcgttgtgcggaaatctaatcttgacagcgtcttcatcgttgaaagttatggttggttctcctgctcgtggaactttgggcttcctttcttccacggccaggatgacttcttcttgctcgtgttgagttgttcgggcatacctctcccgagctttgcccagatctccagtaatgtacgggcctccaataatgacttgtaaatgtccatcgacaggtggaggtaccagatcctacttgttttgaccttggctggtcttgacatacttctgcaggtgcgaattatttttctttattagaaattcaatt

SEQ ID NO: 364365 - DNA, 748 bp, Cannabis indica
gatgcactggtctggtgggacatggtgtctatgatgcatgatgtcacgacaatgacctgggaaaagttccagaaactttttaatgcaaagtattacaatgaagcagttaggagtgccaagagaaaggaattcactcacctgactcagaaagaaaatatgagtgttactaagtacacaacgtaatttgaccgtttggcgaggttggccttgggaattttgccaaccgacttcagtaagaaagaaaaatatctggatggattaaatgcgaaaatcagacatgatctgatgattactactgacgacagaactacctatgctgaaatggtggataaggcactgcgagctgagggcgcagtgggatgcatgatagagtctagaagaactccggtggttggcgggactcctacccctcctacatcaggttttagcagaggaggtagtggttcgaccatggaccagaaaagaaaggcatccactgcaaccagtggctcaggtcagaacaagaggttccgggggaacaagggtcggggcaatcgccagagtggcaccgaaacccggtacactttcccagagtgccccagttgtaaaaagcaccatttgggggagtgtaaagggcaaggatgctttcagtgtggcatgccagggcattacaagatggattgtccccagctcagaactgaggcactgaagactgcagcaaaactcactccagccagggtgtttgcgataactcaggctgatgtagaag

SEQ ID NO: 364366 - DNA, 628 bp, Cannabis indica
agatcctggtaaaataaattccaacaatttggtcgaagtaaaataacgaccaggcgagccactccgggcatacataagcagattcatgacgaaagcgaccaaggcatcacgggtaaccgaggatggaaagttatctgcgatactggggggcatagaagtccttggcgaactgtggaaggacataaggaaaaacggaccggtcgactcaatgagtgatttccttgaccgggccgaaggttcatcaagctcgaagaagccattcagtgagcagagggtgagcaaaagccgaacaaaacgaaggttccttccactggaacgtccgcccagcttccccaatattccagcaattcaagtggcaagcgttcaggaaacaattacaagcaaggaaacgggaagaagggaaagtgcaccgaaaaacgaggacagactccctgtgatcgcgccaaacacactggattcactatcttaactgaagatatagaaagtgtgtatgtagcgactcagtcgctaattcagtacaagaagcccgggcccatgaagaaagtgttagaaattattttaccaggatctagatttactaacaagtatgtttgattaacatcctaatataaattctaaaataatgaaa

SEQ ID NO: 364367 - DNA, 396 bp, Cannabis indica
atgttatttgtttttattcattataacaatgtcatagaaccgattctattttaatcataattggtttgaattattttatgttatttatttttattcattatgttacagaaccggttatatttcaattataaccggtttgagtaattaatttttattcatagaaccagttctatttttagttatatctcagatatctacttctggtgactttttcagtaacttttccagtgacggttaattttctagcgacttttttagtgacttttccgacgacaataactttttcggtgacttttctggcacctacgacttttccgataccgttgacttttctggcgaaccttattattattttacaaatatagaatttttacttttttttttactaaaaataat

SEQ ID NO: 364368 - DNA, 569 bp, Cannabis indica
attacaatgtatgaatcaatgcttggcaaaactcaagtgttagacagcctagggtaggcgtgtgagagagaatgaggaagagagagagtttgtcagacacttagagtttgagatcaggtttctagcttagaggcaacttaagttttcagtcagaggttaaggcctttacatatgaagccttaaaccctaggtttaaattcaaatcccttagcaatcatatagttagttagatatttacaaaataccaaagggcccttgattttagatattatataaccattatgttgggcttttggagcccgattcatagcccatcaatgttgtccacgtataaatctgtccatctaggcatgtagagcctccttggctgaccaggtccttgtggcggccaggctggccggccatggtgttgtccttgggttggtcggtcagagggcaagccaggggtggttggctagctcctgagagggagctggtctgtcacttgatccacgtttgagtgttggggtcttcgtttgctcatgtgctgacgtggcttgttgggttttatgccctaaataaaactcttt

SEQ ID NO: 364369 - DNA, 671 bp, Cannabis indica
ggtttactatacaatatacttctagtgtgtgtgatttttgattcaaatcacataggtagatggacatatagtaaaggtattgtgtataattagcttatgcatgactagaccaatatgtaataaacatctttcatcaagcttgccatttaccatgaaaagtgtttatcatatcacaatgatgatcattagtagatgagtctgaattctgagtatacatgaactcttgtttttatacattaagttctttgatttactcgctaaagtttctcagagaagatgattcttacaacttaaattttgggaccttaataatatgagtggctggtaacatgttatacaatagtggaatcaaaactttcctaacagatcgaatattagttcccttatagtgttaattcttggagtgctaacaattggatccaaatctataatacttataggttaactgttcacattgaattaatggtacataaggaatcaagagataattagaagggtaaaacagtattttgaccaactctaattatgaactaatatttagagggagagctacttatattgatcatatccatagactacaagtaagaattctgtaaatataactttagattgtcaaagagtgcaattctatatttatagtagattaataatggaattaataaactagatta

SEQ ID NO: 364370 - DNA, 610 bp, Cannabis indica
aactgggactgaaactcgggcctggacagggtcgtgtacttagaccggaacagagacccggacatgtacctaaatttgggacacgatcccaaacacagacttggacctagatagggatccagatacaaacttggactcggaccaagacccagactaagatcaaaatgcaggacctagatttgggtttagggtttagggtttagggtttagggtttagggtttaggtttggacgtggacccaaacctagacgaagatcaaggttcaaacctggacacaaacctggacactgacttggactcggacccgaactcaaacccacacctagaatgagacccaaagctagacccggacccaaactcaaacccagaccaggatcagaaccaaggacttacaccttgaacttaatcctgactcagatcgggattggaatttaggactcggaccaaacctagaccaagacccaggatgcgaacccacacccggagcctgatctagacctagactgaaatctggaccaaaacccaaactcagaccaggactcgaactccgacccgaactcaaaccctaactcgaactcagagtggcaaatggaactagaaccgaactagg

SEQ ID NO: 364371 - DNA, 722 bp, Cannabis indica
ttttcttacaactctctaatcttttaacattgtattggttgtcgaaaacctcggtcaacaatatgttttcaaacttactcgatcgttatacatcaagacctgtcggcacaatgtggagtaaatcttacacgtctatcataattagtgggtatttcatccacattagactttgtttagtaaaattagacaaaaaaatttaaatctaataatctcgattgttcggagcatgatttggtacgtgtcaaaatttaggtgtcaaaaatctaaattagcctagttaatatttatgaggaattataaagaaaaaataaaaaagtgtagaaatttataatatttaataaacataaacataataaacttatatttttttaataaataaaaatgaaaaaaaatcatatttttcatcaatatgctctaaaatatatatacaagtgaaattaacttatcaaaaaaatcttatttaatatgatgtgaatgttgatgtgttaaaaaatatttttatatggtaaaaataatttgagcaactgactctttgaatttagccacttatattttcgaaaaataaataaataaaaaatttgcatttaaaatattactttagtaatttattaattagttaatttttctttttgccatgtgaaaacttggagcctagtgtaatgggcgttacaaaacttcatatatttattattttttttcaataatattaataataataatca

SEQ ID NO: 364372 - DNA, 701 bp, Cannabis indica
cttaccccattagaaagcatgtgcacaatggttgtagcaaggaaccatctgggtagagtggttcggattcatacggctcggttggacttctcggatgtgttatgtggagaagcagtggcctgttgtttagctgtttcgttggctcaagagttaggtaataagtatgttttggtggagagtgactcgagaatagttatcaatgcttttaatgggacggagtcacattgggcgcttgagaactatgtctccttttgttttaagtcatctcccacttttatttgctgtaatttcttgtatgttagtagaaattataattttgctgtccataatgtggctaactggccttttactcacaagttgtatggttctattccggcctcgtccattccgaaggaccttttatgtaatgaccgcgaggtctaattttgtttaatcaaataaatgaatacgcttattttcaaaaaaaaaaaaaaaattatttaaacttgctcttaaaggaaaaaaacaaaaatactctatttcgtcttgaatagtttgtgccaaaaggacttaaatatcttggtagaatatataattttttaaaattgaaatttattcatttttaaataagggttaatttcacaaatgcacaaaaacaacaaaaatacggtttcacggaattttaaacatttttacgatttttgattttatttacataaaat

SEQ ID NO: 364373 - DNA, 794 bp, Cannabis indica
ataacggggcatttgttccaaggcttcagcaaaaggaatgttgatgtgtagtcttttgaagacctctagaaattttgtgaactgcttgtctagatttgtctttctgagagtctctgaggatagggtattttcacatgatgatcaatactgattggtggagactgttgtggtggtgctgggctatcagtagccttctctactgttggtgttggggttggcactggttgagctttaatctccttatctacatcaactggttgtgtcaattcaggcccatcatacttcttaccgctcctcagggtaattgctttgcagttttccttgggattgacttcagttgtgctaggcaaatttccttgaggacgggttgctacctgagttgctagttggcccatctgagtctgcaggtctttaattgaagatctagtttcagtcatgaattgtagcagtaaatctgtttgcaaactagaatttccaccagaggcttgttgctgattaaactgttggttctgtgtctggttctgatttcgttgctgatagaacccactgtttcttcggttaccaccttggttgaacccataattgttgttgttgttctgcgaaaaatttccaatggcttttgcttcatccattggcaaatcatccacatctgcttgacactctgaaaagtgatgatttcctccacatatctcacaaacaacttgggcttgtttagcttgccctgcaattagctttgtcaatgcctcaacctgagctgtcaactttgtgatggcatcaacctctaacacaccagc

SEQ ID NO: 364374 - DNA, 779 bp, Cannabis indica
ttttttatttttttttttgcgtatttccatacttaaaatctacaagttcaacttgttggagaatttgttcccctaacagtggcaaatgagccatatctcactcttcagtaccatcgaatgctttcttcttccgtctatcaggatgatttgtaggcaagtaccgtctgtgacccatataacacatcttatgtccatttgccaagcgacgagccgatgtgttagtgcaacaaatcggacaaccttcgtaaccttttgtgcttaagcctgataaattactataagcagggaaatcactgacagtccacaataacacagctttcagattaaagaattcttttttaaaaccatcataggcctgaacaccattctcatacaattctattaaatcgtcaatcaatggttccaaatatacatcgatattatgtccgggttgttgcgggcctgatatcattaaagaaagcatgttaaatttcctcttcatcactaaccagggaggaagattgtacataactaggaagacaggccatgaactatgacgactacttagagatctatgtggatttactccatccgcagacagaccgagacgaatgtgtcttggttcagatttgaattcaggatttatgtagtttacttttttccaagcttgggaatctgcaggatgtctgagttttccatctttcactctcttggtctcatgccaaatcaaattttcagaatgttctgcactacgatataatcgtttcagtcgcggaatcaaaggcatgtaccacatcact

SEQ ID NO: 364375 - DNA, 615 bp, Cannabis indica
ttttcttaaatgttccccattccaataccgtggtactagaacaagttgcattttttcatcatacttacctaatttgtatgttcctaattcgagaacttcgaccacctgatatggtcctgcccagttaggtccgagcacacctaccgtactgtctttggtgtttagaaatactcttcttaggaccatatctcccacaaagattttccgagccttcacttgtttattgaaataccgaactactttttgttgatgggctatcaactttaagttttttgtggttggcttctcttcgatttcatcaagtgattcgactaggagtacgtgatttacttggttgtacgttaatcttttgtgggatggtggctagagttctaaaggtaacatagcttcatacccatatgccataacaaatggggtctgtccggttgccgttttctcagttatttgatatgaccataaaacttcaggaagttcttccggccaatttcctttggcatcttggagtcttttctttagtgtatccttcaaggttttattgactgcttcaactttaccatttgcttaaggatgtgtcactgcgaagaaacttttgatgataccatggttcgcacaaaa

SEQ ID NO: 364376 - DNA, 593 bp, Cannabis indica
tataaataatttattatataaattcctactataattattttaacagttaatcagtttaattataatatttacaattaaactttattttttttttacaaaaattagatttttttaatacaaattagaattctcttcttgtataaacaatttttaaatgatattaaattattttttttttatataattagaagtactaagtatgagtttttctattcaaatttgaggttgtttcgttttctgaaggagcttgactttgtttttttgactctggtttggttttttgagtaaatgactccttataaaaaagggtaaatagcggcaaaacccaaaaaactttcattttggtttcacttaacccccaaaatccaaatttgggcggtaaaactcccaatactcacgttctgttagcaatttaacatttccgtccattttaagtgttaagtgccatgttggactgtccacgtgtgcatttacgtggatacagtgtacacatggcacaattctattggtccacgtacaaaatttaaaaaattaaaataaaattaatttaaattaaaaaataattttaaataaaaaatattttttttttcttt

SEQ ID NO: 364377 - DNA, 651 bp, Cannabis indica
actcttatgtgtttatttcattgttttagaattcatattaggatgtttatgaaacatacttgttagtaaatctagatcctggtaaaatatatccaacatgttgaccatatttcttgcacctattctgtttctttttttatccaatcagctataaatcttcttttccttggtcttctagatcgtatttgttggtttggtggcagaacaaggatatcttttatgttctgcggtacatccctgttgggttttgtgtcctaaataaaactcatttcaatataatcagatttactagttaataaagaacagaaataacattttatgttgcatggttcacatgatttatttcatgattatatttaatgtataaattctattaagtccagaacatatgtatttgttaatgattatagtgttgtcagcacagtggaatataatcttgattatatgtttgaaagtttaattccctgatttgtcacttcactgaatttatactagcatgataatcagcgataggtaatgcttacaccttggataagtgttatgtcttttcaagggcgattggcaaaagtttactagtatcggatgtatggagtataaagtgttgtatcaaagctctcaatgattccattagtgttgtgattggtagttctc

SEQ ID NO: 364378 - DNA, 600 bp, Cannabis indica
ataatatagaattatatttacataattcttatttatagtctattgatataatcaatataagtagttcgccctccaattattagttcataattatagttggtcaaaattattattttacgattctaattatctcttaacgccttacataccattaattcaatgtgaacagttcatctataacttattatagatttagatccaactattagcactcctagaattaccattataagagaactaatatctgatccgttaggaaagcttgcattctattattgtatatgttgggattttatgccctaaataaaactcatttcaatacaatctgatttgttatcaatagtagattagaagtcatttatgtttacatgtagttttcatgtttatggtttaatgtgtacaaaatctgttaagtacagaacatatagttattcacaattacagtgatgtcaacacaatggaatgtaattgtgattatatgcttcaaaagataatgtccctaattcaacagtgcactagatttatactgatgtgataattagcgataaagtatacttacaccttggataagtaatatgttctttccaggacattggcaaa

SEQ ID NO: 364379 - DNA, 950 bp, Cannabis indica
cactatgagtgcctcatagcaatactcatttttttttatttaaggatatgtttggcagataggattggactgaactagactcaataattttagtagttcagtgtttagccatgttggagaactggatcactaatgcagttaattttatttatgtaagattatttatctcatcaagaaccttggaagtattaaaacgagatcctgagagcttgggaatatgacacccaacgctgaggttgacaaatggcctggtgcgttgggttctgtttatctgattttgatttcgtttcgatcgtcaatctagtatttcacaataactaatatccatgaagtcagagaagtcaaattcacaacttcacatttctcatttccaacatgaaaaactctaagaaatgaagagttttgagtctcttatttttgcagaacaacaacatctccgagaactggtgaccaacatcaccaggatacaaaaatagactgagtgatgtcaaaatatcagctaggcatcttaaattacatcccttggacgttatgtcaacctggctgctggatatcaacctggacgttgggtcatgaactgacttcagtaaaataatcataactcactatattgatctgattgacgcgattcaacttgtgtttcgaagataattcaattatctatcaagtcatgtatcacactcaaatcgtaattctgaagctatcatcgtcaaattttactccaagagagttacgaaaataagctctaagttaccctcagcatgactcgtcgggctccaaaaaatggctatcaccaccaagagataattttcaccgttagattattagcttaggttgaaaaatatatttttctcttattttttgtgggtctccttcacctataaaaggagagctcccttagctcatttttcaagttcaaaactacccacaaggtcagaacttctctctct

SEQ ID NO: 364380 - DNA, 616 bp, Cannabis indica
actcttccccttgttagataagaattctttaagatgtccctgtcgaggagcccgaccacttcaaaacatagagctatgcattccgccgttgtgtgagcatgatcgtcgcaaaattcacaccatttggttttgtctctctgatcggctggcttcttggtcttttcaggccacttgaccttgctccccattcctttctgataccacgatctctgctagttctactattaggttgtattctgggatgggtgccttttcttgttctcttggtcttggtgaaggaaacctacgcatgggcctcttttcttgcctattgtttctggaagttgggtatggcacatgatgcgtattatacttgcgttccactatccttgtgctcctttttctctctagtatgagtaggatgcaaaagtatgcctgttggactcgtcctcctcccatttgatttgggcccaagctttggctagtacgtcttccataatgctgcaaggatattttgttaatttcttataaaggtcagaatgtaccattaggccttttcggaaggccgcgatcactgtgtccacgttgcatgaggttatggatactttctctgtgttgaacctgttggaaattattt

SEQ ID NO: 364381 - DNA, 717 bp, Cannabis indica
aacccacttaaaatcttgagattttcaacccatgttccacggcatgcctgggagtgtcgcggcccgcctaggggtttttgggaagttttgaatgttagatttgattattcacaacttttcaatccgaactccgtttagggtgtttcatatatcgttgaaaagctcgttccgagctctatatgtttatctgtatttggatgccaattgtatgattatgtgaaagtggatttaaggattaaccctatttgtgaattctggaaattgtgactatgattattggcacttgttcaggagcacctgggaattcggaatctccacatacttggaacatcaggtaagacatttgttagcacgtagagttaagcatggtggcgctcatgttcaatattataattgtgattaatggagaattgggattagggttattaccctaaagtgagcggttatatggcctagggttattaccctagtgattaaatgatgttaaacgctatgccatgctatatatgttgaagtaaagaattatccgttcaaggaataatttagttagactcgataattggaaccgagataaactattttaaagccttaatgtaattagacatgtgagcataacatgtgggtttatgccacatagacataagtatacgtctgggcgtaacacgcaggtctatgtcaaataaaaaataagtgtaatggcattaatatatatgtgat

SEQ ID NO: 364382 - DNA, 760 bp, Cannabis indica
atagttcaggaagaatttttaaaaaccttataagttccgagggcataatttggtacatgtcaaagtttcggggaaaaaaaatcctaattagccttaaatatatatacaactgtatttgatatatcgtatcattaaaaattaatatactgtaataataaaattatataccacaaagaaattataacaatactaaattaatattcataaaatatctatcatgctaacaaaattatatatatcactattaaaatatgtatacataccaaaaaatttatatataataaaataaaaactaaatatcattttaaataaataatatactatagacaccaaaaactatataccatacaacgacagatatatacctacaataaaaaataaaacaaaataatgtaatattattaaaagaattatatattccatattaacaaaattgtatatcacctttatacataataaaataaaaattaaccgtgcatgatctaaaataaaataatatactatacaataaaacttatatataacaaaaatatataccttacaatagaaatatatatagaataacaacaaattaaaaataaaaaaataatataagatgcaaataaaattatatatcatgtcaacaaaattacaatagaaaatagaagttaaatattatttaaaaaaataaaataacgtataataaaaataacatataccattcaccaaataatatatttgaaattgtaccatttcaaataataaaaataattgttatacc

SEQ ID NO: 364383 - DNA, 876 bp, Cannabis indica
aattctgcatagtccacgagtcactcttattagatttctgataccttttcagggcttttttcttatgattttttcgtctcttttattaatctaacttgccactatttataatcacatagtaggcaattaattacaaagttgattgtaatctttacaacgtttatcccctgaaatcgtggggtttgattacatatcacgtagtataaatgcggttattatttgaatatcacacagctgtgatttacccgcatttgctggatcaaaaatgatcgtgtattcaaacacgttttaattcatggcgctctgggatgtgtcgacgggaactcaataccaatgacagcgagctggagcttttcccttatctctccgaggtcgacaatgtacgcattgttccttctttatttgaaggcatatcacttcatgttttttacagtcacaattcttattaacagagagtacttcagcagttatttgaatgtcggcttctgacttgccgagactataaatctcaccgaaagatgtctgaagttgtttggtaaaagatacagggatgcaccttcctatagcgagataggcgcctcgcttattaagtcttgattccatctaaccattatacttattttgtacattgtactctaagtgttttcacagtcaatatgtatcactttcatcttcccaggtgcaacgaagttgatgtctcgcataatgctttcaatgcattatggtttcttgttaatacacgagtcaacagttggtataactttacttcgcatatgaccttatagttagcgagttgcaagtatactctgttatttatgcaattaatgagttattctattaaaagtgatttcatcgatccatattccccttaacttg

SEQ ID NO: 364384 - DNA, 1044 bp, Cannabis indica
aagtcagagttttgtatgtccggtctgggtctgggtccaggtttcagtcagtgtttgggttcgggtcatggtttgagtttgggtctgggttttggtttgggttcttgtacgggtctggcatctgttccaggtctcgagtcactggtcctgggtcgcaggtcttggcgcacgtcttggtccgggttcgcgtcttgagctagttttgggtcctggtcgaattcctgttctaaggtccttattccggttcttattccgatttcgggtctcgggtccgagtctaggtttgggtcctggtttagaaattgttctaggttagggtcctcttacgattccaagatctagacaccgactacgggttgggtccatccctaggtcgtgggtcaagatccgcatcccaatcttgggtctcggtctcgtttcgattcggatcttcggtcctagtccgtgtttgggtatgggtctttgaccgagaccggggttgagtcttgtgtcccaatcccaatcctgggtcccgattctggttctaattttgagtttgggtccccaatctaggtctaggtctgagtctccaatctcagtccgagtcttgggtctgggtcttggtccatgtccatgtctggcttcaggttcgcgtcctgagtcccgatccgagttttgatttgggtctgcgtctcaatctgggtctaggtctaaggtcctagtttgattcaagttcccgaactcaaacccagactcagacttggacccaggtttgggatacgggtctaggtctagatctgggtctgggtctgagtctaggtatgggtcccaaatccaaacactgactacggttcaggtccaagccccgagtccagatctggataacaatctcgggtcccagtttagttccacttcgggtcccaagtcccaggtcccggtccatgtcctaggttagggtctgggtctaaggtcaggccttgggtctcggtcccaattctgatgcccgtgtcccggtccatgccctaggttagggtttgagtcccgtttcggtttccaatctcggtc

SEQ ID NO: 364385 - DNA, 1195 bp, Cannabis indica
aaagatgtcttttgcaaaaagcggagaactgttttaccatcattctgtggtgtagctgcagcttcaacccatttagacacatagtccacagccaataggatgtattgattgctaaaagatgaaggaaaaggacccatgaagtctatcccccacacatcaaacaattccacttccaagattcctgttaaaggcatttcgtttcttcttgagatattacctgttcgttgacaacgatcacatgccttcacaaaggtactagcatctttaaatagtgttggccaaaagaatccactctgcaacaccttagcagcagttctggtcccactgaaatgtcctccacatggcaaagcatgacaatgatttaggatagaatacatctcctcttcaggcacacatcttctaattatctgatcagcgcagtgcttgtagaggattggctcttcccaataataatgtttcacctcagaaaagaacttcttcaattgttgacgtgaaagctcaggaggagttatttttgcagccaagaagttgacataatcagcataccacggtaccatcaggttttccctcacactaaagagttgttcatcaggaaattgctcatttatctgtacctctttcgtattctgactctcttccagctctagtcttgacaggtgatctgctaccagattttcagtgcccttcttgtcttttatctctaagtcaaactcttgaagtagaagtacccaccgaatcagtctcggctttgcatccttcttggtcataaggtatttgatcgctgaatgatctgtatagacaataaccttattcccaatcaggtagggtcggaacttatcacaagcaaacacaattgccagcatctctttctctgtagtggcataatttattgagcatcattcagggttctgctagcatagtagattgtgtgaaacaccctgtcaactctttgacccaagaccgctccaattgcataatcacttgcatcgcacatcaactcgaaaggcaactcccaatttggtgaagtgactattggtgctgaaatcaatttttcctttagaaccttgaatgcctttaagcaaccttctccaaactcaaatggaatgccattaacaagttaactggacaatggtttggagatctttgagaagtccttaataaatcgtcggtagaaaccagcatgtcctaagaaact

SEQ ID NO: 364386 - DNA, 752 bp, Cannabis indica
agcttcgtcttgagtgacacatttgagcaatggcatcgataatcctcttctgtacatgactccctctactatgatataccgtgctgccttccttctcattttccaagcttcatttcagttatttgggagttccctagagttgaggtaggctgctattggtgtcatccagtttggagatgtatcaatcatttcgatttcttccgtgccagtgatggtaggctcttcgaggaacaggataggaaccaggttttccttgtcacttacattgttccttgccaatcgagctaacgcgtctccggttgtattttgttctcttggaatttttctgagagcgtagcttttgaattgtgcgagcaaattgtgtattttgcttagatatgctatcatcttttctccccgagcctcgtattctccggatacgtgatttaccaccagctgtgaatcactgcaaatttaattgtgttcagccttcatctcccgagctagttttagcccagcgattagagcttcgtactcggcttcgttgttagatgctctgaattcaaatttgactgcagcttgtaggtgttgcccctaaggcgtgacaagggcaatccctgcactagatagttgatctgtagccgacccatccacatgtagttgccaggatcgtttttcttcattttttcttggctgaggtgcctgtatgggctcagggttgctttctggtatgctttctttttttcttgtgcattctaccacgaagtctgcta

SEQ ID NO: 364387 - DNA, 748 bp, Cannabis indica
attattattattatatatatttcgattgtaaagtatatatgttttattatatggtatgtaagttttattgtatagtatattgttttattttaaatcatgcatgtttagtttttattatattatatataaaggtgatatataattttgtaagtatgttataattattttatggttgtatataattgtattaatatggtatatacaattttgtttaataatattatattatttaattttatttttaattgtaagtatataaaggtgatatataattttgtaagtatgttataattattttatggttgtatgtaattttcttaatatggtatatacaatgttgtttaataatattatattatttaattttatttttaattgtaagtatatatcttttgttcttatatagtttttgttgtctatagtatatcatttatttaagatgatatttagtttttataagggttgttaatcaaattgctcaaaccgcccgtaccgcaaaaaagtgtggtttgaaattctttgcggtgcagtcggtttgaatttttcctaaaccgcgcggtgcggtgctgtttgcagttttaaattgttaatatgcagttcaaaccgcaccccacattataaaaatatcaatttttatattaatttaggtccaatatgtaaatgttcaacttaaagcccactaattattgtattgttgaaacttaattttttttcatatttattttcaagtcttatggtatttttgaca

SEQ ID NO: 364388 - DNA, 983 bp, Cannabis indica
caacagtttaatcagcaacaaacctctggtggaaattctagtttgcaaacagatttactgcttcaattcatgactgaaactagatcttcaatcaaagacctgcagacacagatgggccaactagcaactcaggtagcaacccgtcctcaagggaatttgcctagcacaactgaagtaaaccccaaagaaaactgcaaagcaattaccctgagaagcggtaaaaattatgatggtcctgaactgccacaaccagcggatggagaaaaggagaatgaagctcaaccaatgccaaccccaacaccaacatcagagaaggctactgacagcccaacacaaccacaacagtctccaccaattaacattgatcaccatgtgaaaataccctaccctcaaaggcttagaaagtcaagcctagacaagcagttcaccaaattcctagaagtcttcaaaagacttcacattaacattccctttgctgaagctttagagcagatgccaagttatgtgaagtttatgaaggaaattctgtcaaagaagagaaagatggaggattatgagacagtggctctaactgaagagtgcagcgccattctacagaagaaactccctcccaaactcagagatccagggagtttcactattccttgtactatcgggagaattgaaggaataaatgcactatgtgacttgggagccagcattaacttgatgcctctatcagtgtttaaaagattgcagctgggtgaagcaaagccaaccacagtaactctccaattggcggatcgatcactagcccatcctagaggagtcattgaggatgtgttagttaaagttgacaagttcatctttccagctgatttcattgttttggatatggaagaagatagcaatgtcccaatcattcttgggagaccattcttggcaactggccaagccttgatcgatgttcagaagggtgaattaaagctgagagtccaaggaga

SEQ ID NO: 364389 - DNA, 600 bp, Cannabis indica
gatctcccatccactgggatgagacaggggagaagaaatacttaggtccagaatcagtacagcggactaatgaagcaatcaaaaagattaaggccggaatgcttacctctcagagcaggtgatagagttatgcagatccgaaatgcagaaatgttgagtttcaagtaggggatcatgtgttcctacgagtgtctccaatgaaggggatcaagcatttcgggaaaagaggcaagttatgccctaggtttacaggaccttttgagattctggagaaggttggacaagcggcatattgattagctttccctccagctctttcagcagttcacaacgtattccatgtctctatgttaaggaagtgcgtttcagaccctgctcatgtactaagttatgaaaatcttgagctgcaaccggacttgtcatatgaagaacagtcagttcaaatcctagacagaaagaataaggtccttcggaacaagaccatagctttggtcaaagtactctggagaaatagcaaggtggaggaagccaccttggagttagaatccaacataagagctcaatatccagacttattcaggttagatttcgaggatgaaa

SEQ ID NO: 364390 - DNA, 905 bp, Cannabis indica
tatcatggtcaatagcaccaactattaagaacgttcttaatcatctagtaagcctggtggataggtgtatgggcgcctagacacgagtcgataaaacatgatttgttgtatgcttttcttactgagtctattggctcacatattctactttcatgtgtaggtaaggaaaggcggaagatgaacaaaagtgatatctgagcctgaggtgatgattgtacatgtcaagacggtgcgacctagagttttcggtcttgggacatcttgggatacattttgtagtcgctgtgctacaggttgtaaaagtattttcaaatcgtttataaaagtttaaacacggtgtaacgccctaaatagttaggcacgctacccaagatacttatgaaaccctaatcccctaaccgagattactaataaaattagcgcagaaattaaactttaatcataaatggaatgaaaataaaacttgtaataatttaaactttaccatctaaaagttacagaagttgggatcccaaaaacatttacaaaatattgttacaagtccttttctttcagccgacctaagcggcaaaatagagtctcaaaaacacatcactggtagaccccaacccgcttggtctagtatggcccggacatgtacattcttcatccagctcctgcacaaatggctgatcggtaaaagtcttaccctttccttcacagtacagcacccgtgagccaagtccagtaagacagtataaaacatattaataatataaacaacaatgccattcaaatctgcctgtgtgacacagacctgcatgttgctctcacatacctatttatgtctacgtggcttatacctacgtgttgctctcacatgtctatttatgtctacgtggcgtagacctacgtgttgctctcac

SEQ ID NO: 364391 - DNA, 772 bp, Cannabis indica
tcgttgttagatgctttgaatccgaacttgactacagcgtgtaggtgttgcccccaggcgtgacaagggcaattcctgcaccagatagctgatctgtagctgacccatctacatgtagtttccaggtcggcttatcttcattgttacttggctgaggtgtttgtaccggcttggggttgctttttggtatgatttctttcttgcctgtgcattctatcacaaagtctgctaaggtttggcctttgattctctatcgcccacttgagtagtcgtccagaagcatctggcttttacagtatttggcgtaatggttggttagtgtatacccaaacaggatgagcttggaaataaggccttaactttcttgttgctagaataaggcagtaaatgagttttcctatcaacgggtatcggctctcagcctcaatgagttttttactgatgaagtagactgcgtgttgtacgctattctcttctctgattagcacaacactcacggcatgttccgtgacaactaagtatattccgagttcttcttcgtctagaggttttgagaatacgggaggttttgcaagttgtgcttttagctcttggaaagctttttcacatttctctgtccactcgaactagttgtttcctcataggatattaaagaatgggacacacttatcaattgatttggaaacaaatctgctgagcgcggcgatccgaccagtcaagctttgcacttctttgtttttttggtcgagttcatattcaggagggcttgaat

SEQ ID NO: 364392 - DNA, 654 bp, Cannabis indica
ttctatttattgttatttgtagtatccaacatgacaatgaccaaccccgtggtgtcactgttgactgataataagttgaatggatctaactttcccaaatggaaagagaacattgacattgctctcattggtgaaaaatgccatgtttgtgttaactgaaccgtctcctgagcagtagggtgataatgcaaccaaagcagccgggtgataatggcatcaattcaatctcgctttgaagcgacaaggaatttcatcaatgcacggatgaaacctcatcaaaacgtgtgtgatcaccttctccaaatggcgagttacttccaggaagctcagaatcatggagctgttatggatcagacaactcaagtgagtctgatcttgaatagtctgactccagcctttcttccttacacttcaaattatgtcatgaacaagaagcaacaagactttcacaagttggtaaacgaccttcagacatttgaaaatttaattggaggaccagtgaaaggtaaaacttcatttttcttttacctataatagcatgttaccaatagcatgttacctataatagcatttgggaacatggtaaagtgattgagtgggagcgctaaacaaagatatggaatctatagcttctatcaagacatagaagtgaaa

SEQ ID NO: 364393 - DNA, 572 bp, Cannabis indica
cacactcacataataagatattttcaatatagatttgtgttctttgtagatgaatatatagatttgtagaaaagttggagaaattttaattagagaagaataaaaactattgtaaagtaatagggctaatattagtagaatgattgaaaaaagaggtaagtataatagattttgaaagagagggtaaaaattaaagacatcaagttaaaagaggtatgtagtgtaatttactctcaaatgctactaaataaatagggataagttgagaaatacctcatttttgtatccattaataaaaaaatacttttatattatatttcattaaaatgtatccacttttgtgagtgagttgctcaatataccattatcatccacttaagtctagcatataatttacattaacttaaggggtataatgaagacattatctataaaagtaggtatatcttaaataatatgaaaataaaggtaaaaattaaaataaataaagtgggtatataatataattccctcaaataaatattacatcagagagagagtgagtgagtgactaacaaataataaaaaaaaaa

SEQ ID NO: 364394 - DNA, 592 bp, Cannabis indica
atactttttttttactatatttattttctgtgcaagtttatcattgaggctcaaattttggttaacgaaaatatgggttaacagtttggtgctttcatttagagccttcgtgaaaaagctaagaaataaaaaatcctccttacataaaaaataatattcctcttatggctgacaacaaagaaaataatccttgtgaagaaaccactcatcgtcttggaaaagagccaatgagtccccaaggatcattcgacttatcatttgaatggaccacaagctctaggaaaatccagaatttgggaaccagacaaaggcctagaatgaacaatggcaggtctcttcccaatctagttgatgaggatggcgcctatgacccaacaaagtatataccaattgtcgaattagaaaaccgccatcttaggcgtcgattagaagaggcaaaccggcataattctgaattagagcatgaggcagctgtggctagggcagcagaagggaatagctcccaaaatcaacctaacactagagagcgagaattgcgaggcgaacctcgagactcacgaaccagggggcaggaggcagcccaaaggaaccc

SEQ ID NO: 364395 - DNA, 878 bp, Cannabis indica
ttaaaaagtcatgccattggtctcaagaatgccggagctactaccaaagattggtcaataaaatgttcaaggaccagatcgtacgaaatatggaagtatacgtgaataacatgctcgtcaaatccaagaatgctgggggggatatagatgacctggacgaatgcttccaagtcctcaacaaatacaacatgaaactcaatcccctaaagtgctccttggagttagcttgggtaagtttctgggctttattgttaatgcccaaggaattaaagccaatctagagaaaattcaagccctcctggatatgaaatcgccaacaaaaaccaaggaagttcaaagtttaactggtcgaattgccgcactcaacggatttgtttcaaagtcaacagacaagtgtgtcccatacttcaacatcctacgaggaaataagtaatttgaatggacgaaggaatgcaaaaaaggcctttcaagagctaaaaatgtaattcgcaaaacctcctgtactctcaaaacctctggatggagaagagttgggaatacacttggctgtcacggaacatgctctaagtgccgtactgatcagggaagagaacaatatccaacatccggtttactacattagcaaaagactcattgaagcttaacgccggtacccattgatagaaaagctcacctatttcctaatcctagcaacaagaaagctaaggccttactttcaggctcatcgtgttcgggtatacactgactaaccattatgtcaagtagtacaaaaaccagacgcctctggacggttgctcaaatggacagtggagttgggccagtatgaaattatctttcagccccaaacaacgattaagggtcaggccttagcagatttt

SEQ ID NO: 364396 - DNA, 636 bp, Cannabis indica
tttagaattttggttcaaaaactatatttttcaaagtgaaataatggaatatgttgctgcatttgttgttgatgcttgctgttgttttcagaggttattatatgcatatttaggtagatttgagctggtttggatgcatgttagtgatgtttaaccaagtttgagttttgaactcaaagcttggagctttaatggtgatttttgattttctgcatgaagctttgttttatcacttgaaatatgttcattggggtctaattagcaggtctagaaagtttggttgagtttggaaacattttgattaggggtttgatttttgtgggttttctgggtaaaactggctaaccggttttacactgcctgtaaaaccggttacccaaattttgctgcaggggtgaaaaccgatttttccgagcttgtcgtttcgtgctagtttcagattttcaggcagtttgttcccagctagtttggggtattttggtattaagttgcagtaggttagagtggttttaagacctttttcccggtcgtgatttagcgtgtcacttatcagtgttgtgattgttacggttttggagcctgtaattcgccgagcagatagttccactcaggttgactggcacacctgaattcaga

SEQ ID NO: 364397 - DNA, 661 bp, Cannabis indica
aaaccgtggcatatactataggcaatgggttaaaatcgtcgcctatagtataggccacagtttttaaccgtcagtaattcttctttaaaaaaatacaatttttaagcacacttaaaaatcgtcaagaatgtctaacgagtgtttaaaaccgtcgggaattatccaatttttctcgataattttaagcactcaatttttagcaatcgtctaaaaagtatttttagtactattgggaatagtaatttttgtagtagtggattacatagaaagatattttacttatttaagtgtaagtaaacaacattgctaattatcacgtcaatgtaaatccagtatatttataaatcatggggctaaatattttgaaacatataattataataattttctaatgtgtatacaacactacaatcatgaataactttatatcttctggatttaataaaatttatataataaatggaagaggtttcaatggttacatttttattgtaaccatcatggttacatttttttaagccattggattactattaaatggttgtgattaatttggaaattaaataaaaataaataataaataacttgtaacctgaaagtgacctaatcatttatttccttataaaactttaattaagattaattatatttaaattaaatt

SEQ ID NO: 364398 - DNA, 731 bp, Cannabis indica
tgggtttagctggatattatcgttgttagtggaagggttttctacgatctcaattcccttaactgagttaactaagaagaattagcagtttatatggacagataagtttggaacttgttttcaatggttgattatagctcttagctttgccatcagatgaagagaagtttatgtttactgtgacgcatccaaatagggtttgggatgtgttctgatgtaaactaatagggtcatttcttatgcttgttaacagttgaaggagtatgaccaacgttaccacactcataacttagaactccctgcagttgtgtttgtattatagattttgcaatattattgttgggaatattttaccaggatctagatttactaacaagtatgttgattaacatcttaaatatgaatatctctaaaacaacaaccttacattggttgtaagcggaagataatgactccttccgctcaaatctctaactcttgttcctttctgtcacagagtattatcaatatctgagcctggattagaatttgagctttgtttagactcttgactctttcagtcaataagaacacgaagaactctagtttgtagtttttcaaaataggaatttgatccttaggagtcccctagctggcacacagggtatttaatgttgggttttgtgctctaaataaaacccatttcaatataatcaaatttacttattaataaatatcagaaataaacattt

SEQ ID NO: 364399 - DNA, 884 bp, Cannabis indica
tcgcttattaaaaagactcattgtcgttggctaaaagcgaagtcaacaactactatcaatgtaatctaacaggcataacaacatgtacgctaaacatgtaataacatatgcatgatattatactaatcttacctcaattctgaattcaactgtgctggtcaacctgagtggaacaactgctgggcgaattataggctcctaaatcacatcgatatcaacacacataagtgacccgttaaatcacaactgggagtaaggtttaaaaccaaaaccctatctactgcaacttaatataataatatcccaaactagcagggaaaatcaactaattagaaacctgaaactgacacaaaatgacaagttgaaaaaccggttttccccctgctgcaaaatctaggtaaccagttttacaagtagtgtaaaaccggtcagaaaacctacaaaaatcaaactcctaaccaaatcgtttctagactcaaccaaactttccagacctgcataatacaccccaataaacattttccaagtgataaaacaactacccatacacagaattcaaaactaccattgatgagccaagcttgagttcaaaaactcaaagcttgcccatccaacaaactagctatcaaaacctgctcaaatcaccttatataaccataatttaactactgaaaacaacaacaatcaataacagcaaccagagctccttaaaatcaaaattaagcaaagattcataactcgaaacttaagaaactaaggaggaagttgcttagagacttaccttgagttgaaatcacaaagaacaagcttgaaatcccaagatgaagtagtaaaatcaacaaaccctagctgggttctaagggaaaaacgagagagagagagag

SEQ ID NO: 364400 - DNA, 585 bp, Cannabis indica
ttttctcttagctttttcattaagaaattgcttaatatatatcattggacaagaaggtttacaaatcatttactaatgatgtcactctactttcttttataaaaatgagtggcacagatgaccatattccagatcttctatctcgtaatgatataaatcttcgatcttagaaaaatatcatacttatatatgcttagtaaaggcaactttaacttagagatgaactagtattttaatggaggtccaagctagaataattacttattaaatatttggtataaatttatgtctctgactttaaattttagattctaaatagaatttaatttcagtttccataatacattggacactacaactttcacaaattgttaatattcattttctatccatagatccaaactgtatgttagatgtatggattatgagttttatctcttgtgaccagaatctacttgaactattctaagaattctttgttgtaactaaacctagaaaccatcaagagattataaccacaataatgcatctattgcatttgaatcttgttcatagtggttttgacaagatcattctcagcaaaga

SEQ ID NO: 364401 - DNA, 714 bp, Cannabis indica
aagtttaaaaacaagacggagtatcctgcgcttcatgagaaccgtttgtccgagtaagactcggaagttcattgtcacctgataagtctcttatctccgccaggacggccttcccttttcctggtacaggggaaggtggccgagcaggtaaactgggctccctgattcgaatggcatattcaacgggcttgggctggcccggaagtttcttcctccttttgagcagagtcacctgctcttcctcagcctcatcttcaggatccaaaggctcatgagcatactgtttggcccttgcacctcccttcaacttagcttcacgcttaagttgaacgagttcattctccttatgagctccctcagcccagccaacactggatttcctcttcttctccttcacaggccgaggaatgaaatccttcgggtaaagcccgtactccacaaagttgtcctcggaggtcaacaaagtgatatcccgggcagcgaccggcagcagagcaagcttcttagctctgtcccggagggtaagtgtgaagggaggatggtgatatgtggggtctactaaaatcgagtgtaggtggtgctcatgccttccaccataaagtactcgtcaacaaaatgcctaattttgctaacgaccttatccctggtgtccgccaattacttgaagtctgtttgagaaaaatagaaataccccgatctgccttgcttaggggt

SEQ ID NO: 364402 - DNA, 799 bp, Cannabis indica
aatcccagtggggaaaacacgacaaaccacgcctaaggggaagaacggggcgtgaagaaacgagtgtaaccttgggacacacaagaacccacagttgatcaacgcgaggaggagaaagtacttgtcgcaacaatgattgagaaagcactggtacaagtaaaactggaagtcactcaaggacgaggtccatgagtaggacgaggtccgtaagtagaacgaggtccgctagtaactataaccaatcggatctgtgagagcacttgaaccagaaaaaacctgatcttcgcaaacaactcggtccaaagcaagaggatcccatccaattacgaatagatgagttggaggataagttcagaaggtatcaagtaggagagttaggaaaacaatctggatatgactcggacgaggagctcgaaccatatcatccagatatcatggatactccttttcctcagggatttaaaaacccccacgtctcgtcatatgatgggaccaccgacctggtctcgcatttgaataacttcaacactataatgcgagctagcaatgttacaaacaatttacgttgtattttgtttcctacctcactagttggagcagcgagcagctgattcaataaattcactcatcattccatcacttcttgagaacagctgtccaaggacttcaaaaagcagttccaggccgcaagggatagacgacccgaagcgtcagcactcaccaatagtaaattacaatatatgcattatgaaatatgttacctaattaaaaaaattttaaaaatacgtgtatatatata

SEQ ID NO: 364403 - DNA, 737 bp, Cannabis indica
ctctgtgaaaaggctcagaaaaaccacctccatcatggctgaaaatccagaaaacattaacaccccacatgaggaaactaatcatcattctgggaaagagcccatgggctctagaaggtctaccaacccgcagtccagacggatcacccgttccaagaggactcaacctgagggtggccctagtacacggaacacacgttctcggagaacccaacccgacgttggtcttagtacgcggacaacacgttcaaggagaattcagcgtgggagtggtcagaaccccaggacgagggatgaagagctcaatcatggaggtgcctagtctatgggagaagataattatgaaatggaaaaccgctgcctgagacgccatctagaagaggtgcagcgtcgaaacgctgagttagagtgtgatgcagcctcggccagggtggcacaggggacaaatgctcaaaatcagcctaaacctagagtgagaagaccacggggcagaccacgtggctgacgaaccaagagacaggaaattgcacgaaaagaataacccaaggaaaatgagataccccttgaaaatcaagacgacagccagatgggagacaaccaaaaactaatgaacgagaaatccctcataacaatgaggaggatcttgggagtcgaactgggagaacgtaggtcgcctgttagaaatcaccagcgttcttcccaaaaccccatagagtgaggactcgtacagaccctaa

SEQ ID NO: 364404 - DNA, 716 bp, Cannabis indica
agtggactgaagccgaaccactcgcaaccattacatcaaagaaagttcaagactttattatgaagaacataatatgaaaattcggactaccatacaaaatagtctcagataatggcaagtagttcgacagccaatccttcactgatttctgtgcgaaccatggtatcatcaaaagtttctccacagtggtgcatcctcaagaaatggtcaagttgaagtagtcaacaaaaccttgaaggatacactgaagaaaaaacaagaagatgccaaaggaaattggccagaagagcttcctaaagttctatggtcgtatcgcacaactgagaaaatggcaaccgaacagacaccattcgcaatggcgtacagttatgaaactatgctgccagtcgaactcgagccaccttcccatagaagattgacgtacgatcaaggtaccaatcacatactcttagcagaattacttgatgaaattgaagaaggacgatccactgcaaacttaaagttgatggcccatccaaaaaaagtagctcgatatttcaacaaacaagtgaaggctcgaaaattcttcgtgagagatatggtcctgagaagggtattactaaacaccaaagacagtacgatatgtgtacttggacctaactgggaaggaccatatcaagtggttgaagttctcgactccagagcatcaaattaggtaagtatgacgaaaaatgcaa

SEQ ID NO: 364405 - DNA, 702 bp, Cannabis indica
agaggacgaagagggccgataaaatgcccttaggagtgatctgggtcgagcagagaccaaagaagtctgccacatccctgaagtacttgtgcaagggcatcagcgccccttgctggccgtgggcccccgaccaggcacacatccccttatcagggtttgtggcacgattgtcataggcaggaatgtagcagtccagctcgcccaggtacccgtcctggtcgagagttcgaaggcgcgcctccgtaagcttggacggaggacttacccacttggcgcccaaggcatcgtgcctcttatgaggaactaccgaagaaaactcctcactgatgtagtccacatcctcaaccaggacgtctccgtcagcgactagttccccagcctcgttgtactccacgaagtttgggtgttcaacctcttcctctcccttcgcctcgaaaggactgcccagaagtgcatcgtccagctgctcaacctcctggacctcagcgtccccctcgcgatcctcctccatcgggacggccaaatcctgttcggcgctgggcagagtggcgaagccgagccacttgaggatcagaagcgtcgaccagacgcgtggttttctttgtacgagccatcatcctatggctgggtacaaggtcagaagaatgtcctgctgaaggaggactgaacgaagacgaggatgatcctcgtgcagaagttgaa

SEQ ID NO: 364406 - DNA, 455 bp, Cannabis indica
tacttgtgagtagatctaagatcttggtaaaataatttccaacaaagagatcattctcggggcccctccatagaggtctaagtccattcgaagcaaaatacatactgaacgaattacacaaggtgattgcagtaaccactctggactaagaagcttatacaacaaggctcttacaactggatactattggttgacaataaggacagattcatatgtcatcttcaaaagatgcaacaaattccagaggttcgctcaagtatcacacatgccaccaaaagactccattcaacattaactccttggcctttcatgaaatgaggaatgcacattgttgggaagatacctacaggtctggggcaaagagtcttcatgttggcggtaacgattagttcaccaaataggtagaagaagaaacctatgcacaagtcatggatcgagaagtcaaaagttttatt

SEQ ID NO: 364407 - DNA, 472 bp, Cannabis indica
tttatgaatgttcttacatgatttattttgtgatttgaccgagattggtattacaataatttatttatattcttcaaattttcggatttttttttacataagatctacacatttagccattaatacccgaaattagtaccgtagatcgactagaaatccaatcacgatcaaaacccctaagttttcctttattttatgtcgtatttggctggtttttcacgtcagacccagctggtctgaaaccgggtcgcgtgactcacctccaacctggctggaggaagaagaagacactgtccaggaaagttcaagaaataaaattgatggtgctaataaacaaaatggtaatggcaaggagcataagaaaaaaaagaaaaaaaaaagcaagcaagcaagcacatcggagaacgaactgtcacaaatttaagacttggttagaaatttagactgtcacaatttaagacttggttagaaa

SEQ ID NO: 364408 - DNA, 822 bp, Cannabis indica
tgtaactccccgcctggtgtgccacccgtagatatataatgactatgatcctcgatgtcttctcttgtatacattttctccttgaatttaccgtaacttgtcgaagaagaaaatggatcgctccatccagtcacattggtccctcgagcatcagtaggaccactaatatcattggtctctctaccattattaggacctgtactgtcagtagttcctctagcatgactggtttcgcctggacgactactactagtaccaggtgtttggcaattttctctacggggcattcttttccgtgtcggtggcctcggtggtatttggtacgatagtggagtcaagttcaaaggtacagcagcaggggcctctgtaccttggtcgtctcttacgccatcattgccctcaacataacattcagggtctggaccattaaaaaaaccatcgatgaacggcatttgtgctacaatatcagcactcggcatcatattgtttaattcaggtaatacatctgcaaccaacacctctggatttgtttctggaacaaaactcccaacctcgctacgattatccttaacagaacttggtgtgggactaggatcgacgcaaacattcttcttaacaaagtcacaaacaaaggagtaaattcatctggcttcttcgcaagtgtagataaaaagtaccttgcacgcttatcatttccaataacttcagggcgatactcatagcctttcctgtacttgtaatttacttccaatttcaagtcatactccactttgtcaatatccagttcttcgtacaaaagatcaaccaaacctgagtagctta

SEQ ID NO: 364409 - DNA, 963 bp, Cannabis indica
ttagaagggtaaaataatattttgactaactctaattacgaactaagaattagagggcgagctacttatattgattatatcaatagactacaattaagaattctgtaaatataattctatattatcaaagagtgcaattccatatttaaagtggagtaataatgaaattaataagctagattattctgttgatgagattgatagtaatctttaatttattggaacttgaaaatataggttcatggtccccgagtcacatctacacaatattggggaaggttttcatttgatgaatgaattttgaatgaaaattaaattctatggaaaataaattcttaagggaaaaataataatttgtgaaattattgttttgactaattatacaataattatggcaattatgaattgtataattagtagtctttaactatttaactttattagattaaaactatatgaataattaacaattttaccccttgaactttcgacaatattgattttgccccctaaaatacacgacttgttaataatccccctgaacttttaatttacagaaatttagtccttctgttaggttttgtctcattattctgtttgaatgatgatgtgtctttgtaaattagtaattttgccccctaaactttgacaattatcaaatcgtaccctctcaaaataaaaataagaaaaatttaatattttttaggaaatcttaaaaaattaatttagatcttaagaaaaaattattttgaatgattaagaaaataaaaaagtaaattaaaatgttaaaactaattaaacgatttaaaaaataatttattttttattaaaaaattcatctagatattaaaaaatatatattaaaaattcaatttttataaaaactaaattttacgggaacaaacttaagtatattttatttttcctcaaaaaaatgtagatttatttaagtaaacataatat

SEQ ID NO: 364410 - DNA, 709 bp, Cannabis indica
atatgctatctagagcattgacacatctgttattttaatagacatcatgttcttgaagtacttttctttaacttgttcttagaagaaacaagctccatttcttcaggtgtcgggccaccatcagtgtacaatccagatacaattgcaaactcttggagagaaaatctcacaggttttccattaatcaaaaaccataactcatgcctcttttggcaatctaccctcctcaaaactatctggtttactaaggtgccaggaaaaagccctttagtgtcgaggtccaagagacgacccaattgggagtaatgtttaaaaatatcctggtcagactttgtgagccaattctttatttggcctattacacttagcggggatttgatggtaactttagattttgcagctgtattagtagtaatggcacgaggtatacatggaagctctgttgttaatatagttttgggcatctacaataataatgtgtgaaatgaataaaaatatataaacgataagaacataaatataaaaagtataaaaagaattacaaatttaactaaatgaacaaggtcgcacgtggtatgaaaatatatagtgcgaccatgtgcgaccctatgggacttgtgcgaccttggtggttgtttatggttattcagagtaaattcaagttacatagtgtaaatataaggtcgttcatagtcgttcagagcaaatt

SEQ ID NO: 364411 - DNA, 727 bp, Cannabis indica
gtatcgagcgtaggtacgagctcacctgattaggtgatgcaattatatggtatatggatgtaggtttttggcactggctcacctaattaagtgatgcagttatgcgacatatgggtacgaggctatggcacaggcttgcttgattaggcgatgcaatacaagtgtaaagaccgcttaatttaaatttggaaattagcagataattagggtttaattatgaaaattatttattgatatttaaataattatttatgatgatttatttgaatttagaatgcattttttatgtcatatatagaaatttcatatttttgcatgttcagtgcccggcaacattggaatgcgatgtatggcttagtagaatcacatcttcgtattttagtatagcgggacggtataattaaacattgagaatgttgagtttagtcgggaatttagagttttcccaaaataccctaagtgatttgtatgactctttagtatgggcaagggcattatggcctttttgcttattgagttttgtcttttagtgggggtttaatattaagttttatctggtttttattgcttagtttggctgaagcaatctagtaaaataaggtaaaccaatccatttattcattttatgcaaaaaattacaaaagttagaaaaaagatcacattttctctctcaagctcactctcacttttggccacccttagagcagctagggttcatgattttgct

SEQ ID NO: 364412 - DNA, 537 bp, Cannabis indica
ttcccttcttcaacatcttgaagaagtgtcaaaaatttgaatggtccgacgagtgcgaggaggcattcaagaaactaaaagagcacatggccaagccaccaatcctatccaaacccgttctgggagaagacttgttcctatacttggccgcctctgagaatgcggtcagcgcagccttagttcgggaagaagagaaaactcagcatcccgtatactatgtcagcaagcgcatgataggatcggagacgcgatacccagtgattgaaaaactagttttttgcctcctgatggcctcgagaaagttgagaccctactccaaacccaaccaatcaaggtattgaacaatcatctgctccggcaagtcctacagaagccagaagcgtctggaagactcctcagatgggcaatggagttaagcgaatttgacctgcactacatccctcgcatttccataaaggaacaggcgttagcaaacttcatcacggagtgcaatgaggtcgaggctactgcaaacatacccacaccatcagtcccagc

SEQ ID NO: 364413 - DNA, 679 bp, Cannabis indica
accacgcttgagtaacaatgtcacgacactctgcatctttcaaccaatgagtttcaaaccgaaaacttctctttttatcatgcggttgactacgaacaatattttccagaaccgccacaataggccgatggtccgaatgaataaaatctccattaatgactttaacagacggaaacaaactattccactcttggttacaaaagtatcgatccagacgttcttgcacatgtgccgccccgtgccttttattaagccaagtaaagcattgtccttcaaatcccatatcaaccaaagcacaattatccagagcttgttgaaattcagtaatagcagacaaactccgatccacaccacccttcttttcattaattgaaaggatttcattgaaatcaccaccacatatccaaggaagatcaaacagaccctttagcctacacaataattgccatgaatcggctctagcgcttgccttaggattcccataaaagcctgtgaaccgccataaattcctccccggacactgcaccaaagcatcaatatgcccaaccgaaaaagacttaacagacacatcccaatcatcattccacaacaataacaatccaccactcttccccacacaatcaacatgaaaactgttagaaaaactaatatgacggcgtataccttccgcccacccacc

SEQ ID NO: 364414 - DNA, 579 bp, Cannabis indica
gttaggctatttttagcctatgtctcgcgtcttatagataagtattttctcgattattgttgtcttttggagcggttttacgcttgatttttcttgtttcaggttctcggagtgttggagttcaaattcagtccattgacgaaaagacgggacaaactggtaaaaaatcgaccaaagctgctcaaggggagtcagtagtcgccaccagcttgaagcctagtcgcgaccctttttcatggtcgcgactatggtcgcgacttggggttttggcagaaactcagtttttcgagttttgcctgtggtcgcgactagcctttaagtgggtcacgaccaggcacggaaaatgagatttttgacctaattttgatttttccccaattagaggcacacctctcactcctatataagggatacgatttagaaggccaagataagcagaaagtggcccgaaaagtgaatgaatgaggagaggaagcaatcttgaaaacccggagcgatatcaccatctagtttctttcttttaccctctatttctcttttatgtctatttttgtttcagaattaatcatggatgtttat

SEQ ID NO: 364415 - DNA, 547 bp, Cannabis indica
ataagttaatttgtaatttattgagggatcaaattataaatacccaaaatttattatataatgagcctataaataagtattggtccccaagaaacactagggttcctatattctttccttcccatcagaaaaaatactttagagaaatagtatattcttggaagatcataaccttaagttagtgctattgctcacctcattatcatcttcttcttcttctttgatttagcaaaggttttataaaatataatttagaattttctatattaaagcacttttaaaaatataattaaatatgtgattaatatatatatttcttaagtccatggcctaggccatgagtcatggggatagtccgggatgaggtcgtagttgagcttctggctcactaacataaccaatgggcttaacatccaatgcttaagagtatcagacaatgaaatttgatgtttaattcatataaaacacaacttcatcttgttgaatataaagattttttttttcaagtatgttttacatatatcagtgaagaacacgacatcctatt

SEQ ID NO: 364416 - DNA, 694 bp, Cannabis indica
cgttaactatgaatcccaaaaattttccaggagaaactttaaaggaacatttttttgggtttaacttcatgttatacttcgttaatatcttaaagcattctgtgaggtctgaggtatgatccttaatttttattgattttaccaacatatcatcgacgtaaacttccatattctaccctatttggtttgcgaacatttcatttaccattcgttgatatgttgccccagcgttcttcactccaaacgacatgactttataacaatagagtcgcaagttggttacgaggcttgtatgttcttgatttgggacatacatttttatttggttatatccagaatatgcgtccataaatgacataagctcgtgcccaacagttgtatccactgactagtccatcatgggaagtgggaaacaatcttttggacacgccttactaaatcagagaagtcaatacaagttctccaagttccgttaggcttcgggatgagaacaggattggctatccacgagggataaaacacctcgcgtataaaatcgttaagtaacagcttgtcaacttcctgttttagtgccccttgcctctcggaatccaagggcctcctatcctgtctcttcgctgggtattttggatcaacatttaagtgatgtctaactaatattatggtcgatccctatcatatccccatggctcca

SEQ ID NO: 364417 - DNA, 557 bp, Cannabis indica
gcgactactgcatatttaactccaccctttccttgtggtagagatccaatcaaatctatcccccacacagcaaagggccacggggaggtcatagacgtgagttctactgaaggggctcgtggtactattgagaagcgttggcacttgtcacacctttttacatattggagagagtcttgactaatagtaggccaatagtatccttgccttattatctttttagctaagctatcccctccggcatggtccccacaaaatccttcatggacctccttcaatatgcctcgtgcttcttcaactgtcacacacctcaataatggcatggagtatccccttctgtacaattttccatccaacagagtaaaccttggtaccttatatagcaacttccttgcctcactcttatcagaagggagactcccagtagttaagtaatcaatgagtggagtcatccatgttatttgagtatcgaccagctccatgtcagcctcttcattttcctccacattgatactcggtttaggaaggaactctactgggacaacgttgagtgtatc

SEQ ID NO: 364418 - DNA, 814 bp, Cannabis indica
attaaaaaaatataaaaataaacataaaatatttacaaaaaagaaaatattccaatactcaagtattatcctataggctcctatataaatttactatataaaattccttataatttttttttttaaaaaaaataatatgtaattgtctaaataattaaattacttaaatcatttcaaaaaaaataaaaattttaagtcaacatttaataatgaaaaataatatcttctatacatgcatatcgtaaaataaaaataaactaaataaatttataaaaagaaaatactaataaatataattaattatcgataatataaataagacaaaaataaaaggaattattacatagaaaatataaattgacactttatttacaaaaatacttttataaggtgtggaccacatttatactttttatgtaattttaattaccaaaatacctcttacactatcacttacacattcagacgatggttgcaaggtggttgctacgtggttgcgcggtgacgaaggttttaatcagatgatggttgcagggtggttggccgaaggttgcataagattaaagattctgggtgattgctgggtagttggccgaaggttgcatcagacgaaggtttcaatcagacgaaataactgttagcaaaatgtttatgcaactataatgcaactgtaatgcaatatgaaacattaaaaatcagaacagtatttccacgtaactctatctacatgtctctttatgatttaatatgaacaaattcaccattagaaatttggaaaataacgaaaatagaccaggataaacattttactata

SEQ ID NO: 364419 - DNA, 651 bp, Cannabis indica
tcttttactgtcaaggacattgcagtggctttgaaattacccaaaggtgtgcccaatgctatcatgtctatggatcgccatttgatgctcactgaacttactggtgcacgggttgaatggaaatctggggatagtcttcgaattacacatctcacctatgctcatgcatcactcatgaggtttgctcttagaaattggctcccaaattccaacaaaaccatggtgtctcaagatttggcatcctttctttttttatatcacctcgagggcacccattgatctggcttcatcaatattggaccagattgtttcttttcggagaggtaaaaacgtactcataagcttgtgtttcctaacctcatctataaaattttgtcctcttagaaagatgtggctcaatctcatgaaacacttgagtctccacttactggcaccatattccaaccctgagagtattttgatggagcttttccaaagcgtcctaaagctggtgttgctgctgctgcaagttcgatttttgctcctgcaaatgtctaggaagtcaagcatgaggttcaactgatgaacaatcatcttgctgccatggaggaggttcagcaagggatgtccaagcaactgtattcattgatcaagctctatggggcataagtt

SEQ ID NO: 364420 - DNA, 964 bp, Cannabis indica
aaaattcaagccctcctagatagaactcgccaacaaaaaccaaagaagttcaaagcttaactggtcgaatcaccgcactcagcagattcgtgtcaaaatcaacggacaaatgtgttccattcttcaacatcctgctaggaaacaaacagttcgagtggacagaagaatgtgaaagagcttttcaagatttagaggcacaacttacaaaacctctcgtactttctaaacctctggacggtgaggagctgggaatatacctagttgtcacggaacatgccgtaagtgtcggctgatcagagaagaaaacagcgtacaacacctagtctattacattagtaagagactcatcgaggccgagcgcccatatccgttgattgaaaaactcgcctactgcctcattctagcaacaaggaagttgaggccttatttccaagctcatcctattcgggtatatactgaccaaccattacgaaaaatactgcaaaagccagatgcttctagacggttactcaagtgggcagtagaattgggttagtatgaaatcaacttccaaccccgaacagcaatcaaaggccaggccttggccgactttgtggtagaatgcacaggcaaagaagaaagcataccagaaagcaaccccgacccagcaccttagccaagtaacaatgaagataaactgacctggaaactacatgcggatgggtcggctacagatcaactatctggggcagggattgccctcgtcacgcctgggaggccacacctacacgctgcagtcaagttcagattcaaggaatctaacaacgaagccgaatacgaagctctaattgctggaataaaactaggtcaggaaatgaaggtcgaacacattaaaaatctgcagtgattcacagctggtggtaaaatatgtatccggggaatacgaggctcggggagaaaagaatgatagcatatctgagcaaaa

SEQ ID NO: 364421 - DNA, 500 bp, Cannabis indica
aatttcagttatataggcacactttatatagaatagatatattgtcgggaaaaataataatcttcaagcgcaacgaaattataaataaatgaagcaaaaaaaaatttactcagtttgataaaattaccaaaatcataaagagggatatatttcacttatcacttcaaaattatgtatactctctcaatctctccacactaaatctcaatacacccgtgaccctttacttctttctcactctcaccagacaacaaactcacacatgcttttcttttcacaactcactatttttctccacacacatacttctctctcacacaaaacacatatttataaagttacaaaaatttaggcatcatgacaacttagagaccaagacattccaaatcaaccttaagaagactcattaaaatttggtcaccaatactttcctttttccacaattaataattacccaaaaaaattgtaactttacaaatatagataaataaataaagaaa

SEQ ID NO: 364422 - DNA, 952 bp, Cannabis indica
tcaagggctagagatctgaacggaaggagtcattatattccgctgaacccaatgtaaggttttcttaaatccttatgtgtttatttcattgttttagaaattcatattaggatattaatgaaacatacttgttagtaaatctagatcctaaaaactggcctcagagccatggtaatgatttactttcatgaaatatgaattaaaacgatgatttgtgttgatttggatggcttcatgtagtttatgtgcttatgggatgatagtttagaaatcgcaatgtatgttactgaactattttttatttcgatctgcaattattttttgtagaaagtggacgaaaaaataaataaatttatgcttttacacaacctaatttggagtttttatgaattagttatgattttttgaatttgaacgaaaatatcaggatttgaatgcacaacatgcgcgctcggggcattggagacgctcggacagcccctcgttcagacaagaagctgaccgagatttctcgaacatagcccttgtctgaatggctgctcgcgcccatgttcctcggtcaaatgaggctgcttgcagcctctgtctcggccgttcctccccatactcgcgcacaggggtatgcattgcatacccgtgtgcctcaaacttgttttcttcatatcttttgattcaaaaatcgtttttcattgaaacaaaagccaaattttggtagaattttgtgtagaatctgaattttcaattaaaaatctaattgtcagaataaaattaatttttattaatttttttaaattaattaaaattagttttagatattagtaggctttgaattttgaaaatttaatttctcgtaaaaagagccttatggttaatttttaaattttggattattttatttatttgaattataagattagatattacattttttttattaaatttgaatgatctt

SEQ ID NO: 364423 - DNA, 595 bp, Cannabis indica
cacagaatttttagtcacaatataagaatgatgattgtaattcgttataataattttacttttaggcacaagttttatttgttgtgactaaaaataagattttttgtagtgatatatcttactttcattaattataattaaataattgttgaaaaaaaaaagtatttttaaacaaaaacatagtgtagtataataatatagaaactactaaccaattattaagtgtcatatatttatatagtgttggacatcttaagatgccaaataataattcagcagaaaaaaaaatgatacaaaaaattataaataaaaaatccggagaaataaattataaaaacaaaaattaacaatcattcataacaaaaaaaattaaaaaaataaataaattttacatcaagttttgtaattatgcattggagcataatactaaaaattgatgcaaatatatcacaagtcactttttttgccaaatgtattacaatttttacatatcccattatagatgctcttgctaacttatatataataataacaaaaaaattaaaattctaattgaagttaataaagatatctacatattaataacgaaaatatt

SEQ ID NO: 364424 - DNA, 689 bp, Cannabis indica
tatttaagttgaaaattgatttttcaaattgattttggattaacttaaattaatattttgaaattaataattaagtagaattttctaggaaatcaattattcagatattctttaaaaatatttttaggctaaaaatttgttaattttagatcaacttaaataaggatatttttttcaaattaaggtgattagttcaagatacttaatttgttatttaattaaattttgaaaattatttcaggtaaaaattttgttattttaaaacaacttaaattagatatatttcaggaatttattttactatattttaatataattttgaaatattatatttatttataaatagattttcaaaattattatttggaaattaaattaaagttgaaaattaattttaattaattttggaccaacttaaattaagtaattttcattattaaaatatatagattaaaataaacgattagttaaaaatacattattttaaataatgagctttaatcaaagagatatttgatctccattgttggtcttacaatggttaatcattttcaatataacctcgagatgctagactttctcccccttatggatggttattcgttgaaagcacttaacaccgtaagatctcgtatgatatgtattttataagtttttgtttctattagactctcccctatggtgactac

SEQ ID NO: 364425 - DNA, 838 bp, Cannabis indica
ttagcaatttaacgccgtaaaatctcgaaagataagtattatttgtaagtgttttatttttagtatggatcaccataatggtggcgactattagtaagacttacaaaagtatgaaacaatggtggaggctcatgaaataggaatgaccttgactctcgcctaaacgggacaacgttggattctcttttcgatcaaataaaaggttgctagaatgtttgtcattttagatgaattgactactctattcaatggatgatgctttgactctcgcctaaacgggacactgtatcagtttattgaaaaccttggaaaataaaaatatgtttcatttttggtatttttattaacatatttgttatacttttctgaattgtgtatgaatttatttgaaccaaatgatttacttccgtttattgatatttgtagtgtcaaaatgaacaacccacaccccgacccactcctagtaaatgcttttgcaaatgaactgtatagtgtgaaaatgctccctggaaatagcattaactcacacttgttaatgacgaatctgaaattccgaaaaaagcaaacttgcttggaattgaattattaagagaacaatgagttcagttcatacttaatagtcttcctcctaagtataatggatttgttgtatcttatatgatcaacaattttaactcttccgacatggataagctagaagcagaattgcgagcttatgaacggaacttgattgcaatgtcggcccccagatttgcaaacttgtgttagaggaaaagaattaagaatgaagcttctaacaatgttgcttcttaagtaaaattgatggtagtactcttca

SEQ ID NO: 364426 - DNA, 852 bp, Cannabis indica
ctaacgacacttggaggacttgtattgatttttcagacttaaataaggcgtgtccaaaagattgtttcccacagttggtagatgcaactgcaaggcaagagctgatgacatttatggatgcatattcaggatataaccagattaaaatgcatgtccctgatcaagaacatacaagtttcgtgaccaacatgggactttattgttataaagtcatgccatttagtttaaagaatgttggggcatcatatcagtgactagtgaatgggatgttcaaaaagtagattgggcgaaatatggaggtctatgtcgatgatatgctggtaaagtcaataaaatgtgatgatcatacaaaagacctcgcagaatgctttgaaattctttgaaaatataatatgaagcttaacctaaagaaatgttcttttgaagtatcctcgagaaaatttcttggtttcatagttaatgcgaggggaattgaggcaaatctagaaaaaaatcaaggccttaatagagatgctttcaccaacgaagcctaacgaagttcaggccttaacaggaagaatggcagcattaaactgatttatttcaaaatcaacagataaatgtctgccattctttaatgttttatgaggcaataagaagtttgaatggacagaataatgtgaggaagcttttaaaggcataaagaagcatttatcaacacctccaattttggtcaaactaataattggataaactctatacctttactgagctgtctcggagagtgcaatcagtgtagcctttggtgcgagaagagggaaagcgccaacaacttgtttactatgttagtaaaaggttattgggggcagagtc

SEQ ID NO: 364427 - DNA, 789 bp, Cannabis indica
catgcataggcagttgacgttgacgaggaacttcaaaagattttaaattaataaaaataaaaataaaaaagaagaacgaacaagacttcggttttcattgatccatgccaatcttcaaacacatctgtaattagcaaaaattaaccattaacagtgtatggaggcataataattaagacttcagaagtttaaaaagacaaaagtaatacagtaaaaaagaatgaagaaaattcaatttaaagaaaacgttttttttttttttttttctctcgatacaaaaaagactttgattttaatgaaatcgaccccttcaaacgcgttttcatcatcaagactcactagttgactacatatatttcttagcaaaaccatttatatagatgtaatctaattggatagcatccttagggtgacgtatgatttaagaaaataatttttttttttaaaaaaaaaatactaattacaacctcctattataatttttttagtcaattttcatgtctgaaatcacatgccgaaatattttaaaatttttttttataatagttacggtatcatttctgtaaattttttcaaaaattccgaatagtttacagcaatgaaaacagagttcctgatattccagtttaccacgggcgttcaaaaaacttcaaatgtattttttgcacggtaaactattcgaaatttttcaaaaatttacaaggatgatgttgtaagcataacaaacaccccgtgaaaaaaaaaaaattgaaaaaaatattctgacatgtattttcgagcgtggagatt

SEQ ID NO: 364428 - DNA, 458 bp, Cannabis indica
ctagaaactaccctcccgtcgtatttgagacatcagattaatggaaacacggtgacctccgggatcacctagaccaaaagaaacacgtgcccgcagtctccacgggaacgctaaatgaaggaatcatggctgagcttccatactccggaaagacattgcttgggtctcccggagacaaaaaggtgttgactctgaatctgactgtgaagaccggaagccgtgtgccaggcacatcctggaggcggaactccccaaaaattttaagatgcccgaaatggcagcttatacagggaactcggaccctagtgatcacttgtcgcggttcaaccgggtaatgacagtcatgagagtcagcaatgacaccaaatttttatggttcccgctaacactaaggggatctgcggaagaatggttacaagaaactagaaccaggaatccgtggactgctggaataagct

SEQ ID NO: 364429 - DNA, 872 bp, Cannabis indica
tgtaatatcccaataaatctaatggtagataattagggtttatatttatcttatgagttaatcaggtaataagtagaattatgatcctactaatttatttcagtataaaatgtaaatattgctatagtgagtaaataagcgtaatttgtaaattacggagatttatatagcatgtgtgaatataatatgagttatttgtgaaataaaaatatttttaggttcggcgaccctggagacccgattggaggccaaaaatgtcacaacagtttagttagaaatattgatggaattattaagataagttgattttagaaatattagggtattttagggtactcgaagttggccaaataccctaaaaatagagattttttaatggctaagaaataataagattactattaataataaaatttttattaatattatattattattgtatatatattaagttttaagttataacagtagaaagaacgaaaaacgaaaccctcgttctccctccttcgacaaaaccttctcctcctatattcattttcttcaatttttaacccgaaacttaatgatctaagctccggtagcagcaggatagcaaatctttgaaaaagaaaagcttaatgtatggtttaatttcgttttaagtttaaaacaatttattttggtatagagattttgtaaattagaatagttatgaaggttctgaccttataagattattctcgggtagtcatgggactagttctaatgtttacttgttgaatttgaggtgattttgagttagaaatcgagttttgaacttttgaaagcttagtccgaacgttaatggcgtttttcatttaaggggtcgatttttatttctgttacgtaaggat

SEQ ID NO: 364430 - DNA, 787 bp, Cannabis indica
aataagtaggccctaggcgtgggcctaccctgcctatgcctagggtcggtcctgggtgacgtcatatgattatattaattatataaaatctgatatttaattatttaaacagtaatatgccaccaagatgttagcatttatcttagggtaaacactattttagacactctgttttataaaagttactaattagaccttctgttttgttaaatgacgaaatagtccttatattttgtaaaatagtaaaaataagactctgaacttaatttttaacaattttattttttttaatataactaactttaagataatttctaatacgaacatatataaaaaaattgtaactagttttgtcataacatgtctagaccaaattattattaagttttattttaacaaaaaattcgtacagggtcctatttgtacaattttgaaaaatacagagtctattttatcatttaataaaataaaagatctaattaataatttttacaaaacacgggatccaaaatagtatttactctttatcttattattataattattgccttatttttattttggtttttggtttttgaaatggaattattatttaaagagttgatgtatagcttgtagctgtcacatgtcttttcaacttttccaacggtgatgatagatgagtgccacatgtttgtaagcatgttttattattatatgagtttccattgatttcctctattatttaaaaccctaattagatttttttttagaaaaaaaaaattaaagtatgtttgtattagtagga

SEQ ID NO: 364431 - DNA, 995 bp, Cannabis indica
aactcaaaaataatgaaaaataaaataaagagtatttaattatttgcttaaaagtaatatatatgtaagcatctccaaagaaatactaaatttagtgttacactatcaccaaatttagcgtcaaaaaatatttctactccaaccacaacactaaaacttacactaaaaaatattccttattattatattaattttttaataaaataaaaaataaattaatatcatattaattaacaaaattaccacaattgttatatttaactaattatttaaataaaagaaacaccacaaaaaatttgaattttattttcagcgtgttaaattttttaaaaatttttcaaaattgtgcagaatgtattaaataactataatgtacacgaacataaaaaaagactaaacaagtctcccgaatgccgaaacaggtagaagtatatcattgcgccacttttaaaacagtgcattattttcgacgtattaatttttaaaattttacaggatgttttaaataactataatatacactactatatataaaaaaaatagactaaaaaagtatgttgggtgccgaaacaaataggagtagtttcatacattacttttaaaaatatgcatggtaaaatttcccaaaaaataattcttcattttacaaatcaaataatataaatatatataaatattaattaaataataaaaaaaattaaaaaaaaaacaatgccgtgtctacagtgcacggcatatatgccgtgcaactacaaaatgctgcaagaaatgcaacctccttggaagatatatacacgacatacaaattttttgcaatctccttggagctgttctaaatacataaatactatataaaaatgggagttcacgtgagtgtgcacaaatttcaagaaaataataaaaactaaaaaaaaatttggtggcgtttggtaatacttttttaatcagttttctgtttttaaaagtgaaaaaatgaaaatatttttcaaaaacat

SEQ ID NO: 364432 - DNA, 762 bp, Cannabis indica
atacgaatggcagcttatcaaaagaaggtgaccaaatattttaactccaaagttaaaacaaaaaaatcactattggggatatggtcttaagaagagtcttcccagccacccaagaacccggagtgggggtacttgggccaaattgggaagggccatatgaaatcgaggacgaaatcggctccggaacttataagctaaaaaggatggatggaaccattgtgccaagggcctggaacgccgatcacctccgaaaatattaccaatagtccaaatgtgtaacttaggctttgtttaaaggatttgtaccgtctaagtgtatgcaacctctgaattttaaataaaactgagtgccttaaaaacaaagttttcatgccactcaggggggtactaaagcataccacacggacagatgaaaaacaagccgaaagtaaaatatcctgacccaaagggcaggtccaaaaagaaaaattatgcatcaaaaaagatcatatgtataaatatcctgacccaaagggcaggtccgaaagaaagaatatgcatcgatgaaaaaaaagatcatgtatataaaaatcctggccccaaggacaggtctaaaaaaacatatatatatatacatacaaagggcacggggacatgccttaattgttgtctccccttagaaaataagacagctattaagataaagattgtcttaaataaaagaaaatagctgtaaataaaaaacaggataagaaaaagcttggtgaagtgagctggattcaa

SEQ ID NO: 364433 - DNA, 942 bp, Cannabis indica
atgtggtagaatttgtatctcaatgcttaacctgtcagcagattaaggctaaacaccagagaccagcaggtttgttgcagcctttgacacttcttgagtggaagtgggaggatatcaccatggattttgtggttggattaccaagaaccacgagtttatttgattcaatttgggttgtggtagatcgattcacgaagtctgcacattttctaccagttaaaataacaattacagtggatcagaatgcagatttgtacgtcaaagagatagtaagattacatggtgtaccaaagactatagtttcggatagaaatctgaagtttacctctaaattctggcagagttttcaacgagctatgggtacaaaactgaaattcagtacagttttccatccacagactgatggacagtccgaaaggacaattcagatactggaagatatgttacgagcctgtgttatggattttgagggcttttggagtaagtatctaccgctgatagagttctcatacaataacacttattagagtacaatagggatgactcctatgaattgttgtatggcaaaaagtgtagatgtcccatttgctaagttataaaaatctttagctgcagccagacttatcatatgaagaacagttagttcagatcctggacaaaaaggataaggtccttcggaacaagaccatagctttggtcagaaataacaaggtggaggaggccacttgggagttagagtccgacatgagggctcaatatccagagttgttcaggttagattttggagacgaaatccttttaagggataattgtaaagactgcttaactttaatttggaaataggcaaataattagggtttagttatgaaacttgcatgttagttatgaattattattttacggagatttatttgaattcagaatgcattttatatgtcatat

SEQ ID NO: 364434 - DNA, 754 bp, Cannabis indica
ttattgttgtataagttagcttatggcttcacaatctatcatacaaaataccaactcaaaaattgataattttattccttaaatttttgacattactatttatgctccttaaaatatacgatttgttaaaaattcttcttaaatttttatatttgtagaaattctgtgtttctatttggtttcgtcctattattcgtttaaatattagcctgtctttgtaaattaacaattttgcttcataaactttgacaaatatcaaatgataccccttaaaataaaaataagaaagattcaacattttttttttagtaaatcttaaaaattaatttagattttttttttaaaaaaaaaatattttgaatgattgaaaaaaaattaaaaaaaaaaataaaattttaaatccaattaaacaatttgaaaaaaaataattattttttattaaaaattcatttagatataaaaaataatatatagatatattaagaattcaatttttgtaaaaattaaattttttgaaccaaatcgcacatgcactttttataattttttaaaccacgaccgcattgcaagatctcaaaacagcaaaaatatagtgcggtgcgggcagaatgaaggacaacttacatgaggtcatcatagaaaatcagagtgctttcgttaaggggcggttaattcaagataaggcaattcttggttttgagagcctccattgtatgaagaaaggacggttcgagaacgagaggaagatggcctt

SEQ ID NO: 364435 - DNA, 627 bp, Cannabis indica
cctcgggattctggccattcccatgttgtgttttcctcgagcatgttgtccgcgtactaggaccagcgtcgggttgagttctctgaggatgtgtggttcgagcactaggaccatcctcaggttgggccctcctggaacgggtgctccttctggacggcagattagttgatcttctagagcccataggctcttttctagaacgacggttagtttcctcatgtggggtgttaatattcttgggattttcaaccataaaggagaagatttttcttcaaaagaatggaaggctttctctaagttttttcactgaggctctcaatgaaagcaccaaactgttaatgcagatttttcgttaaccaaatttgagcctcacgattatgattcaacacagaaataataaaaactatagaaaaataaaatatgaacaccagcttttttacgtggttttgcagttaaaattctgcatagtccacgagtcaatcttattcggatttctgagtcttttttttagggcctgtataagagttttttcctccccctttataacattaattttttttttctaattaattaatcaattaatgtttataaatttattaaaaaattaaaaaattgagagaattaagg

SEQ ID NO: 364436 - DNA, 675 bp, Cannabis indica
tatattgttatttttatgttgtttgatatacttatagttttgtttaactattaatcgtattttaacggttgtttgttttattaattttgtcatcgtaatattttctagtgcgtgataagacctctgatggtgtttacaaccttccaaagaaaaattttaccaagatttataacttatttttttgatttgtcttgtttgaaacgttctctgcttgtagtcagtggcggacccagggttaaattttaggatgagcttagttatacatttaatataatccaaaacaataaataactaactaaatttaagtggaataatggtttgacagcatctccctattctagtggtcataagtttgatcctaatttgaactttatacttcatttattttttttaataaataaaatgtaaatacacgtagaaaaaaatgggcaagaaaattcaaaaaatggtctcccatgtaaatttaaagtatcttaaccaatttttctatttaactactatgtatatatgaaaataacaattgtatattaatatatttttaaacctcagggtggactttagcccttcctcaacacccctaatgtaaagcccgcttagttaatttggaaattaacagttgtttatgtttaatcatggaattatttatagctatttaaataatttattatggatatt

SEQ ID NO: 364437 - DNA, 616 bp, Cannabis indica
atattactgtcaaaaaattaacagatggtcgacatagcatcgacatcatgttgatattctgtcgacattatcaaacagtacacaattacataagtgtgtcgacaaaatatcaacatcctgtcgacaacctatcaatattatcaaacagcaaacatagcatcaataaaacaaattgccgataacatgtcgacatactgtcgacatgctatcgatattccaactgaatgagcacataacaaaattgtcgacatgatatcgacgtgaggtcgatattatcaaacagaaagcaatcaaatcatattgtcgacaagatattgacatactgtcgacaaattatcgacattttagatcaacacttttattccaattaagtcgacatcccatcgatacaccaacgacatcctatcgatatacactaacaacacagacaattctaatggtcaaactactttcaatcttggtcgacattgtatcgataacctatcgatatctcatcgataactttgtttgaacaaacagacaccactgatgaaaatgcagaaaacatccaaatcgcatacacaatctaaaacaatctaatctaaagaacatacacaaattcacatccaaatctatg

SEQ ID NO: 364438 - DNA, 641 bp, Cannabis indica
gtggatttcaatcttcatttgcttcgatagagacaatagtgtaatttttgtattttgcacttttcattctagccgagtccgcatatatctggattgtccattttttcgttgataaattgaatatggtagtgtcgacaaaaagtgaaaaccatgtttaacaaaaagtgatagtattctataacaaatactattaaatgtgcaaagaagattatggaccttgattggtgcctttaggttgtaaaaaattgattgtgagcaatacaaatattctgattcatcaaaaaaaatactattgaattatttgaatttaaattattttaaaatactattttattaaaataaaactctataccattaaaatttcatatttatctttattcaagaaagaaaaaaaaaattgaataaaagaaaaaagaaaaaaaaataaaaaagttactattattatctttactgcctttctagatgtgaataatggtctcttctttcttccatattcttctttatatattgtgtttgcagcatatctgtaaattattacgtaactttaaaaaactttaattgttaggttttgtattttacgaaagtaactttataataattacataaaaaaagttaatacatacatacataggaccaatatt

SEQ ID NO: 364439 - DNA, 501 bp, Cannabis indica
tggagggaaattcttcttcttagggatcaaaaccaagtttgtttcattcaactctgagaccttcaggaatgaaagcgctttgggtatcagaaataacaaggtctataatgcttctcatacggttagcaaggactttttaaagcaccttataagcaacattacaaagagcaatcgctcgtagatcacccatggaggtgaaattcttcttcttagggatcaaaaccaagtttgtttcattcaactcccacggaaaatagccggtatcaaagaaatcagtaacaagcttaaccaaatctgctctcacaatgtcccaatgtttgtgaaaaatcccagacccatggcatcagggttaagtgctttgtctggatgcatctggaatagggcagttttaatttcttcttcgataaatggttttaaaagattttcattttgagcattggttccaaagcatctgacatcaatggcaatagtattttgcaaggaacaattagcagtaaataa

SEQ ID NO: 364440 - DNA, 678 bp, Cannabis indica
cttcacaatttttgtactaatattactgttgctctaatttttttttctcactcgatatataaactagtgtgtttcttttttttttttattttattttattttatttttttgctggaaaattgtcttttcttttattcatcaatgaataattttagggatttttttttatcaagtcatttttttttatcaattttgactattatattacgttgtattattattattattattattattattattattattttgacaaagtgatttgataaaacatacttaaaaatttagattattcttttaatataccacatttaaataaatactctaaatattctccaaacaccctaaaatccaaaattacccttacaattcaaaaactctcttctcccactctctctgtctaacttccctccctctctctctgttatttccagccccaaatttttcaagccccgactgttcacgagctccgaccgaccaagacgacccacgaccaagaagacccatgacgactcgcgacgacccacgagaagcacccaagacaacctacgaccatcgcaccactttcagcgaaacccactcgcttgttttctgcattttttttctagtttttgatgatgtcgcaaaacattgcgaaatcatgaaacatctctaaatgtctccaattcacatcagcgc

SEQ ID NO: 364441 - DNA, 906 bp, Cannabis indica
tactcctcctacattaggctttaataggtgaggtagtggctcagccactcatcagaaaagaaaggcacctactgcaaccagtggctcaggtcagaacaagaggttccgggggaaccaaggtcgaggcaatcatcagggtagctctgaaacccaatacacttacccagagtgctctagttgtaaaaagcaccacctaggggagtgtaaaaggtaggcctgttttcagtgcggtatgccagcacattacaaaagggattgtccccaactcaagattgaagcactgaagactgcagcgaaacccactccagcaagggtgttcgcgataactcaggctgatgcagaagccagcccttcagtggtaacacgtcagctctcagtcaacaactcttatttctttgtgctgtttgagtctggggccactcattcctttgtggcagccagaatttttagtaaattggatagaccgcacgatagttatgaatcagggtttggaacccctactgcctggcggagaattagtcatctccaaaaggtggattacgtatttgctgatcagaatggaggatagggagttgagtgctgacttaatagaaataaatttagcagattttcatattatactgggaatggatttcttgtccaagtactcagcagtattgattgtaaaaggaagttggtaatcttccagccagaaggcgaagaactgttagtttttgtaagatcagttcagggatcttggataccaataatttcggcactaacagctaaggaattattaagatatgggtgtctagggtttttgactgtggtattagggataccactcgaccttactctgttcagccagaggacatcaaggtggttcgggaatttctagatgtttttcctgatgaactttcgggttta

SEQ ID NO: 364442 - DNA, 808 bp, Cannabis indica
ttacagtcgttatgctaccaaaaatttagtagaattaggatcaaatttgatattatatggtattttgtataaggtccactagctcaaccaccatcaagacgtgatgtgtcgaaggataaaggtcccatgccttctcgaaaacacggtgttgatcaagaagatgaattattcacaccaaagatcatggctttaatctctaagtcactaaaatggatggttgatgaatttctaagagtcaaaaataaacgtgatataatcacaattcgggtaccccgaggattcatagcacttcgtacccaacgttatctagagaggatttgcagcaggtggcattgtgtgacttcattggcaaccagggaatgttgtctggaatgatgtatactcttctttaatctaattaaccttatatattaaattctagtgaaattattataaaacactaatatttaacaatttaatgcaggaacatctgggagagcataaatcatttgagaaaaaatttcaagttttacgacctagagcttctcgcaatgaatggtatcaacgatgagaagagtgagtcttttgagaataacaactaccaaatgttctttatttcctggaatatcgagtaaatactatttatttttttagtgctaactgttttctatattataacttgaatttatttttatactatcttacatacatcttaatataattttttagtgcatattggatgttagagatcgttgcgccaggaaaaattatccatttagaccctatacgtggccacaaagtttcctaacaaattactaaaatgttggaa

SEQ ID NO: 364443 - DNA, 712 bp, Cannabis indica
gtaggaagaatttataaagcaaggtattttccaaattctactttcttacaagtccagttagggaacaatttagctacatttggaggattatttttgagtcaaggaatgtagtgttaaaggggtatcgatgtagagttggtgattgtgcttccatttctattcttgatgatccttgactacctattcttaattagccttttgtcattaaaaaaaatgagttttagtgacccatgttgagtaactttaaaactggttagtgacacttcattgcacgtcattaatgagggtgattggaaaaacagtttttagtgacccttcacacgtgtcactaaacccttttgcactctctgtaacgccctaaacaattagacatgctacccaaaatacttatgaaaccctaatcccctagacgggattgctaatcaaaatagcgcagaatttaaactcttctatttaacagaatgaaaataaaacttgtaataatttaaacttttaaacagttgggattccaaaaattattacaagtctttgtctttcagccggcctaagcggcaaaatgaaatttcaaaatgcatcactggtagacccttaacccgcttggtctgatatggccccgacatgtacattattcgcccagctaccagactcatggctgatcagctaatgtcttaccctttcctgcatagtagagcacccgtgagccaagcccagc

SEQ ID NO: 364444 - DNA, 836 bp, Cannabis indica
aatggttgtgtcgctatgatagttccaataaatactttctggggtgaatatcactcttaaccagtacgatgcccgcactgatgaaccgacacaatggttgtgtcgccatgatagcacccaaacatatatattataaacacagcatgcatatatatcacacatacatacattcgcatatatacaatatgttctatgttattcttacctcgttttttatttcaagtgagttggtcgacctgaacgaaaaacctcgtgctggatggatgccctaatcacataacataattgggtaaataacacacctaaaaccctaatttgggaaacccaaacctccaacttaaggttctcctattaataactaaaactacaataccctaagaaattgggaattacccaaataaggctctgaaatggacacgaatcgaggaaatgaattgttcgaggaacctgccagaatcggctaactagttttacaggtcttggtaaactgattaaccggtttgcaccgggttttcctaaacaattccaaacatgctctgtaacgccctaatgctaagacacgctacaatgatttttcaattacagtgctatctttgctaatcaaagaatttacttaaaaatcatgtcaaattaaaacttttatattaaatattaaactttttaactttacaaaatcatttataagtaccgggatcccatttttaaactttatacaaaatactcaaaatacacaaccaggtcgcacagcgactacaaaatattaactccagatgtcccgagaccgaacactccaagtcacgctgccatgacatgtacaacctcatctcagtcaggct

SEQ ID NO: 364445 - DNA, 595 bp, Cannabis indica
ccgtgagtaaccactttggtcataactagcaacaaactaaaccttcagcacaaagaataaatagatacggtgataacgggtcaccttgacgtaatcctctttaagcaacaatgggccccaactccttccctccgtgtgaaatggtataggaaacagaagatacacattacataactaagttaatccaacgaccattaaaacccatccttaccatcatagcacggcggtaaccccactcaagcttatcatatgctttgctaacatcaagtttaagtgccatctaaccatccctccctctttgttttctctttaaatgatgcataatctcataggcaatcatgatgttatctgagattaagcggtcttgtaaaaatgcactttgagtatcggatatgatagacagcataacacgcttgagtctattagcaaccactttggacacaatcttctataacacattgcataaagcaattggtcttaaattccccatatccataggttgcttcttcttaggaattaaaaccaaaatagttttgttaagatctataggaagaaacccattataaaaaaacttgcttgaccatattgatgatat

SEQ ID NO: 364446 - DNA, 1066 bp, Cannabis indica
ttattgctttcttatatatattctcattacgacatatcgtttatcgcttattaaaaagactcattgtcgttggctaaaagcgaagtcaacattttggtgctttcattgagagcagaattgcagattgctcttttcgacattcgacacgatggtgcaaactcgtaaaggcctgtctgacccagcaaattcacagacgctggatccgacattgcaggacccagggagttcaagggttccacccgttgtcaatcctggacagacgggaagcatggtgaatggtgggacaactcctgttactgaaactgcgcctggtgtgcaagagactgggaataacagttccgcacacagccagggcgttcataacatgactattccaccaggaatcaacgcccaaacgaccatcggagacgcaaccgaattgcaaaatctccgtgctgcgctcggactcatgcagggtcatagcaatactctacatcatgatcaggaggaactgcgtgccgcagtaaatctcgcgtttgatgaacagaggcgtatgttcgctgaatggagagacaaagagatggaggcattaagggctcaccatgcagagatcgaagatcgtagtcggcaagctactgtgctgatacaaagagcctaccagactgtaggccaacaaacgccgagcgtcattcccctgggagaaacggaggatgacccgacgatgaatgcctcccagacaaccaatggtcagtcgtccaatccccggtcacgagttccactcgtgggccaagaggtaggcgggcagaccttgtccgggaattcatcaggaggagccatacctgacggatccaatcagaataatggaaccattccgcctatcaaccaagcgaatcaatcgctaaggcaaccaggctcttctgtgttcgataggctgggaacgacccacgacctaagggacgatctaaacagaagaaggggaacagacgagcagaatactacaacgatcgtacagcccagagcccatactcaaatccccgctcagaaagacgctgacgtaatccaacccgaccaaaatgccaatcaagtc

SEQ ID NO: 364447 - DNA, 856 bp, Cannabis indica
cattgagagccttcgtaaaaaaagctcaagaaaaaaaccctctttttttttttaaaagaaaaaccatctccttcatggctaaaaacccagaaaacgtttatacgccacacgaagaaacccatcaccgttctgggaaagagcccatgggcttcagaaggtcttccgactcacagtctaaacggaccacccgctctaggagaactcaacctaagggtgaccccagcactcagaccactcattctaggaggacccaatctgatgttggtccttgtacgtgaacaacacgctcgaggagaactcagcgtgggaatgatcagaatcctggaataagggatgaggtacccaatcgtggaggtactcagcctatgggagagagcacttgtgaaacaaaaaactgccaccttagacgccgcctgaaggaggcacaacgacagaatgctgaattagagcgcgatgcagccgcagctagggcagcacaggagactaacgctcaaaatcaacctgaacctggagtgagaagaccacgaggcagacctcgtggctcacgaaccaggagacaggaaaatgtccaggaagaacaacctagggaaaatgaaattccccttaaaaatcggaatgatcagccagaaccctctcatagaaatgagaatgggaggcaaccagaaactgatgaacaagaaatcgctcatgaaaatgaggaagatcttggactcaacttggagaacgtaggtcacctgcgagaaattaccagtgttcttcgcgaacccatagagagaggactcgtcagaccctaatgggggaaatacgacaaaccacactgaaggggaaagaacaaagcatgaagaagcaagtgtga

SEQ ID NO: 364448 - DNA, 1294 bp, Cannabis indica
tttacaagactaaataccaaaaaaatattttttaagtaaatagaatatataactgtatttttaattacacaaaacatacaatgtcaccataattacacatataatcagccggcattctcgtaaaataaatcaacacaccaccgtttatgaaacaacttaatctcaccttgcgtgacattagttaatccacgtcgcatcatgagatgctccacatacttaatgtaataaatgccacaatccccactaaatgcaacataaaatataaagttagtacaatgtaaagcatattttaatactatagtacttttttatctctatgtacctgattgttgccttcggaactaagtcgtgagtgactcgactcgcatgcatattcagaagcacgttgatctccttatttgctaacaccatgatctggttattaagtgaaaaatccccgattgcatggattagcgagggcaacagttcttcccaagtcttcaagacgggtgccatggcggaccaatgacaaacgctggaatcacagtcgtacacattaattttccacagctctatgtcaacttcaactgtgacccagtgcctttggtcgggaagatgcaaaatgaagtaaatgaactcattacccatccatctcggaaagaactggttctgtaattatggagaaaaatcaaaacaattaacaaaccataataaacttataatcatagttcaacatttaaaatcttactaaaacaataccttatgaacccctctgcagtactccaggatataatcctcccacacaaagtttctcctcgcacccctgtgattcgtccatgcactgctgatcatggtggtgacgaatgtagagagaatgatacccttctgaggaaatgtcagtggatagtcggcgcgtcgcctcctcagcatatgcattgctgcatctatatgctgcatataaaggttagagaaatcagttagacaacaaaatatattaattgcacattagttgtaaagtaaagtaaaattataaaatactttacttacgtcatctgtaagccattcctgtggtatcagcagcttccaaaagaatgatggaccgtaatcaccacttctcaaatcccgaagtcggtggttcggaatgagtccacaacaccactttcggaaagtatccaacaattgctcatccggtggcgccaggggatcaaacgtcgaagaaggcctctgtttcttcttcatctccgtgtagtcacggaaccatacaggaggatttctcttcctcttccgactcttaacccctgcaggttgtgcctct

SEQ ID NO: 364449 - DNA, 630 bp, Cannabis indica
taaatatatatataataattaaagtggtgttcaatactaaaaatatagtttatagtttagcaattttcaaaattatataagttatacatgaatgaatgtaattaggaatgtttatctaattcaattcatactattttgtttataatatatttgcacaatagttcaaatctacaattcgtaaaagtacgatcgaattagatcaactattttaaataagttattttttaatatcaaattatttaatatttattaaaatatgtatatttaggtttaaaaaataaataaattatatgtagaatatatatttgatcttttgaaatatattttatgtgtgataaattttaaaattaatattttttatatcaaaatattaattgttatataatttttttaaaatttatataaatatgtgtaaactaaatttgattaattattttcagatgtgaattaatattcaatctaatccattcttacaagtggagacatctgctgtacgaactatattagattagattatagagaaaattacactctataccctttttatattgtcctattttatttttaccttcttttttaaaatctatcatttttgcctctttttttaaacattgtaccaattttgcccct

SEQ ID NO: 364450 - DNA, 637 bp, Cannabis indica
attttcaaaggaaaactctctctcttttcctctctctttttcggccatttgaggcagcaagaaagtggatttgctcttgtgattttggtgattttcagcaagtcttgtgtgatccttgaagaggtatttattgtctagcttttcttcctttgttttcttaaaaaaaatgatgaaaaatatgagttatgcatggatgattttaatgttgttgctgctgtaaatttttgttgttgtttccatgtttaaaatgttgatttaagtatgtttaattaggttgaattgcatgctagttattcttgctctagttggatagatttcttgttaaaaatcttgagttttcaaagagaaattgtgtgaattgttgctgtagtgtttgcatgatttagggttagttttctgcagtgttattatgcttgtttatgaggttctaagctagttttgaggcctgttagtgagctttagccaagtttgagtttgaactcaaagcttggagctcacatggtcttttttaattctttgaattctgggtgattttaatgctatagaaaggttttaggggatatatagaacaggtctggaaggtttgaggttgtttggattagatttgagcattgtatgaaattttgaatttctgcct

SEQ ID NO: 364451 - DNA, 553 bp, Cannabis indica
tcgtgaaattttttttgaaaagaaatattttgatatatatgtttgagtatagaaatggattaagagattataataagagattgacaagatatcacatcgagtagagtacaaaaaataatggtgcatttctgtataaaaaagaaagtgcattaattacaagatagcccaaaagagtaagttttgagtgcaatagacgctaacccttttgtaattatttgtgcttcttttttattttaaggttttggatgcttgtcaataaagggttaccaaattaagaaagaaataatcaatagatcatctgagatcatctcccattattaattgaaaatattttagaaggcacaattttttgtaaaacaaattatatttttatgtttaaagtaatttttttttttttacatttttacagttttctatataaataacacaaaaataataaaaaaaaaaaaaatacataaaagtaacatggaaataataacaaaaaataacatacaaataataaaaaattaacaacaaattaaaaaaaaaaatacaacataaaatgaccgcattt

SEQ ID NO: 364452 - DNA, 657 bp, Cannabis indica
gtaaatgataccatgaaccaaataacacacaaaagagtgaaaaatacttctgtttctttattgatatttaaagaataaagattacattgaaatagagttttatttagggcataaaacccaacatctataactcctataactatttagaaaagaaacgataaatttcatagaacttgacttaacagacataaatggaagagctcttatttacgtaattatattagtttattaaaagctaagtattttaaggataaaatatattggcgggtagaatggtaaattagtccctgctcgatgtgaatattcaatagaggatctttatgaaatgtagcctggacccatctcgaaatattttttgccactagccacaataaattcgtactactatgaagtgaatatgaagaatgattcagcgataacattggttaaaatggccccctaattcaaaaaattgaaaatattcttctttttcagggtaaattttaataagttttttcgttactcttacactcgttagtgttctgttaaaatctcacaccaaacatctccaaaatcatgaaatttcacggagacgaagccaagaccgttgtgcactacttttcttgtggacacgttgagagaaaaattagttttcatgcactaacgatcattttaatc

SEQ ID NO: 364453 - DNA, 718 bp, Cannabis indica
tacgttgcccttctgtgggatgggagcaaggtttctactggtaccatggcttcacatccctacaccattgagaatggagagtgtccggttgtggttcttggagtggtctggtaggcccataatactcgcagcagttcttcaggccagttgtttttgcaggccagtagcttttctttagggtgacctttagtattttgttgacggcctctacctgtccatttatttactaattattttatatacctttttgttactttgaaacttatgtgtttatctttagattatatcaaattaatttgttattttaagtacttttatgttacttttttattttaattttgcaaaaataattatgttactttcaagtctattgaataaattaataagttataataaaattaaaaaaaaatctcacttaacttattggtaaaattggtaaatatttaaattactaattaattaatttaaagttatatttttagtaaccttttaagtttatagtagaaactaattaattttcatacagtataacaaataagcatagatatgaaatagttttatttagtatactttatggtaataattaaattaattacgatttcgaaaatataccaattgattactttttataaaataatctactttaaataaaaatatctcttgtagataatattcaatttttagaaacttaatataaaactatatattcatttttagt

SEQ ID NO: 364454 - DNA, 605 bp, Cannabis indica
atttaataatataaaattatatatgttacctcataaagtaaccatcttcattacatcacattgcctaatcaagcaagtcgatgctttagtctaataatcctgtattgcattgcctaatcaggcaaacccgtgccatagcctgacacccacatgtcacataattgcatcacctaatcaggtgagcccgtacctacgctcggtactcatatgtcaccgacgcccgtacctacgcctgatacgttattaggaagaaaccctacatcggtttcaatctatgccataacctggtaattttcatatcattgacgcccgtatctacacgtcgctaggaggaaaccctacagcggttccaatctgtgacataagctggcaattttcatatcactaacactcgtatctacacgtttccaagaggaaaccttacaacagttttaatctatgttataacctggcaattttcatatcactgatgcccgtatctacacgtcgccaggaggaaaccctacaacgtaggggtgttcaacaaaatttacaaatcgtccaacccgaataaaccgtctaaaccaaaccgaataaaccgacaaaaaatacaacccaaaataata

SEQ ID NO: 364455 - DNA, 708 bp, Cannabis indica
tgatacagttggacgtttgtatctttgcggatgatatagtttatagtgtcataaaatctttgaaaaaaatattaaattaatgcattaagttccaatccttaagattcaagaaagcttttcactccaatgacagatgacattcttgaatagacttgcaagcccaaacaatttatatttatttatatgaatactaagtgccatgtgctaatatttaattatatttttaatttttattttaattatttatatttataattgtgtaattaacttttttctattgttcaataaacaatatatttttattaaaaagatatttaatttaaatgttatttataaaaaataataataattaatattcaaaaaaatagtgttataattttagtgtaattatattatttttttaaaaaaaatcacaccaaatatttatccaattaccaaaacacattagtaagcaatgtgacaaatacacacaagtttattattattattattattattattattattattattattatttgataaaatcatactatagatatcatttatctaattactaaaactctattatagagtttaagttatctctaggtagatattaacggtaataccttttatttttttttaaatgtcatatttttttttattgtttaaaaaactaataataaaaatatatattttttaaaaaaacaataatagaaatatatt

SEQ ID NO: 364456 - DNA, 628 bp, Cannabis indica
agggggtttttatataataataataatatgtatatataaaaatggaagtttgttggtatatataacccaatagggaaatttcatcatgatatgagtgcatatatactatgcatgcatacgtacgcacgtttcagaaaaagttttaataattaatctttttttttcttttttttcttgttgaagttaataatctaaataaaacaattatagtatatatgtagatgtaaaaacaatattaattttgaggtggtcaacagctgtaatgcatgcatggatattattattattattattattattattattattataagtgtaggaccttaattttatttttgctattattttatcattttttatttcatattaattcaagaactagtatatatatataaaaaaatagtctcattatccaattaattactctaaacctagtttccattctgttagacaactagtgtttttaaaacttcttcttcttctttctctcttctattttcgaatcataagagtgttcttcacaaatattttcgagctttagtaattcagtgcatgcctactcatagttagtgtaagactgtgaagaatccaaacaattgaaggagtgcactacaaaaaatctaacttt

SEQ ID NO: 364457 - DNA, 585 bp, Cannabis indica
ctttcaaaggggaagaacactttgttccttctcttaagtcaatacaatacaagggagtaggctattaccacactcacagggtcgaacctcttaaaaatttggtgttcattttagtttattatttttgttctcttataattattcaatcgcttattatttgactcactgtcgttggctaaaagcgaggtcaacattttggtgctttcattgagagaaaaaacacaagttccttgttttaagttttggcaggcaaacaggatggttgtacaaactcgtagaggccttgttgatcagggcaacccgatggtgacagatcccaacgtgcaaactcctagaaacatgagaggaccaccagggacaaaccccgagcaaataaatacacaaccacccactgagggccatggagtgacttcccctgtggctggaatagttagattatgttttaccaggacctagatttactaacaggtatgtttttaacatcctaaatatgaacttctaaaacaataaaaaataaacgcatccaaagtatgagaaaccttacactggttgaagcagattaaatgactccttctgcttagatct

SEQ ID NO: 364458 - DNA, 500 bp, Cannabis indica
gccctttttattaggttctattacttttaccgtttaaaattagtatttttactccttgaactttgaccaatactaaaatttttcccctataatcaaaaaagttaatttcaaaattataactttctattagttatgaaaatatatatttaaaaaaaaatattcaaaaatctgataaatcaaagtattgaattaataaaaaaaatatatttagtttactaaaaaaaaatttaaattatccataaaaaaatattttaaaactttattttgtttataaacacatatcttagaaaatcaaaccaaaattatatattgaaaatcaaataaataatttaaacaaactaagatttttgaagaaaagatcaagcttatttgtgtttacaaattcatatcctaaaaactaaagaaacataaatagaaatttaataaaaaagtagaaattatttaaaaaaatagaaattaaacaaaaaagaatgttacgtttatttaaacaaatctaaatt

SEQ ID NO: 364459 - DNA, 645 bp, Cannabis indica
aaccaggtttaggtagtttagtcgccaaaaattcagtttttgtggttaagtgttacaaaccgtaaagttcaggtggtttagccgccaatatttaacatataaatattatcctaattaattatataaatataataaaatccatgtagaataaagttattatatctatataattaattacaagttatgtctattaagatatattttaattaatatataattttatataattaaagatgttggggctattctctaattatttaaaattatatttttcacttagacattaggtattaggctctacctaaaagcaattttgttattaatataatagacaatcattgagattagtgctcctagtgtggtcgtctaaagttcattaaaaattcgctctagctagatatgataatttgttacagtttcatatttttttttatgtaaaaccacaaaattacttatatttcattcatattttatttattttatgaacgttttatgaaacttaatgtgctaaataaaatattcaactaatcttaatgtttgaataccactattatgaatttaggtggtgtttggttgggaggaatgaaaatataggaataagaatagaatggaataaaatttaaatacataaaaaaaaattgataa

SEQ ID NO: 364460 - DNA, 676 bp, Cannabis indica
cttgaagccatcaggaggcagaaaataaacttctcaatcaatgggtaccgtatctcggcccctatcatacgcttgctgacgtagtacacaggatgttgaactttgtcttcttcccaaactagggctgcaatgacagcattctcggagacggccaagtacaataacagatcctctctgggaactggctttgatagaatcggtggtttggccatgtgctcttttagttttctgaatgcctccttgtattcttcagtccattcaaatttttgccatttctttaaaatgttgaaaaaagggatgcactcgtcagttgatcgggaaatgaatcggcttaaggcggcaaccttttcggtcaagctttgcacatctttgtgcttcttgggagaaggcatgtttagcaaggcttgaattttttcgggatttgcctctattcccctttggctgacgatgaatcttaggaatttccctgacttgaccctaaaagtgcacttctttgggttaagcttcattccatatctccagactacttcgaagcattctacgagatcatccatgtggctaggaatgtcagtcgggccgggcccggcccggcccgccacaaacccggcccggcccgacatcactttagcccggcccggcccggcccgactccttcttttggcctagcgggtcaagc

SEQ ID NO: 364461 - DNA, 1092 bp, Cannabis indica
atagctatattatcatacaacgtgatacaaaatacatacattaattgtaacacatatcgaggttgagaaaccttattaaattcctttgagttttataatttttctttaatttttgaggcttatatccatgtattatgttcatgtttaatgctcgaaatataggcatagcactattatatatcatgatatatatatatatatattacaacaacatagaatcaaaactaattgtgacatttttatttttatagttttaaaaggataagtttgcaaaaatatatggctttttctaataaaaaaaaaaaaaaaaaaagttaatttataggaaaaatttagaaaataattaaaaatcatagaaaaaatagcataaggtacttggttacctcttatggtaactggttctccatcgattactagtaactaggtacccttactagattttctcatatttttttaatctttttcttcaattttcccataacataacctttttgaaaaaaaaaaaagccataatattgcacaaaaagtataaaaacctatgaaattttaaaaaattatattggaaaattgatgttgcataaacaaaagggttggggccttgggtcaatgaatctttaggtatctggcttcatcgctgacgatttgagtgcctacttattctctaatatcttctaaggcgatattatatattggatctaaagcttaacaatgaaaattatgaggtcgacaccaatagtatagctagagagctgagaaagttagaggttgtttggctttatagtttaaaaactgttttctattttttaaaactgaaaacagtttttaaaaactattaggagtcgtttggcaaaaatttttaaaaactgttctttaaaaattgagttttaaaaaactagaaaacagaaaacatcagaatgatgttttcaattttcaaaaacaattttttttgtgtaacatattatattttatattttgctcacataatcgacatctagacccgaacctagacccggatgggttaatgtcatggtatggtgctaaaatattgattttttttcgtaagaaaaaaatctaaaaacagtttttaaaaat

SEQ ID NO: 364462 - DNA, 729 bp, Cannabis indica
catcccgtctccgccccgtttaatattcaaggattaaaaattgtccatgtccctgccccattttcccatttatacagagaataagggtaggtctctaactacaaggcctatccccataaaaaaaatgtgcatctctatttaaaatgaaatcaatcatgaaatattacttttcattttttgcattgtcaagactaaaaaataactttttcgttactcttacttatgatgttgaaaacaaactaattagtaactttttcataaaaatactatatttttgtgttatataatttgagatatattttggctacttctaaaaatagaggtatatactactaaaattaaaaatatttatcattaactacaaaaataggttttcccgacgtttttaaatagtcgtttaaagtaatcccgtcggtttttataaccgtcgtaaaacgggcataataggcgacgattcaaaaccgtcgctaatgtgagtttcccgacggtttaaaatcgtcgcctataattgggtataggagatggtttataactgtgccctatactataggcgttggttttaaaccgtcgggaatggaaaaaaaaatgaaaaaaatatatattttctcccatttttttctccattagctttataattttacctaaattaaaataaaacaactaattaattttgttacaataacgactaactttaaaacacattaaatttatacaataacaaaataaata

SEQ ID NO: 364463 - DNA, 608 bp, Cannabis indica
tgatgtctatggatcgtgaattgatgctctctgaactcacgggtgcacggtctgaattaaaatcaggggagagtcttcaaattacacatctcacttttgctcatgcatctcgtatgcggtttgctcttagcaattgggttccaaactccaacaagaccgtggtgtctcaagatgtggcctcattcctataccgcatcacctctggagcttcaattgacttggcctcccacattttgaaccaaattgtttcattctgaagaggtaaaaagccaacctttaagcttgtttttccaaatctaatctttaaggttttatcctctcagaaaaatgtggcccaatctcatgaaacacttgagccttcgatcactggaccaacattccaaccctcggaatactttgatggtgtgtttcaaaataggcctaaagctggagctgctgctgctgcaaattcaagttcttctgctgcagaaatccaggaagtcaagaatgaagttgagttggtaaacaatcgtcttgctgccaaggaggaacttcagcaagagatgtccaagcagttgacctccttggtcaaactctaccgagactaagtttttatctttttctttctt

SEQ ID NO: 364464 - DNA, 825 bp, Cannabis indica
attaattacagtgttgactgatattttacaacaagtatcccttgaaattatgggatttgatcacattccaagtagaataattgcaattaatatctgttaatcacatagctgtgattggtccgcttttattgggtcaatgaaaacgtgtattaaatacattgcaaatcgtatcgttcagggacatctccctgggaatatagcaacaatacccttggtagcgagctagagcttttcccacatttttccgaggttaataatgtaagtattgtcgcttctgtgcttgaagacatggtgctccatctgacaaccacagttctaggttacaaggtgaacttcaaagccaacatcaattgaatgatagcttctatccaagagaactaactcgacggagctgtgaatttcactaaaagatgtctggagttgattagtgaaggtacccgagtgtgcctttttatagcgagatggatgcctcgctaatagtagtatgagcttagctgactgttacacttagtttgtatattgtgtattgtacgctaagtgccttatcggccattatatctctcctacgcctcttgatgcgtgacgagattgatgcctcgccttacgcatcaaatatcgtatggtttctcgttaacgcacgagacaaaagtttgtatatctttatctcgcataagaccttatagtcagcaagttgtaaatatactctgtcacttccacattgaatgagttattccattttcaaatataattatcattatatttgttgattcgtattcttcccagtttgacacgtgtcctcctttgaagtgctagccgaatttcggg

SEQ ID NO: 364465 - DNA, 842 bp, Cannabis indica
gttctggtcctagtctgagtcccaaatctagacaacgactactggtctgttccaggcccggttacccgaatcctgagtcaagatctggatcactgtcacgggtcttggtttggttctggtttgggtcccaggtcccatttatgagttttggttcaggatcgagactggggtgcggttgtaggtcctgactgttgttttgtgtccctagtctggttccatgtttggatctaagttcatgttcgggttcgggtcccgagtccaggtttgggtggagatccgggttcggctcccaaattggggtctaggtctaatttggagttcgtgtccttgtgtggttacagttctggatctaggtccattttcagttatgattccaagtcgaagtcatagttccagtcgcggtcaacttccggttttggttccaattttgggtcacagggtacgggtttgggtccacttttgggtatgggactgggttaaagtcccaaaccaagacaccgactacaggttttgtccaagacttgggtccagatctggatcccaatctcgggtcccagtctggttccttttcttgtgccgggtcacaagctgggtcctaagttcaagtttgggtctgggtcaggtactatgtcccaatcctagttctgtttcccatgtccctatccagattcttggtctatgtcccggttattgtgtgggttttggtaccggtctaggttcgggttagagtcctagtttgagttcgggtcgtagttcgagtcctggtctgagtttgggttcaggatcggatttcagtctaggtccagatcaggctctgggtgtgggttcgcgtcctgggtctt

SEQ ID NO: 364466 - DNA, 607 bp, Cannabis indica
atgaaaagcttaatatatatcttcctagtttctacacgttatcttttttttttaaggtataatagcttttattatttattttcattgtatttgagctctctctccactattcaccttcttcttcattttttttcttttttttttccaagtctataatattacccaaataaaaactaactctctcctcttgtagtaggtaacaaaaaaaaaaaaaaatagcatgtgaaggaggaagaagaagaagaagaagaatcgagaaagataagagtgtggttgtgtgtgtgagagagagatggagagcttgctctgtgatgaacttcttgtagaaatctttcaaaaattcccactaagttcatgtcattcagtctctttggtctcaaagcgttggctccatctctaccgtacttccaagtctaccatctttctccaacttaccctattctgttactggtttattttggtattattttattattgttttaaggttgttttctttcatttttataacacatttttctaaatattattgtactgctctatttttaatagtaatagaaataatgaaatttgtatgtaagttatttcattcagtatcatatgctccaat

SEQ ID NO: 364467 - DNA, 375 bp, Cannabis indica
aaatgaaataaaaattaattttttcatcttcttccaacatcttttagattaacaataaactctttttgttagaagattaacaataaactttgattctcgattcaaacgctatttttcaattttattttcatatattcaaaattctcattctataaactttgtactaatatttttcaatcaatgcaatgaaaagacaaactttaattcctgtatggaaaatcaaatcccaataatcaatagaaacaacatcaaagttcaagttctcgaaatctataaaaataaattaaaaaaaaaaaaaaccagatctcataaacacaaactcaaatattacaaccccagtaaaaaactaaaactcaaacattaaaatgcactaaa

SEQ ID NO: 364468 - DNA, 586 bp, Cannabis indica
tttcttttctttttctttcttctagtgcgactctctctctctctctctctctctctctctctaatatgcaaaaagcaacatctgcccagactaccgcccacttcctccgcccagaccaccacatctacccaccaccaccaaagccacatctacacaccacaaccatcattgaaacctcttttttcagattcaaacaaaaccccacatctcatatccaaacacatcaaagagacctaaatacctaccgaaattcgggtcctgattccataaaaacaaacaaacacaaattaaatccacaagaaaaaaaaacttacagattaaagagaaaaaaaatacgcaagggtgagagagagagagcttactgaacacgaggctcgtgagatctgagatgtggggttttgtcgatctcttccttggtgtcaggcggggctcgtgagggtggagaactgccggggtggctgcccaagggttttgaaaaccctagattgaaaatccaagagagacagagggaggagatcgagagagagtgatagagcgagagagatagagcgagagaagtttcagacgaaaagaaaaagaaagaaaa

SEQ ID NO: 364469 - DNA, 622 bp, Cannabis indica
tattgttatatttgttttgtttgttactttaggcatttttaaaatttttgagaacgtccatttacagacattatgctgccaaaatttcagtagaattagaataaattttactaaaaaaacataaatattgaaggaaaaatacataacacaaataacttgttaattactcgctagttgtaagaaattaggtgacacaacatatttatataacttttcaattataaatgacaaaccaaacaaatgaatggattcactttaggaaaagtcattccaattctaccaacatttcaatcaactaaacactaccctagttagttaattacaacttatacaattgaatatcatgaaccaaactaaaacaagaattttagtaatatataaattaatatgaattaaacgtgagaaatttaattagctacattgtgtaagtagtaactagttataattagttattaaatattgatttttttttttgttaggtatatttgttatggataaatcatggatgcgtgaggagagagacacactgcgattttatgtagggttcgatgcattttttagagtttgtattaataaattttaaaaatctacgaacatattcattgtccgtgtgtagattgtt

SEQ ID NO: 364470 - DNA, 607 bp, Cannabis indica
agtcgctaggcgacaaaatttttgtatatgattttgtaaatgtattttgtaacaggatcgcggaattttataaatgtattactttaagtttctaattaaattagaaaatttaattaatcacatttttcattaatctcgttgattagcaacaagctgaacagtataataaaaatcacgctagcatacctaaattagttagggtgttacaagccaggtgagaatgcaaccaaggcagttaaggaaaagttcgagtgttggcagaatgttaacaataaaactcaatactttatgttgtctagcatggttgacacgttgaagacaagatttgccaatactctcatggttgcagaaatcatgaaccagttaattgatctgttcgaaatggcgtcagatcaagctcattttgaggcgacgaagaattttatcaatgcacggataaagcctcattagaacgtgcgtgatcacctgctccaaatggctagttatttccaggaagctgaaaaccttggagctattacagatcaggaaactcaagtgaatttgattttaaatagtttgactccaacttttttgccctttaccttagattatgtcatgaacaagttga

SEQ ID NO: 364471 - DNA, 1332 bp, Cannabis indica
agaggatcttctctcccagtgtacatcttccacgttggcatcttgaacttgtgaggtagtggcaggaggttgatttctggtgagaaaggatttccgcgtgcgcggtccaactcaagatcattgctacgctccccggccatgccatgaaacatattcttcagttcgtcatgctgggccttcacggctgacttcattggcattctggtcaggttgggctacgtcagcgtctttctgagcagggatttgagtatgggctccggactgtacattcgtcgtagtattgtgctcatctactccccttcttctgtttaggtcgtcccttaggtcgcggggtgttcccaacctttcaaacacagaagaccctggctgccttaccgattggttcgcttagttggcaggtggaatggatccattgttctgagtggatccatcgaccatgactcctcctgatgaattcccggataaggtctgtccgcctacctcttggcccacgagtggaactcgtgaccggggatgggacggctgaccgttatttgtctgggaggcattcaccattgggtcatcctcggcttctccaaggggaatgacgctcggcgcctgctggcctagagtttgataggctctccgtatcagctcagtagcttgccgactacgatctttgatttttgcatggtgagcacttaatgcttccatctctttatctctccactcggcgagcatacgcctctgttcgtcaaacgcgaggttgactgcggcacgtaactcctcttgatcgtgatgcagggtattgttggggccctgcatgagtccaagcgcaccacggagatttcacaattcggttgcatctccgatggttgtctgggcactgatgcctggtggaacattcatgttatgaacatcctagctgtgtgcgaaaccgttatttccggtctcttgcacaccaggtgcagtttcagtaacaggagttgttccatcattccccacgcttcccgtctatccaggattgacagcgggtggaaccgtcgaactccctgggtcctgcaacatcggatccagcgtctgtgagtttgctgggtctgacaggcctttacgagtttgcaccatcgtgttgaaagagcgatctgtcattcttctctcaatgaaagcaccaaaatgttgacttcgcttttagccaacgacaatgagtcttttaataagcgataaacaatatgtcgtaataagaatacgtaataaagcaaataataataacaagaagacacagaaattttatagaggttcagccccgagcagttcggtaatagcctaatcctcattagttgtattgacttaaga

SEQ ID NO: 364472 - DNA, 574 bp, Cannabis indica
atatcaactgcgaaagccccttagcgtataatgtacaaactaagaataacgttcgggtcggctcgagaccaagtaagcgaggtgcccgtctcgctatgggaaggcttccagtaacttcatccagttaacttcagtgaggcttacaatcctgacgagtcagaagctaacattcaaacgaacttcgaagaactctttgtaaataagaactgcaatcatcacaagatatgcatcgacgacctcggaatgaaaaatggccctagctcgctattgagatcactggaaccaagcttccgttgagacatccccagataccacaattaaagacgtgtttaaatacacgatcattttgacccagtaaaagcgaaaaaatcacaactatatgattttcaaataataaccgcatttacattacgtgatatgtaatcaaacccaatgattttaggggatgatcgttgtaaacagattacggtcaactttgtaattaactgcccactatgtaactataaatagtggcaaataagatcaaaaaagggacgaaaaaactcatacaaaagaggccctaagcaaacaatca

SEQ ID NO: 364473 - DNA, 961 bp, Cannabis indica
gggcctatatttctgagcttccaataagccgatcaggaatttaccaagtaaattcactagcttattaattccttgttgcatccactcttggaacttagaattgcactctcagtcaactagtgatattgacttagaaagatatgacggtaagtattataatatctttactaagatcaatatcggtccagtccaatgtatactccatacatccgagaccagtatactatgacaatgttttggaaagaacataatacttatacaaagtgtaagtacacttcattgctgattatcacatcagtgtaaatccaatgcactgatgaaacatagactttgtctttcgaagcatataatcacaatcacattccactgtgttgacatcactgtaattgtgtatgtctatatgttctggacttaacagattttctgtatatatatatatatacaaattaaaccataaacatgaataaaacatgtgagcataaatgatttcaaatcatttttattgttgacaaatcagattagattgtaatgggttttatttggggcatagaatcctaacaaactcccacttgcactaacataaaacaagttatgcactccaaacaatctattgtcttgatcttcaaatcaagtgtagtatatttgactcaacccaaatttctggaaccatgttcataaaacattatgcaacatcctttactatatgcattactcatcaagggataatgaaaatttttattgctaattaaggacatcttgtaaaaacagaagatatatctatcattctattaaagaatgaaatagagataatacagtatagaatttttttcagttgaataactttctggtattacgaatttgaaaagttatgtatatcttcactgatgaagcttgaattattatagatgggtttttacactcttctagaataacttctccacccctagagtaaccaccatct

SEQ ID NO: 364474 - DNA, 428 bp, Cannabis indica
aaataaataaagaaatgactaaagcataatggtgaggattaagcaaatctgaagctttattgtccacgaagctgatggtctggtcgttgtaggctgctggttgtttctttggtctaccctctatcccgactatttcacgtgcattcctcttagcggctaagtttgttacgccgctgaactctgaccctccaaagatgacattacatgttcgggtgtgctgaggtggctctggtggtgttgttggcctcttgtctgattccctcacggtcgtctttcccttgtttgataaaaaatctcgcaattaacctttgtgcaagactccagccacttcataccttaatgttatgcattctggagtggtatgtatgtggtcattatgacattcacacccctttgttgtgtcgcgcattgctgctggttttttaatc

SEQ ID NO: 364475 - DNA, 781 bp, Cannabis indica
gctataaataatttcataattagtcataaacaactgttaatttccaaattaactaagcgggctttacaatatgagtatattaagatttagggtttatgtgttcaaggcataactaggttggactcaataactagaaccgagaggaaccgttctaaggccttattgtatttagatgtgtgagcgcaacacgtaggtttacgctacgtagacgtaaataggcgtatgagtgtaacatgcaggtctgtatcatacaggcataagagaatggcattactatttatgtagtgtgattaacatataattgatattttatactgtcttgttgggcttggctcacgggtgctctactgtccaggaaagggtaaagttgtttctgatcatccatgagtatgggagctgaacgacgaatgtacatgttcgggccacactagaccaagcgagttggggtctaccagtgatgtattttgtgactttgttttgccgcttaggtcagccaatggaaaaggacttgtaatagtgctttgtaaatatttttgggatcccgacttttgtaacttttagtttataaagtttaaattattacaagtttatttcattctgtttgttattaaagtttaatttctgcgctaattttattagtaatcccgtttaggggattaaggtttcttaagtatattgggtaacgtgcctaattacttagggcgttacaataaataagaatatcaatgtgatagaatttggatgaatttataaatcaaataagtgatcacatgaaccaaat

SEQ ID NO: 364476 - DNA, 997 bp, Cannabis indica
ttccaaagcccgggtctcgggtccaagttccccatccaagtcccagtcctaggtctcagtccgtgtctagggcccattcggggttcaagtcctagttcgagtttaggttcggtttttgatccctctacaggtccagatctgagttcgagtcccaggttcgagtctagatccaagttggggtctgagtcttgagttctgatctgggtttgggttccgaggcctgagtccaggtcccccactatgttcgggtccatgttcggtttcgggtcctagtcccagttcaaattttgattttgtgtccgaattcgggttcaggtctaggtctgggtaggggtttgagtcctggtctgagtctagggttggcttgggtcaaagttcggatcccggcttgggactgggttcgggtcaaggttcgagtccaagtcttgggtacaggtcaagatttttgtctaggtctaagtccagatcaaggtcccaagttttgatcccggtctaggtatgggtccgagtctgggtttgggatcggtttcgaagttcaagttcgacctgatcccgaacccgaacctgaacacgaacttggacccggaccaggacctaggacctgaacttagatgggggacccagacctaggaattgggcccctgaactaggaccagaacttggtctcagaacttggatgaggatcgaggaaccgacccaagacccaaacctggacataggacccacattgagacctgggatccgggactcgatgcttggacccgaccagtactcggtgtttggatcaaggacatagactagaacctaaacccaaactcgaactcaaactaagaccctgacacataccaagaccaagacctacactcgtgaaccaaaaccgaaacatgaattagaacgggaccaagatctttgaatgggaccgggaccaggacccaaacccagcctcgaaccctacttgagactgaaacccggacctgaaccttgcctcagacccaaa

SEQ ID NO: 364477 - DNA, 527 bp, Cannabis indica
agatcctggtaaaataaattccaacagtaataaccctaggccatcaaccgctcatattagggtaataaccctaatcccggttactaaacaatcatacatatcactttgaatataagcaccactgcgcatactccatgtgttaaccgctgtcttacctattatcctgcaattgacagagattccgaatccccgggtgctcctgatcaggtgccggtaatcctagtcacacaaatttgggattttcacaacaagggttaacccctgattccatactcataaaattcaataatggcatttaaaattcagataatcatacttagcttggaacgagctttccaacgacataaagaactcccaaatcggagttcggaatcaaaagatatgaatttttaaagttccaactcaaaactgcccaaaaacacaagggcgggccgcgacatgcccaagtcttgccgcggcacctgggacacatcccaggttccacctatagggggtgggctgcggcatgctcagagcatgccgcgaca

SEQ ID NO: 364478 - DNA, 686 bp, Cannabis indica
gctgcctccttggatcaatcctcaacaccaaagtatcaatttgccgcctccttggagttggccttacaaactcaaaactttgagtacttacctcgccatttaacaaaaaaaaaaatgacaagactcgatattaaattgagattatttcaaaaaaattacaaaaatacggttatacaaaattttaaatatttttatggttttgaagattttatttacataaaatagagtcttttaatttatttttatgttttactcttattattttgttgttagtatttttgtaatttgtatattatttttgatgttgttgagattttgttttttttattattttcatgtatttttttattattattttggtgttgtttttatgaataggtaaaaagaaatctttaaaagtgaaagtaaaaaaattgataaaaaaagttatagtttattgggaaatttgcggcaaaagtccccaaaaagttcacggtgatacagattagtccccaagctccaaaaatagcggcaatagtcctcaaggtcacactttttatttgtccgttggtctccaagttaacagattcgttaaatccaattcaaatgccacgtgtcgaaatatcattggtgggtgttattattttaatttaaaaaaaaaaaaataaataaataaataatttaaaaaataatttgtttttttcttt

SEQ ID NO: 364479 - DNA, 606 bp, Cannabis indica
agagaagtaacccagttctccaaatgggtttctttacccaactttccagctacaacaaaaatcaatggcaccacaaaaaactatcaataacaaagctataaactttggtggccatgccattgatattccgtacaagttaccataaccttaattaattaccatttaatcaattatataaatggtggtatctattttctaaaataacaatttaaattctgtgttttataaaatggtataaaataaattcttaacttattttcttcagtaatttacttttttaatataattaacataaaattaatatttagcacgagcacattaaaaaaaatcttataagtattaaataatatctcattcgaaaatatctattttcttattcaataagtaattatttagtagatttactctatatactgtttttttaatttttttttaaatttacggtttgaatttttagaatagttacagtgctagttgcaataggggtttttatacgattttttgttgcaatttaagttgcagcgctagttacaataaaagtttttatgtagaattctgtaaaaaatgacaaaaaaaaaaaaaaaaaaaaaaactaaaaaacttaaa

SEQ ID NO: 364480 - DNA, 624 bp, Cannabis indica
gtgagagcaacacgtaggtctacgccgcgtagacataatagacgtgtgagcacaacacgtaggtctatgccacgtagacataaataggcatgtgagcgcaacatgcaggtctgtgtcacacaggcagaattgaatggcattattgtttatatagtatgatgagaatattattgatatgttatactgtcttgttgggcttggctcacgggtgctctactgtgcaggaaaaggtaaagttgtgtctgatcaaccatgagtgcaggagctggatgaagaatgtacatgctcgggccacactagaccaagcgggttgaggtcaacctgtgatgtgttttgagactctattttgccgcttaggtcggctgaaagaaaatgacttgtaataatattttgtaaatatttttgggatcccaacttctgtaacttttagattataaagtttaaaatattacaagtttactttattccggttgatattaaagtttaaattctgcgctaattttattagtaatcccatttaggggattagggtttcataagtaacttgggtagcgtgcctaattatttagggcattacaatttggtatcagagcgccaaggtttttaaacttcctgtagaccggc

SEQ ID NO: 364481 - DNA, 637 bp, Cannabis indica
gtatacccccttttctgtcgcttatcctccgtccgagtgctgtctttggaggaccttttactccttgagccttgggaaggatcggctaaacttgcggtcggagcggagtgcgagggggctcgtccattcatccctgagggatttccaaaattggaagatgcgggggccaaggcctgtccttggctatatctgggagtagcagaaaactgtatgctgctcatggggggagttgctgttggcaaagtacttgggagctgagctccgggtgcatatcctgctatcccggtaggatagtaccccccatagaccattatttgggcctcttccaggttgatatatttctagactcttttttggaaatcttgaaggttggaagctccttcttgctgtaactcgttccagaatggagtccccgtacggatgcctgcttggagaagagcaagctgttgtccgtcatctactttcttggttttagaggcttcttccctgaacctctttatgaaattctttagtgtctccacaggcagctgcttgatgttagtcaaggcgttgacctccagattgactttccttggggcgacaaattgcctccggaagctggtttgcaacttattccagcaatccacggatcctggtt

SEQ ID NO: 364482 - DNA, 761 bp, Cannabis indica
ttttatttttttaaataaatttttacgtggactaataaaattgtgacacgtgtacactgtgtacacatggacattccaacctggcacttaacagccaaaaatgaatggaaaaggccaactgctaacggactagtggtttaggtagttttaccaccaaaaattttagattagggggttagttgcaaaaatctgtctactttaggaggttttgcacaaataacctgtctttcaaataataaaaatatgaaagaaattacacactcaaaaagtgaaggtataagctttataaaagttaagagagctatagctattttttttttcttttcttttcttggctaaaaagaggtgccatggtccattgataataaggaatctcttcttattattattatttttttacttatcttcctataaggaagtggttcaagtcaagcttaataagccaaattttcttcctttctcacctttatatatgaggattttccatggcattgggtgggttataaattataattagtgtttgctttacgtctcatcaattaccacaaattattaatctacgtcatactaacgaagtgatccactttatgacattgcaaaacatacgtgaaaaatgtttaatgtgtttgggaaatttgaatttgtatgcttaataagtaataaaattggaaacctaatagaatagtagatataatttgtaaagtgggatacattttagtaaaacccaattttacccccctcatttgaaaagtcactctctc

SEQ ID NO: 364483 - DNA, 1113 bp, Cannabis indica
agtagacgatcagaatgtcaagaagatcgtgcagcctggagcccgtcctcaaattcccgctcaaaaggatactgatgtgattcaaattgaccagaatgctgagcaggttagcccagccgtccaggtacagctcgacgaactaaaaaatattttccaaggcatggctagacagagaaacaatgatctcgagctggaacgagcacgtggaactcctttctctcgcgagatcaatctcttggcgttgccccacaagtttaaaatgtcaacatggaaaatgtatacagcgagagaagatcctctttcccagctcaagtatttcgaaatgcaaatggatttacaagcgatacgaagagatgtgtgttgcagaatttttcctgctaccctgttggaggccgcccagcaatggtatttcaagttagcccctggaaagtttagttcatggaaagccttctcctcagaattccatgcccaattctccttctctcgctaacttccattgcatatgggagacctagttgaagtcaagcaacggccaggcgaacccctctgagcatacatcagtagattcatgacggaggcgaccaaagtgtcacgagtaactgaagatggaaagttgtccgcgatactgggggtcattgaagtcctcggcaaactctggaaggatataaggaagaatgggtcggtagactcaatgagtgattttcttgaccgtgtcgaaggcttgatcatgctcgaaaaatccattcaacgagcgaaaggtgagcaaaagcctggcaagtcgaaggctccttctactggaatgtctgtccaactttcccattacccaaacaattcaagctcaagtggtaaacgttccaacaacaaccacaggcaggggaacgagaagaagggaaagttcaccgacaaatccgaacaaactcccaaggagaatcatgccaagtacactgcattcactatcttgactgaagacatagaaagtgttaacatggcaactcagtcgctggccccatataagaagcccggggccatgaagaaagatgtcagcaagagggacatgacaaatttttattgattccacggagactacggccacgacactaatgaatgcaacaa

SEQ ID NO: 364484 - DNA, 790 bp, Cannabis indica
aaagagagatctcatgcatgtatattttggtggagagtttaaatcctactggatatgctgattctaatttgcaattagacaaaaatagtcaaaaaatcgatacctgggtcagcattcactcttggtggtgtatctatagctagagaagcattaagcgaaccagtattgcagatttaatcatggaagtcgaatatatagtagcttgcgaagtacctaatgaagcattttggttcaagaaattctacactgatcttgaagtagttttagaagtagaaaaaccactagtactctaccgtgataacaatggagaagtagctaactccaaggaaccgagaagccataaaagacgcaagcatattgaaaagaagtaccatctactaagaaatatagtatagagaggtcatgtgaaagtcttgaagattacatcagaacataacttggaagatccattcacaaagatgctaccagtgaaatctatatggtcatattactaatatggaattaagggagatgcccaatttgcttttaggaaaagtgggagattattagggtttatgctctgaaaaacatgtaaagacatttctgattataaataataattgaacatttttattgttaaattattaaatttaatattgaatatttatatataaatatcaaaaaatttcttattcatacatgaggttgtgacttgtagttttatggagtaagattacttagccatgaataaaataatcagtaacgtattaaagtttaggaatcttcaatcaatggttgctagtatgattca

SEQ ID NO: 364485 - DNA, 751 bp, Cannabis indica
aagctctgacaagaagaatggctgcacttaacagattcatttcgaagtcaactgataagtgtgttctgttcttcaatgtattgcgaggcaacaaaaagctcaaatggacaaaagagtgcgaagaggcctttcaaaatataaaaaggcatctagcgacgccttcagttttggcgaaacccttaactggagaaacgttgtttctctatttagccatctcggaagatgcgattagtgcagctatagtgcgagaagagggcaagcaccaacaacctatttactatgtaagtaaaaggttattaggggcagaatccagatatccccctctagaaaaactcgcattgtgcctagtccatgcgtctcgtaaactacgaccatacttccaggcgcatcccataaaagtgttaaccaatcagcccttgagacaagttttatcaaaaccagatgcttctggaagattgataaaatggtcaattgaactagggcagttcgacataacataccatcctcaaacatccataaaaggccaagctttggttgactcttgatagaaggtataactctagaagaaattccacctctccagcgagacgcagaaacctggaagttatacgtgaatggtgcatccaacgaacagggttcgggtgtaggggtaatactaatatgaccagaaggctttaagtttcaatatgctttgaggttccaatttgacgcatcaaacaacgaggctgagtatgaagccttgatcgccggc

SEQ ID NO: 364486 - DNA, 321 bp, Cannabis indica
cagaaaaactgagcctttcccattttctataccttggccgaaacccctcttctctttcctcttctatatttcgaccctagtgaaagagtgagtgcccacacacagcaagaagtaactcaatcatagattggaagactatgtaggatcaaactcacatacttgtgagtagatctataatcctggtaaaataatttccaacagtttgatccctccttcgtcaaaaaggtttgatgaagatgctataacaattcgacccctctcttatcaaaaaggattggttagggagttataacagttcgactccactttcgtcaaagaggt

SEQ ID NO: 364487 - DNA, 478 bp, Cannabis indica
aaaaattatagttgtttgatccttcgtcaaaaaggtttgatgaaggtgttatgacgattcgaaccctcttttgtcaaaaaggtttagtcagggagttataacggtttgaatccactttcgtcaaagaggtttagttgagaacctttgaatttcaaaaaaaattgaaatgaattccagttaatcatacataaatgccattagtaatgcttaatataaatgattctctttattcgtaactgaagtctaaagtttacattagtaatgcaacttacatcatttatttattggtagtaggatcgcaaatattctacgttcaagtagttctttattagcgagccatcaagtcgagccaatttatagactccgactccaactactacttcgatgacatatggactctcccaatttgtgttgcacactcttgctgatgcatatatcatatttgcaaagactcaatatccagagttattcaggttag

SEQ ID NO: 364488 - DNA, 935 bp, Cannabis indica
agaatttttttagtttaattttactcatgatcttgtatgttgtagttatatagaacatcatgcaaaattttgataaattcaaaaaaatttaacacaccaataatagaattcaaacaatctatttctagacgcatataaaattaaagagtctcgggagcaacaattgtgtttgaatcctatttttggcttgttaaatatataagaatattttaaaattttacaagatatcttaaataattataatgtagacaatcatgagaagactttaactaaaaaattctctcatatgctaaaattgataaagaatgtatcggtagatcccttttaaaagtgtactattttagtaggaaaaaaagccactaatttggttgtgttttgtttggtacctatacttcttaagattgtattcttcatggagaaaaaaaaattgtattgtagaatttttttttttattttttaaataggtaagcaaagttgaatttcttttacaattttttcactttttttcatttttttctatttttctatttgggtgctgaactgaaatctacaattgtggtggtagcttatttaattttaagtgagctgcacttggccatagtgggcctaccaacgtcaggtgcagaatctcattgcaaaaatatctggcggcataatgtgtgtagccctttattgaaagacatcgtgagaaaaataggccaactttcgtttctctttttctttgtgttttcaactcttttaatatatattatatatacatatctacataaataggatgaatttaataatatatcttcgggaaatttacgaaaatattaaaatttaatttaaattttacaaaaatactgtcccataaaaaagttttcaaaaatactttatttttattaaatccagtagaacacaaaaaaaacaactcaaaacaacaatagaacaac

SEQ ID NO: 364489 - DNA, 757 bp, Cannabis indica
tttaactccaaagttaaaaatagaaaattcgctattggggatatggttttaagaagagtcttcccagccacccaagaacccggagtgggggtacttgggccaaattcggaagggccatatgaaatcgaggacgaaatcgactctgaaacctataagctaaaaaggatggatggaaccattgtgccaagggcctagaatgccgatcacctctgaaaatattaccaatagtctgaatgtgtaacttaggctttgtttaaaggatttgtatcgtctaagtgtatacaacctctgaactttgaataaaatttactaaagcataccacgcggacagatgaaaaacaagacgaaagtaaaatatcctgacccaaagggcaggtccaaaaagaaaaattatgcctccaatctttccctccgaaggacctcctatcggagcatcgcctccgcctgggcttccctctgcttagcctcctcctcgagctttgccttagcaagagcctcctttcgcttaacctcctcctggatcgcctgcctttcaccagacaagtcctgcagaatcctcacaatctcgtctatgcccccaaattcggacaagacgaatccatgattaactatggtcttggaaaggcggccggtctctgcagtaatctggaaaaggaagtgagagtgagaataaaagccttgagtaaaatatcgaggaaagaaataaatcaaaaagtactcaccgcagccaggcattgctgatgtcttgaacctggta

SEQ ID NO: 364490 - DNA, 834 bp, Cannabis indica
atatgtagataaagttacgtacgatggaatattgttctgatttttaatgtttcacaacagttgcattatagttgcattacagttgcataaatattttgctaacagttatttcgtctgattgaaaccttcaattgatgcaacattcggccaacaatccagcaaccacccagaaactttaatctgattgaaactttcgtctgatgcaactttcggccaaccacctagcaaccaccctgcaaccatcatctgattgaaaccttcgtctgatgcaaccactgcacaactacgctgcaaccatcgcctgattgtgtaagtaatatttttataattaaaatcacataaaatatataaatgttgtccacaccttatggaggtatttttgtaaataaagtgtcaatttatattttctatgtaataattctatcatatttttacatacttatttgggttaaagtgtcaattttaactattttctcaaaaatttccaaaaataattttttgaaaaaaaatcatattataccaaatttataccttaaacatcataaaaataaaaattctgacaaagagagactcaaatataatatgcgtatatatttggtcaaaatacatggattacaataatactttctaatcattggtatgtaaataaatattagagaaatttaaaaaaaaaattaatttgtggttctttttatagaaagaatataaaattaaaaaaaatatatatctctttaaaatatagaaattagtttagggaaatctacatggtatactaagttttgccattttcttacaaaaatactgccaggcggatttttttacttgtgttttttt

SEQ ID NO: 364491 - DNA, 771 bp, Cannabis indica
gttcgggtctgggtcgggtactagttcccggtcctagttctgtttcgtaggtccttatactaattcagggtgcaggtcccggttattgtgtgggttggggtcccggtctaggttcgggttcgagtcctagtgtcggtttgggtttaggtctctgtttggcttttgatcaaggttcgggtttgggtttaggtcctggtcctggtctttgtcctagttccattctatttccatttgccattctgagttcgagtttgggtttgagttcgggctcgagttcgagtcctggtctgagtttgggttcgagtttggattttagtctaggtccaaatcaggctctgggtgtgggtttacgtcctgcgtcttggtctatgtccttggttctgatattggtctgggttcgagtttgggtctaggtccggttctagctttgggtctgattctaggtgtgggtttgagttcctgtccaagtttgtgtccgggtttgtgtcctggtttggaccgcgatctaggtctatgttcaggtccaggtccaagttggggtctcgagtgcgggtccaagttttggtctcggtcaggatctcagtccagatctaggtctagcattttgatcaaagtctaggtttggttcgtatccagatccctatctatgtccaagtctgtgtttaagatcgtgtcccagatttaggtccaggtctttatctcagttctggtctgggtacaagaccgtgtccaagcttaagttccagtctcaatttgggtctgaggctaggt

SEQ ID NO: 364492 - DNA, 437 bp, Cannabis indica
taatataaaacaaaaagtgtatttcaaataatctcaacaccttgatatacaaatcaagtgtagtgtgtagtatactctccgtaacaggatctaacaggttgtattcaacacaaccttttctccaccattacatttccttaatcacaaaatccatgatattgtgaaatttctctctatatgtctactctcttgggatactggattgtttactataggcaactaattttgtttaagtcaggaagtaacactagtaattaagaaatgttggaacattgccaaaaatctatagaactttcattggactgaataactacctttcttggaacttaaacattcagtttctctctggtagacttagagacttcagatatgtttttacacttctccaaaatcactactccgcccccagagtaatcaccatctcatcagcagacctt

SEQ ID NO: 364493 - DNA, 494 bp, Cannabis indica
acacttttagtataattatatcttatataattattggcattttaaataaagtgcacacacgtggcgtccctgttggacagggcgttacacaagttatccactttctgccgatggatccaaactatatatttatgtatggaatatgagtttagtattctgtgacaaggatccacttggactattcgaagaactctttattgtaactgttgggttgtggaccctaaataaaacctatttcaatataatatgatttactaattaataaagatcagaaactgcattttatgttacatggttcacatgatttatttcatgattttatttaatgtataaattttattaagtccagaacatatgtatttgttcataattatagtgtcgtcagcacagtgaaatataatcatgattatatgttcaaatgtttaattccctgatttgtcagttcactagatttagactggcatgataatcagcagtaggtatacttacacctt

SEQ ID NO: 364494 - DNA, 754 bp, Cannabis indica
aaaaaattcttttagcttttacatgctctgataccatgtagaaaaatgagaaaaatgagggaaaatgatttttattttctgatggtctcttttagtgtatacaaagggtatatataatacaatgtgaacacctagtaatactagagtaaatggaaaatacattaaatgtaaatttacaactaattgctagcttgatttcctacagcaatgaataatgaggttgatgctttaaagaaagcccgcacctagacattggttccttatcaacctcacatgcaaatcattgacaacaaatgggttcatcgaataaaactcaatgctgatggaacattggacaagttcaaatctcgtcttgttgctaagggatatttgcaaactccaggaattgactatgctgaaatgtttagtcctgttgtgaagccagtcacagttcgcattgttctatcgcttgctgtcacctccaattgggaagtaaagcagctggatgttagtaatgccttcttaaatggagatttacatgagactgtctacatgacacaacctagaggatttgaagatccctttaaacccactcatatttgccatcttcacaaggtgttgtacggattgaaacaggctccaagggcatggagtgaaaagttgagacacacactgctacaatggggattcaagcatctcggtcagacacttccctctttacctatggttcaaaagacatgttggttattcttttagtatatgttgatgatatact

SEQ ID NO: 364495 - DNA, 1537 bp, Cannabis indica
tagtgtctgataatggaactcagtttgacggcgagctgttcactgatttccgtgaaaggaataagattattaaaagtttatcatcagtatcgagacctctagcaaacagacaagtaaaaaataaattaaaagatactattaagaagaagctgaacactgctaaaagaagataggtagatgaactaccacaagtgttgtgggcccatagaacaacagagaaaatagcgacaggacacactccagtagaagttaacattgcaacccacaggcgtgaattctataatcaagaagaaaaccaagaacttctgagtatgtccttggatctactcaaagaaagacgtaatgagtcgcaaataaccaatgcagcttatcaacatcgaatcacgaggtattttaacaaaatagtccaaaaaaggctctttaaggttggagatttggtgttaaggtgtgtgtttgcaaacatgcgagatctggctactagagtgtttaacccaaactaggacagtccttatgttattaaagttgtcgtgagaactagggtttataggttagcttggcttaacggctcgctaataaaaacctctgaaatagtgaatatttgcgaccttattactagtaaatgtaatatgtgaaagctgtatttttctctgtaacaatttatgtttattataaataaagtgtgttcaagtaattacaaagtttattttctttaaattacttgggggcatatatatgtgtataacgattggaattcatctagaaatatatactataaaaacccaaaaaattaaaaaaatttccacaaacgaaaggataattgattaaaattatctatggacaatatcaagtcaaagaattaaaaaaccttttcttttagaaaggaaaatcaaaatagcagttgtaagtgagatcaactcataatacaataaaaatgctatatgcgagttgaatacttaacagctcgcattgttctggcatgtattataaacaaggcacaagaattccttgaaaaataagacttaagctaaaatatgaatagatgatttaactattcattggagcaatcaaaagatattcaaaataagtcttgaggtgaattattcaaaatattttaagttttctttgaaaaaaaatagattagaactgctcgcgtataacaagatagattagaactgctcgcatatatacatggtagattaataactacttaaatatctcaaaaaaaaccaagtacaatggaaacacattcaacctaaagtatcgtaagttgaatcgagatataaatgtttaaattgtgagacaaaacacaataaacaaacatatttagctcaagcacgagatacaagggataaaaggtaaaaaataaataaataagcaaagttggccatcaaacaatgcaaaagtttgtacaaaatgccactaggggcaaccattgtctcagccaaagggccattttctaattgaaacaataaatatataaatatcataaaaaccaagtctacatggttggagacttggatagatcttcttcttcttc

SEQ ID NO: 364496 - DNA, 783 bp, Cannabis indica
tgataccaaaattgtaacgtcctaatactaaggcacgctacaatgatttttcaattacagtgctatctttactaatcaaagaaatttccttgaaaatcgtgtcaaattaaaactttagatttaattatgaaactttataaagttttatttgattatttacaaaagtcggaatcccgtacttaaactttttacaaaatactccaaaatacaatagtcaggtcgcacagcgaccacaaaatgaaaaccccagatgtcccaagaccgaacactctaggttgcgtcgccatgacatgtacaacatcacccttgctcgaggcgcactcctgttcagacttcgttatctacacatgaaagtagaattgtgagtctacaaactcaataataaaagcatataacatatcatataatatcgacttgtatctaggcgcccatacacctatttacaaggcttaacaaataagtaagaacatttttaactaagatacaaccatgtaccactgtaccacatgcactctgtacctacccgtactagtgttggtaacactgtaatgtatcccttagacatcgtacactataccaatgcactctttaccgctactgtactagtgttggtagtgtatgaatcataataagcatgcatatatatcacacatacatacattcacatatatatcatatgttttatactattcttacctcgtttttgaattcaagtgagttggccgacctgaacggaaagtctcgtgctagatggattccctaatcacataatataactgggta

SEQ ID NO: 364497 - DNA, 552 bp, Cannabis indica
aactgtaatgcaacagttatataagttgcgagccagctaacgtgcaacttaattgaaactaaaaaatgtaaaaatatgaatgtgtatatgtaagaaactatttgtcagtattgtttttggtcactaatcgataattacttgttccttaatagtaatatgtggagaaataactgttagcaaaatatttatgcaactcatgttatgaaacattaaaaatcataacagtattttcacatacgtaactctatctacatctcttcatgatttaatatgaacaaattcatcattagaaaatttgaaaaacaacgaaatacactagaataaatattttactatagtattgatgtaatttttttgggattatacttgagaattgtttaggaattccagttcaactttttgagatatgcatttcatgaatctaaaaattgaaagtcaggacattagttttatgcaaattaaactagatttcgggttgaatttagtagttttctatactttttttcttcatgaattcgaaaaacccctatttaattgattctggtcgtcttc

SEQ ID NO: 364498 - DNA, 619 bp, Cannabis indica
gaaaggttattcatagctaatatttttgtgatattaatgggatttgttttatttttattttattatatataaataaaaagtcacccatgaatttctcataaatcaagaattcagttatatagacacactttatatagaactagatgaaagctacgtacaaggtatgtataatttgttttattttagttattatgtaatttaattttgaataatataacacataatgaatttttaaatataaagtaattaatcaagaaagattattaataattattatctggttatttttatttaaatacacataaaagattataatgaattatgaaaataaagactaaatgcaatatgctagtgatgttgttttgaaaaataacttgtagaattgatgattatttaattacaaattgtttgttagatcataaagtaaagaaatttttacaccaaaaatctgatttgcacaatttattacaaatttacccctacacgcctacatcatcatttttacctatcctctttcttttattacaattataccacttacacatcatttccatgcacagacacgtgtgccatccccatcatccatcaatcaacttccaatctcttccctctctttttt

SEQ ID NO: 364499 - DNA, 559 bp, Cannabis indica
accctattacccttgggagaccttatagtatcactaggtggattcggtccttgtctttttggattgacggttgtgagttgatcgccaatctaattgacttacaattgtctcactttgatataatcctgggaatggattttctgcctaaatatggagcgataattgactgcaagcggaagatggtggtatttgagcctgatagtgttaacccagcgttgttcgtgggtaatattcagggggcacgcgtatcgagaataacattgttgaaagctaaggacctgatgggcagaggttgtctggggttcatagtcactacagtggataccagccaacctgtgacatcagggtttgagaatacaagattggtatgcgagttcctcgatatctttccagaagacttgccaggattgccacttactcgggaaattgaatttgttattgaattggttccggtagtggatctagtatctaaggccccgtaccgcatggctccaactgagttgaaagaattaaagttataattgcaggagttactgaatctgggattcatcagatcgag

SEQ ID NO: 364500 - DNA, 496 bp, Cannabis indica
catacttgtgagtagatgtaagatcctggtaaaataatttccaacactacatccattggttcaggtcagaacaagaggttctgagggaaccaaggtcgaggcaatcggcagggtaattttaagacccgatacacttacccagagtgccccagttgtaaaaggcaccatctgggggagtgtaaagggcaggggtgctttcagtgtggcatgccaaggcattacaagaaggattgtcctcaaatcagaaccgcagcttcgaagactgcagcgaaacccaatctggcaagggtgtttgccataactcaggctgacgctgaagccagcccttttgtggtaacaagtctgctctcggtcaacaactcttatttctctgggctgtttgactctgggcccactcattcttatgttgcagcaagaatttttattaagttggatagaccgcacgatagttatgaatcagagtttggagccctattacctggcggagagttagtta

SEQ ID NO: 364501 - DNA, 431 bp, Cannabis indica
aactcttatttactcttcattagtaagatgagcatcactaacaaaagaaaaaatcatcacaattgaagggaagatggggcatcataggaaggtgacgatgaagatggtactggggatagagcatttaagcacatataggtcatgtccacctgcaacttctcataaagatgaggtaattgaatgtatcctctcttgtattccttctcaaaattcataaaaatattactacttaaaaactttctcatatattccttgcagcaatctttgtccgtgcaaagaatttgttgatcggtgccgtaaattacaattgaattgttaaatttaagcatataagctcagttgcaccctcgaaataatctacctccatatgaatcaatgatataacaaacatgatgtaacaccctaactaccttaggcgtattacgtgattt

SEQ ID NO: 364502 - DNA, 762 bp, Cannabis indica
gttcaccgagtggagggacaaagagatggaggcattaaaggctcaccatgcagaaatcaaggctcgtagtcggcaagccactgtgctgatacgaagagcctaccagactataggccagcaggcgccgagcgtcattccccttggagaaaccgaggatgacccgacggtaaatgcttcccagacaaccaacggtcagctgtccaaaccccggtcacgagttccactcgtgggccaagaggtaggcgaacagaccttgtccgggaattcatcaggaggagtcttgctcgacggatccacgaaaaataagggagccattccacctgccaaccaagcgaaccaatcgctaaggcagccaggttcttctgtgttcgaaaggttgggaacaagccgtgacctaagggacgacctaaacagaagaagggtaatagatgagcagaatactacaaggaacgtgcactccggagcacatactcgaatccccgctcagaaagacgctgacatagcccaacccggccagaatgaattagcccagcaatataggcccagcttgacgaattgaagaatatgtttcacggcattgccgggcagcgtaacaatgatcttgagttagaccgtgcacgcggaactcccttctctttagaaatcaacctcctgccactacctcacaaattcaagatgccaacgtggaagacgtacactgggagagaagatcctgttgggttttatgacctaaataaaattcatttcaatataatcagattt

SEQ ID NO: 364503 - DNA, 622 bp, Cannabis indica
gtgtcttaatcctgacatggttaggctcgatctcaagagtgttatttgtgttctttgatttatagttaagcctaccttttgggctgggtgatacgtacattttgggaacatgatagtacaattgagtgggagcgctaatcatagtatggaacctatagcttctatgtggacatagaagtgaaacgatgatctccttcgagcttggctgaacagagataaatgattgagatctcatttaagtaattatattagtttactgaaatatcttttataagtagctaagtgtttttaaggataaaatacattgaagggtagaacggtaaatttgtccccaggattataacaatggataatcataacgtatctatatcgtggtacatatatagcgttctatataactgagagtgtattcaattccaagttctatagtggttcaatgaggaattaataagttagtagatttacttggtgaattatacatctacttattgaaagctcggttataaaggcccatgatcccctcacttattgagataatactgcttgcagactcagttaattgattttaattaaccacttataattctaaaattatactatgtcttatttatgaattttcact

SEQ ID NO: 364504 - DNA, 476 bp, Cannabis indica
ttcttcacagtcttacatactatgattgggtaccaacttgctatgcgtgggcatgtactctatcactataaggttcgaaaattgaagagataaagagagagagaaagattcaaaatagagagagagagaagactcaaagtttgactaaaggaaagtgtcacttaggttgtcacttttgagtccatcactatctatttataggaatccttctaggtttaggtttgaactattaggaattaaaaaattgataaataaatggtaaaaacaagcttaagtggccgaccataggatgtgggcccaccacttgcaattttgccatttttcaactatttatcctattctttcacaaacgtcatattttccaatacaaccacttaaatgccaaaactatgtatttaataattaaaataaattatcaaataaaatttgcatttaacatatttattaattagacttaacaaagtctcttaactaac

SEQ ID NO: 364505 - DNA, 1167 bp, Cannabis indica
gcccgaacagcacagacgagcaagaagaagtgatcctggcccgtagaacaaagggaagccctaaaaatccccacaggcaggagagcccaccataacattcaacgaagagatgctgtcaaaatcaggttttcgcacaatgacccgttggttgtagaggtccaaatagccaataagatggtggccagaaccatgatagataatggagcctcttccaacatcttaatcaagaccgcctatgaaaagatggggctccggccaaggagtcccacctctagggcaaattcgcctacccctcactattggacaagctccgacgagcataactataattgcacaatttatggtattggatgttctttaacgtcatgctaggccgaccagccttgtatgacttaaaggctgttacgttgatattccattcatgcctgaagtttccaacaaagaatggggtagggtgtctgagaggaggccaacagattgctcgggaatgttataaccttgcagtggccaaggctaagaaggaagtatcctcaagctagagcacggacaagggaaaaaacatttctaagtagggaacttcccaaggcggggatgaagatgtggatcctcgacttggggacccaagcagcaatgttggacctgtggaagaattagaagagatcgagattgatccagatatcatggccaggaagctaaaaatcagaaaaggtttgttgctcaaagtaaaatcagcattgttaaaacttctaagagcaaacctggacgtttttgcttggtcacatgaggatatggtaggaattgattcttctataatttcgcacgtcctaaatattgatcccaacttctaaccagttcaacaaaaacgaaggctattggacaaagagtgagcattaaccctgaaggatgaggtagagaagctacgcaacaataatttcacaattgaagctttctacccagcttgggttgcaaatcacgtactggtaccaaagccgaacaaaaaatggtgagtatgtattgatttcacagacgtcaacaaagcgtgccccaaagactattttccacttccaagaatagatcagcttgtggatgcaacagctgggcatgaaatattaagcttcatggacgcttattcgaggtacaatcaaatcaaaatgcatccaccagacc

SEQ ID NO: 364506 - DNA, 526 bp, Cannabis indica
cgccaataatgaactatttattagctgggcaacttccatctgacattaacgaggaaaggaaactcatgtataaggtaccatggtatacaattgtagaaggaaagctttaccgaagaggatatttatgttgggattttatgccctaaataaaactcatttcaatataatcttatttgttatcaatagaagattagaagtcgtttatgtatacatgtattattcatgtttatggtttaatatacagtttttattaaatctagatatatagtcatttacaattacagtgatgtcaaaacagtggaaggtaattgtgattatatgcttcaaaagattatgtctcatgattcatcagtgcacaggatttacactgatgtgatagtcaacgataaagtttacttacaccttggataagtgttatgtcttttccagggcattggaaagtatgctagtatcggatatatggagtatacattggactgggaccgatattaatcttggtaaagatattataatcttaccgttgtat

SEQ ID NO: 364507 - DNA, 940 bp, Cannabis indica
tttactgttttagcatcacttaaatatttgtcatgattattttaagtattaactaaataaattcatgaaaaatacaaaaatgatcgaaaactaaatctattaattgtaactgagtgtatagtgtatactaaacccaaaataattaattttcaattttctgaatagtctaggtattttttataattaactttagaaataacacaaataattcaggaaaaatacaaaattgaccaaaaatccaatctatcaattttgtaacagtttataatctataaccagtcatagaaaataaacatagatttttctgagtaacctaagtatttttcctaattaatttaataaataattcaaataattcataataaatcaaataattgcaagaaaattatgaaacttcgccaaacaccttagaataatatgtagaatctaaatctacaaaaaaaaaagtgggaaaaagacctcaggtatgcccagaacgcgactgccggcgttcacgtcggttccgtcgccgacaagatgtgactttgtccatgattgctcttgacgcgtccttttgattgggaaagcttcccagagttcttaggaccacaaaacgatcaagaactacccaagataacaacccccatgcgtcagatcggagtcgtcttgtccaactccggcgtaccgttgttaatggagtcgaaaatagaaaatttcgtttcagagcttaaagcttcaattcttcatgttaaaactgatctttggggtcccttaaacttaaacacaacctcatttgatcttcgaaacaacttaaacacgttcaaatccgggtttgttacaagaaccgtatcttcgaagcttcaacaatggcgaaactcaaaacagggacctctgacccttatactgttgggaattattttaccaggatcttagatctactcacaagtatgttgtttaaaca

SEQ ID NO: 364508 - DNA, 867 bp, Cannabis indica
tacgggcctaaggctggcatactcgctaacataaggaacgtaatgtactgctaaaggagacttaccggaaccgaaagtactgacgtcaagagcccctgtattcggcacctgaacagaaggctttggcctgggagcccccctcttagccgggctcccaatgcgaagggacttcccggcgatcgtttggctcctcctctcgaccgggctccccacgcgaaggggcctcccggaagccgcctgggccttggtatatgccttctcctgggctttccggtagagatactcctggtacttcttctccgcggtggcaataagctcatcccggaaggtcttatccgcggcaggaaccctcacgttcggacagataaccttagaaaggttagagtcgtccactaactgatgcggcaggatcagcttagccttccagcagttctccgtcgtgaccaagcccccgacgtcgagatcagcccggtcataagtcgcaaatacctgagcccgctggagaaagatctgagtaggcgcggtccgctcgtacgcaggaatcctgacccactccgtgagaagctccgggtgcttcacagctcggaacccggaggagaagaaaaagcgatgccgatactccttgacatgggtttgcctattgtaagagaccacgccatcatttgaagggtgggcccagaaaccataaaaacagtctttaagtttgtccccctttttggggacggaaacaagttcataaaagtacaaaatctctaccggaatgggagagccccatccgcgggcggagtaaaaaataaataagccttaaagcaggcggtaatcttagggaattagttggtatggcgcaaggccgacaaatacaagaaa

SEQ ID NO: 364509 - DNA, 563 bp, Cannabis indica
tcacgcatatccgactagcggtatatctcaagaaacaagcttaggaatctcctatatctcaaggggcatgcctttctcgcataaaccttgggctaacggaaacacctcactatgtcgagcaaacctactagtcgaaatacacggtcatatgggaacaaggaatgctgacgtatgtcgcaaatggctgggtgtatcgcagtacctcaataaacatgcaatcgcacgcatgagcattggaatacggcgacacacctaccatttgaaggacttaactagtatccccacagcaaaatatacatagaatatagagaaaaccctaagttctaaacaacaggtaaaaaatgataaagtcactagaaatcctaaaggaagcagatatgtgagtattcgagatgctcatctgaatacccgcgagtattccagagataagcaataaaaaagatgcgaatattcaaagtattcttcctggattgacggttatgccaattacaggtctgttttctcctggggattatccaattctaacaagggagtaaaactctatgtgtatttcctacaactaa

SEQ ID NO: 364510 - DNA, 733 bp, Cannabis indica
aacaactccaaaactcactcaaaacttatccaaatcccacaaaaccatccattgtacctaaacagggcatacacaacatatttagaccagtaaaactcagaaaaacacactgaattaaattatgccattaaagacctaagtttgggtttcaaaactcaaacttgtgcaattccatcccaacacaacaaaaccagtacccagaacttagaattaactcaaaataagcttagaaatcaaatcacacaaactttaaaccctaatagcccctaacttccaaatttgcatatccaaaccaatatcaaagctagaaaagctaaaagcaaaagatctaggggttatgtctgttggaatttattttaccaggatcttagatctactcacaagtatgttgtttaacaccctaaaatatgaactttctaaaacgataattaaacacatatcaagctaaaaaaaccttacattggtagtagcggaataatatgtctccttccactcagatctctaacccttgtatcctttctgtcacagagtattatcaagatctgagcccgaatgtccttctctttgaatgtgatccttcacagtcttccaatctatgattgaggtaccacttgctctgtgtgggcactactctatcactagagggttctaaattatgaagaagaaaagagggagaggtagggtcggctatagagagagaaagaggaaggctcagtttttctgaaaaggcaat

SEQ ID NO: 364511 - DNA, 849 bp, Cannabis indica
aatgtaaggttttctcaaacccttatatgtttaattttatttttttagagatattcatatttaggatgttaatcgacatacttgttagtaaatctagatcctggtaaaatattctcaacaactggccttagagccacggtaatgatttactttcatgtaatatgaatttaaaatgatgaattttttttattctattgatttggatgtattcatgttggtttatgtattatttgatgaatgtatgtgatttacgaaatttttccatgaaaataattttattttcgttctgaaaatattttatttggattccttgtaaaaaattaagcaacttttgtttttacggaactcaatttcgataaaaatgagagagttatggtggtttggaatttcgggtgcgtatggtcgagcaccatgtgaacaggtgctcgaacaaggaaatctgtgcgtgaatttctgacacgaattgtctgaagcgcatggtcacctcgacatgcactcagttcggacagggcctcatgcgcgtcaccctacacctgttgagatttctcaacagatgatgttgtaggttcccctactccgcgagtgtaagggctgcttgcagccttcttgggctgcacgtgcagccttcttgggcagccacacccctaatgcgattcttgtggattttttccacaaatttaaaattttccctatttcaaaccctaaaaataaaaattaaagtattattttaatatttaaacttaaatattaattttgtaaattaataatatttaattttttaatagattattattaattttttatattttgaggtttaaatttaaaaaattgattattttattttttatt

SEQ ID NO: 364512 - DNA, 577 bp, Cannabis indica
ggttattctctaccctcaacaattattttaactcctattaatgaatctaatttcagatttctaatcaaactattaatctcacagataaagctgaagcattcaaaatatctcaatctccctactacatgtaatcaaggcaaagtgctcaataattaactcttttacctaagcagtaaatccacgaagcatgcaatgtatttaacttagataaagttttaagatttatggagatagactaatctagacaataaattaatgaaacatataatttatttaagctaattcatgccccctgaatttttaaggtcgttaaaaatgctccatgaactattgagattgttgtatttaagaatttttttccaattttggtaaaaaagtctaacatggatgaaagtttaggggacataatttagtacatgtcaaagttcgaggggcatgatttagtagatatcaaaatttgggaagcaagatttagtacataagcaatcactgaaatagtaaaattaaatgaaattaaacaaaagtccttaaatccaacaatctcaatagttcaggagggatttttaacgaccttaaa

SEQ ID NO: 364513 - DNA, 625 bp, Cannabis indica
aagaaatgccgttagatagacacttttaatatataaagatataagttttaaaaagttagtctctatttattattttttttttgataaattggttttcaaattaatcccaaattttatttttcctaaattgatctccaaatttttactttttagcaacattagtcaccactcttaatattaatatttttattaattttacatactttaatttattttttgtgttaaattcaaataattttaatttttaattttaatacttttgataaaatatttatattaatattttttattttttatttttattttttttaagtatttatgtaatatatataattatgatattttttttttaagaaatattcaaaatataatttattcatatatatatatatcaatatcaattatatagtaaagtacagaggaggacatgtgacaactgttaggctttttatttgggcttataataacttttattgattttattaaaaaattaagttgattagataggtttttgttgtgttagctcatattgttgatgatcatagttaatgggcttaacatatatgtgtgtaaagtataggtgaagcagaagtgtgagttttttctagttgactgaagcctttga

SEQ ID NO: 364514 - DNA, 549 bp, Cannabis indica
aaagaaaacctaaattttcaatcatcggagaaaaaaagaaaatcaaggctcaaccttttcggtttcttgtgatagattcttcaagcctaaccaagtaattcaatatcagcaaagtcgaaatttgaggctggccggagaaaatccaaacctgaaatttctatgatcgtgtcaaaatatatagagttcaaaaccctaaacgtacacaaaagaaagaaaattggaagaataaagttaaaagagttgttgaaaacatcggaaataggtaggcgaagaaaaagatgatgatttatttgggagaaagaagtggaagacaaaaaggattattaatataatagaagacttacgagtttaggtggggctgggctgagactgaaaaatgggaggagttgataaaatgtgtttttataggttatagtgtgggtgtggccttattctctattccccggtggtggtggtggtcttcatctccactggatggtacaagagcagaggggttagtggactagcgctggcaagcctcgtagtaccagtaagtatttattgtttttg

SEQ ID NO: 364515 - DNA, 576 bp, Cannabis indica
ttttctcttaagtgaatggccttttgggcggaccacgcccaaaggttcggataaaattttcaagtactcaggtaggatgaccacctttgaaagtacaatttttaattttctgcaatttgttttgtttatgttaagctaaagatcagatcagatcaacataatagctttgatgtaagttactacggtaacagacatatttccgaccaataaatgagtaaagatgtttatttaaattcaaattgagtcgagttcattagcatgttattaatttaacatccagtgcgtacaaaaggtttggtcgtacccaaaaccctgaacagaaaaaaaaagagcatacttataaaaaaaaaagtgatccagagtcataagtctactcggtcacttagggggcacctatacctgtacaaagaatttggtaaaaaacaaaacaaacacaactgcacgatgattataaacaaggaacgaaattcattgaatagcaaaagcattaaagttcaagattaaaggctgtccggtcagccagttattcaaaaaatgaaaaatatattcgaagtgtaaagaccgcttggccggtca

SEQ ID NO: 364516 - DNA, 530 bp, Cannabis indica
tgttctatgttatatacaaatagatcttgggtttattgttaatatttctaacataactctcatagttcagttttccttatctcataatatgagatgattatctcttataatccattaaaagatgtaacttctcaaaatccatcttttattatctcataaagtgagatgttcaccaccaaattgaaaaagaattcaaaactattctttattcacaaaagagatgataataattttcacattaatagtaataaataatattcttatcatactatataactcatatattaatataatatgtatgttactaatcaacatctcatatgtaacatacacataatatcaatattaaattcacaatatatatgttacatatctcatatatatataacatatatactataatatacatatatatcatatacacataatatatacattaattacacaactatatatgttacatacctcacacatatataacatatatatacacattaatatacatgatatatattatatacacatatata

SEQ ID NO: 364517 - DNA, 1372 bp, Cannabis indica
caccctagtgtcggtcttggaccaagaccgagacccagaccggtgcctgggacatgaaccgagacaagactaggacccgtgattgggatccaaatcttgttttggggtccgagaactagggattggaaaagacccatagtccgtgtcttgatctgggagtcggacaaggacccgaagctggaccgagacccagacattggacttgaaactgtaacttgaactagaacgtgaccaggaccctagaataggaccaagagcgtgaccaggacctagacttggaccggtacccagaactagaccataaccaagcccaaaaactcgagctcagaccaagttccaaacccgatcccgaacccagactaggactgagacacgaactcgaacccaaacccaaatccataactcgatcccggacccagaccaagcccttgactgacactggaattcagacctactcttggacacgaacccaaacccgaaatcgaatactgacccagacctagactgggatcgaaacacgggatgaggactcagacccagatgcagacccaaacctgaacctggtacccgaactcagaactggaccgagcccaggattcgaaaaatccatacccattagacccaaacctagacttggacccagaccagaactcgaacccagatcgggatcagaactcaggactcagacccggaactgaactcggtcctgatcgggatcggaacatgggactcggacccgcatctacacccagacccaggaccctaacccaaactcagagcctgatctcgacctagaacgaaatctgagcttgaacccaaactcggaccaggacacgaacaccgacccgaactcgaacccaaactcaaactcggaatcacaactggacctggaaccggacttggactaggaccagaacaaggacctaaactcgaacccgagcttagataaaaaccaagactgagacctagacccgaacaaagaataagactcaaactcgaacctagattgagacccaaacctagacaagaatcgggacctgaacccaaaaacgggatagggaactaggcaacagaactaggactcggacctagtacctgaccccagactcggacttgaacctaggacctagctcgtcagctggcacccaaaatggaatcagaccaggacccgagatcaagatctggatttggacctggggcttatatcgaaccaatagtcggtgtctagatttgggacttagaccagaacccaaacccaaactcaaactcaaatcaagaccaagacacattcccaaacccaaacccagactcgggaacaaaactgaaacttgaactagaaccggactgggatcttagaacgggactaggacct

SEQ ID NO: 364518 - DNA, 938 bp, Cannabis indica
taattgtccgatcaggtcaatcccccaaatggaaaagggccatggactttgcatctgtgttaactcgtttggtggagctcgtgttatctttgaaaatctctggcatttgtcacacttcttaacataggcttttgaatcttcaatcatcgttggccagaaataaccttgccttagaattttcttagataaactttgcccggcggcatgatttccacataatccgtcgtgcacttcagataggagccgtgtagcttcttcttgagtaacacatgtgagcaatggcatcgagaatcctcttctatacataattccctctattatgatataccgtgcagctttccttctcatttttcgagcttcattccaattatttgggagtttccaagagttgaggtaggctcctattggtgtcctccaatttggggaagtatcgatcatttcgatttcttctgtgccagtgatgccaggctcttctaggaactggataggaaccaagttcgccttgtcacttacattgctgcttgccaatcgagctaatgcgtctgcagttgtattttcttcccttggaatttgtctgagaccgtagattttgaattgtgcgagcagatcatgtatttttctcagatacgctatcatcttttctccctgagcttcgtattctccggatacatgatttaccactagctgtgaatcactgcagatttcaatgtgttcggccttcatctcctaggctagtcttagcccagcaattagagcttcgtactcgacttcgttgttagatgctttgaatccaaacttgactatagcgtgcaggtcgttaccccccaggcgtgacgaagggcaattcctgcaccatatatctgatttgtagctgacccatctacatgtagtttccaagtctgcttatcttcattgttacttggctgaggtgttggtac

SEQ ID NO: 364519 - DNA, 501 bp, Cannabis indica
ctgatcagaaaagaaaggcacctactgcatccagcgactcaggtcagaataagaggttttgggggaaccagggtcgaggcaaccatcaaggtggctccgaaacccgatacacttacctagagtgccctagttgtaaaaagcatcatctaggggagtgtagcgggcaggggtgcttttagtgttgtatgtcaggtcattacaagatggattgaccccaactcaagattgaagcgtcgaagactgcggtgaaacgcactccagcaagggtgtttgcgataacttaggttgatgctaaagttagcccttcagtggtaacaagtcggctctcgttcaacaactcttatttctctgtattgtttcactctggggccactcattcttatgtggcagccaaaatttttagtaaattgggtagaccccacgatatgtatgaatcagggtttggaaccctactgcctggtaaagaattagttgtctccaaaaggtggattaggtctatgc

SEQ ID NO: 364520 - DNA, 500 bp, Cannabis indica
attgagatatagttaatatttttatataatgaaggattgattggttgagtatcgataatttgatgatattatgcatgtgatatatgggctcacctgattaggtgatataattttctggcgacgtacttggcgtaagtacggacgtcagtgatatatgatgagtaccgagcgtagttacgggctcacttgattaggtgatgcgattttctgacgatgtactaggcgtaagtatgggtgtcaatgatatatgatgagtaccgagcatagcaatgggctcacctgattaggtgatgcgattttcctggcgatatactgggcgtaagtacgggcgtcattgacatatgataagtaccggacgtaggtataggctcatttgattagacgatgtgatatattggtaccagattgtggcacgggctcacccgattaggtgatccaattataagatatatgggtgcatgtttttggcacgagctcacctaattaggtgatgcagttat

SEQ ID NO: 364521 - DNA, 614 bp, Cannabis indica
ttgcctttgttgggccattgcgtgccatttctctatatgtttgcttgtgggttgtgtgagattggtcatttgggacgctttgtgtttgcttgctcatgcttcttgtttgcactcaacatgtgcgagacatgtatcgtgcctaacctttgaacttgtttacctgcaggcgcgtttaggctgacttgctagctcggtgtgccaacaagtgccgcacgtcccacctatttgggggtgtccaaattggcggcccgtgacagttggtatcagagccaagagagagggaagcttgataacacgacataatggtgagcaacacccaaagaattcaagagcttgagaagcgcataggggaattagatggcctggacgagagggtcaacagcgacgcaacaagttgcttttaaaagcaacaagttgccacgttgactcaagactatgcaaacttgttggccaaggtagctgcaatcgagaggagagatgctgctatcggatcataaggtgcaccttagatggaggatcacatcagggcattagaacaagcaacaacagacatgcaagctgctatcactgtgttacaaaatgggcaggcatcattacaagactccctcaatgat

SEQ ID NO: 364522 - DNA, 910 bp, Cannabis indica
caagggaatgggaagaaggaaagtttactggcaaatccgaaaagctccccgggagaatcatgccaaatacactgcattcactattctgactgaagatatagaaagtgtatacatggcaactcagtcgctggccccgtataagaagcccaggcccatgaagaaagatgccaacaaaagggacatgacaaagttttatcggttccacggagactacggccacgacactaatgaatgctacaacttgaagcgggaaattgaattcctaataaggaaaaacaatccgcacctgcaaaagtatgttaagaccgaccaaggtcagaggaacgacaacaaccaagatttgctacctccaccagtagatggacatctgcaagtcattgttggaggccctcacattgctggagattcgggcaaagctcgggagaggtatgcccgaacagtgcagcacgagcaagaagaagtcatcctggccgtggaagaaaggaagcccaaagttccacgagcaggagagccgaccataaccttcaacgatgaagacgctgtcaaaattagatttccgcacaacgacccgctggtcgtggaagtccagatagccaataaaatggtggccagaaccatgatcgataatggagcctcttccaacattttgttcaagactgcttacgaaaagatgggactccaactcaaggatctaaccccatgcctccagcctgtctatggtttctctggtcaaggagttgcacctctaggacaaattcgtctacccctcactgttggacaagctccgacaagcatgactatcatggcacagttcctaatattggatattccttcagcttttaacgtaatgcttggccgcctggccttgtatgacttaaaggctgtcacatcaatatttcactcgtgcctg

SEQ ID NO: 364523 - DNA, 735 bp, Cannabis indica
ataattaattaattactaaaaaaaggaatgtctacctattagtaacctgctatttacaggtcaaagataaatgtaaccatatggttacaataaaaatgtaaccattgaatagtcacccatataatatatatattataaaaaactactaactatttataaggtattatctcattatgctgatttagttttcattaatgattcttgcaatattttttgagcgtatatgctttaatcacagagtttctgatccatttacatgtgtaaaaggtaagtaattataggtaaaaatacatatattcttgttaattaaaaataatattagaaactgaatattctccatcaagatcaatgggaggtggtctttacagatttatttagtgtttgatctcccggatccaactttgaccaaattatctgctcgatattcctattatcacatttttctgcttcggatgactgttgttcctccacccataaccataggcacaattcaatcccacgcccaaggcctcccacctagacttacaaagagggtttaaatttatttttggctaattaggattttttcccccgaactttcacatgtaccaaatcatgccccctaaacttttttggccgttaaaaatttcccttccactattgagattgttatagatttaaggacttttgtgtaatttcattcaattttactgtttcagtatcatgcccctcaaatgttgatatgtactaaatcat

SEQ ID NO: 364524 - DNA, 530 bp, Cannabis indica
gacatgggaaaagctccagctcactgtcagagtaatttctactatccttgcgaggtgattcaacaagatacactttagagcgtatctaaatccacgtcaacattaaccggggaaaagcggaaaaatcacagtagtgtgattttcaaataataaccgcatttattttacgtgggatgtaatcaaatcccacaattttaggggattattattgtgggaaatcaatctgattgtaattaactgccatcctatgtaactataaataggagcaggatacaatgaaaaaggacggcaaatccttgagggaaaaagtcctagaattgtatcagaaatatctaataagatagactcgtggactatgcagaattttaactgcaaaaccgcgtaaaatttgtgttctttattttttctttactacttgttaatgcagatttttgttaaccaaatttgagcctaacagtgacaaccgcacacagaaaaaataaaggttgtaatataaaaagtatgaacacacaagattttttacgtggttt

SEQ ID NO: 364525 - DNA, 767 bp, Cannabis indica
actgaaatgaggcctcaatcatttattgccttaagccaagctcaaaggaaatcatcatttcacttctagaagttatagaagctatagatattatatctatgattagcgttcccacttaattatactaccatgttcctaagatgtaagtattgggaaaccagttggtcaactttaacgaacaactcaaagaacataaataatacatttaagctaaaacataaccatctcaagattaagatctattaacctaagatcaactaagtgatattgacttagatagatacaacaaaaagtttatgatatcttatccaattgtcagtatcagtccagttcgatgttactccatacatcatcctagaatactttgccaatgccatggaagaacataatatttatccaaggtgtaagtaaattttatcgttgattatcatgttagagtaaatccagtgtattgagaaatcatgggacttaaatgtcgaaacatatactcattattatattctactgtgttcacaacactataatcatgaataattatatgttcttgatttaatagaatttatacagtaagcatataataataaaagaaatcatgtcattcatgcaacataaaatgatttctgatcttttattaattagtaaatctaattatattaaaatgggtattatttagggtataaaatcccaacaaactcccacttgcactaatataaactaaaagtgaattttaattcatttcaacaccttgatgttcagatcaagtgtag

SEQ ID NO: 364526 - DNA, 563 bp, Cannabis indica
cacctttgttatggtggacttccttggtatccgttgatcaaaaagctagctttttgcctcctgattgcttcaagaaagctaaggccctacttccaggcccattccatcaaagtacttatgaaccacccactccgacaggtcctgcaagaacctgaagcctcaggaagactcctcaagtgggccatggagttaagtcagttcgacatacactacgttccacccatctctataaagggtcaggcactggcaaacttcatcgtagagtgtaacaagatagaggctaacactagtaagccagcccaggaaatgccagcgtggaaggtatatgttgatggggcatgtaatgaaagtgggccaggtgccggaatagcaatgatttcacccgatgggttacgactccaagccactctgcggttcacatttccaactgccaacaatgaagccgaatctgaagccctaattgcagggttgagattggccaaggttgtagaagccgaaagagtagaagtttacaatgattcccagctaattgtcaactaagtgtcaggagaataccaaactcg

SEQ ID NO: 364527 - DNA, 567 bp, Cannabis indica
agtgtgtcgaaaaactcgtgcaactaagggccagtttgacactgttgtgctgtgagcaaaagcagctgtagctgtgcgaaaaacaacttttacaaaactatggaaaaaaaaaactagctaagtgtttgataaattataaattttaaagtactatgagttgttaagattctactataataatgataatactataatctagttcattataatcactaataaacataaaaaaaaaactatgttatataaattttttattttatatgtattttaattattttttcccataatataaacttgtatggatttaataaaaataatttataatatttttaaattatatttttatcaattgtaagaaaaaaaatttatagttttgaaaaaactataaaatgatatggtttgttaataataaaaataaaaatataaataatttttaaaacaaactaaaaaataagaaaatttaaatattatttattttaaatatatttttcgttcaaaattaaaatatttttattttttgtaatatataataaataatcaaatacatttttagtacaaaataattta

SEQ ID NO: 364528 - DNA, 1305 bp, Cannabis indica
gtgatatattgaagacctgtggaattgaacttgggtgatcatgccaagtcaggtcagtgcgagagggtgagttcaattgtttccccctgcgcatttttcaagcagtaccccaggggccaatggtgagactagtaccagtggctcgactggcatgggcgcctggagccttgaacatatcagtgcaggggccatactccctcttcgagactacttcaaggattacataaaccacgttagggtgccccaattctatctcctacagaattctcgctagtttgaaggtcttgtataaagttctaaactaggagtgccctacaccagtggaaattgagtatctttattcggttaaggctgttccagcgaggaagaatgccgcaaggggcttctattatcttggtgctcattctagcgagcctaaaattattgtggatttgccaaacaaagtgtcttttaaagacgacttcttctggacatctggtctttccgcaatcggcacaaccacctttcgcagaattcgtaagtgattgttttcctcatgctcagttaaattaatccttgtctttcagttttttgaccaatgttttgtttattttttttacagccctctcgacgagacccatccctacccccgagatgatcagtcggcacaggcgcctcatgactcttccccatggccttaagtcatgcgacttccttttgaacgaggccaatctgagatcggtgggccttcttactgacaaggagtatactcatgattataagtttcccaagtattcttcttggcagcaggttcccgttgcaaaggaggatgaggcctgggatcacgtggcttgagcacagtatcttcaaaacactgcccctcgagaagccggtgaaggagcatcccgaggtaataaatgtggttagccttccacagtacttagcgctgaacgtaacacattggtcacctttcgagacacccgccttaatttttatatttgggattcccatctcgtagaccgagttgctcataagtttgactgcaggtaccctaaattccacgtccagattaactgtcacgagtcatattatggtatagctgagcaatatggcactatggcatatagggaaattcatatagacgcgagctgggatttaaatccaatcgagcccttttatatattcaagattacatgctgtagggattttagtggatattatggtccttctaccccttcttctagtgatagcttgccttctagtgacttcggtaaatccctactgtgttttgtcaatagctatacaactttttgttgggttttgtgc

SEQ ID NO: 364529 - DNA, 688 bp, Cannabis indica
ttgatagttgagggagttttgccgcaaattactcttaaattttttgtttttattttaatttttattttgtaaaatatggccacgtaggataattttttaatgacctgtcatttccacgtgggcaaaattaggacttaacgaggctgaatagacgacaccttaaaaatgtaaacgaaacagtactttggagggttttcccaccaaaatatgaggttggatggttttttgcaagtaaattaatagttgagggggttttgccgcaaattactcaaaaaaaaaacagttcagggttatatttgtacaattttagaaaatactgagttcattttatcatttaacaaaacagatgatccaattagtaacttttgcaaaacacatggtctaaaataatatttatcctgttctttattatttataaataaatataaataattttttagtgtatattaaatgtaattagattacattggtttttaataattaaattttgagattgacatctaataaacgtatataattagaatttaacttttaaccttggcgtttggttgagaggaatgaaaatatgagaataggaatgagaataagaataggaataggaatgcaatggaataaattttaaaatgtataaaaaaattgataaaaaaattattaattttttttcttattacattggaatgttcattcc

SEQ ID NO: 364530 - DNA, 589 bp, Cannabis indica
tagatatagattttatttatctaaggaaaagtttcaactattcaataaaagataaatcccaagaaaataattcgttgaatcaacagtgagaggtctcaataagctttcctatgcagtagaccaaataccagctgttgagtgggagtaatgagtaggttgttggaatttattttaccaggatcttatactcacaagtatgttgtttaacatcctaaatataaacttctaaaacgataataaacacatataaagtttagaaaaccttacattggttgcagtggaataatatgtctccttcccctcagatctctaacccttgtatcctttctgtcgctgagtatcaccaagatctgagtccgaatgtccttctcttcaatttggattcttcacgatcttccaaactatgattgatgtacaacttgatgtgtgtgggcactactctatcactcaaggtattcgaaaattagaagagggaaagagagagagagggggtcggctatagaaggatagtgagtggcttaattttctgaaggcaatctcttgaataacttgaaactcttattttggtgtcagccatcactatctattt

SEQ ID NO: 364531 - DNA, 935 bp, Cannabis indica
tatataaggttaattagattaaaaaagaatatacattattccaaaaagtattccctgtttgccgatgaagtcacataacatcacctgctacaaatcttctccagatatcgtgatctgggtatgaagtgctatgaatccacatggtaccagaattgggattatctcatgtttatctttgactctaaaaaattcttcaaccatccatttaagtgactcagggattagtgtcatgatctctggtgtgaataatagatttgcttgatcaccatcatcttttcaacaaggcatgagaccttttcccttcgatacatcatgtcttgatggtggttgagctagtggaccctatacaaaataccatataatatatcaaatttgatcctaattctcctgaattttcggcagcataacggctgtaattgaacgttcccaaaaattttaaacatgcctaataacaaacaaaacagataaaataattgattattcatccatccgaccgtagtacatgtattcgcaaaacctacttcactatggttgaatatttaagatatttaaactccactaatcattaatgattaatttataataaaagttacctcaggtgttacaattaggtatttaggccaaggaaggaacatgttttctacttccttgacgtattcgcaccccacaattgagattggaatttcaccatcctcttgcagcatttctaaaatgagaacccaggcatgtgaatcatcataggatttagtgtgaactgtgattggaccctcacgttcgtacaaataagctcgggccactatgttgtcgatattgtttgagcagagaaataccgcctgattagctgccctctatttagcaaaattgtacatgataggtggctcatttaaggaaacaaactcctgagcataattttgtggaccctcatcctcctgagc

SEQ ID NO: 364532 - DNA, 596 bp, Cannabis indica
ggcctcaacttcacaaaggggccaacagacgatgagaaagaagccaagtcagggactaaccggttgataaatctctatttcaaccggtcagataatgtaaagacagaattacttcagaataagttcctagcctgggagatcccaaaagacacgtagaagctagggttgtgcttgtttgtggagactgtcttactaggtcgagaggcaaataatgtattacaactgacatactaaaatgggttgaagatcttgatttttccttcaagattccatggggtaactactcattttccagactgatgcacaccctccaaaaagacatgttgaaacagaaggcaaattatgagaagaagttgaagatggataatcagcacgaatgcaaatacactgcctatgactttgcacctgcattacagtattgggcctatgaggccattataaaggtggggaagaagtatagttcgtgtcaggggattccttctcccaggatgctaagctggaccagcagggctgacatgggaaagaaggaaatcagttcattattttcaaaataggtatgatcatttaatttttttgaactgttatgtttatttttt

SEQ ID NO: 364533 - DNA, 662 bp, Cannabis indica
ccttgtaaataatcagacacttgatttgtatataaaggagtgatccaccgtgaaatggacacctacgaaatccttgaaacagtggactaagcagatcgtgatctgactgaaccactatattcccttgtcttcttcatatttccagttttcattaagcatttacgttcccagttcaagtactcgttattctaggttgaatactcgcacttgttcttcatattattattataattattattgttactatttatttttggtgttgcgaaatttgctcgacaacatttggcgtcgtctgtgggtatcgagaaatacttccttgctaatttagaaaaagaatcataatggctggaaaccaagaaaacgggggtcttaacaacgaatccatcaacattggaatgatgaacgttccactttcaggagtcagagtacctcccgtagatgtcatcaacggcggagtaggtcggggtaatgtaagacctctcaacctattccctgaaactacaggccctcatgtcggggaaacgtctacaccaacggccacaacggggcactttccaccctttactccggcaacggtgtccgagggtattgtccaactgaccaccgatcagtacattgcaatccaagaccagcttcgccccctgcaggccgaagtggatgga

SEQ ID NO: 364534 - DNA, 558 bp, Cannabis indica
gtaaaaataattaaatatgatgttaagagtagaattcagagtgtaatgcctgagaaagtggcaaggaagaatttagaatggtttgaaaagttgtgaacaattgtaaaatatttgtttagtggaatatatactcatctgattgactaaaaaaatgtgtttatatacaaaatacttaagtcaaactcaattttttttatcttttttttgctaattttttctttcaaccgatagaacaaccttaactcatataatgcaaaaataagatatttttttaattagatagaaaaattaaacataaaaatttaaattttcttaattctactcattcattggtaatacccattaagagtgtacccatatatatatataaatagaataattagcaatcttatcccctgaacttttgacaatagtgattgtgtctcttaaaatataaaatttgttaagaatctccctgaacttttacatttataaaaatttagtacttctgttaggttccgtcctattatttctttaaatgctgacgtatctttgttaattagtaatttttccttttaa

SEQ ID NO: 364535 - DNA, 613 bp, Cannabis indica
tcaagctaggggtaaaggtgatcatcagacttattatcttccaacggtcatgacaactggtcatgactttacacattcttcatcaattcagtctttgtatcctcgtgtcgcgtgtcatcatttttgccacctcactattgtcaaaattttggtaaatatttcccctaagttttttagcgatatgactatatggtagaaatttttcggtgtagtctgcacttcagtttagttgttgatgacttagtggtacggtaccgagaatgccatgcttatactagaattatatttcaaacccaaaaaataattatctcactttttcatatttttacaacatattcaaatgaaaatttttccctttgtaagcaaaaataaattataaggaaaataaattatttacaaaaaaaaaaaataatgggtaaatagtggcataagtacccaaagttttaggtttgtaagcggcataaatccaatgattttttttagtggcataagtacccaatgtttataaaactgtaattttcttccagtttcatcagtacaaactctgttattgtcttaaacatgacacatataaggcccaaattatagattatttggtctggacaaaaaatat

SEQ ID NO: 364536 - DNA, 762 bp, Cannabis indica
ttagggaaaaaatattaagtatatgtaagaaataaaaattcaaatttcccttctaaaataacatacctgaaatgaaactaatctcgaaattcttttattttttaatttttctgcatttcaaaagtaaccttttggtatgttgataataaaccaataagtaattttttcattaaaaaaatatcacttctatattatataatttgatatacattttggttacctttaaaacttatatgtacgcactttaataatcgattaattatttagattatattaatacatttgagtaactttcaagtttacttttaaaaatgctaaattgtcaagtaacctaccatcttagtaaactgtattttttttttaaaaaaaatatctatcataaatatttaaatcaccaatattttttaaatgtaaattaacatatgcattttgattagttaaataaagaatgaagttacaaataacttttaaatcattataaatatgatatttttttggaccaattagttatgattttgataagatactaattagttacttttgataaaattattagttttaaataaaaagatgatgatcagaccaaaaatcttataatcagatatgtctatactcatatatgtcaaataaacttattagtttattttgacatattgaaataaattttcattctctgtttacatttttcgtatagcctaccatcatatttggtaacaaatttattagtttattttggcattattaaaataaattttcattttt

SEQ ID NO: 364537 - DNA, 598 bp, Cannabis indica
ttttgcaatgtcactgcctttggaattttggcatccgattcttgccaaggaaaatctcttggggatttcttatttggcaattgtcctgagggggcctctttccacggtaagggaaccccaatccccttttttgaacattaaggtttggtttggggcctaactgctggattttctcgatttttttttttcagaaccaaaatgtctgctttcgcatttggttctaagtcttccaagaagggagaggttctactagccaccctggaggaggtcatgcggggtcccatggcccaggagaactttaagtcccgtgctaatggatgggaggtgaatgagctccattctacactgacttgtgctcaccagcttgaaaagatcgtggtggtggcaggcatcaaaccctcagcctgcgggaccttctaccggttccttcgcgacgaggagacactcaatcacaactatggggcttcagagcttggagccaaacccatttgatgttcggggctatgctccctcttcacgactattttgtaaacttagtttttgttggcctcgcgccgtaccaactaatccctcaagcttaccgcctgctttcaggctt

SEQ ID NO: 364538 - DNA, 891 bp, Cannabis indica
cttttatatggaagaaagtgtagatcgcccattcactgggatgaagtgggtgaaagaaagttcttgggtcccgaggctgttcagagaacaagtgaggcggttgacaagattagagcgcgaatgctcgcggctcagagtagacagaaaagttatgctgatccaaagcgtcgggatattgattttcaaatcggggacaaggtgtttctccgaatatcaccgatgaaaggtattaaacgctttgggaagaaaggaaagcttagcccgaggttcattggaccttttgaaatccttgagaggatagggcaagtagcgtacaggttggctatgccccagcgctggcagctgtacacgatgtgttccatgtttcaatgcttcggaagtatgtctcagattcgtcccataatctgagttatgaagcattggaactatagccagatttgtcatatgaggaacaactagtgcatgtactcgatagaagagagaaagtctttagaagaaagacagtgacattggtgaaagtattatggagcaataaagtggaagaggaaacctgggaactcgagacggatatgccgcagaaatatccagagttgttcaggtaaattttcagaacgaaatttctataaggaggggtaattgtaatacctagaattaaggaatggattagtaaaaccctaattagataatgatgaataattgaggaattacattattatataattcagtatatatgaattaatatgaattatttgattaattatatgttaagaccacgttggtgagccaggggcattttcgtaattatgacccgagaagtgtaaaaagatgaaattaatttattaacttgcttatgggactatattattatatagtatacctgtgttgtctttt

SEQ ID NO: 364539 - DNA, 1119 bp, Cannabis indica
tttagttttttaatttttaatcacaaaataaaataaatttgtatttttaaaattttgtttctaaaatacaaattgtgtttattaaccacttttatttttaattttaaaatagaaaacaaaatgtgttctacaacttttcattttctatttttattttttgactttatttaagtcaattctgggtttgggtctagggtcagggttatggtctgtgtccgggactagggctgaggccagagttcgggtcccaaggtctaagttagaatcggaatctaaaattaattattaaaagaaaactatttaaaaaaatttgaaagtgaatttttttaaaaaaaaattaaaattttgattctaaattaaaaaattaaaaagtgaaaacaattttatagaatataattttgaaaaatatttttactttttaattttattaaaaacaaaaaaactaataaaaaatgtgatatgtcgaacgtcgcctaaattaattaagttaattaagcttaatgaaatgacttttttttccttcttagagcatctccaaggagacacaaaatttagtgttacactatcaccaaatttggtgtcaaaaattatttctactccaaccacaacaccaaaaattacactaaaaaaatattccttattattatattaatttttataaaataaaaaaaaaaatatatcatattaattaacaaaaattaccacaatttttatatttaactaataatttaaataaacttactaatgtgattaaagacaataatactgtaaaatcggcaaaattcgataaattaaaatatcatattgcaataacataatattcacatttaaatttacacaaaaaaaaatattataaggtgcttttacaatgtattcttctaaataaaagagtcacgcaacagaaagtttgaattttattttcggcatgttaaatttttttaaattttttaaaattttgcaggatgttttaaataactataatgtacacgaccataaaaaaaaaagactaaacaagtctcccgaatgccgaaacaggtaggagtaaatcagtgcaccacttttaaagaagtgcattattttcggcgtattaaatttttctaaattttttaaattttacag

SEQ ID NO: 364540 - DNA, 678 bp, Cannabis indica
tgctcaactttcacttgctgacacgtaaggcacttagcaacatattcagcgatatcattcttcatgcctggccaccagaacatggctttcaggtcttggtacatctttgttgaccctggatgaactgaataagaagtcgtgtgagattcatccatgatctctttcttgatgttctcatccatgggcatacaaactcgattcccgaatctcagcattcccgtttcatctactgagaaatcactagccttcccagccgaaaccctaactcgagtttttactaattctgaatcttgcacttgtgcttctttgattcgctccaaaagagtagattgcagggtaatattagctaattaccctacaaccaactcaatcttagctcgagtcatctcatttgctagctgctgggagatttgcttcaccgtatttaactgactctgaccctttctacttaaggcatcagcaaccacgttggccttaccagggtgataaaggatctcacaatcataatccttcaccaactctagccaacgcctctgtctcatattcaggtctttctgggtaaagaagtatttcagacttttatgatcagtgtatatctcacatttctcgccataaaggtaatgccgccaaatctttagcgcaaataccactgctgcgagttctagatcgtgagtaggg

SEQ ID NO: 364541 - DNA, 606 bp, Cannabis indica
aaaaaaggaaaaaaaataggaaaaaaaaaaaaaaggaaaaaaaattacaaaattactatgggccggctcattcaacatttatacagccgacataaaaatatttacgaaaataccacatgctctaaaccttcaaccgcacagaacgaacgatgaagatgaacataccttgatcttttcaaatcagcaaaacaaccaaaatgaaaccaaaacgagagaaatacaaccattaaatctggaaaaatcaactgaaaaagaagacctgcaatgatctacacagaaatttacgaaaaaaaaaaccaaaaaaactaggaaaaaactaaaattatacaattgtttttggttttattcgatcaaaacaactctccctaatattgaaattcagattcataaaatgtaaatctgttacaaacagatcttgagctccctccgaatccaaaacaaagtatgatgtgaaaattttaaaaaaacctcatgaataatatatctacttcatatacagttgcattttggtttgattactcgtttccaatgtggaatatattttttaaaaaaaccacaataagaagagaaaatttgaattaatggacaacaagttacgtataagtc

SEQ ID NO: 364542 - DNA, 1168 bp, Cannabis indica
tgtgaatgctgtgaaattattattatgtgctaactttgatatgaaggacctcagagaagctgatgtaatccttggtattaagattactagatttgaaaaggaaatttctttggatcaatctcattacattgagaagattctcaagaaatataattactttgactgcaaacttgcttgcacaccctatgatccaagtgtaaagttatttaataacatgacagtgtgagacaatcagactatgcgagcattattggcagacttcgatatgccactgattgtacgagacccgacattgcctatgtcgtgggattattgtgcaggtttactagtaggcctagtatagagcattggcatgctattgagagggtaatgagataccttaaaagaaccatgaaccttagattacactatcaaaggtttacaactgtccttgaaggatacagtgatgcagactggaacactttgtcagatgactccaaagcaacaaatggctatatttttagcatagctggtggagctgtttcttggaagtcaaagaaacagactattttagcacaatccaccatggagtctgaaatgatagcagtagcctctgctagtgaagaaggaggatggcttagaagcctgctagctgagatccctgtatggaaaaaaccgataccagctgtgttgatccattgtgatagtaccacggctattgcaaaattccaaatctgttattacaatggtaagaaacgacaaatctgtcgtaagcacacaactgttagagagttcctctcaacaagagctgttagagtggatcatgtacgcactgatgacaatttagcagatcctttgacgaaaggactagctagagagaaagtcaataaaacttcgaaaggaatgggactattgcctttagaaagatgagtcactcataatggtaacccaacctaatgactagagatcccaagaattaggttcaacgggtaataacaagttatgaggtgatatgtgttgatcatgctattattatatgaaaagcatgaagtcctgaagcgataagaggatgagttaatagaaactcttaaatgagatctatactctatgtggagtgggagtaccgagctacatgagtactctttgatgaactcacttatgtgaatgtgggagtggggccgcttcctat

SEQ ID NO: 364543 - DNA, 435 bp, Cannabis indica
aacttagacaagtatttacaatatgaaacaatgaagaagtttataaagatatgaataactttgactcttgtctatcgggacatcgttggattcttattttaaatttaaaattatcctttaatttttcctcttagcttattcatttcgaaatagcttaaagaatatatcattagatgaacggcttataaatcatcttcttgtgatgtcactctaatttctcttatgaaattgaatggaagagatgactatattcccgacattctattccaaaatgatataaatcctcgatcttagaaatctcctacttgtatatgtgtattttagggaaattagacttagagttagattagtagtgatagtccaagagagaataataactcaagaaatatttggtataaatttaagtctttgactttaaattttagattccaaata

SEQ ID NO: 364544 - DNA, 692 bp, Cannabis indica
agtatccttaccccgataacttggctgattagtacgttttaagattggtatagttgacctattgttaaaagtcaacagaaagtaaataattgagctacgataacccatgcaaaggttgaacttattttaaagggaatattagtgcgctttctatgttttaatacatatatggtatagtcttaagtagataatcagcactggaatataagtttgttccaaagatttggaggtattggcagggcaattcagaaagcgagaatttttttgcaaattaaagaggctttcaattatgtttcaattgaagagaatcaagatacaatacacaaatatggttggagcaatcgatggtatcataagtatgaaatattgtgtcacctgggaagactggtatgaaggaagaaatactcactgcatatgacgacacacttctattagtgctacaggaataagcttgaccactggaacaacacgttgtcaattcaaatgcatgaaaaaaaaaataaaacattatggaaaacaagctaatgttaaggttaagcttgattgaaagtaataacaacagattaggcaacaaaggtgagattagcaataaagagacaatagagtggtataagaatcaagaggctgcacaaagaatcaaagactatactatccaaaaaaaaaaaatagaatagaaggaaggaaaagtgcaa

SEQ ID NO: 364545 - DNA, 884 bp, Cannabis indica
aggttattctcgacccaggaaatcccacaacatgtgtatacattaggaagaacctagacaagcagctcaaataacaattaataagctttttgaaggcgaaccaggatcaattcacctggagtcatggggatatgatagggattgaccctaagattatctgccatcatttaaatgttgatccacactacccgacgaagagataaaaaaggaggcccctagattccgagaggccagggccactaaatcaggaagttgacaagttgttagtcaacgattttagactcgaggtgttttatgcctcatggatagctactcctgttctcgtcccgaaacctaacggaacttggagaacttgtattggcttctccgatttgagtaaggtgtgcccaaaagactgttttccacttcccaggatcgaccagttagttgatgcaactgctgggcacgagcttatgtcatttatggatgcatattctagatataacaagataaaaatgtacgtcccatatcaagaacatacaagcttcctaaccaacataggactctattgttataaagtcatgccgttcgaactaaagaatgttggggcaacatatcagtgagtaataaacaaaatgttcgcaagccaaatagggcaaaacatggaggtttgcgtcgatgataagggtgaaatcgataaagagtaaggatcatacctcagaccttgcggaatgctttaaaaatattaaaaaagtataacatgaagctaaaacccaaaaaaatgtccctttgaagtctcctcgggtaatatttttggattcatagttaacgcgagggtattgaggaaaatcctaaaaaattaaggcataatagacatgcaatccccgacaaagcctaaggaagta

SEQ ID NO: 364546 - DNA, 675 bp, Cannabis indica
cacatagaataattttttagtgacttatcattaccacgtgggcaaaattaggacttaacgaggctggacagacgacaccttaaaaatgtaaacagaacaatactttggagggttttcccaccaaaatatgagattggatggttttttgcaagtaagttttgccgcaaattactcaaaatgtatcttatctattttacttttttaactcttttattatgggatcataagaattatgttggattaaattaatatttattatgtatgttagattattaggttttaaattatgtcttttcatatatatatttaatgaattcagctttaatggtagttaaaattaattggatggatccaatccaattgagtagaaaatcaaataatgcatccaatagttggaactgatctaatccaatatattcattgaatcagatcggattgaatgacccaattcgattagattggctcggataacaaaatctaatatccaataaataattagactggatcggttgggttgggtacaaagtaggggtgggcatccgatccaatccaaccttttttttcctcatccgatccaatccaattagacctcgaaatccaatccaatccaagtactaattggattggatcggttttttaattggatatccaattacacacctaaatttcaatatt

SEQ ID NO: 364547 - DNA, 800 bp, Cannabis indica
catttgcccccaagtctgtacgggacctctgaggttgcatgtagacttcttccgagctggctctgccttttgaatggggacacgtgtcgagcatgaccgctcgagacccgatgtgaagctgactgggcgtcccttcgattttcagctaataaatgctctgacaattaatatttcgaaatccgattttctctctccacggctgacggttgcactcgattacttttaatttcccatattcgtttttgaggcgggaagctaaggcgtctaaggtttctttgagacgattaccccttttcgagacttgcttataaatgcccataccattggcacataaactcatttcatcacccttccctgctaagttagcttcagagcgaaaagaaaattttctggcttcaaagttgccgaggtgccttcataaaactgcttggttggattgacgttgctcaaacccagacactcgaatcagtaagtttctgatttcctttatgcttttctttgcaagtttacattttgaatgcaactttcattatgctgtagaaaaatgcttaggaaaccctagggctagaaacttccgtgattcttcttttccatgtcttcatgtgggtttacagccataaagcctgtctatgaactgcattgcgtccgtctttcatcttgcttattctaagcttcatgaacttttttttgccctaactcaagaaatttttttgacttcttgagttctgaattttctttagacatagccgttctttaatctgttaagtactcctggtcgacatatttgcttgtttattgtt

SEQ ID NO: 364548 - DNA, 675 bp, Cannabis indica
gatcaacaactaaataggatgttcgaaccaagaagtgagcaacactatttgcaaaacgtctaataaaattaacataaacatctctcaagtcatttaacatcatcttacaatcagaaataattctcccaaagtatgaatccataggaatagagctacgtaacgcttgaagcactgtaagactattagtttcaatgacaacttcttccaatctttcttcttaacccaactcagcgcctccttaacacccaaagcttctaccattttgtgttgcaacacccctgaacgacaccagctaaaagcctccaccaacgcaccagtttcgtccctaaccacccctacgaaactataagttgcattccctagaaaaatggcagcatctaggttaatcttcaaagtgttaccagcaagtttggtccgtgtttcagctccatctacaccagtaagaaatgcatcagttggagtaatagttgtatcttgagctcgagtccaatccgtgaaaagagcttgaataattaaataatatagtattctgatacaactaagtaaacatacattatatgtttatgcattacattacaactctgatacaactgtaagtaaacatacatttattatagtataatattctgatacaactctaaagtggcgtttggtaaaaaaattttaatcagtttt

SEQ ID NO: 364549 - DNA, 498 bp, Cannabis indica
ggcataaaacccaacagatgagagttggatggagtatcaagcgaaaaaataggaaaatgtgccgaccaggagtacccaacagattaaagaacgatcatgttcaagaaaagtctaagctcaagatgccagaaagttttcttgggttacggcaaaaaagttcatgaagcttgaaaaaagcagaacggaaaacagacgcaatgcagttctaaaacgagccttacggctgaaagctaacgcaaggacgtggaaaagaagagtcgcagaagtttcaaaccctagggtttcctacagtgttctttctacagcaaagatacattcaaaagcacaagcatgcaaaggaaaaacataaagggagtcagattcttagtcaaagattcaagtgtccgggttcgagcaagccagaaatcgtctgtaaactcttcagcaactttgaagcctgaaaactcttcttttgctctgaagtttgcttaacaacgaaggtgatgaaatgaggtaatg

SEQ ID NO: 364550 - DNA, 667 bp, Cannabis indica
gttacaaccttgccgtaaccaaggctaaaaaggaagtatcctctagtcagagttgagacaagggaaaaaacatcgccaaatagggaaccacccaaggcaaggatgaagatgtggatccccgacttggggaaccaaataccaatgttggtctagtagaagaattagaagagatcggaatcaacccaaaatttctgaccacgaaactcaaaattggaaaaggtttgttgctcgaagtaaaatcagcattgataaaagttctgagagcaaacctagacatttttgcatggtcgcatgatgatatggtcagaatcaatccttctataattttacacatcataaatattgatcctaatttctggcctgttcaacaaaaaagaagattgttggataaggagcgagccctagcgctaaaagaagaggtagaaaagctgggcaacaataatttcataattgaagctttctacccagcttgggttgctaatcccatattggtacccaagccgaacaagaaatggcgagtatgtattgatttcaccaacctcaacaaggcgtgcccaaaagactgttttccacttccaagaatagatccacttgtggacgcaacagcagggcacgaaattttaagcttcatggacgcctattcggggtacaatcaaatcaagatgca

SEQ ID NO: 364551 - DNA, 777 bp, Cannabis indica
aattgcctttactaatccatatcggcggtcattacaattatcccccagttaaaacgatttcatcctcaacatctaacctggatggctttggatattgagtcctcatgtcaaactctaactcctaggtggcttcctccaccttacttttcctccagagcactttgaccaaggctatggtcttgtttcgaagaagcttttcctttcgatcaaggatctaaactggttgttcttcgtaggacaagtgtgactgtagttcaagggcttcgtagctcaagacacgagtcgggtttgaaacatatttccttaacattgaaatttgaaatacattatggatagtcgataatgcttgtggtaaggctagctgatacgctacctgcccgaccttctcgggtatttgaaatggcccaatgaactttgggcttaacttacccaatcccgaagcgtctaatacccttcactagagaaacctgcaggaaaacatgttcccttgcctaaaatgtattatctctacgcttcggatcatcataacttttttgcctgccttgtgaagcaagcattagagccttgatcttgtctatagcttcattggtcttttgaactaattctagatccaagtacttcccttctccaatttcgtcctaatgaattggggaacgaaatttcctaccatacatcatctcataaggagccatccctattgtactttggtagctgttgttgtaggagaactcaatcaaaggcaagtacttactgttggatattattttaccaggatct

SEQ ID NO: 364552 - DNA, 711 bp, Cannabis indica
taattactgaaatgagatctcaatcatttatctatgtcaagcccagctcaaaggaatcatggtttcacttcaaaatacttatagaagctgtagattccaaatctatgatcaacgctcccactcaattgaactaccatgtttccaaggtgtaaatattcgccaaaactattagttagcatccactaacaacttgaagaagataaataatacaacgaagccgaacctaaccatatcaggattaagatccatggacctaagatcaaccatttgttgggttttgtgccctaaataaaacccattctaatgtaatcagatttactaataaagatcagaaataacattttatattgcatgtttcacatgatttagttcatgattatatataatgtataaattctattaagtccagaacagatgtatttgtgaatgattatagtgttgtcagcacagtggaacataatcttgattatatattcgaaagtttattccctgatttgtcagtttactcgattttgactagcatgattatcagcgataggtattcttacaccttggataagtgttatgtcctttccagggtaatggcaaagtttaccagtatcggatgtatggagtatacgttggaagggaccgatattgaactttgattagatatgttaaaatttaccgtaatatctattcaattcaaaatcacctagttgatcctagatc

SEQ ID NO: 364553 - DNA, 519 bp, Cannabis indica
taaaatagcagaaataaaaataatacaaactaaattaaaattgagattatgatatgagaaaaaagttaaagattattcgtcaccttcaacaatcattcctaattcctatgaaagaatgttattttcaattttcaatcaaattattaatctcgcagataacactgaagtagtcaattatcccaatctctctattatatgtaatcaaggtgaagcgctcaataattagctcttttatctaagcagtaaatccacgaagcatgcaatttatttaatttagataaaactatagagatagactaatctaggaaacaaattaatgaagcatataatttatttaacctaggttatattcttcatcacaattaaaattataatttatcacaaacacttagaatcctagactattagatgaaaagtaaatcctaagatgacggtcgattaaagtaaaacctaatttagcggccgtcttaatagattaaacaataatcataacattgaacatagaagaatagaagcaat

SEQ ID NO: 364554 - DNA, 500 bp, Cannabis indica
atgaagacgttgtcaaaattgattttttgcacaacgacctgctggtcgtggaagtccaaatggccaatcaaatggtggccagaaccatgatcgataatggagcctcttccaacattttgtttaaggctgcttatgaaaatatgggactccaactcaagaagctaaccccatgcctccagcctgtctatgggctcttcggtcagggagttgcacctctaggacaaattcgtctacccctcactattggacaaggtccgacgagcatgactatcatggcacagttctttatattggatgttccttcagcttttaacgtaattcttggccgaccggtcttgtatgacttaacgactgtcacatcaatatttcacttgtgcctgaagttcccaacaaagaatgggtagggtgttggagaggaaaccagcagtcacgggaaggttataaccttgcagtggccaaggctaggaaggaagtatcctccagccagagcacaaacaagg

SEQ ID NO: 364555 - DNA, 518 bp, Cannabis indica
aatattaatattataaaaaaaaaatacatggaatcataaaggtggtggatggtggtggtgcggtggtgtacggtggtggatggtggtggtccgataatgaaaatagagagaaaaagggagacatatttttgtgtgtgagagaatggtgtagtggatggtggtggtgtggtggtgcggtggtggtggtggtggcgtggtgtcgtggtggtggtgcagtggttgttgggaaaaaatttagaagaagaggaaagaagaagaagaataaatggcgaagggggacgtcccccctgttttatatatatatatacttttgatggcacatttcgttacgttggcaaaagtaaatgttgggtcggcatagcatttaaaattaacctaaattgaaatggtgtgtttttggtaacagttttgttagagcgcatttgtgccgaaaaaagtattcactcctacctgttgggttttatgccctaaataaaactccatttcaatgtaatctattttattcaacatcaataaag

SEQ ID NO: 364556 - DNA, 636 bp, Cannabis indica
atataaaaaatataaaagtaccctataaattctaaattaatctaattaactccattggaggaagaaaaaaaaaatcccctagtactcaattattgtttaatatgttcggtaaggtttagacaaaacaaatgggaacaattgattggctatttttcatgaagttcaaatatttgaccagtgaaactagggactttaaggtatatatggaagcaaattacaatttcacttcgtaaaatttaattgagcatgtttactttaagcattcccaagacaagagatgctggaaacaatcaatgggaaaagaaaaatgaaaatagtataatgggagttgttttctactaatttttattaattttagttagactttttgaaggtagactaaactaaaatcaaatatatataatgaccaactttttaacgtacggggttccgacggctccattcgacgatgctatattgagtaaattaataaaattaaaaagaattttatgtagactgtacgtgcatgcattatttatgtatatgtttttctctaattatcccttcatttttttttgttcagcaaaaatttttcttgagacctcaattataccggttaaacatatatatatatatatatatgtattcttttttttt

SEQ ID NO: 364557 - DNA, 713 bp, Cannabis indica
gagtagcccatgttcttatatttagctcaatatttttacattcgatccatgtgggacaatattgtccaatattctatggtggctattttcgttcaccaatcttgaatcaccttatcataagtagtgtcatttgctcacttcttttgtttgtttgttttacagttgggagttccatttgctcgcttattcttgttcgcggttgggagtaccaagcctgctagggatatgactgtgataccatgttgagaatcatgtggttcattctcaaaaccaattgatgatgagtggagtagctcatgttcttatatatgattcaatatttttacatttgatccatgtgaaacaatattgtctaatagacttgaacttgtataattcttggtactaattttacgattttttatattgttcatttctggttttattatctttgatatactcagttggaaatgttgtgaatattttaacaaaatatataagtgtcttagtgtgtgtgagttggaaagagtcccacatgggatatgaaccctcattgacaagggtttaaagagtgcaactttggcatttgggtttgggccccaaagggtacccagttttgtgcgaatgggtgaggacacacacacttgacccaccacacacgcgcgcgccgtcagtccgatccgagccgggttggttggtgtggtctgacacaatattattttttacagaaaaac

SEQ ID NO: 364558 - DNA, 871 bp, Cannabis indica
gatttaataagtcaataaaataccaaaataatatctaatatccatcattcctcatttctaactagtactttaagtcattcagaccatccattccatcttaaatacaaagtcagcttcattgaaagtttaataagtagaataagactaaactaataatgactttcttcctcaacagtaccatcttcatccactagcatcaaactgaattcctagaatgagagaaaaaaagtgagcttataaatttcagtagaaaaacaactaatatcaaaggacccttagtttaataaaaatttctagttagctttaaaaaaaataataacatatctcatcaccattgtcaaaatgtataacaaagtagagagaccacatataatcacaaaatcaagcatcaaatgcatatcacaccgtccactagacccctacctctcaataccattcatagaaaacgacatccaaaaccaggtagttggacctgataaccaccataatactagggttcagattcaattcactccctatacagattctaggtctttcacctacaggtgagtgcacacctgatctacctatgatgacatagagactaggtcgtggaacaacaatacgcacaaatcatgatcaatatggctctcattagtataattaaaagcaagcaaaataatagaataacaaaagaacatatctcctttttattatctagaaaattcggcagcataacggttgtattttgaataaacccaaaaatcataatctgcataattatttgtacaaaaaaatatttggcactcagtgtcccaaaatagtccagaaaaatgtgtagattaagttttaaattttttaaacaatttgcaaatcataaaaattagaatat

SEQ ID NO: 364559 - DNA, 639 bp, Cannabis indica
tttttatatgcttcttaaaaaaaatgtaaaaataataccctccaaacatctttaatctcaacaataacctcctcattgcaaaccccactctccctctaactctctcgtttctctctctttctctaactctctaaacccattcccaacaaaaccccaccggaccatgagaagcactcaagccccgacagttcacgagctccgaccgaccaagacatcccacgaccaagacgacccacgaccgagaagaaccattatgacttgcgaagacccacgagaagcacccgacaactcatgaccaccgacccattgtattttaatttatataaatattttcatttttacacttcaaatacacttcaaaacagtttttttttttttttgtatttttacgaaattctatatagaaacccctattgcaactaacagaacaacttaaattacaaccaaaatccgtatatcaacccgcataaaaactaccggagaaaccactttaaaaacgcaaaccgtaaatttgaaaaaaaaaattaaaaaaatactatatgaggtaatttccctatttttaatcatatttttaaatttattgatttaactttcaattaaataaaaaaaaaattaatatgaatattttatataaaaaaa

SEQ ID NO: 364560 - DNA, 673 bp, Cannabis indica
attgtaacagagaggggaaactcttcctccctatgcctcctagccctataaatagtgatttatgttcattgggcaggggatcggtcgagaagtagttgagccaagaccataccttaaatatattatctaagaattatatattcagagatactgttttaagagctataagaaaaggaatctttctccttgatctaaagtcaatacaaataacgaggattaggctattactgaactgctcggggctgaacctctataaaattcctatgtctttttattgctttatcgtatatttgttattataaatcatttatcgcttgtaaaacagactcattgtcgttggctaaaagcgaagtcaacattttggtgctttcgttgagagataaactcaagaatcgctctttagtcacatccaaccgccaatacgatggtgcaaactcgtagaggcctgactgatccggcaaattcacaaacgctggatcctacatctcagaacctagggagcacaagggttctgcctactgttaatcctggacagccagtaagcatgtggaatggtgaaacagttcctatagatggaattgcgccttgtgtgcaagagactgggaataacagttctgcacccaactagggcattcataatacgactgttttgcctggaaccaacacccagacg

SEQ ID NO: 364561 - DNA, 548 bp, Cannabis indica
aatgaagaaaaatgtaaaagaaacaactaggtacacactgctactagatatcgttttgtgaatagttagctatttttttataaaaattattaaattaaattataaaatttggtatttaattatactaataatcatggccggaaccacatgtagactaagtgaggcttaaattaaataatttttttttagtcttttatacaaatattaatccactcaatattatcaaattatattctttggtgtattattatttggatttgaacttaataattaatttaaaatgtgattatactaaaatttatttaacataattatttattattttatattttattatagtcctataatttttattaaatattaaatctacatgatataagaataagcattactatcttataaatagttattagctttctataattattattaaaagtaaaataaataagtgagacttgatatcaaattacacaaatagcttatgacacttcataaaaagtattaaacaccataaatattgttagcatttcactataaaaataaataat

SEQ ID NO: 364562 - DNA, 531 bp, Cannabis indica
tttttccaatgaaaggtatcaagcgctttgtaaagagggcaagttaagcttaggtttatagggccattcaaaatattcgagaaggttgggcaggtagcgtatcggctagctttaccaccagcgttattcagctgttcattatgtttttcatatttcaatgttgaggaaatatgtcttagacccgtactcatgtacttgaattatgaagacctagagcaacagtcagacttatcctatgatgaaaaaccagttcaaatcctccataggaaagaaaaagttcttcaaaacaagaccatagctttggtcaaggtactctggaagattagtaaggtggaataggccacctaggaactagagtcggacatgaggactcaatatcctgagttattcaagttagattttgaaggtacaaaatccttttaacgagtttggtataattgtaatgatcgcatgttagattatggattagtaaagcaatttgcattaattattagtggtttgataattagatatgattttatatttgttgtg

SEQ ID NO: 364563 - DNA, 497 bp, Cannabis indica
aaaacagatggttcaattgataacttttacaaaaacgtatagtctaaaatggtatttaccatacaatatatcataaataatttttattattatcatttaaagttgcttaattagaaatgaatcaaaattttcaaaattaaattaatatttaggaaaacttctttccttgtctctgttgagctactgtgtattttttttgtgttccacttaaatagctataatttcaatattaccaaaaaaaaaaaatgatgcaaataatttattacacctgtattttcttaatataaatatataaacaaattatttaagggtgcgtttggaaagccacagtgtaattggatttgtgtgtaattggaggtaattacacaatttgacatgtttgtctgaccatgtaattacattataattgtgtaatttgaagtaattggggggttccaattacactctccaattctcatggccccctatgagaattgaatgtaattacactgtgtaat

SEQ ID NO: 364564 - DNA, 500 bp, Cannabis indica
cgaagtcaacattttggtgctttcattgagagaaggatcacaaatcgctctttattcgatactcaactgccaacacgatggtgtgaactcgtagaggtcagtctgacccagcaaattcatagacactggatcctacatcgcaggacccagggagttcaagggttccgcctgctgttaatctgggaaagacgggaagcgtgatgaatggtgaaacagttcctattactggagttgtgcctggtgtgcaagagactgggaataacagttccgtacccaaccagggcattcataatacgactgttctgcttggaaccaacacccagacggccatcggagacgcaaccgaattgcaaaatctccgtgacgcgcttggactcatgcagggtcataacaacactctgcatcatgataaggacgaactgcgtgctgcagtaaatctcgcatttgacgaacaaaggcgtatgttcgctgaatggagagataaagagatggaggcatta

SEQ ID NO: 364565 - DNA, 571 bp, Cannabis indica
caaaatgcataacaatttagaatgatactgaaaaatatacggtgtgataaaatagaatggaaaagaaaggaaacagtctctattccattactaatttgtagtctctattccattactaatttgtttggttgcctattaaagtgttagaatgtcattccagtggaatgacctttctactattttggtagaatggttatttcattttaaaattgaaggaaagactattccaattcatgataagaaaaaatttaataatttttttatcaattttgttatgcattttaaattttattccatttcattcctattctcattcacattcacattcttatgttttcatttctcccaaccaaacaccatctaaatgcaattttttttggtaaataattattcgtaaatataaattgtattgtaaatgtttacaaatttgtaaaaaattgttacaaatactatatttttataattattttgtattactgtatattttaagaaaatttaatattatacaccatagtttctcaaaaacgatatttattttctttttctttataattttttaataaaaaatata

SEQ ID NO: 364566 - DNA, 483 bp, Cannabis indica
ttttttttttgaaagaaaacccaaaacgtgtgggtatgaaaatctaaggaaatctccctcaatcgttgatattcaatgattctactagatctcctcctcgactgttgattctttctcgtcgacttcatggagatcttcccacggtgatcctgctgccatggcagaatatcgaagaaaaaattcttaccggtgttaatggagatcagcccaaagttcctagtcgacattcatggagatcacaaaagattttacatctctggtggctgttaatttcatatctccatcacttgattgtttggtgaagtgttgcctgcaatggagagcaactcactttattttgacctgtcaagaaggagaggttctttggggaagaagactcctgtatttttgagaaaaaaaaacttcagtttttctaatttagtttattttctctcatggtaataaaaatgtaaagtttgaccctaattgtaacgccctaaataa

SEQ ID NO: 364567 - DNA, 535 bp, Cannabis indica
gatgcatagagaaagacatcctcaaccctaacaccattattattaagactccagataaatttcacccaatcccacacacgaataccgttgtcagtgactggaaaaattccccaaggtgaagagcgccacaagtgcatcgccacatcacatgttagaaacaggtgttccacagtttcctctccccttccacaaaaaggacaattagtatcttcaatcggaaatctcttacagatgattgctctaaccggcaaggcattggaaaggatgcaccaccaaagaaccttttggcgctccataatgttactattccaaagtttattccaaagagcaggtgcaacatcacagtggggcgctctctccaaagcttgggaaagataagccgatttgcaagagaaacgcccattactttccaaagtccacacccagctatccttgccactgccttggggaattccatccttgaggatagccgaaatggtctcacggtcaaagaggcaatgaagtttccccatatcccacccacccgtgggtgtta

SEQ ID NO: 364568 - DNA, 552 bp, Cannabis indica
gctcccaattcgggtcatagtctgattttgagtcctggtcttggtccggttacagttctggatctaggtcgaatttcagttatgattctaagtccaagtcctagttccagtcctggtcaacttccagttttggttccaattttgggtcacagggtacgggttcgagtccacttttgggtttgggactgggtttaggtccgggtgtgggttcaggtccttgttatggttcaggtccacggctgggtcccaagccctttgtccagatccggatcccaatctcgggtccaggtctggttcaatttctagtgttgggtaacgagctcggtcctaggatcaagttcgcgtctgtgttgggtactaggtcccggtcctagttctttctcccagatccctatcaagattctgggtccaagtcccgattatcgtgtgggtttgggtcccgatctaggttcggggtcgagtcctagtctcggttccggtttaggttagtctatctgggttcggggtttgggtttaggtcctggtcctgtcctagtcctagttcggtctagt

SEQ ID NO: 364569 - DNA, 1043 bp, Cannabis indica
agtccccggaaagtgatttagcgtgtcactatctatgttgtgaatgatgtgatttacgggcctgtaattcgctgagcagttgttccactcaggttggccgacacacctgaattcggaaacaaggtaagattagtataatgatatgcatatgtatttacatgtttagtgtgcatgttagttaagcctgttagattacattagaaatgtatgttggcttttgtactatccgagagtatcacatcggtacggttagagtataactagcgtaccgagtataggttgacattatggctgatagtaccgtactacttgacagtatcacatcggtacggctagagtatgactaccgtactgagtataggctgatattatggtcaatagtactgtcgtacgaatgttctagactcagcaccgtgtgggacacggggatagggttatgattgggggtatggtcgtccgatcataattcgagttattactatgttattgcttatacttttctcattgagtctgttgactcacaattgctatttctatgtgtaggtaagggcaaggctaaggctgaacacctgtgagagcgagcagatggagattgtacatgtcgaggcggttaggcctggagtgtatgatctttgggacatcagggcttttgttgtatagtcgctaggcgacagacttctgtatatgtacagtgaaacttttgtaaatgcttttgtaaacgggatcccagaattttatatgtaagctattttatgtttttaattaaataagtaaaattttaattaatcactattttcgataacctcgttgattagcaacgaactgcacagtaagtttaaaaatcatgctaacacgcctaaaatagttagggtgtgacaatttagtatcagagccaccaggttgtcttctgaagatcgtcaagacatgtataatcatcatcagtgatcagctcgtttcacagttccaaaagcttttattgctttagtagtttattttaatagtatgatttaagaaaagcctgttaggaagcatgttagtagcct

SEQ ID NO: 364570 - DNA, 830 bp, Cannabis indica
aatgacttaattgtgaagaaaaataggtttcagagtttatttgttaattaagagactttataggtctaattaagaaataatttaaatgacaattttatttgataattaattataattattaaataaatagttttgacatttctagagttaaaattaaaatatggcatttgtgaagaaaaagatgagttaaataaacggtaaaattataactagtgatgcccataatatgacttgatagagcattgaaatagcctaaaaaatatccagaacacttttttcaggccaccagatggttctaacattttgtcaacctaggttgtttctaacaagtgacatgtcgcgataggttctccttatctgattctgattctgtctcgagcattcatcttatttataaaagtaactgagatctatgaagtcataaaagtcaaattgacaacttcatatctttcaactttttggcaaggtgaattactcacaaatcgggaagtttctaatctcccgattccgcaaaacaacatctcctagaactggtgaaaagcttcaccagaacacagaaactagctaagtgatgtccaaatatcacttaggcatcaaaaaagacatccccaacacattttcccactcacccagtgtaactccccgaaatttagccttattttacaaaatactaactttgatgcataaattgaaaagactcaaaactgtttagaaatacacagcgggttttactataaatatgccaaagacgaatgatcattcatattaaaataaaataagtagttgagtgcatttttttaaaataaatttacaacatcccgctgagctca

SEQ ID NO: 364571 - DNA, 676 bp, Cannabis indica
ataattacagccgtcatttttcgaaaccctcgatgggacaaccaagggtcaccacctcgtgacaccctttcacctgtctctcgcgtttagtttccctcatgaccgcacctgtcaagtcgcgaaactaggggcatgtgttatagtgagatttttctcacctagaaactcgagaccagactcctatttggaggccacgtgtactcaattttcccaagaaaagctgagatgtcaatgagagactcctcgagttttaacctcgtctgagctagactcagtgagatgatgcgaatatgaccaagtctaatcgcattcgtgtgactcacattatgtaggaccaaggaatggatttaactcgcatataccaggatatatgcgagtatcctctcgatcctcctgtgaaaacatagagatcaattctctatgatgagagctggtcctgatgacccaacagcctcgataaaccaacatagactcgcatgtcttggttctatcagctcgttatacgatgtccgtaaatgcgactatacaagagcacaaacatcttagacccaactaagtgttaggtgtattctaagtccgcgagcttacgcaagaatatgaatagccaactcgcatattagaagtcgcatgcgttgttgtatttagtgaatagaaattgttcttcatttattaatgt

SEQ ID NO: 364572 - DNA, 742 bp, Cannabis indica
tttaacatccatttgatgcaactctaaatcaaagtgcgcaactaaaatcataataattttgaatgaatttttagtagaaacaggcgagaaagttttaatgcaatcaaaaccttctctttaagtaaaatcttttgtcactaaacgtgctttatacctttcaatctgttccttattatcttttttagttttaaaaatccacttacaccctattagtttaaactatcaggtaatagaatcagctcttatacattatttttctttatggacccaatctcatcatccttagcttctatctattttgaagattgtggattattaagtgcttcactataagtgagaggatccacaaaatgatcaatatcacatcctccttctctaaggtaaacaaattatcatcacaccttgttgactttttttgtctctgggatctccttagaggaggtacttcaggaataacatttatttattaatcatcattttgaatgacatcttccacaactgaaattttttcgataacaagaccctcatcaacaacaggacatttttcaataataggcccttaggactctcgtcatcttcaatgccaagagcaatatattcatcaataatgggggcattattgttgggttttgtgccctaaataaaatccatttcaatataatcagacttactaattaataaagatcagaaataacattttatgctgcatggttcacataatttatttcatgattgtttaatg

SEQ ID NO: 364573 - DNA, 523 bp, Cannabis indica
atgcgtgaattacttgcccaagatagttttatctcttctcgcacattgatgggatggtcagtattcgcaaggaggctgaccattctgtcgagtgcgactttataatctactgcgggtgagatcactcactttgtttttcacacatccatcacgctgaaaagatcttctatctttcagatgagcgatttatcggatagccaacagctcggctcgggaggccatgcatttgacggtgagactgaccaggagagggacagttttctccccacggacatttccgaagtggaggccgctcaaatagaattaggtccgatgtcttctgtggacatcgagaggatggtgcaggaactcgcagaacctgggaccatcgatattcgggacagcgagtccacagtgtcggcacgcgactatcttatacatacgaggcatgctcctgacatcgaggttgaggagatggacgaggaatggacgactccagctcgcgagtcaggtgggaagaggaggaggcagaagggagtgggac

SEQ ID NO: 364574 - DNA, 504 bp, Cannabis indica
gtttgggagaataatttgagcccctgaagtataagacaaatgcttttgaacggtttgcaccaggttactcaaaataaataaaaccttgcccaaatcgtgtccaaaccataccaacccttccaaaacacttgtaacaaccccaaatatcattttccaagcaatagaagcaagaaaaacacactcaatccaaaaatgccattaatgacccaagtttcaaacttgttcattcaccataaaaaacaccataaccagttgtaagaactcaattcgaactcaaaatgaacttagaaactgattcacaaacacatctaaccctaacagccacaaactctcaaacttacatattcaaaccaaaattaaagcttaagcaactaaaaactaagttttagggtttacctccacttggcaaaaccttggatccttgctgaattccctggaaaataaagaagattagggttggcttctactggtttgaggagccgagcaaagagagagagagagaga

SEQ ID NO: 364575 - DNA, 749 bp, Cannabis indica
tatttaaataattatttatactcttatttttaaattctgaatgcatttttatgtcatttagtgaaatttcataattttgcattccggtgcctggtaacatggaactcggtgtttcgctcagtaaaatcacaacttagtatgttagtttattgggacggtttattagacattaggaatgtcgggattggccgggaatttagaatttcccaaaatacccctttagtgcactttatgctattttattgtgaaggggcaaaatggtcattttgccccatttatgttttctcctttactggacatagaaatgggaaatttaaatattaattgattttatgttggctgaatataagggatttatgcttattttcttttattttcaaaagttagaaaaacttagaaaaaaagaaaaatcaaccattttctctccttcttctcttttcggttttgagcagctgggattgggggatttctttgtgtgttttcttgctggatttatcaagttcttgtggtctaaactcttggtaagtctcttgcttttgttcttgaagtttttgaagaaaagtggataggttgcatgctagtttttgatgttgttgctgctgttagttgttgttgttgttgtttttgtgtttaaaatgctgaattaaatgtgattagataggttgaaatggatgctagttatgcttgttgtagtttgagaatttttggttcaaaagctatggtttacaaagcaaattcttgattttcgt

SEQ ID NO: 364576 - DNA, 566 bp, Cannabis indica
gctacagtaaatgctctaaactcattcttcattttatttttttttttaaaatttattattcatactttatatttatagaatactattcattgctctaaatatattttattaattattttgagttttaataattatttttgtatagagatatgttatatattaatattatatatttaaaacgagaaatgtattaaaattttaaaaaagtgaagttttggtgaattattttaaagaagctggtgtatggtgtaaagtaaaagcgtgttataaaataaataaataaaaaaaagtaaaattttagtgatgtattttaaagatagagtagagaaattgttggaagtgcttaagtaactaaaacataatttagccccgataataaaaattaggataacttgtaaaagaacattcccaacagtttttctactctattctttaaaatacttcaccaaaactttattttttcttatttcacatcacacatttacattataccatacatcaactacttcataattttctctaaactatttaaataatatattcataatacacacaaataataaaat

SEQ ID NO: 364577 - DNA, 569 bp, Cannabis indica
aaaacaaaaattaaaaaaataaattattttttaaaattaattacacatgtggtgttgacgtgtcaattgtctaaatagttatgtcatcattctatttgccacatgtgacaaaatttaacagaatgatcaatttacaatactgtaaatagtttgagaactatttttaacagacaaaatttcaagagaccataatatatatgtcataattcaggaggcaaaaattctagataatatttattttacatattattttaggttaattttttttaataataattatttatttttatatatattattcagatcttgtataattttttcaatgaaatttcacttaacaaaatataaaaagtaactttatttacaaaaatgtggtaatttgcctatttaaattttataagtttttatttaataattttactattttgtaatattctattcacaaatatacaatgtattttatatttatttatttattgctcatacaatttgttttttagattaaagatcattatattacttgaaatgaattacataacagtcataagtgaaggtagaaattcctccaa

SEQ ID NO: 364578 - DNA, 535 bp, Cannabis indica
acaagagctatcatcatcgatcttctccaggtgctgtaattctcactccctgtgagaatgtttggaaccaaaacagcacctggattgtcaccattcgacaaaaaatagggattagaaagatcattaacattagtagatcttgaattttcaccaagaatagagaatgagttgggatcattcggattactctcatgatcacgagcaacacgagttcgaactcctcctcctctccccattaacaaaccagaagcagaagcaacaaaaagaagaagtagatagaagaaggatcaccacagatcctgctctgataccatattagctggtaaaaccaacagagaaaatatagagaaaacagagagaaaacgagagaaaaaggagaaagaaaatgtagctgctatattcattcaatctaaaatgaaaatacaagagagcaagctttatatagctgctaataacagaaagagaaagaaccaacaaactacaactggcagtaacaaactcttacagttataacaaccagggccgtcttaaacat

SEQ ID NO: 364579 - DNA, 616 bp, Cannabis indica
tttgttcattcatactatatatataaacataaaaattaaacaaaaactaattttacacatcaaaaaaatacagaaaataaacccacataagtcaacgtacgtactcaacttaaaaaaactcactttccactttccactataaatataatatatatttcattaaacactgagaatagatcatataccaatattaatatgtttaatgacaacttttaaaatagatctaatttattttttataatagagtataattgttagtgtattaatttatattttttataaattgtgtatacagatcagcaaatatgagaagatcttctttttctgatgtatgaggagatcttcttcttctgatgtacagagaactcaaagcatgagatatacaccgatatcaccaaatcatcttcatcaacactttgagtttaatgatatacaaagaccaagagtacaaaagaaaaaattaggagcgcttaaagaaattaaaggagccgtaaataagatgttcaaaagcctttttaagagtaaaaagaagaagccttcggagactgcagaggcggagattccagcggcgatggtgaattcagaggcgggtgcatctgattgataatcgtcatca

SEQ ID NO: 364580 - DNA, 500 bp, Cannabis indica
ctcttcatctctctctacgattcctctctattttccttgtatgacattgtttaatgtatattaatcaacctattccaaattttatttctttatcagtcactctcccttactctctttctaccaatttatctctattttttatggcaaaatcgttttacttctatatttattttttcgaatcacttttcttagtattaattttgtatttctttcattcaaatttatatttacatgaatgtccttatgcatttatttgcgtttctacttctactaggtaggagttatacgtgctgaggcacgtaaatattagttttatgtgaagtttaaggttttttctattttttcttatttagattgtatgtgaaggtatgatcatacgaatgatttgttttattaaagtaatatttgtgctattataattggttatttaaataaatttgggtatatatatgtcataactaaataatacttattatttacttataaaaaatttggaggaa

SEQ ID NO: 364581 - DNA, 513 bp, Cannabis indica
gataaattaagtttctatatatatatatatgtagagagatttctgtagtgaaagtgtttggtgttaccgtttgaaggttttccgtccatggatggatagatagagagagagagagaggagaatatcgacggtgaaactacgacgtggataatcgagaatgtgaaggttgggttgttaccgtccaaatctatttcttggcccattataggcccactcgtaaaaaaagtcatgtgaaacttaacgggtttttacatcagaaatttccaatttttttaccttttttttattgtggagtagatttttttaaaaaaaatattgtgtaaattttatactgtatattgtgttaagttttcattgttgatctacgcttattttttaattgttctattattgttttaattattctgttttgttattttacggttgttttataaaaaaataacatttttgtaaaaaaatgtatgtaacagtaaaattataaatttttacttaaaatatgatttttttttaaaa

SEQ ID NO: 364582 - DNA, 796 bp, Cannabis indica
gcttcttcttcagcttcttgaggggctgttttatgtaggtagtggtgcgagccatattgtaacacccgaactagtataggcgtgttaacgtgattttaaacatattgtgcagctcgttgctaatcaacaaagttaatgacaatcgtgattaattaaaattttcttaattaaacacttataatattacatacaaaatattttgggatctcgttgacaaaaactttacaaaagtttgctattcatttacaaaatatttgtcacccagcgactaacagcaaaagccctgatgtcccgaggattgtacactccaggcctaagcgctcgacatgtacaatcttcatctgctcgtcctcatggttcctcaactttagccttgcccttacctaaacataaacatagcactgtgagtcgacagactcagtaagaaaagcatatatcatatagcatacatatatccaggattatgatcaaacgcccatacccctgaccataaccctaatccccgtgtcccacacggtactgagtctagaacgttcgtacgacggtactattgaccataatattatcctatactcggtacgctagtcatactttagccgtaccgatgtgataatgtatcagcctatactcggtacgctattcatactctagccgtaccgatttgatactgttaaatagttcggtgctatcggccataatatcagcctatactcggtacactagtcataatctactcgtactgatgtgatattgtcaaatagcaggaaagccaacatacatatctaatgtaatgtaa

SEQ ID NO: 364583 - DNA, 1000 bp, Cannabis indica
ttttaactttgcatcttgtaatcccattttcttcaacatatccttgtaaagtttatttatcgagcttccattatccaccgacactctttttattctcttgttagcgagctaaactgtaatgatgagaggatcgacatgtggatacctcacgtgttttgtatctttctccaagaatatgattgcagttttttctgttttggcttttttagtggttctggagcaaacatcgattgctcgttttttatttcactaacatatcttttttgggcattattactctctccagcgagataaccaatgtatccttgccctcaaaagggggaggatctttggttatctgggttgttaggctaattaggatggttttgctcgttcctttgacgcttcacatactgtctgaaatatccacgagagatcacgctctctatctcatccttcagttgccgacactcttcggttgtatgccctatgtctttatgaaattgacaaaattttgttaaatctcgtttatgtctcattggctcaggcttgtgaaatgcaaccctgtgctcatttgcgagaaagatgttttcaggagtttcattcaactcggtgtactcggtgtaaattggaacatatttgtcatgctttttctatttctttttatttttagatgattctctcaagtcatcttttcttttggtgtttgaaccacttggattatcagcctttgtcgagatggtaattgttgtggcagtacttgtgctgggtttatttcccgagccagtcttcaacaatttcatctcattccttgctccttctttacgaacaaacacttgcgctctttcgttgaattcattaatgtttcttactgggcgatccggtaagtcatcccacaactcacctctagctgttgaaaggttgattgtgatccctgcttgaagagcagtaagttgaataatgtcattcaaatttctaacttttgtagctgcagtgcagaagcgactcaggtaagccttaa

SEQ ID NO: 364584 - DNA, 614 bp, Cannabis indica
gggaggacctccaatgtgtaggcaaaattgcaatagaggaaaaggtgggcagtggactccgtctcttccccatacaacgggcaagtctcgtcatcaatatggattctcctagccagggtatgtctgaccggcaaagcattagagaggatactccaccaaaggattttgtgtctctccagaattttagagttccaaagtttgttccatagggccggagcaatcacacaggcaggggctctatcatacgcctgtatcagataagcagacttggtagtgaatttaccacaaccctctttagtccaaagccacttatctctcccctggccgctaggtctaccccctttcaggatattcgtaatcgtggcagagtcgaacatagaccttaacaaggagatgtcccagtccccattactcattaacaactcagaaaccttctctactctcctaggataggaagagatgggtttcaggtagaaatccgtcccatgaaccacccagggatccgaccaaacgttcgtgttttccccatttgagatgagtttgcaagcgccttttttgaggatagctttagtcttaaccacatttttccaaaaccaagaatcagcattattata

SEQ ID NO: 364585 - DNA, 612 bp, Cannabis indica
acacctatttacaaggcttaacagatgagtaagaacgttctcactagctgtgctattgaccatgatatcacccactatcagcacaatgatcgcactgcgggaccggcactatggtcgtaccgctatgatagcatcaatagcatccaagagtacaatcggccatgatatcactcttaaccagtactgtgcccgtactgccgaaccgacacaattgttgtgccactacgatagcgccaattagtagtctctggggtgaatatcactcttaaccagtacgatgcctgtactaccgaaccgacacaatggttgtgccgctatgatatcacccaaaacatatacaatcatacatacaacatgcatatatctcatatcacacgctatatacagctcttacctgatttctgaactcaagtgtgctggccgagctgaacagaaattctcgcgctagatggatgccctaatcacattaattgtaacacaaatgagtgactcgctaaatcactttctggggatttaaacttaaaactaaaagttccccaatcgataaataacatggcaataccctaaatctctcaaaaatgggaaaaactagggttccaaaaactcccccaa

SEQ ID NO: 364586 - DNA, 614 bp, Cannabis indica
aagaggttattttagatccaaataatcaacgaaatgtgtatacattgggaagaatgtggatgaaaaactaaaatagaaattaattgattttttgaagggaaaccagaattaatttgcctggaaccactaagatatgataggaatagaccctaaagtgatttgtcatcatttaaatatcgaccccagttacccagtaaaaagacaaaaaggacggccattagactccgagagacaaggggcacttaaagaagagattgacaaattgttaaccaatgactttatacgcaatgccttttatctctgaggcttttttgggtcatgttgtatatttgtcccaaaaccaaacgacacttagaggacttgtattgactttttagacttgaataaaacatgtcttaaagattgtttccactacccatgatcgacctgttagtggatccaatagcagggaatgagctgatgacttttatggatgcttattctggatataaccatattaaaatgcatattccagaccaagagtatacaagttttgtgacaaatatgagaatttattgttataaagtcatgccatttggtttaaaaaataccggagcgacgtatcaacgactggt

SEQ ID NO: 364587 - DNA, 718 bp, Cannabis indica
agtaacacacaataattcaaacctattacaattaaaaaaataaagggaaaatcagttcctaaaacactgaaacagaaattaaaaataaaactagttctacaataaaaaaaacctcataatacataatacctcataaaatcgattataattttttttaaaaaaaattgtgatcaatttcaaaaaataattaggcataaatataaaaagaaccaattcaataacaaaataaataaacacaataactcaaatataatataaagaaaccggttatatttatcaagtagttaaaaatttaagacaaaataaataaatataattgaaatataactggtgttgtaacataataaataaaaataaataatataaaataacccaaacgagttataattaatatagaatcgattctataacaatgttataatgaataaaaaccaataacacgaaataactcaaaatcggttataattataattataattagtttgagttattttgtttttttatttttattcattatgttacaaaaccagttatatttcaattataaccagtttgagtcattttctgttatttatttttattcattatattatagaaccggttctatttgtgtttatatttgagacatctacttcttgtgacttttttcggcaatgatgacttttccggctacaatgatcactactacaaaattcactattcacgtcggtcacgacga

SEQ ID NO: 364588 - DNA, 1112 bp, Cannabis indica
agaaaactgtaatggagggaaaaagaaaaagaattttaggataaaaataagaattgaaaaattgttcttcattacaattactgaacatcttcacacaagacttaaatcaataaaatattcaaaaatattcatataattcgatcattaacaaaaccagaaacaaccaaatagaaatattcaaacccatcctcaaaataagaacaagagtataaaaatatgttaaacccgaaattcagctggatgacacatgtcaagataaagggaatgtgaattggtgcaatatctttttatggaataactcattaattacgtaagtattagagtatattggtaacccgttgactgtaaggtcttaggcgaggaatcaatgtacaaaccgacacttattgtattaacgagaaaccatatgttgctaaaggaaaatagcgaggcaccgaagaaaagtgacagacaccttagcttgcaatgagcaaactaagtgtaaaagttagatcgactcaaaaaataagtatacgagaagaccatctcactatgagaagacttccaatagcttcatccaactaacaggagcgaggctcataaccctggcaagtcagaagatttctttataaccgcgatcgacgtaaggcatacattatcaacctcggaaagaagaatggtcccagctcgctattgggatcactacaataaagtttctgtcgagacattttccagattcaacaattaaagacgtgtttaaatacacgatatttttgacccagtaaaactgggaaaatcacagctatacgattttctaaatcatacactgtatttatatttcgtgatatgtaatcagatcccaccattttagggataatggctgtacacatattctggtcaactttgtaattacctgcccgctatgtaattataaatagtggtgaataatctcaaaaaagggacgaaaaaactcttatgaaagaggccttgaaagaatactcataaatctgaataagattgactcgtggactacgcagaattttaactgtaaaactacgtaaaaaaaccttgtgttcatatattatttttctatagcttttattttttctgtgttgaattatcatcgtgaggct

SEQ ID NO: 364589 - DNA, 842 bp, Cannabis indica
tcacgcatgccactccatgccgtgttaggaatttaaggcataagtggtagatagacgtctcgccttcaggtcattgagggtcgatcggccaatcatggcattgaaagctgagggaatgtcgatcacgacgaactgcatcatagtgttcttgtggttggattttctccaactgtgatgagtaatctgatatacccgacaagtgcaatgccttggccaaaaaagccatacatcatttggctacaaggctccaggtcggcgacttagagccccatcttttcatatgttgatttaaaataatgttggaggaggcaccatcatccaccatacatctagccatggtcatattcccgatttgcacagtattgaccaggggatcatttgcggttaaatgatcaatgctgcatcttcttcggtaaaggagatcatgggctctacgggcttctattgcttagagctctagtcttcgacagctaggacttcgcctttgggctcgtgatagagtgtccgagcatagcactccctagattttctagtttcgtctgcaatgtgggatccgtctattatgactcctaggtgtcctaccactggtggtggcatcagatatctactttggcctctttgacatgtcccttttgcccatctctcttcttataggaaagggcttttggtatgggaccattccctgagtggccatgaagatggcctcatgcttctttgttaggagggtgaaacaagtatacttgtccttcatattcttctgtggcgtggaagaagtgccaaactgttggaaatattttaccaggaactagatttactaccatgtatgtttcattaacatccta

SEQ ID NO: 364590 - DNA, 739 bp, Cannabis indica
tttaaaaattttaaaatttttttaaccaactttaatttgtaattttcattattaaaatatagaataaaataagtgatcaaataaaatatatattttaaataatgagctttaatcaagagacattcgatctccattgttggttttacatagttattgttttagtgagtaatcctccctaatggaggaacgttcattagcaatttaacgtcgtagaatctcgaaagataagtaatatttgtaagtgtttattttagtttagatcaccctaatggcggcgactattatagggcttacacaagtatgaaatgatggtgggagctcatgaaataggaatgaccttgactctagcctaaacgggacaacctcagattcttttttcgatcgaataaaaggttgttagaatgtttatcattttagatgaattgacaactctattcaatagatggtactttgactctcgcgtaaacaggacattgtatcatttgttggaaaccttacaaaataaaatatgttagatttttggtattttttataaacatatgtgattacttgttattttctgaacctgtgtatgaatttattgaaccaaaccttacttctgttttattgatatttgtagtgccaatatgaacaacccacaccctgacccactcctagtcaatgtcttagcaaatgaactctataatgtgaaaattcaccctggtagttgcataaactcgcacctgttgatgatgaatct

SEQ ID NO: 364591 - DNA, 619 bp, Cannabis indica
tggaattagaaaccgttatcaccaacgtttcccaactgtcaggtaaagaactgaggagtaatgatgcttgcatctcatcatccatattcatcttcatggcaactaactggtttgcaagactctgaaattgacttgtatgctcaaccatactaccaccatccttgtacttcaaatttacaagtcttctaagtagagaaatcttattgccagccgttctcttcgcaaagagattttctagctttttccaaacaacatcagctctggtttcattagagatgtgctcatgaagatttatatccatccatcgtctaatataggcaatggcttttctatgttgaacttcccattcctcatcatctaacttagacggcttctcactacctttaataggtttgtacaaatctttacaatagagcaaatcttccatcaattgcttccaagcagaataatttgataagttcaatttcatcattccatccgactcatccatttttcaacacacaagaattcaacaccaatcaaccttggctctgataccacttgttgggaaaacctattgcaattaaccacaatattttccctctttgtatgtcaaaagtgggatacttatcaaacacca

SEQ ID NO: 364592 - DNA, 600 bp, Cannabis indica
agaaaatgttgtaaagggtggggagatggaggggaatggatgcaccatgagtcacggaccataattgggaaggaagggtcgttgagaagaaagttctcaagatggaagcgagattgattttgattcgtggaagaagtgtcttctaattggagtttcaggactctgtgatcggatccataaaaccccaaatgagtgagagaggcatgagggaaaagacttttccaagaagaggaaatagtacaccaatcaaggcgttccagaatagagccatggcgccaagtgaacttgtttccagagtaagggagggggttaaattgcgagtatgaagaaagttgtgaaagtggtgcatggcatgagcgggtggggaggaagtggaattacgatcattaatagataagtcatcattaaagtcaccaatcactaaccacggtaaaaggggagcagtgtcaaataaacgattaagaagagtccaagaaaaacttttgaatcaatataaggagaaccgtaaaaaccagtaaagtgccagtttatatcattagaattatttatgaaacagtccacatgattgagggagtaagagacaacagttacatcaataca

SEQ ID NO: 364593 - DNA, 520 bp, Cannabis indica
aggtatcttggacctgaagctgtctaaagaacgagtgaggctattgaaaagattcgagctcgtatgcttgcttcacaaagtagacagaaaagctacggagaaccaaagcgtagagatattgaattcctgattggggattttattttccttcgggtatccccaatgaagggaattcagaggttcgggaaaaggggaaattttagtctcaagtttattggcccattcgagattcttgagagagtaggtcaggtagcttatcagttggctttacctcctgctctatctagggttcataatgtgttccacgtctcgatgcttcgaaaatatgtacctgatacaactcatgtattaagttatgaagacatcgagcttcaaactgacttgtcatatgaagaacaactagcacagattctggacaagaaggaaaaagtgttgtaaaacaagactattccgctagttaaagtgctgtggcaaaacaacaaggttgaaaaagtgacttgggagttagagtcgcagatgc

SEQ ID NO: 364594 - DNA, 949 bp, Cannabis indica
aaatgactccttccgctcagatctctaaccattcttcctttctgttgcagagtataatcaaaatctgagcccaacactccttcaattatttagattttgcacagtcttacacactatgattgaggactaacttactatgggtgggcatgcactcaatcactaaaggctcaaaatttttaatgaagaacactctaaggattttgaaaataggaaaaagaagaagaagtctcaaactctctagttgtctgagaagatgtaaactaggtttagagtcattagttggattatgagactattcttttctttttaaactaattcacttacggttaggattgaattatatggaataaaaatgataaaataatagcaaaatagggacttagtggccgagtatgatgtgggccctatactaattatatttttgctattttctcaactatttatctattatttcataaataccatatttttcaattctaatcctataaatgtcaaaactatttatttaataattataattaattatcaaatataaatttcatttatattatttattaattcgactccacaaagtttcttaattaacaaataaaccctaaaattttatttcttcacaatcaagccataacttactgaaaattcataaataagacacaatctagtttagaattataattgattaattaaagtcaagtaattgagtcttacaagaagttctgtctcaactagtatgaggaccatgggcctatataatcgagcttccaataagcagatctagaatttaccaagtaaatttcttaacttattaattcctccttgcaccattatagatttggaattgcactctaaattatatagaacactctatatgttccatgatatagatacgctatgaattatatatttgttgtaatcctagtaatcaatgatcctctatagatgatctaca

SEQ ID NO: 364595 - DNA, 919 bp, Cannabis indica
tccaaagctcataaggtgttttgacaagtgctttagttggtactctatttggaatgtaatttgttgtctttaatgcttctccccagagggactcatgtaaggtagaatgagtgatcatgctccttaccatatccttaagagtcctatttcgtctttctgcaacaccattcatgctagctgatcttgacatggtgtactgtgagacaatatcacattcctctaggaatttagcaaatggtcctagacgttgttcacccgagccatcatatctactgtagtacttaccaccacgatcagatttgatgttcttaatctttttattgaattgattctcaacttcagctttgtaagttttgaatgtccacagactgagattttttatgaatgagatataggtacccataacgtgaataatcatccatgaatgatataaaatattgttgaccattccaagatgttgtagtgaatggcccacaaatatctgtgtgaatcaattctaagacttttgaagctctattggcacctaatctcttagttttggtttgttttcccttgatacaatctacacagacattgaaatttgtgaagtcaagagactctaaaatgttatcagacacaagacgctcaattctacctcttgagatatgacctaagcgttaatgccttaatgacgctgatttttttttatttaatttacgtttaatacctcgtgattttacatgcaaggtttcattataggatacaattgtttctagcaaataaagattgtcataagcattcaaataaccagttccaataacatttgaatttaaagacaaagtaaactgattgtatctaaatgaacacaatatccaaattgtccaacaaagaaacaaaaactaaaatctagcctaaaagacgacacactaaaaagtgtctt

SEQ ID NO: 364596 - DNA, 564 bp, Cannabis indica
tggaattgactcagcttgccacttgcggaagctttctccactgattttttttttacatatatatttttaaattatattaggttgggtgattctacaatatacttccttaaaaggaatgtgttgatgtactatttacttgtttcggcattaaaaaaattttttagtctatttttttttatattcaggtacgttatagctatttaatatatcctacaaaattttgagaaattcagaataatttacaatatagaaaacaatgttcaaacagtctattttacaggcgtataaaataaaataatcacgtgtgaaacacactgtttgaacgcaattttcggcgtgttaaacttttttgaatttcttaaaattttacaggatatcttaaataactataatttacatgatcattagaaaaaatttgactaaaaaattatttcgaatactaaaatagatagagatatatcgatgtatcccttaaaagggtatattataaaatttccctataatatatatcttttcaaaatatatatatatatactaggtgattgttacgtgccaagccacgta

SEQ ID NO: 364597 - DNA, 529 bp, Cannabis indica
tgcgacatcacacgtggaatttggtgcgaatgaagaagaagcagctacaattatggagcttttggcaacttttgaacaagcgcttctggttaataggtaaatattgctaaatcttctatcttttttagcactaatacttctgagttcaatcgtgctacaatgaaagcgattctcaaattgcaagtggctaatgatcaaagttcatacttgggccttcctaatactatgggacggggcaagaatgctacattaggtttccttaaagataagatgcaaaaacgggtagaaagttgggatggtaagtggttttcaagattagaaaacgaagtcttattgaaatctattgttcaagctcttccccgctatgctatgtaggggtgttcactaagtatccgatccaatctaattcgcatgatccaatccaatccaatctgtaaaatgcggatatccgcactttcgtggattggattggattgaaaaatctaaaatccgcacttatgcgaattggatgttgtctgacctcaacaag

SEQ ID NO: 364598 - DNA, 491 bp, Cannabis indica
ggaacaactgctcggcgaattataggctcctaaatcacatcgataacaacacgcataagtgactcgctaaatcacaacctcgacttaggtttaaaactaaaaacctatctactgcaactcaatatgacaataccctaaactagcagggaatcaaccaactagaaatctgaaactgacgtgaaacgacaagctgaattttcgggtttccctgttgcaaaatccaggtaaccagttttacaagcattgtaaaaccggttagccggttttacccagaaaaaccaaaaggtacaaaccctaatcaactcatttccaaactcaaccaaactttccagacatgcatattataccccaataaaccatttccaagcaataaaacaacaatcaaaagctcagaatcgaatttcaccattaaagctccaagtttgagttctaaaactcaaaacttggttaaaaccttcaaacaactactaattcatgcttaattcaacata

SEQ ID NO: 364599 - DNA, 658 bp, Cannabis indica
cagtttatcccagtttttcgccatttgactgaatttgaactttaacactccgggaacctgaaaaaatgaaaatcaagcgtaaaactgctccaaaagacaccaatagacaagataatgctaactttaaagacccgaaacataggctaattataacctaacatcagccccgagtaatccggtaatagcctaatcctcgttatttgtattgacttaagaacaaagagaatagttccttttcttagagctcttacaacagtatctctgaatatgaattcttagacaaaatctcttgaccctttgcccagtgaacatgagccactatttatagggctatgagcttgggaggaaagtatttcccttctaattacaatcgatataagtagaaagattgcataataaatacagaatacaccaattgtgggatttggacagctttccatatctctgtaatctgatcccaaagtcagggggatttctctgatgactcacgatgcaaaagctgaattcgttaagtgttgtcattctgcacaaattgctcacggcttcgtttgagcaagtgtgtgaggtgtcctgtgttgggttttgtgccctaaataaaactcatttcagtataatcagatttacttattaataaagatcagaaataacattttatgtt

SEQ ID NO: 364600 - DNA, 561 bp, Cannabis indica
acatacttgtgagtagatctaagctcctagtaaaataattccaacaatatggagatgaagcacaaaagaatccatatcaataatagaaataacaaatacaaaagctacactctaacctcaccaatatttctaaaatacttcactcattttagaaataagagagaacaagattagaatgtgtatttctctactctaaaatctgatatctttttctattgtatttgattcctttttatagtgtaagtttgctcctaaaatatggtattttcatgtaccatttagtgggataaatggcacaaaaaaactgagaaaagtgggggacaaaatgtgcattggtagtggtagaaagggtgttagcagttggggaattcgtcagacgtgttactcgctgcttcattgccttgcacgaacctgacttcttcattgttgggcttctaattgataaatctaatggtcttggtccacgttcaagcttaggacatgatccatagtgatgcataaatataattatatatatcaagattatattcaactgtggtgacaacactataatcattaaca

SEQ ID NO: 364601 - DNA, 663 bp, Cannabis indica
aaatatgtgaaacaggatgaacacacgcgcgcaagcacgaggggttcactcggcatccacgcagtttcagacaagccctgttagaggaaactcggagacgggctgtttgtagttgtgtcatgcagagtacccttggccattgaggctgcatgcagccttctgtctcggtcagaagccttcatccgcgcgcgcaggggtaagcaatgcatacccctgtgccccaaacttgttttcatcatatcttttgattcaaaaatcatttttcattgaaacacaattcaaattttggtagacttttgtgtggaatctaaattttcaattaaaaatcttattatcagaataaaattaatttttattaatttttaattaattaaaattaattttagatattagtagcctttgaattggaaaatttgatttttccacaaaaatagacttatggttaattttgaattttttttattttatttattttaattataagatcagatattacttattttattattaaaatttaaaatgatcttatttttatattagcatattattaaaattttagaaataatctagtttaaatttcaaaatttgttaaccatattaattttctaaaatttgttattttttgaaatatattttattaatttaaattataagatttgaaaa

SEQ ID NO: 364602 - DNA, 521 bp, Cannabis indica
ggaccctatattttccaaaatggtaaaaataaaaccctaagctcaattttcaacaattttttttttaatataaccaactttaagacaaattttaacacgaataaatacagaaaatataactaattttgtcataacatctatagatcagattattattaagttttattttgacaaaaaatcagttcagagtcttatttgtacaattttagaaaatacatagtccatttttaacaaaacaaaagggtctaattgataacttttacaaaacacataattcaaaatggtaatttcctttaaatttttcttaaaaaaaaaacccgcatgacaagacataaaaaaaaaagtaaaagagaaaaagacgaatattgaaaaaagaaaaatgctagatgaatggtgttagaattatgggttccatttcaaaattaaaatggaagaatccgtgttttttatatatatatatatataacttaatattttacatttaatcgtgtaaggatatttccaataaataatataacacc

SEQ ID NO: 364603 - DNA, 573 bp, Cannabis indica
catagggtacacgattatctgactacgtgtaccctatgtcgtcggttcctataaaggaaccgacgccatagggttataaaagagacccttttcctcagcttcttcctcactcgaacaaacccaaccaagccaaagaaccagtagcagagagacgaaacccttgccgaccaccgcctccaccacccatttctcccccatttctcaaccatttgagcccattcttttttaaaatctttcattttcgatacttaatcacatacacctaaaaaaattttattttttaccctctttgagtgtcatccgaacccaaatagaaaatttaaggtttaaaatctggccaccattttttgctgagagaacattgaatctcaacctcctttaaggtataaatatagtttctattcatttttataatgtacattggttttatttttggtttttgtaaattatttttggttttataattttattagtaatattgttgtgttgtatgtgtatagtgcccggagttttgacgaaattgctcgtcgaattgcggttattaagtaaaaaatttaaacctcaatatatagt

SEQ ID NO: 364604 - DNA, 1120 bp, Cannabis indica
ttttttctaaagcagggaaagaagtccttttaaaagctgttattcaggctataccttcctatgtcatgtcatgttataaacttcctacttctatttgtcaaaaaattgagaaacttatggctcagttttggtggggttcttttgggaaaaactctaaaactcattgtaaatcctggtttacgctttgcaactcaaaattttttgggggttgggttttcgttccttaattcatcataactaggctttgttggctaaacaagcttggagagtttttaccacacctgattcccttgtttctcaaatccttaaaactagatattttcgacattcttcttttttagaagcaagtaaaggtcattccccttctttttcttggactaatttgctctagggcagggatcttcttaagattggactcatttggaaagttgggaatggtcattctatccatacccttcaggattcttgggttcctaatcttaggatccttaggtataaggataattgttttcctccttctgataaagttagttttttcatgagttctaatggtacttgggatataaataagttatcaaattactttgaaaatgacactatggctaatattctccaagtccctattggaggtcatgataaagctgattgtcttatttggaaaggagatccttctggtcttcttacggtcaaatctgcttatcaccttgtaaatacttcttctttacctccttcctcttctaatactagtttctataatacctggtggaaatttttctagaatctatgtattcctcctaaaattaaaaactttggttggagaactttttatcatattttgcctacaacctataatcttcatagaaagaaaattgttccctctccttcttgctattcttgtagtttttctttagaaattgtaactcatgcactactagactgttccagggcgagacaggtttggaaactttcccctttatatcatttttaccttatgcatagaaataaagatataagagactttatgttatctggatatactgatctaaataatgataatttttctttactgttgtgtactttatggtctatttgggaacttaaaataaaaagcttttcaaga

SEQ ID NO: 364605 - DNA, 663 bp, Cannabis indica
caagtgcagacttttgaattttccaatccaatccaattcgcacaagtgcggatatccgcactttgcggattggatcgtgtggattggattgaatcggctattttatgaacacccctacttgtcgcacagtaactacaaaatatatctcaagatatctcgagaccgaacactccaagtcacgccgtctcgacatgtacaatcatcacccaagctcagaacctcacgcctattcagtttcttcattttcattacctacacatgaaagtagaatatgtgagtaaaatgacccagtaagaaaaacatacaacagatactataatatcgatttgaatctaggcgctcatacacctatttgcaaggctatcagatatttaagaacgttcttaacagttggtactattgaccatgatatcactcactaccagcactataattgcactgcgggaccgacactatatttataccgctatgataggatcaatagcacccgaaagttcaattggccaagatatcactcttaaccattacggtgtttgtactgtcgaactgacacaatggttgtgccgctacgattgcgccaattaatactttctggggtgattatcactcttaaaccagtacggtacctgtactgccaaaccgacacaatggttgtgtcgctat

SEQ ID NO: 364606 - DNA, 728 bp, Cannabis indica
tcgaacccaggacctccaacactcacacacccacctatggccacttgagctagccccaagtggttatacttgaggctagctcaagtggtttggtgaccaaattaaaggccataacatcatttaagagcatttcgaatagtaaaattttaaagaatgcttggtgaggtagacatattatgtggtaaaatattgagatgatatatcattggagagaaaagaatatttttctaaaaatttgcatgaatactatgttgtgacattgatgctattcatttttttttaataaaaaattgaagctaaaaatttattgtagttaaaaattaagatatatataaaataataatgtgtgagatcataattataatatttttaaagagtactatacaatggagtgtttctagaagtaaaagtgccaaaaataatgtgtaaaagaaataaaataaaatattatacttttagataatgtataaatttttaacattatctaaaaaagagctttgttattaggcaccattctcgacatgtcgcgttgcgattgactattgatgtttcctaaaaactattatacagtagaaccgctattcaagagggaccaagtaaattatattctaattgggaggttataactaaatagagttacattagaaaaaaaagttaaaaaaccaaaaaatatctatgtaacaataataacaataaataatcattaatactatatcataatagaaata

SEQ ID NO: 364607 - DNA, 733 bp, Cannabis indica
atgccagccatgtcatcttcccaaacaacgaccacctagtcgtagaggtgaaaattgaaaacaagatggtggcacgaactatgatagataatggagcttcctcaaatattctgcttaaaacaacttatgagaagatggcactccaacttaaagacttaatcccttgcactcagctcgtataaggtttcttctaccagagtgtttcaccccttgaacaaattcgcctacagcttactattggacaagctctgatgagcataactgtaaaggcataattcttcataattgatgtcccatcagctttcaatttcatgttaggctgactgactgtataagacttaaaagttgtaacatcaatttttcaactatgcgttaagttcccaactaaaagtgtagtgggatgtcttaaaggaaatcaaagaattgcacgggaatgctataaccttgctctaactaaggtaaagaaggaaaatacttatgactagagttcaaacaagggaaaagtcatcgctcaataggaagtcgcccaagggtgggggaaaagacgatggatccctgacttggggaaagtaaatacaaatgttgggccgaatagaagaattggaagaggtggaaaatcgatccaggtaacctggccaggaaactcaaaataagtaaaggcttgctgctagaaataaattagttttaataaaatttttgagagcaaaccttgacgttttcgcctggtcacatg

SEQ ID NO: 364608 - DNA, 738 bp, Cannabis indica
aaacctttatcttttgagttatgagtttttagttgagtttattttggtttcaagcatgattttgaattatggtggctgttaagtttagaaatggttaggaatagatttctatgctcaatattggttgattaagggttctagtagttaactttgatgcttggtgttagttctaagcaagcttgagttttgaaactcaagctttgagctttaatggcaagttgagtttctttggtttattctgtgaaattctggttgaaaaagttgtgaatacattgtataggtaccctggagagtttggttaagtttgggattgatttgagttaggggggttggtttttgtgttcctagcacagaaccggtcgactggttctgggggacttgtaccaaccggtcgaccggttggtgtctagtttttggacttccgtttggaaccggtctgcctattgggagaattttccgaaccctaggttttttcccagttttgagatatttagggtattgccatgttgtgtattgattggaaacttttagtttcaagtttaagtccccgagtagtgatttagcaagtcactcaccagtgttgcacttaatgtgattagggcatccatctagcgcgagcatttccgttcaggtcggccaacacacttgaattcggaaaacaggtaagaactgtatatagcgtgttaaatgagatatatgcatgaatgtatgtatgttttgggtgatatcatagcggca

SEQ ID NO: 364609 - DNA, 662 bp, Cannabis indica
agaagagaatagcgtacaacaccgagtctattacatcagtaaaagacttatcgaggccgaaggtcgatatccgttgatagaaaagctcgcctttggcctcattctagcaataaggaaggtgaggccttattttcaagctcatcctttttgggtatataccggccagccactacgacaaatactacaaaagccagacgcctctggacagttactcaagtaggcggtagaattgggtcagtacgaaatcaacttccgaccccgaacagctatcaaaggccaagccttggccgactttgtggtagaatgcacaggcaaaaaagaaatcataccaaaaagcaatctcgagccagtacctcagcaaagtaatattgaagacaaaccgacctgaaaactacatgtggatgggttggcaacagatcaactatctagtgtgggaattgcccttgtcacatctgggggcaacacctgcacgatgcagtcaagttcgcattcaaagcctctaacaacaaagtcgaatacgaggctctaatcgcttgacttaagttggcccaggaaatgaaggccgaacacgttgagatctacagtgattcatagatggtggtaaatcatgtatcaggcgaatacgaggctcgaggagaaaaaaatgatagcatatctgagca

SEQ ID NO: 364610 - DNA, 969 bp, Cannabis indica
aaataaaaaaaaaattacacaaataccacttacatacattcaacccaggatccatgcttcttgggtaactatggggcaaccatcgcgcaaccacgcaaccgaaaaaaaaattcaaccacaaaaagaactaccattaattctggcgacttcacctgagtagacaaccagaattaatcaaaacaggggctgtttcgaattcatgaaaaaaagtgtagaaacactactacgaaattaaaattcaaccggaaatccagtttaatttgcataaaacaaatgtcctaacttcaattttcagatccatgaaaaagacagatctcaaaaagttaactggagttcccgagcaatccaactcaagtataatccaaaaaaattacatcaatactgtagtaaaatatttatcctggtgtattttcgttgttttccaaatttctaatggcgaatttgttcatattaaatcataaagagacatgtagatagaattatacgtacgtggaaacactgttttgagttttaatgtttcacaacagttgcattatagttgcattaatattttactaacaattatttcatctgattgaaactttcgtctgatgcaaccttcggccaaccacccagcaactacccagaaactttcgtctgatgcaactttcggccaattacctagcaaccaccctgcaactattttatgatgcaaccaccgcgcaaccacgcagcaaccatcgtctgatcgtgtaagtaataatgtatgtggtattttggtatttaaaattacataaaaggtataaatattgtacacattttacggatgtatttttgttaataagatatcaatttatattagagaaaattacacttactatgagattttaaaagttcttatgataaatatggcacatttaagtttgaccaatttatatggtattttttttgtttttaggttttttttatggtatttgatatgccatatat

SEQ ID NO: 364611 - DNA, 601 bp, Cannabis indica
acctgtcacttccttgaaaaacaacatatatgtataatcatacatatgtaacaacaataaagaagtgacttcattatcataatgcattttcttaacaaaacacaagccataagcaatccgtacaaaatactagcatgtccaatacataaataataaactcccactgagcttagcaagctgggctcccaacaatcccattcgggcaatatgttctaaaaaatacacatatgagtaagcctttcgttagtgggtctgctaacatgccagtgctaggcgtgtattaaatggaaataagagactttgtaactttctctttgacaaaatagtactttatgtcaatgtgtttagagcagaaagtacttttaatattttagagaaagctactgctgcagaattatcacaatactattttagcggcctcgggataaggtctacaacttcaagtgctgaaatgaaattctgcagccatattgcttgataagtagtctcataacacgccatatactctgcctccattatggatgaagctgtgagtgtttgtgtaaagcccgcttagttaatttggaaattatcagttgattgtgattaattatgaaattat

SEQ ID NO: 364612 - DNA, 915 bp, Cannabis indica
cttacactcactctgcatgactccatacgaggacatcttgattggctttcactttttgccactttgttctctattgacgccagagacagtctttcccaccttaatgaccttgcggggtcatttttatgatgcagacttcttccatgtcctccattagtttgatctttctctcaacccccactaagagatctaactcatcttcttcccggactactacagtgccagttgagctgatattctaggatttgattcttcaatgtcttttctcaccatgaaaactgctttggcggagacactataacacttgtgtgcgcttttttgatcacgcctcaccgttctagtactttatactcacatgaaaacttcatgtatagtgtctgatggaagtcgctgctccaaaatcaactaattgtgtgtaatttagtgaaaatttgtgttaatatgtgattttgcgatttcataagtcttataatttgtttgaaatctctcttgatgcgaaatcttaggctacacataactaatgacatgatatagactatttttagaatatttgagcattttgagcctatcttgttacattctatataactagttgctccattgcacttaaattatcaatttctttgttagccacttgtagcccagctttaaaataacttttccattttttttttatttttaccttaagcactttgatgtttttgggcatattttgagtggtgtcatttaggaaagtgtgacaggaaagttcagaatttttttatttgtttgtataaaaataaaatgatgaaacttggtgagagattgctttatcttcttttcttgtttcaacattgaggaaaatgttgattttaagtttggagtgaggtttattctcattgtatatattaatatttgtattttaaaaaaaaaaaa

SEQ ID NO: 364613 - DNA, 1154 bp, Cannabis indica
ctccttcctattacagaagaagaagtgcgtaaagctctctttcagatgcatccttcgaaaagtcctgggccagatggaatgacacccggattttatcagaaatgttggattatagttcggtctgatgtggttcaggtggtgcaacaatttttccaaagtagttttcttgatttgaatacaagcaaggcaaatgttgtgcttattcctaagaagaaaagcccggagttggttactgaccttcggcctattgctttgtgcaacgttctttactaaaatacatcaccaacggtaatggcaaacagaatgaaacctttcatggacaaagctgtgtcagttaatcagagtgcttttattcctggtcggttgatctcggataatatcttagtctcatttgaggtgcttcactatcttaagaggaaacgctatggtaaagatggctatatggctcttcagttagacatgagtaaagcttatgatcgcatcgaatggagctttttgaaggctgtgttgctcaagctgggaattgatagtgtctgggtggatcgtgttttaacttgtgttatctcggctagttacactattattcatggtggaagggaaatgggacctattaatccaaccaggggtataagacaaggatgtcctctctcaccatatcttttcatcctttgtgcggaaggtctctcagctttaattaagaagtatgaggctcgtggttggcttcacggttgcaaagtggctaacggggcaccaagaatttctcatatgctttttgcggatgacagctatctatattgtaaagccactctccaagaagcttcaaaagttcgtgaattactatccaagtttgaagcgacttctggtcaacaagttaacttaaacaagtcgtctatcttttatagtacaaacacaactgagattacccgaagtcacctcgatcacgctcttcagatgagacaagccacagagaatagtacttacttggggcttcctagcaccatgggaagaaacaaaacgactatcatgggttttcttaaagatcgggttcgtaagagacttcaaggttgggaaggcaagtttctctctcgagctggcaaggaagttttggtcaaaactgttgcccaaacccttcctagctatgctatgagtgtttt

SEQ ID NO: 364614 - DNA, 768 bp, Cannabis indica
aggagaactgaaacaagctttcatctttttctgtatgtagtatttcaactaaggctaggtcaaataaaaatagtactattttaataagaaatatgtttaaatctttaataaataatataaagatataaacatgtttttctatccaattaaaaataaccttttatcattaatctatttaaattattaaattaattaatgaaataaaataaaagataaatgagctattttcatagcctaatctatggccgaaattcatagtttgtttggattttatgccataaataaaactcattttaatataatcttctttactaattaataaaagatcgaaaattattttatgttgcttggttcacatgttactttcataattatatctttaatgtacaaattctattaaatcctgaacatatagttattcatgattatagtattcttaacacagtggaaaataattatgattatatacttcaaactatttagtcctatgatttatcagtacgctaaatttatactaacgtgataattagcggtgtagtttatttatacttgaataagtggaatgtcctttccagggtattggcaatgtaaacttgtatcggatgtggcaactgttggattttatgccctaaataaaacccattacaatctaatctgatttgttatcaataagagaattagaagtgatttatgttgacatgtagttttcatgcttatggtttaatatatgcacaaaatctgttaagtccagaacatatattcattcac

SEQ ID NO: 364615 - DNA, 515 bp, Cannabis indica
atctatctaatcatttgtaaaatattttttagattgaaaaaaaatcagaggccatctacacagatatttgtgcataaaaactaatcacattaagcaagcacaattgtatgaaagaataattaagagaaaactaataagatcaagttgaggtacgagaacatactacgtcacgagggttctcatccgttgtaagtatttgcacatcatcatcatcctcaaacatggtttcttcatcttttttttccaggtaatccagaaaagtgcgatagtcttgacatatatcatcactttcatcttctaggttggattcgttcccaagttgaatctcctcaacttttttagatttctttggtgttgtattctcatcatcttcaataccatccagatatctgagatacaaaatttcatcatcttccaattcgcaatcagcatctaaaccatgtttcaaattagaatgcacatcttgtaaatcatcttcatcaacatcttttgaatcatcttcatcaacatcttca

SEQ ID NO: 364616 - DNA, 1242 bp, Cannabis indica
atcctccccgtgtccgtgtataacccaggagaacgactctctgtaaatacgagttggtcttaagaaccctgcagcctttataatgcaatatagactcgcatgtctaggttctatcagctcgactacgtaaggacgcagacatcccaaacgtaatagtaaccctgcaagtttaacatcggaacatgaacagttaactcgcagatgcggaagacgcatacgtcgatggacttaataactgtcatacatttattaatgttaacgttgcttgatttaattcaatgtgtaaataacggattaacaatgaatgcaatccttgtataaccgattggacacctgctttgtatataaaggggtgatccaccgtgaaatggcacctacggatctcttgctacagtggactaagcagaccataatctgactggaccactataattctctgtcttattgttattttccagcattcgtgaattatttttcattcccagttgagtactcgccattctaggttgaatactcacatttgtctttccatgtaaattgcttcttgtcactaataatatcatataatttggtgttgcgaaattcactcgacaacatttggcgccgtctatgggaaacgcgagactaagattttattcatttcaagaaaaataccatcatggctggaaatcaaacaaacggaggagctaacaacgggtccatcaacattgggacgatgaacgtaccgttatctggagctggaatgccacctgtggacgtcattaatggcggagtagggagaagcaatatcagacctctcaacctgttcccagaaacaactgaccctcaagtcggggacacatccacaccaccagcaaccatgcattttccccccgtcactccggcagtggtatccgagggaatcatccaactcaccactgatcaatatactgcgattcaggatcaactgcgtgcactacaggccgaagtagatggacaaaaccgggcccgacgcccccctcgagttcctgctactcgcacggacaaccctcaggtagcaaattctagacgtcatactaatcgtgtacgcagggaacgaagaaccaaccctgaaggtttggacctgaaccatccaacatcgagggatcaatccgcaaggtatccaaaccaaagcacacaggttgatgaagaccctgaacgacgcaatcctcgcagtcgaccatcaagagacaacgacgcagaatcagcctcttcgtcatcgca

SEQ ID NO: 364617 - DNA, 953 bp, Cannabis indica
atggtatttaccctttattatatcactctatgtgtgttatgtttattttttagtaactttttaaaaaataaataatatatataaaaaaaaattgtttatctttatcattttctttgtttattgtgtcatatttattttttctaattaaataatttttagagtttataaaattatgtttgtttatttattttttgatgtaagaattatatttcaatagaaaattcgttcactaactcattaaaaaataatcaatatatagaaacaatagaagaaaaaaaaatatacttattttagtatagtataaattggctatgtctatttttatgtttacaattataataaacataataataatataaaatactttgtatatatatgtttattttgttttctatctattaaacatactaatttaataaacaaaataataatattcacatatgtttattatatcactctatgtgtcatgtttatttttagtaattgtaagtattgattttttatatacattagtgtttataattttgatattgtattttattaaaaaaattctttttaaattataataattcatactaaaatagataataaacatttatcttttattatgtttatttttataaaattgtttaattaattttacgaaatttttttattttgagtttttaataaacattattttattatttaatgattaaaatgtatggtttcatgtaataaattttcaaaaatgtataaattttcaaaaatattttttttttgctacattttttaaaaaaaaaaaaaaaagaaccccctcgtgtagctataaatttagaaacaaaaatcttaatttttttaatttagttaatgttaattttttattttcattcattacctacaatcttcgatctattttttttgccttatattgaaaaagtgatactcgatcgaaaacaacaaagcttagtgac

SEQ ID NO: 364618 - DNA, 469 bp, Cannabis indica
ccaattaaaaaaccgatccaatccaattagtaattggattgaattggattggattttgaggtctaattggattggatcggatgatgattttccaaatccaattactaattggattggatcggatgagtaaaaaaatattggattggatcggatgcccacccctagttttacatcatcatttcatcacctgcccgagaaaatctttgaaggagagctatctagtgatatgagcaataaaagaatcccactccaaacgacaatcacctccttcaacgacagaccgtttcactgccacaccaatttccacagctctcttcctaatctcatctccttcttctgaatctgaacccattattctcctcacacctctgctgatcatcgatgaagtaaccaactcctctctttgactccattcaatcacacccactcccaccttaagcaactcagtaatcaacaaaccattcatggg

SEQ ID NO: 364619 - DNA, 605 bp, Cannabis indica
agaacaatgctggggagaaaagccagcctgacgaattagaacccgtggttatcatggcacaacaagtgcattgactgaaaagaggctatcccagtaagatcaattcaacgagatataacttggcaagatgaccaaaatggaggctgtaatgaccgcattaactaagatggttcccgacgtacgagcccctcaaacaacagatgcacctgagaaggaagagtcgaaggaccctagaacttcaggcattcacaaagataagggcaaaggaatcgctaccgaggagccaaagaagactccttccacgcaacagccttagaaatctaaagcttctaactaacctcagcagaagagttaaggaaaccacgtttcagggcgtggagaccaaaccaattctagaggcagagtcacacagaaagaaaaaatagacattgggacacagaggccagattctcgaaaaaaaataccctctcttagtgattccagcaaccatgacgaggaggttgaagaagtgcacccggtatagaatgacagtggcggaagcctttctacaaatgatctccaaagaaaactggatgctaaaaaggaaagagctaaagccaaaaaag

SEQ ID NO: 364620 - DNA, 641 bp, Cannabis indica
aaagcacttatgtaatgcatgtgggcccctttcttcacctacttccactacacaacaaaaaggaaactaaaggagttatttttctacagcaatgagatcaaacattcaatacaaagtgtttcaaaaggctaaaaatgcatcaacttttatttagtgaaggctactgatgtcgaccaattaattacactgcagtcgcggtagtaaacaggctatatgtcgtatcacaaagggaggaaaaatacacttaaaaggacagttagtaattttacaaaaataaggatcttgaatgtgataagaatattgagaaaataatttttgaaaattaaagaagtaattaaaatgagaagttctcagaaaataattatggaagacacaagcttcgtacatgcaattatgttttcctaataaaattgattctttaaactcaactataattctacaccattaattaaagttggaaaatgtgtatatttaagctcactagaaaaatatgttctctaattaaattaatactacttctaaaaatactatcatattatataatttaaatcgacaaaataccaccgacacaatgcagacactctaataattaataacctaacttacataaaaaaaaaagcatgactgaacttatataaaag

SEQ ID NO: 364621 - DNA, 345 bp, Cannabis indica
ttaggatgttaatgaaacacacttgttagtaaatctagatcctggtaaaatatatctaacatctccacacttgttttgcaagcatagcttgattgaaatcaagaaacgaacgaaaactcattccaccctcaaacttggatttgcatagcaatttccatctcttccagtgaatcttttagccatatttgtttgtcccccaccagaaattagccatcatggattctatttgattacaaaaaccaataggcaatctgaaacaactcatggaatatgtagggatagactgaaccaccgcttttaaaagtacttctttacctccgacagagaagagcttttcattccaag

SEQ ID NO: 364622 - DNA, 782 bp, Cannabis indica
gtttaatttttgggtttaattatcgggtttatttatttgttaacgggagctattaacatcgttaaatttaacagaatattcttttatttttaagtatattctgttaaaccaagaaatgtcgttagatatgtacttctaatatataaagatttatataaaaaaaatagtgaatagaatcacaatacaagaaaaatatcataatttgaatattagatctaatattcatgcattaatcaatcacatagagacaaaattatgttgtcctttttatttttatgtaataaatactattaaggtaaatattcattgaaattcatgtaatatgaaaacatggataattaatattaaggtatatattattttgaatattatattttacaaaaataattaattagattttttattttattaaataataaaataaattttatattttttaaaatagtacaaataagattttgaactgctttttattaaaataagtttaataataatctgatttagaagtgttatgacaaaattagttatatttttttgtatctgttcgtattagatattgtcttcaagttagtattttatttttactattttgaaaaatacaagattttttttatcatttaacaaaagagaagatctcatcaataacttttacaaaataattggaccctctgttttggaccctctgttttacaaaagttaccaattggaccctgtattttgttaaatgacaaaatggaccctgtattttctgaaataatacaaataggaccctgaattgattt

SEQ ID NO: 364623 - DNA, 638 bp, Cannabis indica
tgatgatgtgatacttcctttcgatatgcttgcttctcttgtggcttcgaggctccttactgttggctatggctctagtgttatcacaaagcaaaaccagtggtttttccattctagggacgacaccgagtccagtgaagaactttctaagccagacaagttcttttgcagcctctgcagcagctatgtattctgcctccatggtagagtcagaaatcgcgatttgtttagcacttctccaaaccattgctccaccctaagagtaaataccattcctgatttagatttcttatcatcaagacatgcctagaaatctgaattggtgtaggctacgggatttaaagcaccacccttgtagactaacacgaattgccttgtactcttcaagtacttcaagatatgcttaacagcattccaatgttcctgtcctggatttgtctgatacctgctcacgattcctactgcataacagatgtcacgtctagtgcatagcattgcatgcattagactcctgttgtgaaaatttatattgatttataattgcgcaagtgtagacaatcacaaacaagtaatacaatgataagtaatcaaagttcctctccacagggactttttactaaataatgcaaaatcaacta

SEQ ID NO: 364624 - DNA, 556 bp, Cannabis indica
agtttttgcagcttaagtgctctttggaatgaatttcggatccttgaatagtgaaatgactccactatttcagtttggtttaccaaaacaaataagaaataaataagaaaatttaattactttcctaaatcaagagaaacgaactgagaaaactatgtagtgttgacgttgaaaagtggccaacaccagcttgctagattggcgaggtggatattaaatataaatatataatttagagatacgcacaaaagttatagtagttcacttctcatgtcgcgatggtaatggagctacgtctacttcgagtttttatttctcatgagattacaagaaaaatggctaagtgtggaagctctaatttctagagagagatgctctgaccttatggctacttttttgaatgtgaaaaatgagctagatgagctctcctttgtaagtgaatgaagtcctgaaaacaggaataaaataataaaaaatacaagtttgatatgtttgacagtagatgataatctaacggtttaaattaacttttgaagttcattgtcaatttttggag

SEQ ID NO: 364625 - DNA, 651 bp, Cannabis indica
tctatatgaatctcttaatttttacattttagattcatttggaattgatttggagtcattaggtcgtcggaaaagctatttccgatcgggtttgggtcgggtccgtcgaacccgcgtgtagaaaaacgggtcaaaatgactcggattggctgaaggagacgacccaaacgacgtgtcgttttccaaaaacgacatgtcatttttagtgtttttggctgctgtcgtttgatcaaacgacatgtcgttttttatttttgaaaaacgacgtgtcgtttttcaggatcgtgctgctgtcgttttctcaaacgacatgtcgtttttcccctatggaaaacgacatgtcgtttttcaattttgagatcagccctttagtttgtaaaacgacgtgtcgttttgcgttttgcaaaaaacgacatgtcgtttgtgcagtgcatttttcaaaaaaaaaaaagggggaaaattccgaatttcttataattttttttatttatttggaatattaattattttcctattttgtgttaatttagtccataaattgcatttagtcaattttctatttttgtttaatacatatatctagtataaattgaaaatgaaaatttgtttaatttagtaatttattacctgatttatttagtcatgtaataa

SEQ ID NO: 364626 - DNA, 886 bp, Cannabis indica
acaattctagcttcaataatagcgaaatgagtcacagtgggtcgatacgaacacgacacaattttttacgagttgggctaaggttgagaaaattagacacgagttaaaaaacaggtcgacacgcctgacacgaaatatagaaacagatcacataaaatataacacgaacacgacacgataacacgttttgccaaccctaataacagaaacagaagaagaagacgagatcgaaacaagagaaaagaataagatgaatgaatgaatttagttactagttactagttagtagttacctccaacagctatgctataacaagcaactgaacaagtttgaataatggtattctcttgtctagtaaaaggcttagattggtaaccaaatctttgaagaagttgtgtccatgttctgatgaagataaaagcaagtaaagcagcagagacattgaaatgaggaaccataccagttgtgaggttaagtttcatagctatgatactataaatgtaccaatcactaacacttgctattactcctctacatgttattgtttctccatgattcatacttccaactcatcactttctaattccattatttcttctaaattttcttctaactcatcttcaaaatcatcatgctccttcttttccatcttcttcatacttatatataaataaagaagaaaaaaaagagtttagtttaagaaaacattttataagtaaataatatcctttaagaaaaaactcaccttggctttataataagttgatttatgaagacccttttggatgaagaacagagcaactcttgggaagtgtaccaaaactcatctttgatttgtacatagatatgtatatttatatatatatttgttccattttttctttt

SEQ ID NO: 364627 - DNA, 551 bp, Cannabis indica
acggtaccactactattactacacacacacacacacacacacacacacacacacacacacacacacgtctattctagtatagtgaacgctctaaaaattttgcccaaaatttagtaggaagcggcccactcctacattcactaagatgagtttatcaagagtattcttgtagcttgttacttcactctacttggagtatagaactcattaagagcttctatttacttagccttaaatcgcttaaggaattcatgcttctcttttcgtataattataacacgatcatgataggatttatgccttaaaagcaagtaattaacagataatatattacagaatatatgaaatacaaatataagataaatgatatattaattttaatagtataattatatatgttgctcctaaaatcgcccaatgtacgtggaccaatcaggaagggacacgtggatcaaattacttgggaagaactgctaagtctttgtatgacaccaggaagcattattcgcatgggtcccggatgatgcacccggagtacaaggtactcccgg

SEQ ID NO: 364628 - DNA, 1016 bp, Cannabis indica
taatgtatctcttttctatgtgccgaaatatgaaaatatgtatggccataagattattaatagatgatgtatattttaaattaaagttagactgaaatatattataaattatatttagtttaattttcatatttatatcataatacacaaagtaaattaattataaaaatcattattattaataataatgctcattaaaaacatactgtacttattttatatttataggctaataaaaaaaaaatttactcgggaactttgatatgtaccaaattatatcctctgaactttttaagtcgttaaaaattttccctgaactattgagattgttatatttaaggacttttgtttaattttagtaaaaaaattatgacgtggatgaaaattcagagagcatgatttagtacatatcaaaatttcaggggtaagatttggtagatatcaaaatttggggagtatggtttaatacatacaatcagtgaaatagtaataaaattaaatgaaattagacaaaagtccttaaaatctaacaatctcaatagttcagggggaatttttaacggcaaaaaaaattcagggagcatgatttggtacatgtcgaagttcgggagaaaaaatcctaattaactatatttatattatactattttaatattgtataaatataaaaatatttttattaataaatagtaataatgaaaagtaaaaaagtaattaaaaaaagtagtattattgtgggttaaaatttagtacatcctattgtttacgttaaagtttgtacaattttttaagctaaatttaatacacattttatcaccattaaaattaaattttaacaaaatattataaaaaattacaatataccacatatataattcttcattagagatattctaataatagtagagatgcattatgtggatagggagttactttgcagaggttaagtgtagctttggcattataactaaaaactgattttttgtttttaaaaatagaaaattattttttgaaaa

SEQ ID NO: 364629 - DNA, 1811 bp, Cannabis indica
catcatcaacatcaacaacaacaacaacaacatcataatcatcataatcataattcttatgcttctgctatgcctagtaccaacgcttcatctatgatgatgagccctaactcgatgggttcggctcagatgatggctggtcctggcggtgctcgatttccttttgttctgttactccaccggcttctctaagcctatggaatcttctttgtctagtcatcattatgatggatcttcatcgcctggtatgagggcttgcagtggaagcggtggtggaggctttaatatggattcgggttctaagaagaagaggggtcgaccgaggaaatactctcccgatggcaacattgcgcttggattagctcctacaccgactccttcttcaaatgttgttcatggagattcgagtggcacgccttcgtctgaaccctcggctaagaagaatcggggaagacctcctggttctggaaagaaacaattagatgcattgggtactgctttttttgattaagaaatgtgaaatttttggttttagaatcttacattatgtgattgttattgttgatgtttttacaggtgttggtggggttggttttactcctcatgttattttggtgaaaactggagaggtatgtgtgttacatattgttctctgcaattagtttgattattgtccgtttggttttagttgattgaatgttaataaagaatgttcttttttcattaattgtgtttgtgggctgtttcataaagaattgtaggtataaataatatgagggaagggttggaaatttggttactaactgtcttaaacgcaatagatcggtgttgcttttgttttggttttgtgtttcttggtgatattgaattaatggcaagtgtacacatgcacaaagtgtaaatatttggacattatctttttacatgctcagtttttatttcaaatctgtttagtttagcatacgggttacaatgaatttcttcaaattgtttgtgcatttgagtttgacatgatatttatgaaatggatgcaaagtcatatagattctatatatgctggaagaaaagaatatgctttgaaattttatgtggaggagagcaaattggtaccatttgtttggattccaacactactaagtgttatgttaatatgttatactttttctgaaagttttcatctgttttcccagaagtagaaaaccattcggcacatatatatattttaacaaagacaattcagcatatattttcttcaagaaggttgaatgcaatcttaaaccaaaatgaaaaaaattccttctttcactgttatcattttttaagactttgtactggtcttgctcaggctcattctgttgttttagcttggggtaagcatcatgtagaaccaaatcatttggtatgatgcttaagttggcatttgctatttcttcaaaaggctggcacaagcatatagtatttaattcaaattttgaatttcatctttatcattcccagttgttatttggtatctcatttatactttccagtttagttttatagaattagatgcagaattgaaagcagtcacttctgtatacaattaataaccaacatcaaagaattcttgtcatatatgtacttattagagacagctattatgtgtgtgcgtgcatatgtgttttagtaatttcttttaaatttcaacatcatgtgtagtgttttacctcatataattgattgaaacattatctgttctatgttgtgggtgtaattgacagttatcactttgagggtgtgagtaaaggatgatcattatactactttgattt

SEQ ID NO: 364630 - DNA, 483 bp, Cannabis indica
atagccacgaatccttcccagggatgtttggcaatgtgatgttaaggattctaatggcatcttcctgtttaaaccattgtcttaccaaatcttcattccaaccattatctctaataaagtttctgaccatacttattccttccgttgcatctttcagtggttcaggttgtaaatctcctcctggaacccaagggtggaaccaaatagatgtatcctccccatttccaatccttatacaaattcctttgtggatatactatcttgcattgagaattgcaatttccacattgttgagtctgaaggttgagcttcaatatcaaagaaatctttgtttctcatatatttggcattcacaatctggacccagagactattgtcctccaccagcagtttccaagcccacttcattaaaaaagccatattggtatctttggtagtcctaaagcccaagcctccatggatcttttgttgggttttatgccc

SEQ ID NO: 364631 - DNA, 536 bp, Cannabis indica
attataaaataatagaaatgtaagtaacttaaaaagaataaagataaggagatgagaaaattgatcaaacaaatagcatggttaggtagaaatctagttcggcttgtgcttctcacattttcttaatcacttcaaaaaatttcatttgttccagtatgaaaattaagataaaattaaatatatctaattaaaataattttataattaaaatcataaaaatatctaatcaaatcaattttatatttatgaaatgataacactatgagagtgagctagaaaatggcatagattgattcttagaaaaataaaaacaaatcatcaaaaataacaaaattataattaaaacataccaaaaataaaagaaatgaaagtgttatcggaggaatgtagacaacaccaaataatgctagtattcaaaataaattagaatactcaattataaatatgtgagttttcgcttagaatagcgagtactcagactactggctactaaatggacaaaaatgaaagtagaaataaagagaaaataagagaat

SEQ ID NO: 364632 - DNA, 541 bp, Cannabis indica
tcctgggttccaagtctaaggttgggtcctgtgtctcgagtctagggtcaaattttcggtctcagaccccagttctgaggcccagtattgggtccaagtcccccatctaggtttggatcctttgtccaagtcttggtccaggttcgggtttggggccaaagtcccccatctaggtcacggtttggttcttaggtcccaagtttgagtcttgggtctcgggtctcggtcgcgggtcccggtcccaatctaggttcttgtcccagtcgaggttcagggctcggtcctagtctgtgtctgggtcctagtcctgatctcggtctggatctgagtcttgggttcgagtccgagttctggtacgagtccagctcttggtctaggtctgggtctgggtcagggtccagttttcggtctgagtttgggtccgagtcttggtctgggtctgcgtctgggtttaggtataggttctggtacgagtctgggttatggtctaggtcttgggtcaagggtccagggttccaggttctgtgtcgcaggtcctggc

SEQ ID NO: 364633 - DNA, 1069 bp, Cannabis indica
gggtcccgggcaggtagctagcaggattcagatctcacctcagttagcagaggacatggtcagatctagcattgagtttttagtaggaaagcttcacacttgacgctgcaatctgatgagttagaaagaattaaagtcgcgcagatgactgatccagagttagtgaaaatcagagaagaagtgtcagctggtcaagccagggatttttcagtgtcagacaacgggatgctattgtataaaactagggtttgtgttccagatagtgtggaactcagaaatgaaattttcgaagaggctcattctaccacttattccttacatcccggcaccaccaagatgtatcaggatcttaaaccaagaatttggtgaattcgtatcaagatgcttaacctgtcagcagattaaggctgaatatcagagaccagtagggttgttacagcctttaaccctacctgaatggaagtgggaggatatcgcgatggacttcgtggttgggttacctagaaccacaggtttgttcgattcacgaagtctactcattttctgcctgttaaaacaacctactcagtggaccaactagcagaattgtatgttaaagagatagtaaggcttcacggagtaccaaagtctatagtttcggatagagatccgaagttcacctccaagttttggcagagcttgcagcgggcaatgggtacaaaactgaaattcagtacagcattccatcctcagacagatgggcagtccgagaggacgattcagatattggaggatatgttacgagcctgtgttatggattttgaaggctctttaaatatctaccgttaatagaattttcgtacaacaatagttatcagagtacaagagggatggctgcctatgagctgttatacggtaggaagtcaaggtctcccatccattgggatgagacaggggagagaaaatacctaggtccagagtcagtgcatcggaccaatgaggcaattgagaaaattaaagttagaatgcttgcctctcagagtagacagaaaagttatgcagacccaaaacgcagggatgttgtgttccg

SEQ ID NO: 364634 - DNA, 504 bp, Cannabis indica
aaaccttccataattcaacttttaccatctttttataggttagataaagaggatccatacatgcatgtgaaagattttttagaaatttgctctacatttagatttcaaaatttttctgatgaatctgttaggcttagactttttccattctcattaaaagataagtctaaagcctggttaaattcactcccagcccgatctatttctacttgggatgaattagttaataaatttttgtccaaattttttccaatgtctaaaacggataatattaggagagaaatctccgaattttatcagaaagatcacgaagaattttatgaatgttgggaaagatttaaagatttattgctaaaatgtccacaccatggttttgagaaatggagattggtaaaatacttttatgatggattatctccttcaaaccgacaaatggtacaatcaatgcacactggaaaatttttgcaatttagaggggatgaggcttgggagtctcttgagaat

SEQ ID NO: 364635 - DNA, 471 bp, Cannabis indica
gaatattgaaaaatatggggaggaaggagcgaacaggagatcacgtccagatatggtgacaccggaggtgtgggcggaggttatcgcatactggaaagacccgaaacaataggtattatttgaaagttttaataatttttcttatttacttaatatttttttctcaatttgctaacaataactatacgttaaattacaggcaagagctgagcaaaatgcaaaaaaccaaggtaacatgaaggttcaaggtggatggggatctaagaccatagtgtcgaccattgtcagggtatgaaattttcaatatatgataaaaatatggttcaattgaaattttttaataatattgttctaattctaattttgaaaaaaattaggctgatccgcagacgggggagcttcccagtgctgtggatacatttgtaaagttccactgcaagagcaataagtggcgtgacgagcatacacaac

SEQ ID NO: 364636 - DNA, 784 bp, Cannabis indica
taataataaattatttatttttaatataaataaaaagtcatccacgaatttctcataaactaagaattcggttatataggcacactttatatagaatagatatctatctatttatctatctatataaatgagaagtatgaggcggtgatgtgtcaccctaaaatctctctaatcagcattatttatctctccttaattctctcatttttttaattttttattagcttcataaatattaagtaatataaaatatatacctcaatttattttctccataatactctttatttattatatttagtttgttttttaaaaaaaaaaaattaaagtatcacatatatcacgttctcatgatattttcttttttaaattttataatacgttttcatgatattttcttttttaaattttataatatatttttgtataatgttctacatatatctattctatataaagtgtgcctatataactgaaattcttggtttatgagaaattcatgggtgactttttatttttatttaataaaataataaaatattatttatatataataaaataataataaaacaaatcctattaatatttgaactgatatttagcatatttcaactctatatataatcacaactataactctagaaattaaaaatatatatatataaaataaattgaaccttaaaccgcatatacaattagtttgttgagagagatcaggaaaagaacgaattatatatggaattttttttttacccaaatcgtttaggttttctctaggtattta

SEQ ID NO: 364637 - DNA, 660 bp, Cannabis indica
attaatcacgatttccataaaccttattgattagcaaggagctgtacagtacgtttaaaaatcacgtaatacgcctatgctagttagggtgttacaaggtttgtctaccgaagcttgccaagacatgtacaatcttcatcagagaaagctcgacttacggtccagtaagctcgcacttgtttagaattatatgtgaaaattaaagtatattaggaagcatattaaattataattatttattttaagtgtgttgcttttaagtccctaacactacaagaaaaatatcttttagctaccatgcttttagctaccaaattttatttgtagcaaaatgtagcttattgctaccaaattttagtagcaaaatttcttagtagccaataccaaacaaataagaccaaatctattgcctggcttatgggttcgcaggctaagtcctataaaatgaacgcccaacgaaatacaagaagtcagggtaatatggttgagaccggaggcggtcaaggaaatcaaatccaccacaagctcctccagattgggagcagaggtttgcagaaatggaagatcgaaaccgccaacaagatggagaaattctgagttaaggcagcagggtcatcctaccgtgcctccgacaacaagctcaggccgttgtagctccag

SEQ ID NO: 364638 - DNA, 441 bp, Cannabis indica
aaatattttaaatttgtgaaatcgtatttttgtaatttttttgttgtttttatgtttttgtgaaataatcctttttattttttctataatattttattaaaataaaataaataaaatttgatattaagttgtactaatagcgaaattgcactttataaagttttcataaagttttaatgagaatttaccttatttaatgagaaactaaagagatggttggataaaaatatatgttttataggaataaaaaaaaaatatatatatatatatgtaaggatatatatatatattttttgttaaggatataattaataaaattaaatttatcagataaaatataaaaataaaataaaaaaaaaataaacggtagattaaaattaatatatagaaaatagtaattagaaaatatagagtggagttatgtaccccaccaccaccact

SEQ ID NO: 364639 - DNA, 595 bp, Cannabis indica
ttacgctttaccctttagttgatcaaataggtcgtcaattcggggtagaggatacttgttcttaatagtgagcttgtttaattcccagtaattgatacacatccgcaacgacccatctttaattttcacgaacaacactggagcaccccaaggagaataacttggtcttatgaatcccaagttaactaactcctggagttggatctttaattctttatattttgccattcgatacggtgactttgatactggttcctctctcggaactaactctatcacaaattcaatttcttgggaagatggtaatcccaataggtctttaagaaatacatcaaggaattcacacaccaattctcaggtccagatgacacaggttggctggtatccactgcagtgactaggaatcccagacagcctctacacgtcaaatctttagctcttgaaagttttattctaggtatgcgtgtcccctaaactttacccacaaacactgctgggttggcactgtcgggctcaaacaccaccatctttcgcttacagtcgatcgttgccccatacttagataggaaatccattcccaagattatgtcaaaat

SEQ ID NO: 364640 - DNA, 667 bp, Cannabis indica
tctcggtcattacataaaatgttctccgataaagagtcaatcggaatagatccgtatattagcctcttaagtcttaagctctagagcatatgcaaacatcaagttgattaagctgggccaaactggttttgatcatttctgtgagaaatgacattactattacttattttttatatttatatgctttgtatttataaacaatttattgttttcatatttttagtttgttttctaactatacatattagaacatttattttagagatttttacaccatatactaaaattttcaacttttttactttttattgtgagacggattttattcaaaaatactgtgtgagttttatactgtgtactgtgttaagtttttacgattgttccacggttattttaattattctattttgttgttttgcggttgttttataaaaatagtatttttataaaaattccgtgtaatagtaaaattatacttttaccaaatttagtatttttgtaaaacttctttgttttaacacttaacagtgccctaaatctgcattgggccggcccaatactgaagcccaactcaagcaaacacgtttccctttgatcaatacagaacaacaagaaattacactctataccttttttatattgtcctctttatttttaccttcttttt

SEQ ID NO: 364641 - DNA, 1187 bp, Cannabis indica
gaaaatatagagaaagaataaatattctcccttagaagaatatctccaatgtacgtctaatctggtgatatatttcattgcagtaaatattctatttttatattaactttaagtcatttttaacattttattgttagatttaattattatacattagattataaattttttaaatttatttttttattgtttaatataataaaattaataataaatttattatattttatatttttaataaaattattaataaaacattaatttttcattaagattttcaattgtgtattttttgttttaagtaaatgtttaatagatagaaaaaaattagatcagtgtcattacaaaatactcttaaaaatggatgatatagacaatgaccaagctggttataggtaaagattcactttatcacattatggactataaaattacaaattcttacaatactataaaataaacagccaacaaaagaatgaaccattcttttacaaaataaaaaatatttcacaattttctatctaaaatccatgcctttgatagaattgataactactttagaattatttttcacaataataaacttacagcctttatcctttgccaactccaaagccgcgacctcaccacaaacttgcaattgtaatagagcataatgataaaaattaatacaaatatatcataaagttactttttaggccaaatataacataaatttcacatcttcattagatatatatctcattatattaatatttttaattaaatttttatttactattatttaggtttttattattttttataaaaaaaaaatttcaaaatttatatccaaataacatcaaaataataacaaaaaataacaataaattaacgagagtacaacataaaaagactatattttctgtaattaaaatcgtaaatttatttaaaattctgtaaaactgcagtttttataatttttttgttatttgtatgtattcgtgaaataatctctaaacagtagtagtttttctcgtattttttataagttccccggctctttattactttagggcgaagatgcaaaatggtcctaaatctaacaattaagttaataaatgtttcttttttaaaataattaacaaaatgtccttttattaaaaatttgatgataaaattacgattataaccttgaataattaagt

SEQ ID NO: 364642 - DNA, 563 bp, Cannabis indica
agtaactcacccttattaaattaccatgtacagaccaaagtaactaaaagttagaatgccggtggcgagtggaactttggacgcttgtgtgtgaacttgctgagggccatataactgcaggcggtctagggcactatgtttatttatttacgctattaaatttatgtcgcaattattttattattatttattatgtcttttgtacgaaaactggccaattgtgaatattttcaagtattaaataaaaatgcgacattatgatttttcgcgtttaacgcttgtaaataaaattaatatttttataaaagtacgggcgttacagtttggtatcagagccacagttatattggtcccgaacgttctcacgagttacacacatcggctaaaaagtctctgctcgctaccatgtaagtctcatattatatgtttgcattttgtttttacttgtctaatttcaaaattgcatttactacagagaaccttagtaccaatatccgagtttaggtactacccatataatttcaaatatttttttttcccaatatatatgtataaatattttt

SEQ ID NO: 364643 - DNA, 549 bp, Cannabis indica
gttttacgggaggggtgtgtggattcggctatggctgaattggtaggggttaaggaggccttgagttggataaagaggaaacattggggaccggttgaaattgaaaccgattctttggttgttgtccaggcaatccaaagcacggtggagataccttctccttttggccttcaggtggcggtttgtcgttctcttttggccgatttgccgttagtctcaattaattttgttaaacgttctgtaaacaaagctgcacattgtcttgctcgtagctcttgtttgtatccagatcgtatttttagtgcggatgatgttcctgctgattttctttctattgtaatggttgaatcttcttattaataaagttaccattttccttcaaaaaaaacaataaataatatgtatatttttaaaaatatattttttttagccttaacgttgggtgggccctatgcactaggcctaccttagcccaagcttaactctaaaatattgtgaaaatgacatgaaatatgggattttgtaaaaaaattacaaaaatatggcatt

SEQ ID NO: 364644 - DNA, 672 bp, Cannabis indica
gtcttaagaagagtcttcccagccactcaagaacctggagtgggggtacttggggccaaattgggaagggccatatgaaattaaggatgagatcggctccagaacctataagctaaaaagattggacggaaccattgtgccaagggcctggaacgccgatcatctccggaagtattaccaatagtctgaaaatgtaaacttaggctttgttaaaagaatttgtaccgtaaagtgtatgcaacctctaaatttcaaataaagctgagtgccttaaaaacaaagttttcatgccactcaggggggtactaaggcataccacacggacagatgtaaaacaggccaaaagtaaaaacaagatcaaacagaatatatattaaagcgaacacatatatttaaatatcctgacccaaagggcaagtccaaaaaaaaagtataatatactaggggcctggggacgggccataataattgtctccccttaaaagataataatttaaattgtctaaaaggaaagaaaagagactgtaaatgaaaaagaaaaatatggttgtaatgaggaaattggttggactccgtggcctattcaatacggggaggaagaggagggcctcggcgctcttcgagtaaagcatcaagccttttcttcttttcccggaatttagcaagagcctc

SEQ ID NO: 364645 - DNA, 693 bp, Cannabis indica
gattactaatcagattgtaatgagttttatttagggcataaaacccaacagttgttggaactaaccacttgagctggaattacttgggtagtggggaagttgggcggatgttccagtaggaggagcctttgacttgccaggctttttctcacctttcgctcaatgaatggcttctttgagcttgatgaagccttcgagacggtcacgaaaatcactcattgagtctaccggcccgttcttgcttataaccttccagagctcaccgaggacttcgatgccccccagtatcgcaaataactttccatcttcagttacccgtgaaactttgatcgcctccgtcatgaatctactaatgtatgcccggagaggctcgcctggtcgttgcttaacttcgaccaagtctcccaaatgtaaaggaagttggcgtgaggaggagaattgtacatgaaattccgaagagaaggttttccatgaactaaactttccaggagcgaacttgaaatacaattgctgagcggcttccaacagagtgacatggaagattctgcaacatacatcttctcgtaccccttgcaaatccatttgcatttcgaagtacttgagatgggaaaggggatcttctctcccggtgtacatcttccacgttggcattttgaacttgtggggaaatagcaggagattgatctcaggtga

SEQ ID NO: 364646 - DNA, 584 bp, Cannabis indica
tgatggctccaaccagatcaacggtgccattccacccgtcaaccaagcgaatcaatcgctaaggcaaccaggcgcttctgtgtttgaaaggttaggaacaacccatgacctaaggaatgatctaaatagaaggaggggaacagatgatcagaatgttacggcaatcgtgcagcccgaagctcgtactcaaatccccgctaagaaagatgctgacgtaatccaagttgaccagaatgtcgagcgggtcagcccaaaggttcagctagacgaactgataaatatgtttcacggcatggctagacaaagaaataatgatcttgagttagaccaagcatgcggaactcctttctcgccggagatcaatctcctgccactgccccacaagttcaaaatgtcgacgtggaaaatgtacacggggagagaagatcccctttcccatctcaagtactttgaaatgcaaatggatttgcaaggggtacgaggagatgtatgttgcagattctttcctgccactctgttggaagccgctcagcaatggtatttcaagttggtgttgggttctgtgccctaaataaaatccattt

SEQ ID NO: 364647 - DNA, 623 bp, Cannabis indica
gtcacttgatccccatttgagtgtcggggtcttcgtttgtctaggtgctgacttggccttcctttttagcgagctgtactgccacgtggtattggttctgtgcacataagcatgtcatgtcatgagaacaaaaattaggataacaatgtgcaatatttaagacaataacggagtctgtactgacaataacagagtctgtcaccgcctcatacttgaattttatatgagatataaatagatcgatagattatttttaactaatagtgttatttatagagtattttaaaatatcatgtcaatgccttatacctctcatttatatttatatatatatatatatatttaggtactcttttactgtggggtatttaaaaaaaatatcctatctgtagggatttgaaaataaaatgggtctcattgcatttttgtgaatataaatgagggttcatggccactaaaatatggtgtattataagagattggaattgacttttaacatgggtcccactcatttaatgttatgtttaattgatgtaaaaaacaatcattttcttttttaaaaaatatacaataattaaacactcatttttcttttaaaaaaattaaaaattaattaaaaactt

SEQ ID NO: 364648 - DNA, 544 bp, Cannabis indica
tttcattgagagaatctcagcgagagatttcattgagagctccgcaatatgactaacaaagagcttcgtgagttcgtaagatcaatgattagatcagtggagttgcggacggatgccatatttgagagccacggcttgtcgactgcaacactgttggattcctcagctcatgcaccacctatttcaccggaggtcaaaaatatcattgatagttccgaggaaccagtgagcatcactaagccaatggagaaacatctcaacctcgtcggcagcaacgcttctactggagcagatacatgtagatcgcaattgactcatgctcgatgtaagttgatgccaacagcaagtagagcaccaaagtcggagaagatgcccatgatttcatcggatgttaaggattctagatcttcggcaacaaatggagctcgaaaaacaccgaaagcggaggagatcggcgtggcttcatcggatgttatggattctcgatatgcatcaacaaaggtagctcgaagaactccaacgtcggagaagacagagatggcat

SEQ ID NO: 364649 - DNA, 585 bp, Cannabis indica
aacttaatactatcaatttgatttggtttttttttagtttttcatttgttcattctattttccttgttctattttacgctttgtttgtcttgttttggtttcttttgcaaggtcttgagatgtctcatctacaagtccttatgaattttgttcaacatgacttggagcccttgtatgaagcatggtggagatacaaggcatttctagtgaggtttccatatcatgggttgtccaaagagtgtcaattagaaatcttcctaaatgggttgaatccaagcacacgaaaatgggtagaaagaggaaatggtaccaccaatttctaccaactatcaatcgatgaagcctattggatgttggaagacatggcggagtacaatgagtggtgttgtaattgtccaaacaaagaccatgtttgggaggacaactacaataatttggagccaaattttgacacttacactcaaggaccaaatgatgagattttagaagatttacaagagttcaacatagaagaagatcttcatcaaatggctcaatcaagctcatttgaggtattgatgatggagttcatggcgaaaaatgatg

SEQ ID NO: 364650 - DNA, 713 bp, Cannabis indica
atgatgaaaatggctttctcccggaacaattcccataaaacatagcacccactgtcacaaccgaatagcatcttgagatggaaagatcttttagcaaaggaagttgcccaaagggtggcaagtaggagcaatgcttacattcattaagacatactttagcaatgttgcaaaacgaatcattcccaacccaatttggaaattttgtgcttgggtaattgaaaatctcgagttgcttcaacattgtgtttggtgaaagcatttcaagcacactctctccatgttttggatcatcaatatcatcaacacttcatcccaacctcaatttctcaagttgcttcttctccagtacattcatttgatccgatgcttttgtaatattgaccacattttctaacttcttaatggaaagctctccgtgtaaactttgaagttctgccaactcttttattttagcaccactatcctttcccacaacaaaagctgtcaacatttggagattcctcaatttactcatttgacatggcatctcaactaggctatttccactaataataagatgtctcaacttaatgagatgatgcatatctttgggcagagcttcaagttggtgacaattttctaatttagtgtttgtaaattgtataatgcagtcacagattcaggtagcatcacaatttcagtctcagaaagatctaaggaggcgtttggttggg

SEQ ID NO: 364651 - DNA, 659 bp, Cannabis indica
agggtgagttccttgaaaccctcccactacgactaggtaccgtgattttctgtcaaagaacataagtgggattatcttcttctattgtgtcaagacaacagaggcagtgggaccatcttatacagaataagaggatagaacacttttggaatcaagaagaaaaaaatgttcctctattttgctactttgtgtttagatttagtcattttcttagaaaagtagtatttgttaaaacaaacactttcttatctaatgtctatgggatggtccacccctaatcacttagaataattatcaaacatgcaaaccttagttaacagttctggcttttcttaagattacgattaggtcatccatgaatctagtaatggtttacactaagtacacaaccattccatcattctaaaattttcctatcactagggtatttccttagaaggacttaggcacgactagtaactaatcatagactttattctatcatcaatatgcaaatcgaatttctagggaggtaagtttggatataattcaaaaaatcaacttaatgatctttgaactgcatactgcatatctaccaaatatttctccaccactatcagttcgcaagatccttaaccacttaccttaactgttttaaaccattgctaaaaatttatgaa

SEQ ID NO: 364652 - DNA, 550 bp, Cannabis indica
attttattatttattagtaatattctaatattgattatggtttgaaagcttactcattaaatgttgtacaatttagccatacaaataattaaaaaacggataaaattgaattatggtaatcattctcattaaatccatccaatataattaaattaagaatttgtatgattttatgtaaaaatgttttcaaatgtgtacattgtgacaattatttttttttgcacattttttgtaattatttaagaaaatgtatacacttatgtaaaatgtccatttataaattcatcaaaattcttatcacattgacattattgtttattgtgttggcaacacagtggaaagtaatcaaaattgtgtgattaaatgtattcctatgatttatcagtacacagtatttaactgataggataatctacaatgtagtttacttgcaccttggataagtgttatgtcctttccagggtattggttaaagtaagattgggttggatgtatggagtatgcattagaatagaccaatattgtgttggatattattttaccaggatct

SEQ ID NO: 364653 - DNA, 956 bp, Cannabis indica
cttttttgttttttttaaggtattgataattatgtactctaaggtacttgtttggaacgttgtattaagtcgtattgtattgtactgtattgtattatattgaattcaattatataacatattttatataatactatgttaaactttaatttatattaaaatattatatatttaagtgcttaataaaaattaatatccacatataattttacataaaaatattatataaaatacaatttattataatattatacaatacaatatggtataataggccgtaccaaacgaacactaattgaacaaattaactaaagtagatcaattattaattagctgattaaagtattaacatactaaaatgtaaataatactaattaagggtgccaaagtagactttctttaacatattaatttacattaaaaaaaattattcagctctcatgacctggattctattctatatcccaaaatttggatattatatttgtttggtgtgttagatttgtcatagataattttatattaatgaaccttaaactaatgattagctaaggaaaaaaaatagctacatacctaatttatttaaaaaaaaaattagaatactgtcaatatttcatatgaaaaaatatgtcttttatatatagtactagtaaaaatttaaaatataattaaattttttaataaaatattttaaaaaatgaattaattatttttttaataaataatagttaaaatataaaatatggcattgtaaaaaaataaatttgagacttcttttgttaaaagattttgtagacatgagtgtgtgtattttgggcgtggcccctattgtcccaccctttaatcgaccttattcgcctttcgagaggtgatctgctcgtatctttccttttgatttgtatgaagttggtggagggatcgatcttgccatggtggttttgttgggttttatgccc

SEQ ID NO: 364654 - DNA, 362 bp, Cannabis indica
agctcatctaaaatagacaccatctggcacctttattcgatcaaaaggagaatccaacgttgtcccggtaggtgagagtcaaggttagtttttattttatgagcttccactattgtttcatactctgtaagtctatttctaagtagtcactgtaggggagagtctaatagaaacgaaaacttacaaaatacttatcatacgagatcttacgatgttaagtactttcaatgaataaccatccataaggggacgaagtctagcatctcgagattatattgaaaacaattaaatattgtaagaccgacaatggacatcgaatatctctttaattaaagctcattatttaaaataatatattttta

SEQ ID NO: 364655 - DNA, 1215 bp, Cannabis indica
acatcctcatatactctcagtcgaaactagaatatgagcaacatcttcgaatggtcttacaacgacttagagaaaacaaactttatgctaaatttaataagtgtgagttctggttatcccaagtatcctttctaggtcatattgtcggtgaaaatggtattatggttgatccaggaaagattgaatcaattagagatttgccgagactgaagatagtttctgaggttagaagctttattggtttagctggaaactaccgtcgtttcgtagagggattttctaagatctccatgccattgacagaattgactaagaagaaccaaaaatttgtgtggtctgataagtgtgaagccagtttccaagaactgaagaagcgactagtcagagcaccggtgttagccttaccatcagataaagaaaagtttgtggtatgttgtgatgcatccacacagggtttggggtgtgtcctgatgcaggccgataaggtcgttgcttatgcttcgcgtcagttgaaggaatatgagcaacgttacccaacacatgatttggaacttgtagcagtggtgttcgcattgaaaatttggcgacactacctttatggggaaaagtgtgaaatttatactgaccacaagagtctcaagtatttctttactcagaaagatctaaatatgagacaaagacggtggttagagttagtcaaggactacgattgcgagattctttatcatcctggaaaagccaatatagtggctgatgccctgagtaggaagggccctggacaagtttgtagtaccaagataatttctccccaattagccactgacatggtcaattcaggtattgagtttgtggtgggcaaacttagtaacttggcacttcattctgacctaatagaaaggatcaagtgtgcccaactggaagatcttgagttagtcaaaactcgagaggaagtcttagctggacatgttaaggacttcacagtttctgatactggtatgctactttataaggctcgagtttgtgttccaaaccatggtgggcttaagaaagagattctagatgaagctcacaccactccatattcgttacatccaggtaccaccaagatgtatcaagatttgaaaccctattattggttgtgcggtatgaagagagatgtggtagattatgtgtcaaggtgtttgacttgtcaatagatcaaggctcaacatcaga

SEQ ID NO: 364656 - DNA, 574 bp, Cannabis indica
gtaattagagcttcatactcggcttcgttattagatgctttaaatctaaacttgactgcagcgtgcaggtgttgccccccaggcgtgacaagggcaattcctgcaccatatagttgatctgtagctgacccgtctagatgtagtttccaggtcggcttatcttcattgttacttagctaagatgtttgtaccggctcggggttgctttctggtttgctttctttcttgcatgtgcattccaccacaaagtctgctaaggcttggcctttgattgttgttcggggttggaaagtaatttcgtatttgcccaactctaccgcccacttgtgtagtcctctagaggcatctggcttttgcaatattttgcataatggttggtcagtgtatactcgaacaggataagcttgaaagtaaggccttaactttcttgttgctagaataaggcaataagcgtgtttctctatcaatgggaatcggcctttggccccaatgagtcttttatagatgtaatagactgggtgttgtatgctattctcttctctgattagcatggcacttacaacatgttccgtga

SEQ ID NO: 364657 - DNA, 684 bp, Cannabis indica
aacattaaatgttatttctgatctatattaataaataaatctgattatattgaaatgagttttgtttagggcataaaacccaacagccttcccttttccagcataaggatgggatggccgaacatgtgaaatgggctcccttatgcgaatggcatgttcacattctcagcctcagcctcagcttcatcttcagaattcataagctcctgagcatactgctttgcccgagcacctcccttcaacttagcctctcgcttaagttgaataagctcatcctccaagtgagctcgttcaggtcgagcagcagcagatttccctttcttccccttcacggacttagaagaaaagtcctctagataaaacccgtactgcaccagatttgcatcagaggtcaactggatgatatccctgtcttccgccggcaaccaggcaagtttttgagccttatccctaaatgtaagggtgaggggaggacggtgatatgtttgaatctgatgaaatcgagttcgggtgatgttcggatcctttaccatgaagtactcatcaacaaaacgccctattttgttgatggccttgtggttcgtcccgctcaaccacttgaagcctggctgagagaagtaaaaatccccgacctgccttgcttgggggtagacttcaggtagaagaaccaagcgacctcgtggg

SEQ ID NO: 364658 - DNA, 576 bp, Cannabis indica
gctagaataggcagtatagcttttctattaatggataccgaccctcggcctcaataagtcttttactgatgtaatagagtgggtgttgtatgttgttctcctctctgattagcacagcgcttacggcatgttccgtgacagctaagtatattccaagttcttctccgtctagaggttttgagagtacgagaggttatgcgagttgtgcttttagctcttggaaagctttttcacattcctctttccacttgaacttcttgtttcctctcgggatgttgaagaatcggacacacttatatgtagattttgaaacaaatatgatgagcgcggcgatctgaccagtcaagctttgtacttcttttgtttttgttggtgagttcatatctaggagggcttgaatcttctccgaattagcttcaattcctcgggcattgacgaagaagcctagaaactttcccgagctgactcttagggaacactttgagggatttagtttcatattgtattttctgaggactttgaagtatttgtccaagtcgtttatgtgccccccagcctttctggatttgacgagca

SEQ ID NO: 364659 - DNA, 562 bp, Cannabis indica
acatgtttgaggtgactacattttaaaatctacatacatattccctagacgttggaggaaaagatagccgtcaagcatcactttgtatgtgttgatgggtcttacatgaagactaggtatggtgggaaatgttgtgtgtagtggcactgaattcagaaaaccacattttttcgatagctttcgtggtagttgacaacaaaaaccataactcttggacctatttatgtgagaattgaaagaagcgattggtgatgttgagaacttagccctcgtgtttgaaaggcatcaaagcattgttcatgctttggagctcatgttcccaaatgcacactacgatgcatgctatcaccacattagtatgaacgtcaaccacaagtttaagactaacgtcttcacgaatcatatttacacgtgtgcctacacgtatttaaaaatagagttctgtagagcaattgagaagatttgggcaatgaatgttgcagtttcattatatcttaaggaaattggatttgacaaatgcattcgatcttactttctatgggtacgttacaatgtaatgacg

SEQ ID NO: 364660 - DNA, 1035 bp, Cannabis indica
ttttataaaacttacacacaagctaaaacacatactcctgcaacaagatgaattggatagttggatgtaggaattatttaattttaaataattattttcgaaaataataaataaataaaaaatatttttggtatttaaataaaaataaaaaaaaaaatttaaaattaaacctacaatttttgaaaaataggtttcaactaacctaaatatcatttcaaaaataattgctaaccaccttttaaatttttaaagttattttataaattaaatataaaataaaaaaaaaatatttttcagattttataatttaatttaaataaaaataacaaaatttaaaagttagcaaaatatcttacttctatttaaaattacatgattatagtaatcttattttaaatttaaataaggtcaaattatttaaaaaataattaatttaaaaaaaatttaatatctgacctaaaatttaaaaataagataaaatgatcaaatttaaaaaataagataaaaaatcaagcaaaaagatagatttttacctgttttcaaatttaaattacactaatatctaaaattaattttaaaaaattcaaattaatttatttctgataattagatttgaaaattgaaaagtaagaatcaaaagccaaaactacacaaaaaatcggtagttaattccatgaaatagcatgaaaaatcgaagaaaacgaaagaatttgtgagctgaacggacagtatgcattgcatactgtccatgggcatgcatcaggaggtctaaccgagaaacctcagcgcaggaggctgcatgcagcctctccgcgcacgcgagtggaggtttccgacacgaaaccgtgtctgagcgcgtgttgtccgagggttgcccctcatccgcgcgcgtaggttagttgcaccatcctgatatttttcagcttttcgaaaattcataactaattcaaataaaatcgaaattgagttctgtaaaaaataaattgcttaattttttccaaactatccaataaaataatttcagaaatagatttt

SEQ ID NO: 364661 - DNA, 814 bp, Cannabis indica
tatgactgagagttcaattccaagttctatgcatggatgcaacaaggaattaataagacagtgaatttaccttgtatgttctgggtctccttattggaagcttggttatataggtccgtggtccccatactagtagagaccatacttgtaaagaccgcttagtttaatttgaaaattagtagataattaaggttaaattatgaaaattatttattgatatttaaataattatttatgttgatttatttgaattcagaatgcattttatatgtcatatagcgaaatttcataattttgcattttcggtgcccgacaacatggaacacggtgtatggctcagtagaatcacaatgtaatgttttagtatagcggggtggtattgttagacattaggaatgtcggaattagtcgggaatttagagttttcccaaaatacccttttgtgcttttaatccttttagtgtggtaggggaaaaatggtcatttttccttataagcttttgtccattagtggaattagtattatgtgattatttgatttattttgaattaagttggctgaagtaagtggattagtatgacagttgttcattttattaaaaaatcaaaagaaaggcaaattctcattttctctctagctctctctctctttcggccgcccctagaacaagctagggttcttgattcttcttcctcaattcagtgttttgcatcaattcttactacaatccaagctaagggaaaccttgtgtaactttcttttagtttcttaaagtttaaggaagtaaatatttgcatgcttgatgattttgat

SEQ ID NO: 364662 - DNA, 549 bp, Cannabis indica
cggtaagatcgaaaggaatacctccgacataaacataggcggaatctttatacttagcgtgccaggaagcttcttcagaaatgcctaaagtagcctctttggcattaatattctgaattcgtttgataagagtaagcggattcattgcctgactgaatctgccctaaaaatgaaagttacgtcttctccctctctcccgctgttaaaaccctctttggtttctttatcagactacgtttttaagaccaataataaaattttaagtaagacagattttcggatgcatgcggatatatgctgtcttcagattaatactaattcaagtcttatttggttagtttttcctaaacactttttcctctctcttctctctctatggaaccaaaacaacggttttacttttttaaaaaaaaaaaaaaaaattagaaaaactgaagtaaaaaagttagtagtaaagaatacacttgataatttattaaaatatataatgcatgcttatttatttattatatttattttttttaaaaaataataatattaatttagaga

SEQ ID NO: 364663 - DNA, 651 bp, Cannabis indica
ctcagttttcaccttttttggaagattctaaggcaaatgtcgactgctcgttctttatatatttcacatatctttttagggcattattgctttcccctgcgatatgtagccctcccaaaataacaagcatgtcctctccttcaacaggaaatggatgtaagccctggttgtttgggctattgggcagactgggctggttgtatccatgaccctgtcttttcacgtactctttaaaatggcctcgagcgatgagactttctatctcgtctttcaattggcgacactcatcggtcgtatgcccaatatccttatggaatttacaatacttgttaggatctcttttgctcctcgcattcctcatgggctcaagcttgtcgaaggcaaccttttgctcatgtgcgaggtaaatattctcacgagtttcattaagctcggtataaatagtatacactggcacgtacttattgtgcttcttctacttctttttatccttcgacggttccttagtaccatcctttctcttcgaaccagaagcccccgagtatcaattctcgtggaaacagtgttgggttttgtaccctaaataaaactcatttcaatataatcagatttacatattaataaagttcagaaataacattttatgttgca

SEQ ID NO: 364664 - DNA, 665 bp, Cannabis indica
tttttttaattgttcaactgttgttttaattgttcggttttgttgttttacggttgatttataaaaaaacagtatttttgtaaataaaattcgcttgacaataaaattgtaaatttttacccaaaatacaatatttttataaaaaccccaaaaattatgtgatatttgattataagaacacataatatatgcaaataattctacggccattaattctcaatgcaaaatttgggtttcattttcacaacttcaatgggtatcatgttagttgaagcccaatgacattagcccaatctttgaccaagttcaactaaggattatttcataaatatacaaaaataacaaaataaaaaaaaaattacaacaataatgttgtataaaattttaaatatttttacaatttttatgattttatttataaaaaatatgatttttattgtactattgttaattttatattatctatatattatttttttattattattttgatttatttaaatattatttttctaaaatttttatagatattttctattttaataaattgctgtaaaaaatatataaaaaaaatgtacgaatgtaaaacattttttaaaaaaaaaatgtaacgtggggcaaactctcaaaattctccaccagctgctacgtacgtgcgacatcga

SEQ ID NO: 364665 - DNA, 825 bp, Cannabis indica
tcctgagtttggccctgatgtccaggttcgggtccgagtaccttgttccgatttttgtctggggtccgtggcttaggtccacgtcccccatccaggtccgagttttaggatccggtttgggtcttagtcccagtttcaatttcacttaagtgtctcgggttcgtcgagtttgggtccggatctgggttgaggtctgattcctggtccgaatgtgggtctgagactgggtccaggtctggatcccaatctgggtctgggtttaggtccaggttcaagttcgggtcccgggtgcgggtccaagtctgggtctaggtcagggtctcgttccagatctaggttccgagtttcgatcctggtctggatgcgggtttcggtccaagtctcagtcttggtctgggtgcacgatgtgtcagggcccgacttcaggtcacggtttgggtctggggatatgtccgagttcggttctagggtgggtccatgtccttctcacggtcctagtcttgtttgagggtccaagtgttgcggttcttgttcaggttctagttttgggtcaggggtcgggtttgggtcctggtctgagtcccaagtctagtttgggatcgagattggggtgcggttctaggtcccgaccccaattgtgtgtcccgattctgcttccatgtttgggtctgagttcgagtccaggttcggcatcgagtctatgtcttggttgggatccaggtccgagtttcggttcgggtctaggtctgggttggagttcgtgtcctagtccagctttattattaagatattcgatctcaattgttggttttacatcgcgtttgt

SEQ ID NO: 364666 - DNA, 797 bp, Cannabis indica
acttccttgtggctaagataaggaagtgggtgagtttctctatcagaggatatcgtccctcaacttcaatgagttgtttgctgatataatagactggatgttggacgtttttttcttcccttatcagcacggcgcttgcagcgtattcagtgatagccaagtatattcccaattctttttctgtctaagggttttgagagtatgggaggttttgcgagttgcctttttaattcttagaaggcattcacacattcctccgtccattcgaactttttattacctcagaggatgttgaagaaaggagaacacttgtccatggattttgaaacgaatctactaagtgcgacaattcgaccagttaagctctagacttcctttgtttttatgggcaatttcataacaggagggcttgtattttctctagattagcttctattccccaagcattgaaaataaacccaagaaacttacccgagctgaccctgaaggaacactttaagggattgagtttcatgttgtattttctaaggattttgaagcattcatcaagatcctctatatgccccttagccgtcatggatttgacgagcatgtcatccacatatacttccatgtttcgtcaaatctagtttttaaacgtttagtttactagtctctggtatgtagctttagcattcttcagatcgaacaacattcctttataacagtaaagacccatatatgttcggaaacttgtatgttcttggtcaggtggatgcattctgatttggttgtaccccgagtaggcatccatgaag

SEQ ID NO: 364667 - DNA, 643 bp, Cannabis indica
aaatgttatagtaaaataaaaaatagaggttgaaaaattcttacacaaaatagagatctaaaaagaaaacaattgataaatctatagaaaactcgtcatactatttcaaaaatattgcaattcaaagctaatgtcatcaccgtatctcacttgtagttgacactacatttaaagtcactgtcgttattgtatcttatttgtagttgtcatcattgatcatatatatatacttgtacttgagttaattaaatactgactttttatacttaagtgaatggttttgttataaatccttacttgtatatttctaagtgttttggtatgatgatgaatgttagagatattattacaatggaagaaaattaagatacatataactcaattataaaaatatacaaggacaataaaagagattgattaatatatgttataatacacatatatatacactatatatatcgcatatatatatatgaaacgtagaagagaagattataacacatgtaatataatacatatatatataataaaagaagaatatatatgtatatatactcacttacaatcttgagtctagattagtggggatcaccatgacttgaacatagtattaaacctttgtccaaaagcttatttcccccta

SEQ ID NO: 364668 - DNA, 717 bp, Cannabis indica
ctcctcgtatttcttagatatagctcacgcttaaatttgtttataatgttgccattgtgctttctttttctaagaaaggaattatatttgtagtaatgaaataaaatggtaggatttgagaatgtgatgtaggcatgatacaagtttaattaatttgatgctgcctgttatatagttcctcatatcaatgctcacaaaactaatatgagccatataagttactatatctccatcaatcacactacccttcctccttccaagtctctaattatcttacttttcctcctctttaacgaacataaccttgggaatttttttgactaaactgtactccttaaaaaatatttgagtaaattgtactctaaaattaaagtgactaggcaaagtttctttgacaagacttggatcaaagaacttcagaatttttagacttaataaatttctaaacatccctcaatgaatcagtcaatcaggtaatattatgttcctgtttaattaagattctactttttgacttatttttactatttatataattattatatgaagatttttttaataaaaaatattttataaaatgtttcgatatcattaagaaaaaaatttgagtaaattaagaattatataaattattttaattttaaaaataaattcttaaaagctatttggacgaagctacaaatcctaacttcttttaaaaatttaaattaaaaaaaa

SEQ ID NO: 364669 - DNA, 569 bp, Cannabis indica
cgctccctcagtgagaatgggaatagtctcaagcggattgcatcatcactgattccattgactttgaaagtgtgacataactctatgaaattggacaagtgcagattggggtcttcagagggcagtccaccaaactggactgaagactgcaccagttgaagtatggcaggttttatttcgaagttattagcatccactgctactggtctgatgcatgactggacccccgtaagagttgggagaatataatctctcacgttgcggccatttgcttgatcatcaacggaacctccatgattagcgttgttgcctccattattagcaacattagcgttttcggccatgatttctcgggtttcagcagttggtgaaactttgtcttgcctcttgtttcttctgtttctcctacaagtcttctcaatttcaggaacaactggcagtatgactgcttgtccttgacggcgcatacacttaggattcctaaaatagataaagaaaatattgcaagaaaaagattagtaattagcaagaaaaataaactaaagtagaagttagtataattttgtgta

SEQ ID NO: 364670 - DNA, 878 bp, Cannabis indica
tgatggggaccatccagttgggttcttgcccaaccgttattatggcctcttttattttgatgcttggctctgcaagcgttccacgggtactacccccagtccttcgatttcactgtctgaagctaacttagctagacagtccgtgtgagcgttcttttcccgggggattctttctactttgtagtccgtgaactcgtggagcagttcccagactactgttacatatgcggccattcgctcgccgcgtgtttgatactctcccgatatctggtttaccaccagttgggagtcgctgtagacttctactcttttggcccccacgacctttactaatctcaaacctgctatcaaggcttcatattcggcctcgttgtttgaagctgagaagtcaaaccgtagggctgcctggagtcgaagtccggtcggggatatcatagcaacccccgctccggatccgttttcattggaggctccgtccataaatactttccatgtggggaccgatggtatcggcgcattcgcggttgcctcggctttattacattcggtgatgaagtccgccaaggcttgcccttttatggagatgcggggtatgtagtgtaagtcaaattgacttaactccattgcccatttgaggagccttccggacgcctctggcttttgcaggacttgtcggagcgggtgattggtcagtaccttgattgggtgtgcttggaagtacgaccttaattttcttgaggccattaggaggcagaaaactaatttttcgatgatggggtacctcgtctccgcccctatcatgcgcttgctgacgtagtacacgggatgttgagttttctcttcttcccagactagggcagcgctgaccgcgtgctcgg

SEQ ID NO: 364671 - DNA, 1267 bp, Cannabis indica
attaattataattaattgattactaaaaaaaaaagtttttccattggtaacctactattataggtaaaaggaaaatgtaaccatgatggttagaataaaaatataaccattaattagtcacccatataaatatatatatagtgtagtatatgttgttgtaacatttatttaatctctttgttggtccatgtattacattgcaatagagttgtaatgtcttgatttcttccattgtaataaaatttctaacaatcaaaagcttgttctttattaatggaagaggagataaatcaagattttgagaatacaagtgtcaacgtagttttcgttagtgattatgagcctattttgtaataaattaagcacagatataaagaaaataataacaatgacaccaaaatttttacgtggttttgcaaataacttttcatagtccacgagtctatcttattcagatattgatagatacaggattagggttttacaatcagtatactcctttttttctctaagatttttcattcccttttttgtataatttgcccctatctatagtaatataggttggcagttaattacatttaagttgaaatcccataacaatattccccgaaattttgggccttaattatgctccacttaaatacgtgtagttaatattagaaaatgacatagctgtgatttaaaccgtttgtaatgaggtcaacgttgacgtggattaggacacactgccaaatgtatctcgctgaggtgtctcacctagtacataagttaatgacttagtttacttgcattctagcaatggcatgagcactagtgtattgagcaaacttaagaactactctttgaccataaggccttgtagactggacaatcatgtccttcaagttattacacttagttattataatatatattttacgctaagtgttctaataaccaattcacttcgtcaatttgaaacatgattaccatgggtatttccgtcataatctaatttgaaacatgcatgcctttgattttggcggttttgtggttttgaggcacatcattagcattaatgaaccatcttttccatttctcttccatttcgatctgttggatcttctacattttgatccaacggtaactaagtttgaagtataaaacggtaaggaatccatttttccaccatttttgtcttttcaaaaactcaagcttttttgagaaattctcatcccgatttcatgaaactttgcaagctctccttgtctttgacatactttct

SEQ ID NO: 364672 - DNA, 956 bp, Cannabis indica
tggaaatgaacagattcaagttgacatagatgggatacctcaagtttaagtgaaccaaaaccaatgaggaattgcaagaggtgaatgaagggagtgatggcaattgaattttattaatgaagaatgaaagcaagaatataattaggaacgacaaataaccatctacttctgataacccaccatgagcttaccttggagttaagcataattaacttggggtaatctcaagatggaaaatcttctgggaagtcatctcagaaagcgtacgagtgaggacaaagtatgctaaaaagattcatattaggatgtagaattaccaatcgttccagagattatcaagagggatggatgtgctaataagtagatattgacaaggtattgagaggagtatatagtagtggatggaaataaaaagtactcaaattgaatatctatcagaaatgaatacttaacttattattaagctaagtcagtaggtcagcttaggaggtcccatataaggaatggaaaggcataattatgaattaggtattgtgggatcttatgatttcgactgaatagtaagggttaaagataccgagttaatatgttgtctatcagtatagataatttatacaataaataaggatatggaattcatacgaaagaataatctaatcttgtgaaattccaagcttgatatctttggttatgatgtgaagaattaaagaagattattgagaatcatggaggttaaagcaaaaatagtatgatgttttattcttgaaaggttggtaacctgagaagatcaatggaattttagaaacatgttgtgagcatatttgataaatgttagattatcttagaataatctctttcttgacgtaggtgtttatttaaaactgataattaaatgtaccactggttaggtaccttaataagtgtggtacgagagaaatattagatacttgttcact

SEQ ID NO: 364673 - DNA, 573 bp, Cannabis indica
tatccggatccctatctaggtccaagtctgtgttttgggatcgggtcccagatttaggtccaggtccgggtctcagttccgttcctggtacgcgactgtgtcctggcccgagttccagtcttagtttgggtctgaggctaggtctgtgtttagttctaggtctgggtccgagtcttggtcacggtcctagtcttgttctggtcgtagtctgagtccaagatctagacaccaactattggtctgttccaggccctgttacgcgtatcccgagttaagatccagatcactgtcacgggtctaggtctgattctggttcaggttcaggtcgcatgtcccatttctgagtttgggttcgggatcgaggctgggatgtagttgtaggtcccgaccctaattctatgtccctagtctggttcaatgtttgagtctgagttcaggttcgggttcgggtcccgtgtccacgtttgggtggggatctgggtccggctcccaattcaggtctaggtcagatttggagccggggtcctggttaggttacggtttttgatctaggtccaatttcagttatgattc

SEQ ID NO: 364674 - DNA, 592 bp, Cannabis indica
agaactctttgtaaataagaactacgatcgtcacaagacgtgtatcatcgaccttggaaggaaaaaatggccccaacttgctgttgtgatcattggaactaagcttctctcgagacatcccagatacaacaattaaatacatgtttaaatacacgatcattttaacctagtaaaatcggaaaaatcacatatgtatgattttcaaataataaacaaatttacaatacgtgatatgtaatcaaaccccttgattttaggggatgattgttgtaaacagattatagtcaattttgtaattaactgcccactatgtaattataagtagtggcaagcatgaacaaaaacgggacggaaaaactcatacaaaagacgccctgagaaaacaattagagatctcaataagattgactcgtggactatgcataattttaactccaaaaccacgtaagaaaccctgtgttcctacttttacttttaaagctttattttatctgtgtgacattgttacggttaggctcaaatttagtaacaaaaatctgcattaacagtttggtgctttcattgagagcctctgtgaaaaagttcagaaaaa

SEQ ID NO: 364675 - DNA, 553 bp, Cannabis indica
atacttctaagaaaaattgggcatcacctccccttaattttctatatcccaaaaattcaaaactaaccaaaataatccagacaaatacagtcacagtccaaaatcacattataaacctaataattcctatatcaaccaatgattccaagaataatcactattttcacaaaaatactcaaaatcctcatgcaatttttcaaatgcaatagagaataatacttacaaacccgaagacgccactactccacctccattgttgaatatccttgaaagtttgaggttaaagatgaagaactattgtattttcggatttggggtgaaattgatgagtattttggtggtttttgatggaaagtgtagattcatgagagaaattaggttttaggatggattgggattgagaaataggtttgaagatgaaagaattgaagatttgggaaggaaaattttgaattttttgaatgggagaggttaggattggctgagaagaggaaggattttgaatttttggtgtagggttgaatggggggaaaaattgggattttatagaaaa

SEQ ID NO: 364676 - DNA, 757 bp, Cannabis indica
gctcccggagagatccgagcaaaagatgcgagtaccacaacgacattggtcatagcaccaacgaatgcaagaatctcaaggacgagattgaaaacctgatccgattgggccacctctatgagtggatcaagaataggctgcctcacctcaatccgggccaggcgacagggggtgtgccccagggaacaccggggggtacagcaggagcattggctccagctgctcccgcgggcgatgcccagcacatccccggtctgccgcccagacccaacgggagggtagccatgatctccggaggtccccatattggaggaactactcgcaaggagctaaaacggtacgcgggggccgtgaaacacaatgaggtttgggaggttactcaactcccagctcaaaggccccggctgatggatcaacccatcacattcacggaagaagacgccaagacggtgcgcttccctcatcatgacccgttggtcatagagacccccatcgctaataaagtggtggccagagtcttgattgacaacggaagttccgtgaacctactcttcaaggaggccttcactgcaataggcctgacggaccgagacctttcacccagtgggtcccaactcacagggtttaatggaacgacgcttatcccaatgggaaaagtaagacttccagtcaccttgtgtccggacaccccccagagcacattcaaatactgcacttttgtggtggtggactgtccgactgcttacaacgcgatcct

SEQ ID NO: 364677 - DNA, 592 bp, Cannabis indica
gatcctggtaaaataaatttctaacaaaagcctccaagtagttacacacttagtgctcaagaacggtttgaatttgtagattttataaagtttgtctgattttcagacagatttgctgtaaacttagacaaaaatgtgaacttggataccgacaagatttctgggctcaaatcccatgactgtcatgttttgttacagcgtttaatgccaacagttatccgtaagtactttaaaaaagaaatccgagacacaatcattgagttatgtgtgtatttcaaacaattatattcaagaacacttaatgtttctaatttggaaaatatgcaaacaaatgttctaactattttgtgcaagttagaaactattttcccaccagctttctttgaaataatgattcatatagttatgcatctccctaatgaagtcatactaggtggaccagtgcagtacaagtcactacaggaaaaggcctttttaccggtggagttcgtcaaatgccctggtaaaagttgtcgacgtaaagcaaaaactgaaatcccatttgcatttatgctttatttttgccggctcaataatgcgccggtataacttt

SEQ ID NO: 364678 - DNA, 658 bp, Cannabis indica
ttagtagtaaaatatctagatagttattttctatatgcttgtggtatttgtctagttatattaatattaaatagaaaaataatatttaagtgaattttattcaagatacttaaatattttggacaaacataaattagaataatttttcaagatttattttattttattttatataaatttttaaaatgtatttattttaaaatgcattggatttcgaatttttctatatatatttatagaaaaatatatttaagttgaaaaataattttaattaattttggacaaacttaaattgagtaattttcaaaatatttattgagaattattactaagaaggaaaataattttacttattttcaaatctatctaattataattttataaatattaaactaaaatatatatttagaattacgtaaattagtaattttaattaaattaatatatatattaaaataaatattaaattaaaatacactttaaataatgagctttataataaggatattcgatctccagtgttggttctacataattcttattttagtgagtaatcatccctaatggaataacattcattagcaatttaacgccataaaatctcgaaatataagtattattgaaagtttttttattcttagtaacgtccaccccaata

SEQ ID NO: 364679 - DNA, 610 bp, Cannabis indica
tcagcgctgccctagtccgggaagaagagaaaactcagcatcctgtgtactatgtcagtaagcgcatgataggagccgaaacgaggtactccatcgtcaaaaagctggtcttttgcctcctgatggcctcgaggaaattgaggtcatacttccaagcacatcctatcaagatactaaccaaccacccgcacacaggtcctccaaaaacctgaagcatccggaaggctcctcaaatgggcaatggagctaagtcaatttgacttccactacatgcctcgaatttccataaaaggccaagccttggcggacttcattactgaatgcaacgaagctgaggcaaccgcgaatatgccggtaccgccaatccccacatggagagtatttgtggacggagcctccaatgaaaatgggtccggagccggagtggcgatgatatcaccaactggactgcgactccaggcggccctacggttcgacttcgcagcttcaaacaatgaggccgaatatgaagccctgatagcagggctgaaattagcgaaagctgtaggagccaaaagagtggaagtctatagtgattcccaactggtcgtaaaccaggtatccggagaat

SEQ ID NO: 364680 - DNA, 454 bp, Cannabis indica
tataattgaaatataactggttctgtaacataatgaataaaaataaataacacaaaataactcaaacaaattataattaaaatggaaccggtgctacaacagtgttataatgaataaaaataaataatacgaaataacttaaactgattattactaaaataaaactgattatataacataatgaatgagtatttttttggggtatatatggtatgagtgtaattatttggtgggttggagcatgttgaatagatgtttttctttgagttattttattaaactgatttttttctgtgaatttttatcttagttcactactacaaatatcataattcgcgacagtccttaaaacgatttttttcgaggactgtcgctaaaaaaattaagtaactatttaaaattatcgggaaaaatttagtattcccgacgacttaaaatcgtagtaaacaaaata

SEQ ID NO: 364681 - DNA, 599 bp, Cannabis indica
cttaaaacagtaggaataaatatcactcaaacttcagcaaatgaatccaaactgaacatacatatacagctcccaattcaaacctaaattcacttagttcaacccaaaactcaactaaaactcaaatagaaaagttatgaggatataccttgattgaagctcaaaaccttgctagaacttagagaatcacagcaatgaaatccctcttcctttgctatgcttgaaggttaaaagagaaggaatgaaaaagcttaggaaaaatctaggtttctctcaaatttccattgaagacaaagggttcatcttttctctttattttttttaaacaatactaaattatatattcagcatataattgcataaaagacaaaatactaattaagtctaaaagaccactatacccctccaactatttaccaaatagctattaacccacaagggtaatttggtcaatattaaacccgaaaattcaatacttagcaaaataccccgaacaaataacatacatcaaaatataaaatatgactctctaaaggccccaacgccgcgttccacagcttccgaacaccacacagaaattagataaataacataaaata

SEQ ID NO: 364682 - DNA, 576 bp, Cannabis indica
acttgggagttagagtcgcagatgcgggagtggtatcccgagcttttcaggtaaatttcgaggacaaaattcctataaggggggggggggtagttgtaatatcccgaaaaataaataatatttaaatagacatattttattaaatctataattattttggtaacgaagtaagattatgatcttgcttagggtaattattgagaatttactcaatgaaataaatagcgtaatttattaattacggagattatattgggatatgtgagtaccgaggatatcaatttcgaaataaaatacttttttgggcccgaaaattgtggaaatttagcgatgtggttggtaatgtcacgacgttaatggaagaattattttgagaatatcccggattaggttagaattttattagaatgtcggtttaatggaattagcaaaaattacaaaaatgtcctaggttattttaaagtttatattttttgtcattgggggtaaattagtcttttgccttttactttttagggctgcctattattttttttaaaaaaaaaagggaaggaaaccctattataagaagaaagc

SEQ ID NO: 364683 - DNA, 640 bp, Cannabis indica
cttgattatttttaatttcccatattcacattcaaggagggaaactcaggcgtttgaggttcctttgggacaattacctcttttcgtgacttgcctataaataccaatagcattggcacataaactcattttcatcacccttctttgctaagtaacctttagagcgaaaagagaaattcttggcttcaaagttgccgaagtgcctccatacaaaatgcttgttggattgacgttacttcgaacccagacatcggactcttgagtaagtttatgatatccttcatgcttatctctgcatgtttgcatttcgaatgcatcttctactgtgccgtagaaatttttttaggaaacccttggtttagaaacctctacgattcttctttatcatgtcttcgtacgattttacagccataatgcttgtttctgaactgcataacatccatctttcatcttgcttattctaagcttcatgaacttttttgccctaactcaagaaaactttttacttcttgagttctaacttttctctaaacataatcgttctttaatctgttgagtactcctggtcggcatatttgcttgcttatcgttcaatactccaaccaaacacgcatctcgtgtgttgtcttttgtagatgaa

SEQ ID NO: 364684 - DNA, 1099 bp, Cannabis indica
ttgcttcactttgaccagatctcttaagtgcaacggaagttggcgagaagaggagaattgtgcatggaattctgaggagaaagccttccatgagttgaaccttctgggtgccaacttgaagtaccattgttgggcgacctctgagagggtggtaggaaaaactctgcaacatacatctccttaggttcctttcaggtccatttgcatcaaaatacttaaggtgggataagggatcttcctttccagtgtatattttctaggttggcatcttaaacttgtgagacaattttaaaacattaatctctggggagaaaggggatccacgtgctcggtccaactcgaggacatttgtactctgaccggccaggccttggaacatattttttagttcatccagttgtgcctgcacgactggattaacttgttcggcctcttggccgaccagagtaacgtcagcatatctttgagcgggattttgagcacgggctccggggtgaacgactggtgcgtcatgttggtcgtccaaccctctccttctattaagatcatctcagagatcatgtgctgttcccaatcgattaaatacagaaacacatggctatctccgtgactggttggtttggccaatcagctggccaggaccattaacttgagtggaagtattaggtataacatctcctgatgagttgctagacagggtctgcccgcctaccacttggcccacaggtggaacctgtgactggggattggacggatgactttaccgctggatcttcgtctttctcgcccaggggaatgatggttgcaggttgttgtcctacagcctgataggccttttgtatcaacacggtggtctactgggttcagtctttaatggctgcttgctgtgcttttaacgtttccatctctttgtccttccattcagcgaacatgtgcctctgctcttcaaatgcaagatttaccgcggcgcggagttcctcctgatcatgatgcaatgtgttggtatgaccttgcatgactccaagagcagcacggaggttctagattttagtatcatctccaatggttgttcgtgttggaatttattttaccaggatct

SEQ ID NO: 364685 - DNA, 1071 bp, Cannabis indica
ctatgactgagaaaccaattatttaaatcaaccgaattaaaattagaatgttagagccagttatgtaaaataaaaaaataaaataactacatagaaaaactagttaccaatataaattgcagaaactagttacattagataaattgaaacatacaaactagtttttttttttaaaaaaaaaattaggaggaaccagttacattagataactaattaaacaaaactaacaattaatatagaaacaaaatataaaaagcctaaaataataaaataatatattgaaacacgaaatagctagttaattaaaaaaaaattaaagcacaccacaagagaattacgtaaagcaagcaaattacgtaaatctgacacagtaaaactaatttcccaaaataacataagaaagaatgaaacttaaacctcaattacataaaatgacaattaaagacaaaaaccaattatctaatataaatagctaaaaaattaaatatacataagaagataaattaaaaacattaatatacttttaaaaaatacataccaaagatgaatccttaaaatttggatcagattttttttccttgtgaataatctcgacatgtgagaggttttggctatctcctgagactgaaggcagttgggggtaaaaaagcacctgccacaacttctcctgcctcacaggctgttactatagaacagtatgaggccttacataataaagtggaggaggcacaacaagacagtcagtattcgaggcaacaatatgaaacacaacaaagtctacctcaagcgattcacagatcagtttgagtatctctctcggactgtgcctggtttcaacttgcctcagatggatcttccgccattccccactcttcctaatgctagatcgtcatcgcatccacccgagactcaaaacaataatgacgatgatattacccgtctttagaacaatatatattttataattaactttagaacacaacactttttttttttttttttctagaacatcttttattattttgtttatttactattaactttagaactttttattacttactaatttta

SEQ ID NO: 364686 - DNA, 718 bp, Cannabis indica
cgcgccagtacaatgtcgaccccacccaatttcttgaagatatgcatggttatgacaaaagtattgggtgagcagtcatgccacttgagaggactggggccagttgctaagacttaagacggggggcaaaaaagagaaaactcccaggctaggtcgatccgggcaagcccactgtcactcaagaggagtatgaggcactaaagcgaagggtggaagagcaagaagcatggaacgagtggcaaccacagatgctgatcactcataaccagatcatgagtgtgttccaataacaaatgatctaattggcaagcgccgttccaggatttcacataccgaagatgctcccaattccaccgattccaccatttcagcctcctagcaatgcagttggttcctcctcacagactgcccctcccggtgatgacgacgatgacgttgtcgatttgtagtatttttttagtttgaagtgtagataatattattatttatgaactcaaaatacttttatttaatttatgatgtttaatatagttttgtaataacagtataaatttcgattttataatatatttgatatttatttaatattatttcgacttttaatttaaatttaatttatatatttcatatttataatttttttaaaaaaaattgtaaatacttttaccggtcgcttgaaatgcgccgcaaaaagtattattttgtatattatatatat

SEQ ID NO: 364687 - DNA, 743 bp, Cannabis indica
tttcaaagtgaccttaaagagtcatttcaagagaaaaatacacaaaagtggtattttatatacactttgtggtagaaatatgggggtgagccacaaacttaatcaaaatgtgatgagacattattgattagtttatttgatttaaaactcaaattctaaatcaattttggttatgtgcatatgcgaaaattttgacatattttggtatcaaattttagtgaaaataatttcaagaaagaaattaaagagaaattatagagacaaagaggtcttctatattttaaaatcaagatattatcttgatagtgaaatgtgagaaagtgtgggggtgaaatctaatatttatcaagcaatttggtaaaagaatggatgatatgtgaaatttaggcatgcttggtgcctaagacttgagtataacttagacatgtttggtgtctaaagttagtgtataaattttgatatgcttggtatcaaaatttgtgagaaattgagtaagtgtgaaaattaatcttctatgtaaattttcaaagcttaagtatacttaaggagaaaagtgaccatgtaataatggacactaattttggctagcaagattcgcttggaatcgaaaagtgtgtggttataacaaatcgcttaatctccgtacaagattaaagcatgaaatttcgagggatgggacctaaactcccttagagttttactcattgatggtaacctatcttaacactagtaaaaatctagtc

SEQ ID NO: 364688 - DNA, 426 bp, Cannabis indica
ggcataaaacccaacaggggctaatgcgccgcgtgaagtttctgcacgtcttcccacgcgctggcgcgtggaggcgcgtgtgacggtgtcttcgacggtgttcttttgccagttctttcctttgttcttctaagtccactcacatcttgttaaggttgtaattcggtattttcttgccttcttcgtgtttgggtgttcattctttggtgttcgttttgttctttttctctgtcaattgtgtttgcttttgagattatggcagagataaaatcagattcaaaatcagttgttgtttctgatgtggttctcgtgatgtcaaaactcacggaccataagttgattggtttgaattatttggaatggagtaagacaatttgactgtatttgaggagtattgacaaagatgatcacttgactgacgatcct

SEQ ID NO: 364689 - DNA, 503 bp, Cannabis indica
ccgagtatatatatatataataaaataaatgtaatataatataatatatatatatgtaatgaagcagtatccccttcgtccccctctctctctacctatctctctttctctctctcttcaatacacaagaaagaaaaccaagaaaccatgatcactaccacactctggcgacctacctccggccactgaccagccccacgcgtcggaccactcgaacctcctagtgccggcgacctcaccccccaagcggcgacgctccttttgccgttgttagcttgggatcgcaagtcaaagtttgggagttcaaactttgaacggatttttcggtcacctccggcgtccgtttgacgagacgttttcaccactaaactcagctcgtcgaggagaacaacctacaataaaccatttttctcggtttgctactttttttggtgacatttttgtagctccgcccctttccggcgacttttcgacgacattgtgtaccgttttgacaaacggtt

SEQ ID NO: 364690 - DNA, 1148 bp, Cannabis indica
tattgaattggattatatatcatatttttatatagtactatattaaacattaatttatactaaaatattatatatttaggtgtccataaaagttaataccacatatagttttacataaaaaaattgcataaaatataatttaatattatactatacaatacaatacggtgttgttgaccgaggttttcggcaaccaattaaatcatatataggaaaagctgtaggaaatttaatgcatgagatttttacgtggttggggcattaaagagccttagtccacgagtctttgttattaatgagagtatttattacagagaatgttcttggtaaatttctcttctattttctctctttgattcctttttcacccagaatcctcgacccttttctcagtatgtttgtggggtatttatagtgtttttctggggtgatccctaggaatgaatcacttgtctttcattggaggcttcataggggcacatattcccagccgatacaaaataggaaatacatgacctataccataggtatcttaggggttaggtggatataatcttttatcccctcttgattgatgtgattcctcataaagtagccgtcactagtcttattaatcatagcgcaatagctgacaaagggggcttaagccatctgtcatatcatttatggtagtttcaatacgtctttccccatgcggcattaaatgcgaggtgattgttcaatagaatccagtacctcccgaaactgccttagtatgtccctggcctccgggagcgtaaatatccttctcatgtcttcttcgggagacaccttccgagagacactcctctgttgtccaagacttagttgatttcttttaagaactggtcctctcagctccacgtgtcatccttacccaggtccacgtattttgggcaaaattaagggcaacagatgtcatcccaacactagggctcctgatcccagcacctctggataaggcatattaactctttgcagagactgatcttgtcaaatccactatgaacagatacaaatgccatagattataaaaaaaatgtgttgtgtcgttttgatgacttaggatagttacatcaaagagctcttagactagtgcaagtggatcctggtcacagaataccaaactc

SEQ ID NO: 364691 - DNA, 603 bp, Cannabis indica
aagtagccttgaaagatacataatagcttattttcctaatgtaaattcatttaaaaaagttgaagaagaagaagaattgtttttgtttttatggtttttttttttttggcaagagtttacaaaaatatgactttttccgaataaattattttatgcgaaaaaaaatatgggaaaaaaatttaggggtaaccaattacttataatgttttttttttcttcatatttttgaaattttcttttatttttccaataaaataactttttaaataaataaataaataaagatcaacattatattttttgcacatttaagtataaaaatccataaaatatgtaattttcacttcaaaaaattcattggatttgatttgttttggtttagggtttagtggattgacagcttattgtgggctatttgaagtgagcaaacctaaaaagggtgagaaagtatttgtgtcaacagcttctgggtcagtaggccacttggttggccaatatgctaaacaatttggttgttatgttgttggttgtgctggcactaaagaaaaggtaactttttataacttataaccctacacgctaactcatcaatggttaactatt

SEQ ID NO: 364692 - DNA, 750 bp, Cannabis indica
gctgcaatttgtggaaatcgactgctaattttcatccaagatcgtgctcctcctcctcaattcttgaatgatgcagatcaagcctcaaacacctacaatcaagattttcttgaatgggaggttcaagatcaacttcttgtttcctggttactctcttcgatgacagagagtcttctcacacgcatggtcgaatgcaacacaacaagactaatctggagtgcgcttgagaaacacttcaccttacaagtctcctcaaagatcctggagttcagaacaaagttgcagaaattaagaaaaggatcaatgtgtctaaatgattacttattgaaggtcaaacaacatgtagatcttcttgcttcggttggagaggttctgagttcgagagatcacattgctgcaattttcaaaggactaccacctgaatatgataccttcatcatatcaaccaataccagaatcgaagaatactcggttgctgaaattgaggctctccttcttaccttcgagtctcgaatcgaaaagacagatctggatcaagaaactgatctgagtattaatgttgctactactgattttgatcagttatctgaagctaatattgcctatcaaaattatccaaatcgtggcagcagatttcccaatcaaggcaaattcccaccctcatcctattctggttctactaggataaatggacgtggcttcaacaatcgtgttagcaacaacaatggaggtaactgttggaaattattt

SEQ ID NO: 364693 - DNA, 956 bp, Cannabis indica
tagatcactaaaacatcatttacaggtagctaagtgttttaaggggccaaatacattgaggggtgaaaacggtaaatttatccctactcggtgtaaatcatctatatagaggatctttgatcaattgagattataacgatggttaaatgtgatagcgtatctatgtggtaaaacatatagagcgttctatataactgagagtgcaattctaagttctaagagtggatgcaacaaggaattaataagttagggaatttacttggtaaaatttgttcatcttattggaagctcagtaatataggtccatggtccccattctagttgagaccatgatgcttgtgagactcagatcattgattttgtttaatcaattacaattctctgattagactatgtctagcttatgaattttcactaagcaagggcaaaattgtgaaggaaagagattctatgtttgatttattaattaagagactttaaatatctaattaataattatattaaatgaaaatattatttaataatttattttagttattaaataattagttttggcatttcaatggttagaattggaaaattggcgttttagagaaaatagaaatgaaaattgtcaaaattgcaaaataccaagtggggcccattaactaaagggccggccacttggagaggctttttccaagtaatattttcattattttaatgccaaataattactaacctaaacctagtagttacctataaatcgatagtgatggctaacacttaacaagtgattcaagagattcaaaatcagaaatttttgccttaaaaaaaaaaaaaattaaagccactcactatccttctatagccgaccctctctctctctttcttcttcttattttcgaaaccttgagtgatagagtagtgccacacacatcaagtggtatctcaatcatagtctggagattgtggag

SEQ ID NO: 364694 - DNA, 706 bp, Cannabis indica
gactgatgtaaataattaagaagagaacaatcacttacggagtttgcgaaacgtggttgtgctaatggggtagagaccagacgtcgagaagaagttgtccttgaaagataccttatttggcaagtctacaataatttttggtttgctagcatgagcaccaagagagaaaaagcccactgcgacattcttccttaatagaacggccttaactgagtaaagatactcaatctctaagggtgtgggacaaccccaattcataattttgtacaagactttcaaactagcgagaatcctgtaggatatgggagtcagctggaatggggcaaccccaatgtgatttatgtagtctttgaagtagtctcgaagagggaggatggcccctacacaaatatgctcaaggctccaggcacccatacttgttgaactactagttctagtctcaccactagttcctgggttacttctggcaaagcatgtagggggtagcaacagaattcaccctctcgtactaacctaacctggcatgattgcccaagtgcaattccacaggtcttcagcatgtcgcccatgtagcctgaggagttttagacgtacgtggcttgggaggcataatctcgaaatccaagtcacctggttcaaaagcaattgtgacgttgggtaaaaacaaaggctttgccacaggaataaaggacatgctgggtggttc

SEQ ID NO: 364695 - DNA, 738 bp, Cannabis indica
aggtaaagaaaagaaaagctagatcaaccatgaggtggcagtcttctccagtaatgtacatattgacctcaccggcctgcatgccgagttgccaggagtcgttttgggctggctgtatttgctgtgtattttgattttgtatttaaatagttgttgtatatatttctttagcaaaactttttataacaggaattcccgaaacatgctttttatgccgttataatgtccgtttttagcgttttattttagtcaagttttttaatattatcacagtttttaataattaattattctactagtattaaactagtttataaaatcacacacgtggtgtccctatacatgaacgaaagaacgaacgagtcctcgttctccctccttcgacaaaaccttcttcccctatatccatttttctcgggttttaatatgaaacttagcgatctaagctctggtagtagcaggatagcaaatccttgaagagggaaagcttaaggtatggtttgatttcattttaagtttaaaaataattggtttcgtatagggggtacgtgatttaaaatagttatagaaattctgactttgtagaattgttctttggtacctatgggactaggatagatatcaacttgattttgggttagaaatcgagtttgtaactttttaaagcttagtctgaacgttaatggcgtttttcatttaaaggtctaatttttatttctgttacgtaaggatggtaat

SEQ ID NO: 364696 - DNA, 905 bp, Cannabis indica
tagagccaagatgatgaaaactcaaagcccagatcgatgaaccctttttcgtttgagaaaagaaagaaagaaaacacagaggagagagagagagatctagagagagctaaggggagttgtgcttagacagagagagttagagcttgagttgtgagttgtgagtggaaaagagaagaatgagaatataaaaagggaggaagaaagtggagagttgaacaaagacagcgctaaataaaacatcaattgccgaagaacagtgttcaggctaaacccaacaaatccacaacccagttcggagtggcacaagcaggtagacagttaaccattggagaccagtgagctagaatggaaccaaagtcccaaatacaattcaggatcagtatagagaatctgaagcaaatgctaatggcaatggagaaaagggtcattcaaaatctttattaaatggaaactcagaattttctagccatgctacacaagtttttcttgcccagagtaagtttagtttctctattctatagtttcgtcctccgaaatacatgttttaatgatccttttattgatgcttatgcaggatggaaggaggctagttaaacaggcagtgctcgagtggtcacagcagcaaatagagggccatgattgcagcggctatgttgcggctaattagtacatttttattgaggtatatttttagtatcttgattgatgaaaaatttccaatgttcatgttgattgttaattgtttgttgaggcatgttttgtttaaatatatgattcagatttaagatatttatttttatctctgttcatgtttttaatttagaagattgtaaattcattagcccaagaaagaacaactatacgtattcgaaaacgaagatcattaatccatgtcaattctatat

SEQ ID NO: 364697 - DNA, 643 bp, Cannabis indica
atacatcctgacaaagaaaaaaaatcaaaatataagtatttatattataattaccttactataatatgtttattaaaattaaacacttttaaactaaaaatatacaaataaaattacaaaatatatgcatattataaataattttaatgtatgtttattatttaaaaatgttatttatttcaatttctaattaagttactaaaaaataaacactaaaattaaaatatataaataattatgttttatattatgattattatataatattatatttactaaaaaaattatacaaattatgtatgttcaataaataatattaatttatgtttattatttaaaagtatttattatttttaatttttaatttgaattactaaaatgcaaatatttaaaatttaaacatttatgtgaatatttattctattatcaatataatatatattaaaaattaatatattataaaaatatatataaattttcacgatttacatgtttattatataaataatgtaactatatgtttattatttaaaattagggaaatttacatggtgtactaacttttgttaatttgttacataaatactaccagacggtattttttacttttttgctgtgtttttttatgagtttcatactgcag

SEQ ID NO: 364698 - DNA, 538 bp, Cannabis indica
tttggattttttatgaatcagttatgattttttgaatttggacaaaaatatctaaaaccgagcaacacgttgtgctcgcgcagatagggtttgacgcggcttcagacacgcccatgtccgaatttactcggacaagggctgtcttaagcccctcgtgaccgagttttgtcccccatgaggctgctagcagcccttccgtcgcccatttgcagcctattgtgtgcatgggagtatgcattgcatactcccctagtgcaatcttgttttggtgatatcttttgattcaaaaatcgtttttcattgaaacaaaattcaaaatttggtagaattttgtggagaatctaaattttcaattaaaaataaaattatcagaataaaattaatttttattaattttttaattaatataaattagttttagatgttagtaggctttgatttttgaaaatttggttttttacaaaaatagccttatggttaatttttaaattttagattttttatttattttaattataagatcagatattactttttt

SEQ ID NO: 364699 - DNA, 559 bp, Cannabis indica
gttaaggatgcatcagtacatccttttaagggggtgtattgtagaatcaaccaaaaacattaattaaaaaaataaaagaattaaaaaactaaattaaaaatttgaaaaagtaaatgaaaactaaacctagatgaataaaccctattgctaacccagattcaccaacccacccacccctcttttctttcttcttcttattttcttcttctacaggccaaatcaatccagaacaaataaactaaaccatttcatccttttcgttctgtgatgttgggcacgagactttctgagttgtgtgagatgagcttttgtttcctgttcagcgttggtagcgaggtctggtgttggtatgactgacatcagcggcgacactaacaatggcagcggaggaagcgtggctgaccgagatcacagacggtaccgagaaaaatgacataccgattcggaggagaaatcgcggcggaggagttggcctttggtgatggagaaggctaaggagaaattgtggcggaggacttcgacttggcctcatttctggctggagagagagagagagaga

SEQ ID NO: 364700 - DNA, 865 bp, Cannabis indica
gcttcatggacgcttattcaggccacaatcaaattaaaatgaatccaccagaccaagaacatacaagtttccgaacagatatgggtctatattgctacaaagtaatgccgcttggtctaaaaaatgctggagcgacataccaaagattggtaaacataatgtttaaagaccagataggacgaaatatggaagtgtacatggatgacatgctcgtcaaatccaggaaggctggggggcgcatagacgacctggacgaatgcttcaaagtcctcagaaaatacaatatgaaactaaatccctcaaagtgttcctttggagtcagctcgggaaagaatctgggtttcatcgtcaatgcccgaggaattgaagccaatacaaagaagattcaagccctcctggatatgaagtcgccaactaaaaccaaggaaaagcaaagtttgactggtcggatcgccgcactcagcaggtttgttctaaaatcaacagataagtgtgtcccattcttcaatatcctgcgaggaaacaagcagttcgagtggacggaggaatgtgaaaaatctttccaagagctaaaagcacaacttgcaaaacctctagacagagaagaacttggaatatacttagctgtcacggaacatgctgtaagtgccgtgctaatcagagaagaggacaacatacaacacccagtctattacattagtaaaagagtcattcaggccgagggccgacacccattaatagaaaagctcacatactgccttattctagcaacaagaaaattaaggtcttattttcaagctcatcctgttcgggtgtacactgatgttaggctatttttagcctatattttggatcgattttatgt

SEQ ID NO: 364701 - DNA, 780 bp, Cannabis indica
aacgttggattcttcttttgatcgaataaaaggttgctagaatggtgtccatttttgatgagttgacaactctattcaatgaatgatatctttaactctcgcctaccaagacactgtatcagtttgttggaaaccttagaacttatttaagatatgatagtttttgtagtttgacatgtctttgttacttgctgaatgtatgataatttctaaattgtgtatgaattgatattgaaccatgttattttctgttattaattgcagtataattttgaatcttcattgttggtctaacttagtttgttattttaatgggacaaatcacaaaggattgtcatccattagacaaacaagatagtgttaggtctcaatagataagtatttgtaaatgcaacatgtagttgtccatccaaagatgacaacttagactagtatttacaatatgaaacaatcaaaaagattataaaataagaatgactttgactctcgcctactcaaatagcgttggatttttattttaatcgaaattatcctttaatgtttcctcttaactttttcatttcgaatttgcttaaataatatatcattggatgaatggtttataaatcatatacttatgatgtcattctaatttctcttatgaaattgaatggcgctgatgattatattcctgacattctatcccgaaatgatatatatcctcaatcttatagaatctcctacttgtatatgttttgtaacgccctaatctataggaacgccacgtgtgtgattttataa

SEQ ID NO: 364702 - DNA, 764 bp, Cannabis indica
aaattttattaactaaacatacatgaaaataatttactcttttctcacatgtgaatcatctatgaatcattgaaggaaatttgtagatggcttggtgtaaaaatgttagattgagttgaaaatagaaagagaatattaatggcaaatatcaccaattgtggctttgagactaaacataacaatgtgatccgaatctcctcatgagactaagcataacaacgctatccaatctgatattgacgaaagtaaaaactattgaatatgtacatgggatgattctacctcattgctcgaaaagattgtggcttttgaggtgaaatatatttgtcttcttttaccactatctaggaaaaaaatcttctgtcccaaaaaaccatgtctccaccctgtcccaccaataaatttaagccacttgtttttttatttattaggtattttattaattttttaacgttaactaagattaagtcaatagttaattttcatcccataattaatgctatattctttctctcaaaattataaaagtcttattttagttcaatatcaatatctttcaaaataaataaggtagttaatttttcatcctacaatttatgctatattctctctcttaattcaataacaatattaatactaaatattaaattaactatatatatatcatattctttcgttccttatattgtgctaatgtttatttattattcaatgtatttatatttttttaattaaatattgtatatatatatattaattagttt

SEQ ID NO: 364703 - DNA, 750 bp, Cannabis indica
tcataaactttatatgtgtttatttacattgttttagaaattcatatttatgatgttaaataacatacatggtaataaatctagatcatggtaaaacatattccaacagatagtaccacctatgctgaaatggtggataaggcactgcgggctgagggcgcagtggggtgcataatagagtctcgtgggactctagtttttggcggggctcctacccctaggccttagcaggggaggtagtggctcgaccgctgatcagaaaagaaaggcatctactgctaccgatggctcaggtcagaacaagaggtttcgagggaaccagggtagaggctatcgccagagtggcatcaaaacccgatacacttacccagagtgccccaattgtaaaaagcacaatctaggggagtgtaaagggcaggggtgctttctgtgtggcatgccagggcattacataagggattgtccctaactccgaactaaatcaaggaagactgaagcgaaacccactccaacaagggtgtttgcgataacccagactgatgcagaagccagcccctctgtggtaacaggtcagcactcggtcaataactcttatttctctgtgttgtttgactctggggccactcattcctatgtggcggccagaatttttagtaaattggatagaccgcatgatagttatgaatcagagtttggaaccctactatctggcggggagttagttatctccaaaaggtggattaggtctat

SEQ ID NO: 364704 - DNA, 1473 bp, Cannabis indica
ggcggaggaatacactgtgccgcacggcatagtgttgaccccggtctctgcggatgaggagaggcaaaatctccgcgtggccaagcataactacgcccttgacgagtacagccgggggcatgctgaggtggaggccttgaagaagattctgcgggaggagcatcagaacactctaaatgaggacgccttccaaaatctgtgggacttgaacatggatctgctaacagactagttcaatcgcttcctcgggcccaccttggctccctttgcctcggagattactagcgagttcatctcccatctgactcagttcccgcctaagaggtatgccgcttgtgcctcccaaaactccatctaccaggttcacgacatcagctctgccatggctgcggtaggtgcttgtgatttattccttcccttgatattttgtctaaggcatccgatctcactttggtctccttttttagattactgcggagaccagccgcctttccaagaacacaaaaaaacaaggcctcgtcatgtccgaatttgggggcatagacgaggccgtgaggatcctgcgggacttgtctgccgaaaggcgagcgatccaggaggaggctgaacgaaaggaggccttcgtggaggcgaagctcaaggaggaagctaaacaaagggaagcccaagcggagggaggctgagatggaggcgaggcaccgggaggcgctgaaggcggagggtgaggccgctgccaaggctaggcgtgagcttcgggaggtcagggaagctatggacgagatggctgccaaggtaaagtccttagaggaattgcaccaggcagacttgcagtctacggccaacctgaccgtggaggtgaaggagttgagggacttcaaagatcaggccttgaaaaaggccaaaagagaagaactcctaacccccgtctcctgcaagcattgtgccaaacgctttgacgacgacgtctatatggcctggcagtcaaatggccaaagtattaagcttgacttctatcccaagcctgaagaggctcttgctaaattccgggagaagaagaaaaggcttgatgccttgcttgaagcacgtcggggccctcgtcttcctcctcgcattgactaggccgtggagtccaacccattataatcacatcttttttttttatttacagccatttttctttcttttaagacaattttaatttagctgcttattttctaaggggagacagttattatggcccgtccccaggccctttgtatgtcatatatatattttttctttttggacctgccctttgggtcaggatattttaaatatatatgctcactttgatacatattcttcttgactttgtctttactttcgaattgtaatacatctgtccgtgtggtatgccttagtaccccccctgagtggcatgaaaactttgttttaaggcactcagttttatttaaaatttggaggttgcataca

SEQ ID NO: 364705 - DNA, 1263 bp, Cannabis indica
ttaacgcctcaaccacgtaaaaatctctctcttattttcttacagctctctaaattcttattattttatcggttgccaaaaacctcggtcaacaattagatatcaaatattcttaggagaataaagtagtggatatgtgtaattaataattactaataaacagtattactaaatgtagatttaataatacaacatagaaattagggatgttattaaagtattgaataaacaatttaagaatatattcaaagtattatttaaatatcataattgtttatctgttaaaatttaaaaatacttgtttaatgagattaaacaagtaatacatttcaaatcataaattaagaaaggtcttaattgatcaaggatagtggacagatagattaactgtctaatttagtgggagtattgagtatattgagagtatatttaaaagaccattcaagaggagaatccatttgaaagagttattagaatttaagattaaagagagataattaattgaagaatatacacattatgatattatttcataaacgagaaataaatatttttattagttatgtattcttaaataaaagaatcacttaattgtgacaagtaatttaaaacaggaaagaatgtgaaatgaaacggttcattacaaacattccacttgattagccatgagatttattgagtttactaattatcttaattaataaaatcaactaaatgtgactaatggagggttttagattaatcaattttaaaataaaattttgaatagacatatatttaatattgagaatattacataattaatcatacaacatgaacctgaagaaaataaaagaatgaataaactggatatactagaatcaaattttgtatatttgttaaatgatgatgtggtggtctccggaatctggaactaacattatgtgaagggtctcgttcatatgacttagtttgaacagtcaaatgagatacgtctataagagttatagaataagttgtacttacttctagtgcaagtggaagaatgttgagatttatgccctaaaagtaagtaattaatggatgatatattagagaatatatgaaatacaattataagataaataataattaattataagagtataattattaaatatctaaaaattctttattcacatggagaatgtataatcttgtaaggatgtacaagagaattagattatacgatatgaataaaacaaattggtagtgtattaaagtaatgagaatctttaatataga

SEQ ID NO: 364706 - DNA, 602 bp, Cannabis indica
tttgggtcccaggtctaggtctgggttcggatttggtcttcgtctaggttgtggtcctagactgagtcccggatctagacactgactattggtctgttccaggccccgttacccgaatcttgagttaagatctggatcactgtcacaggtctcggtctggttctggtgtaggtcccaggtcccattttggagtttgggttcgagatcgagactgggttgcggctctaggtcctgaccctggttctttctccctagtttagttccatgtttgggtctgagttcaggttcaagttcgggtcccaactccaggtttgggttgggatccgtgtcaggctcccaattcgggtctaagtctgatttggggtgctcgtccaatttgagtcatgaatccaagtccaagtcctcattccagtccttgtcaacttccagttttggttccaattttgggtcacagggtacgggttcgagtccacttttgggtttggggctgcgtttcggtctgggtgtgggttcgggtccttgtcagggttcgggtccagggctgggtgccgaatctagacactattacgggttttgtccaagccctgggtccaaatctggat

SEQ ID NO: 364707 - DNA, 538 bp, Cannabis indica
ggattttgtttgttggtgtagatgggaatgcttgaaagaaattctgcttggtgattggactgatgggatattaatgggattttgtttgttggtgtagatgggaatgcttgaaagaaattctgcttatgtgggaaaggcagaacatagtagtaggtacttggctaaataacttctatagaaaattgaagaacccagttcctatgtcaccttgtggtatgtttgtgtatatagtatagttctatcccaaatgaaataggagaatttgattgactgggattgttttctattttcatttatgaattgggttttgtgtgaattttgattttgaagttttaaactttatttattttcaggaagtgggtcactttgaatttgagatacaagagattctgcgctgtaagtttcctatatttttttgttattccatctcagttgggcttttcttgtaactttttcttgattgaatattaatcagatgataattagttacttgttttttgttctgtaaattgaattgctttgtttagataggtcaatt

SEQ ID NO: 364708 - DNA, 519 bp, Cannabis indica
gaacggaaggagtcattatattccgctgcacccaatgtaaggtttactaaaatttatatgtgtttatttcattgttttagaattcatattaggatgttaatgaaacatacttgttagtaaatctagatcctggtaaaatatatccaacataaactttattcttcctttcaactactactcccccaacatgaaatctcaacatcgttgctccctatgactaaccaaatttgaaaaaaattatttaaataaactatttgaacgaatcaccaaatcgaaagtattagaagaaaataacttaaatcttattcattgacccaaaatagggcatatatacatgacatagtttgttacaagattaaaaaaataacaactcgagtaacaaaatcctaacaaccctctataataacctataactaattaactaacttaaccatatacttataatactccccctcaagatgaggtgtagagactaatgacactcatcttggacaaaaggaggttaaattgagctggaaa

SEQ ID NO: 364709 - DNA, 1422 bp, Cannabis indica
aatatttctaacagaaatagctggctctgataccaattgtaagccccaagttcttgtctaacctatctttttcatatttagattgattttatcttgatttaagcttgaatataaaaagaacaaaatcaaagattcaacaccagaattttacaagcttcacctgccctagaaactcattctaggcggctagtgcttgggttccccgaaccagggtaatacctttcactatattcaaagatgtatcttacaaaaaccaacaatattgtaaacaatacactcttttacaaaatacagtgaatctatacccataccaaccaagacccttgattggagacacaagatccccttgtgtgaatgatgagctctcttcaacacttcttcaatctgaactcccttcagatctggtgatgaagatgatactgaaatcccttcagtctgaactcaacatcttcaagctttgatctgcaactatggagtaatacctccaagctcaaagatcacctgccatggaacataaagaagaaacaagaagaaagaaacgtaatccctaatctccgatcaaaaagttcgtcaacaaaatacccagaaatcgtatttatacccagctaaaccaagaaacccgaaatagacagctgttaccatctgaacaattaaaacctaaaatatctttgctgacgtggactaacactaacagtacgaactccagacaaaacactacgagtcccagacgcaactggaatgcaactggacataatttgtcactacagaaaataatggttcttacaggtttaggtctgattccaattttaggtctaggtgctagtccgagtcccggtatggttctggctccgattttggttcctagttctaggtttgggtctagattcgagtttgtgtccttgtccgggtttgcgtgcgagctcagttctggtctaggtctgagtttgggttttggtccgggttagggtctagttctgagtctgggtctaggtttaggttcgggtgtgagtcctagtccgagtttgagtctgagttagggttcgggtcggggtcctagtctaggtctaggtccaagtccatgtctgggtatgggtcttggttcgagtctgtgtccgtgtccgggtccttggtcctagtcccagtctgggtcagggtccgggtctgggtcccagtcccgatgtacgtcccagtcccttttctggtcctaggccgagtccgggttctagtcttggttcttgttttaggttcggctttagggtttagggtttagggattacggattacggattagggtttagggtgtaggattaagggtttactgtttagggacctggactcggacctagactgggatcggaactcatgactcaaacttggattcgaacctagaccaaaattaggatcaaaacccgagactcaaac

SEQ ID NO: 364710 - DNA, 1139 bp, Cannabis indica
aagaacatgtataatactcctaagattgaacctaaccatatttaagatcatttgatcttggatcaactaggtgatattgaattgaatagatattacggtaagtttaatatatttgaatcaaagttcaatatcggtcccttccgatgcatactccgtgcatccaacccaagctttactttaaccaatgctctggaaagaacataacactttccaaggtgcaagtaaactatgttgtagattcacatatcagttaaaccctgtgtactgataaatctaggattatatagttaaccacatactcttgattactttccactgtgctggcgacacaataaacaagaatataaatgtgatatgggtttggatgaatttattaatcaaataaacaagtaaatgattacatgaaccaaatgacacacaaagtgatgaaaaatacttctgtttttttattgatatttgaagataatgattacattgaaatagagctttttttagggcataaaacccaacaagaatgagcaaggcctctcccacaaaggcttgagagacgacaaagacctctggagattggaacaaacctcacgaaggttttgagttagattctcatgggttaccttaggacaaatcaagacattttttcttggtcgcatgaggacatcatcgagatcagcccctaggtcatctgtcatgccctcaacatagacaaagttaacttcaagcttgtaaaacataaacgtaggctctttgaaaaagagcgctccataactctcaaggaagaaatttaaatactacgggagaataacttaattaggaaagctttctacctactttaggtatccaaccctgttctggttagctgctttatggaatttcttgttcatcatgagcaagtgtgaagtattactctgaccaggagtcttattcacactttcaagttcattcctaaaggcaatttctagatgagtgttgggatgtgggttgtacattagcactacaaatatcaataaatagaagtaaggttttggttcaataaattcatacacaagtttagaaaataacaagtaatcaaatatgtttgcaaaaatactaaaaatcaaacatatttttattttctaaggtttccaacataatgaaataca

SEQ ID NO: 364711 - DNA, 1071 bp, Cannabis indica
gatggctctgcactagacgggttgagagagatcatagagaaagtgcatattcacacgaacttccttcactttgaacaaaagaaacacacgctactgtgagtgatgtttttgccctacaaaaatgtagattctaagaatggatggatcgataggccacgatcctacaagcccatcaggtggagttgaaccaccaaaatagggaggctaacaaactgatcagacagttcaacaagagagttgaatctaagattgaacagccacccctcatatgggatttcctttagggaaaaggtccctatgttccaaagggaacttggcgccctagggatcacacgcaaacctcacggttatggggaccaactgtatcccaaacaaggctgccaccctatcagcctaataatgatcaaatttttccctaatgggcatacgacatgactgaccaattttagggcttgccctgagacaaagaaagaagggaagatgtcctaccaaggcaagactggagtaggtatagcagtggggagtcttaccccaataccaatgaggataatgttgttggaagttatcttaccaggatctagatttacaaacatgtgtgtttgattaacatcctgaatatgaattctctaatacgatgaaataaacacatataaagtttagaaaatcttaaattaatggcagcagaataacatgactcattatgctcagatctctaaccctttttcctttttatcatagagtaataacaagatttgagcttggatctccttctctcctttagtttggttaaccaccatcttccacataaagattgagtacttgacttgctatgtgtaaacatgatactctatcactaaaggcttgaatttgatgaagaataacaagaggggcaaaatcactataaaaggagtctctacgtactaactagttgtttgacaaagatagaaaattagatttagatgggttgaaagatttgatgagaatgagagtatcatgttccttttatagtatttcaactagggtttaggatttaattatatggattaaaaagaataaaataatagacaaaaa

SEQ ID NO: 364712 - DNA, 669 bp, Cannabis indica
actcaccattaggagctaaaggagctagttggggtaccaatcaggtttgggataatcaagtgcttgtagatatagccagagctagaggaaagactgttgctcaggtacatctatatctatatattataatgaaataatagctaataaaatgaccatgaaattggtaatgaaatatatggttatgctatgtaggttagtcttaggtggatatatgagcaaggggcaagtgttgtagtgaagagttacaacaaggagagattgaaggagaatcttgacatatttgattgggaactaacagaggatgatctcaacaagattaatttgattccacagaacagaactagtctttgtgagggttttgtttcacctgaacatggtccgtacaaatcatttgaagaattctgggatggagagctttaatctctttctgtatgtgtgtatatttatgtatcaatttcctaatttctttttgtttgaataaatgttcatgactctgtttgatttcatattccaatttgctattacagcttgtcctaaaactattttgatattaattatgaaatcaagtatggattccacatattttaaccgtatactaaattacactaacaagtaactaaatattagtacctcttaagcattacataatggaaaatttgattttctata

SEQ ID NO: 364713 - DNA, 836 bp, Cannabis indica
agcagttagctcgttctacagttgagtaagcttttattgctttcgtagtttatttaaaatagtatgatttaagaaaagccccttaggaagcatgttcgtagcctgatagtagaataggcgcatgtttttaatttcccaatgaagcggcattagtaagctctcgttgatcatgatctgatttgccaactctttgttacgcaggctattcagactagatggacgccaggcaaaataccaggagtcagggcaattcggtcgggttaaatgaaggtcaaggacctcagtttcccctaaatgctcggggtcgaggtagaggtcccaggggcagggctcgtggccggggtgatgttaacctgccacaggctgcccaggctagccaagctactcaagaagcccagaattgggaaaataggtttgcagaaatgcaagccagaattgaggaacaagatagtgaaatccagcggttgagacagcagggtgctcctgcagtgccagttccagaaattccagtggcacctacccctgttatccaggccaaaccagtgatagcagtgaatcggatggaacctctgtatgaaaggttccgcaagcaggcacctccagtttttctgggaggtccagacgttatgaaagtcgagcagtggctaacagtgattactaagattttgaatttcatgggtgtcaccgagaatgatagagtggtctgtgccacttttcagtttcaagaagacgcattagtattgtgggacatggtgtccatgatacacgatgtcacaacgatgacctgggaaaagttccaggaacttttcaatgccaaatattacaatgaggccgtc

SEQ ID NO: 364714 - DNA, 644 bp, Cannabis indica
ccctttagtgccctttatgttattttagtgtggaggggcaaaatggtcattttgcccaatttatgttttgtcctttagtggacttagtgtaatgtgttatgtgattatgtggcatcttgttggctgaaataaaggtttaatatatgcattttctctcatttcattcaaagttagaaaaaattaaagaaaagaaactaaaccaattttctctttctctctctctattcggcccacttggagcagcaagaagctggccatttctcttggtgtttcaagcattttcaatcaatttaagtgtagttcaagttgttggtaagatccttgaacttgtcttgttattttcttgagtttttgaagaaaatggttaggtttcatgcttagttttggttgtgttgctgctgttagcttttgatgatgtttacagaagtttattcatgattatttgagtagaatagagctacttgggatgcatgttagtggtgtggtttaaagttatggaatttttactcaaagctatggtttttaaagtgtaattgtaaaatttgttgctgttgacattgtttgtgtttgaattcggtttctgtagtttttatatgcatggttgagtagatttaagcttgttttgatgcttgttggtgagcttt

SEQ ID NO: 364715 - DNA, 604 bp, Cannabis indica
tattattttttttaatctgagatgaatttctaattgttgtctttttgttttatattttgttgtttttttttgtttgttcgttatggttttttttgttactctgaaatagttttcagattggtgtaactgtgtagaatgcaacttttcagtatgtttttattttttttattctttatgattgaaactttgtatagttgtttaatgaaccgcaaataggtatgatgttttttttgttgtttgattatgatctggttgagataatgaaccaatggttgctaattgactgaaggtttgagctcagaatatctatcaatggaggttatcgataatggcgttttatgcatttttcggggatggagatttgcgactatcggagaattttttatttttttttgtttcgaatgagctttaaaataaaaattgaggaatttatatgttagttgtagattgtgaatcacgcactttgattcctgctttttaggattagcagttgatttagttttgaaggttcccgtgaagaagatgatgacgtgtcacgtgattatgtgttggatatatatttaacgttatttttgtaaaaagtttcctaatatagtatattcct

SEQ ID NO: 364716 - DNA, 845 bp, Cannabis indica
gctagggttctactgagcgacagtaaaccgttggtagtactgacactctcgctggcagtgtttatgggtcccgtgacacatagtaagtactcaggttacctttggtgtaccggagtcactatcctccaaacgaactcactgaacccagtcgggctagggttctactgagcggcactcaaccgtttgtagtactcacactgtcactggcagtgtttatgggtcccgtgacacatagtatgtactcaagttacctttggtgtaccggagtcactatcctcctaacaaactcactgaacccagtccaactagggttctactgagaggcagtcaaccgttggtagtactcacactctcactggcggtgtttatgggtcccgtgacacatagtaagtactcaggttacctttggtgtaccggagtcactatcctcctaacgaactcactgaacccagtcgggctagggttcagtgagcggcactcaaccgttggtagtactcacactgtcactggcggtgttttgggtcttgtgacacgtagtacgtactcaggttacctttggtatactggagtcactatcctcctaacgaactcactgaacacagtccagctagggttctactgagcggcattcaaccgtttgtagtactcagtccagtccagtcaaatttatattgggttatatcaccacatctttagccgtaccagtttggattaattattattttttaatttttgacaagactacacaacacaatcacatccacaagtactatatatagccctctacttctccttactacttcacacctcaatttagtaattttttctttgctagagaagtcact

SEQ ID NO: 364717 - DNA, 755 bp, Cannabis indica
tttgggaaggaggctgcccaggaggctgcacgtgcagcctccagaggctgcaaatccccattacgcgcgtggattggtggtcgagcagggacttgcgtgcggcaaaccccggcgcttgccgcagatgatgtacgtgggcgagggacgtgtctgaggggagtgtccgagtgcacgccgcggatcccttggttgtccgagtgcctggtgcgattgatgcacccctcttgacagccatgacactcaatcttccaaaattcataactttttcaatttttatcggaattgagttctgttaaaaagaaaattgcttaatttttcacaaggaatccaaataaaatattttcaaaaacagaaaaaatatttttcgtggaataaattttgtaaatcacagaacatcatcaagtaacacataaaacaacatgaaaccatccaaatcaacacataacatcgttttagttcatatttcatgaaagtaaatcattaacatgggtctgaggccagttgttggaattattttaccaggatctagatttactaacaaatatgtttcattaacatcctaatatgaattctaaaacaatgaaataaacacatataaagtttaaaatataatgactccttccattaagatctctagcccttgattcctttctgtagcagagcatccccaagatctgaacctggatctctttctctccttcctttagtctgattctccttcttgttgattggattcttcacaatcttccacacta

SEQ ID NO: 364718 - DNA, 543 bp, Cannabis indica
attttttataataatatgagtaactattaactaattttttcttcgtatttaataaaaataattttgatattgtaaagtgtaatttttctaattgttttgaacttaataatatcttttattatattatttattatacatatatattattagttttcaaaatatacacataaattaaattaaaattaaaaatatatatatctataataattgatatataaatttacagaaaataatttttaaaattattgtcatcatcgtaatatttggggtttgaggttttaagtctggggtttggtgtttgggttttagggtttggggtttttgggtttggggttctagggtttgggtttcgggtttgggatttggagtttggtgtttttgtgtttggggtttttaggttagctgtttttgggattagggtttggggtttagggtttgatgtttggggttttggggtttggggtttttaggttttacggtttaagggttttggggtttggggttggggtatgggatttgggttttaggttttggggtttgggg

SEQ ID NO: 364719 - DNA, 1041 bp, Cannabis indica
caaatttctctggaacttaaagttaactggggatgagtctgatacgctttttctgtatgcttcaatcatcgtggacatgatttggaaaactctcaatgacaaggtaaataacttgactccttgtaatattgtgaatgtcattaattctatttcccattgttatacagattatgtttcctgcttgcttcccccgaagtaacctgtggctgagcctatgtggacgcctccgccggatgactggatcaagatcaactgtgatgtgagggttggtggagattccatgtgcattgtggccctggcgagggatcacacaggggcgccagtgtgggctgcttcgtccatgcttaactttagggaccctctgattggtgaggcggcggcgtgtcatcttgctttagacacggcgagacgcaggaagcattactatgtcttggtggagagtgattcagatgtggttatcaaagcactcaaggggttgcactatatttggaacattgataattatgtatctttatgtaatcaactctctaactgtttcgttccttgtaatttttcttttatttctcgtggttgtaatttcgccgctcacaatgtggctcgatgggctttcgcccagaatattacaggttttgtggagccatcccgaatacctagttttatcctttgtaatgaccgtgaggtctagtttcctttatctataaaacgctacattttcaaaaaaaaaaaataaatcttataagcttaagtttaggcaataaaatctattaaactattaaatagtttataaatttaaggtgtcatctatttactacagttaactaccaacttgactgcttatgtgtacactcttgtacatgtgacatatttatattgctacacacctaatataattatttaaaaattataaaaaaaaaactaaaattataaattaataaaataaattaaaggttgagataaaaacaaacgttgttgatgatgaccaccatcgtatcaccaccattatatactacgaccacctgcatcaccatcgccatcgcccca

SEQ ID NO: 364720 - DNA, 653 bp, Cannabis indica
cacaacgcacccaagcattacacgaaggaggatattggtccccaatattagaaccaacaacagaacttggtatttcaacttttgtaccactttcaacttggaatgtctcagcaaaaacagtagcagtagctgatgaaataagattctcacttagtttagatttgttcattgttaatggattaagtaatttttcctcttcacaaccattggcagtcataacagaacttaccttgaaacgaatattgttgttattatttgaagcagcagatgattttgtccctttcttagtattcccaaagatttgtgtaagattttccaatgttccccaaacagatgaacgaggtgatttggacaaattacaacctctcttctttctgcacctttgaatttgattagtagaaacaccaatttcactgaccctgttgtcagaattatgatctaatgccaaaacacatgtaccatttacattagtagtagtaatactacttacctgagtagttccaagatttccaaagaacccatcattgtcccctccacgtggctcaattgcccaatttgagatacttagccaaactttagagttcttgaatgagactttattttcttaacatttgcattttttttttgaaaataacttttgcatctattacatg

SEQ ID NO: 364721 - DNA, 924 bp, Cannabis indica
tcgcatcgtgagtcatcaaggaaatccctataacttggggatcagattatagagatatggcaagctgtccaaatcccacaatcaatgtattttgtatttactatgcaatctttctgctcatatcaattgtaatgagaagggaaatacttcctctccaagcacatagccctataaatagtgatgcatattcactaggcaaagagtcaaaaacattccagttgagagagatattatctaagaattcatattcagagatattattggaagagctataagaaaaggaatctttctttttgttcttatgtcaatacaaataatgaggattaggctattaccgaactgctcgaggctgaacctttataaaattcttgtgtctatatattgctttatcatattttaattgttataaactagttgtggcttactaaattagactcactgtcgttggctaaaagtgaggtaaacagttgctatatttttacatattatatctcatgacattaagaatagaactatgagacaacaatttgcacgtttgggtgaaacattgagtagacaatctaatgttgttttgaatactttgttgcgtcttcacgggctattatttgaaaagcctaagccaattcttgatggttcaactgatcaaaggttgaaatggctttagaattatttgggagcactagatggcccacatattaaagtcaatgtgcatgtcgtagatagacctaggtatcagactagaaaaggtgaatttgctactaatgtattaggtgcagtctctcaagatatgcaatttatttatgtcttacatggatgggaaggatcatccgcagactctagagtgttgcgagatgctatatctaggccaaatgggttgaaagttccacaaggtatactttttttccatgtgtaatatcatacata

SEQ ID NO: 364722 - DNA, 597 bp, Cannabis indica
atatgtatataaacatttataaaagtcctttttttttctttcaatttttaatctattattattgttttatttttcttcaataaataagatcaaattcagaaaggaatggtaaataaaatctaaaatgaaaaggaataatatagctccaaaattgagatgaaagacaaagttccaatatagcttttttatgtgtctattgtaatttatagaggtcaaacgaggcatactcaattattggaatattaattgacatacatcacatgtgtagttgttacaaaatagatcatataattaaattacattactagttttaattttgatattgactttcaattattttgtttcgtaaaattagccttagccaattatttttcttctcaatatatacatatcatcaggttatatattgactctactaatatgtccatcgattttcttgttcaatatatatacgcagaaacttcaaagtccatttacaaaacaaactactcacactcaatcgttttttttaactatttctaagattacgacattttctttattaattgttcacccacttatatttattcatcaaattctatacaattgatgagagag

SEQ ID NO: 364723 - DNA, 937 bp, Cannabis indica
gtcactctgactgcttcctggactgatgagtgaccctacaaactaacacgaatgtttccaacgtgctttgttttcacttgcacgcttcttggaaaaacttctcagaaggtcacccatcttgaaattaccctaggtcaagcacacttaaccgtagagttctttcgtgatgagctaccgaaaaataagatgtaccttgttgatatatgtagtaccaatcaatccatttaagcactcttcagctatgcaatctcatagctacatagtctcagaatcatcacttaaccttttctaaacgatgtgggattgcacaacttatccaatattttttcttataaatcatgggaaaactgactgtcatagtacacaatcataaaaaaaattaaactttttttttcttaaagtcaaaacacaaggtgtaccaaaacaacccttataagagtatagaagaggttggttttactaactagttagatctaatttctgaaagagcactcttgctcatggtggccaagctcataattacattgagatcttatgtggtaatatcacaaaatattatatcctattgatataattaaataataaattttacacaattaaatttaataattattataaaaaatccttaattagcataaaattatagtagtgcacatttttatgcactagtgtagtgaaagggcatgcattagactagtgtatgtaatgcctattcacctcaatataatccaaaattatatttgtaagaaagacataaaagttaagctgtcatttcaatctaagagatgaaaagacaagaaacataaaataggtaaattagattgtaagtgtttgaatccaaatccaaccataaactgagaagaaaaaagagttacagagtgttatgtaatgtaatgttatgtttctttttcttcatttacattgagtatgttttttg

SEQ ID NO: 364724 - DNA, 616 bp, Cannabis indica
aagtccagatagccaacagatggtggcccgaactatgatagataatggagcctcttccaacatcttattcaagaccacatatgaaaagatggggctccaactcaaagatctaacccctgtcttttgcctgtatatggtttctccggccaagaagtcgcacctctagggaaaattcgccctcccatcactgttgggcaagctccgacaagcataactacaatggcacaatttctgttattggacgttccatcagcgtttaacgtcatgttaggccaaccaaacttatatcacttgaaggctgttacgtcgatattccatttatgccagaagtttccaacaaagaatggggtagggtatctaaggggaaaccagcagatttctagggagtgttataaccttgtcgtggcaaaggctaaaaaggaagtatcctctagccagataagggaaaaaacatttccaagtagggaacttcccatggcggggataaagatgtggatccttgacttgggcaccgaaacaacaacgttggacctgtagaagagctagaagagatcgagatcgatccagatatcccgaccagaatgctaaaaattggaaaaggtttgttgctcaaagt

SEQ ID NO: 364725 - DNA, 1027 bp, Cannabis indica
gtttattaattaatataaaaaatttaatttgacacgtttttcaagaaaattctttgattagcaaagattgcactttaattgaaaaagcactgtagcgtgccttagcattagggcgttacaatagtaatcctaagatgatggtaagttaaagtaaaacctaatttagtggccatctaaccatgattaaaacaataatcatagcattcacatacaaaaaatagaagtaatttgatatggtagaaattagaaattaacattcaataatgaaattaagaattcgtgtttcaggttttcaaataacccttaactaaaagaaaactactctgaattagacattataatgaaaattataatattaaagaagagtagaaggagaagaaaagacctagaatgaagaacacttcgaaatcgatctctgtctcttccttgctctctttctaagtttctctctctaatttgtcgctttagaattcataaattcgtagcctaagaggtcctatttatagtgcttgaaaggatagatgaatccccttagaattaggattctatttatagtgctttaaaagatagatgaatccccttagatttagaattctatttatagtattaggaaatatctcactaaaagaaaagataactcattttttaaaaacaaaataaaaaattgcaactctacttgaaaagctatcttttttttcgctatcttttttatttttatttttcagaaatttcctcctacgatgactgatagtattttggctataactctctcgatattacttaaaattagacaattcaagatgttctgaaaagctaagaacaacatctaaaacttcatgtttagctccaagtacaattctgcctctaaggttttttcaatttgcaattaagttccaccttataaaatcaaggtcgccgacttctactattttccaccaaaatatgctaaaatccctccaaaagactctaaatgcatgaatattctttaaaatagcttaacaaattaaaatcacactaattaataatt

SEQ ID NO: 364726 - DNA, 437 bp, Cannabis indica
tgctccacccctagagtaatcaccatctcatcagtagactttctagctttaacgcaagtctagaaacttgatttggtgtagtctaagagtattaaaataccacccatatcaactaacatatagtttcactttttgatcttaagattttcttgattgttgtccaatgttcccttttcttgaattaaatcgataccctctcattactcccactcaacagcaggtgtctactctaatgcattgcaaaatatacacgagacctctcactgtcaatcctaaggaattctttccttggcctttatcttttttggaattgttgaaatttttccttaaataaaatctatgtctaggagccaaaaggcctcttttagaattagtcattagattaactccaacatcttactaaagtaagtttcttgcacttgagtaaataaattacc

SEQ ID NO: 364727 - DNA, 515 bp, Cannabis indica
aaaaagagtttttgacgttaaatttagtgatagtgtgatactaaatttaatgtatagtttggagatgccctaggtacttaatattttaatattaagagcatgaccgaccctggaaaaaaaaatgggccaaaaactactttaataaaatttttaaaaaatagacccttttatatgtattattttttgtagtgtaatttttttaagaaaatacataggtcatatgtgtgttgggttttgggcttgagtttgagtgggccctaaacacggacctaacctgccttagcccagagcggggcctatttaagagcacacaaatatttttttttttctatttttagttacatttaaattttaaacaatgtaaaattatagaatattaatgataaatactttataattgttgtacttaaatatttagatttatacaaatgttttaaatatagggtgtttctgtaatgtactgatgcattttttatttgtttcaacatttaggaaaaaaattagtccaatttttt

SEQ ID NO: 364728 - DNA, 820 bp, Cannabis indica
ttgggtcgttcaaaacttcgatcagtaccagatttaacttatcaagttcattttacgaggccaattttgccagtgcatcgacatttgagttatgttgtcttggaattttttcaaccttaaaataatgaaacttgtccaatttctttcaaatcttctctaagtatttagccatttttaattctttcgcctggttttcacctagaacttgattcacaatgaattgtgagccactatagcatataaaattctgaacttttaaggctttggctatcctcaagccagccaacaaagcttcatattctgctttgttgtttgaagtatcaaattggaatcttaatgcatagtggaatttgtagttatcaggcgacatcattatcgctcctgccccagagccattcacattcaaggctccatccacatataatttccaagtttctatatcgtgcttgacgagtggatcttcttttgagattatcccttcaattagggaatcagccaaagcttggcctttggttgatgttcttcggtggtaggttacatcaaattgtcccaactcgattgacaattttatcaatcttcttaatgttggatatattttaccaggatctagatttactaacaagtatgtttcatttacatcctaatatgaattctaaaacaacgaaatacacacataagagtttaagaaaccttacattgggtgaaggggaatataatgactccttccgtgcccttgattcctttctgtagcagagcattatcaatatctgaacatggatctctttctctccttcctttgatgctgaatctccttcttgtt

SEQ ID NO: 364729 - DNA, 1553 bp, Cannabis indica
gataagtagaagagtatgaacatcatggactaaaagaccaaaagaggatgacaaagtaatttggctttgcacggcttgaacacaaactaaactatcagtttccaaaatcacttgtccccacgaatgacggtcaatccagcttaaagcttctttgatgcctacaatttcagctatttcaagttgcacccgccccatctatcccatcgtgtaagcttctaccaaattaccgttggaatctcgagccacacaaccaaaaccaaaccggccttctcgctcaaacaaagcgccatcaacattaactttgatcttatttatagcaggtgcagtccaacgctcaagcacacagtccccatcaatcaacggagacaaagaaagaccctttcttttttgagcggatttgtattgatcaagcagagttcttgctgaagcaaccacattcgcagcaatacggctcctttgttgccaaacaaagtcgttacgggcacaccaaattgaccagctaacaaccgtggcttcctccatctctccctgcctaccacggctgaacaaaaccagcagccaattgcagaatgtgtcgttcaaagtgctgcccacgtccaccatagttttatgccagcacgcacgagcaaaatcacaccccaccaaagcatggtagatcgtttcatctgaagcattacacaaaggacatatagaattaacaagaacatgccttttcttcagctgaaaataagtaggaagcgaacccgaagctaccctccatagaaaattactggcttttggtggaaccttcagattccacaactccttccaaaaacccgaaacaccatcttaggccaggcccctttcatttcttgcaaatatttataagcactcttgaccaagtactggccgaggttttcatatttctaactccaacagtcatttgtagcaattgcacttagttgaatagatagaatcaactcctgatctcggacgttaaagagatctctaataatctcctcgtcccaagcacggccgtttgtcttaaaaaggctgctaacatactaattttgaagagcatgatgagttgaagagacaaaattatttgtgcggtgaggaaaccaagggtcccttaatacagagatttgatcacatgtaccaatggttcgagtgacacctgcttgtaacagccccttagcttcaaaaatactcctccatatgaagcttgggttatctcccaactcagccgaaaagaaagaaccatgagcataatatcttgctttgaaaactttactcaccaaggagcgatcattgactagcaaacgccaacattgctttccaagaagagccaagttaaaatctcgcaagcttcggaagccaaggcctccagcatgtttatgacggctcaaccggtcccaactcatccaactaacacctgttttccgaatagaatcagtttgccaccaaaaatttgccataagacactctaaattcttacaagtatccaaaggtaacaaaaaacactcatagcatagctgggaattgattgcgcaaccgacttcagcaacactttc

SEQ ID NO: 364730 - DNA, 672 bp, Cannabis indica
atgttgtaactaaaagtttcgtggcttgaagtattaatcacaaaaatcataatttgttatgactaaatgtgtttttagtcacaatacttgttgtgactaaaactaaattagtgacaacttatatctaaatactatgtttaagtcacaagtaatattttgttatgactaaaagtcacatttagtcacaaaaaatttatgttgtgactaaaaggttatcactaaaagtgactttttttgtagtgtcatatactgaccacgatatctcacttgggttttattgtacatataaaatacttatatataatcacatccaaagggcacaccaatatagctgcaatagctaaaaaaaagaatccaagatcaaaatctcaaaccctatttcaaaaattttaaaaaaatacattacctaattaaaaagaaaataaacatacatatattgcacttaaaatctcctaattaaataaaaaataatttatacgttcattgcacgtgaaaaaccgagtttttgcaaataaataatatatacgaaaatataaaactgtatacgtctgcaaaagcataatgtaattctgttactgcagaaaccagttttgcaacgacaaaacagaacaggcagaatataaaaatatttgcaaaaaaataaaataacttgacataagagatttgtacgtg

SEQ ID NO: 364731 - DNA, 338 bp, Cannabis indica
attttatggtatcttatttcggttacttaatctctaagaagtattttacacttcagatactagactgctatgttgatgatttagtcttaaaagaaacttacaagtttcagactaatacaataagtcacaactagatatccctccaaacaataagaggttaaaagtattatttaaccagacatctactattgagtgggagctatctgagatataatcaaataaggaacgttaggagatactcaagaaagatttatgaaagtgatctatatattagatattaaggaactatatattagttatccttatatctaccccaactcattcaagaatttgagatg

SEQ ID NO: 364732 - DNA, 661 bp, Cannabis indica
aatttaggtaaaattataaagctaatgacaagaaaaaaattggagcaaatagaaaatttgtatttttttctctttttttaacattcccaacggtttaaaattgtcgcctataatagggtataggcgacggttttaaaaccgtcgcctaatgtataaaggcacagttttaaaccgtcgcctattttgcccgttttacgacggtcgtataggcgacggttatagaaactgacaggaatactttaaacgactgtttaaaaatgtcaagaaaaactatttttgtagtagtgaattttgattaccttggagataccaaagaggcatatcttaattactgtgtgagtcaagcagccaaagaaagccttaaggcaaccgatttcacagccccgaccgaccagagcaatgagacctcagccccttccgtctagaatatcgaacctccagccccttctaaccaagctgatccatacaaggagcccgggacccttgcagtatgaaacatttttctttttcttttttatatctgtttagcccatgggcctttattagagacaaaataatcaaccaagcggtacgaaaaacctacatccaaccccgacattaagagacagtaaaagtttttaccttcgaaatcgaatacagtgatagaggcttcaatttatgc

SEQ ID NO: 364733 - DNA, 1054 bp, Cannabis indica
ctccaatacctacttcacgacttccatatacctcaagaacaacctgcttttatataatgcgacaatcaatctgctatacacatagcaaataatcccacattccacgaaagaaccaaacatataaagctggactaccatttcattcgagacaaaatcaagcgttctcagcagattaagtccagtcaacagcacactacagctggcagatgtcttcattaaaccacttgcttcaaccatcttaacttcctatattagaaaaatgtatgtacatggtttgtacagtccatcttggggggggggggggtattaagttctaatgtctattgttttacttctactattttcactagttgtataaccggtagtcatgccgttattttagttggtttgtgtcagtttgttattagtcgattagtaattagttgactggttgatagacttgatatgtagtccctgttttcttgtactcgaaactcaattgacttaatgcaataagatgaaattcattcattctctcttctgcaatatttttttataaataataatgaaatatacatttgacctactaaattttaaatatatttttatcatatgtattagagttctttttattttttaaaaaatatgtattatatttttaaagtacaatttcttatattaaaatagtaattgtatatataattttttaaatatatataaatatgtgtggattgaattggatcagttcttttaaatatattatataaatttatatttttaccctaaaatagtaatatattatatatataatgttgaattaacatcctaaatatgaattctctaaaacaatgatttaaacacataagggtttaagaaaaccttacattgattgcagctgaatataatgactcctcccattcaagatctctcgcccttgattcctttctgtagcagagcattatcaagatctgaacctggatctctttctctccttcgggtttggttaccatcgtcttactcactatgattgagtacttgacttgctatgtgtgggcatgatgttggaaattatttt

SEQ ID NO: 364734 - DNA, 750 bp, Cannabis indica
aaagtttttaagtacttttattatgacctattaaattaatgatttgtgtcgtttgttgcagtttaaaagaaacatatcatcctcttacactaacaaaaaaatcaatgaaatacgtgacgaatgggcaaagtatgtcatgcagatgatggcagcaggcaaatgactattaacatagagtatgatgaccaatgatcgctcatagacgatccccatgtgatccaagaagacgattggtaggtttgacatcgatcgcagttactattgtcttccttttttggtttttaggaagtgatctccagcaatttgactaaagtcccaagtgactacctagagacttatagtatacatatttttagatgttctgaagatattctacaaaagattacaaaatgtaaaaacttacttggatttgcttcttttgtattgcattactaaactttgatggcatattatggttttcatgaagctttaattcttttgaagagtgttaaatgtatgaattttcttataaaaatattattattgttattatgttttttcatcattgtgtattggaaatctaaataataaaaatacaagaggagaattgaattaatatttctattttatactttacttcatattgtctgacggtttataactgtcattttaagtagtgtattttgttagttatagtctaactaaagtcttttccaacatttcttaactgtcatttaaagtaactttttgccacagttataaaccgtcatt

SEQ ID NO: 364735 - DNA, 768 bp, Cannabis indica
atttagatctcaaacacaagaaacacacagctgaactaccttcagcaaagaatctgaactcccttcagatcaagcagatttgaacttcatcttcaacctcaggaagatctctcaaacttcaatctgcacaaacaagaacaaaaacagaaaatatgttgccctagcagagcaagaatcaagaagaagattctaacagaagagagttagttagtacaacggttttgatcgaatttatatactaaagataataaaccagactaactaaccaaccagcaaagtacagctggcacaccctaacaaactagcagaaagctgacatggcactaaaatgatattagtgaaaacagatgcaactaactccagaacagatgttagagacaacaaatactgaacaaaagcaatatctaatttgccacacaaaacataacacttacagatgtcaaaaatgcttttcttattgggggtctaaaagaagtgcttatgagtcatccacttggttttgaaaaaggttttggttttggaagagtttgcaaacttaaaataaagtccttatgtgggcttaagcaatctcttagagcctggtttgagctctttggtggagtgttgaggctccatggatgtacttagagtcatgcagatcatgtcatgttttataaacattcaaaggaagggaaggtagttgtattatcgtgtatgtggatgattatgttaactggggatgatcatggtgaacttgatgagttaaaaaagaaacttgctcaagagttt

SEQ ID NO: 364736 - DNA, 865 bp, Cannabis indica
cctacaccgcagactggacaaccttattaccctaccccgccgactctttaatctcgtgataatcccgacggttcaagacttagctcgaatgcagatgaatttatggaatttactgatttgaacaatgataattaagttttttaattttgtaaattttatgttttaaagtttatttgaagacaatttcctaattttatttaagataaaagtttatattgttatggacaaattaatgttaatgtttgatttcttaaatttaaattctaattaataatatatttataaaataattattatatataattataattatttttattatataaatattaaaagttataattttttttatataaaaaataccggcaaaatactaaatgtggtccgccggtattaatgtgtcagcgtgtaaaagtgcagacactaataccggcgaaccccaccgatattaatccgccgttattaatattattaccggcaaagttcattttggtcgctaatagtcattaataatgaccaattaataccgacgataattaccggcgaattccgccggtaataattaataccggcggtttggataattaataccggcggatgtccccgccagtactatgggaaattcttgtagtgtaaaaactatctctattaggcactttatatcttaagctacaagagcaattccagtatctccaaccatgctttctaaatattttctagttaaaatagagagtgagttctaaaaaaaagctccaacccatgtattttatgatattagaatgtattttacgtgtgtatatatatcggtaaaaattttaatttttagtttttctgattcaatcgatgaatttttttttttaatttt

SEQ ID NO: 364737 - DNA, 814 bp, Cannabis indica
atccagattgacgtcatatgttaacatggggcgtggatcatgaattgctctataaacagtgtaaccactaaatctcatctaattgaccgacttcaacttgcgtttcgaagctaattcaatgctctatcaaatcatttctcacactctagacctaattctaaagctattgtcataaaaattcaccaataaaagagttacaaaaataagctctgtgttacctgcagcgagacctgttgggatcccaaaaatggctatcactaccaataactaattttcaccattagatagtcatcaaccgtcaaaaatatcttatttttatttttttttcctatttttgtgggcctccttgacctataaaaggagagctcccttagctcactattcagaaacctaccaacaaggtcgaagcttctcttcttagattttgttgttagtttctatatcactcataaaatatgcaacaacaagattcaattccatagataaacatattacatataattataagtgtataaccatagatctaaagaatacctttgttgattcaaagagaagaacttaaatagcggaagcgtaccttaatccatagataatgatgatcttaatccatattgtagagataatctttgtggtgattttgagtaatgatcttccaagaaaacaagacttatgattttctaattttatctcttgatgggggaagatgagaatagaaattgtctcttgtttcttggggaccactaccaatttataacctcatagctaggttattaattttaagtatttctaatttagccccttaataaattagaaa

SEQ ID NO: 364738 - DNA, 552 bp, Cannabis indica
tgcagcctccctaaggagggccaatcaaccaggtccccacaccaataaatccttctgtgcaagcacagttggaccaactcaaggacatgatccagggcatagctggcccaaagccttcagaccttaaacttgatcggtcaaggggatcaccattctcggcatacataaatgccttgcccttctcaaaattcaaaatgtcggtatggaagatgtatactggacaagaagacccgctgactcacatcaaatacttcgagatgcagctcgacctctagaaggttactggtgatttgagttatcgcatattcccagccacactatcagagatagcccaacactggtactttaaactcatcccgtggagattcaactcgtggcctgagttctcacgagaattctatatacaattctcgtcctcgagacttgtaccatcgtagttggaagaccttatcgaagtcaaacagcaacaaggggatcctctaaaggattatgtttagagatttatggttgaggctaccaaagtcaaaggccttactgaagaaggccgatata

SEQ ID NO: 364739 - DNA, 717 bp, Cannabis indica
ttttattgtaacttattagtttactaaatagaccaagtaaaataaatatttttacaaaagaaaaatataaaagtaacgtaaaagtatttaaaataacaaattaatttaatataatctaaaaataaatacataagtttcaaagtaacaaaaaggtatataaaataattgataaataaaaatagtagtttattatattatatgacaaactcattagtttcgaaaataaaatttaaagttatccaaatgtattttaaataataagatagcacaataacttaaaaatagttattgattattaagatgttaacaaataagattttagaggtaaccaaattatatcttaaattatataatttaaaaaagaagtttttttatgtaaaagtaactaattaattttttatcagcatcataagttactaaaaggttacttttgaaaacccaggaaaataataaataaaaaaatagattttgagattaatttcgtttcaggcatattattttagaattaaggtatttttataatgacgtgacatgttattattgtaattgagattggggtttcaacatcctcttgcagcatttccgtaatctgaacccagacatgtgaatcattatagtctttgcagtgaactttgattggacccttatgcttgtacaaataccctcgggccacaacattattgatattagtcaaagcagagatatacttgctgatca

SEQ ID NO: 364740 - DNA, 650 bp, Cannabis indica
ctcagtcgctgcctctctcctttcttctctctctctctgaccaccgattagtggtacctccggcgactaaatcccttctcgaccacttccatttgccttctctacaagttttgccgccaccaccaccatcaccttagtttacagcaactgaagtttacatcaactgaagaggatcaacaacagtgtgttatgccttcaaaaaacaacagtttattcctattaaccaaaaccacaaaggttcgaccaattccatctctatttgccgatcaacctaacttgatatatatatttttttacataattttggaagtttgatctgtaattttcatattgtatatataattatgaaagaaagagaagaagaattttgtaaaatctctgcttttattcttaattaatacagaaatttattaaagcatgattcttccaaattctataatatgaatctaaaagtgatattatatgttcttacgaattaatttatattcggtaaatggtttagaaaaatataaataataattaattttcttataaggtcgaaactggtttcacagattttaaaggttttataatgtgatgacttcattttatgatttttttgttttaagtttttttatattatttttttttttctaaatttgaaactggtt

SEQ ID NO: 364741 - DNA, 366 bp, Cannabis indica
tatatatatatattgatatttaaaaatgaaattaaatagaaaaaaaataatatattaatgaaaagcccccttatcaactgtatatatatatatatatagttattttttttcattaacaaaaattattaacttagtatttttaacataccacagccatatattaattttttattagtaaaggaaatattttattcaaacaaaacctaaattgtgcttaagctcaaacaaaccttttaataatccatataacttttaaattaaaaaaatgatataattaatgatagaataaatagatgagtttttaagttaatttatacacatatgtcagttatatatatatatatgggtgattactcaatagttaca

SEQ ID NO: 364742 - DNA, 554 bp, Cannabis indica
ggggggtaaatgttgcccttcattttgcccaaaatacgtggacctggataaggatgacacgtggagctgagaggaccagctattaaaaaaaaattaactaagtcttagacaatagaggagtgtctctaagaaggtatctcttgaaggagacatgagaaggatctctacgctcccggaggccaaggacatattaaggtagttcccggaggtactggactctattgaacaatcacctcgcatttaataccgcatgggggaagacgtattgaaactaccataaacgatatgacagatggcgtaaccccccctttctcagctattgtgctatgattaatgaggctagtaacggctactttatgagaaatcacatcaatccagaagggataaaagattatatccacataacccttaagatacctacggcatagatcatgtatttcctattttgtatctgctgggaatatgtgcccctattaagcctgcacagaaagacaagtgattcattcctagggatcccagaaaaacactataaataccccacaaacgcactgagg

SEQ ID NO: 364743 - DNA, 822 bp, Cannabis indica
ttgttattataatagttttttttcattaattatagttatttattttcaatgtgatcgaacatgcattatttagaggtttgacatattcttttgaataaatttaatgtttgtgtgatatgattttaatttattgtgtattttatttgaaactagtaaacattctgcgcttcgcgacgagtgtataaaatattttaaattatatataaaaaataaattatatattttaataaataataattacttagtaaaattatattaaaattttaactttattaatataaaaaatttacgatgtaaatacttaaaatatttcatttattaataaatatcagaatttgaaaaataatagcataaatcttcaaatttctaaatttaacagttttattggtacctataatttaatggtcttgaacgaagaccaagccaaagaataagaagaagagagatttgagtttggatttgattcattgatggtataatttttattctgatggatgtgttaagatttgggttcgacttttattgtgtgtgtttttaatgttttgagttttagttgttttactggggttctactatttgacctttgtgtttatgagattctgtttttttgtattttattttattttattttctataaattttgtagaactttgaaattttgattgttgtttctattgtattatttggggatttcattagttttaattttttctagtacgggtaaagttaaagtattaccttttttgttttctatttgattgtaaaaaatattaaattagaattgtttatgaaatagagaatttttgaatatatgaaaaatag

SEQ ID NO: 364744 - DNA, 1203 bp, Cannabis indica
atttttgatacttagactgaaaccacctcaaagcactctaaacttttgtcttccttttttttttccttcttctatagttaatcacttgtttcctaaggagccaaggcaaccatcataattaatataagttctaagagccaaggcaaccatcataattactacaagttttaacatcaatatactctcgtaaccatggtgagcatcatcctctcataaatatatatatatatatatacttatccttcattatatcgacatcaccactaccactattttatgttcacgttttactcatgccagattttatttagaaaccaaggtaataaatataaatttaagttttaagtaaaataattattggcttaaggatcgatttcgcaatcaagctaattttttttactattcgaggtaagaaaattaagtaaaaaaaataattttttgttatacattaacattcataagaaaaaccgaaaattagtaaaaaaaaagttaaaaaatagtatatgagataattccccttacttttatgttattaaaaattaatttttttaattaaaaaacttgttacaaatactaaaatatatataattaaaaaatttacataaactttaagatcaacccactactataattactataattaagactgacacaagactaaaattaaaatgagttctaaatttatagaaagtatcaagactctgactatcaacccactacacaaagtaatcactatccattaaaataaaatattagtcataataaaaattggaaaatagaatgataatatttgacaaaattattatcatcatcgaaaaagtcttcactactaaaagtcaccgtagtgaaatttcgaagttatcaccgaagttggacattagagttgtcaccgaagttgggtcttagaatttgacaaagagaaatcaataatatttatcaactacttaaaaatatgacatcgaaaaactagttatgtagattaaccaaattaaaaactaaatcttaagatgagttacgtataataacaaaagcaataatttaataaaaaaatcggtttcatatcacaatcaactaaaaagtgaacaaacatacatatataatgaaaaagatatatcaattacaaaaatcagttacttaaaaaaaaaaattgcatactcttgatctcagatttggccaaccgatagtagagtcgtaaatattact

SEQ ID NO: 364745 - DNA, 1009 bp, Cannabis indica
caacctacgtatattgatatcgctatcaatgtaatctaacaggcttaataaacatgcacactaaacatgtaatcacagatgcatatcattatactaattttatctcgttttggaatttaggtgtgccggtcaacttgagtggaacaactgctcgatgatttacaggcccctgagtcacaatattcgcaaaactgatgagtgacatgctaaatcatttttcggggacttaaaatcaaaactgaaaattttcatatcgatggataatatggaaataccctaaatatcgtaaaaacgtgaaaatttagggtgccctaaaataccccaattggcagatcggttcccaaccgaaaaaccagttctatggggtctgcctagggatgaaccaaaattccggttcctacaggtcatactgaacctacaggaatccccaaaaaccttctaaacaactaaattcgaccccaaatcaacccaaactttctggagtacctaataaggccacaataagtaaaaatcatgcaataaaaccaagcaatatactcagaaactataaacaccattaaagagcaaagtttaagagctcaaaccatatcaaacttcacaaccaacctctaactcaacttaatctagcataaacaacctcaaaatcacttctaacaacagaaataacaacaattcaaacttacagtaccttaactccaaaaatcatgcatatttagcttggattgaatcactaagaccttgctagaatacccataattgagctcaagaaacccaacttgctcttgatttcttgagagatcgagagagagagggttgaagaaagagaaagagtgttttttatgtttatttctaattttggttaaatgaaataaataaatacttatcaaatatcaaacctatagaagaaatcagattaatctaacttaattcattccactaacgggcaaaagaaactatatggtaaaagaccattttgcccttgcttagactgaaaagcattcatgccacc

SEQ ID NO: 364746 - DNA, 777 bp, Cannabis indica
aaatccatctatggacttaagcaagcttctcgtcaatggtatcacaaatttcatcaagtggttctcttatttggtattgagatgaatgttgttgatgattgtgtgtatcataagtttaatgggagtaagtgtatatttttggttctatatgtcgatgacttattgcttgccactaatgatataggcttattgcacgaaaccaagagatttctatcgaagcattttgagatgaaagatcttggtgacgcctcctttgttttaggaattcaaatacatcgagaccgttctcggggtattcttggattatcacaaaagagctatatcgataaagtactcaaacggtttggcatgcaagattgtagaccaggtgatacccctgtcgttaaaggagacaaattttgtcttaaacaatgccctaaaggaagccttgaaattcaagaaatgcaaaagattccctacgcttcggctgttgggagtctaatgtatgctcaagtttgtacgcgtccggatatagcgtacattgttggagtgttaggcagatacttaagcaatccaggaattgatcactggaaagcagccaaaaaggttatgagatatttgaagagaacaagagagtacatgctcacatataggaggtcagatcactttgagatcattggatattcaaactctgactttgtgagatgccaagacagtaggagatccactttgggctacatatctatgttaggtggtggacaggggcgaacccacattgtagcgaggggggggcagtcg

SEQ ID NO: 364747 - DNA, 517 bp, Cannabis indica
ctgacatgtccagctcttaacagttcaaccgaagttagttaataactaacacaataactaacaactaactgatacaagatgaaagaattataactgaaagtaactaactttcaaataacagtggaggtaaaaactggtttagttttgagtggattatttaccacaactcaaatattaataaaatacatttaaggtttttaaatctttaggaaattctgtagtgggtgctgttttttttagtagaagtgtattttcggtagatagaaaattataatataattttttatatgatgtagttatactaaatatttttgaaaactttaaaatatgatagtattaaatttaattatgagagacttgatttttaattatagcaataataatattaaactttgtgtagaactagacacccctaaatatatattttttttttttatttaagcgtttatatattacaacatgttttacctgggacttgaacccaggacctccaacactcacacacccacctatggcc

SEQ ID NO: 364748 - DNA, 571 bp, Cannabis indica
aattattacctttacaacattgcagtcatttgttcgggaacttggtggccatgtatagggtctaaacgaataacttatctcaaacatgcatggctgccaattcacaacagtttggcactcgccgagactctcccttaacatcacgacaggttaatgaagtgagcaaacccattgagaaccagcttagtcaacaaatagctcaattaacctccgtggtccaacaacttgttttaagcaaacatgtaaagccatgtggaatatgtcaagttgtggggcatactactgatacttgtcctactctctatgaagggtcaacaaaagatgttaatgttattggaggtttcccaggtcaaccaaggcagcagtataatccatattcgaacacatataatgagagattgcgtgatcatccaaatatgtccagcaacctgcaaaacctgcttttaattatcaacagtggacatctgccagacagaatcaagcaccacaagctgccccaccagcacctcccaagcctaccactgaagatcttattaatgccatgttggttgattctcaacaattcaaacaa

SEQ ID NO: 364749 - DNA, 766 bp, Cannabis indica
attaatcacgatttccataaacctcgttgattagcaacgagctgcacaatatgtttaaaattcacgtaatacgcctatgctagttagggtgttacactaatgctttgtaaatcatacatgagacctctcacttttgatccttaaggaatgcttttaatgccttttatcttttctagaatagttgaaactattccttagataaaaaaaatctatatctaggagtcaaaagactttctatagagttagccattggaaaaatgctccaggatcttactaaagtacgttacttaccctagagtaagtaaattaccaggtataccacacgccacaggcttatataatctcaaaccaaatatactaggatcgagaagttttgttaagtccattgaataaacttattatcaaaatttctcttcttgtccttgtaatagaaattttttggttactccatatgaatggttttaaccatatttctcatgactttacttcttagttacttattctgactatccattacatatttaagctacaattagatttttttcacaagtgtattccaagtcataactgggtgaccctcctacaatgacaacgtaccatgtcttttatctatgaacattagttgtattgactattgcaatttattttaccagggatctagatttactaacaagtatgtttttaatatcctaaacatgaacttctaaaacgatataaaataaacacataaaaggtaatgagaaaccttacattggttgcagtggaa

SEQ ID NO: 364750 - DNA, 945 bp, Cannabis indica
gtgcggaaatctaattttgacagtgtcttcatcgttgaaggttatggtcggctctcctgctcgtggaactttagacttcctttcttccacggccaggataacttcttcttgctcgtgctgcactgttcgggcatacctctcccgagctttgcccgaatctccagcaatgtgagggcctccaacaatgacttgcagatgtccatctactggtggaggtagcaaatcttggttgttgtcgttcctctgaccttggtcggtcttaacatacttttgcaggtgtggattgtttttccttattaggaattcaatttcccgcttcaagttgtagcattcattagtgtcgtggccgtagtctccgtggaaccgacaaaactttgtcatgtcccttttgttggcatctttcttcatgggcccgagcttcttatacggggccagcgactgagttgccatgtatacactttctatatcttcagtcagaatagtgaatgcagtgtatttggcatgattctcccggggagcttattcatatttgcgagtgaactttcctttcttcccatttccttgcttgtggttgttactggaacgcttaccacttgagcttgaattatttgggtaatggggaagttgggcagattttccagtggaaggagcctttcacttgcatggcttttgctcaccttccgctcgttgaattgcttcttcgaccttgatgaagccttcgactcggtcaaggaaatcactcattgagtctaccgacccgttcttctttatatctttacagagttcaccgaggactttgatgccccccagtattggggatgactttccatcctcagttactcgtgaaactttggtcgccttcgtcatgaatctactcatgtatgccgggagaggctcgcctggtcgttgcttaacttcgaccaagtctcccaaatgcaatgggag

SEQ ID NO: 364751 - DNA, 793 bp, Cannabis indica
attatgatcgagtaaaaaatacagtaattaccattgttaagaatgagttattactctcttttctgctgatagatttcatacttatcagttgcttaattaagcaacgatagtgacataagaaactcattggtaatgaggggtatggatgctttataaagcatcgaggttagtttgtcttataaggcaaataaattaatcattattatttaactacactttgaataattgcttattctatatattgccttgtaagttgtacattgtttaaatactatgctttatgtaatatttgtgttttacttgcttttcttgctgagttttatgactcacgggtgctctgtggtgcatgtaaagggaaggaaaaactggaccagccatgaatcagagatctcccgacaatgtacatatcaaccgccatgttttgtctttcaatggataggatccttcttttgttatattttgaaaatgtgacaacattttgtaataagctattttgtagcattttgtaaaaaaaaaaaattataattaaggggatcctcgaatccagtggtattttgaattgaaagttaagttatgatttaaataattttactaagagtttttattaaactatacttttcttaaactgttagtttattattataaacttattaataaaagcacacacgtggtgcccttacgattcaggacgttacaatatggtatcagaacaaccaaggtttaaagatcttgaagactggtcagatatgtacattggctgtgaagactcattcgactcatggtatagtaagtg

SEQ ID NO: 364752 - DNA, 687 bp, Cannabis indica
aagaggtagtggcactgaagattttttcctcctatcctctaagtcattaaggacattacaaccgcgtttcctctttcttgaagagtcagaaagctcattttcagcttcagaagcttcagaagcttcggtagcgaattcacactcggtgggaatcctagtaggatctggtgggtcctcacccccaccatcacctccatggtatctagcaaattcacgtcttgcattgatggtgtcttttgatttgtcattatccaaaagtgtgccaagaatactgtcacacacattcttctcaacgtgcatgacatctatgttgtgtttcaaatcatttgaactccaatattcaagttcataaaatatactttttttcctccaattacttgtatccccacttcttttccttctcacaccaccaaaagatatgtgttttccaggaagtttacttggtagagcatttacttgttctaatatctcctcacaagtaaatcttcgaggaggacatctcttctcaattgttccatcaaaggtgcgatcatatctcattcgatgattagacggcataaacctcctatggccaacataagaggtcttaccgagcactctcatggaacaagtgtcttcgttacatgtagggcaagccttgtaaccttgaccactccacccagataaactactacgagcaggaaaatc

SEQ ID NO: 364753 - DNA, 507 bp, Cannabis indica
ataaagtgaaccaaaacatacacaaatgaatgaaaaatacttctgttactttgttgatattgaataatctggattacattgaaatggagttttatttagggcataaaacccaacactatcaactttgacttttctgtggttcgcttctcttcgatttcatcaagtgattcggctaggagtacctgattggtatcttggttctacgttaatctccagtgggatggtggcttgaattctacaagcagcataacttcatatccatatgccatagaaatggagtatgtctggttgccattttctcagttgtccgatatgaccatagaacttcaggaagttcttccggccaatttcctttggcatctttgagttttttcttcagtgtatccttcgaggtcttgttgactgcttaaacttcaccattcgcttgaggatgtgcaactgcggagaaacttttgatgatacatggttcgcacaaaagtcagtgaaggattggctgtcgaactgctt

SEQ ID NO: 364754 - DNA, 759 bp, Cannabis indica
ttaatagaaaagattacattaaaattgagttttatttagggcacaaagcccaattattacacctactaagagatatagtagagagaggtaaagtgatggtcttgaagatcacgttgaaacataacttggcagatccattcataaagatactactaataaaatctttaatgggtcatataatatgggattaagggagattcccaatttacttttagggcaagtgggagattattaggatttatgccgtgaaaatcctttaaagacatttctgttaattaataaagacttgaacattttgatttatgtatgaatgtcaaactatttatatttattattgaataatttttattaaacattgaaaactttcttattcaaaactttcttattcatatatgaggttgtgacttgtagctatataaagaactaagacgacttagctatgaataaaatagtcagccacacattaaagtttgggaatctttgatcaatggttgctagtacagttcactgatacctattcttcagtgcaagtaatttcaatttgaattatgtatgtagtatgacatcaaagtgaaggtgttgtatataatagagattatatatgacaaggactgatatgaatgaatttgtttttatctaatatgtcatttactataaagacctaattcatatcataatgatgatcaatattagatcaaccaaaatcttgagagatcttgaactctttttcatgtttttagtttctttgattcactcgtt

SEQ ID NO: 364755 - DNA, 631 bp, Cannabis indica
accggggtcaggtcttgggtcccagtcccaatcttgggtctcgattctacttctaatttcgggtttgggtcaccaatctaggtttgggacttgggtacaagtctgaatctccaatcccggtctggaatctacgttcgggtctacctccaagtctctgtctgggttcgagtttgtgtccagagtcctgatctgagttttgatttgggtccatctcccggtctgggtctgggtctgggtccttgttaagattccagttccaggaccgagaccgagtccttgtcccctgatcctgttcttgggtgtcggttcacaaggtacggtccagttctgggtccgggtttagcttctagtccgagttagggtttaagtccaggtatgggtccgagatcaaaacatcgactatgggtcaggtccaagaaacgggtccagatcaggatcccagtctcgggtcccaatctagttccacttcgggtctcaggtgctggtccgggtcctagttcagggtccgggtctagggtcacgtctttggtctcgatgccagttctgaagcccaggtcccaggtccaagtccccatctaggtctgagtcctaggttacggttggggtgcaagtcctagtccgattttgggtt

SEQ ID NO: 364756 - DNA, 965 bp, Cannabis indica
cggtagatccaagtggtaggcccctgcctccaagagaagacccaccattggcgattcctactgaaggaaggacctaggggcgatagccccctagaacaattactaggtttcttcttcgattttacactgtagagataggcccaggagttggcaagccctatctggacttaggagaagatctcaagttagccagatttagagaagttattggccatgtaggcctaaccaaagaaccacgcgctgctgattgcgatgttttttgtcagcagagacgcaaattcctgagatgcatggatgaccaggattacatccttcgatcccacaaagcagagttagatcactgcaaccaagaggctagcgatctgataagacaattcaaccagagaaccgataaaagaggttaggatctcctcagagatccacttcaaggaagacttattgatatattagggagggtctattaacatggtgatcaacccaattcatcaggaaccaggacagatcttcccttgctagagggagggcagacctttcctcaaaggtcaaacgacaaaaacaactagattctaacaaccagcggcatgaggggccagtcagggatctctggctcagtaacaccccccattgtacaaccaacggccggcctgccatcagcaagagcaccctcggctggccagagtacagcacttcctccccaagaggagcgaggtgcccagaggtcaatcttcaaccgataaggaccgagagtgggtggaaacatccataacggtgatcaagaagtcaaaccgatcactttagacatctagatccaccaaactctaacaattggtgtgatctacccctgtcaacacacaaccaacatcagtcgactacggagtcacgggcagctagaccctaccctttgcaggtcaggccgaccatggaagcatcacgtgttgggttttgtgccctaaataaaacccttt

SEQ ID NO: 364757 - DNA, 606 bp, Cannabis indica
gaatatttgacttgagaaaaatggggatggtggtgtgatggtgtgtgtggtgtggtgtggtaaggtaattttctctttgatgttatggtggtggtgataatggtgtgatggtgggtatggtggttgtagtaattattgtggttatggtggcattggtggagtagttatggtggtgatggtggaggtaatatttagatgtcgaagaagaagaaaaaagggtcgatgagaagaagaagaagaaagggccgatgagaagaagaagaagaagaaaattattactagtttttttttttattaatttgttttagtgatattaaatttattttctaattttccatgtcaattaaatttgtgacgtaagataattgggtgactaggatcgaccacataatcatttaactgggcaaaatggacaggacaccaagtggcgtttggttggaggtaatgaaatggaatggaatcaaatggaaaggaaacaagttttattccattcatttgtttggttgtattgtaaagtattggaatagcattccaatggaatactctttccaccactttggtagaatgactattccattttaaaaaggaaggaaagaccattccaat

SEQ ID NO: 364758 - DNA, 976 bp, Cannabis indica
ctcgttacaatggatataagcagaaagattgcgtaataaatacataatacactggtcgtgggatttgtacagcttgtcatatctctacaatctgatccccaagttatagggatttctttgatgactcatgatgcaaaagctgaattcgctaagtgttggtcactctgcgcggattgctgatttctttgctttaagcatgcatacgaggcatcctgttcggactatattctctgagtagatactcggagtcaattccatgtgtcaccatcatgcgatgcgacgtcagtgtgcaaaaattgggataacatttgccccccaagtctgtacgggacttccaaagttgcgtgtagacttcatccgagctgcctttgcatttgaatgggtgtcccttcggttttcggctaataaatgctctgacaagtaatatttcaagatctggttttctctcaccacggttgacggctgcacttgattatttttgatttcccaaattcgcttttatggggggaacctaggcgtctgaggttcttttgaaatgattaccccttttcgttgtttgcctataaagaccagtgagcgtttgtacacaaacttattttcactaacctttcttgctaagtaagttcagagcgaaaagagaggtttttggcttcatgtttgctgaagtgccttcatcaaaactgcttgtttggcttggcattacctgaatccagacatctgatccttgagtaagttctcgatttcctttatgtttactttgcatgtttactttttgaatgcaccttcgactttgctgtagaagatatgtaggaaaccctaagtttagaaactctgcgattctccgttgtcatgggttcacgcgattgcaccgtccatagtgtttgctttctgaactgcataatgcctgtctttcatcttgcttattctaagcttcatgaatttttttgccctaactcgagaaaatttcaaacttcct

SEQ ID NO: 364759 - DNA, 650 bp, Cannabis indica
gatcatctatctaactatgacttgtatgttatagcttcatctggtgcaatgaatgaaaagtcagagttggatctctatttagataaccaagtgttacccaggactaatgaattctttgatatatgcaactattggaagataacaggatctaaatatcctgtgttgaacatgattgccagagacatatttgctgtgtcggttagcactattgctttagagtcctcattcagtacaagtggtagacacgtgagtccacatcgagcaagacttcatcctactactttggaggcattggtctgtactcaaagttggttggcaattgacaaacaaggtagaatcatttatttcttattatacaagtttatacaaacaatacaattgttttcatttttaaaatttataaattaaattataattttattattaacatattaattttttttgcaggagccgtacacagtaaattttgaagactagaagaactacatataaaaattttatagttaatttcatgtattttttagaggaaatttatttcatgtaatcatcatacaacattattattgatgattatattagtggaatttttaaaatttggtaaatttttaatttttcaataataaattatatttttatgtgataagaatttg

SEQ ID NO: 364760 - DNA, 489 bp, Cannabis indica
aaaaactcattaaatgctaaactggtagagtatatctataacttgttgactgtaaagtcttgagtgagacacagatgtacaaaatattaattcacgtattgacgagaaaaccatttcgtatatgaagatatgatcgcatggacgacgttattaacacaaaacgaggcaccaacctcgctatgtatgaagaaaagtaagagagacatgttaactattagaacaattattgtataatgtacattatacaaactaagcataacagttgaatgaacttgaacgacgagtagcaaggcatccatctcgctgtaagaaggcatactctttgtatcttcactaatcagcttcagacatctttcaatgagattcactgctccgtcgagtcagctctctcagatagaagctgacattcaaacaatgttgactactgaagttcatcttaccaagaattgcaattgtcagatggagagttatgtcttcaagcacagaaat

SEQ ID NO: 364761 - DNA, 804 bp, Cannabis indica
tcatcttattcgaaataagatggccccactgcctctgttgtcttgacacaactgaagaggtcaatacgtaccatttacgttcttaaacagaaagtcacagtaccttatcatagtgagagggtttaaaggaactcaccctgttatgacttggaagacactaaaatccattgttagtttaaacaagtaacggatagtcagagtaaggaagtaagaagtaaagccaagagaacaatggttaaaaccattcatatggattaaccaaaatttttctattacaagaacaagaaaggaatttttgtaaataagtctattcaatgggctcaacaaaacttactgttcctagtattattaaaggtttgagattatcgaaacctatggcttgtggtatgcttggttaattaattactctagtgccagcaacttactttagtaagttgctggagcattttttttgctaatggcaatttatagaagcttttcgacttatagatatagatttcatttatctaaggaaaagtttcaactattctagaaaagatataggccaaagaaagaattccttaggatcaacggtgagaggtctaagatacgctttgctatgcattagaccagacacatgctgttgagtgggagtaatgagttggtatcagattaatccagaaaaggaacattggaagacaatcaagtgaatcttaagatcaaaaagaggaactatatgttagtcaataagggttgtatttaatactcttagactgcaccaaatcaggtttctagacttgagttagtgctagaaagtctgctgat

SEQ ID NO: 364762 - DNA, 757 bp, Cannabis indica
ctcgattatgatcgagggaaagaaatggtcattaccattagtgagaatgaataaagatatggtcattaccgttaatgaaatgagtaattactcccttgaaagtgtaggtaggtttcttacttatcgggtgctttattaggcaacgatagtgacatatgtagctcgtggatgaagagtgatgaggatgttttatgaagcactaaactaggattgtcttataagataagtaattggctatgtgattattgagtgaatatctgtttattgtaatgatgaagttgttgactatgagttgctatgattttcttataatgcataatatatgtgtttatatagacgttaaattatatatgcatactgaatatgtaatgaatcacgagtatgtatattatgttgtgatgtgaatacttgcattttcaaagcttttgatctagtaacttttcttgttaagtctttgtgactcatgggtgtttcatggtgcaggtcagaaggataggaactgtgttcggccatgagtcagaggactccgagcgatgtacatatcagctgtggtgacttggctttcgggaagcaggatcaaccttttggctatatttggaaatgtaactttacttttgtaatagtagttttgagacttattgtaaaagaatttataaacaggggattcccgtattatggtggtattttgtacaaaagttttattttaatttaatcaaaaagtttttaattaaacaacacatttcttaaactaatagat

SEQ ID NO: 364763 - DNA, 487 bp, Cannabis indica
tttattttttttttttgattttcaatctcttgaaacacttgttcagtgggagccatcactatctatttataggtaaccaataggtttaggttagtaataattttgcattaaaataatgaaaatattattggaaaaagcctctgcaagtggccggccatagagttaataggacccacttggtattttgcaattttgacaattttcatttccatttgctcaaaaacgccaattttccaattctaaccatttaaatgcctaaactaattatttaataactaaaataaattattaaataatattttcaattaatatattattaattagacatttaaagtctcttaattcataaataaaacctagaatctcttttcttcacaattttgcccttgcgtagtgaaaattcataaactagacatagtctaatcctagaattataattgattaatcaaaatcaattatctgagtcttacaagcagtatgatctcaa

SEQ ID NO: 364764 - DNA, 585 bp, Cannabis indica
atcaggaatttttttaagaaagttttgtacagctgggaaatcgtttttgtggttgtctctagggttgctatgttctataaataggacctagagagcagccaaacgattttatctcttctagtctcatattttcatatctttctttgtgagaagagtgtttcatttgtaaaaacctagagtgttcaactaggttttggttttcttattatgatctcatactattcatagaataggttgaagagaagctttgaacaagtgtgggtcttcgggagaagacttttccaagtctcatttcgggaggaagtgagcatatatcttcgggagaagatttgtttaagccttacttcgggaggaagtaagcacacatcaatagctgaagggagttcactacttggtgtgtttcagagatcagattagcaaggtggattacaaagggttgcggcaaatcactagagggagtctaaatttgtttaagtcaattgcttttgtaatctttgatactttactaattgatttcattctctgggcgtggccccgtggactagtagtgtttgaaagaacactgataccacgtacaaatctctt

SEQ ID NO: 364765 - DNA, 791 bp, Cannabis indica
taaataataataataataattgctcaagtgtattatattcaaagatgatgggttatggttatttcttaattattaagaaaaaaatatttacttttttgaatattattattagacatcagtggtatctaatatattctataggtgatgtctcacaattagttatttagcgatacttcttaaaacctattttcgtaaattatataaaaattgatacttaattacactaataataatatgatactgaatagattaaaagacactaataatatttttttagcaattctcttatttttaattattaatttggatatattattagttggacattctctatgaagtttgtggtgccccaccttaaaccaataataccctttttccattttccaatatagactatagagcactttcatgcttgccatacatgtttgaaagagaggaatgacatattgtactatcaatttcaaaagcttatcaactaattaattacattgctatttacttaattttggatggtagccaaaataacacaaactagcaattcataatattatttatttctatgtggggaatatttatgataagttaacatttttttatttttacaggtacgaaaccatcttacatttaacacgtaaattagttataatataatttcataattattgtattcatcagaattgttgcgaatttcgtataaatttttttaaaaataaaaataatttattgtgctaaaactataattttcataaaaattaatttgtcgaaattttttttctatagcggtattcgtt

SEQ ID NO: 364766 - DNA, 588 bp, Cannabis indica
cttctctctctctctctctctttctctttttttttttcttaagtaattttgtattctctatcatctaagctaaaaaagtttaatgataataataataaaaaaattgaagataaatatattttgtattctctaactccttttgttataatttattacatatagactactgcatcttcttaactttcatataatttttttaaatttctttaaataataacatgttgtcaaacattataggcctaagggcatctgcagtggtcgtcaacaaaattagttgcccacatgacacacttgtaaaatttaaccaattattttttctgttttttctttttattttagtgagcaccgatgcttaaataagatccattatatatagagacacgattttgtcccgtgatgtacttttacggaatgtatttcatgatgtacgaaatatattagatgggtctcagggttcgtaataatggatctcacggtacgttaccattttttaagtaccctaattatccctagatcaatccctgccctcagatcaaataactccccttctaacggttgtcatacatccgtgaaagtacaatcacagga

SEQ ID NO: 364767 - DNA, 521 bp, Cannabis indica
agaccatgcagatcgccattgtgttgggcagaactagatgagcatgtcactattggaccactaattatcactagtaccactgaaaagattaagggaatccaagaaagacttaaggttgttcaaagtcgtcagaaaagctatgccgatctccatccacgggaagttgagtttgatggttgtgattatgtcttcttaaaagttactcctatgcgtggtgtaacgagatttggagtgcagggtaagctagccccgaggtatattggaccttttgatgttatcgagacgattggggaggtcacttaccgattaaacttatcaggatagttgggacatgttcataatgtgttccatgtgtttatgttgaggaagtatactcaagatccgccacatgttattgagtatgaggttatccctcttcaggaagatgtgacatatgaagaacaacctgacaaaatcttggcaagagagctaaaagtgttaaggaacagagagattctagtagttaaggtcttatggaaaaa

SEQ ID NO: 364768 - DNA, 1150 bp, Cannabis indica
aaggagcttataaaacggaaaaccgccgcctaaaacgttgtttggaagaggcgcaacgtcaaaacgctgagttagagcgtgatacagcctcagccagggtgacacaagggacgaatgctcaaaatcaacctgaatttgtagtgagaagaccacaaggcagacctcatggctcactaaccacgagacaggaaaaagcccgggaagaacaacccagggaaaatgagacaccccctaaaaattagaatgaccagctagatgggagacaaccagaaactgatgaaccagaattccctcatgagaatgaggaggatcttgggactcaatcgggggaacagacgtcacctcttagaaatcaccaacgttcttcccaaacccatagagcgagggctcatacaaaccctaatggggaaatacgacaaactgctcttgggaggaaagaacagagcatgaagaagcaagtgtgacttcgaggcggtcaagaacccatagtcgatcaactcgaagaggagaaagtattcaacgagctaatgatcgataaagtatgggaaccagtaaattcgcgagccactcaaagacaaagtctatgagtaggacgcgatctgtgagtaagacaagatctgccaataactactccctatcggatctgcgagagcacttgaattggaagaattctgaccttcgccaatagcttggtccaaaagaaggaggatccaatccaattgcagataaacgagctggaggacaagttcaagagatatcaagtgggggaattagggaaattatctggatacgactctaacgaggagcttgagttgtttcatccagacataatgaataacccttttactttgagattcaaaaacccgcatgtctcgtcatatgacagaaccacatatctggtctcgcatttgaataactttaacacaatatgcgagcgagtaatgtgacaaaaaatttacgatgtattttattccccaccttgcttgttggagcagcaagtagctactttaacaagtttactcatcattcgataatttcctaggagcaactgcctagggatttcaagaaacagttctaggctgctagggatagacgacccgaagcggcctcactaaccaatataaagcagcagcctgacgagacacttaag

SEQ ID NO: 364769 - DNA, 584 bp, Cannabis indica
caagaaaacctactataatcatcaacaaaaacgatatagaatttgtagttttctttggagggaacatgagaaggtccccaaagatccgtgtgaaccaaagcaagaggttgattagctctagattgagataaaggatacgacagtctatgatttttgccaagttgacaagccttacaaaattccagatttttaagagggcatgggatattaattttgtgcaaaattttgctaagtgtttggaaagagggatgaccaagtttcttgtgccaattattaatatctttagtagtgtgagacaataagacagtaggatttggaacacaagagtaagcaaaacaagattctttattactttgcttagtacaagaggaagaatcaacattagtacaatagtgattacaacacttagactgatttaacaaaggctgagatgaaatgtctgaagtggccaaatgcacctgcagagcagtggtagaaagactagagctatcatctccaaggtgataaagcccatctttgatttttcctttaagcaagactgcccctatttccttgtccttaacaaaacaacaagttttatgaaa

SEQ ID NO: 364770 - DNA, 548 bp, Cannabis indica
agatcctggtaaaataattcccaacagcctgggggttggtgttgatcgtcggtaaagtgaagactggcaacgacaaaggaagagaagcaagtaatccatggtgcctgaaatttcttttctctctgtgaaagctctgagaaaatttggtgaactggtgaaagtaaccaaatgaagcgagaaggttggcttttatagtccagaacgggtgtgagacaactgtgattgacaatcatcgtacggtcaggatagcaatcgattcacattctacagatccaacggttgggacaagcgttcatcaaggcggtagaaaatgtttgagtactcgactgacacccatttaatgcgctgtatcattaaatggaccggaaacaaatcgttgtgtgcaaaaagcaaataactgcagtaatgatgaccataaacgcatccccacacgcctgggcacgtgccaagaagttaataaggcaaccggaggcatctaagcaagccttgtttacttcttaccaacaaggcttggggggtaaatgttgcccctgattttgtccaaaata

SEQ ID NO: 364771 - DNA, 571 bp, Cannabis indica
ttagattctaacacaaaattctaccaaattttgaattttgtttcaatgcaaaataatttttgaataaaaaaatatgagaaaaacaatattggtgcacaagggtatgcatggagagggctgaccgagacagaaggctgcgtgcagcctctatggccgagaaaactcggcgtgacacggtttcagacagctcgtgtccgagtttcctcggccaggttgtctgaaaccgcgtggatgtcgagtgtatcacctcgtgcgcgcacgtgtgtgcaacctaattttagatattttcatccaaatgtaaaaaatcataactaattcataaaaaattcaaattgagttttgtaaaagcctaaatttattaattttttgtctactttccagttaaaatatttccagaatgaaacaaaacatattttacaacatacattgcgatttccatacaatcatcaaataagcacataaaccatcatgaaaccatccaaatcaacacaaacatcgttttaaaagagtaatttgcggcataacctccttaagtagtcaggtttttgcaactaatctccaattttaaaat

SEQ ID NO: 364772 - DNA, 528 bp, Cannabis indica
agtgcttataatgtttatcctgatattgtattgcagaatacaaggggatgcaacctcttgagcaagtttaggctacgcaatacaagaaatcaagaatagattagatatatcatatgtgtaggtaattatcttcactatgcatgcaattacttccttctgatatgatttatattacaaataaattcaaaaagaataaaacagagtaaaattgacggaataagtaaatatatgttttcctattctgtttaattcaaaattacttgactgttattttcaaaaaaattacttgactgttgttggtaatataaaggattggctgaagctatttataattttgaatgtattcaatctacaaatttgtccttgaactgattttactgaatacatgaggagaatgtgaatttcaaattatatttctacacttgaatttcatgctgtcacttatatgtattatttgatttaagtgtagatgttgtaattcattcattttcatactaaatcttgtttttttattgtctgagactgata

SEQ ID NO: 364773 - DNA, 830 bp, Cannabis indica
ttttcttcagagaaaacctgagccttctctctctaacctagctgccacctatactcttttctgttaatcaacatacttgtcagtagatctaagatcctggtaaaataatttccaacatactcttctttaatctaattaaccttatatatcaaattctagtcaaattattataagacactaatacttaacaatttttttagcaggaacatctgggagagcatcaacagtatgagaaattttttcaagtttgacggcctagagcttcccgtagtgaatgggaaaaccgatgaagagaagattcagtcttttgacgatgcggcaacacgattagctgattggttatcattgatgaataacaaccaccaaatgttctttattccttagaatatcgagtaaactttatttaattctttagtcctaattgttcatttctatattatgacttcaaattattttatttatattccaatataattttgtaatgcgcattggacgctagaggtcgttacgccaacgaaaattatccgtttagaccctgtacgtggccgcccaattcccgaagaaattactcaaatgatcagaaggaaataatttaatgacttcttatgtaacaaatttaaattaactaatgaattgaaatgctaatataattttttaaaacaatgcattcagctatataggggacgcacatgagtatcttggcccgtggcaagaaatttcactagcaaattgtccaagacaacctaaaagccaagaatgtgatttttatgttttcaaatacatgactgacatcgtcgcacgtgcaaaccccaaccgttacatacaagatc

SEQ ID NO: 364774 - DNA, 518 bp, Cannabis indica
atttaattattgagtgtttcgccttgattaattgtaatagagagatttagaaaattgattgcttcagctttttttgcggggttaatagtttaattaaaaaatcagaataatatttattattattgatctagaatgactgttgagggtggagattaattcttaactatttcttaatatcgtaatatctatctttatttgttttctaatttattgtttaatcttgaaaattaaaaacccccacttctcattcttgttactcatttttaaataataaatttataatagtcctcgtgggatcgacttgtatttaccattatactgaattaattgctaatataaaaataaaaattagtaaatttattgtagtaaacgacacacatcaaatttttagcgccgttgttagggactatttcattcaatttgttacatttttttttcgttctactaatttgttcttctagttgtggtttcaaatttcaggtcttgtgcttaaacatggcaatgtactatcaatagta

SEQ ID NO: 364775 - DNA, 653 bp, Cannabis indica
atcgtggccatgtatagggtttaaatggataattttccctggcacacgacctctagcatccaatgcacacttaaaaattatattagaatgtatgtaagatagtataaaaataatttcaagttataatatagaaacaaattagcactaaaatattaaatagtgtttacctgatattctagggaataaagaatatttggtggttattattcatcgatgataaccaaagggccaatcgttgtgacgcattctcgaaagacgcactcttctcttcatcatttttaccattcactgcgagaagctctgggtcataaaacttgaaaattcttctcaaatcgtttatgctcttctagatgtgcctgcattaaattgtttaatgttagtattttataataattcactagaatttgatatataaggttaattagattaaagaagtgtatacatcattcgaatagcattccctcgtgtaggtatcgccctaggacactctgctgctgggtctgaatctgagcctaaacctgggttagccatatctacactattaacaaacaaaatataaagttagctataacatattaactgcgtacatagaaaaagaatcacaagtaatctataacaaatattaactgttggatattattttaccaggatct

SEQ ID NO: 364776 - DNA, 953 bp, Cannabis indica
tttcgttaactaaaattaaatagtctttagtaataaatttctacagaaataataaataataaaagatataataactccagatatttttacgtggttttgtagttaaaatctacatactccatgagttcttattaattagggatattttagagtacagaatacaatatatgatattgaataataatgattctttctcaaaattgtcatcttttcccttatggaatctctccctatatataggagtatacgctggtagttattctttttgggatagatttaaatataaatgtaagtgaaacgtggacaatcaccacgtttcatttaaatcacacgtgagataatactaaataactacccaactattcgttagtttaatcctttagatggttattgctgacgtggaaggttacatcttctctgatttgagttatctttcttgtccatcttgacaagagaaaacactaagtgtttggaaggtttccatctcgctatgtcttctttgtggcttgtaatgcgaggtgatctgctcgctatatataatacaaagcagtttatgttgatacattcattctgctcgggtggatgaatatccccttcttgtttgtatattctgaggcatgcatatgtctcgttaatctcaaatcaatagctattattcttgtctcgtgtttgactataaagccaatgagttttgaatattatctatttatcctttaaatattaacgagttattcaatatgcatttaatgatatcgttatatcattcaaaattgattcatattccatatattggacacgtgtcaacttctgaagtgtagtcgaatttcggatataacacccatgttgtgactaaaaggtctgtggctaaaagtattagtcacaaaaatcacaatttgttgtgactaaatatgtttttagttcacaatactaattatgactaaaactaaattagt

SEQ ID NO: 364777 - DNA, 532 bp, Cannabis indica
ataatattaactatatatctcaatctcaatattaatcaattcataacattattaattatattacaatataacgtactatgcagtacaatatacttctttttacctttaatccagattcatacatatcggccaacccaagtggagaactattcccgatgatctcggccctatgtcataacaacggtaaaccaataagtgtttatcccaaaacacttcttaatattaacataagacaatctaggattttcttccaaacctcatggtataaatacactaaaataaaacttatattttggctctaaaatatacaccatattttagagctcatcgcaagctttgaaacagtatatagattgtccaacatggagacccgagtcaaaagctatgacaaaaataggatttttgatctcttaggaatttttaaaaactatgatactcaaaaatctcaattttcacactcactgaaacactaccaaacttctccaaatcactccaaacttcacagggcgcatatataccataaacattacca

SEQ ID NO: 364778 - DNA, 662 bp, Cannabis indica
aaagtcagagattgacaagctgaaaaagaaactaagtgatgagtttgagataaaagatctgggcaaagcaaagagaattctcgggatagaaataaagagacctagacctacaaaaagtacttttgtattactttctcaagcttcctacctacaaaaagtatttaacaagtttagcatggacaagtgcaaatgagttgcaacaccacttgcttaacacttcaagttatctgcatttcagtcaccaaaaacaaatgcagaaagagccaagatgagcaatgttccctatgcacgttgtattgggattctcatatactctatggtgtgtttaagacctgacttagctcatgtaatgagtgtggtcagctagtacatttcagacccaagccctgaacactgggaagcactgaaatggattatgaggtacctaaaaggtactctagacactggtattttgttcagtaaggagaactagtacaaggaagaaatcaccggttttgtgggcttagattttgcagcaaaccttgacactagatctagaaggagcctatagatggctgcattagctgaatagttggctgctatagaagccatcaaggaggctatatggcttaagggattgacagaggagttaggtttcaaatatgaggatatcacagtttatt

SEQ ID NO: 364779 - DNA, 527 bp, Cannabis indica
ttcagaagagagtccaaaaatatattaacttggaagaggcccagatagtggccaacgggggatactatcccaccgggatagcaggatatgtactcggagcccagctctcaggtactttgccagcagcagctccatcgatgaagggcatacaattttccgctactcccggatatagtcaaggccaagccttggcccccgcatcttcctattttggaaatccctcggggacaaatgaacaagccccatcgcactctgccccgaccgcaagcctagccggtccttctcaaggctctcgaagcaaaaggtcctctaaaggcagcaactggacggaggataagcgacagaaaagggggtatactccccaatgtactcaatacacggagtttacggactcccaagaacgtgtatattttgctactaggaaaagtacgcattaccggagaccgccccctctgtataaggatagctcccggagggaccccaataagagatgcgagtaccacaatgacattgggcacagcaccaat

SEQ ID NO: 364780 - DNA, 532 bp, Cannabis indica
aaaagtgtctatctaacggcattttttggtttaacagaatatactttaaaaataaaagaatattctgttaaatttaacgataggtttgatctcccgttaactttcaaaaatatataaataattaaacccaaaaaattaaacaatctttttttaatcgtttaaactaaataattaaatctaaaaaattaaacaatcttttttaaattaaaaaaaattatcctagccacatatctctctaacataacaaaccgtatatccccaatgtttgatattttttttattagttaaacgttaacaaataaataaaaaattaacaaatattaatattgtctgttaagcttacatgattttttttttaaacccgaacgtttaaacccaataattaaacccaaaaaattaaacaatcttttttaaattaaaaaaactacaccaatacccaccctaaataacaatcatcaatataaaatttaaactctatataaaaaaaaatcgtttataacataaaacatttataggtttatatatacaatta

SEQ ID NO: 364781 - DNA, 964 bp, Cannabis indica
tttcattgttttagaatacatatgaggatgttaatgaacatacttgttagtaaatctagatcttggtaaaatatttccaacaaaaattccagaaaaaattcctattatttttgtaaaaaacttgcaaatatcaacaatgtaatcacatccaaatcacacatatatcgttttaagtccaaatttcttgaaagtaaatcaattaccatggctctgagcccagttgttggaattattttaccaggatctagatttactaacaagtatgtttctaacatcctaaacatgaacttctaaaacgatatgaaataaacacatataaagtttcaggaaccttacagtggttgtcgtggaatataatgtctcctctcactcagatctctaacccttgtattttttctgtagcagagtatcaccaagagttgagtccgaatctccttctcttgaaactggattcttcacagccttacacactatgattgagtaccacttgatgtgtataggcactcactcttttcactatagggctacggttttgaagagacaaagagagagagaaggttttgaatagggagagtgaaggtggctcaaaattttactgaaggaatgagttgcatcatctttttctttgaagccatcactacctatttatgggaaaccaattagggttaggttagattgaattagcattacaataatgaaaaaataaataaagtggcaaattgcttcccaagtggacggccatggatagtcggccccactttgtaattttgctatttttctaatttttcatcttattttctcaaaaataccattttttcaatttaaccacttaaatgccaaatctaattatttaatcattaaaattaaagaacatgttcccaaaatgtacgtaacggtaaatttatcatatctaagcaaagttcaatatgggtcccttcaaatgcatactccatgcatcaaacct

SEQ ID NO: 364782 - DNA, 835 bp, Cannabis indica
atcaacttttattattattttccaatacataattataatagggtaaatattattttaaactatgtattttataaaaaataaccaattagactctctgaatcttatatttttcaaaatgctacaaataagactttgaactgattttttattaaaataaaatttaataataatctgatctaaaggtgttataacaaaaatatttacattttctgtatctgtttgtgtgttatattaaaaaaaaatcaaaaattaagctcagggttctatttttaatattttagaaaatacaatgtccattttgtcatttaaaaaaatagagggtccaatcgataacttttgcaaaacacatgatccaaaatagtatttacccattattatatacaaaatttaatatatcatttaatatctacttaataatttattaaaaaaaatataaaataatactaataatacaaaaataaatataaaatttaataataataataatacaatcatttaatagaaaaaaaataatatcaatattcaataatctaaataattgggtcaaatgatgaaaatatagaaaacttacaagattactgtaaaatggggaaaaaaaattaacaaaaatactgtaacacaaatttttttacatttttactgtatcaactttacaaaatattgtgtttaatgttttaaattacaaaatattgtgttcaataaaattgaaaaaataacttaaaatcaactaaaaaataaccttagaacaacttaataaataacatgaaaacaattattaagaaataacataaaaccaattataaaactacaaagcaatagaaaataacaaaacatt

SEQ ID NO: 364783 - DNA, 552 bp, Cannabis indica
cgataaaaattgagaaagttacgatttttggaaaaatcggatttcatggtgtcgagtgggtgctcgtgagcatcaggcactcggactaggaagcccatccgcgcgcgtgagcctcggtcgttcaccctgcatccacccgtgtttcccctaccagcgtcgagttttctcggggtcccctcctctgtccgcgcgcgcccgaggctgcgtgcagccttcctgggctgcacgtgcagcctcctgggcagccaacatcccaaacccgattttgtgggatttttttccaaaaatttgattctttccaattttaaaaccctaaatttaaaataaaatattatttttaaatatatttgaacttaaatatcatatttcaattaataatatttatttttagtaattattattaatcatggtattttgaggtttaaatttaaaaattgattattttattttttaattatggtaagatttaaaaatttgttaatttctttaatatttatgtattatttaattataagattaaatattttgatatttaacatattttaaattaaa

SEQ ID NO: 364784 - DNA, 694 bp, Cannabis indica
gtattttaaaaaaataaaaacatgtaaatgattgttaattattatgaaattaaagattttaggtttagaaaaaatcttatacattttatatgtattaaagcttaaagcttaaaattatttatttttgttctcagtaatgcaatttagaattctagtttgaagaaattttataaaaagataaatatacacactacaaaaaaataggtctatgtcggcgggcccaggcccccgttgttgatctatctcggcgggtctggcccgccgtaaatttcaatgccgacattggtgaggaatctatctcggcggtcccagcccttcgttattggggacattctcggcgggcaaagcccgccgttaattatgatgcaatctcggcagtctatgcccgtcgagatagatatatttttattccaatttaatattttttgatacctatctcgacgggcctggccccctgttattggtcaatattggctgtctaaagagcccgtcgagatagtgtactggtggaaaaaataataattccccttccattacattaattgtatacaaaaatttacaattcaaatataatatgcaaaataatctttcaatactttaaatagatgtatgtaagtcatcttttaatctttaaaatgatttttatttaaaaaaaatagtttgttagttttttagtgtgttttatttttaaata

SEQ ID NO: 364785 - DNA, 1158 bp, Cannabis indica
ctagtgaaaaccgtcaaggaagctggtcgaaagcttggatcgtcgaaacaagtgagaatccaggattttgagggacttaggtccattcggctcaaggggaagtgaagagcttctctcgttcccttttttaaagagagaaaataagtgtgaaaaaaggagcttttaccaaataacctttttatagttttttagtgtgctccactaatccaacatgcaccaaacaccatgctacctgtaaaataaccatgctaaatattatcagttcccattgggaaacgtgagtagccaaattaaagaaaatattttataactgaaattattgtataaaacctgcccggttaagactccaacaatcaaaactaaagttggaaagttcctatccgtacaggcatctacacagggacttgggggggcaaatattatcccaatttttgcccacatgacgtggcatgtccacatatgtaagattgatgccacgtggagtacaacttgtcaggaagaaggccaggtcagcatgcataacataccaattgatgaggagtccaaatatttaaacgggacaaaagacaatgaactggccaaactaaagggtctggtcggaccccctacccagccctattgccagcataggccggacagcctccagcaaagggaaggcctaccaatctctctcctagcaggcactttttgtgcctctacagcttttagcatgaaaaatacttccaattacgaattggacttcaacaacccccaaaaataggagataaagttcaattatttatctagtcttgtggactaattaacatgttatatacttattattttaatatgtaacaaataagggacatctctacattttaaaggatatcaactctctctctctcttctacatgcccctagcagtgtagaagagagtaagtctccctcatctgaccaacttgagattcgccttttgattcttgctattgtaaccttaagagagccactctagaatccacaatacttgtaatttgagtggtattatctctaatatcaatacaaccaaaagggtatgtcattacccgctagctaagagggccaaacctctataaaatattgtggcccttttatttacttgttcttattgtgtacacgtggtgatattagtcataaatacga

SEQ ID NO: 364786 - DNA, 768 bp, Cannabis indica
accaccagttgtgaatcagtgcaaatttcaatgagcacgactctcatctctcgagctaactttagaccagcgattagagcttcatactcaacttctttattagatgctttgaatccaaacttcactacagcgtgcaagtgttgccccccaggtgtgccaagggaaattcctacaccagatagttgatctgtagccgacccgtctacgtgtagtttccaagtcagattatcttcactgttatttggcgaatggtgtttgtaccggctcgaggttgctttctgttatgcttccttctttgcctgtgcattctaccacaaagtctgctaaggcctggcctttgattgctgttcagggttggaaagtaatttcgtactgaccaaactccaccgcccacttaagtagccgtccagaggcgtccgacttttggaatatttggcgtaatggttggtctgtgtacacttgaacaggatgagcttgaaaatagggctttaactttcttgttgctagaataaggcagtaaccaagtttctctatcaatgggtatcggcctttggcctcaatgagcctttcaccgatttaatagatagggtgttgtatgttgttctcttctctgattagcatggatctcacagcgtgctctgtgaaagctaagtatattccaagctcttctctgtctagaggttttgacagtacgggaggttttacgagatgtgcttttagctcttggaaagctttttcacattcctctgtccactcgaactgcttatt

SEQ ID NO: 364787 - DNA, 538 bp, Cannabis indica
tttttatttgtttagaaagttttatttgtcattgatgtcgaaaaagtcaccggagtttactgccggtgccggaaaagttgccagagtagcggtaggtgccggaaaaatcgttggagttgctgccagtgccagataattcgttgaaattggcattgtcgccgaaaaaattactaaaaaaagaaaccagtttctttcttgatgaagaaactactttcttggtgattttttcgttgacaatgccgattctgacgaattttctgacggtagcagctactccggtgatttttccggcatcgacaacaaacttcagaaaagtcatcagaattggcatagtcgccagaaaaattaccaagaaactggtttcttgatgaagaaactagtttcttggtgatttttcagataatttttctaacaacaatgacaattctgacgacttttctggcgttggtagcaactctaacgactaatacaccggcagctactccagtgactttttcagtaccgacagtaaactttgagaaattcgtcggaattggca

SEQ ID NO: 364788 - DNA, 471 bp, Cannabis indica
taccactatttataattacatagtgggcagtaaattacaaaagatgactgtaatcgttacaacaattattccatcaaatcatgagatttgattaaaaatcacgctaagtaaatgaggtttttatttataattcacacaactgtgagtatcccgcttttattgggccgagatgaacacacatttaaggatatacggtaagccttatctcatgaagattcctcgctaggaatggagctgggttaaccttgatggcgaggagtttctcatcatctgacttcccttagacattataactttctgatgaaattttcatttatggtatttgggcccaaatttttcctttgacaattgtactcttactttatgtgggtatttctaaaatgtgtacatgtcatgaagttagtttcccaccttatcacaactcaaaatatatttgaaaaacaactttggttagaacacgattcgatatgt

SEQ ID NO: 364789 - DNA, 656 bp, Cannabis indica
gccatatcaaaaaaattgtaaccaaaactgaccaccaaattcggtaatggcatagaatcgaaaattcggttagggtctagtcggttttagtttttcaatttttatgaactaacaaattgatcctatattttttaaaatggtaaaaaatagtactttgagttcaattttcatcaaatttttttaaacataactatcttaaaattaatttttagcacgaatagatacaaaaaaaatataaattagtttggtcataaacacctccaggtcatgttatttttaagtcttattttgataaaaattaaacttaagaatgtataaactataaagttattaactttacccactaaatgtttgtaggactcactacatatattctcatctatctaacactttccttcatgacataaatccccacaaattattaatacattatcaatctttcataattttttcatgttatgaggggaaaggagaagaacacaacttacttgttgaggcttttattttagtttaggtgaggtaccaaattttattgactaggactaattgtttggtaaacttgtttttcaaatgaaattcccccaagtttgttcacatattttttaaaatggtttcgtatttagctttaacttattcttccatacagaataccatat

SEQ ID NO: 364790 - DNA, 1627 bp, Cannabis indica
tttaatggctaactctaaaggaagtcttttggctcctagacatagattttatttatctatgtaacggttttaacttttctagaataagataaaagtcataaaaggaattccttaagaattaacagtgagaggtctcgtgtatgttttgtagtgaattagactagacacttgctgttgagtgggagttatgagtaagtatcagtttaatccaggaaaggaatattggaagataataaaataaatcctaagatcaatagaggaactatatgttagtcgataaatgtggtattttaatactcttagactacaccaaataaggtttcaagacttgcgttaatgctaaaaagtctacttatgagatagtgattactttgggggtggagcagtgatttttggagaactgtaaaaaccaatccggaatctctaactctaccagtgagactgaatgttaaagtggtcagaaaggctgcttcataattattcattttatggaaagttctataaagtttttggcgttattctaataatggagtaactactagtgttacttcctgactaacatagatatagttgtcaaacaataaagaatccagtaccctaagaggagtaaacatatagaaaggaatttcacaatataaaagattttatgattaaggagatgcaatggtggaagaaggacggtaattgaatacaacttgtcagaccctattacaaagataatactacatattatgcttgatctgcacatcaaggtgttgagattaattgaaatgcacttttagttttatattagtgcaagagggagtttgttgggattttatgccctaaataaaacccatttctatataatcaaatatactaattaataaaagatcaaaaattactttatgttgcattgttcacatgtttgctttcatgattatatatttaatatattatttctattaaatctggaacatattgttattcacaattacagtaatgacatcacagtggaaggtaattctgattatatgtttcaaagcttatgtctcatgatttagtgcactggatttacactgatgtaataatcaacaagaaagtttacttacaccttggataagtgttatggcattttcagggtattggtaaagtatgctagtatcaaatgtatggactatacattggactagaccgatattgaacttggtaaagatatcataaagttacagttgtatctttctaagtcaatatcacttaattgatcttagatcaatagatcttaatcctaatgtggttaggttcgatctcaactatgttatttatattcttagagttgttcgttaaagaggacaaattggaccggtccaatacttacatcttgggaacatggtagtacaattgagtgggagcgttaatcatagatacaaaatctatagcttctgtctagacataaaagtgaaatgataatttccttcgagcttggcttaatagatataaataaaagattttaatatattagttactgaatatcatttatggtaagctaagtattttaaggataaatacattgagggtagaacggtaaatttttccctacattgagggtagtaacggtaaattttttcctactcgatgtaaatcatct

SEQ ID NO: 364791 - DNA, 613 bp, Cannabis indica
agggaaggtggcttggagaagggcaggttccattccttggtaggtgttaaaagatctgacactgtcatattggcatctgagtggtgtctaaggtaatgaagtttaccatatcctggaatccaagcatcgttgaagatggagattgtggtaccatcaccaattgatcttcgaagacctgactggagaagttctttgccccaagtgatactagaccaaacaagagaaggcctatggccctttccagaattaaggaaactagagtgaggaaagtaacgggatttgaggagggtggcaacaagagagtgaggatactgaagaagccgccaagcttgtttgcccaacatcgcctgattgaaagctttcattgatcgaaatccaagacctccatggaattttgagaaacaaagggaagaccatgctttctaatgaattttccggttgtgctccgttcctccccaccaaaacctagccatcatggattcaagcttagaatgaaaggaggcagggagcctaaagcaagccatagcatatgaaaggatggcttggacaacagattttaaaaggactctttacccccttttgaaaaaagtttggaattccatttatttagatg

SEQ ID NO: 364792 - DNA, 729 bp, Cannabis indica
ctaactaactaatacccctaacatgatgtaattaacacatttgattaagagggtactcacagtttaaaaaattactactacattattattgggatatatataataatgttttaacgtttgtgcagacatcattactcatattcccacgacaacccaatttcatttattaatagtgaggtgagtctcaaaacctcgaggtagttaataagtgaatattgttagatctaaatattgattattgataaggagcgaagtccagctgccagcagcccatgttcgccgtaggccaaaaattttgtctgttttgctttaattattcacaatacctatctactcaaacaacaaattgccttccattatttttatatatttctttccttttttatatataaaatacaaatgggaggtgatgcacaagatagagatcacgtttatgtggtacaaaaaatacacatagagactactatagtattagtatatatatatttggattgtgcatatgattcaatcttagttttttctccaaatccaatctaaattcaacatagtaattgaatttagaaaattatcatccattcagtttaattagattttttaattaaatatttaattacatacttaatttttaatattaatataaaaatatgataaaaaaaatacactaaaaactaaatattaccatatattaaatttaatactctataaaaatattattgttataagtataat

SEQ ID NO: 364793 - DNA, 642 bp, Cannabis indica
gagagagctcttgagagaaaatgaaaaattgttcttttctttgattttttcttatgtttgcaaaatgaataataaaatagtttttacatactttttactcatcataaaataactaataaaatcagatttataaaatttaaataaaattcataaatgacaaagcacatatggcaaaatgacatttttgccctcacacaataaaatgacataaaagggtactaaggggtattttgagaaaactctaaattctcgactaatctcaacattcccaatgtctaaataaaccgtcccacaatactactaaattttgatttaactgagtcataccccgcgttccatgttgtcgggcaccgaaaatgcaaaattatgaaatttcactatatgacataaaatgcattctgaattcaaaaataacaacataaataattatttaaatatctataaataattttcataattaaatcttaattaactgctaattttccaaattaaactaggcggtctttacagtgatataggagagtattttatgtattgtatatgtatatattgaatattttaaactaatagttttgttaaatattgtgaatgagaatgagatagagtattaaaataaaaatttagaaattaactctattttgt

SEQ ID NO: 364794 - DNA, 766 bp, Cannabis indica
ccttatttctgaattcaagtgtgcttgccgacctaagcgtaagtcttgtgctagatggatgcccttatcacattttaaaaccgggtaagttacatggttaaaaccctaatcccgggaaacctaaaaccaaacacctaggttctgttatactttctataggttattataactctggaaatggggaaacacccaaccaaggcaccgaaaagacaaaaattgagaaaatgaaaagcccggggaatcctgccaaaaccggttacccagttttgcaccagtccacaccaaatttttcactctttgctcaattttccaccaaatgctaccaaaccttccatagtacctaattagggtataaacaacataatccaaccagtatttcatagaaaaacataccaaatcaaattatgccattaatgacctaaacttgagtttcaaaactcaagcttgttcaataccctcaccacagctcaaaactaatatccagagctaaaaatcaacttaaaattaacctaaaatcagaacccgaagcattactaaccctagcagcccctctttcacaaaattaatacatgaaacccatttcaaagcttaaaaacacaaagagcaaaggactagggattacctcaacctcaagaacaccttttagtcaccttgattatagaattggagaagaattagggtggtttcctcttgtattcggggtggctaaacaagagagagagagagagagagagagagagagagagagtagagagagagagagaga

SEQ ID NO: 364795 - DNA, 981 bp, Cannabis indica
agaaaaccctagaaggatttcctggacaaaagtcgggtgcaaagaactcacagaagacaatatcgcgcataaaagaaaaagaaagggcagaaaatcgagaaaaacaaagtcttctctatgccctggaaggccagtacacaaaaagcgtatggtcctttgtaaaaataacaacaaacacgtgacaagagtaaccctaacaccagaaatggtgaatctagacctgttacgtgaaaaacccaaaaggatgcattcccagaaacttcaaataccaaacccagaaaaacaacaaacagataagtaaagcatgccatgtacacaaacagtaaagcaagggatgcgagaaacttacaatgaagtgttggaactgggggttatgttgtcgatcaaacaagggaaggtcgactgatagtagtgaatgaagattaactgggaaatttgtaaagtgttcgagggtgttctcttggtctgaggattttttctctctggaaaactcgagcgaagttggcaagaaatgggaagtaaccgaaatgaaggaaaggtagtggcttttataggcaaaaatgcatgaggaacaggcactatcacctaccaatcgaacggttggggagacgcacgattcgaattcccaaagatcaacggttggattgattcgtaattaaggcggtggaaacgtttgagtatctgtctgacaccattaatgcgccgtatcaatcaatgggcgtgaaacgaatcgacctctgcgaaaagtgaatcgctgcattaaaggccatcattaaatacaccctcacgcgctcaaagctcgtgccaagaaaccgaggagtcgaccggaggcacttgagcaagccttgtttatttttcaaataaacaaggcttgggggtaaatgttgcccctgatttttcccaatatacgtggaccaaccagacaaggacacgtggatcaaacatcttagcattcaaattatttgctaagtctttatgtaa

SEQ ID NO: 364796 - DNA, 879 bp, Cannabis indica
tcctacggtgcaacaagtggagagtgggattagtagtgttggtgttagtatatctccggaagagtgtgttacgcttgaagcgcctttcactattgatgatgtgttgtgtgcggttaaggctattggggctacgaaggcaccggggccggatggatttcatgctatttctttcagaagtattgggatattattggacctcgggtttcagctgtgcttgcgattttgaatggtcaacagtcggtgcgaaagtttaataagtcaaatgttgtattgattccgaagatctctaggccgtcgtttgtcaaggaatatcggcctattagtctttgtagtgtgatgtacaagattgtggcgaaggtcgtggctttacggttgaaaggtacattgtctcctctaatttcatcatttcaaagtgcgtttgtgccgggtcgttctattcatgataatgttatggtgggtttcgagttgttacactctcttttcaagaagaataatggcgttagggggtttatggctttgaagctggacatgagtaaagcgtatgataaagttgagtggtgttttctgcgtgctattatgggtaagtttttttcccttgtagatgggtggatttgatcatggactgtgttacttcggctcagtatagctttttagtgaatggaaagcctcggggatgtgtggtgcctacaaggggattgaggcaagggtgtccgctctctccttatctgtttcttttttgtgcggaggctttgtcttccctgctgcgtcaggcggagtttagtggtgagttgatggggtttcggtgctcccggtcagggcctcgggtgtctcatcttttctttgctgatgacagtttgatatttggtagagccaatggac

SEQ ID NO: 364797 - DNA, 575 bp, Cannabis indica
aggatgttaatcaaacatacttggtagtaaatctagatcctggtaaaatatttccaatagataagtgacacgctgaatcactttcaggggacttaaacttgaaactaaaagtttccctatcgatgaacagcatggcaataccctaaacatcttaaaaatgggaaaaattagggttcccaaaactgccccaaccggtagaccggttcccaaccggaattcccgctcctacaggtccccctgaaccggaattccggttcagagcaggattcacccagaaattcataactcaaccaattcaaccacaaaccctatgaaaccttccagacgtgctatttagacctcaaagaacaatatcaaaacaataaaacacttccacaagctcaaaagcaaaacatgccattagagagccaatcttgagttcaaaactcaaagcttgctcaaacatcaaaccggccatcataacaagcttaaaacaacatatctaagaataatttatccactgaaaacaataacaaacacaaacaacaactacagcaacaaaacatgcataaatccataacttaaaacccaagaaa

SEQ ID NO: 364798 - DNA, 1486 bp, Cannabis indica
ttttgaagcattcatctagatcctctatactgccccctaagggtgagcatcggtcaatttggtcggtttttttctatataaaaatttagaattcagtttttcgtcgggattggtgcaatccaaaaaccgaccgaccaatccagaacctatcttaaaactgatctttttgaacctcagtttggttggtttaaactgcccaaactgaacttcttttttttctttaaaatatgatccaatttattctattattctacattttacaactacaaacatataaaataattattcaacaactaattatcttattcttttaactttaatattaataaaataataaaaatatattattttatgttattaataactacaatataaagcaaaaaaaagttaataaattaatatatatgtataacggtcagtttcgagttttttcggtcggtttattaacccaaaaaaaaccgaccgtttaatggtggttttaaccattagtggtttttttggttttcggttttggtttcaatggtgttcggtaggtcaatttgaatgtttttcaattttctggattttatgctcaaccctagcccccagccttcctggatttgagacatcataccccacttcttcttgggaatttgacgcacatatgaaaaactaatgtaaaatgtaacagcttttaagtcatatagggccggttggcctaacatgacattaaaagttaaagggacataaattattaaaaattgtgccattacagttattctcctcggagcttgtgtaacatttaggggtaagccgatttatcccagaggtccaacgctttggctgaaaaaaccatatacgagctgggtgtaggggatcaagtccttaagttggagtcccatcttctcataagttgtcttaaacagaatgttcgaggaagctccattatctatcatgatccgtgccaccatcttgtttgcaatttgtacctctacaactaggggtcgttgtgtgggaagatgacgtggttggcatctacttcagtccaggttatggttgtggtatcttaggtttcctctcttccacagctaagattgcctgattttgttcatacagcaaggcttgagcatactttctcgagctttgcccgagtccccagcgagatgtggacccccaataatgacctgtaaatgcccgtccactggtggagacatcaatttgttctgattattgtctgtttgggcaaccctttgatcttgattggccttgacgtacttctgtaagtgtgggttattctttctaattaaaaactcattttctcgcttcagagtattacattcatttgtgtcgtggccgtagtcagcatgaaagcggtaaaactttgatgtgtctcttttacttacatcctttttcatgggacacagtttcttgaacgacaccatagactgagttatcgcatagattgtctctatgttgtctgttaagaccgagaaggcagtaaatttaa

SEQ ID NO: 364799 - DNA, 576 bp, Cannabis indica
taaaagcaaaaataaataaataaataaaagaatgtatactacaaaaagtaaaaaattaaaaatattaataaaaattattgtgaaattataaaaaataaattagggattttttctataataaactaataaaagcaacattttacatttataccttataaaggaaaaataaacataaatagaaaataaaagtttgtatttacaaaaataccaacctaacaaaaaaaaggaggaaactcctccttcatgagccagtcgaaacaccccaattcaccaaatctccattgttttctttcaaaaatcagggaaatcagctcaaatcaagatgtagatctcaacaaaaaaacaataaaatatcgaaaaatccaaatacaaaaaaagaaaaaaataaaaaaacagagatatcaacctccattgttgtaaaaaaaatgcaaaaacagtctacaaacaaaaactgaaagcgtacgaggataggatttgaagagaaggatatcgaaaaaactttgaatatacccataatcgaatcagagaaaaaaattcaaggtaaaaatatatgaaaaaacaaacatcatctaagct

SEQ ID NO: 364800 - DNA, 709 bp, Cannabis indica
attattaattttcatgtttcaaatattctatattgtgcttttttaatgtatttatcaatttatattagagagtaaaattatccttatgttattatattttttttacaatctcatacgttctatacatggtaatatcaatattcaatatctatataactatttatctatatatataactaaagtttcaaagggtgacataacactctaaattagtttcattctaccctaatcattttctcattttttcacactttcttaagtaatattaaatatttaatttaaattagaaaaaaaaaaattcagcccaactaaaactacagtacaacatctatctaagaatactctacataagaataacctctaatatattatataaaaaaaattaagtctcaatttgagttacttataaataaaaataatttttaaattgtaattagttatacattttttaaattatgtattaagaaaatatacctatatataaaaataattatatattaataaaatttatacatatagtttataaatttatttacgaataatttataattttattctaaattataatagatacataattatttgatttactcaaaaataattttattatcatataatattaagaatagtttattgttattgttgttacttgtaattatcctaaattttgtccacctgacgtggcatgtccacgtaagccaaagataga

SEQ ID NO: 364801 - DNA, 526 bp, Cannabis indica
aagacttctatataacaatttgccgcgaaattttatgttttaatttttatacataatttttttttttatttttttttttgttgataaaattttttcatttttttttaatttaacacaccaattaaatattattgttaaaaatttaaatatttattagtaaatatatatagagtaacttgcggcataaatacctaagttttatgccgagtagtaaataaatacttaagtcgtatttttagcggtaaaaataccttccgttacactagtggaacttccgtaggtacctttccgttatgtgctaagttagtatctacgtgtcactcgtttattggtccatgtcatttaattttttttatttattatttaaatgtttaaaaaataattttaaaaatataaaaataaacaaaataaatataatcaaatttttttatcattaattcttatatatttaaaattaaataaactattttttaattaaaaaattacaaattaacaacacataaacttaaaatctaattcctacaaa

SEQ ID NO: 364802 - DNA, 763 bp, Cannabis indica
tataactcagggatcaatttacgtggatatggcatatacacgatcccagtatcagtgtattcagcctcaatcccacgatccttgcattcagcattgatcccacgatctttctatttataggcattgtaacgataggggaaactcttcctccccaagcttactagccctataaatagtgatgcacattcattaggcaagagatcggtcgaaaagtagttgatctaagactatatcctaaatatattatctaagaattatatattcagagatactcttgtaagagctataagaaaaggaatctttctccttgatcttaagtcaatacaagtaacgaggattaggctattaccgaactgctcggggttgaacctctataaaattcctgtgtctttatattgctttattatatatttgttactataaatcatttattgcttataaaatagactcgttggcgttggctaaaagtgaggtcaacaatatctttacactatttattatttataagaatattaggcaaaaccatctatactttatattttttataattaacaacctaaatcgattttttggtaacaaaactacccaaattctcttcttattagctatttacccgttccacccaaaagtctcagttaactaccacgataaactacctacgtgtacacttgtgtacacatgacacatatttagtggtccacataatattaatataaataaaaattaaattttttttcttttttttttcttttctttccctttc

SEQ ID NO: 364803 - DNA, 868 bp, Cannabis indica
aaaaaaaaaagtataaattttcattccctagtcactatacatgtaataaatatcttattgatgtataatttatttttgggcaagtgtgagtaactacttaaggatgtttaggtaaattttttatctatttgacatccaagaaagattacttgtaaatttttaagaaaattatgaatagtttacaatactaaaaataatatttacatattttgttatatgtgtgactgattttttttagacgcatagtaaataactatttaaacattttcagtattataaactattctgaattttttaattttaaataattataatgtacacgatcttgaaaaaagattaaactaatttttttttagatgtcaaaacaaataaaaaatcgggtaaatgacggcaaaacccccaatactttcgttttggtttcattaaacccccaaaacccaaatttctgcgggtaaacccctaaaactaggaaactgttagcaatttaacacttccgtccaaatttagctgttaactgccaggttagattgtccacgtagacactataaacacgtggtacaattttattggtccacataaaaaattatttaaaaaaattttaaaaataaaataaaattaatttaaaattttaaaaaagttataaataaaaaatatatatttttttctttatttccttttctttttccttcttttttgtcttttcttcacacacatataccctcttctctttcttctctcgcgcaggtacacaagcccaccaccatcttcaacctctgcagcaagcgtccaagaccagcaggcagcccaacctcctccggcgtcgtcctcctccggcctcgcctcctccgccgacttcgaagccattaaa

SEQ ID NO: 364804 - DNA, 601 bp, Cannabis indica
atataataaaattacttgctaagttttcaagtgatttaaatttagtttaccaactttgcaaattttcctacttattacaccaagctgtaattaaagtcgcaaatgtatataaaattgcgattacaccgagctgtaatcaaagttaaaaatatatataaaatcgcgagtacccgtgtactgcgtaaatattaaaggataagctatccccgcgaggatagaaatttgtccaaaagataaggtaaatttgtctaagtacagaagtgcgagtacccttgtaccgcatatatataaaaaaaaaaagaagtgaaattaaaaaacaacataaatcagaagataatcaagcgtctggagcagcaggagtagtcccatcaggagcagtctcgtccgcgaccttgctgacgacctcattctcgacttcttcagcctgtacgccctcgacctcgtccagaaggttgcctcccccaccttgagtctgggtaggcgacatggcgcgaaaggcctcagccatctcagcagcttcagctccaagaagagagaagtcgaagtcggggactttggaaagagtggtgtagatataatcagacacagcctgatcgtactg

SEQ ID NO: 364805 - DNA, 1021 bp, Cannabis indica
  modified_base (6)..(6): a, c, t, g, unknown or other
aaaaanaaaaaaaaggataaaaagagaagtgtttaagcagcaggagtcccaggttcttggttcggttcttcttggccaaccagagcaggaggatctgttgtttaaacaggaggtgcatcagcggcctgagcggaggttgaagcagccgcctcagtttcgccataagccacttgggatgcgtagtacttatggtacatgtccttagcatcgcccaagtagtcgaaattggcccgaggatagccttccaaaaatcaaagaagagctcgagaccggctgtctccaaggcattaacctgtccttcaacctgtccacctccctcgaaagctccccctccttggcttccttttcctccttcatccgataaagaactactcgaagagaagtcctctcatcctgaagactgttcacctcagcagataaggtctcgatggtctcctcaaaacggtcagcagcctcgagatccttagtcagcacaatgattttcttatgagtagcaaacagtttcttgttggcttcaccaaattccaaccgtacatcttcgacttccaccctggcttcttcagcatccttcttgaccaattccgcctctgcctttagggtgtcggacagagccgcgttcttggaagcagcaaacttagcgcgggagtaagtgtaagctaacttcagaccggcctgcacaaaggaaaaactttagcatattgagctaagtatggaagattaagggaaagtatcaaaaaagacttaccctggtgaactccttcaagactccgctcaccagcaattccaaagaagagtcattgtcagcaccagccagttgctcactgacctcgggaaccagctggttcatgtaatgggccagaatctccttgccctttttggcctctggaagcatcgacaaaggtggagtaggtgcccgcacctgtaatatcccgaaaaatgtattgatattttaatcagacatattttattaaatatgtgattaagtgggtattagagtaggattataatcctacttaaacta

SEQ ID NO: 364806 - DNA, 572 bp, Cannabis indica
gtcaactttttataccattgtctggattattgcttgagtccataaattgacttgtgaagtttgcacacgagactggtttctgcagataaagaaggaggaagggtaagtccttgtggaatagtcatatagacttcctcatggagatctccattgaggaaggcattatttatatcaagctgaagtgtgtgccattgtttaatggctgatatagcaagtaacatcttgaatgtgaccattttggccacgggagagaaagtttcaaagaaatcaagtccctcttgttgtgtgtatccttgtgcaacaaggcgtgctttatgtcgttcaacagatccgtcactgttgagtttgatcttataaacccaacgacatccgatggcacgcttatttggagggagtttgacataggtccacattttgttgttaagaagagctaacagttcggtggccatggcttgattccaaacattatattggacagcttgtttgtagtgttgtggctcgaaatgggcttgtactgcacaaataaaagctttgtgagctggagacaaattagtataagacatgaatttatg

SEQ ID NO: 364807 - DNA, 638 bp, Cannabis indica
gcagtgtgggggatagacctagttggtcaactcccaaaggcaaaaagagaggtacagtttgttgtcgtcgtagtagactacttcaccaaatggacagaagttgaacccctagcgacaatcacctctaagaaggtccttgactttgttgtcaagaacatcatatgccagttcggccttccccagaagattgttcctaacaacgacaaacagttcgacagtgacatgttcactgaaaactacaacagacatgacatcatcaagagctacgctgccatggcccatcctcaagcaaatgggtaggtagaagttgtcaacaaaaccctcaaggacaccttaaagaagcgccttgaggaagcaaaaggcaactgacctaagctgctcctagaggtcctatggtcgcataagactaccgagaagacgaccactgagcaaactccatttgctctagcttacggttacgaggcgatgttgcttgtaaagctagtgccactgtctcacagaagaataacctgtgaccaacaaacaaacaacaccctgctggcagagtcccttaacgaagtagaagaaagaagagaattagccaacctaaatttgtaggcctactggcaaaaagtagcaaggcacttcaacaaacacgt

SEQ ID NO: 364808 - DNA, 514 bp, Cannabis indica
ggtttatgtgcttatgtgatgaatgtatatgttgtacgaattttttccatgaaaaatattttttctatttttggaaatattttatttggattccttgtgaaaaattaagcaatttttgtttttacggaacttgattccgataaaaattgagaaagttatgaattttggaaaaatcgggattacattgtgtcgagtgggtgctcgtgcactcggactggatgcccatccgcgcgcgtgacacacccagaaccctgcacatccgcccatgcctaccctgcatgggctgaagaatgctgcacatccctccctgccatcacctgttccgcgcacgttttgggtgtcatgcagcctctagaggctgcacgtgcaacctcctgggtagccagcctccgaatttcgtttttttggtttgccctaaaaatccaatttttatgggattgtttcccaaaattcaattttcctaatttgaaatatttcttttttaaatattttcaattttaaatatttcctatta
